United States Patent Application Publication US 2004/0241651 A1 - sequence listing, part 13

SEQ ID NO: 351186 - DNA, 12 bp, Artificial Sequence
  Oligonucleotide primer for the detection of SNP TSC0047144
ataaaacctaat

SEQ ID NO: 351187 - DNA, 12 bp, Artificial Sequence
  Oligonucleotide primer for the detection of SNP TSC0047144
gtaaaatttaat

SEQ ID NO: 351188 - DNA, 12 bp, Artificial Sequence
  Oligonucleotide primer for the detection of SNP TSC0000218
aaacctaatcac

SEQ ID NO: 351189 - DNA, 12 bp, Artificial Sequence
  Oligonucleotide primer for the detection of SNP TSC0000218
aaacctaatcgc

SEQ ID NO: 351190 - DNA, 12 bp, Artificial Sequence
  Oligonucleotide primer for the detection of SNP TSC0001421
tatctccttaat

SEQ ID NO: 351191 - DNA, 12 bp, Artificial Sequence
  Oligonucleotide primer for the detection of SNP TSC0001421
aattattaagtt

SEQ ID NO: 351192 - DNA, 12 bp, Artificial Sequence
  Oligonucleotide primer for the detection of SNP TSC0001421
aactattaaacc

SEQ ID NO: 351193 - DNA, 12 bp, Artificial Sequence
  Oligonucleotide primer for the detection of SNP TSC0047149
attatcttaatt

SEQ ID NO: 351194 - DNA, 12 bp, Artificial Sequence
  Oligonucleotide primer for the detection of SNP TSC0047149
attagtaatgga

SEQ ID NO: 351195 - DNA, 12 bp, Artificial Sequence
  Oligonucleotide primer for the detection of SNP TSC0047149
accaacaataaa

SEQ ID NO: 351196 - DNA, 12 bp, Artificial Sequence
  Oligonucleotide primer for the detection of SNP TSC0001135
tctattatattt

SEQ ID NO: 351197 - DNA, 12 bp, Artificial Sequence
  Oligonucleotide primer for the detection of SNP TSC0001135
aagaggtataaa

SEQ ID NO: 351198 - DNA, 12 bp, Artificial Sequence
  Oligonucleotide primer for the detection of SNP TSC0001138
tctttaaaataa

SEQ ID NO: 351199 - DNA, 12 bp, Artificial Sequence
  Oligonucleotide primer for the detection of SNP TSC0001138
gggttatttttg

SEQ ID NO: 351200 - DNA, 12 bp, Artificial Sequence
  Oligonucleotide primer for the detection of SNP TSC0001138
aaaccattctta

SEQ ID NO: 351201 - DNA, 12 bp, Artificial Sequence
  Oligonucleotide primer for the detection of SNP TSC0001138
ttttagagtaat

SEQ ID NO: 351202 - DNA, 12 bp, Artificial Sequence
  Oligonucleotide primer for the detection of SNP TSC0047152
aatttatataaa

SEQ ID NO: 351203 - DNA, 12 bp, Artificial Sequence
  Oligonucleotide primer for the detection of SNP TSC0047152
aatagtgttttt

SEQ ID NO: 351204 - DNA, 12 bp, Artificial Sequence
  Oligonucleotide primer for the detection of SNP TSC0047152
aatagtgttttc

SEQ ID NO: 351205 - DNA, 12 bp, Artificial Sequence
  Oligonucleotide primer for the detection of SNP TSC0047152
aataatatctcc

SEQ ID NO: 351206 - DNA, 12 bp, Artificial Sequence
  Oligonucleotide primer for the detection of SNP TSC0047152
ataatttatatg

SEQ ID NO: 351207 - DNA, 12 bp, Artificial Sequence
  Oligonucleotide primer for the detection of SNP TSC0001244
taaccctacaca

SEQ ID NO: 351208 - DNA, 12 bp, Artificial Sequence
  Oligonucleotide primer for the detection of SNP TSC0001244
aagggaattttt

SEQ ID NO: 351209 - DNA, 12 bp, Artificial Sequence
  Oligonucleotide primer for the detection of SNP TSC0047156
ataaaccctacc

SEQ ID NO: 351210 - DNA, 12 bp, Artificial Sequence
  Oligonucleotide primer for the detection of SNP TSC0047156
gtttaaattgag

SEQ ID NO: 351211 - DNA, 12 bp, Artificial Sequence
  Oligonucleotide primer for the detection of SNP TSC0047156
gtttaaatcgag

SEQ ID NO: 351212 - DNA, 12 bp, Artificial Sequence
  Oligonucleotide primer for the detection of SNP TSC0047157
attaacaaaatt

SEQ ID NO: 351213 - DNA, 12 bp, Artificial Sequence
  Oligonucleotide primer for the detection of SNP TSC0047157
gttttaaagagg

SEQ ID NO: 351214 - DNA, 12 bp, Artificial Sequence
  Oligonucleotide primer for the detection of SNP TSC0047158
aattcaaatatc

SEQ ID NO: 351215 - DNA, 12 bp, Artificial Sequence
  Oligonucleotide primer for the detection of SNP TSC0047158
agaagttgagga

SEQ ID NO: 351216 - DNA, 12 bp, Artificial Sequence
  unsure (8): Oligonucleotide primer for the detection of SNP TSC0047159
caaattcntaac

SEQ ID NO: 351217 - DNA, 12 bp, Artificial Sequence
  Oligonucleotide primer for the detection of SNP TSC0047159
ggtggattatga

SEQ ID NO: 351218 - DNA, 12 bp, Artificial Sequence
  Oligonucleotide primer for the detection of SNP TSC0000293
tttggtagtttg

SEQ ID NO: 351219 - DNA, 12 bp, Artificial Sequence
  Oligonucleotide primer for the detection of SNP TSC0000293
tttggtagttcg

SEQ ID NO: 351220 - DNA, 12 bp, Artificial Sequence
  Oligonucleotide primer for the detection of SNP TSC0000813
aacatcatactt

SEQ ID NO: 351221 - DNA, 12 bp, Artificial Sequence
  Oligonucleotide primer for the detection of SNP TSC0047161
agatgggtttga

SEQ ID NO: 351222 - DNA, 12 bp, Artificial Sequence
  Oligonucleotide primer for the detection of SNP TSC0047161
aaataaatttaa

SEQ ID NO: 351223 - DNA, 12 bp, Artificial Sequence
  Oligonucleotide primer for the detection of SNP TSC0047161
aagtttgtgata

SEQ ID NO: 351224 - DNA, 12 bp, Artificial Sequence
  Oligonucleotide primer for the detection of SNP TSC0047162
ttaccacacaac

SEQ ID NO: 351225 - DNA, 12 bp, Artificial Sequence
  Oligonucleotide primer for the detection of SNP TSC0047162
atgtgtttatag

SEQ ID NO: 351226 - DNA, 12 bp, Artificial Sequence
  Oligonucleotide primer for the detection of SNP TSC0047162
acgtgtttatag

SEQ ID NO: 351227 - DNA, 12 bp, Artificial Sequence
  Oligonucleotide primer for the detection of SNP TSC0047163
ctatttctttct

SEQ ID NO: 351228 - DNA, 12 bp, Artificial Sequence
  Oligonucleotide primer for the detection of SNP TSC0047163
gagagagataga

SEQ ID NO: 351229 - DNA, 12 bp, Artificial Sequence
  Oligonucleotide primer for the detection of SNP TSC0047164
agttgggggagg

SEQ ID NO: 351230 - DNA, 12 bp, Artificial Sequence
  Oligonucleotide primer for the detection of SNP TSC0047165
ttaacttatatc

SEQ ID NO: 351231 - DNA, 12 bp, Artificial Sequence
  Oligonucleotide primer for the detection of SNP TSC0047166
catttctaacca

SEQ ID NO: 351232 - DNA, 12 bp, Artificial Sequence
  Oligonucleotide primer for the detection of SNP TSC0047166
acttatatccca

SEQ ID NO: 351233 - DNA, 12 bp, Artificial Sequence
  Oligonucleotide primer for the detection of SNP TSC0047166
tatttttggtta

SEQ ID NO: 351234 - DNA, 12 bp, Artificial Sequence
  Oligonucleotide primer for the detection of SNP TSC0047167
agaaaagatatt

SEQ ID NO: 351235 - DNA, 12 bp, Artificial Sequence
  Oligonucleotide primer for the detection of SNP TSC0047167
gagattttgtag

SEQ ID NO: 351236 - DNA, 12 bp, Artificial Sequence
  Oligonucleotide primer for the detection of SNP TSC0047171
aactaataaaac

SEQ ID NO: 351237 - DNA, 12 bp, Artificial Sequence
  Oligonucleotide primer for the detection of SNP TSC0047171
ttttttatgtat

SEQ ID NO: 351238 - DNA, 12 bp, Artificial Sequence
  Oligonucleotide primer for the detection of SNP TSC0047171
ttttttacgtat

SEQ ID NO: 351239 - DNA, 12 bp, Artificial Sequence
  Oligonucleotide primer for the detection of SNP TSC0047171
tcttcacatata

SEQ ID NO: 351240 - DNA, 12 bp, Artificial Sequence
  Oligonucleotide primer for the detection of SNP TSC0047171
tcttcacgtata

SEQ ID NO: 351241 - DNA, 12 bp, Artificial Sequence
  Oligonucleotide primer for the detection of SNP TSC0047171
gattgatgaaat

SEQ ID NO: 351242 - DNA, 12 bp, Artificial Sequence
  Oligonucleotide primer for the detection of SNP TSC0047172
taatcaacttaa

SEQ ID NO: 351243 - DNA, 12 bp, Artificial Sequence
  Oligonucleotide primer for the detection of SNP TSC0047172
tagtaaggtttt

SEQ ID NO: 351244 - DNA, 12 bp, Artificial Sequence
  Oligonucleotide primer for the detection of SNP TSC0047172
taataaaacttc

SEQ ID NO: 351245 - DNA, 12 bp, Artificial Sequence
  Oligonucleotide primer for the detection of SNP TSC0047172
tggttaatttgg

SEQ ID NO: 351246 - DNA, 12 bp, Artificial Sequence
  Oligonucleotide primer for the detection of SNP TSC0047176
tctttaaccatc

SEQ ID NO: 351247 - DNA, 12 bp, Artificial Sequence
  Oligonucleotide primer for the detection of SNP TSC0047177
ttgtgtatgtat

SEQ ID NO: 351248 - DNA, 12 bp, Artificial Sequence
  Oligonucleotide primer for the detection of SNP TSC0047179
tttaacttctac

SEQ ID NO: 351249 - DNA, 12 bp, Artificial Sequence
  Oligonucleotide primer for the detection of SNP TSC0047179
aaaagggatttg

SEQ ID NO: 351250 - DNA, 12 bp, Artificial Sequence
  unsure (2): Oligonucleotide primer for the detection of SNP TSC0047183
tntataactcaa

SEQ ID NO: 351251 - DNA, 12 bp, Artificial Sequence
  Oligonucleotide primer for the detection of SNP TSC0047183
gatttttataag

SEQ ID NO: 351252 - DNA, 12 bp, Artificial Sequence
  Oligonucleotide primer for the detection of SNP TSC0047183
atctttacaaaa

SEQ ID NO: 351253 - DNA, 12 bp, Artificial Sequence
  unsure (2): Oligonucleotide primer for the detection of SNP TSC0047183
tntatggtttag

SEQ ID NO: 351254 - DNA, 12 bp, Artificial Sequence
  Oligonucleotide primer for the detection of SNP TSC0047184
aaccctaaaaaa

SEQ ID NO: 351255 - DNA, 12 bp, Artificial Sequence
  Oligonucleotide primer for the detection of SNP TSC0047184
ttatgtgttgtt

SEQ ID NO: 351256 - DNA, 12 bp, Artificial Sequence
  Oligonucleotide primer for the detection of SNP TSC0047184
ttatgtgttgtc

SEQ ID NO: 351257 - DNA, 12 bp, Artificial Sequence
  Oligonucleotide primer for the detection of SNP TSC0047184
tcatatattatc

SEQ ID NO: 351258 - DNA, 12 bp, Artificial Sequence
  Oligonucleotide primer for the detection of SNP TSC0047184
agttttggaggg

SEQ ID NO: 351259 - DNA, 12 bp, Artificial Sequence
  Oligonucleotide primer for the detection of SNP TSC0047186
acaaatccaaac

SEQ ID NO: 351260 - DNA, 12 bp, Artificial Sequence
  Oligonucleotide primer for the detection of SNP TSC0047186
acgaatccaaac

SEQ ID NO: 351261 - DNA, 12 bp, Artificial Sequence
  Oligonucleotide primer for the detection of SNP TSC0047186
tactctctaaac

SEQ ID NO: 351262 - DNA, 12 bp, Artificial Sequence
  Oligonucleotide primer for the detection of SNP TSC0047186
gtgagtttaggt

SEQ ID NO: 351263 - DNA, 12 bp, Artificial Sequence
  Oligonucleotide primer for the detection of SNP TSC0047186
gcgagtttaggt

SEQ ID NO: 351264 - DNA, 12 bp, Artificial Sequence
  Oligonucleotide primer for the detection of SNP TSC0047197
ctccaatcataa

SEQ ID NO: 351265 - DNA, 12 bp, Artificial Sequence
  Oligonucleotide primer for the detection of SNP TSC0047197
cactttaccttc

SEQ ID NO: 351266 - DNA, 12 bp, Artificial Sequence
  Oligonucleotide primer for the detection of SNP TSC0005257
ggaaggtttgta

SEQ ID NO: 351267 - DNA, 12 bp, Artificial Sequence
  Oligonucleotide primer for the detection of SNP TSC0005258
atccatcaatct

SEQ ID NO: 351268 - DNA, 12 bp, Artificial Sequence
  Oligonucleotide primer for the detection of SNP TSC0005259
actatactacac

SEQ ID NO: 351269 - DNA, 12 bp, Artificial Sequence
  Oligonucleotide primer for the detection of SNP TSC0005259
aaaatgtggggg

SEQ ID NO: 351270 - DNA, 12 bp, Artificial Sequence
  Oligonucleotide primer for the detection of SNP TSC0047198
aattatttaaac

SEQ ID NO: 351271 - DNA, 12 bp, Artificial Sequence
  Oligonucleotide primer for the detection of SNP TSC0047198
agataatttggg

SEQ ID NO: 351272 - DNA, 12 bp, Artificial Sequence
  Oligonucleotide primer for the detection of SNP TSC0047198
aaacaatttaaa

SEQ ID NO: 351273 - DNA, 12 bp, Artificial Sequence
  Oligonucleotide primer for the detection of SNP TSC0047199
caaatttctact

SEQ ID NO: 351274 - DNA, 12 bp, Artificial Sequence
  Oligonucleotide primer for the detection of SNP TSC0047199
tagtatattaag

SEQ ID NO: 351275 - DNA, 12 bp, Artificial Sequence
  Oligonucleotide primer for the detection of SNP TSC0047201
ctctttttctct

SEQ ID NO: 351276 - DNA, 12 bp, Artificial Sequence
  Oligonucleotide primer for the detection of SNP TSC0047201
aaggaagagata

SEQ ID NO: 351277 - DNA, 12 bp, Artificial Sequence
  Oligonucleotide primer for the detection of SNP TSC0047202
tttatatatgag

SEQ ID NO: 351278 - DNA, 12 bp, Artificial Sequence
  Oligonucleotide primer for the detection of SNP TSC0047202
ttcacatataaa

SEQ ID NO: 351279 - DNA, 12 bp, Artificial Sequence
  Oligonucleotide primer for the detection of SNP TSC0047202
tatgtatgaaaa

SEQ ID NO: 351280 - DNA, 12 bp, Artificial Sequence
  Oligonucleotide primer for the detection of SNP TSC0047204
ccactcacctct

SEQ ID NO: 351281 - DNA, 12 bp, Artificial Sequence
  Oligonucleotide primer for the detection of SNP TSC0047204
ataggaagggta

SEQ ID NO: 351282 - DNA, 12 bp, Artificial Sequence
  Oligonucleotide primer for the detection of SNP TSC0047205
cctaactattac

SEQ ID NO: 351283 - DNA, 12 bp, Artificial Sequence
  Oligonucleotide primer for the detection of SNP TSC0047205
tgttttattata

SEQ ID NO: 351284 - DNA, 12 bp, Artificial Sequence
  Oligonucleotide primer for the detection of SNP TSC0047206
actcacataact

SEQ ID NO: 351285 - DNA, 12 bp, Artificial Sequence
  Oligonucleotide primer for the detection of SNP TSC0047206
actcacgtaact

SEQ ID NO: 351286 - DNA, 12 bp, Artificial Sequence
  Oligonucleotide primer for the detection of SNP TSC0047206
actcgcataact

SEQ ID NO: 351287 - DNA, 12 bp, Artificial Sequence
  Oligonucleotide primer for the detection of SNP TSC0047206
actcgcgtaact

SEQ ID NO: 351288 - DNA, 12 bp, Artificial Sequence
  Oligonucleotide primer for the detection of SNP TSC0047206
ggttggttttag

SEQ ID NO: 351289 - DNA, 12 bp, Artificial Sequence
  Oligonucleotide primer for the detection of SNP TSC0047207
aaataagaataa

SEQ ID NO: 351290 - DNA, 12 bp, Artificial Sequence
  Oligonucleotide primer for the detection of SNP TSC0047207
gatttttggtta

SEQ ID NO: 351291 - DNA, 12 bp, Artificial Sequence
  Oligonucleotide primer for the detection of SNP TSC0047208
ctacactccaat

SEQ ID NO: 351292 - DNA, 12 bp, Artificial Sequence
  Oligonucleotide primer for the detection of SNP TSC0047209
aataaacattat

SEQ ID NO: 351293 - DNA, 12 bp, Artificial Sequence
  Oligonucleotide primer for the detection of SNP TSC0047209
aagtaattataa

SEQ ID NO: 351294 - DNA, 12 bp, Artificial Sequence
  Oligonucleotide primer for the detection of SNP TSC0047210
tataattacttc

SEQ ID NO: 351295 - DNA, 12 bp, Artificial Sequence
  Oligonucleotide primer for the detection of SNP TSC0047210
taagtgtattag

SEQ ID NO: 351296 - DNA, 12 bp, Artificial Sequence
  Oligonucleotide primer for the detection of SNP TSC0047213
tctataaatatc

SEQ ID NO: 351297 - DNA, 12 bp, Artificial Sequence
  Oligonucleotide primer for the detection of SNP TSC0047213
tagatgtttgtg

SEQ ID NO: 351298 - DNA, 12 bp, Artificial Sequence
  Oligonucleotide primer for the detection of SNP TSC0047214
taatccatcact

SEQ ID NO: 351299 - DNA, 12 bp, Artificial Sequence
  Oligonucleotide primer for the detection of SNP TSC0047214
aaaagaggatag

SEQ ID NO: 351300 - DNA, 12 bp, Artificial Sequence
  Oligonucleotide primer for the detection of SNP TSC0047215
aaaatatccaca

SEQ ID NO: 351301 - DNA, 12 bp, Artificial Sequence
  Oligonucleotide primer for the detection of SNP TSC0047215
gtgtagtattat

SEQ ID NO: 351302 - DNA, 12 bp, Artificial Sequence
  Oligonucleotide primer for the detection of SNP TSC0047215
atataacatcac

SEQ ID NO: 351303 - DNA, 12 bp, Artificial Sequence
  Oligonucleotide primer for the detection of SNP TSC0047215
agagtatttata

SEQ ID NO: 351304 - DNA, 12 bp, Artificial Sequence
  Oligonucleotide primer for the detection of SNP TSC0047216
tttgaaagatat

SEQ ID NO: 351305 - DNA, 12 bp, Artificial Sequence
  Oligonucleotide primer for the detection of SNP TSC0047217
tccactaaccat

SEQ ID NO: 351306 - DNA, 12 bp, Artificial Sequence
  Oligonucleotide primer for the detection of SNP TSC0047217
gttgatgtggaa

SEQ ID NO: 351307 - DNA, 12 bp, Artificial Sequence
  Oligonucleotide primer for the detection of SNP TSC0047218
actcactacaac

SEQ ID NO: 351308 - DNA, 12 bp, Artificial Sequence
  Oligonucleotide primer for the detection of SNP TSC0047218
ttaggaggtaga

SEQ ID NO: 351309 - DNA, 12 bp, Artificial Sequence
  Oligonucleotide primer for the detection of SNP TSC0047219
agtttgaaatta

SEQ ID NO: 351310 - DNA, 12 bp, Artificial Sequence
  Oligonucleotide primer for the detection of SNP TSC0047219
aatttaaaacta

SEQ ID NO: 351311 - DNA, 12 bp, Artificial Sequence
  Oligonucleotide primer for the detection of SNP TSC0047219
ataggaagatga

SEQ ID NO: 351312 - DNA, 12 bp, Artificial Sequence
  Oligonucleotide primer for the detection of SNP TSC0005359
tcttactattac

SEQ ID NO: 351313 - DNA, 12 bp, Artificial Sequence
  Oligonucleotide primer for the detection of SNP TSC0005359
agtttaggtaga

SEQ ID NO: 351314 - DNA, 12 bp, Artificial Sequence
  Oligonucleotide primer for the detection of SNP TSC0047221
ctccacctacac

SEQ ID NO: 351315 - DNA, 12 bp, Artificial Sequence
  Oligonucleotide primer for the detection of SNP TSC0047221
tggttatttggt

SEQ ID NO: 351316 - DNA, 12 bp, Artificial Sequence
  Oligonucleotide primer for the detection of SNP TSC0047221
aattacttaata

SEQ ID NO: 351317 - DNA, 12 bp, Artificial Sequence
  Oligonucleotide primer for the detection of SNP TSC0047221
tttatttgtatt

SEQ ID NO: 351318 - DNA, 12 bp, Artificial Sequence
  Oligonucleotide primer for the detection of SNP TSC0047222
attctaaatatt

SEQ ID NO: 351319 - DNA, 12 bp, Artificial Sequence
  Oligonucleotide primer for the detection of SNP TSC0047222
aatcataaaaca

SEQ ID NO: 351320 - DNA, 12 bp, Artificial Sequence
  Oligonucleotide primer for the detection of SNP TSC0047222
gttttgggtatt

SEQ ID NO: 351321 - DNA, 12 bp, Artificial Sequence
  Oligonucleotide primer for the detection of SNP TSC0047223
tcctaccttaac

SEQ ID NO: 351322 - DNA, 12 bp, Artificial Sequence
  Oligonucleotide primer for the detection of SNP TSC0047224
ttcttatcctaa

SEQ ID NO: 351323 - DNA, 12 bp, Artificial Sequence
  Oligonucleotide primer for the detection of SNP TSC0047224
ttcaaaacactt

SEQ ID NO: 351324 - DNA, 12 bp, Artificial Sequence
  Oligonucleotide primer for the detection of SNP TSC0047225
acaattatattc

SEQ ID NO: 351325 - DNA, 12 bp, Artificial Sequence
  Oligonucleotide primer for the detection of SNP TSC0009641
tattctattttt

SEQ ID NO: 351326 - DNA, 12 bp, Artificial Sequence
  Oligonucleotide primer for the detection of SNP TSC0047227
tttattttgtga

SEQ ID NO: 351327 - DNA, 12 bp, Artificial Sequence
  Oligonucleotide primer for the detection of SNP TSC0047227
ttcaccctataa

SEQ ID NO: 351328 - DNA, 12 bp, Artificial Sequence
  Oligonucleotide primer for the detection of SNP TSC0047227
tgaatttagaag

SEQ ID NO: 351329 - DNA, 12 bp, Artificial Sequence
  Oligonucleotide primer for the detection of SNP TSC0047228
cttcctaaaatt

SEQ ID NO: 351330 - DNA, 12 bp, Artificial Sequence
  Oligonucleotide primer for the detection of SNP TSC0047228
aaagtattaggg

SEQ ID NO: 351331 - DNA, 12 bp, Artificial Sequence
  Oligonucleotide primer for the detection of SNP TSC0047229
tactacaaaccc

SEQ ID NO: 351332 - DNA, 12 bp, Artificial Sequence
  Oligonucleotide primer for the detection of SNP TSC0047229
actaatttccca

SEQ ID NO: 351333 - DNA, 12 bp, Artificial Sequence
  Oligonucleotide primer for the detection of SNP TSC0047229
tgtaaatttttt

SEQ ID NO: 351334 - DNA, 12 bp, Artificial Sequence
  Oligonucleotide primer for the detection of SNP TSC0047230
tttctaacttca

SEQ ID NO: 351335 - DNA, 12 bp, Artificial Sequence
  Oligonucleotide primer for the detection of SNP TSC0047230
taaatataaaat

SEQ ID NO: 351336 - DNA, 12 bp, Artificial Sequence
  Oligonucleotide primer for the detection of SNP TSC0047231
tctctatccaac

SEQ ID NO: 351337 - DNA, 12 bp, Artificial Sequence
  Oligonucleotide primer for the detection of SNP TSC0047231
gttgattttata

SEQ ID NO: 351338 - DNA, 12 bp, Artificial Sequence
  Oligonucleotide primer for the detection of SNP TSC0047234
aaaattaattta

SEQ ID NO: 351339 - DNA, 12 bp, Artificial Sequence
  Oligonucleotide primer for the detection of SNP TSC0047234
ctataatctatc

SEQ ID NO: 351340 - DNA, 12 bp, Artificial Sequence
  Oligonucleotide primer for the detection of SNP TSC0047234
aaaattaatttg

SEQ ID NO: 351341 - DNA, 12 bp, Artificial Sequence
  Oligonucleotide primer for the detection of SNP TSC0047238
cttctatttttc

SEQ ID NO: 351342 - DNA, 12 bp, Artificial Sequence
  Oligonucleotide primer for the detection of SNP TSC0047239
tacttcttcctt

SEQ ID NO: 351343 - DNA, 12 bp, Artificial Sequence
  Oligonucleotide primer for the detection of SNP TSC0047240
tcacacattaaa

SEQ ID NO: 351344 - DNA, 12 bp, Artificial Sequence
  Oligonucleotide primer for the detection of SNP TSC0047240
ttattcctttaa

SEQ ID NO: 351345 - DNA, 12 bp, Artificial Sequence
  Oligonucleotide primer for the detection of SNP TSC0047240
aatttatatatt

SEQ ID NO: 351346 - DNA, 12 bp, Artificial Sequence
  Oligonucleotide primer for the detection of SNP TSC0047241
acatctttctac

SEQ ID NO: 351347 - DNA, 12 bp, Artificial Sequence
  Oligonucleotide primer for the detection of SNP TSC0047241
tattaaattaat

SEQ ID NO: 351348 - DNA, 12 bp, Artificial Sequence
  Oligonucleotide primer for the detection of SNP TSC0047242
tttttttactat

SEQ ID NO: 351349 - DNA, 12 bp, Artificial Sequence
  Oligonucleotide primer for the detection of SNP TSC0047242
ttagttattaat

SEQ ID NO: 351350 - DNA, 12 bp, Artificial Sequence
  Oligonucleotide primer for the detection of SNP TSC0047242
ttaactattaac

SEQ ID NO: 351351 - DNA, 12 bp, Artificial Sequence
  Oligonucleotide primer for the detection of SNP TSC0047243
ttgaatagttat

SEQ ID NO: 351352 - DNA, 12 bp, Artificial Sequence
  Oligonucleotide primer for the detection of SNP TSC0047243
ctaaacaatcat

SEQ ID NO: 351353 - DNA, 12 bp, Artificial Sequence
  Oligonucleotide primer for the detection of SNP TSC0047243
taataaaagttg

SEQ ID NO: 351354 - DNA, 12 bp, Artificial Sequence
  Oligonucleotide primer for the detection of SNP TSC0047244
cacatttaaaaa

SEQ ID NO: 351355 - DNA, 12 bp, Artificial Sequence
  Oligonucleotide primer for the detection of SNP TSC0047244
ataatttgtatt

SEQ ID NO: 351356 - DNA, 12 bp, Artificial Sequence
  Oligonucleotide primer for the detection of SNP TSC0047244
ataatctacatc

SEQ ID NO: 351357 - DNA, 12 bp, Artificial Sequence
  Oligonucleotide primer for the detection of SNP TSC0010033
tattcttttttt

SEQ ID NO: 351358 - DNA, 12 bp, Artificial Sequence
  Oligonucleotide primer for the detection of SNP TSC0010033
atagttttagtt

SEQ ID NO: 351359 - DNA, 12 bp, Artificial Sequence
  Oligonucleotide primer for the detection of SNP TSC0010033
acaattttaatt

SEQ ID NO: 351360 - DNA, 12 bp, Artificial Sequence
  Oligonucleotide primer for the detection of SNP TSC0047246
tatttccccata

SEQ ID NO: 351361 - DNA, 12 bp, Artificial Sequence
  Oligonucleotide primer for the detection of SNP TSC0047246
tatttccccgta

SEQ ID NO: 351362 - DNA, 12 bp, Artificial Sequence
  Oligonucleotide primer for the detection of SNP TSC0047246
tagtgttggtaa

SEQ ID NO: 351363 - DNA, 12 bp, Artificial Sequence
  Oligonucleotide primer for the detection of SNP TSC0047246
caatattaacaa

SEQ ID NO: 351364 - DNA, 12 bp, Artificial Sequence
  Oligonucleotide primer for the detection of SNP TSC0047246
ttttttcgtgtt

SEQ ID NO: 351365 - DNA, 12 bp, Artificial Sequence
  Oligonucleotide primer for the detection of SNP TSC0047246
ttttttcgtgtc

SEQ ID NO: 351366 - DNA, 12 bp, Artificial Sequence
  Oligonucleotide primer for the detection of SNP TSC0047247
aagggaaaaaag

SEQ ID NO: 351367 - DNA, 12 bp, Artificial Sequence
  Oligonucleotide primer for the detection of SNP TSC0047250
ttttttttcttc

SEQ ID NO: 351368 - DNA, 12 bp, Artificial Sequence
  Oligonucleotide primer for the detection of SNP TSC0047250
tgaatgaaaatt

SEQ ID NO: 351369 - DNA, 12 bp, Artificial Sequence
  Oligonucleotide primer for the detection of SNP TSC0047250
tgaacgaaaatt

SEQ ID NO: 351370 - DNA, 12 bp, Artificial Sequence
  Oligonucleotide primer for the detection of SNP TSC0047250
aaacgaaaatta

SEQ ID NO: 351371 - DNA, 12 bp, Artificial Sequence
  Oligonucleotide primer for the detection of SNP TSC0047259
cttccctattct

SEQ ID NO: 351372 - DNA, 12 bp, Artificial Sequence
  Oligonucleotide primer for the detection of SNP TSC0047259
tattaattttag

SEQ ID NO: 351373 - DNA, 12 bp, Artificial Sequence
  Oligonucleotide primer for the detection of SNP TSC0047260
atccctataata

SEQ ID NO: 351374 - DNA, 12 bp, Artificial Sequence
  Oligonucleotide primer for the detection of SNP TSC0047260
tacactacccta

SEQ ID NO: 351375 - DNA, 12 bp, Artificial Sequence
  Oligonucleotide primer for the detection of SNP TSC0047261
tgttataataaa

SEQ ID NO: 351376 - DNA, 12 bp, Artificial Sequence
  Oligonucleotide primer for the detection of SNP TSC0047262
gggtttatttaa

SEQ ID NO: 351377 - DNA, 12 bp, Artificial Sequence
  Oligonucleotide primer for the detection of SNP TSC0047263
aaattactctat

SEQ ID NO: 351378 - DNA, 12 bp, Artificial Sequence
  Oligonucleotide primer for the detection of SNP TSC0047263
gaaagaaaatga

SEQ ID NO: 351379 - DNA, 12 bp, Artificial Sequence
  Oligonucleotide primer for the detection of SNP TSC0047263
agattgttttgt

SEQ ID NO: 351380 - DNA, 12 bp, Artificial Sequence
  Oligonucleotide primer for the detection of SNP TSC0047264
attaatagttgt

SEQ ID NO: 351381 - DNA, 12 bp, Artificial Sequence
  Oligonucleotide primer for the detection of SNP TSC0047264
catcaataacta

SEQ ID NO: 351382 - DNA, 12 bp, Artificial Sequence
  Oligonucleotide primer for the detection of SNP TSC0047265
ttacctaaacaa

SEQ ID NO: 351383 - DNA, 12 bp, Artificial Sequence
  Oligonucleotide primer for the detection of SNP TSC0047265
cctccccccaac

SEQ ID NO: 351384 - DNA, 12 bp, Artificial Sequence
  Oligonucleotide primer for the detection of SNP TSC0047265
ttgtttgaataa

SEQ ID NO: 351385 - DNA, 12 bp, Artificial Sequence
  Oligonucleotide primer for the detection of SNP TSC0047266
taacttttatct

SEQ ID NO: 351386 - DNA, 12 bp, Artificial Sequence
  Oligonucleotide primer for the detection of SNP TSC0047266
attttggtagaa

SEQ ID NO: 351387 - DNA, 12 bp, Artificial Sequence
  Oligonucleotide primer for the detection of SNP TSC0047269
aactctcctata

SEQ ID NO: 351388 - DNA, 12 bp, Artificial Sequence
  Oligonucleotide primer for the detection of SNP TSC0047269
agtttaatttgt

SEQ ID NO: 351389 - DNA, 12 bp, Artificial Sequence
  Oligonucleotide primer for the detection of SNP TSC0047269
aatttttttgta

SEQ ID NO: 351390 - DNA, 12 bp, Artificial Sequence
  Oligonucleotide primer for the detection of SNP TSC0047272
atagtttattga

SEQ ID NO: 351391 - DNA, 12 bp, Artificial Sequence
  Oligonucleotide primer for the detection of SNP TSC0047273
aaaccactaatt

SEQ ID NO: 351392 - DNA, 12 bp, Artificial Sequence
  Oligonucleotide primer for the detection of SNP TSC0047273
attatagaaaaa

SEQ ID NO: 351393 - DNA, 12 bp, Artificial Sequence
  Oligonucleotide primer for the detection of SNP TSC0047275
atgttggttagg

SEQ ID NO: 351394 - DNA, 12 bp, Artificial Sequence
  Oligonucleotide primer for the detection of SNP TSC0047282
gggaggaattaa

SEQ ID NO: 351395 - DNA, 12 bp, Artificial Sequence
  Oligonucleotide primer for the detection of SNP TSC0047283
taatctattctc

SEQ ID NO: 351396 - DNA, 12 bp, Artificial Sequence
  Oligonucleotide primer for the detection of SNP TSC0047283
tctttataacaa

SEQ ID NO: 351397 - DNA, 12 bp, Artificial Sequence
  Oligonucleotide primer for the detection of SNP TSC0047284
cttatattaatc

SEQ ID NO: 351398 - DNA, 12 bp, Artificial Sequence
  Oligonucleotide primer for the detection of SNP TSC0047284
gtagtgtgagaa

SEQ ID NO: 351399 - DNA, 12 bp, Artificial Sequence
  Oligonucleotide primer for the detection of SNP TSC0047284
gtagcgtgagaa

SEQ ID NO: 351400 - DNA, 12 bp, Artificial Sequence
  Oligonucleotide primer for the detection of SNP TSC0047294
tctaaaccaaat

SEQ ID NO: 351401 - DNA, 12 bp, Artificial Sequence
  Oligonucleotide primer for the detection of SNP TSC0047294
ttaaaattaaag

SEQ ID NO: 351402 - DNA, 12 bp, Artificial Sequence
  Oligonucleotide primer for the detection of SNP TSC0047295
aaaatatctcac

SEQ ID NO: 351403 - DNA, 12 bp, Artificial Sequence
  Oligonucleotide primer for the detection of SNP TSC0047295
gtaataaaatta

SEQ ID NO: 351404 - DNA, 12 bp, Artificial Sequence
  Oligonucleotide primer for the detection of SNP TSC0047296
aggtatgttgtt

SEQ ID NO: 351405 - DNA, 12 bp, Artificial Sequence
  Oligonucleotide primer for the detection of SNP TSC0047296
aggtacgttgtt

SEQ ID NO: 351406 - DNA, 12 bp, Artificial Sequence
  Oligonucleotide primer for the detection of SNP TSC0047296
caaaacacatta

SEQ ID NO: 351407 - DNA, 12 bp, Artificial Sequence
  Oligonucleotide primer for the detection of SNP TSC0047296
caaaacacgtta

SEQ ID NO: 351408 - DNA, 12 bp, Artificial Sequence
  Oligonucleotide primer for the detection of SNP TSC0047296
taaataagtaaa

SEQ ID NO: 351409 - DNA, 12 bp, Artificial Sequence
  Oligonucleotide primer for the detection of SNP TSC0009621
ttttctaaaaat

SEQ ID NO: 351410 - DNA, 12 bp, Artificial Sequence
  Oligonucleotide primer for the detection of SNP TSC0009621
gtttaagggtat

SEQ ID NO: 351411 - DNA, 12 bp, Artificial Sequence
  Oligonucleotide primer for the detection of SNP TSC0009621
cctaaaaacata

SEQ ID NO: 351412 - DNA, 12 bp, Artificial Sequence
  Oligonucleotide primer for the detection of SNP TSC0047303
atctatacatct

SEQ ID NO: 351413 - DNA, 12 bp, Artificial Sequence
  Oligonucleotide primer for the detection of SNP TSC0047307
tttatcttcact

SEQ ID NO: 351414 - DNA, 12 bp, Artificial Sequence
  Oligonucleotide primer for the detection of SNP TSC0047307
atttaattgaag

SEQ ID NO: 351415 - DNA, 12 bp, Artificial Sequence
  Oligonucleotide primer for the detection of SNP TSC0047314
tacttaaatttt

SEQ ID NO: 351416 - DNA, 12 bp, Artificial Sequence
  Oligonucleotide primer for the detection of SNP TSC0047315
aaacacattttt

SEQ ID NO: 351417 - DNA, 12 bp, Artificial Sequence
  Oligonucleotide primer for the detection of SNP TSC0047315
aaataattagta

SEQ ID NO: 351418 - DNA, 12 bp, Artificial Sequence
  Oligonucleotide primer for the detection of SNP TSC0047316
tttttttgtgga

SEQ ID NO: 351419 - DNA, 12 bp, Artificial Sequence
  Oligonucleotide primer for the detection of SNP TSC0047316
tttttttgcgga

SEQ ID NO: 351420 - DNA, 12 bp, Artificial Sequence
  Oligonucleotide primer for the detection of SNP TSC0047317
aaggatttgatg

SEQ ID NO: 351421 - DNA, 12 bp, Artificial Sequence
  Oligonucleotide primer for the detection of SNP TSC0047322
tcaatcacaaat

SEQ ID NO: 351422 - DNA, 12 bp, Artificial Sequence
  Oligonucleotide primer for the detection of SNP TSC0047322
tcaatcacgaat

SEQ ID NO: 351423 - DNA, 12 bp, Artificial Sequence
  Oligonucleotide primer for the detection of SNP TSC0047322
agaaaaatttag

SEQ ID NO: 351424 - DNA, 12 bp, Artificial Sequence
  Oligonucleotide primer for the detection of SNP TSC0047322
ttagttatggat

SEQ ID NO: 351425 - DNA, 12 bp, Artificial Sequence
  Oligonucleotide primer for the detection of SNP TSC0047322
ttagttacggat

SEQ ID NO: 351426 - DNA, 12 bp, Artificial Sequence
  Oligonucleotide primer for the detection of SNP TSC0008952
aaactttttttt

SEQ ID NO: 351427 - DNA, 12 bp, Artificial Sequence
  Oligonucleotide primer for the detection of SNP TSC0008952
gagatggtgttt

SEQ ID NO: 351428 - DNA, 12 bp, Artificial Sequence
  Oligonucleotide primer for the detection of SNP TSC0047324
taaacatcctta

SEQ ID NO: 351429 - DNA, 12 bp, Artificial Sequence
  Oligonucleotide primer for the detection of SNP TSC0047324
agattagatttg

SEQ ID NO: 351430 - DNA, 12 bp, Artificial Sequence
  Oligonucleotide primer for the detection of SNP TSC0047324
agattagattcg

SEQ ID NO: 351431 - DNA, 12 bp, Artificial Sequence
  Oligonucleotide primer for the detection of SNP TSC0047324
aaaccaaaccca

SEQ ID NO: 351432 - DNA, 12 bp, Artificial Sequence
  Oligonucleotide primer for the detection of SNP TSC0047324
aaaccaaacccg

SEQ ID NO: 351433 - DNA, 12 bp, Artificial Sequence
  Oligonucleotide primer for the detection of SNP TSC0047324
ttgagtattttt

SEQ ID NO: 351434 - DNA, 12 bp, Artificial Sequence
  Oligonucleotide primer for the detection of SNP TSC0047325
ctataaaacatt

SEQ ID NO: 351435 - DNA, 12 bp, Artificial Sequence
  Oligonucleotide primer for the detection of SNP TSC0047325
tggtaaaaaaaa

SEQ ID NO: 351436 - DNA, 12 bp, Artificial Sequence
  Oligonucleotide primer for the detection of SNP TSC0047325
tatgagatattt

SEQ ID NO: 351437 - DNA, 12 bp, Artificial Sequence
  Oligonucleotide primer for the detection of SNP TSC0047326
aaccaaacccaa

SEQ ID NO: 351438 - DNA, 12 bp, Artificial Sequence
  Oligonucleotide primer for the detection of SNP TSC0047326
tatttttggttt

SEQ ID NO: 351439 - DNA, 12 bp, Artificial Sequence
  Oligonucleotide primer for the detection of SNP TSC0047326
acccctaaccca

SEQ ID NO: 351440 - DNA, 12 bp, Artificial Sequence
  Oligonucleotide primer for the detection of SNP TSC0047326
ggttagatttaa

SEQ ID NO: 351441 - DNA, 12 bp, Artificial Sequence
  Oligonucleotide primer for the detection of SNP TSC0047327
aaaatatgtaaa

SEQ ID NO: 351442 - DNA, 12 bp, Artificial Sequence
  Oligonucleotide primer for the detection of SNP TSC0047327
aaaatacgtaaa

SEQ ID NO: 351443 - DNA, 12 bp, Artificial Sequence
  Oligonucleotide primer for the detection of SNP TSC0047327
aaaacacgcaaa

SEQ ID NO: 351444 - DNA, 12 bp, Artificial Sequence
  Oligonucleotide primer for the detection of SNP TSC0047327
atatagtagaat

SEQ ID NO: 351445 - DNA, 12 bp, Artificial Sequence
  Oligonucleotide primer for the detection of SNP TSC0047328
ttccctaataat

SEQ ID NO: 351446 - DNA, 12 bp, Artificial Sequence
  Oligonucleotide primer for the detection of SNP TSC0047328
atggttaaattt

SEQ ID NO: 351447 - DNA, 12 bp, Artificial Sequence
  Oligonucleotide primer for the detection of SNP TSC0047328
ataatcaaattc

SEQ ID NO: 351448 - DNA, 12 bp, Artificial Sequence
  Oligonucleotide primer for the detection of SNP TSC0047328
ttttttgataat

SEQ ID NO: 351449 - DNA, 12 bp, Artificial Sequence
  Oligonucleotide primer for the detection of SNP TSC0047329
aaatacattcat

SEQ ID NO: 351450 - DNA, 12 bp, Artificial Sequence
  Oligonucleotide primer for the detection of SNP TSC0047329
aaatacgttcat

SEQ ID NO: 351451 - DNA, 12 bp, Artificial Sequence
  Oligonucleotide primer for the detection of SNP TSC0047329
aagtggttagag

SEQ ID NO: 351452 - DNA, 12 bp, Artificial Sequence
  Oligonucleotide primer for the detection of SNP TSC0047330
tcaaaacaaaaa

SEQ ID NO: 351453 - DNA, 12 bp, Artificial Sequence
  Oligonucleotide primer for the detection of SNP TSC0047330
ttttgaagaatt

SEQ ID NO: 351454 - DNA, 12 bp, Artificial Sequence
  Oligonucleotide primer for the detection of SNP TSC0047330
tttcgaagaatt

SEQ ID NO: 351455 - DNA, 12 bp, Artificial Sequence
  Oligonucleotide primer for the detection of SNP TSC0047330
tttttcaaaaaa

SEQ ID NO: 351456 - DNA, 12 bp, Artificial Sequence
  Oligonucleotide primer for the detection of SNP TSC0047330
tttttcgaaaaa

SEQ ID NO: 351457 - DNA, 12 bp, Artificial Sequence
  Oligonucleotide primer for the detection of SNP TSC0047331
attaaaataaac

SEQ ID NO: 351458 - DNA, 12 bp, Artificial Sequence
  Oligonucleotide primer for the detection of SNP TSC0047331
tacccctataaa

SEQ ID NO: 351459 - DNA, 12 bp, Artificial Sequence
  Oligonucleotide primer for the detection of SNP TSC0047331
attaaggtgaat

SEQ ID NO: 351460 - DNA, 12 bp, Artificial Sequence
  Oligonucleotide primer for the detection of SNP TSC0047332
ataaaaaaaact

SEQ ID NO: 351461 - DNA, 12 bp, Artificial Sequence
  Oligonukleotid-Primer
gttttaatcgag

SEQ ID NO: 351462 - DNA, 12 bp, Artificial Sequence
  Oligonucleotide primer for the detection of SNP TSC0047333
actacttcttct

SEQ ID NO: 351463 - DNA, 12 bp, Artificial Sequence
  Oligonucleotide primer for the detection of SNP TSC0047333
agaaaagaaata

SEQ ID NO: 351464 - DNA, 12 bp, Artificial Sequence
  Oligonucleotide primer for the detection of SNP TSC0047334
aataactttaaa

SEQ ID NO: 351465 - DNA, 12 bp, Artificial Sequence
  Oligonukleotid-Primer
tgggttggttta

SEQ ID NO: 351466 - DNA, 12 bp, Artificial Sequence
  Oligonucleotide primer for the detection of SNP TSC0047335
taacattcaata

SEQ ID NO: 351467 - DNA, 12 bp, Artificial Sequence
  Oligonucleotide primer for the detection of SNP TSC0047335
atgaattaatgt

SEQ ID NO: 351468 - DNA, 12 bp, Artificial Sequence
  Oligonucleotide primer for the detection of SNP TSC0047335
ttagtatttagt

SEQ ID NO: 351469 - DNA, 12 bp, Artificial Sequence
  Oligonukleotid-Primer
tacctcaaaatt

SEQ ID NO: 351470 - DNA, 12 bp, Artificial Sequence
  Oligonucleotide primer for the detection of SNP TSC0047336
tattttataaag

SEQ ID NO: 351471 - DNA, 12 bp, Artificial Sequence
  Oligonucleotide primer for the detection of SNP TSC0047337
tgtatatgtgtg

SEQ ID NO: 351472 - DNA, 12 bp, Artificial Sequence
  Oligonucleotide primer for the detection of SNP TSC0047339
actacaactacc

SEQ ID NO: 351473 - DNA, 12 bp, Artificial Sequence
  Oligonucleotide primer for the detection of SNP TSC0047339
cgggtgtggtgg

SEQ ID NO: 351474 - DNA, 12 bp, Artificial Sequence
  Oligonucleotide primer for the detection of SNP TSC0047339
cgggcgtggtgg

SEQ ID NO: 351475 - DNA, 12 bp, Artificial Sequence
  Oligonucleotide primer for the detection of SNP TSC0047339
cgaacataataa

SEQ ID NO: 351476 - DNA, 12 bp, Artificial Sequence
  Oligonucleotide primer for the detection of SNP TSC0047339
cgaacgtaataa

SEQ ID NO: 351477 - DNA, 12 bp, Artificial Sequence
  Oligonucleotide primer for the detection of SNP TSC0047339
attatagttgtt

SEQ ID NO: 351478 - DNA, 12 bp, Artificial Sequence
  Oligonucleotide primer for the detection of SNP TSC0047340
ttagtgaatggt

SEQ ID NO: 351479 - DNA, 12 bp, Artificial Sequence
  Oligonucleotide primer for the detection of SNP TSC0047340
aatgaattgaaa

SEQ ID NO: 351480 - DNA, 12 bp, Artificial Sequence
  Oligonucleotide primer for the detection of SNP TSC0000699
taaaaatttctc

SEQ ID NO: 351481 - DNA, 12 bp, Artificial Sequence
  Oligonucleotide primer for the detection of SNP TSC0000699
gatatgaaagaa

SEQ ID NO: 351482 - DNA, 12 bp, Artificial Sequence
  Oligonucleotide primer for the detection of SNP TSC0000432
atttaatattct

SEQ ID NO: 351483 - DNA, 12 bp, Artificial Sequence
  Oligonucleotide primer for the detection of SNP TSC0000432
tataatagtgaa

SEQ ID NO: 351484 - DNA, 12 bp, Artificial Sequence
  Oligonucleotide primer for the detection of SNP TSC0047342
tttagatatagg

SEQ ID NO: 351485 - DNA, 12 bp, Artificial Sequence
  Oligonukleotid-Primer
ttcacacccttc

SEQ ID NO: 351486 - DNA, 12 bp, Artificial Sequence
  Oligonucleotide primer for the detection of SNP TSC0047343
atggattttata

SEQ ID NO: 351487 - DNA, 12 bp, Artificial Sequence
  Oligonucleotide primer for the detection of SNP TSC0047344
caaaactccttc

SEQ ID NO: 351488 - DNA, 12 bp, Artificial Sequence
  Oligonucleotide primer for the detection of SNP TSC0047344
tattattattat

SEQ ID NO: 351489 - DNA, 12 bp, Artificial Sequence
  Oligonukleotid-Primer
tacctatttccc

SEQ ID NO: 351490 - DNA, 12 bp, Artificial Sequence
  Oligonucleotide primer for the detection of SNP TSC0047345
taagaaagatga

SEQ ID NO: 351491 - DNA, 12 bp, Artificial Sequence
  Oligonucleotide primer for the detection of SNP TSC0047346
tatttatttcat

SEQ ID NO: 351492 - DNA, 12 bp, Artificial Sequence
  Oligonucleotide primer for the detection of SNP TSC0047347
taatagtattat

SEQ ID NO: 351493 - DNA, 12 bp, Artificial Sequence
  Oligonukleotid-Primer
caacaatatcat

SEQ ID NO: 351494 - DNA, 12 bp, Artificial Sequence
  Oligonucleotide primer for the detection of SNP TSC0047347
atatgggagaga

SEQ ID NO: 351495 - DNA, 12 bp, Artificial Sequence
  Oligonucleotide primer for the detection of SNP TSC0047348
attagaggatat

SEQ ID NO: 351496 - DNA, 12 bp, Artificial Sequence
  Oligonucleotide primer for the detection of SNP TSC0047348
attaaaaaacat

SEQ ID NO: 351497 - DNA, 12 bp, Artificial Sequence
  Oligonucleotide primer for the detection of SNP TSC0047348
ttgatagaagag

SEQ ID NO: 351498 - DNA, 12 bp, Artificial Sequence
  Oligonucleotide primer for the detection of SNP TSC0047349
acaaaatcctac

SEQ ID NO: 351499 - DNA, 12 bp, Artificial Sequence
  Oligonucleotide primer for the detection of SNP TSC0047349
gattgggattaa

SEQ ID NO: 351500 - DNA, 12 bp, Artificial Sequence
  Oligonucleotide primer for the detection of SNP TSC0047353
tcccaaactcca

SEQ ID NO: 351501 - DNA, 12 bp, Artificial Sequence
  Oligonucleotide primer for the detection of SNP TSC0047353
tcccgaactcca

SEQ ID NO: 351502 - DNA, 12 bp, Artificial Sequence
  Oligonucleotide primer for the detection of SNP TSC0047353
ttttcttacaac

SEQ ID NO: 351503 - DNA, 12 bp, Artificial Sequence
  Oligonucleotide primer for the detection of SNP TSC0047353
tttttgggtttt

SEQ ID NO: 351504 - DNA, 12 bp, Artificial Sequence
  Oligonucleotide primer for the detection of SNP TSC0047353
ttttcgggtttt

SEQ ID NO: 351505 - DNA, 12 bp, Artificial Sequence
  Oligonucleotide primer for the detection of SNP TSC0047355
taacttccctca

SEQ ID NO: 351506 - DNA, 12 bp, Artificial Sequence
  Oligonucleotide primer for the detection of SNP TSC0047355
gtcgttgggtat

SEQ ID NO: 351507 - DNA, 12 bp, Artificial Sequence
  Oligonucleotide primer for the detection of SNP TSC0047355
gtcgttgggtac

SEQ ID NO: 351508 - DNA, 12 bp, Artificial Sequence
  Oligonucleotide primer for the detection of SNP TSC0047355
atcgctaaacac

SEQ ID NO: 351509 - DNA, 12 bp, Artificial Sequence
  Oligonucleotide primer for the detection of SNP TSC0047356
taagggattttg

SEQ ID NO: 351510 - DNA, 12 bp, Artificial Sequence
  Oligonucleotide primer for the detection of SNP TSC0047357
cttaacactaac

SEQ ID NO: 351511 - DNA, 12 bp, Artificial Sequence
  Oligonucleotide primer for the detection of SNP TSC0047357
caatttttttct

SEQ ID NO: 351512 - DNA, 12 bp, Artificial Sequence
  Oligonucleotide primer for the detection of SNP TSC0047357
tttgatattaat

SEQ ID NO: 351513 - DNA, 12 bp, Artificial Sequence
  Oligonucleotide primer for the detection of SNP TSC0047358
aatataaataat

SEQ ID NO: 351514 - DNA, 12 bp, Artificial Sequence
  Oligonucleotide primer for the detection of SNP TSC0047358
tgaaaggttagg

SEQ ID NO: 351515 - DNA, 12 bp, Artificial Sequence
  Oligonucleotide primer for the detection of SNP TSC0047359
gtttttagatgg

SEQ ID NO: 351516 - DNA, 12 bp, Artificial Sequence
  Oligonucleotide primer for the detection of SNP TSC0047360
cctactatccca

SEQ ID NO: 351517 - DNA, 12 bp, Artificial Sequence
  Oligonucleotide primer for the detection of SNP TSC0047360
attggttagggg

SEQ ID NO: 351518 - DNA, 12 bp, Artificial Sequence
  Oligonucleotide primer for the detection of SNP TSC0047361
acaaaaaactta

SEQ ID NO: 351519 - DNA, 12 bp, Artificial Sequence
  Oligonucleotide primer for the detection of SNP TSC0047361
gatagttagtag

SEQ ID NO: 351520 - DNA, 12 bp, Artificial Sequence
  Oligonucleotide primer for the detection of SNP TSC0047361
atagagagttta

SEQ ID NO: 351521 - DNA, 12 bp, Artificial Sequence
  Oligonucleotide primer for the detection of SNP TSC0047362
tcaaatcacaac

SEQ ID NO: 351522 - DNA, 12 bp, Artificial Sequence
  Oligonucleotide primer for the detection of SNP TSC0047362
ttagtggaagaa

SEQ ID NO: 351523 - DNA, 12 bp, Artificial Sequence
  Oligonucleotide primer for the detection of SNP TSC0047363
accaaaaatcat

SEQ ID NO: 351524 - DNA, 12 bp, Artificial Sequence
  Oligonucleotide primer for the detection of SNP TSC0047363
ttttgaatgtga

SEQ ID NO: 351525 - DNA, 12 bp, Artificial Sequence
  Oligonucleotide primer for the detection of SNP TSC0047364
aaaaaaacaatt

SEQ ID NO: 351526 - DNA, 12 bp, Artificial Sequence
  Oligonucleotide primer for the detection of SNP TSC0047364
atattaatatgg

SEQ ID NO: 351527 - DNA, 12 bp, Artificial Sequence
  Oligonucleotide primer for the detection of SNP TSC0047364
gaaaagataatt

SEQ ID NO: 351528 - DNA, 12 bp, Artificial Sequence
  Oligonucleotide primer for the detection of SNP TSC0047366
atttgaattaat

SEQ ID NO: 351529 - DNA, 12 bp, Artificial Sequence
  Oligonucleotide primer for the detection of SNP TSC0047366
tacttaaatcaa

SEQ ID NO: 351530 - DNA, 12 bp, Artificial Sequence
  Oligonucleotide primer for the detection of SNP TSC0047366
agaggtaagggg

SEQ ID NO: 351531 - DNA, 12 bp, Artificial Sequence
  Oligonucleotide primer for the detection of SNP TSC0047367
taaaaacatatc

SEQ ID NO: 351532 - DNA, 12 bp, Artificial Sequence
  Oligonucleotide primer for the detection of SNP TSC0047367
ataaattattta

SEQ ID NO: 351533 - DNA, 12 bp, Artificial Sequence
  Oligonucleotide primer for the detection of SNP TSC0047368
gatatatttgag

SEQ ID NO: 351534 - DNA, 12 bp, Artificial Sequence
  Oligonucleotide primer for the detection of SNP TSC0047368
gatatattcgag

SEQ ID NO: 351535 - DNA, 12 bp, Artificial Sequence
  Oligonucleotide primer for the detection of SNP TSC0047368
acatatccaaaa

SEQ ID NO: 351536 - DNA, 12 bp, Artificial Sequence
  Oligonucleotide primer for the detection of SNP TSC0047368
acatatccgaaa

SEQ ID NO: 351537 - DNA, 12 bp, Artificial Sequence
  Oligonucleotide primer for the detection of SNP TSC0000480
ttcatattcatt

SEQ ID NO: 351538 - DNA, 12 bp, Artificial Sequence
  Oligonucleotide primer for the detection of SNP TSC0000480
agaggagttgtg

SEQ ID NO: 351539 - DNA, 12 bp, Artificial Sequence
  Oligonucleotide primer for the detection of SNP TSC0047369
gtgtgtatgtgt

SEQ ID NO: 351540 - DNA, 12 bp, Artificial Sequence
  Oligonucleotide primer for the detection of SNP TSC0047369
gcgtgtatgtgt

SEQ ID NO: 351541 - DNA, 12 bp, Artificial Sequence
  Oligonucleotide primer for the detection of SNP TSC0047369
acatacatatat

SEQ ID NO: 351542 - DNA, 12 bp, Artificial Sequence
  Oligonucleotide primer for the detection of SNP TSC0047369
acgtacatatat

SEQ ID NO: 351543 - DNA, 12 bp, Artificial Sequence
  Oligonucleotide primer for the detection of SNP TSC0047370
acactcacacac

SEQ ID NO: 351544 - DNA, 12 bp, Artificial Sequence
  Oligonucleotide primer for the detection of SNP TSC0047370
gtatttatatat

SEQ ID NO: 351545 - DNA, 12 bp, Artificial Sequence
  Oligonucleotide primer for the detection of SNP TSC0000138
aatactccttac

SEQ ID NO: 351546 - DNA, 12 bp, Artificial Sequence
  Oligonucleotide primer for the detection of SNP TSC0000138
tttaggagatag

SEQ ID NO: 351547 - DNA, 12 bp, Artificial Sequence
  Oligonucleotide primer for the detection of SNP TSC0047371
tcatacattaaa

SEQ ID NO: 351548 - DNA, 12 bp, Artificial Sequence
  Oligonucleotide primer for the detection of SNP TSC0047371
agtggatttttt

SEQ ID NO: 351549 - DNA, 12 bp, Artificial Sequence
  Oligonucleotide primer for the detection of SNP TSC0047371
ataaacttttta

SEQ ID NO: 351550 - DNA, 12 bp, Artificial Sequence
  Oligonucleotide primer for the detection of SNP TSC0047372
aaataaactctc

SEQ ID NO: 351551 - DNA, 12 bp, Artificial Sequence
  Oligonucleotide primer for the detection of SNP TSC0047372
tataggttatat

SEQ ID NO: 351552 - DNA, 12 bp, Artificial Sequence
  Oligonucleotide primer for the detection of SNP TSC0047372
tataaactatat

SEQ ID NO: 351553 - DNA, 12 bp, Artificial Sequence
  Oligonucleotide primer for the detection of SNP TSC0047372
aaataaattttt

SEQ ID NO: 351554 - DNA, 12 bp, Artificial Sequence
  Oligonucleotide primer for the detection of SNP TSC0047373
ttagatatttta

SEQ ID NO: 351555 - DNA, 12 bp, Artificial Sequence
  Oligonucleotide primer for the detection of SNP TSC0047373
ctaaacatttta

SEQ ID NO: 351556 - DNA, 12 bp, Artificial Sequence
  Oligonucleotide primer for the detection of SNP TSC0047373
tagagatattat

SEQ ID NO: 351557 - DNA, 12 bp, Artificial Sequence
  Oligonucleotide primer for the detection of SNP TSC0047374
tattttttccca

SEQ ID NO: 351558 - DNA, 12 bp, Artificial Sequence
  Oligonucleotide primer for the detection of SNP TSC0047375
tcaacttttttc

SEQ ID NO: 351559 - DNA, 12 bp, Artificial Sequence
  Oligonucleotide primer for the detection of SNP TSC0047376
acctccttccat

SEQ ID NO: 351560 - DNA, 12 bp, Artificial Sequence
  Oligonucleotide primer for the detection of SNP TSC0047376
gttaaatagtag

SEQ ID NO: 351561 - DNA, 12 bp, Artificial Sequence
  Oligonucleotide primer for the detection of SNP TSC0047377
attttaaataac

SEQ ID NO: 351562 - DNA, 12 bp, Artificial Sequence
  Oligonucleotide primer for the detection of SNP TSC0047378
aatattacattt

SEQ ID NO: 351563 - DNA, 12 bp, Artificial Sequence
  Oligonucleotide primer for the detection of SNP TSC0047378
aaaagtatatga

SEQ ID NO: 351564 - DNA, 12 bp, Artificial Sequence
  Oligonucleotide primer for the detection of SNP TSC0047379
cctttataaact

SEQ ID NO: 351565 - DNA, 12 bp, Artificial Sequence
  Oligonucleotide primer for the detection of SNP TSC0047379
gtattgtaagag

SEQ ID NO: 351566 - DNA, 12 bp, Artificial Sequence
  Oligonucleotide primer for the detection of SNP TSC0009836
atagaaattata

SEQ ID NO: 351567 - DNA, 12 bp, Artificial Sequence
  Oligonucleotide primer for the detection of SNP TSC0009837
actactaaaaat

SEQ ID NO: 351568 - DNA, 12 bp, Artificial Sequence
  Oligonucleotide primer for the detection of SNP TSC0009837
tagggtattttg

SEQ ID NO: 351569 - DNA, 12 bp, Artificial Sequence
  Oligonucleotide primer for the detection of SNP TSC0009837
tagggtatttcg

SEQ ID NO: 351570 - DNA, 12 bp, Artificial Sequence
  Oligonucleotide primer for the detection of SNP TSC0009837
caaaacacccca

SEQ ID NO: 351571 - DNA, 12 bp, Artificial Sequence
  Oligonucleotide primer for the detection of SNP TSC0009837
caaaacaccccg

SEQ ID NO: 351572 - DNA, 12 bp, Artificial Sequence
  Oligonucleotide primer for the detection of SNP TSC0009837
attgttgggaat

SEQ ID NO: 351573 - DNA, 12 bp, Artificial Sequence
  Oligonucleotide primer for the detection of SNP TSC0047380
tttattaaaaaa

SEQ ID NO: 351574 - DNA, 12 bp, Artificial Sequence
  Oligonucleotide primer for the detection of SNP TSC0047380
aatttgtaagtt

SEQ ID NO: 351575 - DNA, 12 bp, Artificial Sequence
  Oligonucleotide primer for the detection of SNP TSC0047380
aaatctataaac

SEQ ID NO: 351576 - DNA, 12 bp, Artificial Sequence
  Oligonucleotide primer for the detection of SNP TSC0047381
attatttccacc

SEQ ID NO: 351577 - DNA, 12 bp, Artificial Sequence
  Oligonucleotide primer for the detection of SNP TSC0047381
aaataattgttg

SEQ ID NO: 351578 - DNA, 12 bp, Artificial Sequence
  Oligonucleotide primer for the detection of SNP TSC0047381
aaataattgtcg

SEQ ID NO: 351579 - DNA, 12 bp, Artificial Sequence
  Oligonucleotide primer for the detection of SNP TSC0005317
aatcctccccac

SEQ ID NO: 351580 - DNA, 12 bp, Artificial Sequence
  Oligonucleotide primer for the detection of SNP TSC0005317
aatcctccccgc

SEQ ID NO: 351581 - DNA, 12 bp, Artificial Sequence
  Oligonucleotide primer for the detection of SNP TSC0005317
aagataaaatgt

SEQ ID NO: 351582 - DNA, 12 bp, Artificial Sequence
  Oligonucleotide primer for the detection of SNP TSC0005317
aagataaaacgt

SEQ ID NO: 351583 - DNA, 12 bp, Artificial Sequence
  Oligonucleotide primer for the detection of SNP TSC0005317
taaaataaaacg

SEQ ID NO: 351584 - DNA, 12 bp, Artificial Sequence
  Oligonucleotide primer for the detection of SNP TSC0005317
atttttttcgtt

SEQ ID NO: 351585 - DNA, 12 bp, Artificial Sequence
  Oligonucleotide primer for the detection of SNP TSC0005318
aaccctacccta

SEQ ID NO: 351586 - DNA, 12 bp, Artificial Sequence
  Oligonucleotide primer for the detection of SNP TSC0005318
ttatggttaagg

SEQ ID NO: 351587 - DNA, 12 bp, Artificial Sequence
  Oligonucleotide primer for the detection of SNP TSC0047382
gttatttttagt

SEQ ID NO: 351588 - DNA, 12 bp, Artificial Sequence
  Oligonucleotide primer for the detection of SNP TSC0047382
aaccatctctaa

SEQ ID NO: 351589 - DNA, 12 bp, Artificial Sequence
  Oligonucleotide primer for the detection of SNP TSC0047382
aatatgggatat

SEQ ID NO: 351590 - DNA, 12 bp, Artificial Sequence
  Oligonucleotide primer for the detection of SNP TSC0047384
aatcaatcatct

SEQ ID NO: 351591 - DNA, 12 bp, Artificial Sequence
  Oligonucleotide primer for the detection of SNP TSC0047384
tagaaaagatta

SEQ ID NO: 351592 - DNA, 12 bp, Artificial Sequence
  Oligonucleotide primer for the detection of SNP TSC0047388
tataaccattaa

SEQ ID NO: 351593 - DNA, 12 bp, Artificial Sequence
  Oligonucleotide primer for the detection of SNP TSC0047388
gatgtagagaaa

SEQ ID NO: 351594 - DNA, 12 bp, Artificial Sequence
  Oligonucleotide primer for the detection of SNP TSC0047389
aatccttaaact

SEQ ID NO: 351595 - DNA, 12 bp, Artificial Sequence
  Oligonucleotide primer for the detection of SNP TSC0047389
gtattgttgatg

SEQ ID NO: 351596 - DNA, 12 bp, Artificial Sequence
  Oligonucleotide primer for the detection of SNP TSC0047390
gataattttaaa

SEQ ID NO: 351597 - DNA, 12 bp, Artificial Sequence
  Oligonucleotide primer for the detection of SNP TSC0047390
aataactctaaa

SEQ ID NO: 351598 - DNA, 12 bp, Artificial Sequence
  Oligonucleotide primer for the detection of SNP TSC0047390
tttaaatattta

SEQ ID NO: 351599 - DNA, 12 bp, Artificial Sequence
  Oligonucleotide primer for the detection of SNP TSC0047395
aacaaaatacaa

SEQ ID NO: 351600 - DNA, 12 bp, Artificial Sequence
  Oligonucleotide primer for the detection of SNP TSC0047395
aacaaaatacga

SEQ ID NO: 351601 - DNA, 12 bp, Artificial Sequence
  Oligonucleotide primer for the detection of SNP TSC0047395
atagagtgtgat

SEQ ID NO: 351602 - DNA, 12 bp, Artificial Sequence
  Oligonucleotide primer for the detection of SNP TSC0047395
atagagtgcgat

SEQ ID NO: 351603 - DNA, 12 bp, Artificial Sequence
  Oligonucleotide primer for the detection of SNP TSC0047396
gtaattatagta

SEQ ID NO: 351604 - DNA, 12 bp, Artificial Sequence
  Oligonucleotide primer for the detection of SNP TSC0000168
atttttggatga

SEQ ID NO: 351605 - DNA, 12 bp, Artificial Sequence
  Oligonucleotide primer for the detection of SNP TSC0000168
tctttaaataaa

SEQ ID NO: 351606 - DNA, 12 bp, Artificial Sequence
  Oligonucleotide primer for the detection of SNP TSC0000168
tatttaaagtaa

SEQ ID NO: 351607 - DNA, 12 bp, Artificial Sequence
  Oligonucleotide primer for the detection of SNP TSC0047406
tactaacctatc

SEQ ID NO: 351608 - DNA, 12 bp, Artificial Sequence
  Oligonucleotide primer for the detection of SNP TSC0047406
agtatgggttgg

SEQ ID NO: 351609 - DNA, 12 bp, Artificial Sequence
  Oligonucleotide primer for the detection of SNP TSC0047406
aacataaactaa

SEQ ID NO: 351610 - DNA, 12 bp, Artificial Sequence
  Oligonucleotide primer for the detection of SNP TSC0047407
aacattcactca

SEQ ID NO: 351611 - DNA, 12 bp, Artificial Sequence
  Oligonucleotide primer for the detection of SNP TSC0047407
gtaaggtagagt

SEQ ID NO: 351612 - DNA, 12 bp, Artificial Sequence
  Oligonucleotide primer for the detection of SNP TSC0047409
ataaatatatcc

SEQ ID NO: 351613 - DNA, 12 bp, Artificial Sequence
  Oligonucleotide primer for the detection of SNP TSC0047409
taagtgaggatg

SEQ ID NO: 351614 - DNA, 12 bp, Artificial Sequence
  Oligonucleotide primer for the detection of SNP TSC0047410
cgtacacacaca

SEQ ID NO: 351615 - DNA, 12 bp, Artificial Sequence
  Oligonucleotide primer for the detection of SNP TSC0047410
cgtacacacacg

SEQ ID NO: 351616 - DNA, 12 bp, Artificial Sequence
  Oligonucleotide primer for the detection of SNP TSC0047410
cgtacacacgca

SEQ ID NO: 351617 - DNA, 12 bp, Artificial Sequence
  Oligonucleotide primer for the detection of SNP TSC0047410
cgtacacgcaca

SEQ ID NO: 351618 - DNA, 12 bp, Artificial Sequence
  Oligonucleotide primer for the detection of SNP TSC0047410
cgtacgcacaca

SEQ ID NO: 351619 - DNA, 12 bp, Artificial Sequence
  Oligonucleotide primer for the detection of SNP TSC0047410
cgtacacacgcg

SEQ ID NO: 351620 - DNA, 12 bp, Artificial Sequence
  Oligonucleotide primer for the detection of SNP TSC0047410
cgtacacgcacg

SEQ ID NO: 351621 - DNA, 12 bp, Artificial Sequence
  Oligonucleotide primer for the detection of SNP TSC0047410
cgtacgcacacg

SEQ ID NO: 351622 - DNA, 12 bp, Artificial Sequence
  Oligonucleotide primer for the detection of SNP TSC0047410
cgtacacgcgca

SEQ ID NO: 351623 - DNA, 12 bp, Artificial Sequence
  Oligonucleotide primer for the detection of SNP TSC0047410
cgtacgcacgca

SEQ ID NO: 351624 - DNA, 12 bp, Artificial Sequence
  Oligonucleotide primer for the detection of SNP TSC0047410
cgtacgcgcaca

SEQ ID NO: 351625 - DNA, 12 bp, Artificial Sequence
  Oligonucleotide primer for the detection of SNP TSC0047410
cgtacacgcgcg

SEQ ID NO: 351626 - DNA, 12 bp, Artificial Sequence
  Oligonucleotide primer for the detection of SNP TSC0047410
cgtacgcacgcg

SEQ ID NO: 351627 - DNA, 12 bp, Artificial Sequence
  Oligonucleotide primer for the detection of SNP TSC0047410
cgtacgcgcacg

SEQ ID NO: 351628 - DNA, 12 bp, Artificial Sequence
  Oligonucleotide primer for the detection of SNP TSC0047410
cgtacgcgcgca

SEQ ID NO: 351629 - DNA, 12 bp, Artificial Sequence
  Oligonucleotide primer for the detection of SNP TSC0047410
cgtacgcgcgcg

SEQ ID NO: 351630 - DNA, 12 bp, Artificial Sequence
  Oligonucleotide primer for the detection of SNP TSC0047411
catatactatac

SEQ ID NO: 351631 - DNA, 12 bp, Artificial Sequence
  Oligonucleotide primer for the detection of SNP TSC0047411
tgaatatattta

SEQ ID NO: 351632 - DNA, 12 bp, Artificial Sequence
  Oligonucleotide primer for the detection of SNP TSC0047411
taaatacattta

SEQ ID NO: 351633 - DNA, 12 bp, Artificial Sequence
  Oligonucleotide primer for the detection of SNP TSC0047411
tatatgttatgt

SEQ ID NO: 351634 - DNA, 12 bp, Artificial Sequence
  Oligonucleotide primer for the detection of SNP TSC0047412
ctcattcacctt

SEQ ID NO: 351635 - DNA, 12 bp, Artificial Sequence
  Oligonucleotide primer for the detection of SNP TSC0047412
attattatggtg

SEQ ID NO: 351636 - DNA, 12 bp, Artificial Sequence
  Oligonucleotide primer for the detection of SNP TSC0047414
ttaatttttata

SEQ ID NO: 351637 - DNA, 12 bp, Artificial Sequence
  Oligonucleotide primer for the detection of SNP TSC0047415
attttatatcta

SEQ ID NO: 351638 - DNA, 12 bp, Artificial Sequence
  Oligonucleotide primer for the detection of SNP TSC0047415
atttagtgatgt

SEQ ID NO: 351639 - DNA, 12 bp, Artificial Sequence
  Oligonucleotide primer for the detection of SNP TSC0047415
atttagtgacgt

SEQ ID NO: 351640 - DNA, 12 bp, Artificial Sequence
  Oligonucleotide primer for the detection of SNP TSC0047415
actcaataacat

SEQ ID NO: 351641 - DNA, 12 bp, Artificial Sequence
  Oligonucleotide primer for the detection of SNP TSC0047415
actcaataacgt

SEQ ID NO: 351642 - DNA, 12 bp, Artificial Sequence
  Oligonucleotide primer for the detection of SNP TSC0047415
attttgtatttg

SEQ ID NO: 351643 - DNA, 12 bp, Artificial Sequence
  Oligonucleotide primer for the detection of SNP TSC0047422
actctctataat

SEQ ID NO: 351644 - DNA, 12 bp, Artificial Sequence
  Oligonucleotide primer for the detection of SNP TSC0047422
aaagatggttta

SEQ ID NO: 351645 - DNA, 12 bp, Artificial Sequence
  Oligonucleotide primer for the detection of SNP TSC0047423
atatattcatat

SEQ ID NO: 351646 - DNA, 12 bp, Artificial Sequence
  Oligonucleotide primer for the detection of SNP TSC0047423
ggttagttatag

SEQ ID NO: 351647 - DNA, 12 bp, Artificial Sequence
  Oligonucleotide primer for the detection of SNP TSC0047423
aaccaattacaa

SEQ ID NO: 351648 - DNA, 12 bp, Artificial Sequence
  Oligonucleotide primer for the detection of SNP TSC0047423
gtgtgtttatat

SEQ ID NO: 351649 - DNA, 12 bp, Artificial Sequence
  Oligonucleotide primer for the detection of SNP TSC0047424
ataaatcatata

SEQ ID NO: 351650 - DNA, 12 bp, Artificial Sequence
  Oligonucleotide primer for the detection of SNP TSC0047424
ataaatcgtata

SEQ ID NO: 351651 - DNA, 12 bp, Artificial Sequence
  Oligonucleotide primer for the detection of SNP TSC0047424
ggaggttttatg

SEQ ID NO: 351652 - DNA, 12 bp, Artificial Sequence
  Oligonucleotide primer for the detection of SNP TSC0047424
ggaggttttacg

SEQ ID NO: 351653 - DNA, 12 bp, Artificial Sequence
  Oligonucleotide primer for the detection of SNP TSC0005302
attataaataag

SEQ ID NO: 351654 - DNA, 12 bp, Artificial Sequence
  Oligonucleotide primer for the detection of SNP TSC0005303
ctatacttattt

SEQ ID NO: 351655 - DNA, 12 bp, Artificial Sequence
  Oligonucleotide primer for the detection of SNP TSC0047427
atcctttacaca

SEQ ID NO: 351656 - DNA, 12 bp, Artificial Sequence
  Oligonucleotide primer for the detection of SNP TSC0047427
atcctttacacg

SEQ ID NO: 351657 - DNA, 12 bp, Artificial Sequence
  Oligonucleotide primer for the detection of SNP TSC0047427
agttaggggagt

SEQ ID NO: 351658 - DNA, 12 bp, Artificial Sequence
  Oligonucleotide primer for the detection of SNP TSC0047427
attttttatatg

SEQ ID NO: 351659 - DNA, 12 bp, Artificial Sequence
  Oligonucleotide primer for the detection of SNP TSC0047427
attttttatacg

SEQ ID NO: 351660 - DNA, 12 bp, Artificial Sequence
  Oligonucleotide primer for the detection of SNP TSC0047428
acctaaaccttc

SEQ ID NO: 351661 - DNA, 12 bp, Artificial Sequence
  Oligonucleotide primer for the detection of SNP TSC0047428
tagagaaggata

SEQ ID NO: 351662 - DNA, 12 bp, Artificial Sequence
  Oligonucleotide primer for the detection of SNP TSC0047429
tttatttaacct

SEQ ID NO: 351663 - DNA, 12 bp, Artificial Sequence
  Oligonucleotide primer for the detection of SNP TSC0047429
tagaaattgtta

SEQ ID NO: 351664 - DNA, 12 bp, Artificial Sequence
  Oligonucleotide primer for the detection of SNP TSC0047430
atcttataacat

SEQ ID NO: 351665 - DNA, 12 bp, Artificial Sequence
  Oligonucleotide primer for the detection of SNP TSC0047430
agtagatagtaa

SEQ ID NO: 351666 - DNA, 12 bp, Artificial Sequence
  Oligonucleotide primer for the detection of SNP TSC0047430
aacaaacaacaa

SEQ ID NO: 351667 - DNA, 12 bp, Artificial Sequence
  Oligonucleotide primer for the detection of SNP TSC0047430
attttataatat

SEQ ID NO: 351668 - DNA, 12 bp, Artificial Sequence
  Oligonucleotide primer for the detection of SNP TSC0047431
accactacacct

SEQ ID NO: 351669 - DNA, 12 bp, Artificial Sequence
  Oligonucleotide primer for the detection of SNP TSC0047431
gttatttaggta

SEQ ID NO: 351670 - DNA, 12 bp, Artificial Sequence
  Oligonucleotide primer for the detection of SNP TSC0047433
ttatcaaaataa

SEQ ID NO: 351671 - DNA, 12 bp, Artificial Sequence
  Oligonucleotide primer for the detection of SNP TSC0047433
aataatatctca

SEQ ID NO: 351672 - DNA, 12 bp, Artificial Sequence
  Oligonucleotide primer for the detection of SNP TSC0047433
gttagaataatt

SEQ ID NO: 351673 - DNA, 12 bp, Artificial Sequence
  Oligonucleotide primer for the detection of SNP TSC0047435
ttaaatttgaat

SEQ ID NO: 351674 - DNA, 12 bp, Artificial Sequence
  Oligonucleotide primer for the detection of SNP TSC0047435
tcaaatctaaat

SEQ ID NO: 351675 - DNA, 12 bp, Artificial Sequence
  Oligonucleotide primer for the detection of SNP TSC0047435
aattagatataa

SEQ ID NO: 351676 - DNA, 12 bp, Artificial Sequence
  Oligonucleotide primer for the detection of SNP TSC0047436
taaaatcatatt

SEQ ID NO: 351677 - DNA, 12 bp, Artificial Sequence
  Oligonucleotide primer for the detection of SNP TSC0047436
tgtagaagagga

SEQ ID NO: 351678 - DNA, 12 bp, Artificial Sequence
  Oligonucleotide primer for the detection of SNP TSC0047437
atcatttaaaac

SEQ ID NO: 351679 - DNA, 12 bp, Artificial Sequence
  Oligonucleotide primer for the detection of SNP TSC0047437
tatggtaatagt

SEQ ID NO: 351680 - DNA, 12 bp, Artificial Sequence
  Oligonucleotide primer for the detection of SNP TSC0047438
ggatgtattagg

SEQ ID NO: 351681 - DNA, 12 bp, Artificial Sequence
  Oligonucleotide primer for the detection of SNP TSC0047439
aagattaatatt

SEQ ID NO: 351682 - DNA, 12 bp, Artificial Sequence
  Oligonucleotide primer for the detection of SNP TSC0047439
gtgggaaatgga

SEQ ID NO: 351683 - DNA, 12 bp, Artificial Sequence
  Oligonucleotide primer for the detection of SNP TSC0047440
taaaacctaata

SEQ ID NO: 351684 - DNA, 12 bp, Artificial Sequence
  Oligonucleotide primer for the detection of SNP TSC0047440
tttcaaaataaa

SEQ ID NO: 351685 - DNA, 12 bp, Artificial Sequence
  Oligonucleotide primer for the detection of SNP TSC0047440
agggtttggtat

SEQ ID NO: 351686 - DNA, 12 bp, Artificial Sequence
  Oligonucleotide primer for the detection of SNP TSC0047441
aaccaaatcctt

SEQ ID NO: 351687 - DNA, 12 bp, Artificial Sequence
  Oligonucleotide primer for the detection of SNP TSC0047441
ttttcgggaagt

SEQ ID NO: 351688 - DNA, 12 bp, Artificial Sequence
  Oligonucleotide primer for the detection of SNP TSC0047441
cctccgaaaaat

SEQ ID NO: 351689 - DNA, 12 bp, Artificial Sequence
  Oligonucleotide primer for the detection of SNP TSC0047441
agttaggttttt

SEQ ID NO: 351690 - DNA, 12 bp, Artificial Sequence
  Oligonucleotide primer for the detection of SNP TSC0047442
gtattaaggtat

SEQ ID NO: 351691 - DNA, 12 bp, Artificial Sequence
  Oligonucleotide primer for the detection of SNP TSC0047442
caccaaaacata

SEQ ID NO: 351692 - DNA, 12 bp, Artificial Sequence
  Oligonucleotide primer for the detection of SNP TSC0047442
aaggtaggtagt

SEQ ID NO: 351693 - DNA, 12 bp, Artificial Sequence
  Oligonucleotide primer for the detection of SNP TSC0000191
tataattaaatc

SEQ ID NO: 351694 - DNA, 12 bp, Artificial Sequence
  Oligonucleotide primer for the detection of SNP TSC0000191
ggggaaatttag

SEQ ID NO: 351695 - DNA, 12 bp, Artificial Sequence
  Oligonucleotide primer for the detection of SNP TSC0000191
tgtgattggatt

SEQ ID NO: 351696 - DNA, 12 bp, Artificial Sequence
  Oligonucleotide primer for the detection of SNP TSC0005222
agaaagtataat

SEQ ID NO: 351697 - DNA, 12 bp, Artificial Sequence
  Oligonucleotide primer for the detection of SNP TSC0005222
tgaaagtagata

SEQ ID NO: 351698 - DNA, 12 bp, Artificial Sequence
  Oligonucleotide primer for the detection of SNP TSC0005223
tcaaacaatcct

SEQ ID NO: 351699 - DNA, 12 bp, Artificial Sequence
  Oligonucleotide primer for the detection of SNP TSC0005223
tcaaacgatcct

SEQ ID NO: 351700 - DNA, 12 bp, Artificial Sequence
  Oligonucleotide primer for the detection of SNP TSC0005224
atatagtaagat

SEQ ID NO: 351701 - DNA, 12 bp, Artificial Sequence
  Oligonucleotide primer for the detection of SNP TSC0005224
gttttaagatgg

SEQ ID NO: 351702 - DNA, 12 bp, Artificial Sequence
  Oligonucleotide primer for the detection of SNP TSC0005225
aggtttggggag

SEQ ID NO: 351703 - DNA, 12 bp, Artificial Sequence
  Oligonucleotide primer for the detection of SNP TSC0047444
atactttctata

SEQ ID NO: 351704 - DNA, 12 bp, Artificial Sequence
  Oligonucleotide primer for the detection of SNP TSC0047444
agttggattttt

SEQ ID NO: 351705 - DNA, 12 bp, Artificial Sequence
  Oligonucleotide primer for the detection of SNP TSC0047444
aactaaatcttt

SEQ ID NO: 351706 - DNA, 12 bp, Artificial Sequence
  Oligonucleotide primer for the detection of SNP TSC0047444
atattttttgta

SEQ ID NO: 351707 - DNA, 12 bp, Artificial Sequence
  Oligonucleotide primer for the detection of SNP TSC0047445
atattgaatttg

SEQ ID NO: 351708 - DNA, 12 bp, Artificial Sequence
  Oligonucleotide primer for the detection of SNP TSC0047446
ttttaatatcca

SEQ ID NO: 351709 - DNA, 12 bp, Artificial Sequence
  Oligonucleotide primer for the detection of SNP TSC0047446
ttttaaggatat

SEQ ID NO: 351710 - DNA, 12 bp, Artificial Sequence
  Oligonucleotide primer for the detection of SNP TSC0047446
ccccaaaaacac

SEQ ID NO: 351711 - DNA, 12 bp, Artificial Sequence
  Oligonucleotide primer for the detection of SNP TSC0047447
atttaaaataca

SEQ ID NO: 351712 - DNA, 12 bp, Artificial Sequence
  Oligonucleotide primer for the detection of SNP TSC0047447
tacacatcctcc

SEQ ID NO: 351713 - DNA, 12 bp, Artificial Sequence
  Oligonucleotide primer for the detection of SNP TSC0047447
atttaaagtata

SEQ ID NO: 351714 - DNA, 12 bp, Artificial Sequence
  Oligonucleotide primer for the detection of SNP TSC0047448
aaaaaccaaatc

SEQ ID NO: 351715 - DNA, 12 bp, Artificial Sequence
  Oligonucleotide primer for the detection of SNP TSC0047451
acaaccaaaaac

SEQ ID NO: 351716 - DNA, 12 bp, Artificial Sequence
  Oligonucleotide primer for the detection of SNP TSC0047451
gggtaggtaatt

SEQ ID NO: 351717 - DNA, 12 bp, Artificial Sequence
  Oligonucleotide primer for the detection of SNP TSC0007287
tccacttcctca

SEQ ID NO: 351718 - DNA, 12 bp, Artificial Sequence
  Oligonucleotide primer for the detection of SNP TSC0007287
tccgcttcctca

SEQ ID NO: 351719 - DNA, 12 bp, Artificial Sequence
  Oligonucleotide primer for the detection of SNP TSC0007287
agaaaaatttaa

SEQ ID NO: 351720 - DNA, 12 bp, Artificial Sequence
  Oligonucleotide primer for the detection of SNP TSC0047454
tatattattgta

SEQ ID NO: 351721 - DNA, 12 bp, Artificial Sequence
  Oligonucleotide primer for the detection of SNP TSC0047454
cacaccattaca

SEQ ID NO: 351722 - DNA, 12 bp, Artificial Sequence
  Oligonucleotide primer for the detection of SNP TSC0047454
tgttatttaggt

SEQ ID NO: 351723 - DNA, 12 bp, Artificial Sequence
  Oligonucleotide primer for the detection of SNP TSC0005402
attaattaataa

SEQ ID NO: 351724 - DNA, 12 bp, Artificial Sequence
  Oligonucleotide primer for the detection of SNP TSC0005402
ttagttttaaaa

SEQ ID NO: 351725 - DNA, 12 bp, Artificial Sequence
  Oligonucleotide primer for the detection of SNP TSC0005402
tcaattctaaaa

SEQ ID NO: 351726 - DNA, 12 bp, Artificial Sequence
  Oligonucleotide primer for the detection of SNP TSC0005402
attgattggtgg

SEQ ID NO: 351727 - DNA, 12 bp, Artificial Sequence
  Oligonucleotide primer for the detection of SNP TSC0047456
ccacaaaaccat

SEQ ID NO: 351728 - DNA, 12 bp, Artificial Sequence
  Oligonucleotide primer for the detection of SNP TSC0047456
ttgttttttatg

SEQ ID NO: 351729 - DNA, 12 bp, Artificial Sequence
  Oligonucleotide primer for the detection of SNP TSC0047456
ttgttttttacg

SEQ ID NO: 351730 - DNA, 12 bp, Artificial Sequence
  Oligonucleotide primer for the detection of SNP TSC0010840
aaaaccgaaaca

SEQ ID NO: 351731 - DNA, 12 bp, Artificial Sequence
  Oligonucleotide primer for the detection of SNP TSC0010840
cttataatccac

SEQ ID NO: 351732 - DNA, 12 bp, Artificial Sequence
  Oligonucleotide primer for the detection of SNP TSC0010840
ggagattgaggt

SEQ ID NO: 351733 - DNA, 12 bp, Artificial Sequence
  Oligonucleotide primer for the detection of SNP TSC0010840
ggagatcgaggt

SEQ ID NO: 351734 - DNA, 12 bp, Artificial Sequence
  Oligonucleotide primer for the detection of SNP TSC0010841
aaatatttaata

SEQ ID NO: 351735 - DNA, 12 bp, Artificial Sequence
  Oligonucleotide primer for the detection of SNP TSC0010841
tggaattttttt

SEQ ID NO: 351736 - DNA, 12 bp, Artificial Sequence
  Oligonucleotide primer for the detection of SNP TSC0010841
ttaaaatcctcc

SEQ ID NO: 351737 - DNA, 12 bp, Artificial Sequence
  Oligonucleotide primer for the detection of SNP TSC0010841
aagtatttggtg

SEQ ID NO: 351738 - DNA, 12 bp, Artificial Sequence
  Oligonucleotide primer for the detection of SNP TSC0010842
tttagagatatt

SEQ ID NO: 351739 - DNA, 12 bp, Artificial Sequence
  Oligonucleotide primer for the detection of SNP TSC0010842
tttagagatatc

SEQ ID NO: 351740 - DNA, 12 bp, Artificial Sequence
  Oligonucleotide primer for the detection of SNP TSC0010842
gagataaattag

SEQ ID NO: 351741 - DNA, 12 bp, Artificial Sequence
  Oligonucleotide primer for the detection of SNP TSC0047457
ttactaatatat

SEQ ID NO: 351742 - DNA, 12 bp, Artificial Sequence
  Oligonucleotide primer for the detection of SNP TSC0047457
taaatggatagg

SEQ ID NO: 351743 - DNA, 12 bp, Artificial Sequence
  Oligonucleotide primer for the detection of SNP TSC0047458
taaacctcatct

SEQ ID NO: 351744 - DNA, 12 bp, Artificial Sequence
  Oligonucleotide primer for the detection of SNP TSC0047458
tatgattgggta

SEQ ID NO: 351745 - DNA, 12 bp, Artificial Sequence
  Oligonucleotide primer for the detection of SNP TSC0004802
tttaatatccat

SEQ ID NO: 351746 - DNA, 12 bp, Artificial Sequence
  Oligonucleotide primer for the detection of SNP TSC0004802
aagatttaaaag

SEQ ID NO: 351747 - DNA, 12 bp, Artificial Sequence
  Oligonucleotide primer for the detection of SNP TSC0047466
taaattataaat

SEQ ID NO: 351748 - DNA, 12 bp, Artificial Sequence
  Oligonucleotide primer for the detection of SNP TSC0047466
ataaatcataaa

SEQ ID NO: 351749 - DNA, 12 bp, Artificial Sequence
  Oligonucleotide primer for the detection of SNP TSC0047466
tgggtattaagt

SEQ ID NO: 351750 - DNA, 12 bp, Artificial Sequence
  Oligonucleotide primer for the detection of SNP TSC0047469
cttctaataata

SEQ ID NO: 351751 - DNA, 12 bp, Artificial Sequence
  Oligonucleotide primer for the detection of SNP TSC0047470
acactcaaatac

SEQ ID NO: 351752 - DNA, 12 bp, Artificial Sequence
  Oligonucleotide primer for the detection of SNP TSC0047471
atctacaaaact

SEQ ID NO: 351753 - DNA, 12 bp, Artificial Sequence
  Oligonucleotide primer for the detection of SNP TSC0009387
acttaaataact

SEQ ID NO: 351754 - DNA, 12 bp, Artificial Sequence
  Oligonucleotide primer for the detection of SNP TSC0047473
ttataggttttg

SEQ ID NO: 351755 - DNA, 12 bp, Artificial Sequence
  Oligonucleotide primer for the detection of SNP TSC0047474
ttcttcatcata

SEQ ID NO: 351756 - DNA, 12 bp, Artificial Sequence
  Oligonucleotide primer for the detection of SNP TSC0047474
ggtatgttattt

SEQ ID NO: 351757 - DNA, 12 bp, Artificial Sequence
  Oligonucleotide primer for the detection of SNP TSC0047474
ggtacgttattt

SEQ ID NO: 351758 - DNA, 12 bp, Artificial Sequence
  Oligonucleotide primer for the detection of SNP TSC0047474
aacacactacct

SEQ ID NO: 351759 - DNA, 12 bp, Artificial Sequence
  Oligonucleotide primer for the detection of SNP TSC0047474
aacacgctacct

SEQ ID NO: 351760 - DNA, 12 bp, Artificial Sequence
  Oligonucleotide primer for the detection of SNP TSC0047476
ttataaaccaac

SEQ ID NO: 351761 - DNA, 12 bp, Artificial Sequence
  Oligonucleotide primer for the detection of SNP TSC0047476
tggaatagatat

SEQ ID NO: 351762 - DNA, 12 bp, Artificial Sequence
  Oligonucleotide primer for the detection of SNP TSC0047476
gtaagttaattt

SEQ ID NO: 351763 - DNA, 12 bp, Artificial Sequence
  Oligonucleotide primer for the detection of SNP TSC0047477
aacaattatatc

SEQ ID NO: 351764 - DNA, 12 bp, Artificial Sequence
  Oligonucleotide primer for the detection of SNP TSC0047477
tttatgatatta

SEQ ID NO: 351765 - DNA, 12 bp, Artificial Sequence
  Oligonucleotide primer for the detection of SNP TSC0047477
tttataacacca

SEQ ID NO: 351766 - DNA, 12 bp, Artificial Sequence
  Oligonucleotide primer for the detection of SNP TSC0047477
agtaattgtgtt

SEQ ID NO: 351767 - DNA, 12 bp, Artificial Sequence
  Oligonucleotide primer for the detection of SNP TSC0047477
agtaattgtgtc

SEQ ID NO: 351768 - DNA, 12 bp, Artificial Sequence
  Oligonucleotide primer for the detection of SNP TSC0047478
taactatttttt

SEQ ID NO: 351769 - DNA, 12 bp, Artificial Sequence
  Oligonucleotide primer for the detection of SNP TSC0047478
attgaagagaag

SEQ ID NO: 351770 - DNA, 12 bp, Artificial Sequence
  Oligonucleotide primer for the detection of SNP TSC0047480
ctatactcctaa

SEQ ID NO: 351771 - DNA, 12 bp, Artificial Sequence
  Oligonucleotide primer for the detection of SNP TSC0047480
ggaaagtatagt

SEQ ID NO: 351772 - DNA, 12 bp, Artificial Sequence
  Oligonucleotide primer for the detection of SNP TSC0047480
aaaaacacaata

SEQ ID NO: 351773 - DNA, 12 bp, Artificial Sequence
  Oligonucleotide primer for the detection of SNP TSC0047480
ttgtgtttttaa

SEQ ID NO: 351774 - DNA, 12 bp, Artificial Sequence
  Oligonucleotide primer for the detection of SNP TSC0047481
catttaactaaa

SEQ ID NO: 351775 - DNA, 12 bp, Artificial Sequence
  Oligonukleotid-Primer
aaaatattggag

SEQ ID NO: 351776 - DNA, 12 bp, Artificial Sequence
  Oligonucleotide primer for the detection of SNP TSC0047481
atatttaattga

SEQ ID NO: 351777 - DNA, 12 bp, Artificial Sequence
  Oligonucleotide primer for the detection of SNP TSC0008888
acctctttcttt

SEQ ID NO: 351778 - DNA, 12 bp, Artificial Sequence
  Oligonucleotide primer for the detection of SNP TSC0008888
ctaaacaattta

SEQ ID NO: 351779 - DNA, 12 bp, Artificial Sequence
  Oligonukleotid-Primer
attctattcaac

SEQ ID NO: 351780 - DNA, 12 bp, Artificial Sequence
  Oligonucleotide primer for the detection of SNP TSC0047482
aatatttaggaa

SEQ ID NO: 351781 - DNA, 12 bp, Artificial Sequence
  Oligonucleotide primer for the detection of SNP TSC0047483
aaaaacccatta

SEQ ID NO: 351782 - DNA, 12 bp, Artificial Sequence
  Oligonucleotide primer for the detection of SNP TSC0047483
atccaatcaatt

SEQ ID NO: 351783 - DNA, 12 bp, Artificial Sequence
  Oligonucleotide primer for the detection of SNP TSC0047483
ggaagtttatta

SEQ ID NO: 351784 - DNA, 12 bp, Artificial Sequence
  Oligonucleotide primer for the detection of SNP TSC0047484
ggtagagtagtt

SEQ ID NO: 351785 - DNA, 12 bp, Artificial Sequence
  Oligonucleotide primer for the detection of SNP TSC0047484
ggaaagtttaaa

SEQ ID NO: 351786 - DNA, 12 bp, Artificial Sequence
  Oligonucleotide primer for the detection of SNP TSC0047488
caaatacaacct

SEQ ID NO: 351787 - DNA, 12 bp, Artificial Sequence
  Oligonucleotide primer for the detection of SNP TSC0047488
ttatttggtttg

SEQ ID NO: 351788 - DNA, 12 bp, Artificial Sequence
  Oligonucleotide primer for the detection of SNP TSC0047488
ttattcggtttg

SEQ ID NO: 351789 - DNA, 12 bp, Artificial Sequence
  Oligonucleotide primer for the detection of SNP TSC0047491
ttttttagatta

SEQ ID NO: 351790 - DNA, 12 bp, Artificial Sequence
  Oligonucleotide primer for the detection of SNP TSC0047492
ccccaaaattct

SEQ ID NO: 351791 - DNA, 12 bp, Artificial Sequence
  Oligonucleotide primer for the detection of SNP TSC0047492
ataagattttgg

SEQ ID NO: 351792 - DNA, 12 bp, Artificial Sequence
  Oligonucleotide primer for the detection of SNP TSC0047492
ttttagagtttt

SEQ ID NO: 351793 - DNA, 12 bp, Artificial Sequence
  Oligonucleotide primer for the detection of SNP TSC0047493
tactatatcttt

SEQ ID NO: 351794 - DNA, 12 bp, Artificial Sequence
  Oligonucleotide primer for the detection of SNP TSC0047493
taatggagaaga

SEQ ID NO: 351795 - DNA, 12 bp, Artificial Sequence
  Oligonucleotide primer for the detection of SNP TSC0047496
atcataaaacac

SEQ ID NO: 351796 - DNA, 12 bp, Artificial Sequence
  Oligonucleotide primer for the detection of SNP TSC0047496
gtcataaaacac

SEQ ID NO: 351797 - DNA, 12 bp, Artificial Sequence
  Oligonucleotide primer for the detection of SNP TSC0047496
ttattgtttttg

SEQ ID NO: 351798 - DNA, 12 bp, Artificial Sequence
  Oligonucleotide primer for the detection of SNP TSC0047496
ttattgttttcg

SEQ ID NO: 351799 - DNA, 12 bp, Artificial Sequence
  Oligonucleotide primer for the detection of SNP TSC0047497
ttatataaatta

SEQ ID NO: 351800 - DNA, 12 bp, Artificial Sequence
  Oligonucleotide primer for the detection of SNP TSC0047497
aaaaaacttacc

SEQ ID NO: 351801 - DNA, 12 bp, Artificial Sequence
  Oligonucleotide primer for the detection of SNP TSC0047497
ttatgtaaatta

SEQ ID NO: 351802 - DNA, 12 bp, Artificial Sequence
  Oligonucleotide primer for the detection of SNP TSC0047498
agaaaggagggt

SEQ ID NO: 351803 - DNA, 12 bp, Artificial Sequence
  Oligonucleotide primer for the detection of SNP TSC0047498
gtttaagaataa

SEQ ID NO: 351804 - DNA, 12 bp, Artificial Sequence
  Oligonucleotide primer for the detection of SNP TSC0047499
aaatcacaatat

SEQ ID NO: 351805 - DNA, 12 bp, Artificial Sequence
  Oligonucleotide primer for the detection of SNP TSC0047499
ttaagaagttgt

SEQ ID NO: 351806 - DNA, 12 bp, Artificial Sequence
  Oligonucleotide primer for the detection of SNP TSC0047499
ccaaaaaattat

SEQ ID NO: 351807 - DNA, 12 bp, Artificial Sequence
  Oligonucleotide primer for the detection of SNP TSC0047499
gagttataatgt

SEQ ID NO: 351808 - DNA, 12 bp, Artificial Sequence
  Oligonucleotide primer for the detection of SNP TSC0047500
aaatacttttat

SEQ ID NO: 351809 - DNA, 12 bp, Artificial Sequence
  Oligonucleotide primer for the detection of SNP TSC0047500
agtattggttta

SEQ ID NO: 351810 - DNA, 12 bp, Artificial Sequence
  Oligonucleotide primer for the detection of SNP TSC0047502
acaactaaaaat

SEQ ID NO: 351811 - DNA, 12 bp, Artificial Sequence
  Oligonucleotide primer for the detection of SNP TSC0047502
acgactaaaaat

SEQ ID NO: 351812 - DNA, 12 bp, Artificial Sequence
  Oligonucleotide primer for the detection of SNP TSC0047502
gtgttttgttgg

SEQ ID NO: 351813 - DNA, 12 bp, Artificial Sequence
  Oligonucleotide primer for the detection of SNP TSC0047502
gtgttttgtcgg

SEQ ID NO: 351814 - DNA, 12 bp, Artificial Sequence
  Oligonucleotide primer for the detection of SNP TSC0047502
atactctaccaa

SEQ ID NO: 351815 - DNA, 12 bp, Artificial Sequence
  Oligonucleotide primer for the detection of SNP TSC0047502
atactctaccga

SEQ ID NO: 351816 - DNA, 12 bp, Artificial Sequence
  Oligonucleotide primer for the detection of SNP TSC0047502
gtggttgggagt

SEQ ID NO: 351817 - DNA, 12 bp, Artificial Sequence
  Oligonucleotide primer for the detection of SNP TSC0047502
gcggttgggagt

SEQ ID NO: 351818 - DNA, 12 bp, Artificial Sequence
  Oligonucleotide primer for the detection of SNP TSC0047503
taactataatat

SEQ ID NO: 351819 - DNA, 12 bp, Artificial Sequence
  Oligonucleotide primer for the detection of SNP TSC0047503
ttaagaaatagg

SEQ ID NO: 351820 - DNA, 12 bp, Artificial Sequence
  Oligonucleotide primer for the detection of SNP TSC0007774
tggaaattagaa

SEQ ID NO: 351821 - DNA, 12 bp, Artificial Sequence
  Oligonucleotide primer for the detection of SNP TSC0007774
cggaaattagaa

SEQ ID NO: 351822 - DNA, 12 bp, Artificial Sequence
  Oligonucleotide primer for the detection of SNP TSC0007774
gaaaatgagttt

SEQ ID NO: 351823 - DNA, 12 bp, Artificial Sequence
  Oligonucleotide primer for the detection of SNP TSC0047504
actccattctaa

SEQ ID NO: 351824 - DNA, 12 bp, Artificial Sequence
  Oligonucleotide primer for the detection of SNP TSC0047504
actccgttctaa

SEQ ID NO: 351825 - DNA, 12 bp, Artificial Sequence
  Oligonucleotide primer for the detection of SNP TSC0047504
tggggttttaat

SEQ ID NO: 351826 - DNA, 12 bp, Artificial Sequence
  Oligonucleotide primer for the detection of SNP TSC0047504
gttttgttttga

SEQ ID NO: 351827 - DNA, 12 bp, Artificial Sequence
  Oligonucleotide primer for the detection of SNP TSC0047504
gtttcgttttga

SEQ ID NO: 351828 - DNA, 12 bp, Artificial Sequence
  Oligonucleotide primer for the detection of SNP TSC0047507
aaatgaagttat

SEQ ID NO: 351829 - DNA, 12 bp, Artificial Sequence
  Oligonucleotide primer for the detection of SNP TSC0047508
tccaataaacct

SEQ ID NO: 351830 - DNA, 12 bp, Artificial Sequence
  Oligonucleotide primer for the detection of SNP TSC0047508
attattaggaga

SEQ ID NO: 351831 - DNA, 12 bp, Artificial Sequence
  Oligonucleotide primer for the detection of SNP TSC0047508
attatcaaaaaa

SEQ ID NO: 351832 - DNA, 12 bp, Artificial Sequence
  Oligonucleotide primer for the detection of SNP TSC0047508
tttaatgagttt

SEQ ID NO: 351833 - DNA, 12 bp, Artificial Sequence
  Oligonucleotide primer for the detection of SNP TSC0047509
ttagatttagag

SEQ ID NO: 351834 - DNA, 12 bp, Artificial Sequence
  Oligonucleotide primer for the detection of SNP TSC0047510
agagataattaa

SEQ ID NO: 351835 - DNA, 12 bp, Artificial Sequence
  Oligonucleotide primer for the detection of SNP TSC0047510
aaaaataactaa

SEQ ID NO: 351836 - DNA, 12 bp, Artificial Sequence
  Oligonucleotide primer for the detection of SNP TSC0047510
atttagtgggga

SEQ ID NO: 351837 - DNA, 12 bp, Artificial Sequence
  Oligonucleotide primer for the detection of SNP TSC0047511
taaattacttct

SEQ ID NO: 351838 - DNA, 12 bp, Artificial Sequence
  Oligonucleotide primer for the detection of SNP TSC0047511
gatggagaggaa

SEQ ID NO: 351839 - DNA, 12 bp, Artificial Sequence
  Oligonucleotide primer for the detection of SNP TSC0047511
gacggagaggaa

SEQ ID NO: 351840 - DNA, 12 bp, Artificial Sequence
  Oligonucleotide primer for the detection of SNP TSC0009788
taaaacaaatcc

SEQ ID NO: 351841 - DNA, 12 bp, Artificial Sequence
  Oligonucleotide primer for the detection of SNP TSC0009788
tgatttagggaa

SEQ ID NO: 351842 - DNA, 12 bp, Artificial Sequence
  Oligonucleotide primer for the detection of SNP TSC0009788
tggggtagattt

SEQ ID NO: 351843 - DNA, 12 bp, Artificial Sequence
  Oligonucleotide primer for the detection of SNP TSC0047514
gttatgtaagat

SEQ ID NO: 351844 - DNA, 12 bp, Artificial Sequence
  Oligonucleotide primer for the detection of SNP TSC0047514
accatataaaac

SEQ ID NO: 351845 - DNA, 12 bp, Artificial Sequence
  Oligonucleotide primer for the detection of SNP TSC0047514
gaaggtaaaagg

SEQ ID NO: 351846 - DNA, 12 bp, Artificial Sequence
  Oligonucleotide primer for the detection of SNP TSC0047515
ttcacacacttc

SEQ ID NO: 351847 - DNA, 12 bp, Artificial Sequence
  Oligonucleotide primer for the detection of SNP TSC0000970
ttttatgagata

SEQ ID NO: 351848 - DNA, 12 bp, Artificial Sequence
  Oligonucleotide primer for the detection of SNP TSC0047517
tataaataaatt

SEQ ID NO: 351849 - DNA, 12 bp, Artificial Sequence
  Oligonucleotide primer for the detection of SNP TSC0047517
tttttatagtgg

SEQ ID NO: 351850 - DNA, 12 bp, Artificial Sequence
  Oligonucleotide primer for the detection of SNP TSC0008662
tatatacaacat

SEQ ID NO: 351851 - DNA, 12 bp, Artificial Sequence
  Oligonucleotide primer for the detection of SNP TSC0008662
tatgtgtatata

SEQ ID NO: 351852 - DNA, 12 bp, Artificial Sequence
  Oligonucleotide primer for the detection of SNP TSC0047522
tattattactca

SEQ ID NO: 351853 - DNA, 12 bp, Artificial Sequence
  Oligonucleotide primer for the detection of SNP TSC0047522
aaaagagattat

SEQ ID NO: 351854 - DNA, 12 bp, Artificial Sequence
  Oligonucleotide primer for the detection of SNP TSC0047525
ctaccaacaaaa

SEQ ID NO: 351855 - DNA, 12 bp, Artificial Sequence
  Oligonucleotide primer for the detection of SNP TSC0047525
ttattatggtat

SEQ ID NO: 351856 - DNA, 12 bp, Artificial Sequence
  Oligonucleotide primer for the detection of SNP TSC0047525
ttattataatat

SEQ ID NO: 351857 - DNA, 12 bp, Artificial Sequence
  Oligonucleotide primer for the detection of SNP TSC0047525
ttgttagtaagg

SEQ ID NO: 351858 - DNA, 12 bp, Artificial Sequence
  Oligonucleotide primer for the detection of SNP TSC0004530
ttatctaccaat

SEQ ID NO: 351859 - DNA, 12 bp, Artificial Sequence
  Oligonucleotide primer for the detection of SNP TSC0004530
gaaattagttag

SEQ ID NO: 351860 - DNA, 12 bp, Artificial Sequence
  Oligonucleotide primer for the detection of SNP TSC0047526
caaacacaacac

SEQ ID NO: 351861 - DNA, 12 bp, Artificial Sequence
  Oligonucleotide primer for the detection of SNP TSC0047527
gaattgtagata

SEQ ID NO: 351862 - DNA, 12 bp, Artificial Sequence
  Oligonucleotide primer for the detection of SNP TSC0047528
atctaaacttaa

SEQ ID NO: 351863 - DNA, 12 bp, Artificial Sequence
  Oligonucleotide primer for the detection of SNP TSC0047529
caatattattta

SEQ ID NO: 351864 - DNA, 12 bp, Artificial Sequence
  Oligonucleotide primer for the detection of SNP TSC0047529
ttatgaatagtt

SEQ ID NO: 351865 - DNA, 12 bp, Artificial Sequence
  Oligonucleotide primer for the detection of SNP TSC0047529
tataaacaatta

SEQ ID NO: 351866 - DNA, 12 bp, Artificial Sequence
  Oligonucleotide primer for the detection of SNP TSC0047529
taatattattta

SEQ ID NO: 351867 - DNA, 12 bp, Artificial Sequence
  Oligonucleotide primer for the detection of SNP TSC0047530
ttaaaattttga

SEQ ID NO: 351868 - DNA, 12 bp, Artificial Sequence
  Oligonucleotide primer for the detection of SNP TSC0047530
gatgtatttgat

SEQ ID NO: 351869 - DNA, 12 bp, Artificial Sequence
  Oligonucleotide primer for the detection of SNP TSC0047532
taagaatgatat

SEQ ID NO: 351870 - DNA, 12 bp, Artificial Sequence
  Oligonucleotide primer for the detection of SNP TSC0047538
taaacaaccttc

SEQ ID NO: 351871 - DNA, 12 bp, Artificial Sequence
  Oligonucleotide primer for the detection of SNP TSC0047538
aggatagttgta

SEQ ID NO: 351872 - DNA, 12 bp, Artificial Sequence
  Oligonucleotide primer for the detection of SNP TSC0047539
ttcctctaatct

SEQ ID NO: 351873 - DNA, 12 bp, Artificial Sequence
  Oligonucleotide primer for the detection of SNP TSC0047539
aaatgttagtta

SEQ ID NO: 351874 - DNA, 12 bp, Artificial Sequence
  Oligonucleotide primer for the detection of SNP TSC0047540
taatatatgatt

SEQ ID NO: 351875 - DNA, 12 bp, Artificial Sequence
  Oligonucleotide primer for the detection of SNP TSC0047541
tataaatataaa

SEQ ID NO: 351876 - DNA, 12 bp, Artificial Sequence
  Oligonucleotide primer for the detection of SNP TSC0047546
acataaacttta

SEQ ID NO: 351877 - DNA, 12 bp, Artificial Sequence
  Oligonucleotide primer for the detection of SNP TSC0047546
tttatttttgtg

SEQ ID NO: 351878 - DNA, 12 bp, Artificial Sequence
  Oligonucleotide primer for the detection of SNP TSC0047546
ttcatttttata

SEQ ID NO: 351879 - DNA, 12 bp, Artificial Sequence
  Oligonucleotide primer for the detection of SNP TSC0047549
ctactaatacac

SEQ ID NO: 351880 - DNA, 12 bp, Artificial Sequence
  Oligonucleotide primer for the detection of SNP TSC0047549
catccatacata

SEQ ID NO: 351881 - DNA, 12 bp, Artificial Sequence
  Oligonucleotide primer for the detection of SNP TSC0047550
aactacatccat

SEQ ID NO: 351882 - DNA, 12 bp, Artificial Sequence
  Oligonucleotide primer for the detection of SNP TSC0047550
aactacatccgt

SEQ ID NO: 351883 - DNA, 12 bp, Artificial Sequence
  Oligonucleotide primer for the detection of SNP TSC0047550
aaaatggattaa

SEQ ID NO: 351884 - DNA, 12 bp, Artificial Sequence
  Oligonucleotide primer for the detection of SNP TSC0047551
tttcctaaatat

SEQ ID NO: 351885 - DNA, 12 bp, Artificial Sequence
  Oligonucleotide primer for the detection of SNP TSC0047551
taaaagtgagga

SEQ ID NO: 351886 - DNA, 12 bp, Artificial Sequence
  Oligonucleotide primer for the detection of SNP TSC0047551
ttttttgaatat

SEQ ID NO: 351887 - DNA, 12 bp, Artificial Sequence
  Oligonucleotide primer for the detection of SNP TSC0047552
tgttaaaagata

SEQ ID NO: 351888 - DNA, 12 bp, Artificial Sequence
  Oligonucleotide primer for the detection of SNP TSC0047553
attagtagtgta

SEQ ID NO: 351889 - DNA, 12 bp, Artificial Sequence
  Oligonucleotide primer for the detection of SNP TSC0047554
attaataattat

SEQ ID NO: 351890 - DNA, 12 bp, Artificial Sequence
  Oligonucleotide primer for the detection of SNP TSC0047554
gtattttaagta

SEQ ID NO: 351891 - DNA, 12 bp, Artificial Sequence
  Oligonucleotide primer for the detection of SNP TSC0047555
taaaaacatata

SEQ ID NO: 351892 - DNA, 12 bp, Artificial Sequence
  Oligonucleotide primer for the detection of SNP TSC0047555
atatgttaaata

SEQ ID NO: 351893 - DNA, 12 bp, Artificial Sequence
  Oligonucleotide primer for the detection of SNP TSC0047555
atacgttaaata

SEQ ID NO: 351894 - DNA, 12 bp, Artificial Sequence
  Oligonucleotide primer for the detection of SNP TSC0047555
acacactaaata

SEQ ID NO: 351895 - DNA, 12 bp, Artificial Sequence
  Oligonucleotide primer for the detection of SNP TSC0047555
acacgctaaata

SEQ ID NO: 351896 - DNA, 12 bp, Artificial Sequence
  Oligonucleotide primer for the detection of SNP TSC0047555
tgagaatatgtg

SEQ ID NO: 351897 - DNA, 12 bp, Artificial Sequence
  Oligonucleotide primer for the detection of SNP TSC0047559
actattttaatt

SEQ ID NO: 351898 - DNA, 12 bp, Artificial Sequence
  Oligonucleotide primer for the detection of SNP TSC0047559
aatataagagta

SEQ ID NO: 351899 - DNA, 12 bp, Artificial Sequence
  Oligonucleotide primer for the detection of SNP TSC0047560
ccctaatcccta

SEQ ID NO: 351900 - DNA, 12 bp, Artificial Sequence
  Oligonucleotide primer for the detection of SNP TSC0047560
gttggagtggtt

SEQ ID NO: 351901 - DNA, 12 bp, Artificial Sequence
  Oligonucleotide primer for the detection of SNP TSC0047561
taccaaatacta

SEQ ID NO: 351902 - DNA, 12 bp, Artificial Sequence
  Oligonucleotide primer for the detection of SNP TSC0047561
ttatatatatgg

SEQ ID NO: 351903 - DNA, 12 bp, Artificial Sequence
  Oligonucleotide primer for the detection of SNP TSC0047561
ctatacacataa

SEQ ID NO: 351904 - DNA, 12 bp, Artificial Sequence
  Oligonucleotide primer for the detection of SNP TSC0047561
tattagatatta

SEQ ID NO: 351905 - DNA, 12 bp, Artificial Sequence
  Oligonucleotide primer for the detection of SNP TSC0047569
aaacatcttccc

SEQ ID NO: 351906 - DNA, 12 bp, Artificial Sequence
  Oligonucleotide primer for the detection of SNP TSC0047569
tggtatatttgt

SEQ ID NO: 351907 - DNA, 12 bp, Artificial Sequence
  Oligonucleotide primer for the detection of SNP TSC0047569
tggtatatttgc

SEQ ID NO: 351908 - DNA, 12 bp, Artificial Sequence
  Oligonucleotide primer for the detection of SNP TSC0047570
tttaaatgtgag

SEQ ID NO: 351909 - DNA, 12 bp, Artificial Sequence
  Oligonucleotide primer for the detection of SNP TSC0047572
atcctatactat

SEQ ID NO: 351910 - DNA, 12 bp, Artificial Sequence
  Oligonucleotide primer for the detection of SNP TSC0047572
taatatggaaaa

SEQ ID NO: 351911 - DNA, 12 bp, Artificial Sequence
  Oligonucleotide primer for the detection of SNP TSC0047573
ttggggataata

SEQ ID NO: 351912 - DNA, 12 bp, Artificial Sequence
  Oligonucleotide primer for the detection of SNP TSC0047573
ctaaaaacaaca

SEQ ID NO: 351913 - DNA, 12 bp, Artificial Sequence
  Oligonucleotide primer for the detection of SNP TSC0047573
ggtttgttgatt

SEQ ID NO: 351914 - DNA, 12 bp, Artificial Sequence
  Oligonucleotide primer for the detection of SNP TSC0047574
catcctaaccaa

SEQ ID NO: 351915 - DNA, 12 bp, Artificial Sequence
  Oligonucleotide primer for the detection of SNP TSC0047574
ttatgattattt

SEQ ID NO: 351916 - DNA, 12 bp, Artificial Sequence
  Oligonucleotide primer for the detection of SNP TSC0047574
ttatgattattc

SEQ ID NO: 351917 - DNA, 12 bp, Artificial Sequence
  Oligonucleotide primer for the detection of SNP TSC0047574
ttataatcaccc

SEQ ID NO: 351918 - DNA, 12 bp, Artificial Sequence
  Oligonucleotide primer for the detection of SNP TSC0047574
attttgattaat

SEQ ID NO: 351919 - DNA, 12 bp, Artificial Sequence
  Oligonucleotide primer for the detection of SNP TSC0047575
cctactattttt

SEQ ID NO: 351920 - DNA, 12 bp, Artificial Sequence
  Oligonucleotide primer for the detection of SNP TSC0047575
ataatgtaaaag

SEQ ID NO: 351921 - DNA, 12 bp, Artificial Sequence
  Oligonucleotide primer for the detection of SNP TSC0005499
ccactatttcat

SEQ ID NO: 351922 - DNA, 12 bp, Artificial Sequence
  Oligonucleotide primer for the detection of SNP TSC0005499
aggaagtagtta

SEQ ID NO: 351923 - DNA, 12 bp, Artificial Sequence
  Oligonucleotide primer for the detection of SNP TSC0047576
ctcaacaaacaa

SEQ ID NO: 351924 - DNA, 12 bp, Artificial Sequence
  Oligonucleotide primer for the detection of SNP TSC0047576
tttaaaaggtgt

SEQ ID NO: 351925 - DNA, 12 bp, Artificial Sequence
  Oligonucleotide primer for the detection of SNP TSC0047576
tccaaaaaatat

SEQ ID NO: 351926 - DNA, 12 bp, Artificial Sequence
  Oligonucleotide primer for the detection of SNP TSC0047576
tttaataaatag

SEQ ID NO: 351927 - DNA, 12 bp, Artificial Sequence
  Oligonucleotide primer for the detection of SNP TSC0047577
aaccttaaccac

SEQ ID NO: 351928 - DNA, 12 bp, Artificial Sequence
  Oligonucleotide primer for the detection of SNP TSC0047577
aattgtaaaatt

SEQ ID NO: 351929 - DNA, 12 bp, Artificial Sequence
  Oligonucleotide primer for the detection of SNP TSC0047577
attataaaatta

SEQ ID NO: 351930 - DNA, 12 bp, Artificial Sequence
  Oligonucleotide primer for the detection of SNP TSC0047577
gattttagttat

SEQ ID NO: 351931 - DNA, 12 bp, Artificial Sequence
  Oligonucleotide primer for the detection of SNP TSC0047578
aatctcacacta

SEQ ID NO: 351932 - DNA, 12 bp, Artificial Sequence
  Oligonucleotide primer for the detection of SNP TSC0047578
agtaggttgtat

SEQ ID NO: 351933 - DNA, 12 bp, Artificial Sequence
  Oligonucleotide primer for the detection of SNP TSC0047578
acaaactacata

SEQ ID NO: 351934 - DNA, 12 bp, Artificial Sequence
  Oligonucleotide primer for the detection of SNP TSC0047578
gagttttatatt

SEQ ID NO: 351935 - DNA, 12 bp, Artificial Sequence
  Oligonucleotide primer for the detection of SNP TSC0047583
ggaggttatgaa

SEQ ID NO: 351936 - DNA, 12 bp, Artificial Sequence
  Oligonucleotide primer for the detection of SNP TSC0047583
ggaggttacgaa

SEQ ID NO: 351937 - DNA, 12 bp, Artificial Sequence
  Oligonucleotide primer for the detection of SNP TSC0047585
cccaaaattttt

SEQ ID NO: 351938 - DNA, 12 bp, Artificial Sequence
  Oligonucleotide primer for the detection of SNP TSC0047586
aataaattctac

SEQ ID NO: 351939 - DNA, 12 bp, Artificial Sequence
  Oligonucleotide primer for the detection of SNP TSC0047587
tcaaaactcaat

SEQ ID NO: 351940 - DNA, 12 bp, Artificial Sequence
  Oligonucleotide primer for the detection of SNP TSC0047587
ttctacatttcc

SEQ ID NO: 351941 - DNA, 12 bp, Artificial Sequence
  Oligonucleotide primer for the detection of SNP TSC0047587
ttaaagtttagt

SEQ ID NO: 351942 - DNA, 12 bp, Artificial Sequence
  Oligonucleotide primer for the detection of SNP TSC0047588
tacataaataaa

SEQ ID NO: 351943 - DNA, 12 bp, Artificial Sequence
  Oligonucleotide primer for the detection of SNP TSC0047588
atttgttaaacg

SEQ ID NO: 351944 - DNA, 12 bp, Artificial Sequence
  Oligonucleotide primer for the detection of SNP TSC0047588
atttatcaaaca

SEQ ID NO: 351945 - DNA, 12 bp, Artificial Sequence
  Oligonucleotide primer for the detection of SNP TSC0047588
atttatcaaacg

SEQ ID NO: 351946 - DNA, 12 bp, Artificial Sequence
  Oligonucleotide primer for the detection of SNP TSC0047589
aactcttttttt

SEQ ID NO: 351947 - DNA, 12 bp, Artificial Sequence
  Oligonucleotide primer for the detection of SNP TSC0047589
tattttaattgg

SEQ ID NO: 351948 - DNA, 12 bp, Artificial Sequence
  Oligonucleotide primer for the detection of SNP TSC0047591
aaaatcctatct

SEQ ID NO: 351949 - DNA, 12 bp, Artificial Sequence
  Oligonucleotide primer for the detection of SNP TSC0047592
tcttctacctca

SEQ ID NO: 351950 - DNA, 12 bp, Artificial Sequence
  Oligonucleotide primer for the detection of SNP TSC0047593
tttattttcttt

SEQ ID NO: 351951 - DNA, 12 bp, Artificial Sequence
  Oligonucleotide primer for the detection of SNP TSC0047593
agaaaatattag

SEQ ID NO: 351952 - DNA, 12 bp, Artificial Sequence
  Oligonucleotide primer for the detection of SNP TSC0047594
aatgagataatg

SEQ ID NO: 351953 - DNA, 12 bp, Artificial Sequence
  Oligonucleotide primer for the detection of SNP TSC0047594
ttataatgaaga

SEQ ID NO: 351954 - DNA, 12 bp, Artificial Sequence
  Oligonucleotide primer for the detection of SNP TSC0047595
ttgggtttatgt

SEQ ID NO: 351955 - DNA, 12 bp, Artificial Sequence
  Oligonucleotide primer for the detection of SNP TSC0047595
tcgggtttatgt

SEQ ID NO: 351956 - DNA, 12 bp, Artificial Sequence
  Oligonucleotide primer for the detection of SNP TSC0047595
ttgggtttacgt

SEQ ID NO: 351957 - DNA, 12 bp, Artificial Sequence
  Oligonucleotide primer for the detection of SNP TSC0047595
tcgggtttacgt

SEQ ID NO: 351958 - DNA, 12 bp, Artificial Sequence
  Oligonucleotide primer for the detection of SNP TSC0047595
ccaaattcacac

SEQ ID NO: 351959 - DNA, 12 bp, Artificial Sequence
  Oligonucleotide primer for the detection of SNP TSC0047595
ccaaattcacgc

SEQ ID NO: 351960 - DNA, 12 bp, Artificial Sequence
  Oligonucleotide primer for the detection of SNP TSC0047595
ccgaattcacac

SEQ ID NO: 351961 - DNA, 12 bp, Artificial Sequence
  Oligonucleotide primer for the detection of SNP TSC0047595
ccgaattcacgc

SEQ ID NO: 351962 - DNA, 12 bp, Artificial Sequence
  Oligonucleotide primer for the detection of SNP TSC0047595
aggtaggagaac

SEQ ID NO: 351963 - DNA, 12 bp, Artificial Sequence
  Oligonucleotide primer for the detection of SNP TSC0047597
atggggatgata

SEQ ID NO: 351964 - DNA, 12 bp, Artificial Sequence
  Oligonucleotide primer for the detection of SNP TSC0047598
ttacctcccaat

SEQ ID NO: 351965 - DNA, 12 bp, Artificial Sequence
  Oligonucleotide primer for the detection of SNP TSC0047598
aatctattttct

SEQ ID NO: 351966 - DNA, 12 bp, Artificial Sequence
  Oligonucleotide primer for the detection of SNP TSC0047599
ctatccctaaca

SEQ ID NO: 351967 - DNA, 12 bp, Artificial Sequence
  Oligonucleotide primer for the detection of SNP TSC0047599
accaaacaattt

SEQ ID NO: 351968 - DNA, 12 bp, Artificial Sequence
  Oligonucleotide primer for the detection of SNP TSC0047600
taactattctct

SEQ ID NO: 351969 - DNA, 12 bp, Artificial Sequence
  Oligonucleotide primer for the detection of SNP TSC0047600
ataaatacaacc

SEQ ID NO: 351970 - DNA, 12 bp, Artificial Sequence
  Oligonucleotide primer for the detection of SNP TSC0047601
aaacttaccact

SEQ ID NO: 351971 - DNA, 12 bp, Artificial Sequence
  Oligonucleotide primer for the detection of SNP TSC0047601
gggaattaatta

SEQ ID NO: 351972 - DNA, 12 bp, Artificial Sequence
  Oligonucleotide primer for the detection of SNP TSC0047602
ttccaacaaaac

SEQ ID NO: 351973 - DNA, 12 bp, Artificial Sequence
  Oligonucleotide primer for the detection of SNP TSC0047602
atttgtgtgttg

SEQ ID NO: 351974 - DNA, 12 bp, Artificial Sequence
  Oligonucleotide primer for the detection of SNP TSC0047603
ctaaaaaccaaa

SEQ ID NO: 351975 - DNA, 12 bp, Artificial Sequence
  Oligonucleotide primer for the detection of SNP TSC0047603
ttttctttcaaa

SEQ ID NO: 351976 - DNA, 12 bp, Artificial Sequence
  Oligonucleotide primer for the detection of SNP TSC0047604
atcaaaactatt

SEQ ID NO: 351977 - DNA, 12 bp, Artificial Sequence
  Oligonucleotide primer for the detection of SNP TSC0047604
gtgatgatttta

SEQ ID NO: 351978 - DNA, 12 bp, Artificial Sequence
  Oligonucleotide primer for the detection of SNP TSC0047604
ataataatccta

SEQ ID NO: 351979 - DNA, 12 bp, Artificial Sequence
  Oligonucleotide primer for the detection of SNP TSC0047604
attaaaattgtt

SEQ ID NO: 351980 - DNA, 12 bp, Artificial Sequence
  Oligonucleotide primer for the detection of SNP TSC0047605
tattttaatcta

SEQ ID NO: 351981 - DNA, 12 bp, Artificial Sequence
  Oligonucleotide primer for the detection of SNP TSC0047605
ttgttttaattt

SEQ ID NO: 351982 - DNA, 12 bp, Artificial Sequence
  Oligonucleotide primer for the detection of SNP TSC0047608
actaaacacact

SEQ ID NO: 351983 - DNA, 12 bp, Artificial Sequence
  Oligonucleotide primer for the detection of SNP TSC0047608
ataatttgtgaa

SEQ ID NO: 351984 - DNA, 12 bp, Artificial Sequence
  Oligonucleotide primer for the detection of SNP TSC0047609
aacaatatttcc

SEQ ID NO: 351985 - DNA, 12 bp, Artificial Sequence
  Oligonucleotide primer for the detection of SNP TSC0047609
atttgatttgga

SEQ ID NO: 351986 - DNA, 12 bp, Artificial Sequence
  Oligonucleotide primer for the detection of SNP TSC0047609
atttgattcgga

SEQ ID NO: 351987 - DNA, 12 bp, Artificial Sequence
  Oligonucleotide primer for the detection of SNP TSC0047612
ctcaacaactca

SEQ ID NO: 351988 - DNA, 12 bp, Artificial Sequence
  Oligonucleotide primer for the detection of SNP TSC0047612
agtgttaggatt

SEQ ID NO: 351989 - DNA, 12 bp, Artificial Sequence
  Oligonucleotide primer for the detection of SNP TSC0047613
acctttccctta

SEQ ID NO: 351990 - DNA, 12 bp, Artificial Sequence
  Oligonucleotide primer for the detection of SNP TSC0047613
attttataaatt

SEQ ID NO: 351991 - DNA, 12 bp, Artificial Sequence
  Oligonucleotide primer for the detection of SNP TSC0047613
actccacaaacc

SEQ ID NO: 351992 - DNA, 12 bp, Artificial Sequence
  Oligonucleotide primer for the detection of SNP TSC0047616
ccaatcttaata

SEQ ID NO: 351993 - DNA, 12 bp, Artificial Sequence
  Oligonucleotide primer for the detection of SNP TSC0047616
tgagggaattag

SEQ ID NO: 351994 - DNA, 12 bp, Artificial Sequence
  Oligonucleotide primer for the detection of SNP TSC0047620
aataaacacaat

SEQ ID NO: 351995 - DNA, 12 bp, Artificial Sequence
  Oligonucleotide primer for the detection of SNP TSC0047621
tattacaacctc

SEQ ID NO: 351996 - DNA, 12 bp, Artificial Sequence
  Oligonucleotide primer for the detection of SNP TSC0047622
tagttattcggg

SEQ ID NO: 351997 - DNA, 12 bp, Artificial Sequence
  Oligonucleotide primer for the detection of SNP TSC0047623
taaaccaccaaa

SEQ ID NO: 351998 - DNA, 12 bp, Artificial Sequence
  Oligonucleotide primer for the detection of SNP TSC0047625
tttacgtttata

SEQ ID NO: 351999 - DNA, 12 bp, Artificial Sequence
  Oligonucleotide primer for the detection of SNP TSC0047625
ctcacactcata

SEQ ID NO: 352000 - DNA, 12 bp, Artificial Sequence
  Oligonucleotide primer for the detection of SNP TSC0047625
ctcacgctcata

SEQ ID NO: 352001 - DNA, 12 bp, Artificial Sequence
  Oligonucleotide primer for the detection of SNP TSC0047625
aaagtgttgaga

SEQ ID NO: 352002 - DNA, 12 bp, Artificial Sequence
  Oligonucleotide primer for the detection of SNP TSC0047626
aaaaattaattt

SEQ ID NO: 352003 - DNA, 12 bp, Artificial Sequence
  Oligonucleotide primer for the detection of SNP TSC0047626
aaaaatcaattt

SEQ ID NO: 352004 - DNA, 12 bp, Artificial Sequence
  Oligonucleotide primer for the detection of SNP TSC0047626
ttatatgtatat

SEQ ID NO: 352005 - DNA, 12 bp, Artificial Sequence
  Oligonucleotide primer for the detection of SNP TSC0047627
aaaaactacgat

SEQ ID NO: 352006 - DNA, 12 bp, Artificial Sequence
  Oligonucleotide primer for the detection of SNP TSC0047628
ataaaccactat

SEQ ID NO: 352007 - DNA, 12 bp, Artificial Sequence
  Oligonucleotide primer for the detection of SNP TSC0047628
tttttgggatag

SEQ ID NO: 352008 - DNA, 12 bp, Artificial Sequence
  Oligonucleotide primer for the detection of SNP TSC0047632
atcaactaacat

SEQ ID NO: 352009 - DNA, 12 bp, Artificial Sequence
  Oligonucleotide primer for the detection of SNP TSC0047633
ctcactacctcc

SEQ ID NO: 352010 - DNA, 12 bp, Artificial Sequence
  Oligonucleotide primer for the detection of SNP TSC0047633
ttgaaagataga

SEQ ID NO: 352011 - DNA, 12 bp, Artificial Sequence
  Oligonucleotide primer for the detection of SNP TSC0047634
tttatagtaaat

SEQ ID NO: 352012 - DNA, 12 bp, Artificial Sequence
  Oligonucleotide primer for the detection of SNP TSC0047634
tttataacaaac

SEQ ID NO: 352013 - DNA, 12 bp, Artificial Sequence
  Oligonucleotide primer for the detection of SNP TSC0047634
aataattgggag

SEQ ID NO: 352014 - DNA, 12 bp, Artificial Sequence
  Oligonucleotide primer for the detection of SNP TSC0047635
cctctctttaaa

SEQ ID NO: 352015 - DNA, 12 bp, Artificial Sequence
  Oligonucleotide primer for the detection of SNP TSC0047635
gatgagaaaaat

SEQ ID NO: 352016 - DNA, 12 bp, Artificial Sequence
  Oligonucleotide primer for the detection of SNP TSC0007172
ggtagtagttat

SEQ ID NO: 352017 - DNA, 12 bp, Artificial Sequence
  Oligonucleotide primer for the detection of SNP TSC0007172
ggtagtagttac

SEQ ID NO: 352018 - DNA, 12 bp, Artificial Sequence
  Oligonucleotide primer for the detection of SNP TSC0007172
aataacaatcac

SEQ ID NO: 352019 - DNA, 12 bp, Artificial Sequence
  Oligonucleotide primer for the detection of SNP TSC0047640
tattctaaataa

SEQ ID NO: 352020 - DNA, 12 bp, Artificial Sequence
  Oligonucleotide primer for the detection of SNP TSC0047641
atcattacaaat

SEQ ID NO: 352021 - DNA, 12 bp, Artificial Sequence
  Oligonucleotide primer for the detection of SNP TSC0047641
atcgttacaaat

SEQ ID NO: 352022 - DNA, 12 bp, Artificial Sequence
  Oligonucleotide primer for the detection of SNP TSC0047641
tgattattttag

SEQ ID NO: 352023 - DNA, 12 bp, Artificial Sequence
  Oligonucleotide primer for the detection of SNP TSC0047641
taatcatcccaa

SEQ ID NO: 352024 - DNA, 12 bp, Artificial Sequence
  Oligonucleotide primer for the detection of SNP TSC0047641
gttgttgtaggt

SEQ ID NO: 352025 - DNA, 12 bp, Artificial Sequence
  Oligonucleotide primer for the detection of SNP TSC0047641
gtcgttgtaggt

SEQ ID NO: 352026 - DNA, 12 bp, Artificial Sequence
  Oligonucleotide primer for the detection of SNP TSC0047642
aattatatttcc

SEQ ID NO: 352027 - DNA, 12 bp, Artificial Sequence
  Oligonucleotide primer for the detection of SNP TSC0047642
tttcggtattta

SEQ ID NO: 352028 - DNA, 12 bp, Artificial Sequence
  Oligonucleotide primer for the detection of SNP TSC0047642
tctcaatatcta

SEQ ID NO: 352029 - DNA, 12 bp, Artificial Sequence
  Oligonucleotide primer for the detection of SNP TSC0047642
tctcgatatcta

SEQ ID NO: 352030 - DNA, 12 bp, Artificial Sequence
  Oligonucleotide primer for the detection of SNP TSC0047642
ggttatgttttt

SEQ ID NO: 352031 - DNA, 12 bp, Artificial Sequence
  Oligonucleotide primer for the detection of SNP TSC0047644
aaatcaactctt

SEQ ID NO: 352032 - DNA, 12 bp, Artificial Sequence
  Oligonucleotide primer for the detection of SNP TSC0047644
aaatcgactctt

SEQ ID NO: 352033 - DNA, 12 bp, Artificial Sequence
  Oligonucleotide primer for the detection of SNP TSC0047644
ttgatagatttg

SEQ ID NO: 352034 - DNA, 12 bp, Artificial Sequence
  Oligonucleotide primer for the detection of SNP TSC0047644
tcgatagatttg

SEQ ID NO: 352035 - DNA, 12 bp, Artificial Sequence
  Oligonucleotide primer for the detection of SNP TSC0047644
ttgatagattcg

SEQ ID NO: 352036 - DNA, 12 bp, Artificial Sequence
  Oligonucleotide primer for the detection of SNP TSC0047644
tcgatagattcg

SEQ ID NO: 352037 - DNA, 12 bp, Artificial Sequence
  Oligonucleotide primer for the detection of SNP TSC0047644
ccaacaaactca

SEQ ID NO: 352038 - DNA, 12 bp, Artificial Sequence
  Oligonucleotide primer for the detection of SNP TSC0047644
ccaacaaactcg

SEQ ID NO: 352039 - DNA, 12 bp, Artificial Sequence
  Oligonucleotide primer for the detection of SNP TSC0047644
ccgacaaactca

SEQ ID NO: 352040 - DNA, 12 bp, Artificial Sequence
  Oligonucleotide primer for the detection of SNP TSC0047644
ccgacaaactcg

SEQ ID NO: 352041 - DNA, 12 bp, Artificial Sequence
  Oligonucleotide primer for the detection of SNP TSC0047644
aggtcggttttt

SEQ ID NO: 352042 - DNA, 12 bp, Artificial Sequence
  Oligonucleotide primer for the detection of SNP TSC0047645
aatctctttaac

SEQ ID NO: 352043 - DNA, 12 bp, Artificial Sequence
  Oligonucleotide primer for the detection of SNP TSC0047645
tggtataaggtt

SEQ ID NO: 352044 - DNA, 12 bp, Artificial Sequence
  Oligonucleotide primer for the detection of SNP TSC0047645
taacacaaaatt

SEQ ID NO: 352045 - DNA, 12 bp, Artificial Sequence
  Oligonucleotide primer for the detection of SNP TSC0047645
ggtttttttggt

SEQ ID NO: 352046 - DNA, 12 bp, Artificial Sequence
  Oligonucleotide primer for the detection of SNP TSC0047646
tttcccatctct

SEQ ID NO: 352047 - DNA, 12 bp, Artificial Sequence
  Oligonucleotide primer for the detection of SNP TSC0047646
tttcccgtctct

SEQ ID NO: 352048 - DNA, 12 bp, Artificial Sequence
  Oligonucleotide primer for the detection of SNP TSC0047646
aaaattgaggtt

SEQ ID NO: 352049 - DNA, 12 bp, Artificial Sequence
  Oligonucleotide primer for the detection of SNP TSC0047647
aatacttctaac

SEQ ID NO: 352050 - DNA, 12 bp, Artificial Sequence
  Oligonucleotide primer for the detection of SNP TSC0047647
cattactcctta

SEQ ID NO: 352051 - DNA, 12 bp, Artificial Sequence
  Oligonucleotide primer for the detection of SNP TSC0047647
ggtgtttttgat

SEQ ID NO: 352052 - DNA, 12 bp, Artificial Sequence
  Oligonucleotide primer for the detection of SNP TSC0047648
ctaccccaccct

SEQ ID NO: 352053 - DNA, 12 bp, Artificial Sequence
  Oligonucleotide primer for the detection of SNP TSC0047649
cataaccctccc

SEQ ID NO: 352054 - DNA, 12 bp, Artificial Sequence
  Oligonucleotide primer for the detection of SNP TSC0047649
aggaggttgtta

SEQ ID NO: 352055 - DNA, 12 bp, Artificial Sequence
  Oligonucleotide primer for the detection of SNP TSC0047650
ttttattaccac

SEQ ID NO: 352056 - DNA, 12 bp, Artificial Sequence
  Oligonucleotide primer for the detection of SNP TSC0047650
gtagagtttaaa

SEQ ID NO: 352057 - DNA, 12 bp, Artificial Sequence
  Oligonucleotide primer for the detection of SNP TSC0047651
tttctaaaattt

SEQ ID NO: 352058 - DNA, 12 bp, Artificial Sequence
  Oligonucleotide primer for the detection of SNP TSC0047651
aagaatattgta

SEQ ID NO: 352059 - DNA, 12 bp, Artificial Sequence
  Oligonucleotide primer for the detection of SNP TSC0047652
tgggttatgtga

SEQ ID NO: 352060 - DNA, 12 bp, Artificial Sequence
  Oligonucleotide primer for the detection of SNP TSC0000462
acattttttcta

SEQ ID NO: 352061 - DNA, 12 bp, Artificial Sequence
  Oligonucleotide primer for the detection of SNP TSC0000462
taagaaaataat

SEQ ID NO: 352062 - DNA, 12 bp, Artificial Sequence
  Oligonucleotide primer for the detection of SNP TSC0000462
taagaaaataac

SEQ ID NO: 352063 - DNA, 12 bp, Artificial Sequence
  Oligonucleotide primer for the detection of SNP TSC0007262
agaaaagaattt

SEQ ID NO: 352064 - DNA, 12 bp, Artificial Sequence
  Oligonucleotide primer for the detection of SNP TSC0007262
tttggttggata

SEQ ID NO: 352065 - DNA, 12 bp, Artificial Sequence
  Oligonucleotide primer for the detection of SNP TSC0047656
aagtaaattttg

SEQ ID NO: 352066 - DNA, 12 bp, Artificial Sequence
  Oligonucleotide primer for the detection of SNP TSC0047657
ttatttttacaa

SEQ ID NO: 352067 - DNA, 12 bp, Artificial Sequence
  Oligonucleotide primer for the detection of SNP TSC0047657
atgaagtaggat

SEQ ID NO: 352068 - DNA, 12 bp, Artificial Sequence
  Oligonucleotide primer for the detection of SNP TSC0047659
caatctttttac

SEQ ID NO: 352069 - DNA, 12 bp, Artificial Sequence
  Oligonucleotide primer for the detection of SNP TSC0047659
aatttttaacta

SEQ ID NO: 352070 - DNA, 12 bp, Artificial Sequence
  Oligonucleotide primer for the detection of SNP TSC0047663
atccaacccaaa

SEQ ID NO: 352071 - DNA, 12 bp, Artificial Sequence
  Oligonucleotide primer for the detection of SNP TSC0047663
ggtattatggtt

SEQ ID NO: 352072 - DNA, 12 bp, Artificial Sequence
  Oligonucleotide primer for the detection of SNP TSC0047663
taacactataat

SEQ ID NO: 352073 - DNA, 12 bp, Artificial Sequence
  Oligonucleotide primer for the detection of SNP TSC0047665
aaacttcattaa

SEQ ID NO: 352074 - DNA, 12 bp, Artificial Sequence
  Oligonucleotide primer for the detection of SNP TSC0047665
aaacttcgttaa

SEQ ID NO: 352075 - DNA, 12 bp, Artificial Sequence
  Oligonucleotide primer for the detection of SNP TSC0047665
aggttttgttag

SEQ ID NO: 352076 - DNA, 12 bp, Artificial Sequence
  Oligonucleotide primer for the detection of SNP TSC0047665
aggtttcgttag

SEQ ID NO: 352077 - DNA, 12 bp, Artificial Sequence
  Oligonucleotide primer for the detection of SNP TSC0010432
taacttatcttt

SEQ ID NO: 352078 - DNA, 12 bp, Artificial Sequence
  Oligonucleotide primer for the detection of SNP TSC0010432
aagttttagttg

SEQ ID NO: 352079 - DNA, 12 bp, Artificial Sequence
  Oligonucleotide primer for the detection of SNP TSC0047666
ccaaaaatccaa

SEQ ID NO: 352080 - DNA, 12 bp, Artificial Sequence
  Oligonucleotide primer for the detection of SNP TSC0047666
gattaattgtat

SEQ ID NO: 352081 - DNA, 12 bp, Artificial Sequence
  Oligonucleotide primer for the detection of SNP TSC0047666
attaactacata

SEQ ID NO: 352082 - DNA, 12 bp, Artificial Sequence
  Oligonucleotide primer for the detection of SNP TSC0047667
atacctccctta

SEQ ID NO: 352083 - DNA, 12 bp, Artificial Sequence
  Oligonucleotide primer for the detection of SNP TSC0047668
gatgattttttg

SEQ ID NO: 352084 - DNA, 12 bp, Artificial Sequence
  Oligonucleotide primer for the detection of SNP TSC0047668
aataacttccta

SEQ ID NO: 352085 - DNA, 12 bp, Artificial Sequence
  Oligonucleotide primer for the detection of SNP TSC0047668
gagtttggaatt

SEQ ID NO: 352086 - DNA, 12 bp, Artificial Sequence
  Oligonucleotide primer for the detection of SNP TSC0047669
atcctccatcct

SEQ ID NO: 352087 - DNA, 12 bp, Artificial Sequence
  Oligonucleotide primer for the detection of SNP TSC0047669
ttgagtttttgg

SEQ ID NO: 352088 - DNA, 12 bp, Artificial Sequence
  Oligonucleotide primer for the detection of SNP TSC0047669
ctaaatttttaa

SEQ ID NO: 352089 - DNA, 12 bp, Artificial Sequence
  Oligonucleotide primer for the detection of SNP TSC0005356
tcttcatataaa

SEQ ID NO: 352090 - DNA, 12 bp, Artificial Sequence
  Oligonucleotide primer for the detection of SNP TSC0005356
tcttcgtataaa

SEQ ID NO: 352091 - DNA, 12 bp, Artificial Sequence
  Oligonucleotide primer for the detection of SNP TSC0005356
atagaaaaatat

SEQ ID NO: 352092 - DNA, 12 bp, Artificial Sequence
  Oligonucleotide primer for the detection of SNP TSC0005356
ttttcgtgtgga

SEQ ID NO: 352093 - DNA, 12 bp, Artificial Sequence
  Oligonucleotide primer for the detection of SNP TSC0005357
catcccaaacta

SEQ ID NO: 352094 - DNA, 12 bp, Artificial Sequence
  Oligonucleotide primer for the detection of SNP TSC0005357
tatttgagaagt

SEQ ID NO: 352095 - DNA, 12 bp, Artificial Sequence
  Oligonucleotide primer for the detection of SNP TSC0005045
tcaaactcccca

SEQ ID NO: 352096 - DNA, 12 bp, Artificial Sequence
  Oligonucleotide primer for the detection of SNP TSC0005045
tcgaactcccca

SEQ ID NO: 352097 - DNA, 12 bp, Artificial Sequence
  Oligonucleotide primer for the detection of SNP TSC0005045
aaatcatctaaa

SEQ ID NO: 352098 - DNA, 12 bp, Artificial Sequence
  Oligonucleotide primer for the detection of SNP TSC0005045
gaatcatctaaa

SEQ ID NO: 352099 - DNA, 12 bp, Artificial Sequence
  Oligonucleotide primer for the detection of SNP TSC0005045
tcgaatttttta

SEQ ID NO: 352100 - DNA, 12 bp, Artificial Sequence
  Oligonucleotide primer for the detection of SNP TSC0005046
agattatgttat

SEQ ID NO: 352101 - DNA, 12 bp, Artificial Sequence
  Oligonucleotide primer for the detection of SNP TSC0005046
agattatgttac

SEQ ID NO: 352102 - DNA, 12 bp, Artificial Sequence
  Oligonucleotide primer for the detection of SNP TSC0005046
aaaatcatacca

SEQ ID NO: 352103 - DNA, 12 bp, Artificial Sequence
  Oligonucleotide primer for the detection of SNP TSC0005706
acatctctcacc

SEQ ID NO: 352104 - DNA, 12 bp, Artificial Sequence
  Oligonucleotide primer for the detection of SNP TSC0005706
tggagtggggta

SEQ ID NO: 352105 - DNA, 12 bp, Artificial Sequence
  Oligonucleotide primer for the detection of SNP TSC0005707
tatttttatgat

SEQ ID NO: 352106 - DNA, 12 bp, Artificial Sequence
  Oligonucleotide primer for the detection of SNP TSC0005707
catccctataac

SEQ ID NO: 352107 - DNA, 12 bp, Artificial Sequence
  Oligonucleotide primer for the detection of SNP TSC0005707
tggtgagagatg

SEQ ID NO: 352108 - DNA, 12 bp, Artificial Sequence
  Oligonucleotide primer for the detection of SNP TSC0047671
actacaacctct

SEQ ID NO: 352109 - DNA, 12 bp, Artificial Sequence
  Oligonucleotide primer for the detection of SNP TSC0047675
atttaaattatc

SEQ ID NO: 352110 - DNA, 12 bp, Artificial Sequence
  Oligonucleotide primer for the detection of SNP TSC0047675
tgttttatggag

SEQ ID NO: 352111 - DNA, 12 bp, Artificial Sequence
  Oligonucleotide primer for the detection of SNP TSC0047676
aaaaaactcttc

SEQ ID NO: 352112 - DNA, 12 bp, Artificial Sequence
  Oligonucleotide primer for the detection of SNP TSC0047676
tggaaatttttt

SEQ ID NO: 352113 - DNA, 12 bp, Artificial Sequence
  Oligonucleotide primer for the detection of SNP TSC0047676
gaaggttttttt

SEQ ID NO: 352114 - DNA, 12 bp, Artificial Sequence
  Oligonucleotide primer for the detection of SNP TSC0047677
taataccccaac

SEQ ID NO: 352115 - DNA, 12 bp, Artificial Sequence
  Oligonucleotide primer for the detection of SNP TSC0047677
taataccccgac

SEQ ID NO: 352116 - DNA, 12 bp, Artificial Sequence
  Oligonucleotide primer for the detection of SNP TSC0047677
ccaaccccaccc

SEQ ID NO: 352117 - DNA, 12 bp, Artificial Sequence
  Oligonucleotide primer for the detection of SNP TSC0047677
tggtgttttggt

SEQ ID NO: 352118 - DNA, 12 bp, Artificial Sequence
  Oligonucleotide primer for the detection of SNP TSC0047677
tggtgtttcggt

SEQ ID NO: 352119 - DNA, 12 bp, Artificial Sequence
  Oligonucleotide primer for the detection of SNP TSC0047677
tggtgttttggc

SEQ ID NO: 352120 - DNA, 12 bp, Artificial Sequence
  Oligonucleotide primer for the detection of SNP TSC0047677
tggtgtttcggc

SEQ ID NO: 352121 - DNA, 12 bp, Artificial Sequence
  Oligonucleotide primer for the detection of SNP TSC0047678
atacataacact

SEQ ID NO: 352122 - DNA, 12 bp, Artificial Sequence
  Oligonucleotide primer for the detection of SNP TSC0047678
attgttatttta

SEQ ID NO: 352123 - DNA, 12 bp, Artificial Sequence
  Oligonucleotide primer for the detection of SNP TSC0047679
ttaaaattagaa

SEQ ID NO: 352124 - DNA, 12 bp, Artificial Sequence
  Oligonucleotide primer for the detection of SNP TSC0047681
aaattaaaacct

SEQ ID NO: 352125 - DNA, 12 bp, Artificial Sequence
  Oligonucleotide primer for the detection of SNP TSC0047681
ttattgaggatt

SEQ ID NO: 352126 - DNA, 12 bp, Artificial Sequence
  Oligonucleotide primer for the detection of SNP TSC0047682
aacatttcttac

SEQ ID NO: 352127 - DNA, 12 bp, Artificial Sequence
  Oligonucleotide primer for the detection of SNP TSC0047682
tgaatgaattta

SEQ ID NO: 352128 - DNA, 12 bp, Artificial Sequence
  Oligonucleotide primer for the detection of SNP TSC0047683
aaaatacccttc

SEQ ID NO: 352129 - DNA, 12 bp, Artificial Sequence
  Oligonucleotide primer for the detection of SNP TSC0047683
aatattatttta

SEQ ID NO: 352130 - DNA, 12 bp, Artificial Sequence
  Oligonucleotide primer for the detection of SNP TSC0010583
ttactaaaaatt

SEQ ID NO: 352131 - DNA, 12 bp, Artificial Sequence
  Oligonucleotide primer for the detection of SNP TSC0010583
attggatataaa

SEQ ID NO: 352132 - DNA, 12 bp, Artificial Sequence
  Oligonucleotide primer for the detection of SNP TSC0010584
tatattaaatac

SEQ ID NO: 352133 - DNA, 12 bp, Artificial Sequence
  Oligonucleotide primer for the detection of SNP TSC0005074
ataatggatatt

SEQ ID NO: 352134 - DNA, 12 bp, Artificial Sequence
  Oligonucleotide primer for the detection of SNP TSC0005074
ataataaacatt

SEQ ID NO: 352135 - DNA, 12 bp, Artificial Sequence
  Oligonucleotide primer for the detection of SNP TSC0005074
aaagtattatat

SEQ ID NO: 352136 - DNA, 12 bp, Artificial Sequence
  Oligonucleotide primer for the detection of SNP TSC0047685
aatatccttatc

SEQ ID NO: 352137 - DNA, 12 bp, Artificial Sequence
  Oligonucleotide primer for the detection of SNP TSC0047685
ttaatttttatg

SEQ ID NO: 352138 - DNA, 12 bp, Artificial Sequence
  Oligonucleotide primer for the detection of SNP TSC0047686
atttctaattct

SEQ ID NO: 352139 - DNA, 12 bp, Artificial Sequence
  Oligonucleotide primer for the detection of SNP TSC0047686
tattataaaata

SEQ ID NO: 352140 - DNA, 12 bp, Artificial Sequence
  Oligonucleotide primer for the detection of SNP TSC0047687
aaatatatactt

SEQ ID NO: 352141 - DNA, 12 bp, Artificial Sequence
  Oligonucleotide primer for the detection of SNP TSC0047687
gatgagtttgaa

SEQ ID NO: 352142 - DNA, 12 bp, Artificial Sequence
  Oligonucleotide primer for the detection of SNP TSC0047688
tggttaatttga

SEQ ID NO: 352143 - DNA, 12 bp, Artificial Sequence
  Oligonucleotide primer for the detection of SNP TSC0047688
tggttaattcga

SEQ ID NO: 352144 - DNA, 12 bp, Artificial Sequence
  Oligonucleotide primer for the detection of SNP TSC0047689
tccataattccc

SEQ ID NO: 352145 - DNA, 12 bp, Artificial Sequence
  Oligonucleotide primer for the detection of SNP TSC0047689
ttttttataata

SEQ ID NO: 352146 - DNA, 12 bp, Artificial Sequence
  Oligonucleotide primer for the detection of SNP TSC0005684
actaaaaatctt

SEQ ID NO: 352147 - DNA, 12 bp, Artificial Sequence
  Oligonucleotide primer for the detection of SNP TSC0005684
ataaaaaatggt

SEQ ID NO: 352148 - DNA, 12 bp, Artificial Sequence
  Oligonucleotide primer for the detection of SNP TSC0005684
tgggaatttttt

SEQ ID NO: 352149 - DNA, 12 bp, Artificial Sequence
  Oligonucleotide primer for the detection of SNP TSC0047691
ctaaatcaccac

SEQ ID NO: 352150 - DNA, 12 bp, Artificial Sequence
  Oligonucleotide primer for the detection of SNP TSC0047691
ttataatattga

SEQ ID NO: 352151 - DNA, 12 bp, Artificial Sequence
  Oligonucleotide primer for the detection of SNP TSC0047692
ctcactcactaa

SEQ ID NO: 352152 - DNA, 12 bp, Artificial Sequence
  Oligonucleotide primer for the detection of SNP TSC0047692
agttttggtttt

SEQ ID NO: 352153 - DNA, 12 bp, Artificial Sequence
  Oligonucleotide primer for the detection of SNP TSC0047694
aaaaacaacatt

SEQ ID NO: 352154 - DNA, 12 bp, Artificial Sequence
  Oligonucleotide primer for the detection of SNP TSC0047694
gttttaaagtta

SEQ ID NO: 352155 - DNA, 12 bp, Artificial Sequence
  Oligonucleotide primer for the detection of SNP TSC0047695
taaactaacaaa

SEQ ID NO: 352156 - DNA, 12 bp, Artificial Sequence
  Oligonucleotide primer for the detection of SNP TSC0047695
taataaattatt

SEQ ID NO: 352157 - DNA, 12 bp, Artificial Sequence
  Oligonucleotide primer for the detection of SNP TSC0047695
taataaattacc

SEQ ID NO: 352158 - DNA, 12 bp, Artificial Sequence
  Oligonucleotide primer for the detection of SNP TSC0047695
tgagttagtaag

SEQ ID NO: 352159 - DNA, 12 bp, Artificial Sequence
  Oligonucleotide primer for the detection of SNP TSC0047696
atatgttatttt

SEQ ID NO: 352160 - DNA, 12 bp, Artificial Sequence
  Oligonucleotide primer for the detection of SNP TSC0047696
atacgttatttt

SEQ ID NO: 352161 - DNA, 12 bp, Artificial Sequence
  Oligonukleotid-Primer
atacattatctt

SEQ ID NO: 352162 - DNA, 12 bp, Artificial Sequence
  Oligonucleotide primer for the detection of SNP TSC0047696
atacgttatctt

SEQ ID NO: 352163 - DNA, 12 bp, Artificial Sequence
  Oligonucleotide primer for the detection of SNP TSC0047696
gtagatatgatt

SEQ ID NO: 352164 - DNA, 12 bp, Artificial Sequence
  Oligonucleotide primer for the detection of SNP TSC0047702
cttttttttcac

SEQ ID NO: 352165 - DNA, 12 bp, Artificial Sequence
  Oligonucleotide primer for the detection of SNP TSC0047702
tgtttattatag

SEQ ID NO: 352166 - DNA, 12 bp, Artificial Sequence
  Oligonucleotide primer for the detection of SNP TSC0047702
tacctaccacaa

SEQ ID NO: 352167 - DNA, 12 bp, Artificial Sequence
  Oligonucleotide primer for the detection of SNP TSC0047706
aatttctaataa

SEQ ID NO: 352168 - DNA, 12 bp, Artificial Sequence
  Oligonucleotide primer for the detection of SNP TSC0047706
atagataagata

SEQ ID NO: 352169 - DNA, 12 bp, Artificial Sequence
  Oligonucleotide primer for the detection of SNP TSC0047706
acaaacaaaaca

SEQ ID NO: 352170 - DNA, 12 bp, Artificial Sequence
  Oligonucleotide primer for the detection of SNP TSC0047706
gatttttagtaa

SEQ ID NO: 352171 - DNA, 12 bp, Artificial Sequence
  Oligonucleotide primer for the detection of SNP TSC0047707
ttataatatcct

SEQ ID NO: 352172 - DNA, 12 bp, Artificial Sequence
  Oligonucleotide primer for the detection of SNP TSC0047707
tatcttaatcta

SEQ ID NO: 352173 - DNA, 12 bp, Artificial Sequence
  Oligonucleotide primer for the detection of SNP TSC0047708
tttttttctatt

SEQ ID NO: 352174 - DNA, 12 bp, Artificial Sequence
  Oligonucleotide primer for the detection of SNP TSC0047708
taaaatgtttaa

SEQ ID NO: 352175 - DNA, 12 bp, Artificial Sequence
  Oligonucleotide primer for the detection of SNP TSC0047708
caaaatatttaa

SEQ ID NO: 352176 - DNA, 12 bp, Artificial Sequence
  Oligonucleotide primer for the detection of SNP TSC0047710
cttatctactac

SEQ ID NO: 352177 - DNA, 12 bp, Artificial Sequence
  Oligonucleotide primer for the detection of SNP TSC0047711
attataccatta

SEQ ID NO: 352178 - DNA, 12 bp, Artificial Sequence
  Oligonucleotide primer for the detection of SNP TSC0047711
ttaattaatata

SEQ ID NO: 352179 - DNA, 12 bp, Artificial Sequence
  Oligonucleotide primer for the detection of SNP TSC0047719
taatttgttgag

SEQ ID NO: 352180 - DNA, 12 bp, Artificial Sequence
  Oligonucleotide primer for the detection of SNP TSC0047720
caatataatatt

SEQ ID NO: 352181 - DNA, 12 bp, Artificial Sequence
  Oligonucleotide primer for the detection of SNP TSC0009467
aatcctccctcc

SEQ ID NO: 352182 - DNA, 12 bp, Artificial Sequence
  Oligonucleotide primer for the detection of SNP TSC0009467
tgtagtagattg

SEQ ID NO: 352183 - DNA, 12 bp, Artificial Sequence
  Oligonucleotide primer for the detection of SNP TSC0009468
atattttcaatt

SEQ ID NO: 352184 - DNA, 12 bp, Artificial Sequence
  Oligonucleotide primer for the detection of SNP TSC0009468
gtttagattagg

SEQ ID NO: 352185 - DNA, 12 bp, Artificial Sequence
  Oligonucleotide primer for the detection of SNP TSC0010232
ccaccaaactcc

SEQ ID NO: 352186 - DNA, 12 bp, Artificial Sequence
  Oligonucleotide primer for the detection of SNP TSC0010232
attgatttggga

SEQ ID NO: 352187 - DNA, 12 bp, Artificial Sequence
  Oligonucleotide primer for the detection of SNP TSC0010232
atcgatttggga

SEQ ID NO: 352188 - DNA, 12 bp, Artificial Sequence
  Oligonucleotide primer for the detection of SNP TSC0010232
atcaacctaaaa

SEQ ID NO: 352189 - DNA, 12 bp, Artificial Sequence
  Oligonucleotide primer for the detection of SNP TSC0010232
atcgacctaaaa

SEQ ID NO: 352190 - DNA, 12 bp, Artificial Sequence
  Oligonucleotide primer for the detection of SNP TSC0047723
ccaaaaaactac

SEQ ID NO: 352191 - DNA, 12 bp, Artificial Sequence
  Oligonucleotide primer for the detection of SNP TSC0047723
aagtataaaatt

SEQ ID NO: 352192 - DNA, 12 bp, Artificial Sequence
  Oligonucleotide primer for the detection of SNP TSC0047723
aaacacaaaatt

SEQ ID NO: 352193 - DNA, 12 bp, Artificial Sequence
  Oligonucleotide primer for the detection of SNP TSC0047723
taaagggttgtt

SEQ ID NO: 352194 - DNA, 12 bp, Artificial Sequence
  Oligonucleotide primer for the detection of SNP TSC0047724
aaaatgtttagg

SEQ ID NO: 352195 - DNA, 12 bp, Artificial Sequence
  Oligonucleotide primer for the detection of SNP TSC0047728
attctctacatt

SEQ ID NO: 352196 - DNA, 12 bp, Artificial Sequence
  Oligonucleotide primer for the detection of SNP TSC0047728
ctctaaacctca

SEQ ID NO: 352197 - DNA, 12 bp, Artificial Sequence
  Oligonucleotide primer for the detection of SNP TSC0006497
aaataacactaa

SEQ ID NO: 352198 - DNA, 12 bp, Artificial Sequence
  Oligonucleotide primer for the detection of SNP TSC0006497
tcttatttaatt

SEQ ID NO: 352199 - DNA, 12 bp, Artificial Sequence
  Oligonucleotide primer for the detection of SNP TSC0006497
agatagtattgg

SEQ ID NO: 352200 - DNA, 12 bp, Artificial Sequence
  Oligonucleotide primer for the detection of SNP TSC0006498
ataatatcactt

SEQ ID NO: 352201 - DNA, 12 bp, Artificial Sequence
  Oligonucleotide primer for the detection of SNP TSC0006498
atagggaagata

SEQ ID NO: 352202 - DNA, 12 bp, Artificial Sequence
  Oligonucleotide primer for the detection of SNP TSC0006499
aatctaccaaac

SEQ ID NO: 352203 - DNA, 12 bp, Artificial Sequence
  Oligonucleotide primer for the detection of SNP TSC0006499
agaatttggtta

SEQ ID NO: 352204 - DNA, 12 bp, Artificial Sequence
  Oligonucleotide primer for the detection of SNP TSC0047729
ttaagtttggta

SEQ ID NO: 352205 - DNA, 12 bp, Artificial Sequence
  Oligonucleotide primer for the detection of SNP TSC0047729
caaacctaataa

SEQ ID NO: 352206 - DNA, 12 bp, Artificial Sequence
  Oligonucleotide primer for the detection of SNP TSC0047730
caaacttaaaaa

SEQ ID NO: 352207 - DNA, 12 bp, Artificial Sequence
  Oligonucleotide primer for the detection of SNP TSC0047730
tataaaagaaat

SEQ ID NO: 352208 - DNA, 12 bp, Artificial Sequence
  Oligonucleotide primer for the detection of SNP TSC0047730
tttaaatttaag

SEQ ID NO: 352209 - DNA, 12 bp, Artificial Sequence
  Oligonucleotide primer for the detection of SNP TSC0047732
ctaataatcact

SEQ ID NO: 352210 - DNA, 12 bp, Artificial Sequence
  Oligonucleotide primer for the detection of SNP TSC0047732
ataaatagtaga

SEQ ID NO: 352211 - DNA, 12 bp, Artificial Sequence
  Oligonucleotide primer for the detection of SNP TSC0047732
tagtaattattt

SEQ ID NO: 352212 - DNA, 12 bp, Artificial Sequence
  Oligonucleotide primer for the detection of SNP TSC0047733
cataacatattt

SEQ ID NO: 352213 - DNA, 12 bp, Artificial Sequence
  Oligonucleotide primer for the detection of SNP TSC0047733
ccttaacaatct

SEQ ID NO: 352214 - DNA, 12 bp, Artificial Sequence
  Oligonucleotide primer for the detection of SNP TSC0047733
tatgatatgttt

SEQ ID NO: 352215 - DNA, 12 bp, Artificial Sequence
  Oligonucleotide primer for the detection of SNP TSC0047735
aaacttacacct

SEQ ID NO: 352216 - DNA, 12 bp, Artificial Sequence
  Oligonucleotide primer for the detection of SNP TSC0047735
aaacttacgcct

SEQ ID NO: 352217 - DNA, 12 bp, Artificial Sequence
  Oligonucleotide primer for the detection of SNP TSC0047735
agatttatgttt

SEQ ID NO: 352218 - DNA, 12 bp, Artificial Sequence
  Oligonucleotide primer for the detection of SNP TSC0047735
agatttacgttt

SEQ ID NO: 352219 - DNA, 12 bp, Artificial Sequence
  Oligonucleotide primer for the detection of SNP TSC0047737
aaatcaataaaa

SEQ ID NO: 352220 - DNA, 12 bp, Artificial Sequence
  Oligonucleotide primer for the detection of SNP TSC0047737
atcttctctata

SEQ ID NO: 352221 - DNA, 12 bp, Artificial Sequence
  Oligonucleotide primer for the detection of SNP TSC0047737
gaattaatagga

SEQ ID NO: 352222 - DNA, 12 bp, Artificial Sequence
  Oligonucleotide primer for the detection of SNP TSC0047741
ctcactacaacc

SEQ ID NO: 352223 - DNA, 12 bp, Artificial Sequence
  Oligonucleotide primer for the detection of SNP TSC0047741
tttaggaggtag

SEQ ID NO: 352224 - DNA, 12 bp, Artificial Sequence
  Oligonucleotide primer for the detection of SNP TSC0007947
taaaccctcaac

SEQ ID NO: 352225 - DNA, 12 bp, Artificial Sequence
  Oligonucleotide primer for the detection of SNP TSC0007947
gaggtatttgtg

SEQ ID NO: 352226 - DNA, 12 bp, Artificial Sequence
  Oligonucleotide primer for the detection of SNP TSC0005253
attatctcaaaa

SEQ ID NO: 352227 - DNA, 12 bp, Artificial Sequence
  Oligonucleotide primer for the detection of SNP TSC0005253
tatttggagaaa

SEQ ID NO: 352228 - DNA, 12 bp, Artificial Sequence
  Oligonucleotide primer for the detection of SNP TSC0005253
attattttaagg

SEQ ID NO: 352229 - DNA, 12 bp, Artificial Sequence
  Oligonucleotide primer for the detection of SNP TSC0005254
ctcaaaaaaaac

SEQ ID NO: 352230 - DNA, 12 bp, Artificial Sequence
  Oligonucleotide primer for the detection of SNP TSC0047745
tatatttacaca

SEQ ID NO: 352231 - DNA, 12 bp, Artificial Sequence
  Oligonucleotide primer for the detection of SNP TSC0047745
aaaagattatat

SEQ ID NO: 352232 - DNA, 12 bp, Artificial Sequence
  Oligonucleotide primer for the detection of SNP TSC0047747
aaaacaaatccc

SEQ ID NO: 352233 - DNA, 12 bp, Artificial Sequence
  Oligonucleotide primer for the detection of SNP TSC0047747
aaaggtgaaaag

SEQ ID NO: 352234 - DNA, 12 bp, Artificial Sequence
  Oligonucleotide primer for the detection of SNP TSC0047747
aaagtaggtttt

SEQ ID NO: 352235 - DNA, 12 bp, Artificial Sequence
  Oligonucleotide primer for the detection of SNP TSC0047750
caattctattcc

SEQ ID NO: 352236 - DNA, 12 bp, Artificial Sequence
  Oligonucleotide primer for the detection of SNP TSC0047751
aattttaaaact

SEQ ID NO: 352237 - DNA, 12 bp, Artificial Sequence
  Oligonucleotide primer for the detection of SNP TSC0047751
ttcttttcaaac

SEQ ID NO: 352238 - DNA, 12 bp, Artificial Sequence
  Oligonucleotide primer for the detection of SNP TSC0047751
aattttagaatt

SEQ ID NO: 352239 - DNA, 12 bp, Artificial Sequence
  Oligonucleotide primer for the detection of SNP TSC0047754
aataactacatc

SEQ ID NO: 352240 - DNA, 12 bp, Artificial Sequence
  Oligonucleotide primer for the detection of SNP TSC0047754
taaagtatagta

SEQ ID NO: 352241 - DNA, 12 bp, Artificial Sequence
  Oligonucleotide primer for the detection of SNP TSC0047755
tttaaaatttaa

SEQ ID NO: 352242 - DNA, 12 bp, Artificial Sequence
  Oligonucleotide primer for the detection of SNP TSC0047755
taatgaagatat

SEQ ID NO: 352243 - DNA, 12 bp, Artificial Sequence
  Oligonucleotide primer for the detection of SNP TSC0047755
tttaaaatttag

SEQ ID NO: 352244 - DNA, 12 bp, Artificial Sequence
  Oligonucleotide primer for the detection of SNP TSC0047757
aaagttatatgt

SEQ ID NO: 352245 - DNA, 12 bp, Artificial Sequence
  Oligonucleotide primer for the detection of SNP TSC0047757
tattttaaattt

SEQ ID NO: 352246 - DNA, 12 bp, Artificial Sequence
  Oligonucleotide primer for the detection of SNP TSC0047758
ctaattttttaa

SEQ ID NO: 352247 - DNA, 12 bp, Artificial Sequence
  Oligonucleotide primer for the detection of SNP TSC0047758
tattttatgtgt

SEQ ID NO: 352248 - DNA, 12 bp, Artificial Sequence
  Oligonucleotide primer for the detection of SNP TSC0047758
tacttcatatac

SEQ ID NO: 352249 - DNA, 12 bp, Artificial Sequence
  Oligonucleotide primer for the detection of SNP TSC0047759
aattattttaac

SEQ ID NO: 352250 - DNA, 12 bp, Artificial Sequence
  Oligonucleotide primer for the detection of SNP TSC0047759
gttattttggtt

SEQ ID NO: 352251 - DNA, 12 bp, Artificial Sequence
  Oligonucleotide primer for the detection of SNP TSC0047760
tatcatataaaa

SEQ ID NO: 352252 - DNA, 12 bp, Artificial Sequence
  Oligonucleotide primer for the detection of SNP TSC0047760
tggaatttttta

SEQ ID NO: 352253 - DNA, 12 bp, Artificial Sequence
  Oligonucleotide primer for the detection of SNP TSC0047763
tatcattcctaa

SEQ ID NO: 352254 - DNA, 12 bp, Artificial Sequence
  Oligonucleotide primer for the detection of SNP TSC0047763
ttttttatccta

SEQ ID NO: 352255 - DNA, 12 bp, Artificial Sequence
  Oligonucleotide primer for the detection of SNP TSC0047763
attgttattttt

SEQ ID NO: 352256 - DNA, 12 bp, Artificial Sequence
  Oligonucleotide primer for the detection of SNP TSC0047764
tcttataaaaaa

SEQ ID NO: 352257 - DNA, 12 bp, Artificial Sequence
  Oligonucleotide primer for the detection of SNP TSC0047764
atgatatttatt

SEQ ID NO: 352258 - DNA, 12 bp, Artificial Sequence
  Oligonucleotide primer for the detection of SNP TSC0047764
taataatatcta

SEQ ID NO: 352259 - DNA, 12 bp, Artificial Sequence
  Oligonucleotide primer for the detection of SNP TSC0047765
attttcttttct

SEQ ID NO: 352260 - DNA, 12 bp, Artificial Sequence
  Oligonucleotide primer for the detection of SNP TSC0047766
tccactttttcc

SEQ ID NO: 352261 - DNA, 12 bp, Artificial Sequence
  Oligonucleotide primer for the detection of SNP TSC0047766
tagagtagtggg

SEQ ID NO: 352262 - DNA, 12 bp, Artificial Sequence
  Oligonucleotide primer for the detection of SNP TSC0047770
aactcaaaaaca

SEQ ID NO: 352263 - DNA, 12 bp, Artificial Sequence
  Oligonucleotide primer for the detection of SNP TSC0047770
aagatttttgaa

SEQ ID NO: 352264 - DNA, 12 bp, Artificial Sequence
  Oligonucleotide primer for the detection of SNP TSC0047770
tgatttaaaggt

SEQ ID NO: 352265 - DNA, 12 bp, Artificial Sequence
  Oligonucleotide primer for the detection of SNP TSC0047771
tacaattacaaa

SEQ ID NO: 352266 - DNA, 12 bp, Artificial Sequence
  Oligonucleotide primer for the detection of SNP TSC0047771
attcttccaaac

SEQ ID NO: 352267 - DNA, 12 bp, Artificial Sequence
  Oligonucleotide primer for the detection of SNP TSC0047771
gtttatagttgt

SEQ ID NO: 352268 - DNA, 12 bp, Artificial Sequence
  Oligonucleotide primer for the detection of SNP TSC0047777
attacttctcca

SEQ ID NO: 352269 - DNA, 12 bp, Artificial Sequence
  Oligonucleotide primer for the detection of SNP TSC0047779
aatcaaaaaaat

SEQ ID NO: 352270 - DNA, 12 bp, Artificial Sequence
  Oligonucleotide primer for the detection of SNP TSC0047780
ctacatataata

SEQ ID NO: 352271 - DNA, 12 bp, Artificial Sequence
  Oligonucleotide primer for the detection of SNP TSC0047780
ccattctctatc

SEQ ID NO: 352272 - DNA, 12 bp, Artificial Sequence
  Oligonucleotide primer for the detection of SNP TSC0047780
tttatatataat

SEQ ID NO: 352273 - DNA, 12 bp, Artificial Sequence
  Oligonucleotide primer for the detection of SNP TSC0047781
tagtaataatta

SEQ ID NO: 352274 - DNA, 12 bp, Artificial Sequence
  Oligonucleotide primer for the detection of SNP TSC0047782
aaaaatcccatt

SEQ ID NO: 352275 - DNA, 12 bp, Artificial Sequence
  Oligonucleotide primer for the detection of SNP TSC0047782
ggagggaaaagt

SEQ ID NO: 352276 - DNA, 12 bp, Artificial Sequence
  Oligonucleotide primer for the detection of SNP TSC0047785
tacttaactatc

SEQ ID NO: 352277 - DNA, 12 bp, Artificial Sequence
  Oligonucleotide primer for the detection of SNP TSC0047785
aaattgaggtat

SEQ ID NO: 352278 - DNA, 12 bp, Artificial Sequence
  Oligonucleotide primer for the detection of SNP TSC0047790
tttcacaaaaca

SEQ ID NO: 352279 - DNA, 12 bp, Artificial Sequence
  Oligonucleotide primer for the detection of SNP TSC0047790
tttcacgaaaca

SEQ ID NO: 352280 - DNA, 12 bp, Artificial Sequence
  Oligonucleotide primer for the detection of SNP TSC0047790
actactctttcc

SEQ ID NO: 352281 - DNA, 12 bp, Artificial Sequence
  Oligonucleotide primer for the detection of SNP TSC0047790
ttttatgaagta

SEQ ID NO: 352282 - DNA, 12 bp, Artificial Sequence
  Oligonucleotide primer for the detection of SNP TSC0047790
ttttacgaagta

SEQ ID NO: 352283 - DNA, 12 bp, Artificial Sequence
  Oligonucleotide primer for the detection of SNP TSC0047793
tggttttcggta

SEQ ID NO: 352284 - DNA, 12 bp, Artificial Sequence
  Oligonucleotide primer for the detection of SNP TSC0047794
ttaaataacctt

SEQ ID NO: 352285 - DNA, 12 bp, Artificial Sequence
  Oligonucleotide primer for the detection of SNP TSC0047794
ttaagaaatata

SEQ ID NO: 352286 - DNA, 12 bp, Artificial Sequence
  Oligonucleotide primer for the detection of SNP TSC0047795
ccaaaaacccat

SEQ ID NO: 352287 - DNA, 12 bp, Artificial Sequence
  Oligonucleotide primer for the detection of SNP TSC0047795
tttagaggttgg

SEQ ID NO: 352288 - DNA, 12 bp, Artificial Sequence
  Oligonucleotide primer for the detection of SNP TSC0047796
taaaatcttact

SEQ ID NO: 352289 - DNA, 12 bp, Artificial Sequence
  Oligonucleotide primer for the detection of SNP TSC0047796
tggggttttgtt

SEQ ID NO: 352290 - DNA, 12 bp, Artificial Sequence
  Oligonucleotide primer for the detection of SNP TSC0047797
taactctaatat

SEQ ID NO: 352291 - DNA, 12 bp, Artificial Sequence
  Oligonucleotide primer for the detection of SNP TSC0047797
gttgttttgatg

SEQ ID NO: 352292 - DNA, 12 bp, Artificial Sequence
  Oligonucleotide primer for the detection of SNP TSC0047798
actatattaccc

SEQ ID NO: 352293 - DNA, 12 bp, Artificial Sequence
  Oligonucleotide primer for the detection of SNP TSC0047798
atttgagtttag

SEQ ID NO: 352294 - DNA, 12 bp, Artificial Sequence
  Oligonucleotide primer for the detection of SNP TSC0047798
attatgttattt

SEQ ID NO: 352295 - DNA, 12 bp, Artificial Sequence
  Oligonucleotide primer for the detection of SNP TSC0047799
ttgggtattaga

SEQ ID NO: 352296 - DNA, 12 bp, Artificial Sequence
  Oligonucleotide primer for the detection of SNP TSC0047800
aaaaataattat

SEQ ID NO: 352297 - DNA, 12 bp, Artificial Sequence
  Oligonucleotide primer for the detection of SNP TSC0047800
aacaatccttcc

SEQ ID NO: 352298 - DNA, 12 bp, Artificial Sequence
  Oligonucleotide primer for the detection of SNP TSC0047800
ggaagtaattgt

SEQ ID NO: 352299 - DNA, 12 bp, Artificial Sequence
  Oligonucleotide primer for the detection of SNP TSC0047801
aacctaactctc

SEQ ID NO: 352300 - DNA, 12 bp, Artificial Sequence
  Oligonucleotide primer for the detection of SNP TSC0047801
atatttctccta

SEQ ID NO: 352301 - DNA, 12 bp, Artificial Sequence
  Oligonucleotide primer for the detection of SNP TSC0047803
tacattatatct

SEQ ID NO: 352302 - DNA, 12 bp, Artificial Sequence
  Oligonucleotide primer for the detection of SNP TSC0047803
taagattaaagt

SEQ ID NO: 352303 - DNA, 12 bp, Artificial Sequence
  Oligonucleotide primer for the detection of SNP TSC0047803
ctaaaaccaaaa

SEQ ID NO: 352304 - DNA, 12 bp, Artificial Sequence
  Oligonucleotide primer for the detection of SNP TSC0047804
caaaacccacca

SEQ ID NO: 352305 - DNA, 12 bp, Artificial Sequence
  Oligonucleotide primer for the detection of SNP TSC0047804
atgtatgtgtag

SEQ ID NO: 352306 - DNA, 12 bp, Artificial Sequence
  Oligonucleotide primer for the detection of SNP TSC0047806
cacaaaactatt

SEQ ID NO: 352307 - DNA, 12 bp, Artificial Sequence
  Oligonucleotide primer for the detection of SNP TSC0047806
tttttgagagta

SEQ ID NO: 352308 - DNA, 12 bp, Artificial Sequence
  Oligonucleotide primer for the detection of SNP TSC0047807
agaaattttgga

SEQ ID NO: 352309 - DNA, 12 bp, Artificial Sequence
  Oligonucleotide primer for the detection of SNP TSC0047813
tccttacatccc

SEQ ID NO: 352310 - DNA, 12 bp, Artificial Sequence
  Oligonucleotide primer for the detection of SNP TSC0047813
gttaaagagtta

SEQ ID NO: 352311 - DNA, 12 bp, Artificial Sequence
  Oligonucleotide primer for the detection of SNP TSC0047814
aacatactcatc

SEQ ID NO: 352312 - DNA, 12 bp, Artificial Sequence
  Oligonucleotide primer for the detection of SNP TSC0047814
aacatactcgtc

SEQ ID NO: 352313 - DNA, 12 bp, Artificial Sequence
  Oligonucleotide primer for the detection of SNP TSC0047814
gtgagggttagt

SEQ ID NO: 352314 - DNA, 12 bp, Artificial Sequence
  Oligonucleotide primer for the detection of SNP TSC0047814
gcgagggttagt

SEQ ID NO: 352315 - DNA, 12 bp, Artificial Sequence
  Oligonucleotide primer for the detection of SNP TSC0047814
aacgaaaactaa

SEQ ID NO: 352316 - DNA, 12 bp, Artificial Sequence
  Oligonucleotide primer for the detection of SNP TSC0047814
gatatgtttgtt

SEQ ID NO: 352317 - DNA, 12 bp, Artificial Sequence
  Oligonucleotide primer for the detection of SNP TSC0047814
gatatgttcgtt

SEQ ID NO: 352318 - DNA, 12 bp, Artificial Sequence
  Oligonucleotide primer for the detection of SNP TSC0047814
gatatgtttgtc

SEQ ID NO: 352319 - DNA, 12 bp, Artificial Sequence
  Oligonucleotide primer for the detection of SNP TSC0047814
gatatgttcgtc

SEQ ID NO: 352320 - DNA, 12 bp, Artificial Sequence
  Oligonucleotide primer for the detection of SNP TSC0047815
aaacccctcacc

SEQ ID NO: 352321 - DNA, 12 bp, Artificial Sequence
  Oligonucleotide primer for the detection of SNP TSC0047815
aaacccctcgcc

SEQ ID NO: 352322 - DNA, 12 bp, Artificial Sequence
  Oligonucleotide primer for the detection of SNP TSC0047815
ttttgtgtggga

SEQ ID NO: 352323 - DNA, 12 bp, Artificial Sequence
  Oligonucleotide primer for the detection of SNP TSC0047815
tttcgtgtggga

SEQ ID NO: 352324 - DNA, 12 bp, Artificial Sequence
  Oligonucleotide primer for the detection of SNP TSC0047815
tctcatataaaa

SEQ ID NO: 352325 - DNA, 12 bp, Artificial Sequence
  Oligonucleotide primer for the detection of SNP TSC0047815
tctcgtataaaa

SEQ ID NO: 352326 - DNA, 12 bp, Artificial Sequence
  Oligonucleotide primer for the detection of SNP TSC0047815
aggtttttcgtt

SEQ ID NO: 352327 - DNA, 12 bp, Artificial Sequence
  Oligonucleotide primer for the detection of SNP TSC0047816
aaaacctccaaa

SEQ ID NO: 352328 - DNA, 12 bp, Artificial Sequence
  Oligonucleotide primer for the detection of SNP TSC0047816
agatatatttat

SEQ ID NO: 352329 - DNA, 12 bp, Artificial Sequence
  Oligonucleotide primer for the detection of SNP TSC0047816
agatatatttac

SEQ ID NO: 352330 - DNA, 12 bp, Artificial Sequence
  Oligonucleotide primer for the detection of SNP TSC0047816
taaacacattca

SEQ ID NO: 352331 - DNA, 12 bp, Artificial Sequence
  Oligonucleotide primer for the detection of SNP TSC0047816
gagatttttaaa

SEQ ID NO: 352332 - DNA, 12 bp, Artificial Sequence
  Oligonucleotide primer for the detection of SNP TSC0047817
aatggatttttg

SEQ ID NO: 352333 - DNA, 12 bp, Artificial Sequence
  Oligonucleotide primer for the detection of SNP TSC0047817
aaaatgtttaga

SEQ ID NO: 352334 - DNA, 12 bp, Artificial Sequence
  Oligonucleotide primer for the detection of SNP TSC0047818
atacttccctac

SEQ ID NO: 352335 - DNA, 12 bp, Artificial Sequence
  Oligonucleotide primer for the detection of SNP TSC0047818
taatttaatagt

SEQ ID NO: 352336 - DNA, 12 bp, Artificial Sequence
  Oligonucleotide primer for the detection of SNP TSC0047818
caactcaacaat

SEQ ID NO: 352337 - DNA, 12 bp, Artificial Sequence
  Oligonucleotide primer for the detection of SNP TSC0047819
tgggatgtgaga

SEQ ID NO: 352338 - DNA, 12 bp, Artificial Sequence
  Oligonucleotide primer for the detection of SNP TSC0047823
actaatcattaa

SEQ ID NO: 352339 - DNA, 12 bp, Artificial Sequence
  Oligonucleotide primer for the detection of SNP TSC0047823
agttttggtttg

SEQ ID NO: 352340 - DNA, 12 bp, Artificial Sequence
  Oligonucleotide primer for the detection of SNP TSC0047823
attgattattaa

SEQ ID NO: 352341 - DNA, 12 bp, Artificial Sequence
  Oligonucleotide primer for the detection of SNP TSC0047824
taatgaaaataa

SEQ ID NO: 352342 - DNA, 12 bp, Artificial Sequence
  Oligonucleotide primer for the detection of SNP TSC0047826
atattaaaatta

SEQ ID NO: 352343 - DNA, 12 bp, Artificial Sequence
  Oligonucleotide primer for the detection of SNP TSC0047826
gtggtttatatt

SEQ ID NO: 352344 - DNA, 12 bp, Artificial Sequence
  Oligonucleotide primer for the detection of SNP TSC0047826
gtgttgggatta

SEQ ID NO: 352345 - DNA, 12 bp, Artificial Sequence
  Oligonucleotide primer for the detection of SNP TSC0047828
aactataaatat

SEQ ID NO: 352346 - DNA, 12 bp, Artificial Sequence
  Oligonucleotide primer for the detection of SNP TSC0047829
aactttcactac

SEQ ID NO: 352347 - DNA, 12 bp, Artificial Sequence
  Oligonucleotide primer for the detection of SNP TSC0047829
aactttcgctac

SEQ ID NO: 352348 - DNA, 12 bp, Artificial Sequence
  Oligonucleotide primer for the detection of SNP TSC0047829
ttgaggaaaata

SEQ ID NO: 352349 - DNA, 12 bp, Artificial Sequence
  Oligonucleotide primer for the detection of SNP TSC0047830
taatcccaaacc

SEQ ID NO: 352350 - DNA, 12 bp, Artificial Sequence
  Oligonukleotid-Primer
ataattagaaat

SEQ ID NO: 352351 - DNA, 12 bp, Artificial Sequence
  Oligonucleotide primer for the detection of SNP TSC0047831
ttgtagagattg

SEQ ID NO: 352352 - DNA, 12 bp, Artificial Sequence
  Oligonucleotide primer for the detection of SNP TSC0047831
ttacaaaaatta

SEQ ID NO: 352353 - DNA, 12 bp, Artificial Sequence
  Oligonucleotide primer for the detection of SNP TSC0047832
ctacttttaatt

SEQ ID NO: 352354 - DNA, 12 bp, Artificial Sequence
  Oligonukleotid-Primer
ttttcttattac

SEQ ID NO: 352355 - DNA, 12 bp, Artificial Sequence
  Oligonucleotide primer for the detection of SNP TSC0047833
ataaaatatcat

SEQ ID NO: 352356 - DNA, 12 bp, Artificial Sequence
  Oligonucleotide primer for the detection of SNP TSC0047833
ggatattttagg

SEQ ID NO: 352357 - DNA, 12 bp, Artificial Sequence
  Oligonucleotide primer for the detection of SNP TSC0047834
tattcatttcac

SEQ ID NO: 352358 - DNA, 12 bp, Artificial Sequence
  Oligonucleotide primer for the detection of SNP TSC0047836
aaaattaaaaca

SEQ ID NO: 352359 - DNA, 12 bp, Artificial Sequence
  Oligonucleotide primer for the detection of SNP TSC0047836
tataggaaaagt

SEQ ID NO: 352360 - DNA, 12 bp, Artificial Sequence
  Oligonucleotide primer for the detection of SNP TSC0047836
gaaattgagata

SEQ ID NO: 352361 - DNA, 12 bp, Artificial Sequence
  Oligonucleotide primer for the detection of SNP TSC0047837
atttactcatac

SEQ ID NO: 352362 - DNA, 12 bp, Artificial Sequence
  Oligonukleotid-Primer
ttgttatgtgtg

SEQ ID NO: 352363 - DNA, 12 bp, Artificial Sequence
  Oligonucleotide primer for the detection of SNP TSC0047838
tgagattgtatt

SEQ ID NO: 352364 - DNA, 12 bp, Artificial Sequence
  Oligonucleotide primer for the detection of SNP TSC0047838
gttggagtgtga

SEQ ID NO: 352365 - DNA, 12 bp, Artificial Sequence
  Oligonucleotide primer for the detection of SNP TSC0047838
gttggagtgcga

SEQ ID NO: 352366 - DNA, 12 bp, Artificial Sequence
  Oligonukleotid-Primer
tatataatttaa

SEQ ID NO: 352367 - DNA, 12 bp, Artificial Sequence
  Oligonucleotide primer for the detection of SNP TSC0047839
cacataatccaa

SEQ ID NO: 352368 - DNA, 12 bp, Artificial Sequence
  Oligonucleotide primer for the detection of SNP TSC0047839
taagttagtagt

SEQ ID NO: 352369 - DNA, 12 bp, Artificial Sequence
  Oligonucleotide primer for the detection of SNP TSC0047842
aataactcttac

SEQ ID NO: 352370 - DNA, 12 bp, Artificial Sequence
  Oligonucleotide primer for the detection of SNP TSC0047842
tttaggattttg

SEQ ID NO: 352371 - DNA, 12 bp, Artificial Sequence
  Oligonucleotide primer for the detection of SNP TSC0047844
attaaaatgaag

SEQ ID NO: 352372 - DNA, 12 bp, Artificial Sequence
  Oligonucleotide primer for the detection of SNP TSC0047846
acctcattaata

SEQ ID NO: 352373 - DNA, 12 bp, Artificial Sequence
  Oligonucleotide primer for the detection of SNP TSC0047846
ataaagtttaat

SEQ ID NO: 352374 - DNA, 12 bp, Artificial Sequence
  Oligonukleotid-Primer
acaaaacctaac

SEQ ID NO: 352375 - DNA, 12 bp, Artificial Sequence
  Oligonucleotide primer for the detection of SNP TSC0047846
attttattgata

SEQ ID NO: 352376 - DNA, 12 bp, Artificial Sequence
  Oligonucleotide primer for the detection of SNP TSC0004866
actaaatatacc

SEQ ID NO: 352377 - DNA, 12 bp, Artificial Sequence
  Oligonucleotide primer for the detection of SNP TSC0004866
agggatgtttaa

SEQ ID NO: 352378 - DNA, 12 bp, Artificial Sequence
  Oligonucleotide primer for the detection of SNP TSC0004866
attgggtatgtt

SEQ ID NO: 352379 - DNA, 12 bp, Artificial Sequence
  Oligonucleotide primer for the detection of SNP TSC0004867
tatcaactactt

SEQ ID NO: 352380 - DNA, 12 bp, Artificial Sequence
  Oligonucleotide primer for the detection of SNP TSC0004867
tttgatatggta

SEQ ID NO: 352381 - DNA, 12 bp, Artificial Sequence
  Oligonucleotide primer for the detection of SNP TSC0004867
tttgatacggta

SEQ ID NO: 352382 - DNA, 12 bp, Artificial Sequence
  Oligonucleotide primer for the detection of SNP TSC0004868
ctaaaattaact

SEQ ID NO: 352383 - DNA, 12 bp, Artificial Sequence
  Oligonucleotide primer for the detection of SNP TSC0004868
gtaaagtaaatt

SEQ ID NO: 352384 - DNA, 12 bp, Artificial Sequence
  Oligonucleotide primer for the detection of SNP TSC0004868
ataaaataaatc

SEQ ID NO: 352385 - DNA, 12 bp, Artificial Sequence
  Oligonucleotide primer for the detection of SNP TSC0004868
ttagggttgatt

SEQ ID NO: 352386 - DNA, 12 bp, Artificial Sequence
  Oligonucleotide primer for the detection of SNP TSC0047850
tttcttacaatc

SEQ ID NO: 352387 - DNA, 12 bp, Artificial Sequence
  Oligonucleotide primer for the detection of SNP TSC0047853
ctcttataacac

SEQ ID NO: 352388 - DNA, 12 bp, Artificial Sequence
  Oligonucleotide primer for the detection of SNP TSC0047854
acacaattatat

SEQ ID NO: 352389 - DNA, 12 bp, Artificial Sequence
  Oligonucleotide primer for the detection of SNP TSC0047854
tttttgtgatta

SEQ ID NO: 352390 - DNA, 12 bp, Artificial Sequence
  Oligonucleotide primer for the detection of SNP TSC0047857
taaatatcaaaa

SEQ ID NO: 352391 - DNA, 12 bp, Artificial Sequence
  Oligonucleotide primer for the detection of SNP TSC0047857
aatgtttatttt

SEQ ID NO: 352392 - DNA, 12 bp, Artificial Sequence
  Oligonucleotide primer for the detection of SNP TSC0047857
aatacttatccc

SEQ ID NO: 352393 - DNA, 12 bp, Artificial Sequence
  Oligonucleotide primer for the detection of SNP TSC0047857
taaatattagaa

SEQ ID NO: 352394 - DNA, 12 bp, Artificial Sequence
  Oligonucleotide primer for the detection of SNP TSC0006134
aataaactttat

SEQ ID NO: 352395 - DNA, 12 bp, Artificial Sequence
  Oligonucleotide primer for the detection of SNP TSC0006134
ttggggtggggt

SEQ ID NO: 352396 - DNA, 12 bp, Artificial Sequence
  Oligonucleotide primer for the detection of SNP TSC0006134
tcggggtggggt

SEQ ID NO: 352397 - DNA, 12 bp, Artificial Sequence
  Oligonucleotide primer for the detection of SNP TSC0006134
ccaaaataaaat

SEQ ID NO: 352398 - DNA, 12 bp, Artificial Sequence
  Oligonucleotide primer for the detection of SNP TSC0006134
ccgaaataaaat

SEQ ID NO: 352399 - DNA, 12 bp, Artificial Sequence
  Oligonucleotide primer for the detection of SNP TSC0006134
ggtgaattttat

SEQ ID NO: 352400 - DNA, 12 bp, Artificial Sequence
  Oligonucleotide primer for the detection of SNP TSC0006135
tcacaaactcac

SEQ ID NO: 352401 - DNA, 12 bp, Artificial Sequence
  Oligonucleotide primer for the detection of SNP TSC0006135
tgtttattttag

SEQ ID NO: 352402 - DNA, 12 bp, Artificial Sequence
  Oligonucleotide primer for the detection of SNP TSC0047860
tataaaagagtt

SEQ ID NO: 352403 - DNA, 12 bp, Artificial Sequence
  Oligonucleotide primer for the detection of SNP TSC0047860
tataaaaaaacc

SEQ ID NO: 352404 - DNA, 12 bp, Artificial Sequence
  Oligonucleotide primer for the detection of SNP TSC0047863
aaacccgtaaat

SEQ ID NO: 352405 - DNA, 12 bp, Artificial Sequence
  Oligonucleotide primer for the detection of SNP TSC0047863
tatgtaaggtaa

SEQ ID NO: 352406 - DNA, 12 bp, Artificial Sequence
  Oligonucleotide primer for the detection of SNP TSC0047863
catacaaaataa

SEQ ID NO: 352407 - DNA, 12 bp, Artificial Sequence
  Oligonucleotide primer for the detection of SNP TSC0047863
gaatttgtaaat

SEQ ID NO: 352408 - DNA, 12 bp, Artificial Sequence
  Oligonucleotide primer for the detection of SNP TSC0047863
gaattcgtaaat

SEQ ID NO: 352409 - DNA, 12 bp, Artificial Sequence
  Oligonucleotide primer for the detection of SNP TSC0047864
attatatttttc

SEQ ID NO: 352410 - DNA, 12 bp, Artificial Sequence
  Oligonucleotide primer for the detection of SNP TSC0047864
accatacccccc

SEQ ID NO: 352411 - DNA, 12 bp, Artificial Sequence
  Oligonucleotide primer for the detection of SNP TSC0047864
aggaagaaaagt

SEQ ID NO: 352412 - DNA, 12 bp, Artificial Sequence
  Oligonucleotide primer for the detection of SNP TSC0047865
tttgtttggaag

SEQ ID NO: 352413 - DNA, 12 bp, Artificial Sequence
  Oligonucleotide primer for the detection of SNP TSC0047866
taaaaaaaaacc

SEQ ID NO: 352414 - DNA, 12 bp, Artificial Sequence
  Oligonucleotide primer for the detection of SNP TSC0047866
tgttatatgagg

SEQ ID NO: 352415 - DNA, 12 bp, Artificial Sequence
  Oligonucleotide primer for the detection of SNP TSC0047866
cgttatatgagg

SEQ ID NO: 352416 - DNA, 12 bp, Artificial Sequence
  Oligonucleotide primer for the detection of SNP TSC0047868
acaataaattta

SEQ ID NO: 352417 - DNA, 12 bp, Artificial Sequence
  Oligonucleotide primer for the detection of SNP TSC0047868
gatgaaaaaaat

SEQ ID NO: 352418 - DNA, 12 bp, Artificial Sequence
  Oligonucleotide primer for the detection of SNP TSC0047868
cgataaaaaaaa

SEQ ID NO: 352419 - DNA, 12 bp, Artificial Sequence
  Oligonucleotide primer for the detection of SNP TSC0047868
taatgagtttat

SEQ ID NO: 352420 - DNA, 12 bp, Artificial Sequence
  Oligonucleotide primer for the detection of SNP TSC0047869
tcataaaacaaa

SEQ ID NO: 352421 - DNA, 12 bp, Artificial Sequence
  Oligonucleotide primer for the detection of SNP TSC0047869
gaagatttttgg

SEQ ID NO: 352422 - DNA, 12 bp, Artificial Sequence
  Oligonucleotide primer for the detection of SNP TSC0047869
tttatagaatag

SEQ ID NO: 352423 - DNA, 12 bp, Artificial Sequence
  Oligonucleotide primer for the detection of SNP TSC0006422
tcaaattattct

SEQ ID NO: 352424 - DNA, 12 bp, Artificial Sequence
  Oligonucleotide primer for the detection of SNP TSC0006422
tgaaggatgtta

SEQ ID NO: 352425 - DNA, 12 bp, Artificial Sequence
  Oligonucleotide primer for the detection of SNP TSC0047870
taacactacaat

SEQ ID NO: 352426 - DNA, 12 bp, Artificial Sequence
  Oligonucleotide primer for the detection of SNP TSC0047871
atttattatctt

SEQ ID NO: 352427 - DNA, 12 bp, Artificial Sequence
  Oligonucleotide primer for the detection of SNP TSC0047871
gaaatttaggag

SEQ ID NO: 352428 - DNA, 12 bp, Artificial Sequence
  Oligonucleotide primer for the detection of SNP TSC0047873
tctttataaatt

SEQ ID NO: 352429 - DNA, 12 bp, Artificial Sequence
  Oligonucleotide primer for the detection of SNP TSC0047873
agaagaattttt

SEQ ID NO: 352430 - DNA, 12 bp, Artificial Sequence
  Oligonucleotide primer for the detection of SNP TSC0047873
tttttatagatt

SEQ ID NO: 352431 - DNA, 12 bp, Artificial Sequence
  Oligonucleotide primer for the detection of SNP TSC0047874
aatatataaaaa

SEQ ID NO: 352432 - DNA, 12 bp, Artificial Sequence
  Oligonucleotide primer for the detection of SNP TSC0047874
ataacttatatc

SEQ ID NO: 352433 - DNA, 12 bp, Artificial Sequence
  Oligonucleotide primer for the detection of SNP TSC0047874
agtgtgtaaaaa

SEQ ID NO: 352434 - DNA, 12 bp, Artificial Sequence
  Oligonucleotide primer for the detection of SNP TSC0047875
aatatacctccc

SEQ ID NO: 352435 - DNA, 12 bp, Artificial Sequence
  Oligonucleotide primer for the detection of SNP TSC0047876
atttccacttat

SEQ ID NO: 352436 - DNA, 12 bp, Artificial Sequence
  Oligonucleotide primer for the detection of SNP TSC0047876
gttatttttgag

SEQ ID NO: 352437 - DNA, 12 bp, Artificial Sequence
  Oligonucleotide primer for the detection of SNP TSC0047877
ctattaaccctc

SEQ ID NO: 352438 - DNA, 12 bp, Artificial Sequence
  Oligonucleotide primer for the detection of SNP TSC0047879
atcctccttttt

SEQ ID NO: 352439 - DNA, 12 bp, Artificial Sequence
  Oligonucleotide primer for the detection of SNP TSC0047879
aaaataaatgga

SEQ ID NO: 352440 - DNA, 12 bp, Artificial Sequence
  Oligonucleotide primer for the detection of SNP TSC0047880
tacatatttata

SEQ ID NO: 352441 - DNA, 12 bp, Artificial Sequence
  Oligonucleotide primer for the detection of SNP TSC0047880
taagatataatt

SEQ ID NO: 352442 - DNA, 12 bp, Artificial Sequence
  Oligonucleotide primer for the detection of SNP TSC0047880
caaaatataatt

SEQ ID NO: 352443 - DNA, 12 bp, Artificial Sequence
  Oligonucleotide primer for the detection of SNP TSC0047882
tcaaaccactcc

SEQ ID NO: 352444 - DNA, 12 bp, Artificial Sequence
  Oligonucleotide primer for the detection of SNP TSC0047882
tcgaaccactcc

SEQ ID NO: 352445 - DNA, 12 bp, Artificial Sequence
  Oligonucleotide primer for the detection of SNP TSC0047882
tggtagggtggg

SEQ ID NO: 352446 - DNA, 12 bp, Artificial Sequence
  Oligonucleotide primer for the detection of SNP TSC0047882
tggtagggcggg

SEQ ID NO: 352447 - DNA, 12 bp, Artificial Sequence
  Oligonucleotide primer for the detection of SNP TSC0047883
aaactataaacc

SEQ ID NO: 352448 - DNA, 12 bp, Artificial Sequence
  Oligonucleotide primer for the detection of SNP TSC0047883
aaaagagattta

SEQ ID NO: 352449 - DNA, 12 bp, Artificial Sequence
  Oligonucleotide primer for the detection of SNP TSC0047884
ctaaatcttctt

SEQ ID NO: 352450 - DNA, 12 bp, Artificial Sequence
  Oligonucleotide primer for the detection of SNP TSC0047885
aaacatacacca

SEQ ID NO: 352451 - DNA, 12 bp, Artificial Sequence
  Oligonucleotide primer for the detection of SNP TSC0047885
aaacatacgcca

SEQ ID NO: 352452 - DNA, 12 bp, Artificial Sequence
  Oligonucleotide primer for the detection of SNP TSC0047885
atttagttgggt

SEQ ID NO: 352453 - DNA, 12 bp, Artificial Sequence
  Oligonucleotide primer for the detection of SNP TSC0047885
atttaactaaat

SEQ ID NO: 352454 - DNA, 12 bp, Artificial Sequence
  Oligonucleotide primer for the detection of SNP TSC0047885
aggtatgcgtta

SEQ ID NO: 352455 - DNA, 12 bp, Artificial Sequence
  Oligonucleotide primer for the detection of SNP TSC0047886
ctataccacccc

SEQ ID NO: 352456 - DNA, 12 bp, Artificial Sequence
  Oligonucleotide primer for the detection of SNP TSC0047886
tggggggggtgg

SEQ ID NO: 352457 - DNA, 12 bp, Artificial Sequence
  Oligonucleotide primer for the detection of SNP TSC0047887
gaaagaaattag

SEQ ID NO: 352458 - DNA, 12 bp, Artificial Sequence
  Oligonucleotide primer for the detection of SNP TSC0047888
caacatcaaact

SEQ ID NO: 352459 - DNA, 12 bp, Artificial Sequence
  Oligonucleotide primer for the detection of SNP TSC0047888
atgtaggtatag

SEQ ID NO: 352460 - DNA, 12 bp, Artificial Sequence
  Oligonucleotide primer for the detection of SNP TSC0047889
atttatttttga

SEQ ID NO: 352461 - DNA, 12 bp, Artificial Sequence
  Oligonucleotide primer for the detection of SNP TSC0047890
aatgaagttaaa

SEQ ID NO: 352462 - DNA, 12 bp, Artificial Sequence
  Oligonucleotide primer for the detection of SNP TSC0047890
tgagaaatagtg

SEQ ID NO: 352463 - DNA, 12 bp, Artificial Sequence
  Oligonucleotide primer for the detection of SNP TSC0047894
tacactaatcac

SEQ ID NO: 352464 - DNA, 12 bp, Artificial Sequence
  Oligonucleotide primer for the detection of SNP TSC0047894
gttatattattt

SEQ ID NO: 352465 - DNA, 12 bp, Artificial Sequence
  Oligonucleotide primer for the detection of SNP TSC0047894
ttacatcaccta

SEQ ID NO: 352466 - DNA, 12 bp, Artificial Sequence
  Oligonucleotide primer for the detection of SNP TSC0047894
tgtattgattat

SEQ ID NO: 352467 - DNA, 12 bp, Artificial Sequence
  Oligonucleotide primer for the detection of SNP TSC0047895
tgatttaaatta

SEQ ID NO: 352468 - DNA, 12 bp, Artificial Sequence
  Oligonucleotide primer for the detection of SNP TSC0047896
tatcatctaaat

SEQ ID NO: 352469 - DNA, 12 bp, Artificial Sequence
  Oligonucleotide primer for the detection of SNP TSC0047896
tctctcccctca

SEQ ID NO: 352470 - DNA, 12 bp, Artificial Sequence
  Oligonucleotide primer for the detection of SNP TSC0047898
gaacaaaaaaat

SEQ ID NO: 352471 - DNA, 12 bp, Artificial Sequence
  Oligonucleotide primer for the detection of SNP TSC0047898
aatttctcccca

SEQ ID NO: 352472 - DNA, 12 bp, Artificial Sequence
  Oligonucleotide primer for the detection of SNP TSC0047898
gggtaggagggt

SEQ ID NO: 352473 - DNA, 12 bp, Artificial Sequence
  Oligonucleotide primer for the detection of SNP TSC0047899
tttatattcaac

SEQ ID NO: 352474 - DNA, 12 bp, Artificial Sequence
  Oligonucleotide primer for the detection of SNP TSC0047900
taatttaataat

SEQ ID NO: 352475 - DNA, 12 bp, Artificial Sequence
  Oligonucleotide primer for the detection of SNP TSC0047900
attagaattatt

SEQ ID NO: 352476 - DNA, 12 bp, Artificial Sequence
  Oligonucleotide primer for the detection of SNP TSC0047900
attaaaactact

SEQ ID NO: 352477 - DNA, 12 bp, Artificial Sequence
  Oligonucleotide primer for the detection of SNP TSC0047900
tagtttaataat

SEQ ID NO: 352478 - DNA, 12 bp, Artificial Sequence
  Oligonucleotide primer for the detection of SNP TSC0047901
tcaatataattt

SEQ ID NO: 352479 - DNA, 12 bp, Artificial Sequence
  Oligonucleotide primer for the detection of SNP TSC0047901
tagaattattaa

SEQ ID NO: 352480 - DNA, 12 bp, Artificial Sequence
  Oligonucleotide primer for the detection of SNP TSC0047902
agttattgagga

SEQ ID NO: 352481 - DNA, 12 bp, Artificial Sequence
  Oligonucleotide primer for the detection of SNP TSC0047902
aaccattaaaaa

SEQ ID NO: 352482 - DNA, 12 bp, Artificial Sequence
  Oligonucleotide primer for the detection of SNP TSC0047902
ttagataaaaaa

SEQ ID NO: 352483 - DNA, 12 bp, Artificial Sequence
  Oligonucleotide primer for the detection of SNP TSC0047903
atatctacactc

SEQ ID NO: 352484 - DNA, 12 bp, Artificial Sequence
  Oligonucleotide primer for the detection of SNP TSC0047903
gtaataaatata

SEQ ID NO: 352485 - DNA, 12 bp, Artificial Sequence
  Oligonucleotide primer for the detection of SNP TSC0047911
atatttaggttg

SEQ ID NO: 352486 - DNA, 12 bp, Artificial Sequence
  Oligonucleotide primer for the detection of SNP TSC0047912
ataaaaaaattc

SEQ ID NO: 352487 - DNA, 12 bp, Artificial Sequence
  Oligonucleotide primer for the detection of SNP TSC0047912
ttaagtaaaaag

SEQ ID NO: 352488 - DNA, 12 bp, Artificial Sequence
  Oligonucleotide primer for the detection of SNP TSC0047912
gtaggaagattt

SEQ ID NO: 352489 - DNA, 12 bp, Artificial Sequence
  Oligonucleotide primer for the detection of SNP TSC0047921
caaaacacttaa

SEQ ID NO: 352490 - DNA, 12 bp, Artificial Sequence
  Oligonucleotide primer for the detection of SNP TSC0047921
ttggggaagggt

SEQ ID NO: 352491 - DNA, 12 bp, Artificial Sequence
  Oligonucleotide primer for the detection of SNP TSC0047921
tagggtatttgg

SEQ ID NO: 352492 - DNA, 12 bp, Artificial Sequence
  Oligonucleotide primer for the detection of SNP TSC0047922
aatcataaacca

SEQ ID NO: 352493 - DNA, 12 bp, Artificial Sequence
  Oligonucleotide primer for the detection of SNP TSC0047923
tcaattcaccaa

SEQ ID NO: 352494 - DNA, 12 bp, Artificial Sequence
  Oligonucleotide primer for the detection of SNP TSC0047923
ttttttagtatt

SEQ ID NO: 352495 - DNA, 12 bp, Artificial Sequence
  Oligonucleotide primer for the detection of SNP TSC0047923
tttcttaacatt

SEQ ID NO: 352496 - DNA, 12 bp, Artificial Sequence
  Oligonucleotide primer for the detection of SNP TSC0047925
cttccttaaata

SEQ ID NO: 352497 - DNA, 12 bp, Artificial Sequence
  Oligonucleotide primer for the detection of SNP TSC0047925
aggatagagatt

SEQ ID NO: 352498 - DNA, 12 bp, Artificial Sequence
  Oligonucleotide primer for the detection of SNP TSC0047926
caataccataca

SEQ ID NO: 352499 - DNA, 12 bp, Artificial Sequence
  Oligonucleotide primer for the detection of SNP TSC0047926
gtaattgtgtgt

SEQ ID NO: 352500 - DNA, 12 bp, Artificial Sequence
  Oligonucleotide primer for the detection of SNP TSC0047926
acaattatatac

SEQ ID NO: 352501 - DNA, 12 bp, Artificial Sequence
  Oligonucleotide primer for the detection of SNP TSC0047926
tagtattatgta

SEQ ID NO: 352502 - DNA, 12 bp, Artificial Sequence
  Oligonucleotide primer for the detection of SNP TSC0047928
aataaaatagat

SEQ ID NO: 352503 - DNA, 12 bp, Artificial Sequence
  Oligonucleotide primer for the detection of SNP TSC0047929
tatttttataac

SEQ ID NO: 352504 - DNA, 12 bp, Artificial Sequence
  Oligonucleotide primer for the detection of SNP TSC0047929
attaagagtata

SEQ ID NO: 352505 - DNA, 12 bp, Artificial Sequence
  Oligonucleotide primer for the detection of SNP TSC0005543
atttactttcaa

SEQ ID NO: 352506 - DNA, 12 bp, Artificial Sequence
  Oligonucleotide primer for the detection of SNP TSC0005543
atttactttcga

SEQ ID NO: 352507 - DNA, 12 bp, Artificial Sequence
  Oligonucleotide primer for the detection of SNP TSC0005543
taactttaaaaa

SEQ ID NO: 352508 - DNA, 12 bp, Artificial Sequence
  Oligonucleotide primer for the detection of SNP TSC0005543
gtttgttttcgg

SEQ ID NO: 352509 - DNA, 12 bp, Artificial Sequence
  Oligonucleotide primer for the detection of SNP TSC0007850
cttcttataatt

SEQ ID NO: 352510 - DNA, 12 bp, Artificial Sequence
  Oligonucleotide primer for the detection of SNP TSC0007850
ttataaggagaa

SEQ ID NO: 352511 - DNA, 12 bp, Artificial Sequence
  Oligonucleotide primer for the detection of SNP TSC0007851
attttcccaaat

SEQ ID NO: 352512 - DNA, 12 bp, Artificial Sequence
  Oligonucleotide primer for the detection of SNP TSC0007852
aggtatataaaa

SEQ ID NO: 352513 - DNA, 12 bp, Artificial Sequence
  Oligonucleotide primer for the detection of SNP TSC0007852
ggggaaagtatt

SEQ ID NO: 352514 - DNA, 12 bp, Artificial Sequence
  Oligonucleotide primer for the detection of SNP TSC0006970
ttttttctatct

SEQ ID NO: 352515 - DNA, 12 bp, Artificial Sequence
  Oligonucleotide primer for the detection of SNP TSC0006970
tttaatagttag

SEQ ID NO: 352516 - DNA, 12 bp, Artificial Sequence
  Oligonucleotide primer for the detection of SNP TSC0047930
ataggtaggtag

SEQ ID NO: 352517 - DNA, 12 bp, Artificial Sequence
  Oligonucleotide primer for the detection of SNP TSC0047931
atcttaatcaac

SEQ ID NO: 352518 - DNA, 12 bp, Artificial Sequence
  Oligonucleotide primer for the detection of SNP TSC0047931
agaatatttttg

SEQ ID NO: 352519 - DNA, 12 bp, Artificial Sequence
  Oligonucleotide primer for the detection of SNP TSC0047936
cactaaataatt

SEQ ID NO: 352520 - DNA, 12 bp, Artificial Sequence
  Oligonucleotide primer for the detection of SNP TSC0047936
gaagtagttatg

SEQ ID NO: 352521 - DNA, 12 bp, Artificial Sequence
  Oligonucleotide primer for the detection of SNP TSC0005457
aaattactctta

SEQ ID NO: 352522 - DNA, 12 bp, Artificial Sequence
  Oligonucleotide primer for the detection of SNP TSC0005457
gggaattttaat

SEQ ID NO: 352523 - DNA, 12 bp, Artificial Sequence
  Oligonucleotide primer for the detection of SNP TSC0047937
aaatataagtta

SEQ ID NO: 352524 - DNA, 12 bp, Artificial Sequence
  Oligonucleotide primer for the detection of SNP TSC0047938
aactattcctcc

SEQ ID NO: 352525 - DNA, 12 bp, Artificial Sequence
  Oligonucleotide primer for the detection of SNP TSC0047938
aattttatgtga

SEQ ID NO: 352526 - DNA, 12 bp, Artificial Sequence
  Oligonucleotide primer for the detection of SNP TSC0047939
gttggaattttg

SEQ ID NO: 352527 - DNA, 12 bp, Artificial Sequence
  Oligonucleotide primer for the detection of SNP TSC0047939
gtcggaattttg

SEQ ID NO: 352528 - DNA, 12 bp, Artificial Sequence
  Oligonucleotide primer for the detection of SNP TSC0047943
taggagtttgtg

SEQ ID NO: 352529 - DNA, 12 bp, Artificial Sequence
  Oligonucleotide primer for the detection of SNP TSC0047944
aatttccctcta

SEQ ID NO: 352530 - DNA, 12 bp, Artificial Sequence
  Oligonucleotide primer for the detection of SNP TSC0047944
taggaattgggg

SEQ ID NO: 352531 - DNA, 12 bp, Artificial Sequence
  Oligonucleotide primer for the detection of SNP TSC0047945
caacaatttaaa

SEQ ID NO: 352532 - DNA, 12 bp, Artificial Sequence
  Oligonucleotide primer for the detection of SNP TSC0047945
tagtaatttggg

SEQ ID NO: 352533 - DNA, 12 bp, Artificial Sequence
  Oligonucleotide primer for the detection of SNP TSC0047946
tttgggttggtt

SEQ ID NO: 352534 - DNA, 12 bp, Artificial Sequence
  Oligonucleotide primer for the detection of SNP TSC0047946
tacctaaattaa

SEQ ID NO: 352535 - DNA, 12 bp, Artificial Sequence
  Oligonucleotide primer for the detection of SNP TSC0047947
ttaaaatttgaa

SEQ ID NO: 352536 - DNA, 12 bp, Artificial Sequence
  Oligonucleotide primer for the detection of SNP TSC0047948
attcatttatta

SEQ ID NO: 352537 - DNA, 12 bp, Artificial Sequence
  Oligonucleotide primer for the detection of SNP TSC0047948
attcgtttatta

SEQ ID NO: 352538 - DNA, 12 bp, Artificial Sequence
  Oligonucleotide primer for the detection of SNP TSC0047948
acacttattata

SEQ ID NO: 352539 - DNA, 12 bp, Artificial Sequence
  Oligonucleotide primer for the detection of SNP TSC0047948
tcgtttattatt

SEQ ID NO: 352540 - DNA, 12 bp, Artificial Sequence
  Oligonucleotide primer for the detection of SNP TSC0047951
acttcaaacact

SEQ ID NO: 352541 - DNA, 12 bp, Artificial Sequence
  Oligonucleotide primer for the detection of SNP TSC0047951
aagattttttta

SEQ ID NO: 352542 - DNA, 12 bp, Artificial Sequence
  Oligonucleotide primer for the detection of SNP TSC0047951
gttttaaatatt

SEQ ID NO: 352543 - DNA, 12 bp, Artificial Sequence
  Oligonucleotide primer for the detection of SNP TSC0047952
aattacaaaaaa

SEQ ID NO: 352544 - DNA, 12 bp, Artificial Sequence
  Oligonucleotide primer for the detection of SNP TSC0047952
tatagggtgaag

SEQ ID NO: 352545 - DNA, 12 bp, Artificial Sequence
  Oligonucleotide primer for the detection of SNP TSC0047952
gagttataggga

SEQ ID NO: 352546 - DNA, 12 bp, Artificial Sequence
  Oligonucleotide primer for the detection of SNP TSC0047953
tcaaaaaaactc

SEQ ID NO: 352547 - DNA, 12 bp, Artificial Sequence
  Oligonucleotide primer for the detection of SNP TSC0047953
ttgaattttcgg

SEQ ID NO: 352548 - DNA, 12 bp, Artificial Sequence
  Oligonucleotide primer for the detection of SNP TSC0047953
aaattcccaaaa

SEQ ID NO: 352549 - DNA, 12 bp, Artificial Sequence
  Oligonucleotide primer for the detection of SNP TSC0047953
aaattcccgaaa

SEQ ID NO: 352550 - DNA, 12 bp, Artificial Sequence
  Oligonucleotide primer for the detection of SNP TSC0047953
ttaaaggagttt

SEQ ID NO: 352551 - DNA, 12 bp, Artificial Sequence
  Oligonucleotide primer for the detection of SNP TSC0047953
ttaaaggagttc

SEQ ID NO: 352552 - DNA, 12 bp, Artificial Sequence
  Oligonucleotide primer for the detection of SNP TSC0047955
tagtataggata

SEQ ID NO: 352553 - DNA, 12 bp, Artificial Sequence
  Oligonucleotide primer for the detection of SNP TSC0047955
caacacaaaaca

SEQ ID NO: 352554 - DNA, 12 bp, Artificial Sequence
  Oligonucleotide primer for the detection of SNP TSC0047955
gaaagggttaat

SEQ ID NO: 352555 - DNA, 12 bp, Artificial Sequence
  Oligonucleotide primer for the detection of SNP TSC0047957
cccaactactct

SEQ ID NO: 352556 - DNA, 12 bp, Artificial Sequence
  Oligonucleotide primer for the detection of SNP TSC0047957
aaaggattaatg

SEQ ID NO: 352557 - DNA, 12 bp, Artificial Sequence
  Oligonucleotide primer for the detection of SNP TSC0047958
acttatttcact

SEQ ID NO: 352558 - DNA, 12 bp, Artificial Sequence
  Oligonucleotide primer for the detection of SNP TSC0047958
aggatgttatgg

SEQ ID NO: 352559 - DNA, 12 bp, Artificial Sequence
  Oligonucleotide primer for the detection of SNP TSC0047958
aggacgttatgg

SEQ ID NO: 352560 - DNA, 12 bp, Artificial Sequence
  Oligonucleotide primer for the detection of SNP TSC0047959
tcaacattcctt

SEQ ID NO: 352561 - DNA, 12 bp, Artificial Sequence
  Oligonucleotide primer for the detection of SNP TSC0047959
tgaagttaggaa

SEQ ID NO: 352562 - DNA, 12 bp, Artificial Sequence
  Oligonucleotide primer for the detection of SNP TSC0047962
tcattttttaaa

SEQ ID NO: 352563 - DNA, 12 bp, Artificial Sequence
  Oligonucleotide primer for the detection of SNP TSC0047962
aaggaattgtat

SEQ ID NO: 352564 - DNA, 12 bp, Artificial Sequence
  Oligonucleotide primer for the detection of SNP TSC0047968
aattaatttaat

SEQ ID NO: 352565 - DNA, 12 bp, Artificial Sequence
  Oligonucleotide primer for the detection of SNP TSC0047968
taatattagtat

SEQ ID NO: 352566 - DNA, 12 bp, Artificial Sequence
  Oligonucleotide primer for the detection of SNP TSC0047972
acaaaactcaac

SEQ ID NO: 352567 - DNA, 12 bp, Artificial Sequence
  Oligonucleotide primer for the detection of SNP TSC0047972
aatagagataag

SEQ ID NO: 352568 - DNA, 12 bp, Artificial Sequence
  Oligonucleotide primer for the detection of SNP TSC0008645
tatatattttcc

SEQ ID NO: 352569 - DNA, 12 bp, Artificial Sequence
  Oligonucleotide primer for the detection of SNP TSC0008645
aaaaaagagaaa

SEQ ID NO: 352570 - DNA, 12 bp, Artificial Sequence
  Oligonucleotide primer for the detection of SNP TSC0008646
cctttcctctaa

SEQ ID NO: 352571 - DNA, 12 bp, Artificial Sequence
  Oligonucleotide primer for the detection of SNP TSC0008646
aagatattttta

SEQ ID NO: 352572 - DNA, 12 bp, Artificial Sequence
  Oligonucleotide primer for the detection of SNP TSC0008646
aacacccccaaa

SEQ ID NO: 352573 - DNA, 12 bp, Artificial Sequence
  Oligonucleotide primer for the detection of SNP TSC0047976
atctcaaatacc

SEQ ID NO: 352574 - DNA, 12 bp, Artificial Sequence
  Oligonucleotide primer for the detection of SNP TSC0047976
gtaagatattgg

SEQ ID NO: 352575 - DNA, 12 bp, Artificial Sequence
  Oligonucleotide primer for the detection of SNP TSC0047980
aataaatcttaa

SEQ ID NO: 352576 - DNA, 12 bp, Artificial Sequence
  Oligonucleotide primer for the detection of SNP TSC0047980
ttagattatatt

SEQ ID NO: 352577 - DNA, 12 bp, Artificial Sequence
  Oligonucleotide primer for the detection of SNP TSC0047980
ttaaattatact

SEQ ID NO: 352578 - DNA, 12 bp, Artificial Sequence
  Oligonucleotide primer for the detection of SNP TSC0007896
aaaaaattttta

SEQ ID NO: 352579 - DNA, 12 bp, Artificial Sequence
  Oligonucleotide primer for the detection of SNP TSC0004773
gttttttttgag

SEQ ID NO: 352580 - DNA, 12 bp, Artificial Sequence
  Oligonucleotide primer for the detection of SNP TSC0010434
caatataatact

SEQ ID NO: 352581 - DNA, 12 bp, Artificial Sequence
  Oligonucleotide primer for the detection of SNP TSC0010434
cgatataatact

SEQ ID NO: 352582 - DNA, 12 bp, Artificial Sequence
  Oligonucleotide primer for the detection of SNP TSC0010434
aggggggtgaaa

SEQ ID NO: 352583 - DNA, 12 bp, Artificial Sequence
  Oligonucleotide primer for the detection of SNP TSC0010434
aggggggcgaaa

SEQ ID NO: 352584 - DNA, 12 bp, Artificial Sequence
  Oligonucleotide primer for the detection of SNP TSC0007996
aaaattattaat

SEQ ID NO: 352585 - DNA, 12 bp, Artificial Sequence
  Oligonucleotide primer for the detection of SNP TSC0007996
tgtgagtttgaa

SEQ ID NO: 352586 - DNA, 12 bp, Artificial Sequence
  Oligonucleotide primer for the detection of SNP TSC0007996
aaaattgttgat

SEQ ID NO: 352587 - DNA, 12 bp, Artificial Sequence
  Oligonucleotide primer for the detection of SNP TSC0008401
aaatttgtgagt

SEQ ID NO: 352588 - DNA, 12 bp, Artificial Sequence
  Oligonucleotide primer for the detection of SNP TSC0005279
tactatatctta

SEQ ID NO: 352589 - DNA, 12 bp, Artificial Sequence
  Oligonucleotide primer for the detection of SNP TSC0005279
gtgtggatagat

SEQ ID NO: 352590 - DNA, 12 bp, Artificial Sequence
  Oligonucleotide primer for the detection of SNP TSC0047981
ctaccaatcaat

SEQ ID NO: 352591 - DNA, 12 bp, Artificial Sequence
  Oligonucleotide primer for the detection of SNP TSC0047981
tagaggaaaagt

SEQ ID NO: 352592 - DNA, 12 bp, Artificial Sequence
  Oligonucleotide primer for the detection of SNP TSC0047981
ttattaattagt

SEQ ID NO: 352593 - DNA, 12 bp, Artificial Sequence
  Oligonucleotide primer for the detection of SNP TSC0047982
ctcccctaccct

SEQ ID NO: 352594 - DNA, 12 bp, Artificial Sequence
  Oligonucleotide primer for the detection of SNP TSC0047982
ttatgtttgtag

SEQ ID NO: 352595 - DNA, 12 bp, Artificial Sequence
  Oligonucleotide primer for the detection of SNP TSC0047983
aatcatctaaaa

SEQ ID NO: 352596 - DNA, 12 bp, Artificial Sequence
  Oligonucleotide primer for the detection of SNP TSC0047983
aatcgtctaaaa

SEQ ID NO: 352597 - DNA, 12 bp, Artificial Sequence
  Oligonucleotide primer for the detection of SNP TSC0047983
ttggagagtttt

SEQ ID NO: 352598 - DNA, 12 bp, Artificial Sequence
  Oligonucleotide primer for the detection of SNP TSC0047983
ttaaaaaactct

SEQ ID NO: 352599 - DNA, 12 bp, Artificial Sequence
  Oligonucleotide primer for the detection of SNP TSC0047983
ggttgtttagga

SEQ ID NO: 352600 - DNA, 12 bp, Artificial Sequence
  Oligonucleotide primer for the detection of SNP TSC0047983
ggtcgtttagga

SEQ ID NO: 352601 - DNA, 12 bp, Artificial Sequence
  Oligonucleotide primer for the detection of SNP TSC0047984
ggagttaaaagg

SEQ ID NO: 352602 - DNA, 12 bp, Artificial Sequence
  Oligonucleotide primer for the detection of SNP TSC0047986
gttaggagtatt

SEQ ID NO: 352603 - DNA, 12 bp, Artificial Sequence
  Oligonucleotide primer for the detection of SNP TSC0047986
actaaaaacatt

SEQ ID NO: 352604 - DNA, 12 bp, Artificial Sequence
  Oligonucleotide primer for the detection of SNP TSC0047987
ttaattacaaat

SEQ ID NO: 352605 - DNA, 12 bp, Artificial Sequence
  Oligonucleotide primer for the detection of SNP TSC0047987
gtaaatatttga

SEQ ID NO: 352606 - DNA, 12 bp, Artificial Sequence
  Oligonucleotide primer for the detection of SNP TSC0047989
aaatccttattc

SEQ ID NO: 352607 - DNA, 12 bp, Artificial Sequence
  Oligonucleotide primer for the detection of SNP TSC0047989
aaggttttttgg

SEQ ID NO: 352608 - DNA, 12 bp, Artificial Sequence
  Oligonucleotide primer for the detection of SNP TSC0047993
actaaatctata

SEQ ID NO: 352609 - DNA, 12 bp, Artificial Sequence
  Oligonucleotide primer for the detection of SNP TSC0047993
gttgatatagaa

SEQ ID NO: 352610 - DNA, 12 bp, Artificial Sequence
  Oligonucleotide primer for the detection of SNP TSC0047993
attaacacaaaa

SEQ ID NO: 352611 - DNA, 12 bp, Artificial Sequence
  Oligonucleotide primer for the detection of SNP TSC0047993
attgggtttgta

SEQ ID NO: 352612 - DNA, 12 bp, Artificial Sequence
  Oligonucleotide primer for the detection of SNP TSC0047994
aaaacatatttt

SEQ ID NO: 352613 - DNA, 12 bp, Artificial Sequence
  Oligonucleotide primer for the detection of SNP TSC0047994
aatgaataaatg

SEQ ID NO: 352614 - DNA, 12 bp, Artificial Sequence
  Oligonucleotide primer for the detection of SNP TSC0047995
tttctctaacta

SEQ ID NO: 352615 - DNA, 12 bp, Artificial Sequence
  Oligonucleotide primer for the detection of SNP TSC0047995
tatagtttatat

SEQ ID NO: 352616 - DNA, 12 bp, Artificial Sequence
  Oligonucleotide primer for the detection of SNP TSC0047995
cataacttatat

SEQ ID NO: 352617 - DNA, 12 bp, Artificial Sequence
  Oligonucleotide primer for the detection of SNP TSC0047995
tttttttagttg

SEQ ID NO: 352618 - DNA, 12 bp, Artificial Sequence
  Oligonucleotide primer for the detection of SNP TSC0047996
acctaaaaaaac

SEQ ID NO: 352619 - DNA, 12 bp, Artificial Sequence
  Oligonucleotide primer for the detection of SNP TSC0047996
tggataaattgg

SEQ ID NO: 352620 - DNA, 12 bp, Artificial Sequence
  Oligonucleotide primer for the detection of SNP TSC0047996
taaacaaattaa

SEQ ID NO: 352621 - DNA, 12 bp, Artificial Sequence
  Oligonucleotide primer for the detection of SNP TSC0047996
atttgagggaat

SEQ ID NO: 352622 - DNA, 12 bp, Artificial Sequence
  Oligonucleotide primer for the detection of SNP TSC0047997
tcaatttccttc

SEQ ID NO: 352623 - DNA, 12 bp, Artificial Sequence
  Oligonucleotide primer for the detection of SNP TSC0047997
gaaggaattaag

SEQ ID NO: 352624 - DNA, 12 bp, Artificial Sequence
  Oligonucleotide primer for the detection of SNP TSC0047999
tccaatctacct

SEQ ID NO: 352625 - DNA, 12 bp, Artificial Sequence
  Oligonucleotide primer for the detection of SNP TSC0047999
attttgatttaa

SEQ ID NO: 352626 - DNA, 12 bp, Artificial Sequence
  Oligonucleotide primer for the detection of SNP TSC0048000
ttacaaaacctc

SEQ ID NO: 352627 - DNA, 12 bp, Artificial Sequence
  Oligonucleotide primer for the detection of SNP TSC0048000
tttgtagggatt

SEQ ID NO: 352628 - DNA, 12 bp, Artificial Sequence
  Oligonucleotide primer for the detection of SNP TSC0048000
ttgtagggtttt

SEQ ID NO: 352629 - DNA, 12 bp, Artificial Sequence
  Oligonucleotide primer for the detection of SNP TSC0048002
aaacctaaaccc

SEQ ID NO: 352630 - DNA, 12 bp, Artificial Sequence
  Oligonucleotide primer for the detection of SNP TSC0048002
tatcttattctc

SEQ ID NO: 352631 - DNA, 12 bp, Artificial Sequence
  Oligonukleotid-Primer
gaatttagattt

SEQ ID NO: 352632 - DNA, 12 bp, Artificial Sequence
  Oligonucleotide primer for the detection of SNP TSC0048003
tagtttattttg

SEQ ID NO: 352633 - DNA, 12 bp, Artificial Sequence
  Oligonucleotide primer for the detection of SNP TSC0048005
tttaacacaaac

SEQ ID NO: 352634 - DNA, 12 bp, Artificial Sequence
  Oligonucleotide primer for the detection of SNP TSC0048005
gtttgaggaaaa

SEQ ID NO: 352635 - DNA, 12 bp, Artificial Sequence
  Oligonucleotide primer for the detection of SNP TSC0048006
gttagtttgggt

SEQ ID NO: 352636 - DNA, 12 bp, Artificial Sequence
  Oligonucleotide primer for the detection of SNP TSC0048006
gttagtttgggc

SEQ ID NO: 352637 - DNA, 12 bp, Artificial Sequence
  Oligonucleotide primer for the detection of SNP TSC0048006
taccaacctaaa

SEQ ID NO: 352638 - DNA, 12 bp, Artificial Sequence
  Oligonucleotide primer for the detection of SNP TSC0048007
gtttgttatgta

SEQ ID NO: 352639 - DNA, 12 bp, Artificial Sequence
  Oligonucleotide primer for the detection of SNP TSC0048008
taaaataaccct

SEQ ID NO: 352640 - DNA, 12 bp, Artificial Sequence
  Oligonucleotide primer for the detection of SNP TSC0048008
ggtggtatttgg

SEQ ID NO: 352641 - DNA, 12 bp, Artificial Sequence
  Oligonucleotide primer for the detection of SNP TSC0048009
ttttggaattaa

SEQ ID NO: 352642 - DNA, 12 bp, Artificial Sequence
  Oligonucleotide primer for the detection of SNP TSC0048009
tttggtatatgt

SEQ ID NO: 352643 - DNA, 12 bp, Artificial Sequence
  Oligonucleotide primer for the detection of SNP TSC0048013
ttaatgtgtgta

SEQ ID NO: 352644 - DNA, 12 bp, Artificial Sequence
  Oligonucleotide primer for the detection of SNP TSC0048013
ccaatatatata

SEQ ID NO: 352645 - DNA, 12 bp, Artificial Sequence
  Oligonucleotide primer for the detection of SNP TSC0048013
taggttataagg

SEQ ID NO: 352646 - DNA, 12 bp, Artificial Sequence
  Oligonucleotide primer for the detection of SNP TSC0048014
taacaacaatac

SEQ ID NO: 352647 - DNA, 12 bp, Artificial Sequence
  Oligonukleotid-Primer
gagttttaaatg

SEQ ID NO: 352648 - DNA, 12 bp, Artificial Sequence
  Oligonucleotide primer for the detection of SNP TSC0048015
atgtattttaaa

SEQ ID NO: 352649 - DNA, 12 bp, Artificial Sequence
  Oligonucleotide primer for the detection of SNP TSC0048015
atacattttaaa

SEQ ID NO: 352650 - DNA, 12 bp, Artificial Sequence
  Oligonucleotide primer for the detection of SNP TSC0048015
agagaaaggaaa

SEQ ID NO: 352651 - DNA, 12 bp, Artificial Sequence
  Oligonukleotid-Primer
aaattatactcc

SEQ ID NO: 352652 - DNA, 12 bp, Artificial Sequence
  Oligonucleotide primer for the detection of SNP TSC0048016
atatgggaatta

SEQ ID NO: 352653 - DNA, 12 bp, Artificial Sequence
  Oligonucleotide primer for the detection of SNP TSC0048017
atactaataaat

SEQ ID NO: 352654 - DNA, 12 bp, Artificial Sequence
  Oligonucleotide primer for the detection of SNP TSC0048017
tatggtttttaa

SEQ ID NO: 352655 - DNA, 12 bp, Artificial Sequence
  Oligonukleotid-Primer
agaagttataat

SEQ ID NO: 352656 - DNA, 12 bp, Artificial Sequence
  Oligonucleotide primer for the detection of SNP TSC0048018
atatagatttaa

SEQ ID NO: 352657 - DNA, 12 bp, Artificial Sequence
  Oligonucleotide primer for the detection of SNP TSC0048022
caaaactttaaa

SEQ ID NO: 352658 - DNA, 12 bp, Artificial Sequence
  Oligonucleotide primer for the detection of SNP TSC0048022
tttatatttggt

SEQ ID NO: 352659 - DNA, 12 bp, Artificial Sequence
  Oligonucleotide primer for the detection of SNP TSC0048022
atccacatttaa

SEQ ID NO: 352660 - DNA, 12 bp, Artificial Sequence
  Oligonucleotide primer for the detection of SNP TSC0048022
aagttttggatt

SEQ ID NO: 352661 - DNA, 12 bp, Artificial Sequence
  Oligonucleotide primer for the detection of SNP TSC0048023
cataaacacctt

SEQ ID NO: 352662 - DNA, 12 bp, Artificial Sequence
  Oligonucleotide primer for the detection of SNP TSC0048023
tataatttttta

SEQ ID NO: 352663 - DNA, 12 bp, Artificial Sequence
  Oligonucleotide primer for the detection of SNP TSC0048024
cctactttctta

SEQ ID NO: 352664 - DNA, 12 bp, Artificial Sequence
  Oligonucleotide primer for the detection of SNP TSC0048024
aacactcctaac

SEQ ID NO: 352665 - DNA, 12 bp, Artificial Sequence
  Oligonucleotide primer for the detection of SNP TSC0048025
taccataaaatc

SEQ ID NO: 352666 - DNA, 12 bp, Artificial Sequence
  Oligonucleotide primer for the detection of SNP TSC0048025
accaccttctaa

SEQ ID NO: 352667 - DNA, 12 bp, Artificial Sequence
  Oligonucleotide primer for the detection of SNP TSC0048025
tgttatagaatt

SEQ ID NO: 352668 - DNA, 12 bp, Artificial Sequence
  Oligonucleotide primer for the detection of SNP TSC0048026
cctacccaaaat

SEQ ID NO: 352669 - DNA, 12 bp, Artificial Sequence
  Oligonucleotide primer for the detection of SNP TSC0048026
tatgtatttatt

SEQ ID NO: 352670 - DNA, 12 bp, Artificial Sequence
  Oligonucleotide primer for the detection of SNP TSC0048026
atatactcacta

SEQ ID NO: 352671 - DNA, 12 bp, Artificial Sequence
  Oligonucleotide primer for the detection of SNP TSC0048026
ttgtttaaaatt

SEQ ID NO: 352672 - DNA, 12 bp, Artificial Sequence
  Oligonucleotide primer for the detection of SNP TSC0048027
ctttactaaatc

SEQ ID NO: 352673 - DNA, 12 bp, Artificial Sequence
  Oligonucleotide primer for the detection of SNP TSC0048027
attgtaaaaggt

SEQ ID NO: 352674 - DNA, 12 bp, Artificial Sequence
  Oligonucleotide primer for the detection of SNP TSC0048027
tttgttgaattt

SEQ ID NO: 352675 - DNA, 12 bp, Artificial Sequence
  Oligonucleotide primer for the detection of SNP TSC0048028
taaaaaaattac

SEQ ID NO: 352676 - DNA, 12 bp, Artificial Sequence
  Oligonucleotide primer for the detection of SNP TSC0048029
tattacactatc

SEQ ID NO: 352677 - DNA, 12 bp, Artificial Sequence
  Oligonucleotide primer for the detection of SNP TSC0048029
tattgtggtttg

SEQ ID NO: 352678 - DNA, 12 bp, Artificial Sequence
  Oligonucleotide primer for the detection of SNP TSC0048029
actataatctaa

SEQ ID NO: 352679 - DNA, 12 bp, Artificial Sequence
  Oligonucleotide primer for the detection of SNP TSC0048031
aacaaaactcct

SEQ ID NO: 352680 - DNA, 12 bp, Artificial Sequence
  Oligonucleotide primer for the detection of SNP TSC0048031
aacgaaactcct

SEQ ID NO: 352681 - DNA, 12 bp, Artificial Sequence
  Oligonucleotide primer for the detection of SNP TSC0048031
attgtaggaagg

SEQ ID NO: 352682 - DNA, 12 bp, Artificial Sequence
  Oligonucleotide primer for the detection of SNP TSC0048031
ggtgggattttt

SEQ ID NO: 352683 - DNA, 12 bp, Artificial Sequence
  Oligonucleotide primer for the detection of SNP TSC0048031
ggcgggattttt

SEQ ID NO: 352684 - DNA, 12 bp, Artificial Sequence
  Oligonucleotide primer for the detection of SNP TSC0048032
tctacctccctt

SEQ ID NO: 352685 - DNA, 12 bp, Artificial Sequence
  Oligonucleotide primer for the detection of SNP TSC0048032
tatttttgttaa

SEQ ID NO: 352686 - DNA, 12 bp, Artificial Sequence
  Oligonucleotide primer for the detection of SNP TSC0048032
tatttttaccaa

SEQ ID NO: 352687 - DNA, 12 bp, Artificial Sequence
  Oligonucleotide primer for the detection of SNP TSC0048033
ctctaatacctt

SEQ ID NO: 352688 - DNA, 12 bp, Artificial Sequence
  Oligonucleotide primer for the detection of SNP TSC0048037
tatggatagaat

SEQ ID NO: 352689 - DNA, 12 bp, Artificial Sequence
  Oligonucleotide primer for the detection of SNP TSC0048037
tatggatagaac

SEQ ID NO: 352690 - DNA, 12 bp, Artificial Sequence
  Oligonucleotide primer for the detection of SNP TSC0048037
ctataaataaaa

SEQ ID NO: 352691 - DNA, 12 bp, Artificial Sequence
  Oligonucleotide primer for the detection of SNP TSC0048037
ttggggtattgt

SEQ ID NO: 352692 - DNA, 12 bp, Artificial Sequence
  Oligonucleotide primer for the detection of SNP TSC0048038
caacttaaaacc

SEQ ID NO: 352693 - DNA, 12 bp, Artificial Sequence
  Oligonucleotide primer for the detection of SNP TSC0048038
aaattctataca

SEQ ID NO: 352694 - DNA, 12 bp, Artificial Sequence
  Oligonucleotide primer for the detection of SNP TSC0048039
cacaaactaaat

SEQ ID NO: 352695 - DNA, 12 bp, Artificial Sequence
  Oligonucleotide primer for the detection of SNP TSC0048040
tttggagaaggg

SEQ ID NO: 352696 - DNA, 12 bp, Artificial Sequence
  Oligonucleotide primer for the detection of SNP TSC0048041
aattttaactca

SEQ ID NO: 352697 - DNA, 12 bp, Artificial Sequence
  Oligonucleotide primer for the detection of SNP TSC0048041
caactctcttat

SEQ ID NO: 352698 - DNA, 12 bp, Artificial Sequence
  Oligonucleotide primer for the detection of SNP TSC0048044
taaatatactta

SEQ ID NO: 352699 - DNA, 12 bp, Artificial Sequence
  Oligonucleotide primer for the detection of SNP TSC0048044
tataattgaagt

SEQ ID NO: 352700 - DNA, 12 bp, Artificial Sequence
  Oligonucleotide primer for the detection of SNP TSC0048044
cacaactaaaac

SEQ ID NO: 352701 - DNA, 12 bp, Artificial Sequence
  Oligonucleotide primer for the detection of SNP TSC0048044
ggatatatttat

SEQ ID NO: 352702 - DNA, 12 bp, Artificial Sequence
  Oligonucleotide primer for the detection of SNP TSC0048044
ggatatatttac

SEQ ID NO: 352703 - DNA, 12 bp, Artificial Sequence
  Oligonucleotide primer for the detection of SNP TSC0048045
aatttataatca

SEQ ID NO: 352704 - DNA, 12 bp, Artificial Sequence
  Oligonucleotide primer for the detection of SNP TSC0048045
agtttataatta

SEQ ID NO: 352705 - DNA, 12 bp, Artificial Sequence
  Oligonucleotide primer for the detection of SNP TSC0048048
ttatatagggag

SEQ ID NO: 352706 - DNA, 12 bp, Artificial Sequence
  Oligonucleotide primer for the detection of SNP TSC0048049
tccccataactt

SEQ ID NO: 352707 - DNA, 12 bp, Artificial Sequence
  Oligonucleotide primer for the detection of SNP TSC0048049
cctaaaacctcc

SEQ ID NO: 352708 - DNA, 12 bp, Artificial Sequence
  Oligonucleotide primer for the detection of SNP TSC0048051
acaccatttatt

SEQ ID NO: 352709 - DNA, 12 bp, Artificial Sequence
  Oligonucleotide primer for the detection of SNP TSC0048051
ggattttttatt

SEQ ID NO: 352710 - DNA, 12 bp, Artificial Sequence
  Oligonucleotide primer for the detection of SNP TSC0048051
aaaaactcccta

SEQ ID NO: 352711 - DNA, 12 bp, Artificial Sequence
  Oligonucleotide primer for the detection of SNP TSC0048052
aatattaccatt

SEQ ID NO: 352712 - DNA, 12 bp, Artificial Sequence
  Oligonucleotide primer for the detection of SNP TSC0048052
gtaatattatta

SEQ ID NO: 352713 - DNA, 12 bp, Artificial Sequence
  Oligonucleotide primer for the detection of SNP TSC0048052
acaatattacta

SEQ ID NO: 352714 - DNA, 12 bp, Artificial Sequence
  Oligonucleotide primer for the detection of SNP TSC0048052
agtattgttatt

SEQ ID NO: 352715 - DNA, 12 bp, Artificial Sequence
  Oligonucleotide primer for the detection of SNP TSC0048053
tcaattactatt

SEQ ID NO: 352716 - DNA, 12 bp, Artificial Sequence
  Oligonucleotide primer for the detection of SNP TSC0048053
ttatttattaga

SEQ ID NO: 352717 - DNA, 12 bp, Artificial Sequence
  Oligonucleotide primer for the detection of SNP TSC0048055
ttaaccttctaa

SEQ ID NO: 352718 - DNA, 12 bp, Artificial Sequence
  Oligonucleotide primer for the detection of SNP TSC0048055
atgtgattattt

SEQ ID NO: 352719 - DNA, 12 bp, Artificial Sequence
  Oligonucleotide primer for the detection of SNP TSC0048055
atataattattt

SEQ ID NO: 352720 - DNA, 12 bp, Artificial Sequence
  Oligonucleotide primer for the detection of SNP TSC0048056
taaattaacttt

SEQ ID NO: 352721 - DNA, 12 bp, Artificial Sequence
  Oligonucleotide primer for the detection of SNP TSC0048056
ttaatacatcta

SEQ ID NO: 352722 - DNA, 12 bp, Artificial Sequence
  Oligonucleotide primer for the detection of SNP TSC0048058
tgtttaagttgg

SEQ ID NO: 352723 - DNA, 12 bp, Artificial Sequence
  Oligonucleotide primer for the detection of SNP TSC0048059
tcctaaccctaa

SEQ ID NO: 352724 - DNA, 12 bp, Artificial Sequence
  Oligonucleotide primer for the detection of SNP TSC0048059
taattggaaaat

SEQ ID NO: 352725 - DNA, 12 bp, Artificial Sequence
  Oligonucleotide primer for the detection of SNP TSC0048063
taacccacataa

SEQ ID NO: 352726 - DNA, 12 bp, Artificial Sequence
  Oligonucleotide primer for the detection of SNP TSC0048063
tttggtttatat

SEQ ID NO: 352727 - DNA, 12 bp, Artificial Sequence
  Oligonucleotide primer for the detection of SNP TSC0048064
ccaaaatcaaaa

SEQ ID NO: 352728 - DNA, 12 bp, Artificial Sequence
  Oligonucleotide primer for the detection of SNP TSC0048064
ccaaaatcgaaa

SEQ ID NO: 352729 - DNA, 12 bp, Artificial Sequence
  Oligonucleotide primer for the detection of SNP TSC0048064
tttgttgttatt

SEQ ID NO: 352730 - DNA, 12 bp, Artificial Sequence
  Oligonucleotide primer for the detection of SNP TSC0048064
tttgtcgttatt

SEQ ID NO: 352731 - DNA, 12 bp, Artificial Sequence
  Oligonucleotide primer for the detection of SNP TSC0048064
tctaccaccacc

SEQ ID NO: 352732 - DNA, 12 bp, Artificial Sequence
  Oligonucleotide primer for the detection of SNP TSC0048064
tctaccgccacc

SEQ ID NO: 352733 - DNA, 12 bp, Artificial Sequence
  Oligonucleotide primer for the detection of SNP TSC0048064
ttaaggttgggg

SEQ ID NO: 352734 - DNA, 12 bp, Artificial Sequence
  Oligonucleotide primer for the detection of SNP TSC0048064
ttaaggtcgggg

SEQ ID NO: 352735 - DNA, 12 bp, Artificial Sequence
  Oligonucleotide primer for the detection of SNP TSC0048065
cattaaaaccac

SEQ ID NO: 352736 - DNA, 12 bp, Artificial Sequence
  Oligonucleotide primer for the detection of SNP TSC0048065
ttggaaatttta

SEQ ID NO: 352737 - DNA, 12 bp, Artificial Sequence
  Oligonucleotide primer for the detection of SNP TSC0048066
acttacttctta

SEQ ID NO: 352738 - DNA, 12 bp, Artificial Sequence
  Oligonucleotide primer for the detection of SNP TSC0048066
agagaatttagt

SEQ ID NO: 352739 - DNA, 12 bp, Artificial Sequence
  Oligonucleotide primer for the detection of SNP TSC0048068
catttcacctac

SEQ ID NO: 352740 - DNA, 12 bp, Artificial Sequence
  Oligonucleotide primer for the detection of SNP TSC0048068
tttaagtttttg

SEQ ID NO: 352741 - DNA, 12 bp, Artificial Sequence
  Oligonucleotide primer for the detection of SNP TSC0048069
tctctccattat

SEQ ID NO: 352742 - DNA, 12 bp, Artificial Sequence
  Oligonucleotide primer for the detection of SNP TSC0048069
tagtttagtaaa

SEQ ID NO: 352743 - DNA, 12 bp, Artificial Sequence
  Oligonucleotide primer for the detection of SNP TSC0048070
gggtataaaatt

SEQ ID NO: 352744 - DNA, 12 bp, Artificial Sequence
  Oligonucleotide primer for the detection of SNP TSC0048071
tccaaaaatttc

SEQ ID NO: 352745 - DNA, 12 bp, Artificial Sequence
  Oligonucleotide primer for the detection of SNP TSC0048071
ttgggaataaaa

SEQ ID NO: 352746 - DNA, 12 bp, Artificial Sequence
  Oligonucleotide primer for the detection of SNP TSC0048072
atcatccaattc

SEQ ID NO: 352747 - DNA, 12 bp, Artificial Sequence
  Oligonucleotide primer for the detection of SNP TSC0048073
ctttacacaaat

SEQ ID NO: 352748 - DNA, 12 bp, Artificial Sequence
  Oligonucleotide primer for the detection of SNP TSC0048073
gaagttattgta

SEQ ID NO: 352749 - DNA, 12 bp, Artificial Sequence
  Oligonucleotide primer for the detection of SNP TSC0048074
tctctcctcttt

SEQ ID NO: 352750 - DNA, 12 bp, Artificial Sequence
  Oligonucleotide primer for the detection of SNP TSC0048074
ttgtagtatttg

SEQ ID NO: 352751 - DNA, 12 bp, Artificial Sequence
  Oligonucleotide primer for the detection of SNP TSC0048076
ccattataaaac

SEQ ID NO: 352752 - DNA, 12 bp, Artificial Sequence
  Oligonucleotide primer for the detection of SNP TSC0048079
aaaatctaataa

SEQ ID NO: 352753 - DNA, 12 bp, Artificial Sequence
  Oligonucleotide primer for the detection of SNP TSC0048079
aaatttaggata

SEQ ID NO: 352754 - DNA, 12 bp, Artificial Sequence
  Oligonucleotide primer for the detection of SNP TSC0048079
aggatttaataa

SEQ ID NO: 352755 - DNA, 12 bp, Artificial Sequence
  Oligonucleotide primer for the detection of SNP TSC0048080
aaactaccctac

SEQ ID NO: 352756 - DNA, 12 bp, Artificial Sequence
  Oligonucleotide primer for the detection of SNP TSC0048080
tggggtattgtg

SEQ ID NO: 352757 - DNA, 12 bp, Artificial Sequence
  Oligonucleotide primer for the detection of SNP TSC0048082
taaatttcacta

SEQ ID NO: 352758 - DNA, 12 bp, Artificial Sequence
  Oligonucleotide primer for the detection of SNP TSC0048082
ttgtgaaaaatt

SEQ ID NO: 352759 - DNA, 12 bp, Artificial Sequence
  Oligonucleotide primer for the detection of SNP TSC0048082
tataaaaaatca

SEQ ID NO: 352760 - DNA, 12 bp, Artificial Sequence
  Oligonucleotide primer for the detection of SNP TSC0048083
tataatctaaac

SEQ ID NO: 352761 - DNA, 12 bp, Artificial Sequence
  Oligonucleotide primer for the detection of SNP TSC0048083
aatggtaaatag

SEQ ID NO: 352762 - DNA, 12 bp, Artificial Sequence
  Oligonucleotide primer for the detection of SNP TSC0048084
aactacaactac

SEQ ID NO: 352763 - DNA, 12 bp, Artificial Sequence
  Oligonucleotide primer for the detection of SNP TSC0048087
ttattcaatata

SEQ ID NO: 352764 - DNA, 12 bp, Artificial Sequence
  Oligonucleotide primer for the detection of SNP TSC0048087
aaaatacattta

SEQ ID NO: 352765 - DNA, 12 bp, Artificial Sequence
  Oligonucleotide primer for the detection of SNP TSC0048087
ttgtttagtatg

SEQ ID NO: 352766 - DNA, 12 bp, Artificial Sequence
  Oligonucleotide primer for the detection of SNP TSC0048088
tccaccatcaac

SEQ ID NO: 352767 - DNA, 12 bp, Artificial Sequence
  Oligonucleotide primer for the detection of SNP TSC0048088
gggagatggaaa

SEQ ID NO: 352768 - DNA, 12 bp, Artificial Sequence
  Oligonucleotide primer for the detection of SNP TSC0048089
aaatcatatata

SEQ ID NO: 352769 - DNA, 12 bp, Artificial Sequence
  Oligonucleotide primer for the detection of SNP TSC0048089
atgtttaaatat

SEQ ID NO: 352770 - DNA, 12 bp, Artificial Sequence
  Oligonucleotide primer for the detection of SNP TSC0048089
atattcaaatac

SEQ ID NO: 352771 - DNA, 12 bp, Artificial Sequence
  Oligonucleotide primer for the detection of SNP TSC0048089
ggattatgtata

SEQ ID NO: 352772 - DNA, 12 bp, Artificial Sequence
  Oligonucleotide primer for the detection of SNP TSC0048093
tccatctatccc

SEQ ID NO: 352773 - DNA, 12 bp, Artificial Sequence
  Oligonucleotide primer for the detection of SNP TSC0048093
gaaaggaatttg

SEQ ID NO: 352774 - DNA, 12 bp, Artificial Sequence
  Oligonucleotide primer for the detection of SNP TSC0048094
ttttctataatt

SEQ ID NO: 352775 - DNA, 12 bp, Artificial Sequence
  Oligonucleotide primer for the detection of SNP TSC0048094
atttaatgttta

SEQ ID NO: 352776 - DNA, 12 bp, Artificial Sequence
  Oligonucleotide primer for the detection of SNP TSC0048095
taataacatatt

SEQ ID NO: 352777 - DNA, 12 bp, Artificial Sequence
  Oligonucleotide primer for the detection of SNP TSC0048095
atgaagtggtaa

SEQ ID NO: 352778 - DNA, 12 bp, Artificial Sequence
  Oligonucleotide primer for the detection of SNP TSC0048095
ataaaataacaa

SEQ ID NO: 352779 - DNA, 12 bp, Artificial Sequence
  Oligonucleotide primer for the detection of SNP TSC0048095
tggtagtatatt

SEQ ID NO: 352780 - DNA, 12 bp, Artificial Sequence
  Oligonucleotide primer for the detection of SNP TSC0048096
atactaaaatct

SEQ ID NO: 352781 - DNA, 12 bp, Artificial Sequence
  Oligonucleotide primer for the detection of SNP TSC0048096
tttagataaaaa

SEQ ID NO: 352782 - DNA, 12 bp, Artificial Sequence
  Oligonucleotide primer for the detection of SNP TSC0048097
aaaaatacactt

SEQ ID NO: 352783 - DNA, 12 bp, Artificial Sequence
  Oligonucleotide primer for the detection of SNP TSC0048097
ttatagtttgtt

SEQ ID NO: 352784 - DNA, 12 bp, Artificial Sequence
  Oligonucleotide primer for the detection of SNP TSC0048097
ttatagttcgtt

SEQ ID NO: 352785 - DNA, 12 bp, Artificial Sequence
  Oligonucleotide primer for the detection of SNP TSC0048097
tacaattcatta

SEQ ID NO: 352786 - DNA, 12 bp, Artificial Sequence
  Oligonucleotide primer for the detection of SNP TSC0048097
tacaattcgtta

SEQ ID NO: 352787 - DNA, 12 bp, Artificial Sequence
  Oligonucleotide primer for the detection of SNP TSC0048097
gaggatatattt

SEQ ID NO: 352788 - DNA, 12 bp, Artificial Sequence
  Oligonucleotide primer for the detection of SNP TSC0048098
tttctatttaaa

SEQ ID NO: 352789 - DNA, 12 bp, Artificial Sequence
  Oligonucleotide primer for the detection of SNP TSC0048098
atttttgaaaat

SEQ ID NO: 352790 - DNA, 12 bp, Artificial Sequence
  Oligonucleotide primer for the detection of SNP TSC0048098
tttttatttaaa

SEQ ID NO: 352791 - DNA, 12 bp, Artificial Sequence
  Oligonucleotide primer for the detection of SNP TSC0048100
tagggaaaatat

SEQ ID NO: 352792 - DNA, 12 bp, Artificial Sequence
  Oligonucleotide primer for the detection of SNP TSC0048100
aaattttaaaag

SEQ ID NO: 352793 - DNA, 12 bp, Artificial Sequence
  Oligonucleotide primer for the detection of SNP TSC0048101
ataaacttaacc

SEQ ID NO: 352794 - DNA, 12 bp, Artificial Sequence
  Oligonucleotide primer for the detection of SNP TSC0048101
aaggtattaagg

SEQ ID NO: 352795 - DNA, 12 bp, Artificial Sequence
  Oligonucleotide primer for the detection of SNP TSC0048102
cataaaaacttc

SEQ ID NO: 352796 - DNA, 12 bp, Artificial Sequence
  Oligonucleotide primer for the detection of SNP TSC0048102
tttgtagtaggg

SEQ ID NO: 352797 - DNA, 12 bp, Artificial Sequence
  Oligonucleotide primer for the detection of SNP TSC0048103
aacccacttctc

SEQ ID NO: 352798 - DNA, 12 bp, Artificial Sequence
  Oligonucleotide primer for the detection of SNP TSC0048103
gtttattggagg

SEQ ID NO: 352799 - DNA, 12 bp, Artificial Sequence
  Oligonucleotide primer for the detection of SNP TSC0048105
aatctaattttt

SEQ ID NO: 352800 - DNA, 12 bp, Artificial Sequence
  Oligonucleotide primer for the detection of SNP TSC0048106
tcaatttcaaaa

SEQ ID NO: 352801 - DNA, 12 bp, Artificial Sequence
  Oligonucleotide primer for the detection of SNP TSC0048107
ttgtttattgta

SEQ ID NO: 352802 - DNA, 12 bp, Artificial Sequence
  Oligonucleotide primer for the detection of SNP TSC0048107
tcgtttattgta

SEQ ID NO: 352803 - DNA, 12 bp, Artificial Sequence
  Oligonucleotide primer for the detection of SNP TSC0048107
ccactcactaca

SEQ ID NO: 352804 - DNA, 12 bp, Artificial Sequence
  Oligonucleotide primer for the detection of SNP TSC0048107
ccgctcactaca

SEQ ID NO: 352805 - DNA, 12 bp, Artificial Sequence
  Oligonucleotide primer for the detection of SNP TSC0048107
aggaggtggagg

SEQ ID NO: 352806 - DNA, 12 bp, Artificial Sequence
  Oligonucleotide primer for the detection of SNP TSC0048108
taaaaactcaat

SEQ ID NO: 352807 - DNA, 12 bp, Artificial Sequence
  Oligonucleotide primer for the detection of SNP TSC0048109
tgagagaaatta

SEQ ID NO: 352808 - DNA, 12 bp, Artificial Sequence
  Oligonucleotide primer for the detection of SNP TSC0048109
taaaaaaaacca

SEQ ID NO: 352809 - DNA, 12 bp, Artificial Sequence
  Oligonucleotide primer for the detection of SNP TSC0048109
ggtgattggagt

SEQ ID NO: 352810 - DNA, 12 bp, Artificial Sequence
  Oligonucleotide primer for the detection of SNP TSC0048112
ggattaatggta

SEQ ID NO: 352811 - DNA, 12 bp, Artificial Sequence
  Oligonucleotide primer for the detection of SNP TSC0048112
aaaccaataaca

SEQ ID NO: 352812 - DNA, 12 bp, Artificial Sequence
  Oligonucleotide primer for the detection of SNP TSC0048112
tttagggagagt

SEQ ID NO: 352813 - DNA, 12 bp, Artificial Sequence
  Oligonucleotide primer for the detection of SNP TSC0048113
tctttaataaca

SEQ ID NO: 352814 - DNA, 12 bp, Artificial Sequence
  Oligonucleotide primer for the detection of SNP TSC0048113
ttggtgtgttgt

SEQ ID NO: 352815 - DNA, 12 bp, Artificial Sequence
  Oligonucleotide primer for the detection of SNP TSC0048116
ataaaacatcat

SEQ ID NO: 352816 - DNA, 12 bp, Artificial Sequence
  Oligonucleotide primer for the detection of SNP TSC0048116
ataaaacgtcat

SEQ ID NO: 352817 - DNA, 12 bp, Artificial Sequence
  Oligonucleotide primer for the detection of SNP TSC0048117
cactaataaaac

SEQ ID NO: 352818 - DNA, 12 bp, Artificial Sequence
  Oligonucleotide primer for the detection of SNP TSC0048117
caatacctataa

SEQ ID NO: 352819 - DNA, 12 bp, Artificial Sequence
  Oligonucleotide primer for the detection of SNP TSC0048117
tattgataaagt

SEQ ID NO: 352820 - DNA, 12 bp, Artificial Sequence
  Oligonucleotide primer for the detection of SNP TSC0048117
tattgataaagc

SEQ ID NO: 352821 - DNA, 12 bp, Artificial Sequence
  Oligonucleotide primer for the detection of SNP TSC0048119
catatactaata

SEQ ID NO: 352822 - DNA, 12 bp, Artificial Sequence
  Oligonucleotide primer for the detection of SNP TSC0048119
ggttatggttag

SEQ ID NO: 352823 - DNA, 12 bp, Artificial Sequence
  Oligonucleotide primer for the detection of SNP TSC0048119
attataatcaaa

SEQ ID NO: 352824 - DNA, 12 bp, Artificial Sequence
  Oligonucleotide primer for the detection of SNP TSC0048120
tacatttttaaa

SEQ ID NO: 352825 - DNA, 12 bp, Artificial Sequence
  Oligonucleotide primer for the detection of SNP TSC0048120
tgtatttttaaa

SEQ ID NO: 352826 - DNA, 12 bp, Artificial Sequence
  Oligonucleotide primer for the detection of SNP TSC0048121
ttgggttataat

SEQ ID NO: 352827 - DNA, 12 bp, Artificial Sequence
  Oligonucleotide primer for the detection of SNP TSC0048121
ctaaattataac

SEQ ID NO: 352828 - DNA, 12 bp, Artificial Sequence
  Oligonucleotide primer for the detection of SNP TSC0048121
aaatttagagga

SEQ ID NO: 352829 - DNA, 12 bp, Artificial Sequence
  Oligonucleotide primer for the detection of SNP TSC0048122
tatcaattttct

SEQ ID NO: 352830 - DNA, 12 bp, Artificial Sequence
  Oligonucleotide primer for the detection of SNP TSC0048122
taggttattaag

SEQ ID NO: 352831 - DNA, 12 bp, Artificial Sequence
  Oligonucleotide primer for the detection of SNP TSC0048124
atctcatttcac

SEQ ID NO: 352832 - DNA, 12 bp, Artificial Sequence
  Oligonucleotide primer for the detection of SNP TSC0048124
tagagagataaa

SEQ ID NO: 352833 - DNA, 12 bp, Artificial Sequence
  Oligonucleotide primer for the detection of SNP TSC0048125
atttatcaaaat

SEQ ID NO: 352834 - DNA, 12 bp, Artificial Sequence
  Oligonucleotide primer for the detection of SNP TSC0048125
tttttatgaaga

SEQ ID NO: 352835 - DNA, 12 bp, Artificial Sequence
  Oligonucleotide primer for the detection of SNP TSC0048126
cattcaaactta

SEQ ID NO: 352836 - DNA, 12 bp, Artificial Sequence
  Oligonucleotide primer for the detection of SNP TSC0048126
gttgtaattaat

SEQ ID NO: 352837 - DNA, 12 bp, Artificial Sequence
  Oligonucleotide primer for the detection of SNP TSC0048126
gttgtaattaac

SEQ ID NO: 352838 - DNA, 12 bp, Artificial Sequence
  Oligonucleotide primer for the detection of SNP TSC0048126
ctataactaaca

SEQ ID NO: 352839 - DNA, 12 bp, Artificial Sequence
  Oligonucleotide primer for the detection of SNP TSC0048126
ctataactaacg

SEQ ID NO: 352840 - DNA, 12 bp, Artificial Sequence
  Oligonucleotide primer for the detection of SNP TSC0048127
tagagggttttt

SEQ ID NO: 352841 - DNA, 12 bp, Artificial Sequence
  Oligonucleotide primer for the detection of SNP TSC0048127
tagagggttttc

SEQ ID NO: 352842 - DNA, 12 bp, Artificial Sequence
  Oligonucleotide primer for the detection of SNP TSC0048127
tttatagagata

SEQ ID NO: 352843 - DNA, 12 bp, Artificial Sequence
  Oligonucleotide primer for the detection of SNP TSC0048128
ttaacaaatcct

SEQ ID NO: 352844 - DNA, 12 bp, Artificial Sequence
  Oligonucleotide primer for the detection of SNP TSC0048129
aatacacattca

SEQ ID NO: 352845 - DNA, 12 bp, Artificial Sequence
  Oligonucleotide primer for the detection of SNP TSC0048129
gaattttgtaat

SEQ ID NO: 352846 - DNA, 12 bp, Artificial Sequence
  Oligonucleotide primer for the detection of SNP TSC0048129
atgtatatttat

SEQ ID NO: 352847 - DNA, 12 bp, Artificial Sequence
  Oligonucleotide primer for the detection of SNP TSC0048130
acattatttttt

SEQ ID NO: 352848 - DNA, 12 bp, Artificial Sequence
  Oligonucleotide primer for the detection of SNP TSC0048130
aagttaatatga

SEQ ID NO: 352849 - DNA, 12 bp, Artificial Sequence
  Oligonucleotide primer for the detection of SNP TSC0048131
aataactaataa

SEQ ID NO: 352850 - DNA, 12 bp, Artificial Sequence
  Oligonucleotide primer for the detection of SNP TSC0048131
gatttattaagt

SEQ ID NO: 352851 - DNA, 12 bp, Artificial Sequence
  Oligonucleotide primer for the detection of SNP TSC0048131
aatccattaaac

SEQ ID NO: 352852 - DNA, 12 bp, Artificial Sequence
  Oligonucleotide primer for the detection of SNP TSC0048131
ggtggttgataa

SEQ ID NO: 352853 - DNA, 12 bp, Artificial Sequence
  Oligonucleotide primer for the detection of SNP TSC0048132
gagagattattt

SEQ ID NO: 352854 - DNA, 12 bp, Artificial Sequence
  Oligonucleotide primer for the detection of SNP TSC0048132
aaaaaatcactt

SEQ ID NO: 352855 - DNA, 12 bp, Artificial Sequence
  Oligonucleotide primer for the detection of SNP TSC0048132
gttgggagaggt

SEQ ID NO: 352856 - DNA, 12 bp, Artificial Sequence
  Oligonucleotide primer for the detection of SNP TSC0048133
aattagtttgtc

SEQ ID NO: 352857 - DNA, 12 bp, Artificial Sequence
  Oligonucleotide primer for the detection of SNP TSC0048133
aactaacctacc

SEQ ID NO: 352858 - DNA, 12 bp, Artificial Sequence
  Oligonucleotide primer for the detection of SNP TSC0048133
agaaagttgtta

SEQ ID NO: 352859 - DNA, 12 bp, Artificial Sequence
  Oligonucleotide primer for the detection of SNP TSC0048137
cttacaacccct

SEQ ID NO: 352860 - DNA, 12 bp, Artificial Sequence
  Oligonucleotide primer for the detection of SNP TSC0048138
agtgttatatga

SEQ ID NO: 352861 - DNA, 12 bp, Artificial Sequence
  Oligonucleotide primer for the detection of SNP TSC0048138
aatatcacataa

SEQ ID NO: 352862 - DNA, 12 bp, Artificial Sequence
  Oligonucleotide primer for the detection of SNP TSC0048138
agggagaaaatt

SEQ ID NO: 352863 - DNA, 12 bp, Artificial Sequence
  Oligonucleotide primer for the detection of SNP TSC0048139
ttgtggtgatta

SEQ ID NO: 352864 - DNA, 12 bp, Artificial Sequence
  Oligonucleotide primer for the detection of SNP TSC0048140
aatttttagata

SEQ ID NO: 352865 - DNA, 12 bp, Artificial Sequence
  Oligonucleotide primer for the detection of SNP TSC0048141
aaacacaaacta

SEQ ID NO: 352866 - DNA, 12 bp, Artificial Sequence
  Oligonucleotide primer for the detection of SNP TSC0048141
cacctacacaat

SEQ ID NO: 352867 - DNA, 12 bp, Artificial Sequence
  Oligonucleotide primer for the detection of SNP TSC0048141
agatatagattg

SEQ ID NO: 352868 - DNA, 12 bp, Artificial Sequence
  Oligonucleotide primer for the detection of SNP TSC0005700
tgtgtatgttga

SEQ ID NO: 352869 - DNA, 12 bp, Artificial Sequence
  Oligonucleotide primer for the detection of SNP TSC0005700
tgtgtacgttga

SEQ ID NO: 352870 - DNA, 12 bp, Artificial Sequence
  Oligonucleotide primer for the detection of SNP TSC0009428
ttggttttagtt

SEQ ID NO: 352871 - DNA, 12 bp, Artificial Sequence
  Oligonucleotide primer for the detection of SNP TSC0009428
ctaattttaacc

SEQ ID NO: 352872 - DNA, 12 bp, Artificial Sequence
  Oligonucleotide primer for the detection of SNP TSC0009428
agaaagaggaag

SEQ ID NO: 352873 - DNA, 12 bp, Artificial Sequence
  Oligonucleotide primer for the detection of SNP TSC0048143
aaaatatcctcc

SEQ ID NO: 352874 - DNA, 12 bp, Artificial Sequence
  Oligonucleotide primer for the detection of SNP TSC0048147
tctcttcttcaa

SEQ ID NO: 352875 - DNA, 12 bp, Artificial Sequence
  Oligonucleotide primer for the detection of SNP TSC0048147
tttaaaggaaag

SEQ ID NO: 352876 - DNA, 12 bp, Artificial Sequence
  Oligonucleotide primer for the detection of SNP TSC0048149
attcaataaaca

SEQ ID NO: 352877 - DNA, 12 bp, Artificial Sequence
  Oligonucleotide primer for the detection of SNP TSC0048149
gagtatttttgg

SEQ ID NO: 352878 - DNA, 12 bp, Artificial Sequence
  Oligonucleotide primer for the detection of SNP TSC0048149
aaatattcttaa

SEQ ID NO: 352879 - DNA, 12 bp, Artificial Sequence
  Oligonucleotide primer for the detection of SNP TSC0048149
atttaataagta

SEQ ID NO: 352880 - DNA, 12 bp, Artificial Sequence
  Oligonucleotide primer for the detection of SNP TSC0048150
aaaactacaact

SEQ ID NO: 352881 - DNA, 12 bp, Artificial Sequence
  Oligonucleotide primer for the detection of SNP TSC0048150
attaaacttttc

SEQ ID NO: 352882 - DNA, 12 bp, Artificial Sequence
  Oligonucleotide primer for the detection of SNP TSC0048150
ggagttataatt

SEQ ID NO: 352883 - DNA, 12 bp, Artificial Sequence
  Oligonucleotide primer for the detection of SNP TSC0048153
aacatatctata

SEQ ID NO: 352884 - DNA, 12 bp, Artificial Sequence
  Oligonucleotide primer for the detection of SNP TSC0048153
catatatatttt

SEQ ID NO: 352885 - DNA, 12 bp, Artificial Sequence
  Oligonucleotide primer for the detection of SNP TSC0048153
aatatatttatg

SEQ ID NO: 352886 - DNA, 12 bp, Artificial Sequence
  Oligonucleotide primer for the detection of SNP TSC0048154
cctctaaaacaa

SEQ ID NO: 352887 - DNA, 12 bp, Artificial Sequence
  Oligonucleotide primer for the detection of SNP TSC0048154
tttctaaatcca

SEQ ID NO: 352888 - DNA, 12 bp, Artificial Sequence
  Oligonucleotide primer for the detection of SNP TSC0048154
attttttgaggt

SEQ ID NO: 352889 - DNA, 12 bp, Artificial Sequence
  Oligonucleotide primer for the detection of SNP TSC0048156
ctacatatatac

SEQ ID NO: 352890 - DNA, 12 bp, Artificial Sequence
  Oligonucleotide primer for the detection of SNP TSC0048156
tttaggtttggg

SEQ ID NO: 352891 - DNA, 12 bp, Artificial Sequence
  Oligonucleotide primer for the detection of SNP TSC0048156
tttaggttcggg

SEQ ID NO: 352892 - DNA, 12 bp, Artificial Sequence
  Oligonucleotide primer for the detection of SNP TSC0048157
tatttccatttt

SEQ ID NO: 352893 - DNA, 12 bp, Artificial Sequence
  Oligonucleotide primer for the detection of SNP TSC0048160
taggatttttaa

SEQ ID NO: 352894 - DNA, 12 bp, Artificial Sequence
  Oligonucleotide primer for the detection of SNP TSC0048161
tctcaaaatcac

SEQ ID NO: 352895 - DNA, 12 bp, Artificial Sequence
  Oligonucleotide primer for the detection of SNP TSC0048161
atagaggtcgtt

SEQ ID NO: 352896 - DNA, 12 bp, Artificial Sequence
  Oligonucleotide primer for the detection of SNP TSC0048161
aataaaaatcac

SEQ ID NO: 352897 - DNA, 12 bp, Artificial Sequence
  Oligonucleotide primer for the detection of SNP TSC0048161
aataaaaatcgc

SEQ ID NO: 352898 - DNA, 12 bp, Artificial Sequence
  Oligonucleotide primer for the detection of SNP TSC0048161
ttttaagattat

SEQ ID NO: 352899 - DNA, 12 bp, Artificial Sequence
  Oligonucleotide primer for the detection of SNP TSC0048161
ttttaagattac

SEQ ID NO: 352900 - DNA, 12 bp, Artificial Sequence
  Oligonucleotide primer for the detection of SNP TSC0048166
ttcctaaatatc

SEQ ID NO: 352901 - DNA, 12 bp, Artificial Sequence
  Oligonucleotide primer for the detection of SNP TSC0048166
agttaaatttat

SEQ ID NO: 352902 - DNA, 12 bp, Artificial Sequence
  Oligonucleotide primer for the detection of SNP TSC0048166
tttttgagtatt

SEQ ID NO: 352903 - DNA, 12 bp, Artificial Sequence
  Oligonucleotide primer for the detection of SNP TSC0048166
tttttgagtatc

SEQ ID NO: 352904 - DNA, 12 bp, Artificial Sequence
  Oligonukleotid-Primer
atcctccataac

SEQ ID NO: 352905 - DNA, 12 bp, Artificial Sequence
  Oligonucleotide primer for the detection of SNP TSC0048167
atcctccgtaac

SEQ ID NO: 352906 - DNA, 12 bp, Artificial Sequence
  Oligonucleotide primer for the detection of SNP TSC0048167
tagattgttgta

SEQ ID NO: 352907 - DNA, 12 bp, Artificial Sequence
  Oligonucleotide primer for the detection of SNP TSC0048170
cctaactaaaaa

SEQ ID NO: 352908 - DNA, 12 bp, Artificial Sequence
  Oligonucleotide primer for the detection of SNP TSC0048170
aaattccccaaa

SEQ ID NO: 352909 - DNA, 12 bp, Artificial Sequence
  Oligonucleotide primer for the detection of SNP TSC0048170
tttaattgggaa

SEQ ID NO: 352910 - DNA, 12 bp, Artificial Sequence
  Oligonucleotide primer for the detection of SNP TSC0048171
atggatataagt

SEQ ID NO: 352911 - DNA, 12 bp, Artificial Sequence
  Oligonucleotide primer for the detection of SNP TSC0048171
aataaacacaaa

SEQ ID NO: 352912 - DNA, 12 bp, Artificial Sequence
  Oligonucleotide primer for the detection of SNP TSC0048171
aagaaaatgatt

SEQ ID NO: 352913 - DNA, 12 bp, Artificial Sequence
  Oligonucleotide primer for the detection of SNP TSC0048172
agagtgttgttt

SEQ ID NO: 352914 - DNA, 12 bp, Artificial Sequence
  Oligonucleotide primer for the detection of SNP TSC0048173
ttgttttgagtt

SEQ ID NO: 352915 - DNA, 12 bp, Artificial Sequence
  Oligonucleotide primer for the detection of SNP TSC0048173
actatcttaaat

SEQ ID NO: 352916 - DNA, 12 bp, Artificial Sequence
  Oligonucleotide primer for the detection of SNP TSC0048173
tatttttagaga

SEQ ID NO: 352917 - DNA, 12 bp, Artificial Sequence
  Oligonucleotide primer for the detection of SNP TSC0048174
ttatggatgtga

SEQ ID NO: 352918 - DNA, 12 bp, Artificial Sequence
  Oligonucleotide primer for the detection of SNP TSC0048175
ctaattacacaa

SEQ ID NO: 352919 - DNA, 12 bp, Artificial Sequence
  Oligonucleotide primer for the detection of SNP TSC0048175
tattcttaccta

SEQ ID NO: 352920 - DNA, 12 bp, Artificial Sequence
  Oligonucleotide primer for the detection of SNP TSC0048175
ttgattatataa

SEQ ID NO: 352921 - DNA, 12 bp, Artificial Sequence
  Oligonucleotide primer for the detection of SNP TSC0048176
aaaacatacttc

SEQ ID NO: 352922 - DNA, 12 bp, Artificial Sequence
  Oligonucleotide primer for the detection of SNP TSC0048176
aaaacgtacttc

SEQ ID NO: 352923 - DNA, 12 bp, Artificial Sequence
  Oligonucleotide primer for the detection of SNP TSC0048176
tcaacctacatt

SEQ ID NO: 352924 - DNA, 12 bp, Artificial Sequence
  Oligonucleotide primer for the detection of SNP TSC0048176
aggtgtattttt

SEQ ID NO: 352925 - DNA, 12 bp, Artificial Sequence
  Oligonucleotide primer for the detection of SNP TSC0048176
aggcgtattttt

SEQ ID NO: 352926 - DNA, 12 bp, Artificial Sequence
  Oligonucleotide primer for the detection of SNP TSC0005040
caaaaatcttta

SEQ ID NO: 352927 - DNA, 12 bp, Artificial Sequence
  Oligonucleotide primer for the detection of SNP TSC0005040
cgaaaatcttta

SEQ ID NO: 352928 - DNA, 12 bp, Artificial Sequence
  Oligonucleotide primer for the detection of SNP TSC0005040
agaaatttaaag

SEQ ID NO: 352929 - DNA, 12 bp, Artificial Sequence
  Oligonucleotide primer for the detection of SNP TSC0005041
ttccattcccca

SEQ ID NO: 352930 - DNA, 12 bp, Artificial Sequence
  Oligonucleotide primer for the detection of SNP TSC0005041
ttttgtggggat

SEQ ID NO: 352931 - DNA, 12 bp, Artificial Sequence
  Oligonucleotide primer for the detection of SNP TSC0005041
ctttataaaaac

SEQ ID NO: 352932 - DNA, 12 bp, Artificial Sequence
  Oligonucleotide primer for the detection of SNP TSC0048181
aaaacctccaca

SEQ ID NO: 352933 - DNA, 12 bp, Artificial Sequence
  Oligonucleotide primer for the detection of SNP TSC0048181
taatttatgtgg

SEQ ID NO: 352934 - DNA, 12 bp, Artificial Sequence
  Oligonucleotide primer for the detection of SNP TSC0048181
caattcatataa

SEQ ID NO: 352935 - DNA, 12 bp, Artificial Sequence
  Oligonucleotide primer for the detection of SNP TSC0048183
aaaaaacctacc

SEQ ID NO: 352936 - DNA, 12 bp, Artificial Sequence
  Oligonucleotide primer for the detection of SNP TSC0048183
gggaattttttg

SEQ ID NO: 352937 - DNA, 12 bp, Artificial Sequence
  Oligonucleotide primer for the detection of SNP TSC0048184
acctaatatatc

SEQ ID NO: 352938 - DNA, 12 bp, Artificial Sequence
  Oligonucleotide primer for the detection of SNP TSC0048186
actaaaacctct

SEQ ID NO: 352939 - DNA, 12 bp, Artificial Sequence
  Oligonucleotide primer for the detection of SNP TSC0048186
tgaatttaagag

SEQ ID NO: 352940 - DNA, 12 bp, Artificial Sequence
  Oligonucleotide primer for the detection of SNP TSC0048188
tatcctataact

SEQ ID NO: 352941 - DNA, 12 bp, Artificial Sequence
  Oligonucleotide primer for the detection of SNP TSC0048190
tctttacaatta

SEQ ID NO: 352942 - DNA, 12 bp, Artificial Sequence
  Oligonucleotide primer for the detection of SNP TSC0048190
gttttgagtatg

SEQ ID NO: 352943 - DNA, 12 bp, Artificial Sequence
  Oligonucleotide primer for the detection of SNP TSC0048190
accttaaacata

SEQ ID NO: 352944 - DNA, 12 bp, Artificial Sequence
  Oligonucleotide primer for the detection of SNP TSC0048192
tttaagtaagtt

SEQ ID NO: 352945 - DNA, 12 bp, Artificial Sequence
  Oligonucleotide primer for the detection of SNP TSC0048192
taaacaaatcaa

SEQ ID NO: 352946 - DNA, 12 bp, Artificial Sequence
  Oligonucleotide primer for the detection of SNP TSC0048192
agttataaaatg

SEQ ID NO: 352947 - DNA, 12 bp, Artificial Sequence
  Oligonucleotide primer for the detection of SNP TSC0048193
ttcctaataaac

SEQ ID NO: 352948 - DNA, 12 bp, Artificial Sequence
  Oligonucleotide primer for the detection of SNP TSC0048193
ggtgagattttt

SEQ ID NO: 352949 - DNA, 12 bp, Artificial Sequence
  Oligonucleotide primer for the detection of SNP TSC0048193
ataaaattctca

SEQ ID NO: 352950 - DNA, 12 bp, Artificial Sequence
  Oligonucleotide primer for the detection of SNP TSC0048193
tttttgatgagt

SEQ ID NO: 352951 - DNA, 12 bp, Artificial Sequence
  Oligonucleotide primer for the detection of SNP TSC0048201
ataaattcctat

SEQ ID NO: 352952 - DNA, 12 bp, Artificial Sequence
  Oligonucleotide primer for the detection of SNP TSC0048201
aggaaatttttg

SEQ ID NO: 352953 - DNA, 12 bp, Artificial Sequence
  Oligonucleotide primer for the detection of SNP TSC0048203
tttaataactaa

SEQ ID NO: 352954 - DNA, 12 bp, Artificial Sequence
  Oligonucleotide primer for the detection of SNP TSC0048203
aatgaaatatta

SEQ ID NO: 352955 - DNA, 12 bp, Artificial Sequence
  Oligonucleotide primer for the detection of SNP TSC0048203
aataaaatacta

SEQ ID NO: 352956 - DNA, 12 bp, Artificial Sequence
  Oligonucleotide primer for the detection of SNP TSC0048203
tttaataattga

SEQ ID NO: 352957 - DNA, 12 bp, Artificial Sequence
  Oligonucleotide primer for the detection of SNP TSC0010364
actttaaaaaaa

SEQ ID NO: 352958 - DNA, 12 bp, Artificial Sequence
  Oligonucleotide primer for the detection of SNP TSC0010364
aattttgttatt

SEQ ID NO: 352959 - DNA, 12 bp, Artificial Sequence
  Oligonucleotide primer for the detection of SNP TSC0010364
aattttaccact

SEQ ID NO: 352960 - DNA, 12 bp, Artificial Sequence
  Oligonucleotide primer for the detection of SNP TSC0010364
gggttttgagaa

SEQ ID NO: 352961 - DNA, 12 bp, Artificial Sequence
  Oligonucleotide primer for the detection of SNP TSC0048204
aacctaaaacat

SEQ ID NO: 352962 - DNA, 12 bp, Artificial Sequence
  Oligonucleotide primer for the detection of SNP TSC0048204
gtatgtagttta

SEQ ID NO: 352963 - DNA, 12 bp, Artificial Sequence
  Oligonucleotide primer for the detection of SNP TSC0048205
taggtagtggag

SEQ ID NO: 352964 - DNA, 12 bp, Artificial Sequence
  Oligonucleotide primer for the detection of SNP TSC0048206
tttcactcctat

SEQ ID NO: 352965 - DNA, 12 bp, Artificial Sequence
  Oligonucleotide primer for the detection of SNP TSC0048206
tttcgctcctat

SEQ ID NO: 352966 - DNA, 12 bp, Artificial Sequence
  Oligonucleotide primer for the detection of SNP TSC0005329
taccattttatt

SEQ ID NO: 352967 - DNA, 12 bp, Artificial Sequence
  Oligonucleotide primer for the detection of SNP TSC0005329
taaggatgatga

SEQ ID NO: 352968 - DNA, 12 bp, Artificial Sequence
  Oligonucleotide primer for the detection of SNP TSC0048207
ccactacactcc

SEQ ID NO: 352969 - DNA, 12 bp, Artificial Sequence
  Oligonucleotide primer for the detection of SNP TSC0048207
tttgtcgtttag

SEQ ID NO: 352970 - DNA, 12 bp, Artificial Sequence
  Oligonucleotide primer for the detection of SNP TSC0048208
aaatcaacatcc

SEQ ID NO: 352971 - DNA, 12 bp, Artificial Sequence
  Oligonucleotide primer for the detection of SNP TSC0048208
atagagtaaata

SEQ ID NO: 352972 - DNA, 12 bp, Artificial Sequence
  Oligonucleotide primer for the detection of SNP TSC0048209
aatcccatcttc

SEQ ID NO: 352973 - DNA, 12 bp, Artificial Sequence
  Oligonucleotide primer for the detection of SNP TSC0048209
ttttaatacgaa

SEQ ID NO: 352974 - DNA, 12 bp, Artificial Sequence
  Oligonucleotide primer for the detection of SNP TSC0048210
ataaatcccaat

SEQ ID NO: 352975 - DNA, 12 bp, Artificial Sequence
  Oligonucleotide primer for the detection of SNP TSC0048210
aaatcccatctt

SEQ ID NO: 352976 - DNA, 12 bp, Artificial Sequence
  Oligonucleotide primer for the detection of SNP TSC0048210
gtgaattttaat

SEQ ID NO: 352977 - DNA, 12 bp, Artificial Sequence
  Oligonucleotide primer for the detection of SNP TSC0048211
ttttctttatcc

SEQ ID NO: 352978 - DNA, 12 bp, Artificial Sequence
  Oligonucleotide primer for the detection of SNP TSC0048211
ggatagaatatg

SEQ ID NO: 352979 - DNA, 12 bp, Artificial Sequence
  Oligonucleotide primer for the detection of SNP TSC0010759
actaactaattc

SEQ ID NO: 352980 - DNA, 12 bp, Artificial Sequence
  Oligonucleotide primer for the detection of SNP TSC0005446
aaacctaatata

SEQ ID NO: 352981 - DNA, 12 bp, Artificial Sequence
  Oligonucleotide primer for the detection of SNP TSC0005446
taccaacttctt

SEQ ID NO: 352982 - DNA, 12 bp, Artificial Sequence
  Oligonucleotide primer for the detection of SNP TSC0005446
aaatttagtata

SEQ ID NO: 352983 - DNA, 12 bp, Artificial Sequence
  Oligonucleotide primer for the detection of SNP TSC0010493
taggaagataaa

SEQ ID NO: 352984 - DNA, 12 bp, Artificial Sequence
  Oligonucleotide primer for the detection of SNP TSC0010494
aatattatcatc

SEQ ID NO: 352985 - DNA, 12 bp, Artificial Sequence
  Oligonucleotide primer for the detection of SNP TSC0010494
aagtgtatttgg

SEQ ID NO: 352986 - DNA, 12 bp, Artificial Sequence
  Oligonucleotide primer for the detection of SNP TSC0048212
atacacttacca

SEQ ID NO: 352987 - DNA, 12 bp, Artificial Sequence
  Oligonucleotide primer for the detection of SNP TSC0048212
tattgattgttt

SEQ ID NO: 352988 - DNA, 12 bp, Artificial Sequence
  Oligonucleotide primer for the detection of SNP TSC0048212
ccctactaatta

SEQ ID NO: 352989 - DNA, 12 bp, Artificial Sequence
  Oligonucleotide primer for the detection of SNP TSC0048212
aatatatttgtt

SEQ ID NO: 352990 - DNA, 12 bp, Artificial Sequence
  Oligonucleotide primer for the detection of SNP TSC0048213
cacctattctac

SEQ ID NO: 352991 - DNA, 12 bp, Artificial Sequence
  Oligonucleotide primer for the detection of SNP TSC0048213
tagatgagttgt

SEQ ID NO: 352992 - DNA, 12 bp, Artificial Sequence
  Oligonucleotide primer for the detection of SNP TSC0048213
caaataaactac

SEQ ID NO: 352993 - DNA, 12 bp, Artificial Sequence
  Oligonucleotide primer for the detection of SNP TSC0048214
ctatacattcaa

SEQ ID NO: 352994 - DNA, 12 bp, Artificial Sequence
  unsure (3): Oligonucleotide primer for the detection of SNP TSC0048214
ttntaagtattt

SEQ ID NO: 352995 - DNA, 12 bp, Artificial Sequence
  unsure (3): Oligonucleotide primer for the detection of SNP TSC0048214
tcntaaacattc

SEQ ID NO: 352996 - DNA, 12 bp, Artificial Sequence
  Oligonucleotide primer for the detection of SNP TSC0048214
ttatgtatttag

SEQ ID NO: 352997 - DNA, 12 bp, Artificial Sequence
  Oligonucleotide primer for the detection of SNP TSC0048215
acaacctacaat

SEQ ID NO: 352998 - DNA, 12 bp, Artificial Sequence
  Oligonucleotide primer for the detection of SNP TSC0048215
acgacctacaat

SEQ ID NO: 352999 - DNA, 12 bp, Artificial Sequence
  Oligonucleotide primer for the detection of SNP TSC0048215
gaatgttagtaa

SEQ ID NO: 353000 - DNA, 12 bp, Artificial Sequence
  Oligonucleotide primer for the detection of SNP TSC0048219
ctacataaaaac

SEQ ID NO: 353001 - DNA, 12 bp, Artificial Sequence
  Oligonucleotide primer for the detection of SNP TSC0048219
tttttgtaagag

SEQ ID NO: 353002 - DNA, 12 bp, Artificial Sequence
  Oligonucleotide primer for the detection of SNP TSC0048219
ttatatgaaagt

SEQ ID NO: 353003 - DNA, 12 bp, Artificial Sequence
  Oligonucleotide primer for the detection of SNP TSC0048220
cctcttataatt

SEQ ID NO: 353004 - DNA, 12 bp, Artificial Sequence
  Oligonucleotide primer for the detection of SNP TSC0048220
gttattatttta

SEQ ID NO: 353005 - DNA, 12 bp, Artificial Sequence
  Oligonucleotide primer for the detection of SNP TSC0048220
atcaccatttta

SEQ ID NO: 353006 - DNA, 12 bp, Artificial Sequence
  Oligonucleotide primer for the detection of SNP TSC0048226
actaataacatt

SEQ ID NO: 353007 - DNA, 12 bp, Artificial Sequence
  Oligonucleotide primer for the detection of SNP TSC0048226
tttaattaataa

SEQ ID NO: 353008 - DNA, 12 bp, Artificial Sequence
  Oligonucleotide primer for the detection of SNP TSC0048226
attaataatatt

SEQ ID NO: 353009 - DNA, 12 bp, Artificial Sequence
  Oligonucleotide primer for the detection of SNP TSC0048227
atatttatcata

SEQ ID NO: 353010 - DNA, 12 bp, Artificial Sequence
  Oligonucleotide primer for the detection of SNP TSC0048227
gtaagatatatt

SEQ ID NO: 353011 - DNA, 12 bp, Artificial Sequence
  Oligonucleotide primer for the detection of SNP TSC0048227
caataaaatata

SEQ ID NO: 353012 - DNA, 12 bp, Artificial Sequence
  Oligonucleotide primer for the detection of SNP TSC0048227
atatttgttatg

SEQ ID NO: 353013 - DNA, 12 bp, Artificial Sequence
  Oligonucleotide primer for the detection of SNP TSC0048228
taatttttattc

SEQ ID NO: 353014 - DNA, 12 bp, Artificial Sequence
  Oligonucleotide primer for the detection of SNP TSC0048228
aaatatgtttta

SEQ ID NO: 353015 - DNA, 12 bp, Artificial Sequence
  Oligonucleotide primer for the detection of SNP TSC0048234
tcataattaccc

SEQ ID NO: 353016 - DNA, 12 bp, Artificial Sequence
  Oligonucleotide primer for the detection of SNP TSC0048234
taatgttttttg

SEQ ID NO: 353017 - DNA, 12 bp, Artificial Sequence
  Oligonucleotide primer for the detection of SNP TSC0048234
taatactttcta

SEQ ID NO: 353018 - DNA, 12 bp, Artificial Sequence
  Oligonucleotide primer for the detection of SNP TSC0048234
ttatggttgttt

SEQ ID NO: 353019 - DNA, 12 bp, Artificial Sequence
  Oligonucleotide primer for the detection of SNP TSC0048244
attgaagtttgg

SEQ ID NO: 353020 - DNA, 12 bp, Artificial Sequence
  Oligonucleotide primer for the detection of SNP TSC0048250
ctttccaacaaa

SEQ ID NO: 353021 - DNA, 12 bp, Artificial Sequence
  Oligonucleotide primer for the detection of SNP TSC0048250
gaattaatgtat

SEQ ID NO: 353022 - DNA, 12 bp, Artificial Sequence
  Oligonucleotide primer for the detection of SNP TSC0048250
aatcaatacaca

SEQ ID NO: 353023 - DNA, 12 bp, Artificial Sequence
  Oligonucleotide primer for the detection of SNP TSC0048252
acaaatccattc

SEQ ID NO: 353024 - DNA, 12 bp, Artificial Sequence
  Oligonucleotide primer for the detection of SNP TSC0048252
tttaaagtaaaa

SEQ ID NO: 353025 - DNA, 12 bp, Artificial Sequence
  Oligonucleotide primer for the detection of SNP TSC0048252
gtaggtttattt

SEQ ID NO: 353026 - DNA, 12 bp, Artificial Sequence
  Oligonucleotide primer for the detection of SNP TSC0048255
aatacatatata

SEQ ID NO: 353027 - DNA, 12 bp, Artificial Sequence
  Oligonucleotide primer for the detection of SNP TSC0048255
atatagatttat

SEQ ID NO: 353028 - DNA, 12 bp, Artificial Sequence
  Oligonucleotide primer for the detection of SNP TSC0048255
atataaacttac

SEQ ID NO: 353029 - DNA, 12 bp, Artificial Sequence
  Oligonucleotide primer for the detection of SNP TSC0048256
aaatttaactta

SEQ ID NO: 353030 - DNA, 12 bp, Artificial Sequence
  Oligonucleotide primer for the detection of SNP TSC0048256
taaaaatatgtt

SEQ ID NO: 353031 - DNA, 12 bp, Artificial Sequence
  Oligonucleotide primer for the detection of SNP TSC0048256
taaaaatatatc

SEQ ID NO: 353032 - DNA, 12 bp, Artificial Sequence
  Oligonucleotide primer for the detection of SNP TSC0048256
gaatttaattta

SEQ ID NO: 353033 - DNA, 12 bp, Artificial Sequence
  Oligonucleotide primer for the detection of SNP TSC0048258
ccaaactcaatt

SEQ ID NO: 353034 - DNA, 12 bp, Artificial Sequence
  Oligonucleotide primer for the detection of SNP TSC0048258
ccaaactcgatt

SEQ ID NO: 353035 - DNA, 12 bp, Artificial Sequence
  Oligonucleotide primer for the detection of SNP TSC0048259
acataacaataa

SEQ ID NO: 353036 - DNA, 12 bp, Artificial Sequence
  Oligonucleotide primer for the detection of SNP TSC0048259
tgaatttgagag

SEQ ID NO: 353037 - DNA, 12 bp, Artificial Sequence
  Oligonucleotide primer for the detection of SNP TSC0048259
atatagtagtgg

SEQ ID NO: 353038 - DNA, 12 bp, Artificial Sequence
  Oligonucleotide primer for the detection of SNP TSC0048260
ttaaatgttgtt

SEQ ID NO: 353039 - DNA, 12 bp, Artificial Sequence
  Oligonucleotide primer for the detection of SNP TSC0048261
tactcaactaat

SEQ ID NO: 353040 - DNA, 12 bp, Artificial Sequence
  Oligonucleotide primer for the detection of SNP TSC0048262
aacacctctaca

SEQ ID NO: 353041 - DNA, 12 bp, Artificial Sequence
  Oligonucleotide primer for the detection of SNP TSC0048262
ctcaacacaata

SEQ ID NO: 353042 - DNA, 12 bp, Artificial Sequence
  Oligonucleotide primer for the detection of SNP TSC0048262
ggtatttttgta

SEQ ID NO: 353043 - DNA, 12 bp, Artificial Sequence
  Oligonucleotide primer for the detection of SNP TSC0048263
gggtagagaagt

SEQ ID NO: 353044 - DNA, 12 bp, Artificial Sequence
  Oligonucleotide primer for the detection of SNP TSC0048264
caaatcctacaa

SEQ ID NO: 353045 - DNA, 12 bp, Artificial Sequence
  Oligonucleotide primer for the detection of SNP TSC0048264
attagttgtgga

SEQ ID NO: 353046 - DNA, 12 bp, Artificial Sequence
  Oligonucleotide primer for the detection of SNP TSC0048264
actaactataaa

SEQ ID NO: 353047 - DNA, 12 bp, Artificial Sequence
  Oligonucleotide primer for the detection of SNP TSC0048264
ttaagttttgta

SEQ ID NO: 353048 - DNA, 12 bp, Artificial Sequence
  Oligonucleotide primer for the detection of SNP TSC0048266
ttagagtagtag

SEQ ID NO: 353049 - DNA, 12 bp, Artificial Sequence
  Oligonucleotide primer for the detection of SNP TSC0007100
atttagtttata

SEQ ID NO: 353050 - DNA, 12 bp, Artificial Sequence
  Oligonucleotide primer for the detection of SNP TSC0048267
ttctttaatctc

SEQ ID NO: 353051 - DNA, 12 bp, Artificial Sequence
  Oligonucleotide primer for the detection of SNP TSC0048267
taaattttttta

SEQ ID NO: 353052 - DNA, 12 bp, Artificial Sequence
  Oligonucleotide primer for the detection of SNP TSC0048268
taaataaacacc

SEQ ID NO: 353053 - DNA, 12 bp, Artificial Sequence
  Oligonucleotide primer for the detection of SNP TSC0048268
aaaattttttgg

SEQ ID NO: 353054 - DNA, 12 bp, Artificial Sequence
  Oligonucleotide primer for the detection of SNP TSC0048269
cttaatttaaaa

SEQ ID NO: 353055 - DNA, 12 bp, Artificial Sequence
  Oligonucleotide primer for the detection of SNP TSC0048269
ggttttagtgag

SEQ ID NO: 353056 - DNA, 12 bp, Artificial Sequence
  Oligonucleotide primer for the detection of SNP TSC0048269
ggttttagcgag

SEQ ID NO: 353057 - DNA, 12 bp, Artificial Sequence
  Oligonucleotide primer for the detection of SNP TSC0048269
aactccaacaaa

SEQ ID NO: 353058 - DNA, 12 bp, Artificial Sequence
  Oligonucleotide primer for the detection of SNP TSC0048269
aactccaacgaa

SEQ ID NO: 353059 - DNA, 12 bp, Artificial Sequence
  Oligonucleotide primer for the detection of SNP TSC0048270
attaaaacctat

SEQ ID NO: 353060 - DNA, 12 bp, Artificial Sequence
  Oligonucleotide primer for the detection of SNP TSC0048270
ggagattagtaa

SEQ ID NO: 353061 - DNA, 12 bp, Artificial Sequence
  Oligonucleotide primer for the detection of SNP TSC0048275
aatcccacatac

SEQ ID NO: 353062 - DNA, 12 bp, Artificial Sequence
  Oligonucleotide primer for the detection of SNP TSC0048275
aatcccgcatac

SEQ ID NO: 353063 - DNA, 12 bp, Artificial Sequence
  Oligonucleotide primer for the detection of SNP TSC0048275
ccatcttcctaa

SEQ ID NO: 353064 - DNA, 12 bp, Artificial Sequence
  Oligonucleotide primer for the detection of SNP TSC0048275
ggttttgtatgt

SEQ ID NO: 353065 - DNA, 12 bp, Artificial Sequence
  Oligonucleotide primer for the detection of SNP TSC0048275
ggtttcgtatgt

SEQ ID NO: 353066 - DNA, 12 bp, Artificial Sequence
  Oligonucleotide primer for the detection of SNP TSC0048279
ttcaatctaact

SEQ ID NO: 353067 - DNA, 12 bp, Artificial Sequence
  Oligonucleotide primer for the detection of SNP TSC0048279
gtagaggtaaaa

SEQ ID NO: 353068 - DNA, 12 bp, Artificial Sequence
  Oligonucleotide primer for the detection of SNP TSC0048280
tatactcacaat

SEQ ID NO: 353069 - DNA, 12 bp, Artificial Sequence
  Oligonucleotide primer for the detection of SNP TSC0048280
catcttctacca

SEQ ID NO: 353070 - DNA, 12 bp, Artificial Sequence
  Oligonucleotide primer for the detection of SNP TSC0048280
catcttctaccg

SEQ ID NO: 353071 - DNA, 12 bp, Artificial Sequence
  Oligonucleotide primer for the detection of SNP TSC0048280
gtatttataatt

SEQ ID NO: 353072 - DNA, 12 bp, Artificial Sequence
  Oligonucleotide primer for the detection of SNP TSC0048281
tgttgtagtgta

SEQ ID NO: 353073 - DNA, 12 bp, Artificial Sequence
  Oligonucleotide primer for the detection of SNP TSC0048281
tgtcgtagtgta

SEQ ID NO: 353074 - DNA, 12 bp, Artificial Sequence
  Oligonucleotide primer for the detection of SNP TSC0048282
tattcctaaatt

SEQ ID NO: 353075 - DNA, 12 bp, Artificial Sequence
  Oligonucleotide primer for the detection of SNP TSC0048282
gtagtattaaaa

SEQ ID NO: 353076 - DNA, 12 bp, Artificial Sequence
  Oligonucleotide primer for the detection of SNP TSC0048285
taatcatcttta

SEQ ID NO: 353077 - DNA, 12 bp, Artificial Sequence
  Oligonucleotide primer for the detection of SNP TSC0048285
atatggttatat

SEQ ID NO: 353078 - DNA, 12 bp, Artificial Sequence
  Oligonucleotide primer for the detection of SNP TSC0048285
acataaccacat

SEQ ID NO: 353079 - DNA, 12 bp, Artificial Sequence
  Oligonucleotide primer for the detection of SNP TSC0048288
aaatattagttt

SEQ ID NO: 353080 - DNA, 12 bp, Artificial Sequence
  Oligonucleotide primer for the detection of SNP TSC0048288
aaagtagagtta

SEQ ID NO: 353081 - DNA, 12 bp, Artificial Sequence
  Oligonucleotide primer for the detection of SNP TSC0048289
cttataatattt

SEQ ID NO: 353082 - DNA, 12 bp, Artificial Sequence
  Oligonucleotide primer for the detection of SNP TSC0048289
atatttaatagt

SEQ ID NO: 353083 - DNA, 12 bp, Artificial Sequence
  Oligonucleotide primer for the detection of SNP TSC0048289
acttaacaataa

SEQ ID NO: 353084 - DNA, 12 bp, Artificial Sequence
  Oligonucleotide primer for the detection of SNP TSC0048290
ttcttttcatct

SEQ ID NO: 353085 - DNA, 12 bp, Artificial Sequence
  Oligonucleotide primer for the detection of SNP TSC0048291
agtattttgtag

SEQ ID NO: 353086 - DNA, 12 bp, Artificial Sequence
  Oligonucleotide primer for the detection of SNP TSC0048292
tcaaattaaaac

SEQ ID NO: 353087 - DNA, 12 bp, Artificial Sequence
  Oligonucleotide primer for the detection of SNP TSC0048292
agattattaaag

SEQ ID NO: 353088 - DNA, 12 bp, Artificial Sequence
  Oligonucleotide primer for the detection of SNP TSC0048292
ttaggttgaaat

SEQ ID NO: 353089 - DNA, 12 bp, Artificial Sequence
  Oligonucleotide primer for the detection of SNP TSC0048294
caacaaacatta

SEQ ID NO: 353090 - DNA, 12 bp, Artificial Sequence
  Oligonucleotide primer for the detection of SNP TSC0048294
cgacaaacatta

SEQ ID NO: 353091 - DNA, 12 bp, Artificial Sequence
  Oligonucleotide primer for the detection of SNP TSC0048294
tatttaggtttt

SEQ ID NO: 353092 - DNA, 12 bp, Artificial Sequence
  Oligonucleotide primer for the detection of SNP TSC0048294
tactcaaattcc

SEQ ID NO: 353093 - DNA, 12 bp, Artificial Sequence
  Oligonucleotide primer for the detection of SNP TSC0048294
tgataaatatta

SEQ ID NO: 353094 - DNA, 12 bp, Artificial Sequence
  Oligonucleotide primer for the detection of SNP TSC0048294
cgataaatatta

SEQ ID NO: 353095 - DNA, 12 bp, Artificial Sequence
  Oligonucleotide primer for the detection of SNP TSC0004526
ccattatccccc

SEQ ID NO: 353096 - DNA, 12 bp, Artificial Sequence
  Oligonucleotide primer for the detection of SNP TSC0004526
ccgttatccccc

SEQ ID NO: 353097 - DNA, 12 bp, Artificial Sequence
  Oligonucleotide primer for the detection of SNP TSC0004526
ttgtggtagtta

SEQ ID NO: 353098 - DNA, 12 bp, Artificial Sequence
  Oligonucleotide primer for the detection of SNP TSC0048296
acaaaatttttt

SEQ ID NO: 353099 - DNA, 12 bp, Artificial Sequence
  Oligonucleotide primer for the detection of SNP TSC0048296
aattttaggggg

SEQ ID NO: 353100 - DNA, 12 bp, Artificial Sequence
  Oligonucleotide primer for the detection of SNP TSC0048297
attaatgatttt

SEQ ID NO: 353101 - DNA, 12 bp, Artificial Sequence
  Oligonucleotide primer for the detection of SNP TSC0048297
actaataatccc

SEQ ID NO: 353102 - DNA, 12 bp, Artificial Sequence
  Oligonucleotide primer for the detection of SNP TSC0048297
taaaagataaag

SEQ ID NO: 353103 - DNA, 12 bp, Artificial Sequence
  Oligonucleotide primer for the detection of SNP TSC0048298
tttgatattgta

SEQ ID NO: 353104 - DNA, 12 bp, Artificial Sequence
  Oligonucleotide primer for the detection of SNP TSC0048310
acttcaaaatta

SEQ ID NO: 353105 - DNA, 12 bp, Artificial Sequence
  Oligonucleotide primer for the detection of SNP TSC0048310
agtattattttg

SEQ ID NO: 353106 - DNA, 12 bp, Artificial Sequence
  Oligonucleotide primer for the detection of SNP TSC0048310
atattatcttaa

SEQ ID NO: 353107 - DNA, 12 bp, Artificial Sequence
  Oligonucleotide primer for the detection of SNP TSC0048310
tttagaattatt

SEQ ID NO: 353108 - DNA, 12 bp, Artificial Sequence
  Oligonucleotide primer for the detection of SNP TSC0048314
ttctatcttaaa

SEQ ID NO: 353109 - DNA, 12 bp, Artificial Sequence
  Oligonukleotid-Primer
attgggttgtat

SEQ ID NO: 353110 - DNA, 12 bp, Artificial Sequence
  Oligonucleotide primer for the detection of SNP TSC0048314
attaaattacac

SEQ ID NO: 353111 - DNA, 12 bp, Artificial Sequence
  Oligonucleotide primer for the detection of SNP TSC0048315
tccccacctccc

SEQ ID NO: 353112 - DNA, 12 bp, Artificial Sequence
  Oligonucleotide primer for the detection of SNP TSC0048315
aatatgggggaa

SEQ ID NO: 353113 - DNA, 12 bp, Artificial Sequence
  Oligonukleotid-Primer
aaaaattaacca

SEQ ID NO: 353114 - DNA, 12 bp, Artificial Sequence
  Oligonucleotide primer for the detection of SNP TSC0048316
ctaccaccacac

SEQ ID NO: 353115 - DNA, 12 bp, Artificial Sequence
  Oligonucleotide primer for the detection of SNP TSC0048317
acatctattatt

SEQ ID NO: 353116 - DNA, 12 bp, Artificial Sequence
  Oligonucleotide primer for the detection of SNP TSC0048317
ggggaaaaaaag

SEQ ID NO: 353117 - DNA, 12 bp, Artificial Sequence
  Oligonukleotid-Primer
atttattctact

SEQ ID NO: 353118 - DNA, 12 bp, Artificial Sequence
  Oligonucleotide primer for the detection of SNP TSC0048318
tatttaaatgta

SEQ ID NO: 353119 - DNA, 12 bp, Artificial Sequence
  Oligonucleotide primer for the detection of SNP TSC0010241
tagagttgtata

SEQ ID NO: 353120 - DNA, 12 bp, Artificial Sequence
  Oligonucleotide primer for the detection of SNP TSC0010241
taaaattataca

SEQ ID NO: 353121 - DNA, 12 bp, Artificial Sequence
  Oligonucleotide primer for the detection of SNP TSC0010241
gggattttgttt

SEQ ID NO: 353122 - DNA, 12 bp, Artificial Sequence
  Oligonucleotide primer for the detection of SNP TSC0005486
ttttaaggtaaa

SEQ ID NO: 353123 - DNA, 12 bp, Artificial Sequence
  Oligonucleotide primer for the detection of SNP TSC0005487
gtttatgttttg

SEQ ID NO: 353124 - DNA, 12 bp, Artificial Sequence
  Oligonucleotide primer for the detection of SNP TSC0005487
atccatatttta

SEQ ID NO: 353125 - DNA, 12 bp, Artificial Sequence
  Oligonucleotide primer for the detection of SNP TSC0005487
atagagggaatg

SEQ ID NO: 353126 - DNA, 12 bp, Artificial Sequence
  Oligonucleotide primer for the detection of SNP TSC0048321
aagtaaaatagt

SEQ ID NO: 353127 - DNA, 12 bp, Artificial Sequence
  Oligonucleotide primer for the detection of SNP TSC0048321
tagaaattattc

SEQ ID NO: 353128 - DNA, 12 bp, Artificial Sequence
  Oligonucleotide primer for the detection of SNP TSC0048324
acacactcctcc

SEQ ID NO: 353129 - DNA, 12 bp, Artificial Sequence
  Oligonucleotide primer for the detection of SNP TSC0048324
acacgctcctcc

SEQ ID NO: 353130 - DNA, 12 bp, Artificial Sequence
  Oligonucleotide primer for the detection of SNP TSC0048325
acaaacaaactc

SEQ ID NO: 353131 - DNA, 12 bp, Artificial Sequence
  Oligonucleotide primer for the detection of SNP TSC0048325
gcaaacaaactc

SEQ ID NO: 353132 - DNA, 12 bp, Artificial Sequence
  Oligonucleotide primer for the detection of SNP TSC0048325
tttatgtggaaa

SEQ ID NO: 353133 - DNA, 12 bp, Artificial Sequence
  Oligonucleotide primer for the detection of SNP TSC0048328
ctacctcctcaa

SEQ ID NO: 353134 - DNA, 12 bp, Artificial Sequence
  Oligonucleotide primer for the detection of SNP TSC0048328
tattagttattt

SEQ ID NO: 353135 - DNA, 12 bp, Artificial Sequence
  Oligonucleotide primer for the detection of SNP TSC0048328
taccaactactc

SEQ ID NO: 353136 - DNA, 12 bp, Artificial Sequence
  Oligonucleotide primer for the detection of SNP TSC0048329
tcaatttaatac

SEQ ID NO: 353137 - DNA, 12 bp, Artificial Sequence
  Oligonucleotide primer for the detection of SNP TSC0048329
tattaagttaaa

SEQ ID NO: 353138 - DNA, 12 bp, Artificial Sequence
  Oligonucleotide primer for the detection of SNP TSC0048329
cactaaatcaaa

SEQ ID NO: 353139 - DNA, 12 bp, Artificial Sequence
  Oligonucleotide primer for the detection of SNP TSC0048329
ttaatttgatat

SEQ ID NO: 353140 - DNA, 12 bp, Artificial Sequence
  Oligonucleotide primer for the detection of SNP TSC0048330
catcaccaatca

SEQ ID NO: 353141 - DNA, 12 bp, Artificial Sequence
  Oligonucleotide primer for the detection of SNP TSC0048330
tgagatgattta

SEQ ID NO: 353142 - DNA, 12 bp, Artificial Sequence
  Oligonucleotide primer for the detection of SNP TSC0048330
taaaataactca

SEQ ID NO: 353143 - DNA, 12 bp, Artificial Sequence
  Oligonucleotide primer for the detection of SNP TSC0048330
tattattaatta

SEQ ID NO: 353144 - DNA, 12 bp, Artificial Sequence
  Oligonucleotide primer for the detection of SNP TSC0048331
cttttaaaaaca

SEQ ID NO: 353145 - DNA, 12 bp, Artificial Sequence
  Oligonucleotide primer for the detection of SNP TSC0048331
cctccatatctc

SEQ ID NO: 353146 - DNA, 12 bp, Artificial Sequence
  Oligonucleotide primer for the detection of SNP TSC0048331
tttttaggggta

SEQ ID NO: 353147 - DNA, 12 bp, Artificial Sequence
  Oligonucleotide primer for the detection of SNP TSC0048333
aatttaatttat

SEQ ID NO: 353148 - DNA, 12 bp, Artificial Sequence
  Oligonucleotide primer for the detection of SNP TSC0048333
gttatgtttata

SEQ ID NO: 353149 - DNA, 12 bp, Artificial Sequence
  Oligonucleotide primer for the detection of SNP TSC0006704
tgtaaatgattg

SEQ ID NO: 353150 - DNA, 12 bp, Artificial Sequence
  Oligonucleotide primer for the detection of SNP TSC0048336
tttaatctttaa

SEQ ID NO: 353151 - DNA, 12 bp, Artificial Sequence
  Oligonucleotide primer for the detection of SNP TSC0048336
ctaaaacccatt

SEQ ID NO: 353152 - DNA, 12 bp, Artificial Sequence
  Oligonucleotide primer for the detection of SNP TSC0048338
ttcccaaaatac

SEQ ID NO: 353153 - DNA, 12 bp, Artificial Sequence
  Oligonucleotide primer for the detection of SNP TSC0048338
ttttggtgaaag

SEQ ID NO: 353154 - DNA, 12 bp, Artificial Sequence
  Oligonucleotide primer for the detection of SNP TSC0048339
cctctcattttt

SEQ ID NO: 353155 - DNA, 12 bp, Artificial Sequence
  Oligonucleotide primer for the detection of SNP TSC0048339
attttctctaaa

SEQ ID NO: 353156 - DNA, 12 bp, Artificial Sequence
  Oligonucleotide primer for the detection of SNP TSC0048340
tttttgagatgg

SEQ ID NO: 353157 - DNA, 12 bp, Artificial Sequence
  Oligonucleotide primer for the detection of SNP TSC0048340
ttttcgagatgg

SEQ ID NO: 353158 - DNA, 12 bp, Artificial Sequence
  Oligonucleotide primer for the detection of SNP TSC0048341
acctataatcac

SEQ ID NO: 353159 - DNA, 12 bp, Artificial Sequence
  Oligonucleotide primer for the detection of SNP TSC0048341
acctataatcgc

SEQ ID NO: 353160 - DNA, 12 bp, Artificial Sequence
  Oligonucleotide primer for the detection of SNP TSC0048345
atacaacacaat

SEQ ID NO: 353161 - DNA, 12 bp, Artificial Sequence
  Oligonucleotide primer for the detection of SNP TSC0048346
atatctaatcac

SEQ ID NO: 353162 - DNA, 12 bp, Artificial Sequence
  Oligonucleotide primer for the detection of SNP TSC0048346
gtttaatatatg

SEQ ID NO: 353163 - DNA, 12 bp, Artificial Sequence
  Oligonucleotide primer for the detection of SNP TSC0048347
tctcaatctaat

SEQ ID NO: 353164 - DNA, 12 bp, Artificial Sequence
  Oligonucleotide primer for the detection of SNP TSC0048347
tgtgttgtaagg

SEQ ID NO: 353165 - DNA, 12 bp, Artificial Sequence
  Oligonucleotide primer for the detection of SNP TSC0048348
taccccatttac

SEQ ID NO: 353166 - DNA, 12 bp, Artificial Sequence
  Oligonucleotide primer for the detection of SNP TSC0048350
aacaataacact

SEQ ID NO: 353167 - DNA, 12 bp, Artificial Sequence
  Oligonucleotide primer for the detection of SNP TSC0048350
ttgtattttata

SEQ ID NO: 353168 - DNA, 12 bp, Artificial Sequence
  Oligonucleotide primer for the detection of SNP TSC0048350
ctacatctcata

SEQ ID NO: 353169 - DNA, 12 bp, Artificial Sequence
  Oligonucleotide primer for the detection of SNP TSC0048350
aataataatatt

SEQ ID NO: 353170 - DNA, 12 bp, Artificial Sequence
  Oligonucleotide primer for the detection of SNP TSC0048351
agttatggaaat

SEQ ID NO: 353171 - DNA, 12 bp, Artificial Sequence
  Oligonucleotide primer for the detection of SNP TSC0048351
aaccataaaaat

SEQ ID NO: 353172 - DNA, 12 bp, Artificial Sequence
  Oligonucleotide primer for the detection of SNP TSC0048356
cttcatctccaa

SEQ ID NO: 353173 - DNA, 12 bp, Artificial Sequence
  Oligonucleotide primer for the detection of SNP TSC0048356
atgagatttatt

SEQ ID NO: 353174 - DNA, 12 bp, Artificial Sequence
  Oligonucleotide primer for the detection of SNP TSC0048356
aaataaaactta

SEQ ID NO: 353175 - DNA, 12 bp, Artificial Sequence
  Oligonucleotide primer for the detection of SNP TSC0008584
taaactcaacac

SEQ ID NO: 353176 - DNA, 12 bp, Artificial Sequence
  Oligonucleotide primer for the detection of SNP TSC0008584
gtagtgtttatg

SEQ ID NO: 353177 - DNA, 12 bp, Artificial Sequence
  Oligonucleotide primer for the detection of SNP TSC0008584
gtagcgtttatg

SEQ ID NO: 353178 - DNA, 12 bp, Artificial Sequence
  Oligonucleotide primer for the detection of SNP TSC0008585
aaaatctccaac

SEQ ID NO: 353179 - DNA, 12 bp, Artificial Sequence
  Oligonucleotide primer for the detection of SNP TSC0008585
agggaaatgtgg

SEQ ID NO: 353180 - DNA, 12 bp, Artificial Sequence
  Oligonucleotide primer for the detection of SNP TSC0008585
ggggtttttaat

SEQ ID NO: 353181 - DNA, 12 bp, Artificial Sequence
  Oligonucleotide primer for the detection of SNP TSC0008585
ggggtttttaac

SEQ ID NO: 353182 - DNA, 12 bp, Artificial Sequence
  Oligonucleotide primer for the detection of SNP TSC0008586
acactaaatccc

SEQ ID NO: 353183 - DNA, 12 bp, Artificial Sequence
  Oligonucleotide primer for the detection of SNP TSC0008586
tgttgtatgtag

SEQ ID NO: 353184 - DNA, 12 bp, Artificial Sequence
  Oligonucleotide primer for the detection of SNP TSC0048360
acaaacactccc

SEQ ID NO: 353185 - DNA, 12 bp, Artificial Sequence
  Oligonucleotide primer for the detection of SNP TSC0048360
agtttatagtta

SEQ ID NO: 353186 - DNA, 12 bp, Artificial Sequence
  Oligonucleotide primer for the detection of SNP TSC0004939
taagaagaattt

SEQ ID NO: 353187 - DNA, 12 bp, Artificial Sequence
  Oligonucleotide primer for the detection of SNP TSC0048363
ctctctatataa

SEQ ID NO: 353188 - DNA, 12 bp, Artificial Sequence
  Oligonucleotide primer for the detection of SNP TSC0048363
tagtaaaagaga

SEQ ID NO: 353189 - DNA, 12 bp, Artificial Sequence
  Oligonucleotide primer for the detection of SNP TSC0048364
aataaaacattt

SEQ ID NO: 353190 - DNA, 12 bp, Artificial Sequence
  Oligonucleotide primer for the detection of SNP TSC0048364
aaatgtttttaa

SEQ ID NO: 353191 - DNA, 12 bp, Artificial Sequence
  Oligonucleotide primer for the detection of SNP TSC0048364
agtaggatattt

SEQ ID NO: 353192 - DNA, 12 bp, Artificial Sequence
  Oligonucleotide primer for the detection of SNP TSC0048365
aaatactatcaa

SEQ ID NO: 353193 - DNA, 12 bp, Artificial Sequence
  Oligonucleotide primer for the detection of SNP TSC0048365
atggagatatgt

SEQ ID NO: 353194 - DNA, 12 bp, Artificial Sequence
  Oligonucleotide primer for the detection of SNP TSC0048365
ataaaaatatac

SEQ ID NO: 353195 - DNA, 12 bp, Artificial Sequence
  Oligonucleotide primer for the detection of SNP TSC0048365
atattattagtt

SEQ ID NO: 353196 - DNA, 12 bp, Artificial Sequence
  Oligonucleotide primer for the detection of SNP TSC0048365
atattattagtc

SEQ ID NO: 353197 - DNA, 12 bp, Artificial Sequence
  Oligonucleotide primer for the detection of SNP TSC0048366
taaatcttcatc

SEQ ID NO: 353198 - DNA, 12 bp, Artificial Sequence
  Oligonucleotide primer for the detection of SNP TSC0048366
tattaaagtttt

SEQ ID NO: 353199 - DNA, 12 bp, Artificial Sequence
  Oligonucleotide primer for the detection of SNP TSC0048366
attaaaacctta

SEQ ID NO: 353200 - DNA, 12 bp, Artificial Sequence
  Oligonucleotide primer for the detection of SNP TSC0048367
atggggtaggga

SEQ ID NO: 353201 - DNA, 12 bp, Artificial Sequence
  Oligonucleotide primer for the detection of SNP TSC0048367
attttaaagagg

SEQ ID NO: 353202 - DNA, 12 bp, Artificial Sequence
  Oligonucleotide primer for the detection of SNP TSC0048370
aaatttactttc

SEQ ID NO: 353203 - DNA, 12 bp, Artificial Sequence
  Oligonucleotide primer for the detection of SNP TSC0048371
tgtgttattgtt

SEQ ID NO: 353204 - DNA, 12 bp, Artificial Sequence
  Oligonucleotide primer for the detection of SNP TSC0048371
tgcgttattgtt

SEQ ID NO: 353205 - DNA, 12 bp, Artificial Sequence
  Oligonucleotide primer for the detection of SNP TSC0048371
tacaccactacc

SEQ ID NO: 353206 - DNA, 12 bp, Artificial Sequence
  Oligonucleotide primer for the detection of SNP TSC0048371
tacgccactacc

SEQ ID NO: 353207 - DNA, 12 bp, Artificial Sequence
  Oligonucleotide primer for the detection of SNP TSC0048372
tttgaggtaaag

SEQ ID NO: 353208 - DNA, 12 bp, Artificial Sequence
  Oligonucleotide primer for the detection of SNP TSC0048373
attgatgtagtt

SEQ ID NO: 353209 - DNA, 12 bp, Artificial Sequence
  Oligonucleotide primer for the detection of SNP TSC0048373
attgatgtagtc

SEQ ID NO: 353210 - DNA, 12 bp, Artificial Sequence
  Oligonucleotide primer for the detection of SNP TSC0048373
actaatataacc

SEQ ID NO: 353211 - DNA, 12 bp, Artificial Sequence
  Oligonucleotide primer for the detection of SNP TSC0048373
gtatagagggtt

SEQ ID NO: 353212 - DNA, 12 bp, Artificial Sequence
  Oligonucleotide primer for the detection of SNP TSC0048374
acaatttcaata

SEQ ID NO: 353213 - DNA, 12 bp, Artificial Sequence
  Oligonucleotide primer for the detection of SNP TSC0048374
agtttagttttt

SEQ ID NO: 353214 - DNA, 12 bp, Artificial Sequence
  Oligonucleotide primer for the detection of SNP TSC0048374
aacccaaccctc

SEQ ID NO: 353215 - DNA, 12 bp, Artificial Sequence
  Oligonucleotide primer for the detection of SNP TSC0048378
tcttaactaaac

SEQ ID NO: 353216 - DNA, 12 bp, Artificial Sequence
  Oligonucleotide primer for the detection of SNP TSC0048378
tttgaatatgtg

SEQ ID NO: 353217 - DNA, 12 bp, Artificial Sequence
  Oligonucleotide primer for the detection of SNP TSC0048378
tttggttagatt

SEQ ID NO: 353218 - DNA, 12 bp, Artificial Sequence
  Oligonucleotide primer for the detection of SNP TSC0048380
tcaccttttcat

SEQ ID NO: 353219 - DNA, 12 bp, Artificial Sequence
  Oligonucleotide primer for the detection of SNP TSC0048380
attggtgggtga

SEQ ID NO: 353220 - DNA, 12 bp, Artificial Sequence
  Oligonucleotide primer for the detection of SNP TSC0048380
attggtgggcga

SEQ ID NO: 353221 - DNA, 12 bp, Artificial Sequence
  Oligonucleotide primer for the detection of SNP TSC0048381
ttgtttgtgggg

SEQ ID NO: 353222 - DNA, 12 bp, Artificial Sequence
  Oligonucleotide primer for the detection of SNP TSC0048383
tgttagtattta

SEQ ID NO: 353223 - DNA, 12 bp, Artificial Sequence
  Oligonucleotide primer for the detection of SNP TSC0007122
aaccttactaca

SEQ ID NO: 353224 - DNA, 12 bp, Artificial Sequence
  Oligonucleotide primer for the detection of SNP TSC0007122
tcctctaaaact

SEQ ID NO: 353225 - DNA, 12 bp, Artificial Sequence
  Oligonucleotide primer for the detection of SNP TSC0007122
ggttttgttgta

SEQ ID NO: 353226 - DNA, 12 bp, Artificial Sequence
  Oligonucleotide primer for the detection of SNP TSC0048384
tactacaaacaa

SEQ ID NO: 353227 - DNA, 12 bp, Artificial Sequence
  Oligonucleotide primer for the detection of SNP TSC0048384
ccaatttcccta

SEQ ID NO: 353228 - DNA, 12 bp, Artificial Sequence
  Oligonucleotide primer for the detection of SNP TSC0048384
ttgttataaata

SEQ ID NO: 353229 - DNA, 12 bp, Artificial Sequence
  Oligonucleotide primer for the detection of SNP TSC0048385
aaaccccatctt

SEQ ID NO: 353230 - DNA, 12 bp, Artificial Sequence
  Oligonucleotide primer for the detection of SNP TSC0048387
attttccaatct

SEQ ID NO: 353231 - DNA, 12 bp, Artificial Sequence
  Oligonucleotide primer for the detection of SNP TSC0048387
tttttaagagtt

SEQ ID NO: 353232 - DNA, 12 bp, Artificial Sequence
  Oligonucleotide primer for the detection of SNP TSC0048388
aggggtgttgtt

SEQ ID NO: 353233 - DNA, 12 bp, Artificial Sequence
  Oligonucleotide primer for the detection of SNP TSC0048388
taatttataaga

SEQ ID NO: 353234 - DNA, 12 bp, Artificial Sequence
  Oligonucleotide primer for the detection of SNP TSC0048389
ctaaacctaaac

SEQ ID NO: 353235 - DNA, 12 bp, Artificial Sequence
  Oligonucleotide primer for the detection of SNP TSC0048389
tgtagaagttta

SEQ ID NO: 353236 - DNA, 12 bp, Artificial Sequence
  Oligonucleotide primer for the detection of SNP TSC0048390
ttaaaaataatc

SEQ ID NO: 353237 - DNA, 12 bp, Artificial Sequence
  Oligonucleotide primer for the detection of SNP TSC0048393
aaacccatctta

SEQ ID NO: 353238 - DNA, 12 bp, Artificial Sequence
  Oligonucleotide primer for the detection of SNP TSC0048393
aattttacttta

SEQ ID NO: 353239 - DNA, 12 bp, Artificial Sequence
  Oligonucleotide primer for the detection of SNP TSC0048394
actaaatatttt

SEQ ID NO: 353240 - DNA, 12 bp, Artificial Sequence
  Oligonucleotide primer for the detection of SNP TSC0048397
cacaattaaatc

SEQ ID NO: 353241 - DNA, 12 bp, Artificial Sequence
  Oligonucleotide primer for the detection of SNP TSC0048397
agtgatggagta

SEQ ID NO: 353242 - DNA, 12 bp, Artificial Sequence
  Oligonucleotide primer for the detection of SNP TSC0048398
cacaaatactac

SEQ ID NO: 353243 - DNA, 12 bp, Artificial Sequence
  Oligonucleotide primer for the detection of SNP TSC0048398
atagaagatatt

SEQ ID NO: 353244 - DNA, 12 bp, Artificial Sequence
  Oligonucleotide primer for the detection of SNP TSC0048398
taaaaaacatca

SEQ ID NO: 353245 - DNA, 12 bp, Artificial Sequence
  Oligonucleotide primer for the detection of SNP TSC0048398
ataggtgttgtt

SEQ ID NO: 353246 - DNA, 12 bp, Artificial Sequence
  Oligonucleotide primer for the detection of SNP TSC0048399
tattaaactcca

SEQ ID NO: 353247 - DNA, 12 bp, Artificial Sequence
  Oligonucleotide primer for the detection of SNP TSC0048399
ttgttaaatttt

SEQ ID NO: 353248 - DNA, 12 bp, Artificial Sequence
  Oligonucleotide primer for the detection of SNP TSC0048400
attctaaattct

SEQ ID NO: 353249 - DNA, 12 bp, Artificial Sequence
  Oligonucleotide primer for the detection of SNP TSC0048400
ggagtaaatagt

SEQ ID NO: 353250 - DNA, 12 bp, Artificial Sequence
  Oligonucleotide primer for the detection of SNP TSC0048400
attttgaatttt

SEQ ID NO: 353251 - DNA, 12 bp, Artificial Sequence
  Oligonucleotide primer for the detection of SNP TSC0048401
agttgaagtttt

SEQ ID NO: 353252 - DNA, 12 bp, Artificial Sequence
  Oligonucleotide primer for the detection of SNP TSC0048401
ccaattaaaacc

SEQ ID NO: 353253 - DNA, 12 bp, Artificial Sequence
  Oligonucleotide primer for the detection of SNP TSC0048401
tagttatataat

SEQ ID NO: 353254 - DNA, 12 bp, Artificial Sequence
  Oligonucleotide primer for the detection of SNP TSC0048401
tagttatataac

SEQ ID NO: 353255 - DNA, 12 bp, Artificial Sequence
  Oligonucleotide primer for the detection of SNP TSC0048402
ctcaacactaaa

SEQ ID NO: 353256 - DNA, 12 bp, Artificial Sequence
  Oligonucleotide primer for the detection of SNP TSC0048402
tgaggttttatt

SEQ ID NO: 353257 - DNA, 12 bp, Artificial Sequence
  Oligonucleotide primer for the detection of SNP TSC0048402
taaaaccctacc

SEQ ID NO: 353258 - DNA, 12 bp, Artificial Sequence
  Oligonucleotide primer for the detection of SNP TSC0048405
tatacataaaaa

SEQ ID NO: 353259 - DNA, 12 bp, Artificial Sequence
  Oligonucleotide primer for the detection of SNP TSC0048405
acattctctttt

SEQ ID NO: 353260 - DNA, 12 bp, Artificial Sequence
  Oligonucleotide primer for the detection of SNP TSC0048405
tatatataaaga

SEQ ID NO: 353261 - DNA, 12 bp, Artificial Sequence
  Oligonucleotide primer for the detection of SNP TSC0009382
tagttttgtgtt

SEQ ID NO: 353262 - DNA, 12 bp, Artificial Sequence
  Oligonucleotide primer for the detection of SNP TSC0009382
actaattctata

SEQ ID NO: 353263 - DNA, 12 bp, Artificial Sequence
  Oligonucleotide primer for the detection of SNP TSC0009382
agtaatgagaat

SEQ ID NO: 353264 - DNA, 12 bp, Artificial Sequence
  Oligonucleotide primer for the detection of SNP TSC0009382
agtaatgagaac

SEQ ID NO: 353265 - DNA, 12 bp, Artificial Sequence
  Oligonucleotide primer for the detection of SNP TSC0048407
aaaattaaccat

SEQ ID NO: 353266 - DNA, 12 bp, Artificial Sequence
  Oligonucleotide primer for the detection of SNP TSC0048412
aaatccacacct

SEQ ID NO: 353267 - DNA, 12 bp, Artificial Sequence
  Oligonucleotide primer for the detection of SNP TSC0048412
aaagattttggg

SEQ ID NO: 353268 - DNA, 12 bp, Artificial Sequence
  Oligonucleotide primer for the detection of SNP TSC0048413
aaaacaaacaca

SEQ ID NO: 353269 - DNA, 12 bp, Artificial Sequence
  Oligonucleotide primer for the detection of SNP TSC0048413
aaaacgaacaca

SEQ ID NO: 353270 - DNA, 12 bp, Artificial Sequence
  Oligonucleotide primer for the detection of SNP TSC0048413
atttgttatggt

SEQ ID NO: 353271 - DNA, 12 bp, Artificial Sequence
  Oligonucleotide primer for the detection of SNP TSC0048413
atttatcataac

SEQ ID NO: 353272 - DNA, 12 bp, Artificial Sequence
  Oligonucleotide primer for the detection of SNP TSC0048413
aagatgggtata

SEQ ID NO: 353273 - DNA, 12 bp, Artificial Sequence
  Oligonucleotide primer for the detection of SNP TSC0048413
aagacgggtata

SEQ ID NO: 353274 - DNA, 12 bp, Artificial Sequence
  Oligonucleotide primer for the detection of SNP TSC0007901
aaccctccccaa

SEQ ID NO: 353275 - DNA, 12 bp, Artificial Sequence
  Oligonucleotide primer for the detection of SNP TSC0007901
gtatgtgggagt

SEQ ID NO: 353276 - DNA, 12 bp, Artificial Sequence
  Oligonucleotide primer for the detection of SNP TSC0007901
gtatgtgggagc

SEQ ID NO: 353277 - DNA, 12 bp, Artificial Sequence
  Oligonucleotide primer for the detection of SNP TSC0009530
cccacacttatt

SEQ ID NO: 353278 - DNA, 12 bp, Artificial Sequence
  Oligonucleotide primer for the detection of SNP TSC0009530
tttagataatta

SEQ ID NO: 353279 - DNA, 12 bp, Artificial Sequence
  Oligonucleotide primer for the detection of SNP TSC0009530
cttaaataacca

SEQ ID NO: 353280 - DNA, 12 bp, Artificial Sequence
  Oligonucleotide primer for the detection of SNP TSC0048422
tctcataaacaa

SEQ ID NO: 353281 - DNA, 12 bp, Artificial Sequence
  Oligonucleotide primer for the detection of SNP TSC0048422
tgtgtatttgga

SEQ ID NO: 353282 - DNA, 12 bp, Artificial Sequence
  Oligonucleotide primer for the detection of SNP TSC0048422
tatatatctaaa

SEQ ID NO: 353283 - DNA, 12 bp, Artificial Sequence
  Oligonucleotide primer for the detection of SNP TSC0048423
tttgtagtatta

SEQ ID NO: 353284 - DNA, 12 bp, Artificial Sequence
  Oligonucleotide primer for the detection of SNP TSC0048423
tttataacatca

SEQ ID NO: 353285 - DNA, 12 bp, Artificial Sequence
  Oligonucleotide primer for the detection of SNP TSC0048423
aggaaatgaaat

SEQ ID NO: 353286 - DNA, 12 bp, Artificial Sequence
  Oligonucleotide primer for the detection of SNP TSC0048427
attttaaatatg

SEQ ID NO: 353287 - DNA, 12 bp, Artificial Sequence
  Oligonucleotide primer for the detection of SNP TSC0048428
accaacattaat

SEQ ID NO: 353288 - DNA, 12 bp, Artificial Sequence
  Oligonucleotide primer for the detection of SNP TSC0048428
accaacgttaat

SEQ ID NO: 353289 - DNA, 12 bp, Artificial Sequence
  Oligonucleotide primer for the detection of SNP TSC0048429
tccaattcaacc

SEQ ID NO: 353290 - DNA, 12 bp, Artificial Sequence
  Oligonucleotide primer for the detection of SNP TSC0048429
ggtaaatgttta

SEQ ID NO: 353291 - DNA, 12 bp, Artificial Sequence
  Oligonucleotide primer for the detection of SNP TSC0048431
actatattattc

SEQ ID NO: 353292 - DNA, 12 bp, Artificial Sequence
  Oligonucleotide primer for the detection of SNP TSC0006242
ttatccattttc

SEQ ID NO: 353293 - DNA, 12 bp, Artificial Sequence
  Oligonucleotide primer for the detection of SNP TSC0006242
tagaaatttttg

SEQ ID NO: 353294 - DNA, 12 bp, Artificial Sequence
  Oligonucleotide primer for the detection of SNP TSC0048435
actttaaatata

SEQ ID NO: 353295 - DNA, 12 bp, Artificial Sequence
  Oligonucleotide primer for the detection of SNP TSC0048435
gagaattagagt

SEQ ID NO: 353296 - DNA, 12 bp, Artificial Sequence
  Oligonucleotide primer for the detection of SNP TSC0048435
attttagatgta

SEQ ID NO: 353297 - DNA, 12 bp, Artificial Sequence
  Oligonucleotide primer for the detection of SNP TSC0008667
aaaaaccatctc

SEQ ID NO: 353298 - DNA, 12 bp, Artificial Sequence
  Oligonucleotide primer for the detection of SNP TSC0008667
atattggtggtg

SEQ ID NO: 353299 - DNA, 12 bp, Artificial Sequence
  Oligonucleotide primer for the detection of SNP TSC0048440
taggggtgggag

SEQ ID NO: 353300 - DNA, 12 bp, Artificial Sequence
  Oligonucleotide primer for the detection of SNP TSC0048440
taggggcgggag

SEQ ID NO: 353301 - DNA, 12 bp, Artificial Sequence
  Oligonucleotide primer for the detection of SNP TSC0048441
taattaacttat

SEQ ID NO: 353302 - DNA, 12 bp, Artificial Sequence
  Oligonucleotide primer for the detection of SNP TSC0048441
agtttgtagaat

SEQ ID NO: 353303 - DNA, 12 bp, Artificial Sequence
  Oligonucleotide primer for the detection of SNP TSC0048441
caacctacaaaa

SEQ ID NO: 353304 - DNA, 12 bp, Artificial Sequence
  Oligonucleotide primer for the detection of SNP TSC0048441
taattgatttat

SEQ ID NO: 353305 - DNA, 12 bp, Artificial Sequence
  Oligonucleotide primer for the detection of SNP TSC0048442
tatattactata

SEQ ID NO: 353306 - DNA, 12 bp, Artificial Sequence
  Oligonucleotide primer for the detection of SNP TSC0048442
tagttttaggta

SEQ ID NO: 353307 - DNA, 12 bp, Artificial Sequence
  Oligonucleotide primer for the detection of SNP TSC0048443
actattcaatat

SEQ ID NO: 353308 - DNA, 12 bp, Artificial Sequence
  Oligonucleotide primer for the detection of SNP TSC0048443
ttttgtgagata

SEQ ID NO: 353309 - DNA, 12 bp, Artificial Sequence
  Oligonucleotide primer for the detection of SNP TSC0048444
ccttacattcaa

SEQ ID NO: 353310 - DNA, 12 bp, Artificial Sequence
  Oligonucleotide primer for the detection of SNP TSC0048444
ggagagtattgt

SEQ ID NO: 353311 - DNA, 12 bp, Artificial Sequence
  Oligonucleotide primer for the detection of SNP TSC0048445
taagagagaaag

SEQ ID NO: 353312 - DNA, 12 bp, Artificial Sequence
  Oligonucleotide primer for the detection of SNP TSC0048446
tcacactccaac

SEQ ID NO: 353313 - DNA, 12 bp, Artificial Sequence
  Oligonucleotide primer for the detection of SNP TSC0048446
tcgcactccaac

SEQ ID NO: 353314 - DNA, 12 bp, Artificial Sequence
  Oligonucleotide primer for the detection of SNP TSC0048447
aaatacaacacc

SEQ ID NO: 353315 - DNA, 12 bp, Artificial Sequence
  Oligonucleotide primer for the detection of SNP TSC0048448
atatacattctt

SEQ ID NO: 353316 - DNA, 12 bp, Artificial Sequence
  Oligonucleotide primer for the detection of SNP TSC0048448
ttaaagtatata

SEQ ID NO: 353317 - DNA, 12 bp, Artificial Sequence
  Oligonucleotide primer for the detection of SNP TSC0048453
gatatagtttgg

SEQ ID NO: 353318 - DNA, 12 bp, Artificial Sequence
  Oligonucleotide primer for the detection of SNP TSC0009260
tcttcttaaacc

SEQ ID NO: 353319 - DNA, 12 bp, Artificial Sequence
  Oligonucleotide primer for the detection of SNP TSC0009260
tttaggggatag

SEQ ID NO: 353320 - DNA, 12 bp, Artificial Sequence
  Oligonucleotide primer for the detection of SNP TSC0048454
atatccatttat

SEQ ID NO: 353321 - DNA, 12 bp, Artificial Sequence
  Oligonucleotide primer for the detection of SNP TSC0048454
tgtattaatttg

SEQ ID NO: 353322 - DNA, 12 bp, Artificial Sequence
  Oligonucleotide primer for the detection of SNP TSC0048454
tacactaattta

SEQ ID NO: 353323 - DNA, 12 bp, Artificial Sequence
  Oligonucleotide primer for the detection of SNP TSC0048454
gtgtttatttgt

SEQ ID NO: 353324 - DNA, 12 bp, Artificial Sequence
  Oligonucleotide primer for the detection of SNP TSC0048457
tattataatgaa

SEQ ID NO: 353325 - DNA, 12 bp, Artificial Sequence
  Oligonucleotide primer for the detection of SNP TSC0048458
aattctatttaa

SEQ ID NO: 353326 - DNA, 12 bp, Artificial Sequence
  Oligonucleotide primer for the detection of SNP TSC0048458
tagaagaaaagt

SEQ ID NO: 353327 - DNA, 12 bp, Artificial Sequence
  Oligonucleotide primer for the detection of SNP TSC0048459
actactatcata

SEQ ID NO: 353328 - DNA, 12 bp, Artificial Sequence
  Oligonucleotide primer for the detection of SNP TSC0048459
aatatggatttt

SEQ ID NO: 353329 - DNA, 12 bp, Artificial Sequence
  Oligonucleotide primer for the detection of SNP TSC0048459
aatataaacctt

SEQ ID NO: 353330 - DNA, 12 bp, Artificial Sequence
  Oligonucleotide primer for the detection of SNP TSC0048459
attgttgttatg

SEQ ID NO: 353331 - DNA, 12 bp, Artificial Sequence
  Oligonucleotide primer for the detection of SNP TSC0006793
tctcattctatt

SEQ ID NO: 353332 - DNA, 12 bp, Artificial Sequence
  Oligonucleotide primer for the detection of SNP TSC0006793
attttagtttag

SEQ ID NO: 353333 - DNA, 12 bp, Artificial Sequence
  Oligonucleotide primer for the detection of SNP TSC0048461
agattagtttga

SEQ ID NO: 353334 - DNA, 12 bp, Artificial Sequence
  Oligonucleotide primer for the detection of SNP TSC0048465
taacttactcat

SEQ ID NO: 353335 - DNA, 12 bp, Artificial Sequence
  Oligonucleotide primer for the detection of SNP TSC0048465
tgtaagatttta

SEQ ID NO: 353336 - DNA, 12 bp, Artificial Sequence
  Oligonucleotide primer for the detection of SNP TSC0048466
acaatacataca

SEQ ID NO: 353337 - DNA, 12 bp, Artificial Sequence
  Oligonucleotide primer for the detection of SNP TSC0048466
ggttgatattat

SEQ ID NO: 353338 - DNA, 12 bp, Artificial Sequence
  Oligonucleotide primer for the detection of SNP TSC0048466
ggttgatattac

SEQ ID NO: 353339 - DNA, 12 bp, Artificial Sequence
  Oligonucleotide primer for the detection of SNP TSC0048466
taattaacatta

SEQ ID NO: 353340 - DNA, 12 bp, Artificial Sequence
  Oligonucleotide primer for the detection of SNP TSC0048467
tttgaggtaaaa

SEQ ID NO: 353341 - DNA, 12 bp, Artificial Sequence
  Oligonucleotide primer for the detection of SNP TSC0048468
aataattataaa

SEQ ID NO: 353342 - DNA, 12 bp, Artificial Sequence
  Oligonucleotide primer for the detection of SNP TSC0048468
attaaacactcc

SEQ ID NO: 353343 - DNA, 12 bp, Artificial Sequence
  Oligonucleotide primer for the detection of SNP TSC0048468
taataattatag

SEQ ID NO: 353344 - DNA, 12 bp, Artificial Sequence
  Oligonucleotide primer for the detection of SNP TSC0048469
cctacaatacca

SEQ ID NO: 353345 - DNA, 12 bp, Artificial Sequence
  Oligonucleotide primer for the detection of SNP TSC0048469
tatagtatgtat

SEQ ID NO: 353346 - DNA, 12 bp, Artificial Sequence
  Oligonucleotide primer for the detection of SNP TSC0048469
tacaatatacat

SEQ ID NO: 353347 - DNA, 12 bp, Artificial Sequence
  Oligonucleotide primer for the detection of SNP TSC0048469
tttgtaatatta

SEQ ID NO: 353348 - DNA, 12 bp, Artificial Sequence
  Oligonucleotide primer for the detection of SNP TSC0048470
atttaccacctt

SEQ ID NO: 353349 - DNA, 12 bp, Artificial Sequence
  Oligonucleotide primer for the detection of SNP TSC0048470
ataaaaaaaatg

SEQ ID NO: 353350 - DNA, 12 bp, Artificial Sequence
  Oligonucleotide primer for the detection of SNP TSC0048475
tttaataactta

SEQ ID NO: 353351 - DNA, 12 bp, Artificial Sequence
  Oligonucleotide primer for the detection of SNP TSC0048475
aaaccaatcaat

SEQ ID NO: 353352 - DNA, 12 bp, Artificial Sequence
  Oligonucleotide primer for the detection of SNP TSC0048475
ttggtgatttat

SEQ ID NO: 353353 - DNA, 12 bp, Artificial Sequence
  Oligonucleotide primer for the detection of SNP TSC0048476
ccgaattcaaac

SEQ ID NO: 353354 - DNA, 12 bp, Artificial Sequence
  Oligonucleotide primer for the detection of SNP TSC0048476
tgaggtaagaga

SEQ ID NO: 353355 - DNA, 12 bp, Artificial Sequence
  Oligonucleotide primer for the detection of SNP TSC0048477
taccctcttata

SEQ ID NO: 353356 - DNA, 12 bp, Artificial Sequence
  Oligonucleotide primer for the detection of SNP TSC0048477
gaatgggattga

SEQ ID NO: 353357 - DNA, 12 bp, Artificial Sequence
  Oligonucleotide primer for the detection of SNP TSC0048478
gaaataaattat

SEQ ID NO: 353358 - DNA, 12 bp, Artificial Sequence
  Oligonucleotide primer for the detection of SNP TSC0048478
aaaacaaattat

SEQ ID NO: 353359 - DNA, 12 bp, Artificial Sequence
  Oligonucleotide primer for the detection of SNP TSC0048478
tggtatgttgtg

SEQ ID NO: 353360 - DNA, 12 bp, Artificial Sequence
  Oligonucleotide primer for the detection of SNP TSC0048480
tatcaatctttt

SEQ ID NO: 353361 - DNA, 12 bp, Artificial Sequence
  Oligonucleotide primer for the detection of SNP TSC0048480
tagaagtatata

SEQ ID NO: 353362 - DNA, 12 bp, Artificial Sequence
  Oligonucleotide primer for the detection of SNP TSC0048480
caaaaacacaca

SEQ ID NO: 353363 - DNA, 12 bp, Artificial Sequence
  Oligonucleotide primer for the detection of SNP TSC0048480
attaattttttc

SEQ ID NO: 353364 - DNA, 12 bp, Artificial Sequence
  Oligonucleotide primer for the detection of SNP TSC0048481
ctttaaaataat

SEQ ID NO: 353365 - DNA, 12 bp, Artificial Sequence
  Oligonucleotide primer for the detection of SNP TSC0048481
atgtagtgtgta

SEQ ID NO: 353366 - DNA, 12 bp, Artificial Sequence
  Oligonucleotide primer for the detection of SNP TSC0009072
atttttttcata

SEQ ID NO: 353367 - DNA, 12 bp, Artificial Sequence
  Oligonucleotide primer for the detection of SNP TSC0008050
taagatgattta

SEQ ID NO: 353368 - DNA, 12 bp, Artificial Sequence
  Oligonucleotide primer for the detection of SNP TSC0007894
ccctcacactat

SEQ ID NO: 353369 - DNA, 12 bp, Artificial Sequence
  Oligonucleotide primer for the detection of SNP TSC0007894
ttgttttattga

SEQ ID NO: 353370 - DNA, 12 bp, Artificial Sequence
  Oligonucleotide primer for the detection of SNP TSC0007895
taattgttttaa

SEQ ID NO: 353371 - DNA, 12 bp, Artificial Sequence
  Oligonucleotide primer for the detection of SNP TSC0007895
taatcgttttaa

SEQ ID NO: 353372 - DNA, 12 bp, Artificial Sequence
  Oligonucleotide primer for the detection of SNP TSC0048483
catatacattat

SEQ ID NO: 353373 - DNA, 12 bp, Artificial Sequence
  Oligonucleotide primer for the detection of SNP TSC0048483
tgttgttagttg

SEQ ID NO: 353374 - DNA, 12 bp, Artificial Sequence
  Oligonucleotide primer for the detection of SNP TSC0048485
taattcttatat

SEQ ID NO: 353375 - DNA, 12 bp, Artificial Sequence
  Oligonucleotide primer for the detection of SNP TSC0048485
atagtgagtttg

SEQ ID NO: 353376 - DNA, 12 bp, Artificial Sequence
  Oligonucleotide primer for the detection of SNP TSC0005358
ctatataaatca

SEQ ID NO: 353377 - DNA, 12 bp, Artificial Sequence
  Oligonucleotide primer for the detection of SNP TSC0005358
aggaggtagtgt

SEQ ID NO: 353378 - DNA, 12 bp, Artificial Sequence
  Oligonucleotide primer for the detection of SNP TSC0005358
tttatgtgaatt

SEQ ID NO: 353379 - DNA, 12 bp, Artificial Sequence
  Oligonucleotide primer for the detection of SNP TSC0008717
tcttcaaacatt

SEQ ID NO: 353380 - DNA, 12 bp, Artificial Sequence
  Oligonucleotide primer for the detection of SNP TSC0048493
ctactcaaacta

SEQ ID NO: 353381 - DNA, 12 bp, Artificial Sequence
  Oligonucleotide primer for the detection of SNP TSC0048494
gtatatatagga

SEQ ID NO: 353382 - DNA, 12 bp, Artificial Sequence
  Oligonucleotide primer for the detection of SNP TSC0048495
aactaaaacaac

SEQ ID NO: 353383 - DNA, 12 bp, Artificial Sequence
  Oligonucleotide primer for the detection of SNP TSC0048495
aactaaaacgac

SEQ ID NO: 353384 - DNA, 12 bp, Artificial Sequence
  Oligonucleotide primer for the detection of SNP TSC0048495
tgtgttggtgta

SEQ ID NO: 353385 - DNA, 12 bp, Artificial Sequence
  Oligonucleotide primer for the detection of SNP TSC0048495
tatattaataca

SEQ ID NO: 353386 - DNA, 12 bp, Artificial Sequence
  Oligonucleotide primer for the detection of SNP TSC0048495
agttgggatgat

SEQ ID NO: 353387 - DNA, 12 bp, Artificial Sequence
  Oligonucleotide primer for the detection of SNP TSC0048495
agttgggacgat

SEQ ID NO: 353388 - DNA, 12 bp, Artificial Sequence
  Oligonucleotide primer for the detection of SNP TSC0048496
aaaatttacacg

SEQ ID NO: 353389 - DNA, 12 bp, Artificial Sequence
  Oligonucleotide primer for the detection of SNP TSC0048496
aagtaataatgt

SEQ ID NO: 353390 - DNA, 12 bp, Artificial Sequence
  Oligonucleotide primer for the detection of SNP TSC0048496
ataacaatataa

SEQ ID NO: 353391 - DNA, 12 bp, Artificial Sequence
  Oligonucleotide primer for the detection of SNP TSC0048496
aaaatttatacg

SEQ ID NO: 353392 - DNA, 12 bp, Artificial Sequence
  Oligonucleotide primer for the detection of SNP TSC0006087
tttacctcaatt

SEQ ID NO: 353393 - DNA, 12 bp, Artificial Sequence
  Oligonucleotide primer for the detection of SNP TSC0006087
caattaatttac

SEQ ID NO: 353394 - DNA, 12 bp, Artificial Sequence
  Oligonucleotide primer for the detection of SNP TSC0006087
tttattttagtt

SEQ ID NO: 353395 - DNA, 12 bp, Artificial Sequence
  Oligonucleotide primer for the detection of SNP TSC0006088
aattcataatct

SEQ ID NO: 353396 - DNA, 12 bp, Artificial Sequence
  Oligonucleotide primer for the detection of SNP TSC0048497
aaataattcatt

SEQ ID NO: 353397 - DNA, 12 bp, Artificial Sequence
  Oligonucleotide primer for the detection of SNP TSC0048498
accaaaacactt

SEQ ID NO: 353398 - DNA, 12 bp, Artificial Sequence
  Oligonucleotide primer for the detection of SNP TSC0048498
atagaggtttaa

SEQ ID NO: 353399 - DNA, 12 bp, Artificial Sequence
  Oligonucleotide primer for the detection of SNP TSC0048498
gttaagatattt

SEQ ID NO: 353400 - DNA, 12 bp, Artificial Sequence
  Oligonucleotide primer for the detection of SNP TSC0048502
aaaattattacc

SEQ ID NO: 353401 - DNA, 12 bp, Artificial Sequence
  Oligonucleotide primer for the detection of SNP TSC0048502
tggagattattt

SEQ ID NO: 353402 - DNA, 12 bp, Artificial Sequence
  Oligonucleotide primer for the detection of SNP TSC0048502
aaaaactactta

SEQ ID NO: 353403 - DNA, 12 bp, Artificial Sequence
  Oligonucleotide primer for the detection of SNP TSC0048502
agattattgttt

SEQ ID NO: 353404 - DNA, 12 bp, Artificial Sequence
  Oligonucleotide primer for the detection of SNP TSC0048503
tacctactacat

SEQ ID NO: 353405 - DNA, 12 bp, Artificial Sequence
  Oligonucleotide primer for the detection of SNP TSC0048504
aacttcctaaca

SEQ ID NO: 353406 - DNA, 12 bp, Artificial Sequence
  Oligonucleotide primer for the detection of SNP TSC0048504
agaatgtggttt

SEQ ID NO: 353407 - DNA, 12 bp, Artificial Sequence
  Oligonucleotide primer for the detection of SNP TSC0048504
aaatataattta

SEQ ID NO: 353408 - DNA, 12 bp, Artificial Sequence
  Oligonucleotide primer for the detection of SNP TSC0048505
aacacctacctt

SEQ ID NO: 353409 - DNA, 12 bp, Artificial Sequence
  Oligonucleotide primer for the detection of SNP TSC0048505
aacgcctacctt

SEQ ID NO: 353410 - DNA, 12 bp, Artificial Sequence
  Oligonukleotid-Primer
gtaaggaaatga

SEQ ID NO: 353411 - DNA, 12 bp, Artificial Sequence
  Oligonucleotide primer for the detection of SNP TSC0048506
taccaatcttaa

SEQ ID NO: 353412 - DNA, 12 bp, Artificial Sequence
  Oligonucleotide primer for the detection of SNP TSC0048506
agattgagagat

SEQ ID NO: 353413 - DNA, 12 bp, Artificial Sequence
  Oligonucleotide primer for the detection of SNP TSC0048507
tcacaaaatata

SEQ ID NO: 353414 - DNA, 12 bp, Artificial Sequence
  Oligonukleotid-Primer
tggtagggttaa

SEQ ID NO: 353415 - DNA, 12 bp, Artificial Sequence
  Oligonucleotide primer for the detection of SNP TSC0048507
taacaaaattaa

SEQ ID NO: 353416 - DNA, 12 bp, Artificial Sequence
  Oligonucleotide primer for the detection of SNP TSC0048507
tttataaaatat

SEQ ID NO: 353417 - DNA, 12 bp, Artificial Sequence
  Oligonucleotide primer for the detection of SNP TSC0048509
actaaataattc

SEQ ID NO: 353418 - DNA, 12 bp, Artificial Sequence
  Oligonukleotid-Primer
ttttatatataa

SEQ ID NO: 353419 - DNA, 12 bp, Artificial Sequence
  Oligonucleotide primer for the detection of SNP TSC0048510
cttcacttacct

SEQ ID NO: 353420 - DNA, 12 bp, Artificial Sequence
  Oligonucleotide primer for the detection of SNP TSC0048510
ttatatgattaa

SEQ ID NO: 353421 - DNA, 12 bp, Artificial Sequence
  Oligonucleotide primer for the detection of SNP TSC0048511
tctatcaccacc

SEQ ID NO: 353422 - DNA, 12 bp, Artificial Sequence
  Oligonukleotid-Primer
tagtattgggga

SEQ ID NO: 353423 - DNA, 12 bp, Artificial Sequence
  Oligonucleotide primer for the detection of SNP TSC0048511
tagtatcgggga

SEQ ID NO: 353424 - DNA, 12 bp, Artificial Sequence
  Oligonucleotide primer for the detection of SNP TSC0004544
ttatcaacttcc

SEQ ID NO: 353425 - DNA, 12 bp, Artificial Sequence
  Oligonucleotide primer for the detection of SNP TSC0004544
aaatttgagaaa

SEQ ID NO: 353426 - DNA, 12 bp, Artificial Sequence
  Oligonukleotid-Primer
ttctcatctaca

SEQ ID NO: 353427 - DNA, 12 bp, Artificial Sequence
  Oligonucleotide primer for the detection of SNP TSC0048513
ggaatatttttt

SEQ ID NO: 353428 - DNA, 12 bp, Artificial Sequence
  Oligonucleotide primer for the detection of SNP TSC0048513
aaaatattttcc

SEQ ID NO: 353429 - DNA, 12 bp, Artificial Sequence
  Oligonucleotide primer for the detection of SNP TSC0048514
acaaatcattcc

SEQ ID NO: 353430 - DNA, 12 bp, Artificial Sequence
  Oligonukleotid-Primer
aaacaaattcaa

SEQ ID NO: 353431 - DNA, 12 bp, Artificial Sequence
  Oligonucleotide primer for the detection of SNP TSC0009059
aattccacatat

SEQ ID NO: 353432 - DNA, 12 bp, Artificial Sequence
  Oligonucleotide primer for the detection of SNP TSC0009059
tattacataata

SEQ ID NO: 353433 - DNA, 12 bp, Artificial Sequence
  Oligonucleotide primer for the detection of SNP TSC0009059
gattttatatat

SEQ ID NO: 353434 - DNA, 12 bp, Artificial Sequence
  Oligonukleotid-Primer
aatcctttccat

SEQ ID NO: 353435 - DNA, 12 bp, Artificial Sequence
  Oligonucleotide primer for the detection of SNP TSC0048519
gaattttaggaa

SEQ ID NO: 353436 - DNA, 12 bp, Artificial Sequence
  Oligonucleotide primer for the detection of SNP TSC0048520
gttgaagtgagt

SEQ ID NO: 353437 - DNA, 12 bp, Artificial Sequence
  Oligonucleotide primer for the detection of SNP TSC0048520
gtagtggtgtga

SEQ ID NO: 353438 - DNA, 12 bp, Artificial Sequence
  Oligonukleotid-Primer
ttataatcctta

SEQ ID NO: 353439 - DNA, 12 bp, Artificial Sequence
  Oligonucleotide primer for the detection of SNP TSC0048522
ttagagttattg

SEQ ID NO: 353440 - DNA, 12 bp, Artificial Sequence
  Oligonucleotide primer for the detection of SNP TSC0048522
ccaaaatcatta

SEQ ID NO: 353441 - DNA, 12 bp, Artificial Sequence
  Oligonucleotide primer for the detection of SNP TSC0048522
ttgtaagttggt

SEQ ID NO: 353442 - DNA, 12 bp, Artificial Sequence
  Oligonukleotid-Primer
cctaacacatat

SEQ ID NO: 353443 - DNA, 12 bp, Artificial Sequence
  Oligonucleotide primer for the detection of SNP TSC0048523
tggttaatttaa

SEQ ID NO: 353444 - DNA, 12 bp, Artificial Sequence
  Oligonucleotide primer for the detection of SNP TSC0048523
taatcaatctaa

SEQ ID NO: 353445 - DNA, 12 bp, Artificial Sequence
  Oligonucleotide primer for the detection of SNP TSC0048523
tttaatatatgt

SEQ ID NO: 353446 - DNA, 12 bp, Artificial Sequence
  Oligonucleotide primer for the detection of SNP TSC0005528
tcttaattcctt

SEQ ID NO: 353447 - DNA, 12 bp, Artificial Sequence
  Oligonucleotide primer for the detection of SNP TSC0005528
gttgggtgaata

SEQ ID NO: 353448 - DNA, 12 bp, Artificial Sequence
  Oligonucleotide primer for the detection of SNP TSC0048524
caccttcctaac

SEQ ID NO: 353449 - DNA, 12 bp, Artificial Sequence
  Oligonucleotide primer for the detection of SNP TSC0048524
tattatataggt

SEQ ID NO: 353450 - DNA, 12 bp, Artificial Sequence
  Oligonucleotide primer for the detection of SNP TSC0048524
taccatacaaat

SEQ ID NO: 353451 - DNA, 12 bp, Artificial Sequence
  Oligonucleotide primer for the detection of SNP TSC0048524
tatttttttggt

SEQ ID NO: 353452 - DNA, 12 bp, Artificial Sequence
  Oligonucleotide primer for the detection of SNP TSC0048525
tgggggtttttt

SEQ ID NO: 353453 - DNA, 12 bp, Artificial Sequence
  Oligonucleotide primer for the detection of SNP TSC0048525
ggaaaagaaaag

SEQ ID NO: 353454 - DNA, 12 bp, Artificial Sequence
  Oligonucleotide primer for the detection of SNP TSC0048526
acctctcaatac

SEQ ID NO: 353455 - DNA, 12 bp, Artificial Sequence
  Oligonucleotide primer for the detection of SNP TSC0048526
gttttttagtgt

SEQ ID NO: 353456 - DNA, 12 bp, Artificial Sequence
  Oligonucleotide primer for the detection of SNP TSC0008787
caatttatacca

SEQ ID NO: 353457 - DNA, 12 bp, Artificial Sequence
  Oligonucleotide primer for the detection of SNP TSC0008787
tggtagtagtag

SEQ ID NO: 353458 - DNA, 12 bp, Artificial Sequence
  Oligonucleotide primer for the detection of SNP TSC0008787
aatttatattat

SEQ ID NO: 353459 - DNA, 12 bp, Artificial Sequence
  Oligonucleotide primer for the detection of SNP TSC0008788
acaacctaaaat

SEQ ID NO: 353460 - DNA, 12 bp, Artificial Sequence
  Oligonucleotide primer for the detection of SNP TSC0008788
tttggaggatga

SEQ ID NO: 353461 - DNA, 12 bp, Artificial Sequence
  Oligonucleotide primer for the detection of SNP TSC0008788
tttggaggacga

SEQ ID NO: 353462 - DNA, 12 bp, Artificial Sequence
  Oligonucleotide primer for the detection of SNP TSC0048527
cccacatctata

SEQ ID NO: 353463 - DNA, 12 bp, Artificial Sequence
  Oligonucleotide primer for the detection of SNP TSC0048527
cccacgtctata

SEQ ID NO: 353464 - DNA, 12 bp, Artificial Sequence
  Oligonucleotide primer for the detection of SNP TSC0048527
cccgcatctata

SEQ ID NO: 353465 - DNA, 12 bp, Artificial Sequence
  Oligonucleotide primer for the detection of SNP TSC0048527
cccgcgtctata

SEQ ID NO: 353466 - DNA, 12 bp, Artificial Sequence
  Oligonucleotide primer for the detection of SNP TSC0048527
tgaagtggatgt

SEQ ID NO: 353467 - DNA, 12 bp, Artificial Sequence
  Oligonucleotide primer for the detection of SNP TSC0048527
tgaagtggacgt

SEQ ID NO: 353468 - DNA, 12 bp, Artificial Sequence
  Oligonucleotide primer for the detection of SNP TSC0048527
taaaataaacgc

SEQ ID NO: 353469 - DNA, 12 bp, Artificial Sequence
  Oligonucleotide primer for the detection of SNP TSC0048527
tttgtgtttgtg

SEQ ID NO: 353470 - DNA, 12 bp, Artificial Sequence
  Oligonucleotide primer for the detection of SNP TSC0048527
ttcgtgtttgtg

SEQ ID NO: 353471 - DNA, 12 bp, Artificial Sequence
  Oligonucleotide primer for the detection of SNP TSC0048527
tttgcgtttgtg

SEQ ID NO: 353472 - DNA, 12 bp, Artificial Sequence
  Oligonucleotide primer for the detection of SNP TSC0048527
ttcgcgtttgtg

SEQ ID NO: 353473 - DNA, 12 bp, Artificial Sequence
  Oligonucleotide primer for the detection of SNP TSC0048528
atctccctaaat

SEQ ID NO: 353474 - DNA, 12 bp, Artificial Sequence
  Oligonucleotide primer for the detection of SNP TSC0048529
aacaaacaattc

SEQ ID NO: 353475 - DNA, 12 bp, Artificial Sequence
  Oligonucleotide primer for the detection of SNP TSC0048529
ttgtttatttta

SEQ ID NO: 353476 - DNA, 12 bp, Artificial Sequence
  Oligonucleotide primer for the detection of SNP TSC0048529
tcgtttatttta

SEQ ID NO: 353477 - DNA, 12 bp, Artificial Sequence
  Oligonucleotide primer for the detection of SNP TSC0007482
aaactacatatt

SEQ ID NO: 353478 - DNA, 12 bp, Artificial Sequence
  Oligonucleotide primer for the detection of SNP TSC0007482
agggtatatagg

SEQ ID NO: 353479 - DNA, 12 bp, Artificial Sequence
  Oligonucleotide primer for the detection of SNP TSC0048530
ctaaattttata

SEQ ID NO: 353480 - DNA, 12 bp, Artificial Sequence
  Oligonucleotide primer for the detection of SNP TSC0048530
aaatattgatgt

SEQ ID NO: 353481 - DNA, 12 bp, Artificial Sequence
  Oligonucleotide primer for the detection of SNP TSC0048530
aaacactaatat

SEQ ID NO: 353482 - DNA, 12 bp, Artificial Sequence
  Oligonucleotide primer for the detection of SNP TSC0048530
ttgaattttgta

SEQ ID NO: 353483 - DNA, 12 bp, Artificial Sequence
  Oligonucleotide primer for the detection of SNP TSC0048531
taatattataac

SEQ ID NO: 353484 - DNA, 12 bp, Artificial Sequence
  Oligonucleotide primer for the detection of SNP TSC0048531
tgattgttaagt

SEQ ID NO: 353485 - DNA, 12 bp, Artificial Sequence
  Oligonucleotide primer for the detection of SNP TSC0048531
taattatcaaat

SEQ ID NO: 353486 - DNA, 12 bp, Artificial Sequence
  Oligonucleotide primer for the detection of SNP TSC0048531
tagtattatgat

SEQ ID NO: 353487 - DNA, 12 bp, Artificial Sequence
  Oligonucleotide primer for the detection of SNP TSC0048532
ttctaaacattt

SEQ ID NO: 353488 - DNA, 12 bp, Artificial Sequence
  unsure (3): Oligonucleotide primer for the detection of SNP TSC0048532
gtntaagaaatg

SEQ ID NO: 353489 - DNA, 12 bp, Artificial Sequence
  Oligonucleotide primer for the detection of SNP TSC0048533
ctaactactctt

SEQ ID NO: 353490 - DNA, 12 bp, Artificial Sequence
  Oligonucleotide primer for the detection of SNP TSC0048533
tatggtgtgttg

SEQ ID NO: 353491 - DNA, 12 bp, Artificial Sequence
  Oligonucleotide primer for the detection of SNP TSC0048533
tatggtgcgttg

SEQ ID NO: 353492 - DNA, 12 bp, Artificial Sequence
  Oligonucleotide primer for the detection of SNP TSC0004854
aaatccaacacc

SEQ ID NO: 353493 - DNA, 12 bp, Artificial Sequence
  Oligonucleotide primer for the detection of SNP TSC0004854
tatgaattttga

SEQ ID NO: 353494 - DNA, 12 bp, Artificial Sequence
  Oligonucleotide primer for the detection of SNP TSC0048536
aaatctataaat

SEQ ID NO: 353495 - DNA, 12 bp, Artificial Sequence
  Oligonucleotide primer for the detection of SNP TSC0048536
ttatatatataa

SEQ ID NO: 353496 - DNA, 12 bp, Artificial Sequence
  Oligonucleotide primer for the detection of SNP TSC0048537
taatatatttct

SEQ ID NO: 353497 - DNA, 12 bp, Artificial Sequence
  Oligonucleotide primer for the detection of SNP TSC0048537
tgaatttaaaag

SEQ ID NO: 353498 - DNA, 12 bp, Artificial Sequence
  Oligonucleotide primer for the detection of SNP TSC0048538
taaaaataaccc

SEQ ID NO: 353499 - DNA, 12 bp, Artificial Sequence
  Oligonucleotide primer for the detection of SNP TSC0048538
ttttaaaggtta

SEQ ID NO: 353500 - DNA, 12 bp, Artificial Sequence
  Oligonucleotide primer for the detection of SNP TSC0048539
atataaccttat

SEQ ID NO: 353501 - DNA, 12 bp, Artificial Sequence
  Oligonucleotide primer for the detection of SNP TSC0048539
acgagttttttt

SEQ ID NO: 353502 - DNA, 12 bp, Artificial Sequence
  Oligonucleotide primer for the detection of SNP TSC0048539
caaacttcctta

SEQ ID NO: 353503 - DNA, 12 bp, Artificial Sequence
  Oligonucleotide primer for the detection of SNP TSC0048539
cgaacttcctta

SEQ ID NO: 353504 - DNA, 12 bp, Artificial Sequence
  Oligonucleotide primer for the detection of SNP TSC0048539
gtgtaattttgt

SEQ ID NO: 353505 - DNA, 12 bp, Artificial Sequence
  Oligonucleotide primer for the detection of SNP TSC0048542
ttactttcttcc

SEQ ID NO: 353506 - DNA, 12 bp, Artificial Sequence
  Oligonucleotide primer for the detection of SNP TSC0048542
tataaaataagg

SEQ ID NO: 353507 - DNA, 12 bp, Artificial Sequence
  Oligonucleotide primer for the detection of SNP TSC0048546
tgttattaaatt

SEQ ID NO: 353508 - DNA, 12 bp, Artificial Sequence
  Oligonucleotide primer for the detection of SNP TSC0048546
tattattaaatt

SEQ ID NO: 353509 - DNA, 12 bp, Artificial Sequence
  Oligonucleotide primer for the detection of SNP TSC0048546
attttaagttat

SEQ ID NO: 353510 - DNA, 12 bp, Artificial Sequence
  Oligonucleotide primer for the detection of SNP TSC0048549
ctcaaactaaac

SEQ ID NO: 353511 - DNA, 12 bp, Artificial Sequence
  Oligonucleotide primer for the detection of SNP TSC0048549
tttaagttgagt

SEQ ID NO: 353512 - DNA, 12 bp, Artificial Sequence
  Oligonucleotide primer for the detection of SNP TSC0048553
atcccaacattt

SEQ ID NO: 353513 - DNA, 12 bp, Artificial Sequence
  Oligonucleotide primer for the detection of SNP TSC0048555
taaaatctaata

SEQ ID NO: 353514 - DNA, 12 bp, Artificial Sequence
  Oligonucleotide primer for the detection of SNP TSC0048555
atatgatgtaaa

SEQ ID NO: 353515 - DNA, 12 bp, Artificial Sequence
  Oligonucleotide primer for the detection of SNP TSC0048555
atataatacaaa

SEQ ID NO: 353516 - DNA, 12 bp, Artificial Sequence
  Oligonucleotide primer for the detection of SNP TSC0048555
tggggtttgatg

SEQ ID NO: 353517 - DNA, 12 bp, Artificial Sequence
  Oligonucleotide primer for the detection of SNP TSC0048556
ctcccttaacta

SEQ ID NO: 353518 - DNA, 12 bp, Artificial Sequence
  Oligonucleotide primer for the detection of SNP TSC0048556
tgggtgggagtg

SEQ ID NO: 353519 - DNA, 12 bp, Artificial Sequence
  Oligonucleotide primer for the detection of SNP TSC0048556
tgggcgggagtg

SEQ ID NO: 353520 - DNA, 12 bp, Artificial Sequence
  Oligonucleotide primer for the detection of SNP TSC0048556
tgggtgggagcg

SEQ ID NO: 353521 - DNA, 12 bp, Artificial Sequence
  Oligonucleotide primer for the detection of SNP TSC0048556
tgggcgggagcg

SEQ ID NO: 353522 - DNA, 12 bp, Artificial Sequence
  Oligonucleotide primer for the detection of SNP TSC0048556
taaacaaaaacg

SEQ ID NO: 353523 - DNA, 12 bp, Artificial Sequence
  Oligonucleotide primer for the detection of SNP TSC0048556
taaacgaaaaca

SEQ ID NO: 353524 - DNA, 12 bp, Artificial Sequence
  Oligonucleotide primer for the detection of SNP TSC0048556
taaacgaaaacg

SEQ ID NO: 353525 - DNA, 12 bp, Artificial Sequence
  Oligonucleotide primer for the detection of SNP TSC0048558
attataatattc

SEQ ID NO: 353526 - DNA, 12 bp, Artificial Sequence
  Oligonucleotide primer for the detection of SNP TSC0048558
gtgaatattgta

SEQ ID NO: 353527 - DNA, 12 bp, Artificial Sequence
  Oligonucleotide primer for the detection of SNP TSC0048560
aaacattctaaa

SEQ ID NO: 353528 - DNA, 12 bp, Artificial Sequence
  Oligonucleotide primer for the detection of SNP TSC0048560
ttaattttttgc

SEQ ID NO: 353529 - DNA, 12 bp, Artificial Sequence
  Oligonucleotide primer for the detection of SNP TSC0048560
cttaattttcta

SEQ ID NO: 353530 - DNA, 12 bp, Artificial Sequence
  Oligonucleotide primer for the detection of SNP TSC0048560
ggagtattttaa

SEQ ID NO: 353531 - DNA, 12 bp, Artificial Sequence
  Oligonucleotide primer for the detection of SNP TSC0048562
atctaattcaac

SEQ ID NO: 353532 - DNA, 12 bp, Artificial Sequence
  Oligonucleotide primer for the detection of SNP TSC0048562
agggtataatta

SEQ ID NO: 353533 - DNA, 12 bp, Artificial Sequence
  Oligonucleotide primer for the detection of SNP TSC0048564
ctatccacctat

SEQ ID NO: 353534 - DNA, 12 bp, Artificial Sequence
  Oligonucleotide primer for the detection of SNP TSC0048564
ctatccgcctat

SEQ ID NO: 353535 - DNA, 12 bp, Artificial Sequence
  Oligonucleotide primer for the detection of SNP TSC0048564
gaatttggaggg

SEQ ID NO: 353536 - DNA, 12 bp, Artificial Sequence
  Oligonucleotide primer for the detection of SNP TSC0048564
gaattcggaggg

SEQ ID NO: 353537 - DNA, 12 bp, Artificial Sequence
  Oligonucleotide primer for the detection of SNP TSC0048565
aaatcaaattaa

SEQ ID NO: 353538 - DNA, 12 bp, Artificial Sequence
  Oligonucleotide primer for the detection of SNP TSC0048565
aggttgggagtt

SEQ ID NO: 353539 - DNA, 12 bp, Artificial Sequence
  Oligonucleotide primer for the detection of SNP TSC0048565
aggtcgggagtt

SEQ ID NO: 353540 - DNA, 12 bp, Artificial Sequence
  Oligonucleotide primer for the detection of SNP TSC0048565
aaatcgaaaatt

SEQ ID NO: 353541 - DNA, 12 bp, Artificial Sequence
  Oligonucleotide primer for the detection of SNP TSC0048565
gggttaggttgg

SEQ ID NO: 353542 - DNA, 12 bp, Artificial Sequence
  Oligonucleotide primer for the detection of SNP TSC0048566
cctcactcctca

SEQ ID NO: 353543 - DNA, 12 bp, Artificial Sequence
  Oligonukleotid-Primer
aattgagggatg

SEQ ID NO: 353544 - DNA, 12 bp, Artificial Sequence
  Oligonucleotide primer for the detection of SNP TSC0048567
ctaaaaccataa

SEQ ID NO: 353545 - DNA, 12 bp, Artificial Sequence
  Oligonucleotide primer for the detection of SNP TSC0048567
ttttggggaagg

SEQ ID NO: 353546 - DNA, 12 bp, Artificial Sequence
  Oligonucleotide primer for the detection of SNP TSC0048567
tggaattatagt

SEQ ID NO: 353547 - DNA, 12 bp, Artificial Sequence
  Oligonukleotid-Primer
ttcctacatcat

SEQ ID NO: 353548 - DNA, 12 bp, Artificial Sequence
  Oligonucleotide primer for the detection of SNP TSC0006603
ttcctacatcgt

SEQ ID NO: 353549 - DNA, 12 bp, Artificial Sequence
  Oligonucleotide primer for the detection of SNP TSC0006603
gtagatttaggg

SEQ ID NO: 353550 - DNA, 12 bp, Artificial Sequence
  Oligonucleotide primer for the detection of SNP TSC0006603
acaaacctaaaa

SEQ ID NO: 353551 - DNA, 12 bp, Artificial Sequence
  Oligonucleotide primer for the detection of SNP TSC0006603
tttttgtattgt

SEQ ID NO: 353552 - DNA, 12 bp, Artificial Sequence
  Oligonucleotide primer for the detection of SNP TSC0006603
tttttgtatcgt

SEQ ID NO: 353553 - DNA, 12 bp, Artificial Sequence
  Oligonucleotide primer for the detection of SNP TSC0048568
aacttttacctc

SEQ ID NO: 353554 - DNA, 12 bp, Artificial Sequence
  Oligonucleotide primer for the detection of SNP TSC0048568
aaggttttagaa

SEQ ID NO: 353555 - DNA, 12 bp, Artificial Sequence
  Oligonucleotide primer for the detection of SNP TSC0048569
taacttctctta

SEQ ID NO: 353556 - DNA, 12 bp, Artificial Sequence
  Oligonucleotide primer for the detection of SNP TSC0048569
gaagtgtgtttt

SEQ ID NO: 353557 - DNA, 12 bp, Artificial Sequence
  Oligonucleotide primer for the detection of SNP TSC0048570
tggagtatattt

SEQ ID NO: 353558 - DNA, 12 bp, Artificial Sequence
  Oligonucleotide primer for the detection of SNP TSC0048570
tataaaacacac

SEQ ID NO: 353559 - DNA, 12 bp, Artificial Sequence
  Oligonucleotide primer for the detection of SNP TSC0048570
ggtaggtgaagg

SEQ ID NO: 353560 - DNA, 12 bp, Artificial Sequence
  Oligonucleotide primer for the detection of SNP TSC0048572
tattttatttac

SEQ ID NO: 353561 - DNA, 12 bp, Artificial Sequence
  Oligonucleotide primer for the detection of SNP TSC0048572
tttaaagaaatg

SEQ ID NO: 353562 - DNA, 12 bp, Artificial Sequence
  Oligonucleotide primer for the detection of SNP TSC0048573
ctttttatttta

SEQ ID NO: 353563 - DNA, 12 bp, Artificial Sequence
  Oligonucleotide primer for the detection of SNP TSC0048574
aaaaccttaatc

SEQ ID NO: 353564 - DNA, 12 bp, Artificial Sequence
  Oligonucleotide primer for the detection of SNP TSC0048574
aggttaaataag

SEQ ID NO: 353565 - DNA, 12 bp, Artificial Sequence
  Oligonucleotide primer for the detection of SNP TSC0010632
aagttaggatta

SEQ ID NO: 353566 - DNA, 12 bp, Artificial Sequence
  Oligonucleotide primer for the detection of SNP TSC0010633
atatataaattc

SEQ ID NO: 353567 - DNA, 12 bp, Artificial Sequence
  Oligonucleotide primer for the detection of SNP TSC0010633
tggaagaaataa

SEQ ID NO: 353568 - DNA, 12 bp, Artificial Sequence
  Oligonucleotide primer for the detection of SNP TSC0048576
aaacgtatatct

SEQ ID NO: 353569 - DNA, 12 bp, Artificial Sequence
  Oligonucleotide primer for the detection of SNP TSC0048576
aaagtgtttttg

SEQ ID NO: 353570 - DNA, 12 bp, Artificial Sequence
  Oligonucleotide primer for the detection of SNP TSC0048586
ctatcaaaacat

SEQ ID NO: 353571 - DNA, 12 bp, Artificial Sequence
  Oligonucleotide primer for the detection of SNP TSC0048586
attttagtgtat

SEQ ID NO: 353572 - DNA, 12 bp, Artificial Sequence
  Oligonucleotide primer for the detection of SNP TSC0048586
attccaatatac

SEQ ID NO: 353573 - DNA, 12 bp, Artificial Sequence
  Oligonucleotide primer for the detection of SNP TSC0048587
taatattaacac

SEQ ID NO: 353574 - DNA, 12 bp, Artificial Sequence
  Oligonucleotide primer for the detection of SNP TSC0048587
gtaattgtttta

SEQ ID NO: 353575 - DNA, 12 bp, Artificial Sequence
  Oligonucleotide primer for the detection of SNP TSC0048588
tttatctcataa

SEQ ID NO: 353576 - DNA, 12 bp, Artificial Sequence
  Oligonucleotide primer for the detection of SNP TSC0048588
tatagattaaag

SEQ ID NO: 353577 - DNA, 12 bp, Artificial Sequence
  Oligonucleotide primer for the detection of SNP TSC0048588
attttatgattt

SEQ ID NO: 353578 - DNA, 12 bp, Artificial Sequence
  Oligonucleotide primer for the detection of SNP TSC0048591
atatttattacc

SEQ ID NO: 353579 - DNA, 12 bp, Artificial Sequence
  Oligonucleotide primer for the detection of SNP TSC0048591
aaatttgaagaa

SEQ ID NO: 353580 - DNA, 12 bp, Artificial Sequence
  Oligonucleotide primer for the detection of SNP TSC0048596
gtagtggcgtga

SEQ ID NO: 353581 - DNA, 12 bp, Artificial Sequence
  Oligonucleotide primer for the detection of SNP TSC0048596
ataataacgtaa

SEQ ID NO: 353582 - DNA, 12 bp, Artificial Sequence
  Oligonucleotide primer for the detection of SNP TSC0048596
ttgtagggagtt

SEQ ID NO: 353583 - DNA, 12 bp, Artificial Sequence
  Oligonucleotide primer for the detection of SNP TSC0048597
attttccttttc

SEQ ID NO: 353584 - DNA, 12 bp, Artificial Sequence
  Oligonucleotide primer for the detection of SNP TSC0048597
gttataataatt

SEQ ID NO: 353585 - DNA, 12 bp, Artificial Sequence
  Oligonucleotide primer for the detection of SNP TSC0048597
accataacaatt

SEQ ID NO: 353586 - DNA, 12 bp, Artificial Sequence
  Oligonucleotide primer for the detection of SNP TSC0048598
tataataaattt

SEQ ID NO: 353587 - DNA, 12 bp, Artificial Sequence
  Oligonucleotide primer for the detection of SNP TSC0048598
cacactttctaa

SEQ ID NO: 353588 - DNA, 12 bp, Artificial Sequence
  Oligonucleotide primer for the detection of SNP TSC0048598
tgtagtaggttt

SEQ ID NO: 353589 - DNA, 12 bp, Artificial Sequence
  Oligonucleotide primer for the detection of SNP TSC0048599
tatcccaacact

SEQ ID NO: 353590 - DNA, 12 bp, Artificial Sequence
  Oligonucleotide primer for the detection of SNP TSC0048599
tttgtttaatta

SEQ ID NO: 353591 - DNA, 12 bp, Artificial Sequence
  Oligonucleotide primer for the detection of SNP TSC0048601
tttcatttccct

SEQ ID NO: 353592 - DNA, 12 bp, Artificial Sequence
  Oligonucleotide primer for the detection of SNP TSC0048601
caatatcattca

SEQ ID NO: 353593 - DNA, 12 bp, Artificial Sequence
  Oligonucleotide primer for the detection of SNP TSC0048606
ttctctcacaaa

SEQ ID NO: 353594 - DNA, 12 bp, Artificial Sequence
  Oligonucleotide primer for the detection of SNP TSC0048606
ctaatttcacta

SEQ ID NO: 353595 - DNA, 12 bp, Artificial Sequence
  Oligonukleotid-Primer
tttatgatagta

SEQ ID NO: 353596 - DNA, 12 bp, Artificial Sequence
  Oligonucleotide primer for the detection of SNP TSC0048607
ctcataacaaca

SEQ ID NO: 353597 - DNA, 12 bp, Artificial Sequence
  Oligonucleotide primer for the detection of SNP TSC0048607
tatattagaggg

SEQ ID NO: 353598 - DNA, 12 bp, Artificial Sequence
  Oligonucleotide primer for the detection of SNP TSC0048610
actactttcaaa

SEQ ID NO: 353599 - DNA, 12 bp, Artificial Sequence
  Oligonucleotide primer for the detection of SNP TSC0048610
aagttgggttat

SEQ ID NO: 353600 - DNA, 12 bp, Artificial Sequence
  Oligonucleotide primer for the detection of SNP TSC0048610
aaattaaattac

SEQ ID NO: 353601 - DNA, 12 bp, Artificial Sequence
  Oligonucleotide primer for the detection of SNP TSC0048610
gttgtttttagg

SEQ ID NO: 353602 - DNA, 12 bp, Artificial Sequence
  Oligonucleotide primer for the detection of SNP TSC0007560
atttaatggtta

SEQ ID NO: 353603 - DNA, 12 bp, Artificial Sequence
  Oligonucleotide primer for the detection of SNP TSC0007560
atttaacggtta

SEQ ID NO: 353604 - DNA, 12 bp, Artificial Sequence
  Oligonucleotide primer for the detection of SNP TSC0007561
aaacataatatt

SEQ ID NO: 353605 - DNA, 12 bp, Artificial Sequence
  Oligonucleotide primer for the detection of SNP TSC0048611
tcaatataacca

SEQ ID NO: 353606 - DNA, 12 bp, Artificial Sequence
  Oligonucleotide primer for the detection of SNP TSC0048611
tataaatttatt

SEQ ID NO: 353607 - DNA, 12 bp, Artificial Sequence
  Oligonucleotide primer for the detection of SNP TSC0048611
cttataaattca

SEQ ID NO: 353608 - DNA, 12 bp, Artificial Sequence
  Oligonucleotide primer for the detection of SNP TSC0048612
tactaatcacat

SEQ ID NO: 353609 - DNA, 12 bp, Artificial Sequence
  Oligonucleotide primer for the detection of SNP TSC0048612
tactaatcacgt

SEQ ID NO: 353610 - DNA, 12 bp, Artificial Sequence
  Oligonucleotide primer for the detection of SNP TSC0048613
aaataacgatac

SEQ ID NO: 353611 - DNA, 12 bp, Artificial Sequence
  Oligonucleotide primer for the detection of SNP TSC0048613
ttattgtggttg

SEQ ID NO: 353612 - DNA, 12 bp, Artificial Sequence
  Oligonucleotide primer for the detection of SNP TSC0048613
tcactataacta

SEQ ID NO: 353613 - DNA, 12 bp, Artificial Sequence
  Oligonucleotide primer for the detection of SNP TSC0048613
gagtggtggtgt

SEQ ID NO: 353614 - DNA, 12 bp, Artificial Sequence
  Oligonucleotide primer for the detection of SNP TSC0048613
gagtggcggtgt

SEQ ID NO: 353615 - DNA, 12 bp, Artificial Sequence
  Oligonucleotide primer for the detection of SNP TSC0048614
ctcaaatcaaaa

SEQ ID NO: 353616 - DNA, 12 bp, Artificial Sequence
  Oligonucleotide primer for the detection of SNP TSC0048614
ctcgaatcaaaa

SEQ ID NO: 353617 - DNA, 12 bp, Artificial Sequence
  Oligonucleotide primer for the detection of SNP TSC0048614
agtaaatatatt

SEQ ID NO: 353618 - DNA, 12 bp, Artificial Sequence
  Oligonucleotide primer for the detection of SNP TSC0048614
caacaaacacac

SEQ ID NO: 353619 - DNA, 12 bp, Artificial Sequence
  Oligonucleotide primer for the detection of SNP TSC0048614
ttttgggttaag

SEQ ID NO: 353620 - DNA, 12 bp, Artificial Sequence
  Oligonucleotide primer for the detection of SNP TSC0048614
tttcgggttaag

SEQ ID NO: 353621 - DNA, 12 bp, Artificial Sequence
  Oligonucleotide primer for the detection of SNP TSC0048615
aaatcaaacatt

SEQ ID NO: 353622 - DNA, 12 bp, Artificial Sequence
  Oligonucleotide primer for the detection of SNP TSC0048615
tggtatatagga

SEQ ID NO: 353623 - DNA, 12 bp, Artificial Sequence
  Oligonucleotide primer for the detection of SNP TSC0048616
tttctatcttat

SEQ ID NO: 353624 - DNA, 12 bp, Artificial Sequence
  Oligonucleotide primer for the detection of SNP TSC0048616
tggagggtttaa

SEQ ID NO: 353625 - DNA, 12 bp, Artificial Sequence
  Oligonucleotide primer for the detection of SNP TSC0008772
aaaaacatacta

SEQ ID NO: 353626 - DNA, 12 bp, Artificial Sequence
  Oligonucleotide primer for the detection of SNP TSC0008772
tagtagggttaa

SEQ ID NO: 353627 - DNA, 12 bp, Artificial Sequence
  Oligonucleotide primer for the detection of SNP TSC0008772
aaagatatattg

SEQ ID NO: 353628 - DNA, 12 bp, Artificial Sequence
  Oligonucleotide primer for the detection of SNP TSC0048617
tctattatcatt

SEQ ID NO: 353629 - DNA, 12 bp, Artificial Sequence
  Oligonucleotide primer for the detection of SNP TSC0048617
ttagagagaaag

SEQ ID NO: 353630 - DNA, 12 bp, Artificial Sequence
  Oligonucleotide primer for the detection of SNP TSC0048617
tttgttattatt

SEQ ID NO: 353631 - DNA, 12 bp, Artificial Sequence
  Oligonucleotide primer for the detection of SNP TSC0048618
attacaatcatt

SEQ ID NO: 353632 - DNA, 12 bp, Artificial Sequence
  Oligonucleotide primer for the detection of SNP TSC0048618
tttttaatgtta

SEQ ID NO: 353633 - DNA, 12 bp, Artificial Sequence
  Oligonucleotide primer for the detection of SNP TSC0048619
aaacataatctc

SEQ ID NO: 353634 - DNA, 12 bp, Artificial Sequence
  Oligonucleotide primer for the detection of SNP TSC0048620
ttaactctatac

SEQ ID NO: 353635 - DNA, 12 bp, Artificial Sequence
  Oligonucleotide primer for the detection of SNP TSC0048620
atttttttataa

SEQ ID NO: 353636 - DNA, 12 bp, Artificial Sequence
  Oligonucleotide primer for the detection of SNP TSC0048621
tcctattattcc

SEQ ID NO: 353637 - DNA, 12 bp, Artificial Sequence
  Oligonucleotide primer for the detection of SNP TSC0048622
aatactaaacaa

SEQ ID NO: 353638 - DNA, 12 bp, Artificial Sequence
  Oligonucleotide primer for the detection of SNP TSC0048622
cccccaaaacca

SEQ ID NO: 353639 - DNA, 12 bp, Artificial Sequence
  Oligonucleotide primer for the detection of SNP TSC0008820
aaatcaaactac

SEQ ID NO: 353640 - DNA, 12 bp, Artificial Sequence
  Oligonucleotide primer for the detection of SNP TSC0008820
gattagttgttg

SEQ ID NO: 353641 - DNA, 12 bp, Artificial Sequence
  Oligonucleotide primer for the detection of SNP TSC0048623
aataagatgaga

SEQ ID NO: 353642 - DNA, 12 bp, Artificial Sequence
  Oligonucleotide primer for the detection of SNP TSC0048625
ttttttggtcgt

SEQ ID NO: 353643 - DNA, 12 bp, Artificial Sequence
  Oligonucleotide primer for the detection of SNP TSC0048625
ctttcttaatca

SEQ ID NO: 353644 - DNA, 12 bp, Artificial Sequence
  Oligonucleotide primer for the detection of SNP TSC0048625
ctttcttaatcg

SEQ ID NO: 353645 - DNA, 12 bp, Artificial Sequence
  Oligonucleotide primer for the detection of SNP TSC0048625
gagatttaatta

SEQ ID NO: 353646 - DNA, 12 bp, Artificial Sequence
  Oligonucleotide primer for the detection of SNP TSC0048630
ctctatctacct

SEQ ID NO: 353647 - DNA, 12 bp, Artificial Sequence
  Oligonucleotide primer for the detection of SNP TSC0048630
atagatagataa

SEQ ID NO: 353648 - DNA, 12 bp, Artificial Sequence
  Oligonucleotide primer for the detection of SNP TSC0006487
ttgtgagtttta

SEQ ID NO: 353649 - DNA, 12 bp, Artificial Sequence
  Oligonucleotide primer for the detection of SNP TSC0048631
tttttctccatt

SEQ ID NO: 353650 - DNA, 12 bp, Artificial Sequence
  Oligonucleotide primer for the detection of SNP TSC0048631
atgtaaaggtaa

SEQ ID NO: 353651 - DNA, 12 bp, Artificial Sequence
  Oligonucleotide primer for the detection of SNP TSC0048632
aattacatattc

SEQ ID NO: 353652 - DNA, 12 bp, Artificial Sequence
  Oligonucleotide primer for the detection of SNP TSC0048632
aattacgtattc

SEQ ID NO: 353653 - DNA, 12 bp, Artificial Sequence
  Oligonucleotide primer for the detection of SNP TSC0048633
taaattacactt

SEQ ID NO: 353654 - DNA, 12 bp, Artificial Sequence
  Oligonucleotide primer for the detection of SNP TSC0048633
gaagaattttat

SEQ ID NO: 353655 - DNA, 12 bp, Artificial Sequence
  Oligonucleotide primer for the detection of SNP TSC0048634
cttacaaaaaat

SEQ ID NO: 353656 - DNA, 12 bp, Artificial Sequence
  Oligonucleotide primer for the detection of SNP TSC0048634
aattgttagtag

SEQ ID NO: 353657 - DNA, 12 bp, Artificial Sequence
  Oligonucleotide primer for the detection of SNP TSC0048635
ctatattcacta

SEQ ID NO: 353658 - DNA, 12 bp, Artificial Sequence
  Oligonucleotide primer for the detection of SNP TSC0048636
aaattacttatt

SEQ ID NO: 353659 - DNA, 12 bp, Artificial Sequence
  Oligonucleotide primer for the detection of SNP TSC0048636
tgtggttatata

SEQ ID NO: 353660 - DNA, 12 bp, Artificial Sequence
  Oligonucleotide primer for the detection of SNP TSC0048636
tataattatata

SEQ ID NO: 353661 - DNA, 12 bp, Artificial Sequence
  Oligonucleotide primer for the detection of SNP TSC0048636
ggattatttatt

SEQ ID NO: 353662 - DNA, 12 bp, Artificial Sequence
  Oligonucleotide primer for the detection of SNP TSC0005726
taaccattcaac

SEQ ID NO: 353663 - DNA, 12 bp, Artificial Sequence
  Oligonucleotide primer for the detection of SNP TSC0005726
aagatgtggagt

SEQ ID NO: 353664 - DNA, 12 bp, Artificial Sequence
  Oligonucleotide primer for the detection of SNP TSC0005726
aagacgtggagt

SEQ ID NO: 353665 - DNA, 12 bp, Artificial Sequence
  Oligonucleotide primer for the detection of SNP TSC0005726
aaaacgtaaaat

SEQ ID NO: 353666 - DNA, 12 bp, Artificial Sequence
  Oligonucleotide primer for the detection of SNP TSC0005726
tgattatttaat

SEQ ID NO: 353667 - DNA, 12 bp, Artificial Sequence
  Oligonucleotide primer for the detection of SNP TSC0048644
gtttttttaata

SEQ ID NO: 353668 - DNA, 12 bp, Artificial Sequence
  Oligonucleotide primer for the detection of SNP TSC0048645
aataatcaaccc

SEQ ID NO: 353669 - DNA, 12 bp, Artificial Sequence
  Oligonucleotide primer for the detection of SNP TSC0048645
aatgatagatga

SEQ ID NO: 353670 - DNA, 12 bp, Artificial Sequence
  Oligonucleotide primer for the detection of SNP TSC0048647
attgtgtttatt

SEQ ID NO: 353671 - DNA, 12 bp, Artificial Sequence
  Oligonucleotide primer for the detection of SNP TSC0048648
caaacatttata

SEQ ID NO: 353672 - DNA, 12 bp, Artificial Sequence
  Oligonucleotide primer for the detection of SNP TSC0048648
atagaatgtttt

SEQ ID NO: 353673 - DNA, 12 bp, Artificial Sequence
  Oligonucleotide primer for the detection of SNP TSC0048648
tacaaaatactc

SEQ ID NO: 353674 - DNA, 12 bp, Artificial Sequence
  Oligonucleotide primer for the detection of SNP TSC0048648
tagatatttgtg

SEQ ID NO: 353675 - DNA, 12 bp, Artificial Sequence
  Oligonucleotide primer for the detection of SNP TSC0048650
atataataatta

SEQ ID NO: 353676 - DNA, 12 bp, Artificial Sequence
  Oligonucleotide primer for the detection of SNP TSC0048650
gagagtggtatt

SEQ ID NO: 353677 - DNA, 12 bp, Artificial Sequence
  Oligonucleotide primer for the detection of SNP TSC0048650
aaaataacatca

SEQ ID NO: 353678 - DNA, 12 bp, Artificial Sequence
  Oligonucleotide primer for the detection of SNP TSC0048650
agtgtaataatt

SEQ ID NO: 353679 - DNA, 12 bp, Artificial Sequence
  Oligonucleotide primer for the detection of SNP TSC0048651
ataattcaaaaa

SEQ ID NO: 353680 - DNA, 12 bp, Artificial Sequence
  Oligonucleotide primer for the detection of SNP TSC0048651
atcataaaatta

SEQ ID NO: 353681 - DNA, 12 bp, Artificial Sequence
  Oligonucleotide primer for the detection of SNP TSC0048651
gatgatttagag

SEQ ID NO: 353682 - DNA, 12 bp, Artificial Sequence
  Oligonucleotide primer for the detection of SNP TSC0048653
cctaacaaacca

SEQ ID NO: 353683 - DNA, 12 bp, Artificial Sequence
  Oligonucleotide primer for the detection of SNP TSC0048653
ccccctaacaaa

SEQ ID NO: 353684 - DNA, 12 bp, Artificial Sequence
  Oligonucleotide primer for the detection of SNP TSC0048653
ttttggtaggtt

SEQ ID NO: 353685 - DNA, 12 bp, Artificial Sequence
  Oligonucleotide primer for the detection of SNP TSC0048654
aaataaccattt

SEQ ID NO: 353686 - DNA, 12 bp, Artificial Sequence
  Oligonucleotide primer for the detection of SNP TSC0048654
aaataaccgttt

SEQ ID NO: 353687 - DNA, 12 bp, Artificial Sequence
  Oligonucleotide primer for the detection of SNP TSC0048655
gaaggaaggaag

SEQ ID NO: 353688 - DNA, 12 bp, Artificial Sequence
  Oligonucleotide primer for the detection of SNP TSC0048656
ctttttctttct

SEQ ID NO: 353689 - DNA, 12 bp, Artificial Sequence
  Oligonucleotide primer for the detection of SNP TSC0048656
aagaaagaaaga

SEQ ID NO: 353690 - DNA, 12 bp, Artificial Sequence
  Oligonucleotide primer for the detection of SNP TSC0048657
tattataacctt

SEQ ID NO: 353691 - DNA, 12 bp, Artificial Sequence
  Oligonucleotide primer for the detection of SNP TSC0048657
gggttttgttta

SEQ ID NO: 353692 - DNA, 12 bp, Artificial Sequence
  Oligonucleotide primer for the detection of SNP TSC0048658
acattctaaaaa

SEQ ID NO: 353693 - DNA, 12 bp, Artificial Sequence
  Oligonucleotide primer for the detection of SNP TSC0048658
tttttaaatata

SEQ ID NO: 353694 - DNA, 12 bp, Artificial Sequence
  Oligonucleotide primer for the detection of SNP TSC0048658
gtattttaagaa

SEQ ID NO: 353695 - DNA, 12 bp, Artificial Sequence
  Oligonucleotide primer for the detection of SNP TSC0005361
ttcttaaacctc

SEQ ID NO: 353696 - DNA, 12 bp, Artificial Sequence
  Oligonucleotide primer for the detection of SNP TSC0048659
aaacacaaccca

SEQ ID NO: 353697 - DNA, 12 bp, Artificial Sequence
  Oligonucleotide primer for the detection of SNP TSC0048659
agtagggggttt

SEQ ID NO: 353698 - DNA, 12 bp, Artificial Sequence
  Oligonucleotide primer for the detection of SNP TSC0048659
aataaaaaatct

SEQ ID NO: 353699 - DNA, 12 bp, Artificial Sequence
  Oligonucleotide primer for the detection of SNP TSC0048659
gagtatagttta

SEQ ID NO: 353700 - DNA, 12 bp, Artificial Sequence
  Oligonucleotide primer for the detection of SNP TSC0048660
actattccctct

SEQ ID NO: 353701 - DNA, 12 bp, Artificial Sequence
  Oligonucleotide primer for the detection of SNP TSC0048660
agggggatttag

SEQ ID NO: 353702 - DNA, 12 bp, Artificial Sequence
  Oligonucleotide primer for the detection of SNP TSC0048661
accctcccaact

SEQ ID NO: 353703 - DNA, 12 bp, Artificial Sequence
  Oligonucleotide primer for the detection of SNP TSC0048661
tattagagtgaa

SEQ ID NO: 353704 - DNA, 12 bp, Artificial Sequence
  Oligonucleotide primer for the detection of SNP TSC0048662
tattaataattt

SEQ ID NO: 353705 - DNA, 12 bp, Artificial Sequence
  Oligonucleotide primer for the detection of SNP TSC0048662
ttgaatttattg

SEQ ID NO: 353706 - DNA, 12 bp, Artificial Sequence
  Oligonucleotide primer for the detection of SNP TSC0048663
ctataaataaat

SEQ ID NO: 353707 - DNA, 12 bp, Artificial Sequence
  Oligonucleotide primer for the detection of SNP TSC0048663
gtaggagttaag

SEQ ID NO: 353708 - DNA, 12 bp, Artificial Sequence
  Oligonucleotide primer for the detection of SNP TSC0048664
tatatatcctta

SEQ ID NO: 353709 - DNA, 12 bp, Artificial Sequence
  Oligonucleotide primer for the detection of SNP TSC0048664
agaaattttatt

SEQ ID NO: 353710 - DNA, 12 bp, Artificial Sequence
  Oligonucleotide primer for the detection of SNP TSC0048665
atacaaccaact

SEQ ID NO: 353711 - DNA, 12 bp, Artificial Sequence
  Oligonucleotide primer for the detection of SNP TSC0048665
attttgttttag

SEQ ID NO: 353712 - DNA, 12 bp, Artificial Sequence
  Oligonucleotide primer for the detection of SNP TSC0048667
atccatattact

SEQ ID NO: 353713 - DNA, 12 bp, Artificial Sequence
  Oligonucleotide primer for the detection of SNP TSC0048667
gagttgttgtaa

SEQ ID NO: 353714 - DNA, 12 bp, Artificial Sequence
  Oligonucleotide primer for the detection of SNP TSC0048668
tttatgatttat

SEQ ID NO: 353715 - DNA, 12 bp, Artificial Sequence
  Oligonucleotide primer for the detection of SNP TSC0048670
tattaatacaaa

SEQ ID NO: 353716 - DNA, 12 bp, Artificial Sequence
  Oligonucleotide primer for the detection of SNP TSC0048670
ggtggattttag

SEQ ID NO: 353717 - DNA, 12 bp, Artificial Sequence
  Oligonucleotide primer for the detection of SNP TSC0048670
aataaatcctaa

SEQ ID NO: 353718 - DNA, 12 bp, Artificial Sequence
  Oligonucleotide primer for the detection of SNP TSC0048670
gataaatcctaa

SEQ ID NO: 353719 - DNA, 12 bp, Artificial Sequence
  Oligonucleotide primer for the detection of SNP TSC0048670
ttaatgtagatt

SEQ ID NO: 353720 - DNA, 12 bp, Artificial Sequence
  Oligonucleotide primer for the detection of SNP TSC0048671
catcaaaacttc

SEQ ID NO: 353721 - DNA, 12 bp, Artificial Sequence
  Oligonucleotide primer for the detection of SNP TSC0048671
ggagtttattta

SEQ ID NO: 353722 - DNA, 12 bp, Artificial Sequence
  Oligonucleotide primer for the detection of SNP TSC0048672
ctcaaataacct

SEQ ID NO: 353723 - DNA, 12 bp, Artificial Sequence
  Oligonucleotide primer for the detection of SNP TSC0048672
ttttttggtgta

SEQ ID NO: 353724 - DNA, 12 bp, Artificial Sequence
  Oligonucleotide primer for the detection of SNP TSC0048679
ttctattcttta

SEQ ID NO: 353725 - DNA, 12 bp, Artificial Sequence
  Oligonucleotide primer for the detection of SNP TSC0048679
atataaattatc

SEQ ID NO: 353726 - DNA, 12 bp, Artificial Sequence
  Oligonucleotide primer for the detection of SNP TSC0048680
aatttaccatta

SEQ ID NO: 353727 - DNA, 12 bp, Artificial Sequence
  Oligonucleotide primer for the detection of SNP TSC0048680
aggtgtttagtg

SEQ ID NO: 353728 - DNA, 12 bp, Artificial Sequence
  Oligonucleotide primer for the detection of SNP TSC0048680
gaatttattatt

SEQ ID NO: 353729 - DNA, 12 bp, Artificial Sequence
  Oligonucleotide primer for the detection of SNP TSC0048681
gagtgtgaaatt

SEQ ID NO: 353730 - DNA, 12 bp, Artificial Sequence
  Oligonucleotide primer for the detection of SNP TSC0048681
attttgtatgtg

SEQ ID NO: 353731 - DNA, 12 bp, Artificial Sequence
  Oligonucleotide primer for the detection of SNP TSC0048682
taaccattaaaa

SEQ ID NO: 353732 - DNA, 12 bp, Artificial Sequence
  Oligonucleotide primer for the detection of SNP TSC0048682
tggttattagaa

SEQ ID NO: 353733 - DNA, 12 bp, Artificial Sequence
  Oligonucleotide primer for the detection of SNP TSC0048683
aaaatacttttt

SEQ ID NO: 353734 - DNA, 12 bp, Artificial Sequence
  Oligonucleotide primer for the detection of SNP TSC0048683
taagttgataag

SEQ ID NO: 353735 - DNA, 12 bp, Artificial Sequence
  Oligonucleotide primer for the detection of SNP TSC0048685
aatatctcctat

SEQ ID NO: 353736 - DNA, 12 bp, Artificial Sequence
  Oligonucleotide primer for the detection of SNP TSC0048685
ttataatggtat

SEQ ID NO: 353737 - DNA, 12 bp, Artificial Sequence
  Oligonucleotide primer for the detection of SNP TSC0048685
tcataataacac

SEQ ID NO: 353738 - DNA, 12 bp, Artificial Sequence
  Oligonucleotide primer for the detection of SNP TSC0048685
atattttttgtc

SEQ ID NO: 353739 - DNA, 12 bp, Artificial Sequence
  Oligonucleotide primer for the detection of SNP TSC0048686
aaaattttctct

SEQ ID NO: 353740 - DNA, 12 bp, Artificial Sequence
  Oligonucleotide primer for the detection of SNP TSC0048686
aaggtgagtaga

SEQ ID NO: 353741 - DNA, 12 bp, Artificial Sequence
  Oligonucleotide primer for the detection of SNP TSC0004574
taaaaacatttc

SEQ ID NO: 353742 - DNA, 12 bp, Artificial Sequence
  Oligonucleotide primer for the detection of SNP TSC0004574
taaaaacgtttc

SEQ ID NO: 353743 - DNA, 12 bp, Artificial Sequence
  Oligonucleotide primer for the detection of SNP TSC0004574
ggttgttggtga

SEQ ID NO: 353744 - DNA, 12 bp, Artificial Sequence
  Oligonucleotide primer for the detection of SNP TSC0048687
tccatcattttc

SEQ ID NO: 353745 - DNA, 12 bp, Artificial Sequence
  Oligonucleotide primer for the detection of SNP TSC0048688
taatattattaa

SEQ ID NO: 353746 - DNA, 12 bp, Artificial Sequence
  Oligonucleotide primer for the detection of SNP TSC0048689
aataacaaaaat

SEQ ID NO: 353747 - DNA, 12 bp, Artificial Sequence
  Oligonucleotide primer for the detection of SNP TSC0048689
atgagataagga

SEQ ID NO: 353748 - DNA, 12 bp, Artificial Sequence
  Oligonucleotide primer for the detection of SNP TSC0048690
ttcattattaat

SEQ ID NO: 353749 - DNA, 12 bp, Artificial Sequence
  Oligonucleotide primer for the detection of SNP TSC0048691
cctattaaaact

SEQ ID NO: 353750 - DNA, 12 bp, Artificial Sequence
  Oligonucleotide primer for the detection of SNP TSC0048692
taaaatctttaa

SEQ ID NO: 353751 - DNA, 12 bp, Artificial Sequence
  Oligonucleotide primer for the detection of SNP TSC0048692
tatatagaaagt

SEQ ID NO: 353752 - DNA, 12 bp, Artificial Sequence
  Oligonucleotide primer for the detection of SNP TSC0048692
tggagtttttag

SEQ ID NO: 353753 - DNA, 12 bp, Artificial Sequence
  Oligonucleotide primer for the detection of SNP TSC0048693
cactacaaaaat

SEQ ID NO: 353754 - DNA, 12 bp, Artificial Sequence
  Oligonucleotide primer for the detection of SNP TSC0048693
gtttggtttaag

SEQ ID NO: 353755 - DNA, 12 bp, Artificial Sequence
  Oligonucleotide primer for the detection of SNP TSC0048697
ctccacctatca

SEQ ID NO: 353756 - DNA, 12 bp, Artificial Sequence
  Oligonucleotide primer for the detection of SNP TSC0048697
taccatcattat

SEQ ID NO: 353757 - DNA, 12 bp, Artificial Sequence
  Oligonucleotide primer for the detection of SNP TSC0048698
catttaacctct

SEQ ID NO: 353758 - DNA, 12 bp, Artificial Sequence
  Oligonucleotide primer for the detection of SNP TSC0048698
cgtttaacctct

SEQ ID NO: 353759 - DNA, 12 bp, Artificial Sequence
  Oligonucleotide primer for the detection of SNP TSC0048698
ttttatatgttg

SEQ ID NO: 353760 - DNA, 12 bp, Artificial Sequence
  Oligonucleotide primer for the detection of SNP TSC0048699
tttgtaaaatat

SEQ ID NO: 353761 - DNA, 12 bp, Artificial Sequence
  Oligonucleotide primer for the detection of SNP TSC0048699
ttataaaacaca

SEQ ID NO: 353762 - DNA, 12 bp, Artificial Sequence
  Oligonucleotide primer for the detection of SNP TSC0048699
aagttagaagat

SEQ ID NO: 353763 - DNA, 12 bp, Artificial Sequence
  Oligonucleotide primer for the detection of SNP TSC0005313
tacaaaataacc

SEQ ID NO: 353764 - DNA, 12 bp, Artificial Sequence
  Oligonucleotide primer for the detection of SNP TSC0048702
atttttacgttt

SEQ ID NO: 353765 - DNA, 12 bp, Artificial Sequence
  Oligonucleotide primer for the detection of SNP TSC0048702
actcccacattc

SEQ ID NO: 353766 - DNA, 12 bp, Artificial Sequence
  Oligonucleotide primer for the detection of SNP TSC0048702
actcccacgttc

SEQ ID NO: 353767 - DNA, 12 bp, Artificial Sequence
  Oligonucleotide primer for the detection of SNP TSC0048702
tattgaggggtg

SEQ ID NO: 353768 - DNA, 12 bp, Artificial Sequence
  Oligonucleotide primer for the detection of SNP TSC0048707
catttacaatcc

SEQ ID NO: 353769 - DNA, 12 bp, Artificial Sequence
  Oligonucleotide primer for the detection of SNP TSC0048707
gtgtagatgttg

SEQ ID NO: 353770 - DNA, 12 bp, Artificial Sequence
  Oligonucleotide primer for the detection of SNP TSC0048707
atacaaatatta

SEQ ID NO: 353771 - DNA, 12 bp, Artificial Sequence
  Oligonucleotide primer for the detection of SNP TSC0048708
aacaaacctttt

SEQ ID NO: 353772 - DNA, 12 bp, Artificial Sequence
  Oligonucleotide primer for the detection of SNP TSC0048708
aatagatttttt

SEQ ID NO: 353773 - DNA, 12 bp, Artificial Sequence
  Oligonucleotide primer for the detection of SNP TSC0048709
tatctacctact

SEQ ID NO: 353774 - DNA, 12 bp, Artificial Sequence
  Oligonucleotide primer for the detection of SNP TSC0048709
tgttgagtttga

SEQ ID NO: 353775 - DNA, 12 bp, Artificial Sequence
  Oligonucleotide primer for the detection of SNP TSC0048709
cgttgagtttga

SEQ ID NO: 353776 - DNA, 12 bp, Artificial Sequence
  Oligonucleotide primer for the detection of SNP TSC0005346
tgagtattttgt

SEQ ID NO: 353777 - DNA, 12 bp, Artificial Sequence
  Oligonucleotide primer for the detection of SNP TSC0005346
taaacattctat

SEQ ID NO: 353778 - DNA, 12 bp, Artificial Sequence
  Oligonucleotide primer for the detection of SNP TSC0048711
tatctatctatc

SEQ ID NO: 353779 - DNA, 12 bp, Artificial Sequence
  Oligonucleotide primer for the detection of SNP TSC0048711
tagatggatgga

SEQ ID NO: 353780 - DNA, 12 bp, Artificial Sequence
  Oligonucleotide primer for the detection of SNP TSC0048712
aaaacttaacct

SEQ ID NO: 353781 - DNA, 12 bp, Artificial Sequence
  Oligonucleotide primer for the detection of SNP TSC0048712
tataatggttag

SEQ ID NO: 353782 - DNA, 12 bp, Artificial Sequence
  Oligonucleotide primer for the detection of SNP TSC0048715
atactaatttct

SEQ ID NO: 353783 - DNA, 12 bp, Artificial Sequence
  Oligonucleotide primer for the detection of SNP TSC0048715
agataagtagta

SEQ ID NO: 353784 - DNA, 12 bp, Artificial Sequence
  Oligonucleotide primer for the detection of SNP TSC0048716
acacaatctaaa

SEQ ID NO: 353785 - DNA, 12 bp, Artificial Sequence
  Oligonucleotide primer for the detection of SNP TSC0048716
aatataattttt

SEQ ID NO: 353786 - DNA, 12 bp, Artificial Sequence
  Oligonucleotide primer for the detection of SNP TSC0048716
aacataattccc

SEQ ID NO: 353787 - DNA, 12 bp, Artificial Sequence
  Oligonucleotide primer for the detection of SNP TSC0048716
ggatatagtttg

SEQ ID NO: 353788 - DNA, 12 bp, Artificial Sequence
  Oligonucleotide primer for the detection of SNP TSC0048717
aaaataatcatc

SEQ ID NO: 353789 - DNA, 12 bp, Artificial Sequence
  Oligonucleotide primer for the detection of SNP TSC0048717
tgtgtatagtta

SEQ ID NO: 353790 - DNA, 12 bp, Artificial Sequence
  Oligonucleotide primer for the detection of SNP TSC0048718
tctaaaaataat

SEQ ID NO: 353791 - DNA, 12 bp, Artificial Sequence
  Oligonucleotide primer for the detection of SNP TSC0048719
gtttaagtaggt

SEQ ID NO: 353792 - DNA, 12 bp, Artificial Sequence
  Oligonucleotide primer for the detection of SNP TSC0048719
aactcaaacaaa

SEQ ID NO: 353793 - DNA, 12 bp, Artificial Sequence
  Oligonucleotide primer for the detection of SNP TSC0048719
tattatggttgt

SEQ ID NO: 353794 - DNA, 12 bp, Artificial Sequence
  Oligonucleotide primer for the detection of SNP TSC0005238
ataaattacaat

SEQ ID NO: 353795 - DNA, 12 bp, Artificial Sequence
  Oligonucleotide primer for the detection of SNP TSC0005238
ataaattacgat

SEQ ID NO: 353796 - DNA, 12 bp, Artificial Sequence
  Oligonucleotide primer for the detection of SNP TSC0005238
gaatttattatg

SEQ ID NO: 353797 - DNA, 12 bp, Artificial Sequence
  Oligonucleotide primer for the detection of SNP TSC0005238
aaatttaccata

SEQ ID NO: 353798 - DNA, 12 bp, Artificial Sequence
  Oligonucleotide primer for the detection of SNP TSC0005238
gtgaattatgat

SEQ ID NO: 353799 - DNA, 12 bp, Artificial Sequence
  Oligonucleotide primer for the detection of SNP TSC0005238
gtgaattacgat

SEQ ID NO: 353800 - DNA, 12 bp, Artificial Sequence
  Oligonucleotide primer for the detection of SNP TSC0048720
cttcccaatctt

SEQ ID NO: 353801 - DNA, 12 bp, Artificial Sequence
  Oligonucleotide primer for the detection of SNP TSC0048720
ggatgaggaatt

SEQ ID NO: 353802 - DNA, 12 bp, Artificial Sequence
  Oligonucleotide primer for the detection of SNP TSC0048721
ttcatattaact

SEQ ID NO: 353803 - DNA, 12 bp, Artificial Sequence
  Oligonucleotide primer for the detection of SNP TSC0048721
tgtttaatagta

SEQ ID NO: 353804 - DNA, 12 bp, Artificial Sequence
  Oligonucleotide primer for the detection of SNP TSC0048721
tatccaacaaca

SEQ ID NO: 353805 - DNA, 12 bp, Artificial Sequence
  Oligonucleotide primer for the detection of SNP TSC0048726
caaaactatctc

SEQ ID NO: 353806 - DNA, 12 bp, Artificial Sequence
  Oligonucleotide primer for the detection of SNP TSC0048737
ctttacaaaata

SEQ ID NO: 353807 - DNA, 12 bp, Artificial Sequence
  Oligonucleotide primer for the detection of SNP TSC0048737
taggttgggggt

SEQ ID NO: 353808 - DNA, 12 bp, Artificial Sequence
  Oligonucleotide primer for the detection of SNP TSC0048737
taggtcgggggt

SEQ ID NO: 353809 - DNA, 12 bp, Artificial Sequence
  Oligonucleotide primer for the detection of SNP TSC0048737
caaatcgaaaac

SEQ ID NO: 353810 - DNA, 12 bp, Artificial Sequence
  Oligonucleotide primer for the detection of SNP TSC0048737
ttttgtagggta

SEQ ID NO: 353811 - DNA, 12 bp, Artificial Sequence
  Oligonucleotide primer for the detection of SNP TSC0048738
aactaacttctc

SEQ ID NO: 353812 - DNA, 12 bp, Artificial Sequence
  Oligonucleotide primer for the detection of SNP TSC0048739
accccataaatc

SEQ ID NO: 353813 - DNA, 12 bp, Artificial Sequence
  Oligonucleotide primer for the detection of SNP TSC0048740
atacccaaaatt

SEQ ID NO: 353814 - DNA, 12 bp, Artificial Sequence
  Oligonucleotide primer for the detection of SNP TSC0048742
ccccacattttc

SEQ ID NO: 353815 - DNA, 12 bp, Artificial Sequence
  Oligonucleotide primer for the detection of SNP TSC0048742
ccccacgttttc

SEQ ID NO: 353816 - DNA, 12 bp, Artificial Sequence
  Oligonucleotide primer for the detection of SNP TSC0048742
agttagttaatg

SEQ ID NO: 353817 - DNA, 12 bp, Artificial Sequence
  Oligonucleotide primer for the detection of SNP TSC0048742
aaccaactaata

SEQ ID NO: 353818 - DNA, 12 bp, Artificial Sequence
  Oligonucleotide primer for the detection of SNP TSC0048742
ttttacgttttt

SEQ ID NO: 353819 - DNA, 12 bp, Artificial Sequence
  Oligonucleotide primer for the detection of SNP TSC0048743
gttttataaata

SEQ ID NO: 353820 - DNA, 12 bp, Artificial Sequence
  Oligonucleotide primer for the detection of SNP TSC0009035
aaatttaccccc

SEQ ID NO: 353821 - DNA, 12 bp, Artificial Sequence
  Oligonucleotide primer for the detection of SNP TSC0009035
tggttatgagta

SEQ ID NO: 353822 - DNA, 12 bp, Artificial Sequence
  Oligonucleotide primer for the detection of SNP TSC0048744
atataataacat

SEQ ID NO: 353823 - DNA, 12 bp, Artificial Sequence
  Oligonucleotide primer for the detection of SNP TSC0048745
tccaaaacaaac

SEQ ID NO: 353824 - DNA, 12 bp, Artificial Sequence
  Oligonucleotide primer for the detection of SNP TSC0048746
acatactacact

SEQ ID NO: 353825 - DNA, 12 bp, Artificial Sequence
  Oligonucleotide primer for the detection of SNP TSC0048746
tataaatttgtt

SEQ ID NO: 353826 - DNA, 12 bp, Artificial Sequence
  Oligonucleotide primer for the detection of SNP TSC0048746
ttataaacttac

SEQ ID NO: 353827 - DNA, 12 bp, Artificial Sequence
  Oligonucleotide primer for the detection of SNP TSC0048746
atatgttatatt

SEQ ID NO: 353828 - DNA, 12 bp, Artificial Sequence
  Oligonucleotide primer for the detection of SNP TSC0048747
acaaacaacaat

SEQ ID NO: 353829 - DNA, 12 bp, Artificial Sequence
  Oligonucleotide primer for the detection of SNP TSC0048748
taccttacaaat

SEQ ID NO: 353830 - DNA, 12 bp, Artificial Sequence
  Oligonucleotide primer for the detection of SNP TSC0048749
tttggatttttg

SEQ ID NO: 353831 - DNA, 12 bp, Artificial Sequence
  Oligonucleotide primer for the detection of SNP TSC0048752
tttccacataat

SEQ ID NO: 353832 - DNA, 12 bp, Artificial Sequence
  Oligonucleotide primer for the detection of SNP TSC0048752
aaaataatatga

SEQ ID NO: 353833 - DNA, 12 bp, Artificial Sequence
  Oligonucleotide primer for the detection of SNP TSC0048753
catttatatttt

SEQ ID NO: 353834 - DNA, 12 bp, Artificial Sequence
  Oligonucleotide primer for the detection of SNP TSC0048753
agtgttttattg

SEQ ID NO: 353835 - DNA, 12 bp, Artificial Sequence
  Oligonucleotide primer for the detection of SNP TSC0048754
cccaaatcccac

SEQ ID NO: 353836 - DNA, 12 bp, Artificial Sequence
  Oligonucleotide primer for the detection of SNP TSC0048757
catacttcttca

SEQ ID NO: 353837 - DNA, 12 bp, Artificial Sequence
  Oligonucleotide primer for the detection of SNP TSC0048757
aggttatttgta

SEQ ID NO: 353838 - DNA, 12 bp, Artificial Sequence
  Oligonucleotide primer for the detection of SNP TSC0048757
aaaccacttata

SEQ ID NO: 353839 - DNA, 12 bp, Artificial Sequence
  Oligonucleotide primer for the detection of SNP TSC0048758
caaactcctcta

SEQ ID NO: 353840 - DNA, 12 bp, Artificial Sequence
  Oligonucleotide primer for the detection of SNP TSC0048758
aggtagagtata

SEQ ID NO: 353841 - DNA, 12 bp, Artificial Sequence
  Oligonucleotide primer for the detection of SNP TSC0048758
taggttttttta

SEQ ID NO: 353842 - DNA, 12 bp, Artificial Sequence
  Oligonucleotide primer for the detection of SNP TSC0048759
atctaaaccaca

SEQ ID NO: 353843 - DNA, 12 bp, Artificial Sequence
  Oligonucleotide primer for the detection of SNP TSC0048759
ttgttaaaatga

SEQ ID NO: 353844 - DNA, 12 bp, Artificial Sequence
  Oligonucleotide primer for the detection of SNP TSC0048760
tgagagaaaaaa

SEQ ID NO: 353845 - DNA, 12 bp, Artificial Sequence
  Oligonucleotide primer for the detection of SNP TSC0048761
aacttataactt

SEQ ID NO: 353846 - DNA, 12 bp, Artificial Sequence
  Oligonucleotide primer for the detection of SNP TSC0048761
ataaagaaagaa

SEQ ID NO: 353847 - DNA, 12 bp, Artificial Sequence
  Oligonucleotide primer for the detection of SNP TSC0048762
taatataaaatt

SEQ ID NO: 353848 - DNA, 12 bp, Artificial Sequence
  Oligonucleotide primer for the detection of SNP TSC0048762
gagtgttaatta

SEQ ID NO: 353849 - DNA, 12 bp, Artificial Sequence
  Oligonucleotide primer for the detection of SNP TSC0007803
acaattcttatt

SEQ ID NO: 353850 - DNA, 12 bp, Artificial Sequence
  Oligonucleotide primer for the detection of SNP TSC0007803
ttaattatgtta

SEQ ID NO: 353851 - DNA, 12 bp, Artificial Sequence
  Oligonucleotide primer for the detection of SNP TSC0048766
tacaaaaatccc

SEQ ID NO: 353852 - DNA, 12 bp, Artificial Sequence
  Oligonucleotide primer for the detection of SNP TSC0048766
cttttctaaaat

SEQ ID NO: 353853 - DNA, 12 bp, Artificial Sequence
  Oligonucleotide primer for the detection of SNP TSC0048768
aatagaattgtt

SEQ ID NO: 353854 - DNA, 12 bp, Artificial Sequence
  Oligonucleotide primer for the detection of SNP TSC0048768
aatagaatcgtt

SEQ ID NO: 353855 - DNA, 12 bp, Artificial Sequence
  Oligonucleotide primer for the detection of SNP TSC0048768
agagagatttaa

SEQ ID NO: 353856 - DNA, 12 bp, Artificial Sequence
  Oligonucleotide primer for the detection of SNP TSC0048769
atacctccaact

SEQ ID NO: 353857 - DNA, 12 bp, Artificial Sequence
  Oligonucleotide primer for the detection of SNP TSC0048769
aggtagaagttt

SEQ ID NO: 353858 - DNA, 12 bp, Artificial Sequence
  Oligonucleotide primer for the detection of SNP TSC0048770
ctaaatacctcc

SEQ ID NO: 353859 - DNA, 12 bp, Artificial Sequence
  Oligonucleotide primer for the detection of SNP TSC0048770
tttttttcgtta

SEQ ID NO: 353860 - DNA, 12 bp, Artificial Sequence
  Oligonucleotide primer for the detection of SNP TSC0048771
acattataccta

SEQ ID NO: 353861 - DNA, 12 bp, Artificial Sequence
  Oligonucleotide primer for the detection of SNP TSC0048772
caatataatata

SEQ ID NO: 353862 - DNA, 12 bp, Artificial Sequence
  Oligonucleotide primer for the detection of SNP TSC0048772
aatgtaaatatt

SEQ ID NO: 353863 - DNA, 12 bp, Artificial Sequence
  Oligonucleotide primer for the detection of SNP TSC0048772
aatacaaatatt

SEQ ID NO: 353864 - DNA, 12 bp, Artificial Sequence
  Oligonucleotide primer for the detection of SNP TSC0048772
tagtatgatata

SEQ ID NO: 353865 - DNA, 12 bp, Artificial Sequence
  Oligonucleotide primer for the detection of SNP TSC0048773
tactccatcact

SEQ ID NO: 353866 - DNA, 12 bp, Artificial Sequence
  Oligonucleotide primer for the detection of SNP TSC0048773
aaaatgtattta

SEQ ID NO: 353867 - DNA, 12 bp, Artificial Sequence
  Oligonucleotide primer for the detection of SNP TSC0048774
ctaaaacctctt

SEQ ID NO: 353868 - DNA, 12 bp, Artificial Sequence
  Oligonucleotide primer for the detection of SNP TSC0048774
atggaaggttta

SEQ ID NO: 353869 - DNA, 12 bp, Artificial Sequence
  Oligonucleotide primer for the detection of SNP TSC0048774
ttaggatttttt

SEQ ID NO: 353870 - DNA, 12 bp, Artificial Sequence
  Oligonucleotide primer for the detection of SNP TSC0048775
acaataaaacac

SEQ ID NO: 353871 - DNA, 12 bp, Artificial Sequence
  Oligonucleotide primer for the detection of SNP TSC0048777
tgtagatatttt

SEQ ID NO: 353872 - DNA, 12 bp, Artificial Sequence
  Oligonucleotide primer for the detection of SNP TSC0048777
tacaaacatttt

SEQ ID NO: 353873 - DNA, 12 bp, Artificial Sequence
  Oligonucleotide primer for the detection of SNP TSC0048777
ttattaaggtat

SEQ ID NO: 353874 - DNA, 12 bp, Artificial Sequence
  Oligonucleotide primer for the detection of SNP TSC0048778
tggttttaagta

SEQ ID NO: 353875 - DNA, 12 bp, Artificial Sequence
  Oligonucleotide primer for the detection of SNP TSC0048780
cacaattaataa

SEQ ID NO: 353876 - DNA, 12 bp, Artificial Sequence
  Oligonucleotide primer for the detection of SNP TSC0048780
aagtatatattg

SEQ ID NO: 353877 - DNA, 12 bp, Artificial Sequence
  Oligonucleotide primer for the detection of SNP TSC0048780
aacatacattaa

SEQ ID NO: 353878 - DNA, 12 bp, Artificial Sequence
  Oligonucleotide primer for the detection of SNP TSC0048780
agttggtgattt

SEQ ID NO: 353879 - DNA, 12 bp, Artificial Sequence
  Oligonucleotide primer for the detection of SNP TSC0048781
ccaatcaaaaaa

SEQ ID NO: 353880 - DNA, 12 bp, Artificial Sequence
  Oligonucleotide primer for the detection of SNP TSC0048781
taagttttattt

SEQ ID NO: 353881 - DNA, 12 bp, Artificial Sequence
  Oligonucleotide primer for the detection of SNP TSC0048781
ccaaactccacc

SEQ ID NO: 353882 - DNA, 12 bp, Artificial Sequence
  Oligonucleotide primer for the detection of SNP TSC0048781
ttagttaaaagg

SEQ ID NO: 353883 - DNA, 12 bp, Artificial Sequence
  Oligonucleotide primer for the detection of SNP TSC0048782
tccccacaaaac

SEQ ID NO: 353884 - DNA, 12 bp, Artificial Sequence
  Oligonucleotide primer for the detection of SNP TSC0048782
tatttcatatta

SEQ ID NO: 353885 - DNA, 12 bp, Artificial Sequence
  Oligonucleotide primer for the detection of SNP TSC0048784
atttgtgatgta

SEQ ID NO: 353886 - DNA, 12 bp, Artificial Sequence
  Oligonucleotide primer for the detection of SNP TSC0048785
aaatcttcaact

SEQ ID NO: 353887 - DNA, 12 bp, Artificial Sequence
  Oligonucleotide primer for the detection of SNP TSC0048785
aaaggattttgg

SEQ ID NO: 353888 - DNA, 12 bp, Artificial Sequence
  Oligonucleotide primer for the detection of SNP TSC0048787
aaactccatatt

SEQ ID NO: 353889 - DNA, 12 bp, Artificial Sequence
  Oligonucleotide primer for the detection of SNP TSC0048789
tctatttataaa

SEQ ID NO: 353890 - DNA, 12 bp, Artificial Sequence
  Oligonucleotide primer for the detection of SNP TSC0048789
tagttttgatat

SEQ ID NO: 353891 - DNA, 12 bp, Artificial Sequence
  Oligonucleotide primer for the detection of SNP TSC0048789
taaccctaatac

SEQ ID NO: 353892 - DNA, 12 bp, Artificial Sequence
  Oligonucleotide primer for the detection of SNP TSC0048789
tttgtttgtaaa

SEQ ID NO: 353893 - DNA, 12 bp, Artificial Sequence
  Oligonucleotide primer for the detection of SNP TSC0048790
ccctcttcaact

SEQ ID NO: 353894 - DNA, 12 bp, Artificial Sequence
  Oligonucleotide primer for the detection of SNP TSC0048790
ccctcttcgact

SEQ ID NO: 353895 - DNA, 12 bp, Artificial Sequence
  Oligonucleotide primer for the detection of SNP TSC0048790
ttataatcatca

SEQ ID NO: 353896 - DNA, 12 bp, Artificial Sequence
  Oligonucleotide primer for the detection of SNP TSC0048790
tttttttcgatt

SEQ ID NO: 353897 - DNA, 12 bp, Artificial Sequence
  Oligonucleotide primer for the detection of SNP TSC0010206
ttaaatatttaa

SEQ ID NO: 353898 - DNA, 12 bp, Artificial Sequence
  Oligonucleotide primer for the detection of SNP TSC0010207
aacaatttacac

SEQ ID NO: 353899 - DNA, 12 bp, Artificial Sequence
  Oligonucleotide primer for the detection of SNP TSC0010207
aacaatttacgc

SEQ ID NO: 353900 - DNA, 12 bp, Artificial Sequence
  Oligonucleotide primer for the detection of SNP TSC0005903
attttaaaacat

SEQ ID NO: 353901 - DNA, 12 bp, Artificial Sequence
  Oligonucleotide primer for the detection of SNP TSC0005903
taattggagtag

SEQ ID NO: 353902 - DNA, 12 bp, Artificial Sequence
  Oligonucleotide primer for the detection of SNP TSC0007058
ccacaacacata

SEQ ID NO: 353903 - DNA, 12 bp, Artificial Sequence
  Oligonucleotide primer for the detection of SNP TSC0007058
tataaatgaatt

SEQ ID NO: 353904 - DNA, 12 bp, Artificial Sequence
  Oligonucleotide primer for the detection of SNP TSC0007058
tataaataaatc

SEQ ID NO: 353905 - DNA, 12 bp, Artificial Sequence
  Oligonucleotide primer for the detection of SNP TSC0007058
ttatagtatata

SEQ ID NO: 353906 - DNA, 12 bp, Artificial Sequence
  Oligonucleotide primer for the detection of SNP TSC0007059
aatttttattat

SEQ ID NO: 353907 - DNA, 12 bp, Artificial Sequence
  Oligonucleotide primer for the detection of SNP TSC0007059
aacctttatcat

SEQ ID NO: 353908 - DNA, 12 bp, Artificial Sequence
  Oligonucleotide primer for the detection of SNP TSC0007059
taaaattggaat

SEQ ID NO: 353909 - DNA, 12 bp, Artificial Sequence
  Oligonucleotide primer for the detection of SNP TSC0048791
ctaacccttttt

SEQ ID NO: 353910 - DNA, 12 bp, Artificial Sequence
  Oligonucleotide primer for the detection of SNP TSC0048791
attagatggaga

SEQ ID NO: 353911 - DNA, 12 bp, Artificial Sequence
  Oligonucleotide primer for the detection of SNP TSC0048792
tactatatacat

SEQ ID NO: 353912 - DNA, 12 bp, Artificial Sequence
  Oligonucleotide primer for the detection of SNP TSC0048793
aatataaacata

SEQ ID NO: 353913 - DNA, 12 bp, Artificial Sequence
  Oligonucleotide primer for the detection of SNP TSC0048793
accacaaaccta

SEQ ID NO: 353914 - DNA, 12 bp, Artificial Sequence
  Oligonucleotide primer for the detection of SNP TSC0048793
gatatgaatata

SEQ ID NO: 353915 - DNA, 12 bp, Artificial Sequence
  Oligonucleotide primer for the detection of SNP TSC0048795
tacaatatattc

SEQ ID NO: 353916 - DNA, 12 bp, Artificial Sequence
  Oligonucleotide primer for the detection of SNP TSC0048796
tcatctacatat

SEQ ID NO: 353917 - DNA, 12 bp, Artificial Sequence
  Oligonucleotide primer for the detection of SNP TSC0048797
ttcactataatc

SEQ ID NO: 353918 - DNA, 12 bp, Artificial Sequence
  Oligonucleotide primer for the detection of SNP TSC0048797
tgtatttttgta

SEQ ID NO: 353919 - DNA, 12 bp, Artificial Sequence
  Oligonucleotide primer for the detection of SNP TSC0048798
atatagtgacga

SEQ ID NO: 353920 - DNA, 12 bp, Artificial Sequence
  Oligonucleotide primer for the detection of SNP TSC0048799
aactttttaaaa

SEQ ID NO: 353921 - DNA, 12 bp, Artificial Sequence
  Oligonucleotide primer for the detection of SNP TSC0048799
tttttgtttgat

SEQ ID NO: 353922 - DNA, 12 bp, Artificial Sequence
  Oligonucleotide primer for the detection of SNP TSC0048800
tcatttattaaa

SEQ ID NO: 353923 - DNA, 12 bp, Artificial Sequence
  Oligonucleotide primer for the detection of SNP TSC0048800
tcgtttattaaa

SEQ ID NO: 353924 - DNA, 12 bp, Artificial Sequence
  Oligonucleotide primer for the detection of SNP TSC0048800
cctcccctactc

SEQ ID NO: 353925 - DNA, 12 bp, Artificial Sequence
  Oligonucleotide primer for the detection of SNP TSC0048800
ttgtttgttggg

SEQ ID NO: 353926 - DNA, 12 bp, Artificial Sequence
  Oligonucleotide primer for the detection of SNP TSC0048800
tcgtttgttggg

SEQ ID NO: 353927 - DNA, 12 bp, Artificial Sequence
  Oligonucleotide primer for the detection of SNP TSC0048801
agttatttgaga

SEQ ID NO: 353928 - DNA, 12 bp, Artificial Sequence
  Oligonucleotide primer for the detection of SNP TSC0048803
aattgtattgtt

SEQ ID NO: 353929 - DNA, 12 bp, Artificial Sequence
  Oligonucleotide primer for the detection of SNP TSC0048803
aattacattatt

SEQ ID NO: 353930 - DNA, 12 bp, Artificial Sequence
  Oligonucleotide primer for the detection of SNP TSC0048803
gtagaaaaaaaa

SEQ ID NO: 353931 - DNA, 12 bp, Artificial Sequence
  Oligonucleotide primer for the detection of SNP TSC0048804
aaactaacacta

SEQ ID NO: 353932 - DNA, 12 bp, Artificial Sequence
  Oligonucleotide primer for the detection of SNP TSC0048804
attgtgtggaat

SEQ ID NO: 353933 - DNA, 12 bp, Artificial Sequence
  Oligonucleotide primer for the detection of SNP TSC0048804
atcgtgtggaat

SEQ ID NO: 353934 - DNA, 12 bp, Artificial Sequence
  Oligonucleotide primer for the detection of SNP TSC0048804
attgtgtggaac

SEQ ID NO: 353935 - DNA, 12 bp, Artificial Sequence
  Oligonucleotide primer for the detection of SNP TSC0048804
atcgtgtggaac

SEQ ID NO: 353936 - DNA, 12 bp, Artificial Sequence
  Oligonucleotide primer for the detection of SNP TSC0048804
accgtataaaac

SEQ ID NO: 353937 - DNA, 12 bp, Artificial Sequence
  Oligonucleotide primer for the detection of SNP TSC0048805
tctttactcacc

SEQ ID NO: 353938 - DNA, 12 bp, Artificial Sequence
  Oligonucleotide primer for the detection of SNP TSC0048805
attgaagaatga

SEQ ID NO: 353939 - DNA, 12 bp, Artificial Sequence
  Oligonucleotide primer for the detection of SNP TSC0048806
aattttcctccc

SEQ ID NO: 353940 - DNA, 12 bp, Artificial Sequence
  Oligonukleotid-Primer
atatataacctc

SEQ ID NO: 353941 - DNA, 12 bp, Artificial Sequence
  Oligonucleotide primer for the detection of SNP TSC0048810
tccgaaaaatat

SEQ ID NO: 353942 - DNA, 12 bp, Artificial Sequence
  Oligonucleotide primer for the detection of SNP TSC0048810
acgttttagttt

SEQ ID NO: 353943 - DNA, 12 bp, Artificial Sequence
  Oligonucleotide primer for the detection of SNP TSC0048810
acattccaatct

SEQ ID NO: 353944 - DNA, 12 bp, Artificial Sequence
  Oligonucleotide primer for the detection of SNP TSC0048810
acgttccaatct

SEQ ID NO: 353945 - DNA, 12 bp, Artificial Sequence
  Oligonucleotide primer for the detection of SNP TSC0048810
tttgaaggatgt

SEQ ID NO: 353946 - DNA, 12 bp, Artificial Sequence
  Oligonucleotide primer for the detection of SNP TSC0048810
ttcgaaggatgt

SEQ ID NO: 353947 - DNA, 12 bp, Artificial Sequence
  Oligonucleotide primer for the detection of SNP TSC0048811
atcttcctaatc

SEQ ID NO: 353948 - DNA, 12 bp, Artificial Sequence
  Oligonucleotide primer for the detection of SNP TSC0048811
atcaattttcaa

SEQ ID NO: 353949 - DNA, 12 bp, Artificial Sequence
  Oligonucleotide primer for the detection of SNP TSC0048811
gtttttttgatc

SEQ ID NO: 353950 - DNA, 12 bp, Artificial Sequence
  Oligonucleotide primer for the detection of SNP TSC0048812
aaatttaaatct

SEQ ID NO: 353951 - DNA, 12 bp, Artificial Sequence
  Oligonucleotide primer for the detection of SNP TSC0048812
ttagggattagg

SEQ ID NO: 353952 - DNA, 12 bp, Artificial Sequence
  Oligonucleotide primer for the detection of SNP TSC0048813
cacttcctttcc

SEQ ID NO: 353953 - DNA, 12 bp, Artificial Sequence
  Oligonucleotide primer for the detection of SNP TSC0048813
gggggtagtttg

SEQ ID NO: 353954 - DNA, 12 bp, Artificial Sequence
  Oligonucleotide primer for the detection of SNP TSC0004656
tctaaaaactat

SEQ ID NO: 353955 - DNA, 12 bp, Artificial Sequence
  Oligonucleotide primer for the detection of SNP TSC0004656
taaaagagattt

SEQ ID NO: 353956 - DNA, 12 bp, Artificial Sequence
  Oligonucleotide primer for the detection of SNP TSC0004656
tttgggagttat

SEQ ID NO: 353957 - DNA, 12 bp, Artificial Sequence
  Oligonucleotide primer for the detection of SNP TSC0048816
ataaatatcatt

SEQ ID NO: 353958 - DNA, 12 bp, Artificial Sequence
  Oligonucleotide primer for the detection of SNP TSC0048816
agtggttgtata

SEQ ID NO: 353959 - DNA, 12 bp, Artificial Sequence
  Oligonucleotide primer for the detection of SNP TSC0048816
aataactatata

SEQ ID NO: 353960 - DNA, 12 bp, Artificial Sequence
  Oligonucleotide primer for the detection of SNP TSC0048817
ctcaaaaacgtc

SEQ ID NO: 353961 - DNA, 12 bp, Artificial Sequence
  Oligonucleotide primer for the detection of SNP TSC0048817
ctcgaaaacatc

SEQ ID NO: 353962 - DNA, 12 bp, Artificial Sequence
  Oligonucleotide primer for the detection of SNP TSC0048817
ctcgaaaacgtc

SEQ ID NO: 353963 - DNA, 12 bp, Artificial Sequence
  Oligonucleotide primer for the detection of SNP TSC0048817
tcttttatttta

SEQ ID NO: 353964 - DNA, 12 bp, Artificial Sequence
  Oligonucleotide primer for the detection of SNP TSC0048817
ttggaaatgttt

SEQ ID NO: 353965 - DNA, 12 bp, Artificial Sequence
  Oligonucleotide primer for the detection of SNP TSC0048817
tcggaaatgttt

SEQ ID NO: 353966 - DNA, 12 bp, Artificial Sequence
  Oligonucleotide primer for the detection of SNP TSC0048817
ttggaaacgttt

SEQ ID NO: 353967 - DNA, 12 bp, Artificial Sequence
  Oligonucleotide primer for the detection of SNP TSC0048817
tcggaaacgttt

SEQ ID NO: 353968 - DNA, 12 bp, Artificial Sequence
  Oligonucleotide primer for the detection of SNP TSC0048818
gataagattata

SEQ ID NO: 353969 - DNA, 12 bp, Artificial Sequence
  Oligonucleotide primer for the detection of SNP TSC0048821
tactattaatac

SEQ ID NO: 353970 - DNA, 12 bp, Artificial Sequence
  Oligonucleotide primer for the detection of SNP TSC0048821
tttgattatatg

SEQ ID NO: 353971 - DNA, 12 bp, Artificial Sequence
  Oligonucleotide primer for the detection of SNP TSC0048824
aatttcataaat

SEQ ID NO: 353972 - DNA, 12 bp, Artificial Sequence
  Oligonucleotide primer for the detection of SNP TSC0048824
tggtttaagtgg

SEQ ID NO: 353973 - DNA, 12 bp, Artificial Sequence
  Oligonucleotide primer for the detection of SNP TSC0048826
taaaaatcttac

SEQ ID NO: 353974 - DNA, 12 bp, Artificial Sequence
  Oligonucleotide primer for the detection of SNP TSC0048827
aactaatatttc

SEQ ID NO: 353975 - DNA, 12 bp, Artificial Sequence
  Oligonucleotide primer for the detection of SNP TSC0048827
agttaatatttt

SEQ ID NO: 353976 - DNA, 12 bp, Artificial Sequence
  Oligonucleotide primer for the detection of SNP TSC0048828
tacaattaattt

SEQ ID NO: 353977 - DNA, 12 bp, Artificial Sequence
  Oligonucleotide primer for the detection of SNP TSC0048828
ggtattgtttaa

SEQ ID NO: 353978 - DNA, 12 bp, Artificial Sequence
  Oligonucleotide primer for the detection of SNP TSC0048829
gtaattaattta

SEQ ID NO: 353979 - DNA, 12 bp, Artificial Sequence
  Oligonucleotide primer for the detection of SNP TSC0048830
aaaaatttaact

SEQ ID NO: 353980 - DNA, 12 bp, Artificial Sequence
  Oligonucleotide primer for the detection of SNP TSC0048830
gttattttgata

SEQ ID NO: 353981 - DNA, 12 bp, Artificial Sequence
  Oligonucleotide primer for the detection of SNP TSC0008139
ttaatttgggaa

SEQ ID NO: 353982 - DNA, 12 bp, Artificial Sequence
  Oligonucleotide primer for the detection of SNP TSC0008139
ctaatctaaaaa

SEQ ID NO: 353983 - DNA, 12 bp, Artificial Sequence
  Oligonucleotide primer for the detection of SNP TSC0008139
aagtaatgtaat

SEQ ID NO: 353984 - DNA, 12 bp, Artificial Sequence
  Oligonucleotide primer for the detection of SNP TSC0048836
ccctcctccatc

SEQ ID NO: 353985 - DNA, 12 bp, Artificial Sequence
  Oligonucleotide primer for the detection of SNP TSC0048836
gtgattgaggta

SEQ ID NO: 353986 - DNA, 12 bp, Artificial Sequence
  Oligonucleotide primer for the detection of SNP TSC0048839
ataaaattacta

SEQ ID NO: 353987 - DNA, 12 bp, Artificial Sequence
  Oligonucleotide primer for the detection of SNP TSC0048839
taactcaatcct

SEQ ID NO: 353988 - DNA, 12 bp, Artificial Sequence
  Oligonucleotide primer for the detection of SNP TSC0048839
ataaggttatta

SEQ ID NO: 353989 - DNA, 12 bp, Artificial Sequence
  Oligonucleotide primer for the detection of SNP TSC0048840
tttgagtattta

SEQ ID NO: 353990 - DNA, 12 bp, Artificial Sequence
  Oligonucleotide primer for the detection of SNP TSC0005309
tatcccctaccc

SEQ ID NO: 353991 - DNA, 12 bp, Artificial Sequence
  Oligonucleotide primer for the detection of SNP TSC0005309
ggtttttgtagg

SEQ ID NO: 353992 - DNA, 12 bp, Artificial Sequence
  Oligonucleotide primer for the detection of SNP TSC0005309
aatttctataaa

SEQ ID NO: 353993 - DNA, 12 bp, Artificial Sequence
  Oligonucleotide primer for the detection of SNP TSC0048841
gggaagtttaag

SEQ ID NO: 353994 - DNA, 12 bp, Artificial Sequence
  Oligonucleotide primer for the detection of SNP TSC0048841
aaaaaattcaaa

SEQ ID NO: 353995 - DNA, 12 bp, Artificial Sequence
  Oligonucleotide primer for the detection of SNP TSC0048841
gaaaaattcaaa

SEQ ID NO: 353996 - DNA, 12 bp, Artificial Sequence
  Oligonucleotide primer for the detection of SNP TSC0048841
gtagaggtaagt

SEQ ID NO: 353997 - DNA, 12 bp, Artificial Sequence
  Oligonucleotide primer for the detection of SNP TSC0048842
ttaaaaaactca

SEQ ID NO: 353998 - DNA, 12 bp, Artificial Sequence
  Oligonucleotide primer for the detection of SNP TSC0048842
attgaagaatgt

SEQ ID NO: 353999 - DNA, 12 bp, Artificial Sequence
  Oligonucleotide primer for the detection of SNP TSC0048846
tctaattaaatc

SEQ ID NO: 354000 - DNA, 12 bp, Artificial Sequence
  Oligonucleotide primer for the detection of SNP TSC0048846
ttgagtaggatt

SEQ ID NO: 354001 - DNA, 12 bp, Artificial Sequence
  Oligonucleotide primer for the detection of SNP TSC0048846
taaacaaaacca

SEQ ID NO: 354002 - DNA, 12 bp, Artificial Sequence
  Oligonucleotide primer for the detection of SNP TSC0048846
tttggttaggtt

SEQ ID NO: 354003 - DNA, 12 bp, Artificial Sequence
  Oligonucleotide primer for the detection of SNP TSC0048847
tacaatctaaac

SEQ ID NO: 354004 - DNA, 12 bp, Artificial Sequence
  Oligonucleotide primer for the detection of SNP TSC0006125
aactcacaaaac

SEQ ID NO: 354005 - DNA, 12 bp, Artificial Sequence
  Oligonucleotide primer for the detection of SNP TSC0006125
atagaaagttaa

SEQ ID NO: 354006 - DNA, 12 bp, Artificial Sequence
  Oligonucleotide primer for the detection of SNP TSC0006126
tatttccaaacc

SEQ ID NO: 354007 - DNA, 12 bp, Artificial Sequence
  Oligonucleotide primer for the detection of SNP TSC0006126
gagaaagagaac

SEQ ID NO: 354008 - DNA, 12 bp, Artificial Sequence
  Oligonucleotide primer for the detection of SNP TSC0048848
acaaataaattc

SEQ ID NO: 354009 - DNA, 12 bp, Artificial Sequence
  Oligonucleotide primer for the detection of SNP TSC0048849
aattactcaata

SEQ ID NO: 354010 - DNA, 12 bp, Artificial Sequence
  Oligonucleotide primer for the detection of SNP TSC0048849
aattactcgata

SEQ ID NO: 354011 - DNA, 12 bp, Artificial Sequence
  Oligonucleotide primer for the detection of SNP TSC0048849
tttaccattaat

SEQ ID NO: 354012 - DNA, 12 bp, Artificial Sequence
  Oligonucleotide primer for the detection of SNP TSC0048849
attatttgatgt

SEQ ID NO: 354013 - DNA, 12 bp, Artificial Sequence
  Oligonucleotide primer for the detection of SNP TSC0048849
attattcgatgt

SEQ ID NO: 354014 - DNA, 12 bp, Artificial Sequence
  Oligonucleotide primer for the detection of SNP TSC0048850
aatttaatattt

SEQ ID NO: 354015 - DNA, 12 bp, Artificial Sequence
  Oligonucleotide primer for the detection of SNP TSC0048850
ttaagtaagaaa

SEQ ID NO: 354016 - DNA, 12 bp, Artificial Sequence
  Oligonucleotide primer for the detection of SNP TSC0048851
taataaacccta

SEQ ID NO: 354017 - DNA, 12 bp, Artificial Sequence
  Oligonucleotide primer for the detection of SNP TSC0048851
tttttgagggat

SEQ ID NO: 354018 - DNA, 12 bp, Artificial Sequence
  Oligonucleotide primer for the detection of SNP TSC0048851
ttcctaaaaaac

SEQ ID NO: 354019 - DNA, 12 bp, Artificial Sequence
  Oligonucleotide primer for the detection of SNP TSC0048851
tgatgaattttg

SEQ ID NO: 354020 - DNA, 12 bp, Artificial Sequence
  Oligonucleotide primer for the detection of SNP TSC0048852
ctccctctacaa

SEQ ID NO: 354021 - DNA, 12 bp, Artificial Sequence
  Oligonucleotide primer for the detection of SNP TSC0048852
ggtgaaatattt

SEQ ID NO: 354022 - DNA, 12 bp, Artificial Sequence
  Oligonucleotide primer for the detection of SNP TSC0048852
ataataaaacat

SEQ ID NO: 354023 - DNA, 12 bp, Artificial Sequence
  Oligonucleotide primer for the detection of SNP TSC0048853
acaatcctataa

SEQ ID NO: 354024 - DNA, 12 bp, Artificial Sequence
  Oligonucleotide primer for the detection of SNP TSC0048853
tttaatatttat

SEQ ID NO: 354025 - DNA, 12 bp, Artificial Sequence
  Oligonucleotide primer for the detection of SNP TSC0048853
tttaatatttac

SEQ ID NO: 354026 - DNA, 12 bp, Artificial Sequence
  Oligonucleotide primer for the detection of SNP TSC0048853
cctaatacctac

SEQ ID NO: 354027 - DNA, 12 bp, Artificial Sequence
  Oligonucleotide primer for the detection of SNP TSC0048853
ataattttatag

SEQ ID NO: 354028 - DNA, 12 bp, Artificial Sequence
  Oligonucleotide primer for the detection of SNP TSC0048854
ttattacttttc

SEQ ID NO: 354029 - DNA, 12 bp, Artificial Sequence
  Oligonucleotide primer for the detection of SNP TSC0048854
tagagatgtata

SEQ ID NO: 354030 - DNA, 12 bp, Artificial Sequence
  Oligonucleotide primer for the detection of SNP TSC0048857
taatcaatcaat

SEQ ID NO: 354031 - DNA, 12 bp, Artificial Sequence
  Oligonucleotide primer for the detection of SNP TSC0048857
taatcaatcgat

SEQ ID NO: 354032 - DNA, 12 bp, Artificial Sequence
  Oligonucleotide primer for the detection of SNP TSC0048857
ttgattttatgt

SEQ ID NO: 354033 - DNA, 12 bp, Artificial Sequence
  Oligonucleotide primer for the detection of SNP TSC0048857
attaaccctata

SEQ ID NO: 354034 - DNA, 12 bp, Artificial Sequence
  Oligonucleotide primer for the detection of SNP TSC0048857
taattaattgat

SEQ ID NO: 354035 - DNA, 12 bp, Artificial Sequence
  Oligonucleotide primer for the detection of SNP TSC0048857
taattaatcgat

SEQ ID NO: 354036 - DNA, 12 bp, Artificial Sequence
  Oligonucleotide primer for the detection of SNP TSC0048858
taatttaaatct

SEQ ID NO: 354037 - DNA, 12 bp, Artificial Sequence
  Oligonucleotide primer for the detection of SNP TSC0048858
gttgtaggaatt

SEQ ID NO: 354038 - DNA, 12 bp, Artificial Sequence
  Oligonucleotide primer for the detection of SNP TSC0048858
tagtttaaattt

SEQ ID NO: 354039 - DNA, 12 bp, Artificial Sequence
  Oligonucleotide primer for the detection of SNP TSC0048863
ccttttcctatc

SEQ ID NO: 354040 - DNA, 12 bp, Artificial Sequence
  Oligonucleotide primer for the detection of SNP TSC0048864
aaccatatttta

SEQ ID NO: 354041 - DNA, 12 bp, Artificial Sequence
  Oligonucleotide primer for the detection of SNP TSC0048864
attagttttttc

SEQ ID NO: 354042 - DNA, 12 bp, Artificial Sequence
  Oligonucleotide primer for the detection of SNP TSC0048864
accaaccttccc

SEQ ID NO: 354043 - DNA, 12 bp, Artificial Sequence
  Oligonucleotide primer for the detection of SNP TSC0048865
aatttatatcta

SEQ ID NO: 354044 - DNA, 12 bp, Artificial Sequence
  Oligonucleotide primer for the detection of SNP TSC0048865
aaggaattagat

SEQ ID NO: 354045 - DNA, 12 bp, Artificial Sequence
  Oligonucleotide primer for the detection of SNP TSC0048865
ggatttgtgttt

SEQ ID NO: 354046 - DNA, 12 bp, Artificial Sequence
  Oligonucleotide primer for the detection of SNP TSC0048868
cctataaaatct

SEQ ID NO: 354047 - DNA, 12 bp, Artificial Sequence
  Oligonucleotide primer for the detection of SNP TSC0048868
ggggagtggaga

SEQ ID NO: 354048 - DNA, 12 bp, Artificial Sequence
  Oligonucleotide primer for the detection of SNP TSC0048869
ataccatatttt

SEQ ID NO: 354049 - DNA, 12 bp, Artificial Sequence
  Oligonucleotide primer for the detection of SNP TSC0048870
aatttaataaat

SEQ ID NO: 354050 - DNA, 12 bp, Artificial Sequence
  Oligonucleotide primer for the detection of SNP TSC0048870
aacttaataaac

SEQ ID NO: 354051 - DNA, 12 bp, Artificial Sequence
  Oligonucleotide primer for the detection of SNP TSC0048870
ttaaatgtgtag

SEQ ID NO: 354052 - DNA, 12 bp, Artificial Sequence
  Oligonucleotide primer for the detection of SNP TSC0048872
tgtgaattttat

SEQ ID NO: 354053 - DNA, 12 bp, Artificial Sequence
  Oligonucleotide primer for the detection of SNP TSC0004834
tcaattttactc

SEQ ID NO: 354054 - DNA, 12 bp, Artificial Sequence
  Oligonucleotide primer for the detection of SNP TSC0004834
aaagtttggata

SEQ ID NO: 354055 - DNA, 12 bp, Artificial Sequence
  Oligonucleotide primer for the detection of SNP TSC0048874
aaactttatcta

SEQ ID NO: 354056 - DNA, 12 bp, Artificial Sequence
  Oligonucleotide primer for the detection of SNP TSC0048874
gaaatattttat

SEQ ID NO: 354057 - DNA, 12 bp, Artificial Sequence
  Oligonucleotide primer for the detection of SNP TSC0048874
aaaatatcccat

SEQ ID NO: 354058 - DNA, 12 bp, Artificial Sequence
  Oligonucleotide primer for the detection of SNP TSC0048874
gggttttgtttg

SEQ ID NO: 354059 - DNA, 12 bp, Artificial Sequence
  Oligonucleotide primer for the detection of SNP TSC0048875
aaaacaaaccac

SEQ ID NO: 354060 - DNA, 12 bp, Artificial Sequence
  Oligonucleotide primer for the detection of SNP TSC0048875
gagatgtttggg

SEQ ID NO: 354061 - DNA, 12 bp, Artificial Sequence
  Oligonucleotide primer for the detection of SNP TSC0048875
ggagtaggttat

SEQ ID NO: 354062 - DNA, 12 bp, Artificial Sequence
  Oligonucleotide primer for the detection of SNP TSC0008195
caccacactcta

SEQ ID NO: 354063 - DNA, 12 bp, Artificial Sequence
  Oligonucleotide primer for the detection of SNP TSC0008195
ctattacccaaa

SEQ ID NO: 354064 - DNA, 12 bp, Artificial Sequence
  Oligonucleotide primer for the detection of SNP TSC0008196
tttactttcttt

SEQ ID NO: 354065 - DNA, 12 bp, Artificial Sequence
  Oligonucleotide primer for the detection of SNP TSC0048878
ataactaaacct

SEQ ID NO: 354066 - DNA, 12 bp, Artificial Sequence
  Oligonucleotide primer for the detection of SNP TSC0048878
ttggggtttgaa

SEQ ID NO: 354067 - DNA, 12 bp, Artificial Sequence
  Oligonucleotide primer for the detection of SNP TSC0048885
tgatagagggag

SEQ ID NO: 354068 - DNA, 12 bp, Artificial Sequence
  Oligonucleotide primer for the detection of SNP TSC0005183
agagggagttgt

SEQ ID NO: 354069 - DNA, 12 bp, Artificial Sequence
  Oligonucleotide primer for the detection of SNP TSC0005183
gggaatatgtat

SEQ ID NO: 354070 - DNA, 12 bp, Artificial Sequence
  Oligonucleotide primer for the detection of SNP TSC0005183
gggaatatgtac

SEQ ID NO: 354071 - DNA, 12 bp, Artificial Sequence
  Oligonucleotide primer for the detection of SNP TSC0005184
aaaacctactta

SEQ ID NO: 354072 - DNA, 12 bp, Artificial Sequence
  Oligonucleotide primer for the detection of SNP TSC0005184
attttagaagta

SEQ ID NO: 354073 - DNA, 12 bp, Artificial Sequence
  Oligonucleotide primer for the detection of SNP TSC0000118
tgaaaggttatg

SEQ ID NO: 354074 - DNA, 12 bp, Artificial Sequence
  Oligonucleotide primer for the detection of SNP TSC0048888
ttaactcctctt

SEQ ID NO: 354075 - DNA, 12 bp, Artificial Sequence
  Oligonucleotide primer for the detection of SNP TSC0048888
attttaaagggg

SEQ ID NO: 354076 - DNA, 12 bp, Artificial Sequence
  Oligonucleotide primer for the detection of SNP TSC0048890
cattattccccc

SEQ ID NO: 354077 - DNA, 12 bp, Artificial Sequence
  Oligonucleotide primer for the detection of SNP TSC0048890
atatagcgatgg

SEQ ID NO: 354078 - DNA, 12 bp, Artificial Sequence
  Oligonucleotide primer for the detection of SNP TSC0048891
tttaaccaaact

SEQ ID NO: 354079 - DNA, 12 bp, Artificial Sequence
  Oligonucleotide primer for the detection of SNP TSC0048893
attttcaaaacc

SEQ ID NO: 354080 - DNA, 12 bp, Artificial Sequence
  Oligonucleotide primer for the detection of SNP TSC0048893
aaattattatta

SEQ ID NO: 354081 - DNA, 12 bp, Artificial Sequence
  Oligonucleotide primer for the detection of SNP TSC0048894
ctaactaaataa

SEQ ID NO: 354082 - DNA, 12 bp, Artificial Sequence
  Oligonucleotide primer for the detection of SNP TSC0048894
attgtatttgtt

SEQ ID NO: 354083 - DNA, 12 bp, Artificial Sequence
  Oligonucleotide primer for the detection of SNP TSC0048894
atcgtatttgtt

SEQ ID NO: 354084 - DNA, 12 bp, Artificial Sequence
  Oligonucleotide primer for the detection of SNP TSC0048894
atcatacctacc

SEQ ID NO: 354085 - DNA, 12 bp, Artificial Sequence
  Oligonucleotide primer for the detection of SNP TSC0048894
atcgtacctacc

SEQ ID NO: 354086 - DNA, 12 bp, Artificial Sequence
  Oligonucleotide primer for the detection of SNP TSC0048894
ttaattaaatag

SEQ ID NO: 354087 - DNA, 12 bp, Artificial Sequence
  Oligonucleotide primer for the detection of SNP TSC0048895
aaatctcattta

SEQ ID NO: 354088 - DNA, 12 bp, Artificial Sequence
  Oligonucleotide primer for the detection of SNP TSC0048895
ttgttgtaaaga

SEQ ID NO: 354089 - DNA, 12 bp, Artificial Sequence
  Oligonucleotide primer for the detection of SNP TSC0009392
atttatttaact

SEQ ID NO: 354090 - DNA, 12 bp, Artificial Sequence
  Oligonucleotide primer for the detection of SNP TSC0009392
attttagggaag

SEQ ID NO: 354091 - DNA, 12 bp, Artificial Sequence
  Oligonucleotide primer for the detection of SNP TSC0004869
ttttatacctaa

SEQ ID NO: 354092 - DNA, 12 bp, Artificial Sequence
  Oligonucleotide primer for the detection of SNP TSC0004869
taacatctctct

SEQ ID NO: 354093 - DNA, 12 bp, Artificial Sequence
  Oligonucleotide primer for the detection of SNP TSC0048896
aacataaacacc

SEQ ID NO: 354094 - DNA, 12 bp, Artificial Sequence
  Oligonucleotide primer for the detection of SNP TSC0048896
cgtttttttatg

SEQ ID NO: 354095 - DNA, 12 bp, Artificial Sequence
  Oligonucleotide primer for the detection of SNP TSC0048897
actctcttattt

SEQ ID NO: 354096 - DNA, 12 bp, Artificial Sequence
  Oligonucleotide primer for the detection of SNP TSC0048897
attatttggtga

SEQ ID NO: 354097 - DNA, 12 bp, Artificial Sequence
  Oligonucleotide primer for the detection of SNP TSC0048897
accacctaataa

SEQ ID NO: 354098 - DNA, 12 bp, Artificial Sequence
  Oligonucleotide primer for the detection of SNP TSC0048898
taaaactcttct

SEQ ID NO: 354099 - DNA, 12 bp, Artificial Sequence
  Oligonucleotide primer for the detection of SNP TSC0048898
atttggtaaggg

SEQ ID NO: 354100 - DNA, 12 bp, Artificial Sequence
  Oligonucleotide primer for the detection of SNP TSC0048901
aaaaaaccatat

SEQ ID NO: 354101 - DNA, 12 bp, Artificial Sequence
  Oligonucleotide primer for the detection of SNP TSC0048901
gtataaaatgaa

SEQ ID NO: 354102 - DNA, 12 bp, Artificial Sequence
  Oligonucleotide primer for the detection of SNP TSC0048902
atccttatttat

SEQ ID NO: 354103 - DNA, 12 bp, Artificial Sequence
  Oligonucleotide primer for the detection of SNP TSC0048902
taaaattatatg

SEQ ID NO: 354104 - DNA, 12 bp, Artificial Sequence
  Oligonucleotide primer for the detection of SNP TSC0048903
aaacaaaatcca

SEQ ID NO: 354105 - DNA, 12 bp, Artificial Sequence
  Oligonucleotide primer for the detection of SNP TSC0048903
ggtttgaatatt

SEQ ID NO: 354106 - DNA, 12 bp, Artificial Sequence
  Oligonucleotide primer for the detection of SNP TSC0048904
taaattctaaac

SEQ ID NO: 354107 - DNA, 12 bp, Artificial Sequence
  Oligonucleotide primer for the detection of SNP TSC0048906
ttttaataataa

SEQ ID NO: 354108 - DNA, 12 bp, Artificial Sequence
  Oligonucleotide primer for the detection of SNP TSC0048906
tttatattagtt

SEQ ID NO: 354109 - DNA, 12 bp, Artificial Sequence
  Oligonucleotide primer for the detection of SNP TSC0048906
ctcacaccaatc

SEQ ID NO: 354110 - DNA, 12 bp, Artificial Sequence
  Oligonucleotide primer for the detection of SNP TSC0048906
ttttagtaatag

SEQ ID NO: 354111 - DNA, 12 bp, Artificial Sequence
  Oligonucleotide primer for the detection of SNP TSC0007127
atttttaatatc

SEQ ID NO: 354112 - DNA, 12 bp, Artificial Sequence
  Oligonucleotide primer for the detection of SNP TSC0007127
ttaagtattaaa

SEQ ID NO: 354113 - DNA, 12 bp, Artificial Sequence
  Oligonucleotide primer for the detection of SNP TSC0007127
ttaaacaccaaa

SEQ ID NO: 354114 - DNA, 12 bp, Artificial Sequence
  Oligonucleotide primer for the detection of SNP TSC0048911
aataattttccc

SEQ ID NO: 354115 - DNA, 12 bp, Artificial Sequence
  Oligonucleotide primer for the detection of SNP TSC0048911
tggaggttgagg

SEQ ID NO: 354116 - DNA, 12 bp, Artificial Sequence
  Oligonucleotide primer for the detection of SNP TSC0048914
ctatctccctac

SEQ ID NO: 354117 - DNA, 12 bp, Artificial Sequence
  Oligonucleotide primer for the detection of SNP TSC0005781
caatcctaaaac

SEQ ID NO: 354118 - DNA, 12 bp, Artificial Sequence
  Oligonucleotide primer for the detection of SNP TSC0005781
aaaggtgaggtg

SEQ ID NO: 354119 - DNA, 12 bp, Artificial Sequence
  Oligonucleotide primer for the detection of SNP TSC0005782
aattcacaatat

SEQ ID NO: 354120 - DNA, 12 bp, Artificial Sequence
  Oligonucleotide primer for the detection of SNP TSC0005782
aattcacgatat

SEQ ID NO: 354121 - DNA, 12 bp, Artificial Sequence
  Oligonucleotide primer for the detection of SNP TSC0048916
aaattaaatcta

SEQ ID NO: 354122 - DNA, 12 bp, Artificial Sequence
  Oligonucleotide primer for the detection of SNP TSC0048916
aaattgtttgtt

SEQ ID NO: 354123 - DNA, 12 bp, Artificial Sequence
  Oligonucleotide primer for the detection of SNP TSC0048916
aaattatttacc

SEQ ID NO: 354124 - DNA, 12 bp, Artificial Sequence
  Oligonucleotide primer for the detection of SNP TSC0048916
agattgaatttg

SEQ ID NO: 354125 - DNA, 12 bp, Artificial Sequence
  Oligonucleotide primer for the detection of SNP TSC0048917
tatattcaatat

SEQ ID NO: 354126 - DNA, 12 bp, Artificial Sequence
  Oligonucleotide primer for the detection of SNP TSC0048917
ttaattaataaa

SEQ ID NO: 354127 - DNA, 12 bp, Artificial Sequence
  Oligonucleotide primer for the detection of SNP TSC0048917
ttaatcaacaaa

SEQ ID NO: 354128 - DNA, 12 bp, Artificial Sequence
  Oligonucleotide primer for the detection of SNP TSC0048917
tatgtttaatat

SEQ ID NO: 354129 - DNA, 12 bp, Artificial Sequence
  Oligonucleotide primer for the detection of SNP TSC0048918
aacccacaacta

SEQ ID NO: 354130 - DNA, 12 bp, Artificial Sequence
  Oligonucleotide primer for the detection of SNP TSC0048918
tttgaatatgtt

SEQ ID NO: 354131 - DNA, 12 bp, Artificial Sequence
  Oligonucleotide primer for the detection of SNP TSC0048919
ctcaccactctc

SEQ ID NO: 354132 - DNA, 12 bp, Artificial Sequence
  Oligonucleotide primer for the detection of SNP TSC0048919
tgaagtaagggg

SEQ ID NO: 354133 - DNA, 12 bp, Artificial Sequence
  Oligonucleotide primer for the detection of SNP TSC0001249
taaaaattacac

SEQ ID NO: 354134 - DNA, 12 bp, Artificial Sequence
  Oligonucleotide primer for the detection of SNP TSC0001249
gaatgggagata

SEQ ID NO: 354135 - DNA, 12 bp, Artificial Sequence
  Oligonucleotide primer for the detection of SNP TSC0048920
aattctttcttt

SEQ ID NO: 354136 - DNA, 12 bp, Artificial Sequence
  Oligonucleotide primer for the detection of SNP TSC0048920
tttcatcaacca

SEQ ID NO: 354137 - DNA, 12 bp, Artificial Sequence
  Oligonucleotide primer for the detection of SNP TSC0005633
atctctcaactc

SEQ ID NO: 354138 - DNA, 12 bp, Artificial Sequence
  Oligonucleotide primer for the detection of SNP TSC0005633
ttatttgttagg

SEQ ID NO: 354139 - DNA, 12 bp, Artificial Sequence
  Oligonucleotide primer for the detection of SNP TSC0048928
aatcataccact

SEQ ID NO: 354140 - DNA, 12 bp, Artificial Sequence
  Oligonucleotide primer for the detection of SNP TSC0048928
taggttggagta

SEQ ID NO: 354141 - DNA, 12 bp, Artificial Sequence
  Oligonucleotide primer for the detection of SNP TSC0048928
ggttatgttatt

SEQ ID NO: 354142 - DNA, 12 bp, Artificial Sequence
  Oligonucleotide primer for the detection of SNP TSC0048929
attatcaaaact

SEQ ID NO: 354143 - DNA, 12 bp, Artificial Sequence
  Oligonucleotide primer for the detection of SNP TSC0048929
taataaattaga

SEQ ID NO: 354144 - DNA, 12 bp, Artificial Sequence
  Oligonucleotide primer for the detection of SNP TSC0048931
taaaatacctac

SEQ ID NO: 354145 - DNA, 12 bp, Artificial Sequence
  Oligonucleotide primer for the detection of SNP TSC0048931
aaggtgaagggg

SEQ ID NO: 354146 - DNA, 12 bp, Artificial Sequence
  Oligonucleotide primer for the detection of SNP TSC0048931
gagatgtttgtt

SEQ ID NO: 354147 - DNA, 12 bp, Artificial Sequence
  Oligonucleotide primer for the detection of SNP TSC0048932
aatttattaact

SEQ ID NO: 354148 - DNA, 12 bp, Artificial Sequence
  Oligonucleotide primer for the detection of SNP TSC0048932
ttatgtaagtat

SEQ ID NO: 354149 - DNA, 12 bp, Artificial Sequence
  Oligonucleotide primer for the detection of SNP TSC0048932
aatttattagtt

SEQ ID NO: 354150 - DNA, 12 bp, Artificial Sequence
  Oligonucleotide primer for the detection of SNP TSC0048937
tttaatgatagt

SEQ ID NO: 354151 - DNA, 12 bp, Artificial Sequence
  Oligonucleotide primer for the detection of SNP TSC0048937
tttaataacaac

SEQ ID NO: 354152 - DNA, 12 bp, Artificial Sequence
  Oligonucleotide primer for the detection of SNP TSC0048937
ttatataatttt

SEQ ID NO: 354153 - DNA, 12 bp, Artificial Sequence
  Oligonucleotide primer for the detection of SNP TSC0048938
attattatacat

SEQ ID NO: 354154 - DNA, 12 bp, Artificial Sequence
  Oligonucleotide primer for the detection of SNP TSC0048938
ttaatttttgga

SEQ ID NO: 354155 - DNA, 12 bp, Artificial Sequence
  Oligonucleotide primer for the detection of SNP TSC0048939
tcatataaaaat

SEQ ID NO: 354156 - DNA, 12 bp, Artificial Sequence
  Oligonucleotide primer for the detection of SNP TSC0048939
gaagagtatagg

SEQ ID NO: 354157 - DNA, 12 bp, Artificial Sequence
  Oligonucleotide primer for the detection of SNP TSC0048942
ttacatatttta

SEQ ID NO: 354158 - DNA, 12 bp, Artificial Sequence
  Oligonucleotide primer for the detection of SNP TSC0048942
gaagattaaatg

SEQ ID NO: 354159 - DNA, 12 bp, Artificial Sequence
  Oligonucleotide primer for the detection of SNP TSC0048943
taaaggtaatgg

SEQ ID NO: 354160 - DNA, 12 bp, Artificial Sequence
  Oligonucleotide primer for the detection of SNP TSC0048944
ttccaaaacatt

SEQ ID NO: 354161 - DNA, 12 bp, Artificial Sequence
  Oligonucleotide primer for the detection of SNP TSC0048949
tacaactaaaac

SEQ ID NO: 354162 - DNA, 12 bp, Artificial Sequence
  Oligonucleotide primer for the detection of SNP TSC0048949
tacgactaaaac

SEQ ID NO: 354163 - DNA, 12 bp, Artificial Sequence
  Oligonucleotide primer for the detection of SNP TSC0048949
atttatcttact

SEQ ID NO: 354164 - DNA, 12 bp, Artificial Sequence
  Oligonucleotide primer for the detection of SNP TSC0048949
gtgattagaatt

SEQ ID NO: 354165 - DNA, 12 bp, Artificial Sequence
  Oligonucleotide primer for the detection of SNP TSC0048949
gcgattagaatt

SEQ ID NO: 354166 - DNA, 12 bp, Artificial Sequence
  Oligonucleotide primer for the detection of SNP TSC0048950
ccgacaacttaa

SEQ ID NO: 354167 - DNA, 12 bp, Artificial Sequence
  Oligonucleotide primer for the detection of SNP TSC0048950
atttttttatgt

SEQ ID NO: 354168 - DNA, 12 bp, Artificial Sequence
  Oligonucleotide primer for the detection of SNP TSC0048950
atttttttacgt

SEQ ID NO: 354169 - DNA, 12 bp, Artificial Sequence
  Oligonucleotide primer for the detection of SNP TSC0048950
tattctcttaca

SEQ ID NO: 354170 - DNA, 12 bp, Artificial Sequence
  Oligonucleotide primer for the detection of SNP TSC0048950
tattctcttacg

SEQ ID NO: 354171 - DNA, 12 bp, Artificial Sequence
  Oligonucleotide primer for the detection of SNP TSC0048950
tattggtaattt

SEQ ID NO: 354172 - DNA, 12 bp, Artificial Sequence
  Oligonucleotide primer for the detection of SNP TSC0048950
tatcggtaattt

SEQ ID NO: 354173 - DNA, 12 bp, Artificial Sequence
  Oligonucleotide primer for the detection of SNP TSC0048953
tattttcatatt

SEQ ID NO: 354174 - DNA, 12 bp, Artificial Sequence
  Oligonucleotide primer for the detection of SNP TSC0048953
gagaataaaata

SEQ ID NO: 354175 - DNA, 12 bp, Artificial Sequence
  Oligonucleotide primer for the detection of SNP TSC0048954
caaaattttaca

SEQ ID NO: 354176 - DNA, 12 bp, Artificial Sequence
  Oligonucleotide primer for the detection of SNP TSC0048954
cgaaattttaca

SEQ ID NO: 354177 - DNA, 12 bp, Artificial Sequence
  Oligonucleotide primer for the detection of SNP TSC0048954
atgtggtgtgta

SEQ ID NO: 354178 - DNA, 12 bp, Artificial Sequence
  Oligonucleotide primer for the detection of SNP TSC0048955
acaataaaatct

SEQ ID NO: 354179 - DNA, 12 bp, Artificial Sequence
  Oligonucleotide primer for the detection of SNP TSC0048955
attgttgatttg

SEQ ID NO: 354180 - DNA, 12 bp, Artificial Sequence
  Oligonucleotide primer for the detection of SNP TSC0048960
caaaatcttttt

SEQ ID NO: 354181 - DNA, 12 bp, Artificial Sequence
  Oligonucleotide primer for the detection of SNP TSC0048960
cgaaatcttttt

SEQ ID NO: 354182 - DNA, 12 bp, Artificial Sequence
  Oligonucleotide primer for the detection of SNP TSC0048960
aggattagtgtt

SEQ ID NO: 354183 - DNA, 12 bp, Artificial Sequence
  Oligonucleotide primer for the detection of SNP TSC0048961
cacaaactaaaa

SEQ ID NO: 354184 - DNA, 12 bp, Artificial Sequence
  Oligonucleotide primer for the detection of SNP TSC0048961
cacgaactaaaa

SEQ ID NO: 354185 - DNA, 12 bp, Artificial Sequence
  Oligonukleotid-Primer
tagatgaaattt

SEQ ID NO: 354186 - DNA, 12 bp, Artificial Sequence
  Oligonucleotide primer for the detection of SNP TSC0048961
aaataaaaccta

SEQ ID NO: 354187 - DNA, 12 bp, Artificial Sequence
  Oligonucleotide primer for the detection of SNP TSC0048961
aatatgaattag

SEQ ID NO: 354188 - DNA, 12 bp, Artificial Sequence
  Oligonucleotide primer for the detection of SNP TSC0048961
aatacgaattag

SEQ ID NO: 354189 - DNA, 12 bp, Artificial Sequence
  Oligonucleotide primer for the detection of SNP TSC0048963
tcatttaccccc

SEQ ID NO: 354190 - DNA, 12 bp, Artificial Sequence
  Oligonucleotide primer for the detection of SNP TSC0048963
tcgtttaccccc

SEQ ID NO: 354191 - DNA, 12 bp, Artificial Sequence
  Oligonucleotide primer for the detection of SNP TSC0048963
tagtttggtgaa

SEQ ID NO: 354192 - DNA, 12 bp, Artificial Sequence
  Oligonucleotide primer for the detection of SNP TSC0048966
actaataaacat

SEQ ID NO: 354193 - DNA, 12 bp, Artificial Sequence
  Oligonucleotide primer for the detection of SNP TSC0048966
agaaataattta

SEQ ID NO: 354194 - DNA, 12 bp, Artificial Sequence
  Oligonucleotide primer for the detection of SNP TSC0048966
gttgatggatat

SEQ ID NO: 354195 - DNA, 12 bp, Artificial Sequence
  Oligonucleotide primer for the detection of SNP TSC0048967
tcgatattttag

SEQ ID NO: 354196 - DNA, 12 bp, Artificial Sequence
  Oligonucleotide primer for the detection of SNP TSC0048969
ttcttttaaaac

SEQ ID NO: 354197 - DNA, 12 bp, Artificial Sequence
  Oligonucleotide primer for the detection of SNP TSC0048969
gtaaaataagta

SEQ ID NO: 354198 - DNA, 12 bp, Artificial Sequence
  Oligonucleotide primer for the detection of SNP TSC0048970
atggtaaaattt

SEQ ID NO: 354199 - DNA, 12 bp, Artificial Sequence
  Oligonucleotide primer for the detection of SNP TSC0048970
tttttatagaga

SEQ ID NO: 354200 - DNA, 12 bp, Artificial Sequence
  Oligonucleotide primer for the detection of SNP TSC0048971
ttctttacccaa

SEQ ID NO: 354201 - DNA, 12 bp, Artificial Sequence
  Oligonucleotide primer for the detection of SNP TSC0048971
ggattttggagt

SEQ ID NO: 354202 - DNA, 12 bp, Artificial Sequence
  Oligonucleotide primer for the detection of SNP TSC0048972
gtagaagtttta

SEQ ID NO: 354203 - DNA, 12 bp, Artificial Sequence
  Oligonucleotide primer for the detection of SNP TSC0048972
ataaaaacttca

SEQ ID NO: 354204 - DNA, 12 bp, Artificial Sequence
  Oligonucleotide primer for the detection of SNP TSC0048972
aaataaatagta

SEQ ID NO: 354205 - DNA, 12 bp, Artificial Sequence
  Oligonucleotide primer for the detection of SNP TSC0048977
atacttatcact

SEQ ID NO: 354206 - DNA, 12 bp, Artificial Sequence
  Oligonucleotide primer for the detection of SNP TSC0048977
ggataggtatta

SEQ ID NO: 354207 - DNA, 12 bp, Artificial Sequence
  Oligonucleotide primer for the detection of SNP TSC0048978
acattcattaat

SEQ ID NO: 354208 - DNA, 12 bp, Artificial Sequence
  Oligonucleotide primer for the detection of SNP TSC0048978
tgtgattgttaa

SEQ ID NO: 354209 - DNA, 12 bp, Artificial Sequence
  Oligonucleotide primer for the detection of SNP TSC0048978
tgcgattgttaa

SEQ ID NO: 354210 - DNA, 12 bp, Artificial Sequence
  Oligonucleotide primer for the detection of SNP TSC0001175
agtagtagtata

SEQ ID NO: 354211 - DNA, 12 bp, Artificial Sequence
  Oligonucleotide primer for the detection of SNP TSC0001175
aataacaacaca

SEQ ID NO: 354212 - DNA, 12 bp, Artificial Sequence
  Oligonucleotide primer for the detection of SNP TSC0001175
agtatttgaaat

SEQ ID NO: 354213 - DNA, 12 bp, Artificial Sequence
  Oligonucleotide primer for the detection of SNP TSC0048979
tatttctttttt

SEQ ID NO: 354214 - DNA, 12 bp, Artificial Sequence
  Oligonucleotide primer for the detection of SNP TSC0048981
tataaacacacg

SEQ ID NO: 354215 - DNA, 12 bp, Artificial Sequence
  Oligonucleotide primer for the detection of SNP TSC0048981
tataaacacgca

SEQ ID NO: 354216 - DNA, 12 bp, Artificial Sequence
  Oligonucleotide primer for the detection of SNP TSC0048981
tataaacgcaca

SEQ ID NO: 354217 - DNA, 12 bp, Artificial Sequence
  Oligonucleotide primer for the detection of SNP TSC0048981
tataaacacgcg

SEQ ID NO: 354218 - DNA, 12 bp, Artificial Sequence
  Oligonucleotide primer for the detection of SNP TSC0048981
tataaacgcacg

SEQ ID NO: 354219 - DNA, 12 bp, Artificial Sequence
  Oligonucleotide primer for the detection of SNP TSC0048981
tataaacgcgca

SEQ ID NO: 354220 - DNA, 12 bp, Artificial Sequence
  Oligonucleotide primer for the detection of SNP TSC0048981
tataaacgcgcg

SEQ ID NO: 354221 - DNA, 12 bp, Artificial Sequence
  Oligonucleotide primer for the detection of SNP TSC0048981
gggatttagggt

SEQ ID NO: 354222 - DNA, 12 bp, Artificial Sequence
  Oligonucleotide primer for the detection of SNP TSC0048981
aaaatccaaaat

SEQ ID NO: 354223 - DNA, 12 bp, Artificial Sequence
  Oligonucleotide primer for the detection of SNP TSC0048981
ttgtgagtgtgt

SEQ ID NO: 354224 - DNA, 12 bp, Artificial Sequence
  Oligonucleotide primer for the detection of SNP TSC0048981
ttgtgagcgtgt

SEQ ID NO: 354225 - DNA, 12 bp, Artificial Sequence
  Oligonucleotide primer for the detection of SNP TSC0048981
ttgtgagtgcgt

SEQ ID NO: 354226 - DNA, 12 bp, Artificial Sequence
  Oligonucleotide primer for the detection of SNP TSC0048981
ttgtgagtgtgc

SEQ ID NO: 354227 - DNA, 12 bp, Artificial Sequence
  Oligonucleotide primer for the detection of SNP TSC0048981
ttgtgagcgcgt

SEQ ID NO: 354228 - DNA, 12 bp, Artificial Sequence
  Oligonucleotide primer for the detection of SNP TSC0048981
ttgtgagcgtgc

SEQ ID NO: 354229 - DNA, 12 bp, Artificial Sequence
  Oligonucleotide primer for the detection of SNP TSC0048981
ttgtgagtgcgc

SEQ ID NO: 354230 - DNA, 12 bp, Artificial Sequence
  Oligonucleotide primer for the detection of SNP TSC0048981
ttgtgagcgcgc

SEQ ID NO: 354231 - DNA, 12 bp, Artificial Sequence
  Oligonucleotide primer for the detection of SNP TSC0048982
taacccaaaaaa

SEQ ID NO: 354232 - DNA, 12 bp, Artificial Sequence
  Oligonucleotide primer for the detection of SNP TSC0048982
taacccgaaaaa

SEQ ID NO: 354233 - DNA, 12 bp, Artificial Sequence
  Oligonucleotide primer for the detection of SNP TSC0048982
tgatttgggagg

SEQ ID NO: 354234 - DNA, 12 bp, Artificial Sequence
  Oligonucleotide primer for the detection of SNP TSC0048982
tgattcgggagg

SEQ ID NO: 354235 - DNA, 12 bp, Artificial Sequence
  Oligonucleotide primer for the detection of SNP TSC0048983
ctaaaaatacct

SEQ ID NO: 354236 - DNA, 12 bp, Artificial Sequence
  Oligonucleotide primer for the detection of SNP TSC0048983
ttggttaagaga

SEQ ID NO: 354237 - DNA, 12 bp, Artificial Sequence
  Oligonucleotide primer for the detection of SNP TSC0048983
ttggagatattt

SEQ ID NO: 354238 - DNA, 12 bp, Artificial Sequence
  Oligonucleotide primer for the detection of SNP TSC0048987
aaagaagttgta

SEQ ID NO: 354239 - DNA, 12 bp, Artificial Sequence
  Oligonucleotide primer for the detection of SNP TSC0048988
accctccaacct

SEQ ID NO: 354240 - DNA, 12 bp, Artificial Sequence
  Oligonucleotide primer for the detection of SNP TSC0048993
tgaggataggat

SEQ ID NO: 354241 - DNA, 12 bp, Artificial Sequence
  Oligonucleotide primer for the detection of SNP TSC0048994
aattatcaaata

SEQ ID NO: 354242 - DNA, 12 bp, Artificial Sequence
  Oligonucleotide primer for the detection of SNP TSC0048994
tgatgttaatta

SEQ ID NO: 354243 - DNA, 12 bp, Artificial Sequence
  Oligonucleotide primer for the detection of SNP TSC0048994
taataccaacca

SEQ ID NO: 354244 - DNA, 12 bp, Artificial Sequence
  Oligonucleotide primer for the detection of SNP TSC0048994
tgattattagat

SEQ ID NO: 354245 - DNA, 12 bp, Artificial Sequence
  Oligonucleotide primer for the detection of SNP TSC0048999
attcacacacac

SEQ ID NO: 354246 - DNA, 12 bp, Artificial Sequence
  Oligonucleotide primer for the detection of SNP TSC0048999
tttgtatgtgtg

SEQ ID NO: 354247 - DNA, 12 bp, Artificial Sequence
  Oligonucleotide primer for the detection of SNP TSC0049000
aaataattattt

SEQ ID NO: 354248 - DNA, 12 bp, Artificial Sequence
  Oligonucleotide primer for the detection of SNP TSC0049000
agagttgaatta

SEQ ID NO: 354249 - DNA, 12 bp, Artificial Sequence
  Oligonucleotide primer for the detection of SNP TSC0007445
acttcaccaaac

SEQ ID NO: 354250 - DNA, 12 bp, Artificial Sequence
  Oligonucleotide primer for the detection of SNP TSC0007445
agtttaggaaag

SEQ ID NO: 354251 - DNA, 12 bp, Artificial Sequence
  Oligonucleotide primer for the detection of SNP TSC0007445
gttttattaagt

SEQ ID NO: 354252 - DNA, 12 bp, Artificial Sequence
  Oligonucleotide primer for the detection of SNP TSC0049002
ctttcctctacc

SEQ ID NO: 354253 - DNA, 12 bp, Artificial Sequence
  Oligonucleotide primer for the detection of SNP TSC0049002
tggggagtagag

SEQ ID NO: 354254 - DNA, 12 bp, Artificial Sequence
  Oligonucleotide primer for the detection of SNP TSC0049003
ccaccaactctt

SEQ ID NO: 354255 - DNA, 12 bp, Artificial Sequence
  Oligonucleotide primer for the detection of SNP TSC0049003
tttattgtaaag

SEQ ID NO: 354256 - DNA, 12 bp, Artificial Sequence
  Oligonucleotide primer for the detection of SNP TSC0049003
cttactacaaaa

SEQ ID NO: 354257 - DNA, 12 bp, Artificial Sequence
  Oligonucleotide primer for the detection of SNP TSC0049004
aaataacgcttt

SEQ ID NO: 354258 - DNA, 12 bp, Artificial Sequence
  Oligonucleotide primer for the detection of SNP TSC0049004
tgtagagaggaa

SEQ ID NO: 354259 - DNA, 12 bp, Artificial Sequence
  Oligonucleotide primer for the detection of SNP TSC0049005
atcccaacctcc

SEQ ID NO: 354260 - DNA, 12 bp, Artificial Sequence
  Oligonucleotide primer for the detection of SNP TSC0049005
atcccgacctcc

SEQ ID NO: 354261 - DNA, 12 bp, Artificial Sequence
  Oligonucleotide primer for the detection of SNP TSC0049005
caatcccaacta

SEQ ID NO: 354262 - DNA, 12 bp, Artificial Sequence
  Oligonucleotide primer for the detection of SNP TSC0049005
gtttcggttttt

SEQ ID NO: 354263 - DNA, 12 bp, Artificial Sequence
  Oligonucleotide primer for the detection of SNP TSC0049006
acaaaactccac

SEQ ID NO: 354264 - DNA, 12 bp, Artificial Sequence
  Oligonucleotide primer for the detection of SNP TSC0049006
acaaaactccgc

SEQ ID NO: 354265 - DNA, 12 bp, Artificial Sequence
  Oligonucleotide primer for the detection of SNP TSC0049006
acgaaactccac

SEQ ID NO: 354266 - DNA, 12 bp, Artificial Sequence
  Oligonucleotide primer for the detection of SNP TSC0049006
acgaaactccgc

SEQ ID NO: 354267 - DNA, 12 bp, Artificial Sequence
  Oligonucleotide primer for the detection of SNP TSC0049007
cactataacttc

SEQ ID NO: 354268 - DNA, 12 bp, Artificial Sequence
  Oligonucleotide primer for the detection of SNP TSC0049007
gtttttggtgta

SEQ ID NO: 354269 - DNA, 12 bp, Artificial Sequence
  Oligonucleotide primer for the detection of SNP TSC0049007
gtttttggcgta

SEQ ID NO: 354270 - DNA, 12 bp, Artificial Sequence
  Oligonucleotide primer for the detection of SNP TSC0049008
ccacaacaaccc

SEQ ID NO: 354271 - DNA, 12 bp, Artificial Sequence
  Oligonucleotide primer for the detection of SNP TSC0049008
ccacaacgaccc

SEQ ID NO: 354272 - DNA, 12 bp, Artificial Sequence
  Oligonucleotide primer for the detection of SNP TSC0049008
ccgcaacaaccc

SEQ ID NO: 354273 - DNA, 12 bp, Artificial Sequence
  Oligonucleotide primer for the detection of SNP TSC0049008
ccgcaacgaccc

SEQ ID NO: 354274 - DNA, 12 bp, Artificial Sequence
  Oligonucleotide primer for the detection of SNP TSC0049008
gatattttggag

SEQ ID NO: 354275 - DNA, 12 bp, Artificial Sequence
  Oligonucleotide primer for the detection of SNP TSC0049008
gatatttcggag

SEQ ID NO: 354276 - DNA, 12 bp, Artificial Sequence
  Oligonucleotide primer for the detection of SNP TSC0049008
aacatcccaaaa

SEQ ID NO: 354277 - DNA, 12 bp, Artificial Sequence
  Oligonucleotide primer for the detection of SNP TSC0049008
aacatcccgaaa

SEQ ID NO: 354278 - DNA, 12 bp, Artificial Sequence
  Oligonukleotid-Primer
gacatcccaaaa

SEQ ID NO: 354279 - DNA, 12 bp, Artificial Sequence
  Oligonucleotide primer for the detection of SNP TSC0049008
gacatcccgaaa

SEQ ID NO: 354280 - DNA, 12 bp, Artificial Sequence
  Oligonucleotide primer for the detection of SNP TSC0049008
ttgtaatgattt

SEQ ID NO: 354281 - DNA, 12 bp, Artificial Sequence
  Oligonucleotide primer for the detection of SNP TSC0049008
tcgtaatgattt

SEQ ID NO: 354282 - DNA, 12 bp, Artificial Sequence
  Oligonucleotide primer for the detection of SNP TSC0049008
ttgtaacgattt

SEQ ID NO: 354283 - DNA, 12 bp, Artificial Sequence
  Oligonucleotide primer for the detection of SNP TSC0049008
ttgtaatgattc

SEQ ID NO: 354284 - DNA, 12 bp, Artificial Sequence
  Oligonucleotide primer for the detection of SNP TSC0049008
tcgtaacgattt

SEQ ID NO: 354285 - DNA, 12 bp, Artificial Sequence
  Oligonucleotide primer for the detection of SNP TSC0049008
tcgtaatgattc

SEQ ID NO: 354286 - DNA, 12 bp, Artificial Sequence
  Oligonucleotide primer for the detection of SNP TSC0049008
ttgtaacgattc

SEQ ID NO: 354287 - DNA, 12 bp, Artificial Sequence
  Oligonucleotide primer for the detection of SNP TSC0049008
tcgtaacgattc

SEQ ID NO: 354288 - DNA, 12 bp, Artificial Sequence
  Oligonucleotide primer for the detection of SNP TSC0049009
tacaatcccaat

SEQ ID NO: 354289 - DNA, 12 bp, Artificial Sequence
  Oligonucleotide primer for the detection of SNP TSC0049009
tacgatcccaat

SEQ ID NO: 354290 - DNA, 12 bp, Artificial Sequence
  Oligonucleotide primer for the detection of SNP TSC0049009
tattagttggga

SEQ ID NO: 354291 - DNA, 12 bp, Artificial Sequence
  Oligonucleotide primer for the detection of SNP TSC0049010
ggaaggaaggta

SEQ ID NO: 354292 - DNA, 12 bp, Artificial Sequence
  Oligonucleotide primer for the detection of SNP TSC0049011
tagttgaaggaa

SEQ ID NO: 354293 - DNA, 12 bp, Artificial Sequence
  Oligonucleotide primer for the detection of SNP TSC0006759
aaatttttctat

SEQ ID NO: 354294 - DNA, 12 bp, Artificial Sequence
  Oligonucleotide primer for the detection of SNP TSC0006759
aagtagatttgg

SEQ ID NO: 354295 - DNA, 12 bp, Artificial Sequence
  Oligonucleotide primer for the detection of SNP TSC0049013
taataatatata

SEQ ID NO: 354296 - DNA, 12 bp, Artificial Sequence
  Oligonucleotide primer for the detection of SNP TSC0049013
aaaaggtaagta

SEQ ID NO: 354297 - DNA, 12 bp, Artificial Sequence
  Oligonucleotide primer for the detection of SNP TSC0049015
ctctaaactttt

SEQ ID NO: 354298 - DNA, 12 bp, Artificial Sequence
  Oligonucleotide primer for the detection of SNP TSC0049015
taatagttttaa

SEQ ID NO: 354299 - DNA, 12 bp, Artificial Sequence
  Oligonucleotide primer for the detection of SNP TSC0049015
taataacttcaa

SEQ ID NO: 354300 - DNA, 12 bp, Artificial Sequence
  Oligonucleotide primer for the detection of SNP TSC0049016
attaaatgtgag

SEQ ID NO: 354301 - DNA, 12 bp, Artificial Sequence
  Oligonucleotide primer for the detection of SNP TSC0049016
taaaaaaagatt

SEQ ID NO: 354302 - DNA, 12 bp, Artificial Sequence
  Oligonucleotide primer for the detection of SNP TSC0049017
ataaatcttttc

SEQ ID NO: 354303 - DNA, 12 bp, Artificial Sequence
  Oligonucleotide primer for the detection of SNP TSC0049017
aaaagtaaaaag

SEQ ID NO: 354304 - DNA, 12 bp, Artificial Sequence
  Oligonucleotide primer for the detection of SNP TSC0049022
cctcatcctcat

SEQ ID NO: 354305 - DNA, 12 bp, Artificial Sequence
  Oligonucleotide primer for the detection of SNP TSC0049022
aagaataataaa

SEQ ID NO: 354306 - DNA, 12 bp, Artificial Sequence
  Oligonucleotide primer for the detection of SNP TSC0049024
tactcaattact

SEQ ID NO: 354307 - DNA, 12 bp, Artificial Sequence
  Oligonucleotide primer for the detection of SNP TSC0049024
taatgtaaaata

SEQ ID NO: 354308 - DNA, 12 bp, Artificial Sequence
  Oligonucleotide primer for the detection of SNP TSC0049024
taacgtaaaata

SEQ ID NO: 354309 - DNA, 12 bp, Artificial Sequence
  Oligonucleotide primer for the detection of SNP TSC0049024
caacataaaata

SEQ ID NO: 354310 - DNA, 12 bp, Artificial Sequence
  Oligonucleotide primer for the detection of SNP TSC0049024
caacgtaaaata

SEQ ID NO: 354311 - DNA, 12 bp, Artificial Sequence
  Oligonucleotide primer for the detection of SNP TSC0049025
taaaattctact

SEQ ID NO: 354312 - DNA, 12 bp, Artificial Sequence
  Oligonucleotide primer for the detection of SNP TSC0049025
tgatttgttgga

SEQ ID NO: 354313 - DNA, 12 bp, Artificial Sequence
  Oligonucleotide primer for the detection of SNP TSC0049025
tgattcgttgga

SEQ ID NO: 354314 - DNA, 12 bp, Artificial Sequence
  Oligonucleotide primer for the detection of SNP TSC0049025
taattcattaaa

SEQ ID NO: 354315 - DNA, 12 bp, Artificial Sequence
  Oligonucleotide primer for the detection of SNP TSC0049025
taattcgttaaa

SEQ ID NO: 354316 - DNA, 12 bp, Artificial Sequence
  Oligonucleotide primer for the detection of SNP TSC0049028
tataataacacg

SEQ ID NO: 354317 - DNA, 12 bp, Artificial Sequence
  Oligonucleotide primer for the detection of SNP TSC0049028
tagattataggt

SEQ ID NO: 354318 - DNA, 12 bp, Artificial Sequence
  Oligonucleotide primer for the detection of SNP TSC0049028
taaactacaaac

SEQ ID NO: 354319 - DNA, 12 bp, Artificial Sequence
  Oligonucleotide primer for the detection of SNP TSC0049028
tgtggtggtatg

SEQ ID NO: 354320 - DNA, 12 bp, Artificial Sequence
  Oligonucleotide primer for the detection of SNP TSC0049028
tgtggtggtacg

SEQ ID NO: 354321 - DNA, 12 bp, Artificial Sequence
  Oligonucleotide primer for the detection of SNP TSC0049029
caaaatcacatc

SEQ ID NO: 354322 - DNA, 12 bp, Artificial Sequence
  Oligonucleotide primer for the detection of SNP TSC0049029
cgaaatcacatc

SEQ ID NO: 354323 - DNA, 12 bp, Artificial Sequence
  Oligonucleotide primer for the detection of SNP TSC0049030
ttaatctaaaac

SEQ ID NO: 354324 - DNA, 12 bp, Artificial Sequence
  Oligonucleotide primer for the detection of SNP TSC0049031
ccccataacatc

SEQ ID NO: 354325 - DNA, 12 bp, Artificial Sequence
  Oligonucleotide primer for the detection of SNP TSC0049031
ccccataacgtc

SEQ ID NO: 354326 - DNA, 12 bp, Artificial Sequence
  Oligonucleotide primer for the detection of SNP TSC0049031
tatatggagtta

SEQ ID NO: 354327 - DNA, 12 bp, Artificial Sequence
  Oligonucleotide primer for the detection of SNP TSC0049034
catcaaacttat

SEQ ID NO: 354328 - DNA, 12 bp, Artificial Sequence
  Oligonucleotide primer for the detection of SNP TSC0049034
tcatctaccata

SEQ ID NO: 354329 - DNA, 12 bp, Artificial Sequence
  Oligonucleotide primer for the detection of SNP TSC0049034
tattaggtttgt

SEQ ID NO: 354330 - DNA, 12 bp, Artificial Sequence
  Oligonucleotide primer for the detection of SNP TSC0049035
ctctttaactta

SEQ ID NO: 354331 - DNA, 12 bp, Artificial Sequence
  Oligonucleotide primer for the detection of SNP TSC0049035
gagtgggaggag

SEQ ID NO: 354332 - DNA, 12 bp, Artificial Sequence
  Oligonucleotide primer for the detection of SNP TSC0049035
gagcgggaggag

SEQ ID NO: 354333 - DNA, 12 bp, Artificial Sequence
  Oligonucleotide primer for the detection of SNP TSC0049038
ttctacctactc

SEQ ID NO: 354334 - DNA, 12 bp, Artificial Sequence
  Oligonucleotide primer for the detection of SNP TSC0049038
aaggaatgtagg

SEQ ID NO: 354335 - DNA, 12 bp, Artificial Sequence
  Oligonucleotide primer for the detection of SNP TSC0049039
acctcccatcaa

SEQ ID NO: 354336 - DNA, 12 bp, Artificial Sequence
  Oligonucleotide primer for the detection of SNP TSC0049039
caaccctcaacc

SEQ ID NO: 354337 - DNA, 12 bp, Artificial Sequence
  Oligonucleotide primer for the detection of SNP TSC0049040
aattattaatat

SEQ ID NO: 354338 - DNA, 12 bp, Artificial Sequence
  Oligonucleotide primer for the detection of SNP TSC0049040
caattattaata

SEQ ID NO: 354339 - DNA, 12 bp, Artificial Sequence
  Oligonucleotide primer for the detection of SNP TSC0049040
aggtagatgata

SEQ ID NO: 354340 - DNA, 12 bp, Artificial Sequence
  Oligonucleotide primer for the detection of SNP TSC0049041
atttcacatttc

SEQ ID NO: 354341 - DNA, 12 bp, Artificial Sequence
  Oligonucleotide primer for the detection of SNP TSC0049042
aatgattttatt

SEQ ID NO: 354342 - DNA, 12 bp, Artificial Sequence
  Oligonucleotide primer for the detection of SNP TSC0049042
aataactttatt

SEQ ID NO: 354343 - DNA, 12 bp, Artificial Sequence
  Oligonucleotide primer for the detection of SNP TSC0049042
agtatttaataa

SEQ ID NO: 354344 - DNA, 12 bp, Artificial Sequence
  unsure (3): Oligonucleotide primer for the detection of SNP TSC0049043
atnacatatttt

SEQ ID NO: 354345 - DNA, 12 bp, Artificial Sequence
  Oligonucleotide primer for the detection of SNP TSC0049043
ttggttatttta

SEQ ID NO: 354346 - DNA, 12 bp, Artificial Sequence
  Oligonucleotide primer for the detection of SNP TSC0049044
aacctaccaaac

SEQ ID NO: 354347 - DNA, 12 bp, Artificial Sequence
  Oligonucleotide primer for the detection of SNP TSC0049045
actctaactcat

SEQ ID NO: 354348 - DNA, 12 bp, Artificial Sequence
  Oligonucleotide primer for the detection of SNP TSC0049045
attttttgggta

SEQ ID NO: 354349 - DNA, 12 bp, Artificial Sequence
  Oligonucleotide primer for the detection of SNP TSC0049048
attattaaaaat

SEQ ID NO: 354350 - DNA, 12 bp, Artificial Sequence
  Oligonucleotide primer for the detection of SNP TSC0049048
tatttaatatga

SEQ ID NO: 354351 - DNA, 12 bp, Artificial Sequence
  Oligonucleotide primer for the detection of SNP TSC0004813
caaataacaatt

SEQ ID NO: 354352 - DNA, 12 bp, Artificial Sequence
  Oligonucleotide primer for the detection of SNP TSC0004813
aattatttaaca

SEQ ID NO: 354353 - DNA, 12 bp, Artificial Sequence
  Oligonucleotide primer for the detection of SNP TSC0004813
taagtgataatt

SEQ ID NO: 354354 - DNA, 12 bp, Artificial Sequence
  Oligonucleotide primer for the detection of SNP TSC0049049
tcacctataaaa

SEQ ID NO: 354355 - DNA, 12 bp, Artificial Sequence
  Oligonucleotide primer for the detection of SNP TSC0049049
tcgcctataaaa

SEQ ID NO: 354356 - DNA, 12 bp, Artificial Sequence
  Oligonucleotide primer for the detection of SNP TSC0049049
ttttattagaag

SEQ ID NO: 354357 - DNA, 12 bp, Artificial Sequence
  Oligonucleotide primer for the detection of SNP TSC0049049
cttcattaaaaa

SEQ ID NO: 354358 - DNA, 12 bp, Artificial Sequence
  Oligonucleotide primer for the detection of SNP TSC0049049
attgtttgtaaa

SEQ ID NO: 354359 - DNA, 12 bp, Artificial Sequence
  Oligonucleotide primer for the detection of SNP TSC0049049
atcgtttgtaaa

SEQ ID NO: 354360 - DNA, 12 bp, Artificial Sequence
  Oligonucleotide primer for the detection of SNP TSC0049050
actatctataaa

SEQ ID NO: 354361 - DNA, 12 bp, Artificial Sequence
  Oligonucleotide primer for the detection of SNP TSC0049050
gggttcgttttt

SEQ ID NO: 354362 - DNA, 12 bp, Artificial Sequence
  Oligonucleotide primer for the detection of SNP TSC0049050
aaactcacttcc

SEQ ID NO: 354363 - DNA, 12 bp, Artificial Sequence
  Oligonucleotide primer for the detection of SNP TSC0049050
aaactcgcttcc

SEQ ID NO: 354364 - DNA, 12 bp, Artificial Sequence
  Oligonucleotide primer for the detection of SNP TSC0049050
gttgtttgtaaa

SEQ ID NO: 354365 - DNA, 12 bp, Artificial Sequence
  Oligonucleotide primer for the detection of SNP TSC0049051
ttacaaacaacc

SEQ ID NO: 354366 - DNA, 12 bp, Artificial Sequence
  Oligonucleotide primer for the detection of SNP TSC0049051
tataatgagaag

SEQ ID NO: 354367 - DNA, 12 bp, Artificial Sequence
  Oligonucleotide primer for the detection of SNP TSC0049052
aaaaaaaaatcg

SEQ ID NO: 354368 - DNA, 12 bp, Artificial Sequence
  Oligonucleotide primer for the detection of SNP TSC0049052
accctccctact

SEQ ID NO: 354369 - DNA, 12 bp, Artificial Sequence
  Oligonucleotide primer for the detection of SNP TSC0049052
ggaaaggagttg

SEQ ID NO: 354370 - DNA, 12 bp, Artificial Sequence
  Oligonucleotide primer for the detection of SNP TSC0049052
ggaaaggagtcg

SEQ ID NO: 354371 - DNA, 12 bp, Artificial Sequence
  Oligonucleotide primer for the detection of SNP TSC0049053
ccacccacccca

SEQ ID NO: 354372 - DNA, 12 bp, Artificial Sequence
  Oligonucleotide primer for the detection of SNP TSC0049053
ccacccaccccg

SEQ ID NO: 354373 - DNA, 12 bp, Artificial Sequence
  Oligonucleotide primer for the detection of SNP TSC0049053
ttgtatggaatt

SEQ ID NO: 354374 - DNA, 12 bp, Artificial Sequence
  Oligonucleotide primer for the detection of SNP TSC0049053
ttgtacggaatt

SEQ ID NO: 354375 - DNA, 12 bp, Artificial Sequence
  Oligonukleotid-Primer
ctacacaaaacc

SEQ ID NO: 354376 - DNA, 12 bp, Artificial Sequence
  Oligonucleotide primer for the detection of SNP TSC0049053
ctacacgaaacc

SEQ ID NO: 354377 - DNA, 12 bp, Artificial Sequence
  Oligonucleotide primer for the detection of SNP TSC0049054
ctataacaaaat

SEQ ID NO: 354378 - DNA, 12 bp, Artificial Sequence
  Oligonucleotide primer for the detection of SNP TSC0049054
tggagaggggat

SEQ ID NO: 354379 - DNA, 12 bp, Artificial Sequence
  Oligonucleotide primer for the detection of SNP TSC0049054
cggagaggggat

SEQ ID NO: 354380 - DNA, 12 bp, Artificial Sequence
  Oligonucleotide primer for the detection of SNP TSC0049054
ttgtgataagat

SEQ ID NO: 354381 - DNA, 12 bp, Artificial Sequence
  Oligonucleotide primer for the detection of SNP TSC0049055
tctcaattttct

SEQ ID NO: 354382 - DNA, 12 bp, Artificial Sequence
  Oligonucleotide primer for the detection of SNP TSC0049055
tattagatagta

SEQ ID NO: 354383 - DNA, 12 bp, Artificial Sequence
  Oligonucleotide primer for the detection of SNP TSC0049056
gaagagagtaaa

SEQ ID NO: 354384 - DNA, 12 bp, Artificial Sequence
  Oligonucleotide primer for the detection of SNP TSC0049056
aagagtttatgg

SEQ ID NO: 354385 - DNA, 12 bp, Artificial Sequence
  Oligonucleotide primer for the detection of SNP TSC0049057
aaacaaacccat

SEQ ID NO: 354386 - DNA, 12 bp, Artificial Sequence
  Oligonucleotide primer for the detection of SNP TSC0049057
ttataaaaaaga

SEQ ID NO: 354387 - DNA, 12 bp, Artificial Sequence
  Oligonucleotide primer for the detection of SNP TSC0049058
ataaacatcctt

SEQ ID NO: 354388 - DNA, 12 bp, Artificial Sequence
  Oligonucleotide primer for the detection of SNP TSC0049059
tatatttagtag

SEQ ID NO: 354389 - DNA, 12 bp, Artificial Sequence
  Oligonucleotide primer for the detection of SNP TSC0006423
ttccaaaacctt

SEQ ID NO: 354390 - DNA, 12 bp, Artificial Sequence
  Oligonucleotide primer for the detection of SNP TSC0006423
ttccgaaacctt

SEQ ID NO: 354391 - DNA, 12 bp, Artificial Sequence
  Oligonucleotide primer for the detection of SNP TSC0006423
tttgtgaatttg

SEQ ID NO: 354392 - DNA, 12 bp, Artificial Sequence
  Oligonucleotide primer for the detection of SNP TSC0049060
atatacaatatt

SEQ ID NO: 354393 - DNA, 12 bp, Artificial Sequence
  Oligonucleotide primer for the detection of SNP TSC0049061
ccattatatacc

SEQ ID NO: 354394 - DNA, 12 bp, Artificial Sequence
  Oligonucleotide primer for the detection of SNP TSC0049061
aaatatataatg

SEQ ID NO: 354395 - DNA, 12 bp, Artificial Sequence
  Oligonukleotid-Primer
tttataattcta

SEQ ID NO: 354396 - DNA, 12 bp, Artificial Sequence
  Oligonucleotide primer for the detection of SNP TSC0049065
tggttggagtat

SEQ ID NO: 354397 - DNA, 12 bp, Artificial Sequence
  Oligonucleotide primer for the detection of SNP TSC0049065
ttgtggttttgt

SEQ ID NO: 354398 - DNA, 12 bp, Artificial Sequence
  Oligonucleotide primer for the detection of SNP TSC0049066
atacccttcacc

SEQ ID NO: 354399 - DNA, 12 bp, Artificial Sequence
  Oligonukleotid-Primer
atcatatcttct

SEQ ID NO: 354400 - DNA, 12 bp, Artificial Sequence
  Oligonucleotide primer for the detection of SNP TSC0049067
tagtttatagaa

SEQ ID NO: 354401 - DNA, 12 bp, Artificial Sequence
  Oligonucleotide primer for the detection of SNP TSC0049068
ttcaatcacctc

SEQ ID NO: 354402 - DNA, 12 bp, Artificial Sequence
  Oligonucleotide primer for the detection of SNP TSC0049070
cccctaccactc

SEQ ID NO: 354403 - DNA, 12 bp, Artificial Sequence
  Oligonucleotide primer for the detection of SNP TSC0049070
ttattgaatgta

SEQ ID NO: 354404 - DNA, 12 bp, Artificial Sequence
  Oligonucleotide primer for the detection of SNP TSC0049071
tactcattttaa

SEQ ID NO: 354405 - DNA, 12 bp, Artificial Sequence
  Oligonucleotide primer for the detection of SNP TSC0049071
tccattaaccca

SEQ ID NO: 354406 - DNA, 12 bp, Artificial Sequence
  Oligonucleotide primer for the detection of SNP TSC0049071
tgtttattttga

SEQ ID NO: 354407 - DNA, 12 bp, Artificial Sequence
  Oligonucleotide primer for the detection of SNP TSC0049072
acaatattattt

SEQ ID NO: 354408 - DNA, 12 bp, Artificial Sequence
  Oligonucleotide primer for the detection of SNP TSC0000385
tctttataattt

SEQ ID NO: 354409 - DNA, 12 bp, Artificial Sequence
  Oligonucleotide primer for the detection of SNP TSC0000385
agtttataagta

SEQ ID NO: 354410 - DNA, 12 bp, Artificial Sequence
  Oligonucleotide primer for the detection of SNP TSC0000386
attcaaaaataa

SEQ ID NO: 354411 - DNA, 12 bp, Artificial Sequence
  Oligonucleotide primer for the detection of SNP TSC0000386
ttttaggttaat

SEQ ID NO: 354412 - DNA, 12 bp, Artificial Sequence
  Oligonucleotide primer for the detection of SNP TSC0000386
ccctaaattaat

SEQ ID NO: 354413 - DNA, 12 bp, Artificial Sequence
  Oligonucleotide primer for the detection of SNP TSC0000386
atttaaagataa

SEQ ID NO: 354414 - DNA, 12 bp, Artificial Sequence
  Oligonucleotide primer for the detection of SNP TSC0049077
tttatataaaaa

SEQ ID NO: 354415 - DNA, 12 bp, Artificial Sequence
  Oligonucleotide primer for the detection of SNP TSC0049077
taatgtttgtgt

SEQ ID NO: 354416 - DNA, 12 bp, Artificial Sequence
  Oligonucleotide primer for the detection of SNP TSC0049077
aatgatttatgt

SEQ ID NO: 354417 - DNA, 12 bp, Artificial Sequence
  Oligonucleotide primer for the detection of SNP TSC0049078
tatttttctcta

SEQ ID NO: 354418 - DNA, 12 bp, Artificial Sequence
  Oligonucleotide primer for the detection of SNP TSC0049078
gattgttttaaa

SEQ ID NO: 354419 - DNA, 12 bp, Artificial Sequence
  Oligonucleotide primer for the detection of SNP TSC0049078
aattactttaaa

SEQ ID NO: 354420 - DNA, 12 bp, Artificial Sequence
  Oligonucleotide primer for the detection of SNP TSC0049079
caatatactaaa

SEQ ID NO: 354421 - DNA, 12 bp, Artificial Sequence
  Oligonucleotide primer for the detection of SNP TSC0049079
cgatatactaaa

SEQ ID NO: 354422 - DNA, 12 bp, Artificial Sequence
  Oligonucleotide primer for the detection of SNP TSC0049079
tatatatgaagt

SEQ ID NO: 354423 - DNA, 12 bp, Artificial Sequence
  Oligonukleotid-Primer
tatatatgaagc

SEQ ID NO: 354424 - DNA, 12 bp, Artificial Sequence
  Oligonucleotide primer for the detection of SNP TSC0049079
tgatgtgttaaa

SEQ ID NO: 354425 - DNA, 12 bp, Artificial Sequence
  Oligonucleotide primer for the detection of SNP TSC0049079
cgatgtgttaaa

SEQ ID NO: 354426 - DNA, 12 bp, Artificial Sequence
  Oligonucleotide primer for the detection of SNP TSC0049080
cccaaaccctct

SEQ ID NO: 354427 - DNA, 12 bp, Artificial Sequence
  Oligonucleotide primer for the detection of SNP TSC0049080
cccgaaccctct

SEQ ID NO: 354428 - DNA, 12 bp, Artificial Sequence
  Oligonucleotide primer for the detection of SNP TSC0049080
tgtgttattaag

SEQ ID NO: 354429 - DNA, 12 bp, Artificial Sequence
  Oligonucleotide primer for the detection of SNP TSC0049081
atctatcaataa

SEQ ID NO: 354430 - DNA, 12 bp, Artificial Sequence
  Oligonucleotide primer for the detection of SNP TSC0049081
aatggatagatt

SEQ ID NO: 354431 - DNA, 12 bp, Artificial Sequence
  Oligonucleotide primer for the detection of SNP TSC0049081
atttattaataa

SEQ ID NO: 354432 - DNA, 12 bp, Artificial Sequence
  Oligonucleotide primer for the detection of SNP TSC0049082
aaataaatcatt

SEQ ID NO: 354433 - DNA, 12 bp, Artificial Sequence
  Oligonucleotide primer for the detection of SNP TSC0049082
aatgatttatta

SEQ ID NO: 354434 - DNA, 12 bp, Artificial Sequence
  Oligonucleotide primer for the detection of SNP TSC0049083
tacaattaaaaa

SEQ ID NO: 354435 - DNA, 12 bp, Artificial Sequence
  Oligonucleotide primer for the detection of SNP TSC0049083
tttagttatgat

SEQ ID NO: 354436 - DNA, 12 bp, Artificial Sequence
  Oligonucleotide primer for the detection of SNP TSC0049083
cttaaccataat

SEQ ID NO: 354437 - DNA, 12 bp, Artificial Sequence
  Oligonucleotide primer for the detection of SNP TSC0049083
tgtagttgaaag

SEQ ID NO: 354438 - DNA, 12 bp, Artificial Sequence
  Oligonucleotide primer for the detection of SNP TSC0004990
ttttaaattgga

SEQ ID NO: 354439 - DNA, 12 bp, Artificial Sequence
  Oligonucleotide primer for the detection of SNP TSC0049085
tattttatatat

SEQ ID NO: 354440 - DNA, 12 bp, Artificial Sequence
  Oligonucleotide primer for the detection of SNP TSC0049085
cttcatacataa

SEQ ID NO: 354441 - DNA, 12 bp, Artificial Sequence
  Oligonucleotide primer for the detection of SNP TSC0049086
atagattagtag

SEQ ID NO: 354442 - DNA, 12 bp, Artificial Sequence
  Oligonucleotide primer for the detection of SNP TSC0049086
ataaattaacaa

SEQ ID NO: 354443 - DNA, 12 bp, Artificial Sequence
  Oligonucleotide primer for the detection of SNP TSC0049086
agaaataaaaat

SEQ ID NO: 354444 - DNA, 12 bp, Artificial Sequence
  Oligonucleotide primer for the detection of SNP TSC0049088
ttaaaaaagaag

SEQ ID NO: 354445 - DNA, 12 bp, Artificial Sequence
  Oligonucleotide primer for the detection of SNP TSC0049089
acataccaaaac

SEQ ID NO: 354446 - DNA, 12 bp, Artificial Sequence
  Oligonucleotide primer for the detection of SNP TSC0049090
caatctacactt

SEQ ID NO: 354447 - DNA, 12 bp, Artificial Sequence
  Oligonucleotide primer for the detection of SNP TSC0049090
taggttatttgg

SEQ ID NO: 354448 - DNA, 12 bp, Artificial Sequence
  Oligonucleotide primer for the detection of SNP TSC0049091
ttgtggattata

SEQ ID NO: 354449 - DNA, 12 bp, Artificial Sequence
  Oligonucleotide primer for the detection of SNP TSC0049092
gtttatttttat

SEQ ID NO: 354450 - DNA, 12 bp, Artificial Sequence
  Oligonucleotide primer for the detection of SNP TSC0049092
gtttatttttac

SEQ ID NO: 354451 - DNA, 12 bp, Artificial Sequence
  Oligonucleotide primer for the detection of SNP TSC0049092
atccactttcac

SEQ ID NO: 354452 - DNA, 12 bp, Artificial Sequence
  Oligonucleotide primer for the detection of SNP TSC0049092
gagttagtgagt

SEQ ID NO: 354453 - DNA, 12 bp, Artificial Sequence
  Oligonucleotide primer for the detection of SNP TSC0008949
atttgtttatag

SEQ ID NO: 354454 - DNA, 12 bp, Artificial Sequence
  Oligonucleotide primer for the detection of SNP TSC0008949
atctatctacaa

SEQ ID NO: 354455 - DNA, 12 bp, Artificial Sequence
  Oligonucleotide primer for the detection of SNP TSC0008949
aatttttaaaag

SEQ ID NO: 354456 - DNA, 12 bp, Artificial Sequence
  Oligonucleotide primer for the detection of SNP TSC0008950
tattccattcca

SEQ ID NO: 354457 - DNA, 12 bp, Artificial Sequence
  Oligonucleotide primer for the detection of SNP TSC0008950
tattccgttcca

SEQ ID NO: 354458 - DNA, 12 bp, Artificial Sequence
  Oligonucleotide primer for the detection of SNP TSC0008950
tattataggtta

SEQ ID NO: 354459 - DNA, 12 bp, Artificial Sequence
  Oligonucleotide primer for the detection of SNP TSC0008950
taccataaatca

SEQ ID NO: 354460 - DNA, 12 bp, Artificial Sequence
  Oligonucleotide primer for the detection of SNP TSC0008950
tatttcgtttta

SEQ ID NO: 354461 - DNA, 12 bp, Artificial Sequence
  Oligonucleotide primer for the detection of SNP TSC0049096
tatatctaattt

SEQ ID NO: 354462 - DNA, 12 bp, Artificial Sequence
  Oligonucleotide primer for the detection of SNP TSC0049096
attaattagata

SEQ ID NO: 354463 - DNA, 12 bp, Artificial Sequence
  Oligonucleotide primer for the detection of SNP TSC0049097
ttttgagttgaa

SEQ ID NO: 354464 - DNA, 12 bp, Artificial Sequence
  Oligonucleotide primer for the detection of SNP TSC0049097
ttctaaattaaa

SEQ ID NO: 354465 - DNA, 12 bp, Artificial Sequence
  Oligonucleotide primer for the detection of SNP TSC0049097
gatttaattgaa

SEQ ID NO: 354466 - DNA, 12 bp, Artificial Sequence
  Oligonucleotide primer for the detection of SNP TSC0008362
caaaaccttaac

SEQ ID NO: 354467 - DNA, 12 bp, Artificial Sequence
  Oligonucleotide primer for the detection of SNP TSC0008362
ttatatattata

SEQ ID NO: 354468 - DNA, 12 bp, Artificial Sequence
  Oligonucleotide primer for the detection of SNP TSC0049100
aaaagagtttta

SEQ ID NO: 354469 - DNA, 12 bp, Artificial Sequence
  Oligonucleotide primer for the detection of SNP TSC0049101
caaaatataacc

SEQ ID NO: 354470 - DNA, 12 bp, Artificial Sequence
  Oligonucleotide primer for the detection of SNP TSC0049101
cgaaatataacc

SEQ ID NO: 354471 - DNA, 12 bp, Artificial Sequence
  Oligonucleotide primer for the detection of SNP TSC0049101
attttagtaaaa

SEQ ID NO: 354472 - DNA, 12 bp, Artificial Sequence
  Oligonucleotide primer for the detection of SNP TSC0049101
attccaacaaaa

SEQ ID NO: 354473 - DNA, 12 bp, Artificial Sequence
  Oligonucleotide primer for the detection of SNP TSC0049101
tgggatgtagtt

SEQ ID NO: 354474 - DNA, 12 bp, Artificial Sequence
  Oligonucleotide primer for the detection of SNP TSC0049101
cgggatgtagtt

SEQ ID NO: 354475 - DNA, 12 bp, Artificial Sequence
  Oligonucleotide primer for the detection of SNP TSC0049102
ctataaatttcc

SEQ ID NO: 354476 - DNA, 12 bp, Artificial Sequence
  Oligonucleotide primer for the detection of SNP TSC0049102
tggatatgatta

SEQ ID NO: 354477 - DNA, 12 bp, Artificial Sequence
  Oligonucleotide primer for the detection of SNP TSC0049103
acctataacctt

SEQ ID NO: 354478 - DNA, 12 bp, Artificial Sequence
  Oligonucleotide primer for the detection of SNP TSC0049103
tattagtattaa

SEQ ID NO: 354479 - DNA, 12 bp, Artificial Sequence
  Oligonucleotide primer for the detection of SNP TSC0006989
attctctaaccc

SEQ ID NO: 354480 - DNA, 12 bp, Artificial Sequence
  Oligonucleotide primer for the detection of SNP TSC0006989
gttctctaaccc

SEQ ID NO: 354481 - DNA, 12 bp, Artificial Sequence
  Oligonucleotide primer for the detection of SNP TSC0006989
gagatggataga

SEQ ID NO: 354482 - DNA, 12 bp, Artificial Sequence
  Oligonucleotide primer for the detection of SNP TSC0005075
aacttatatata

SEQ ID NO: 354483 - DNA, 12 bp, Artificial Sequence
  Oligonucleotide primer for the detection of SNP TSC0005075
acacatacacat

SEQ ID NO: 354484 - DNA, 12 bp, Artificial Sequence
  Oligonucleotide primer for the detection of SNP TSC0005075
agtttgtgtgtg

SEQ ID NO: 354485 - DNA, 12 bp, Artificial Sequence
  Oligonucleotide primer for the detection of SNP TSC0005076
aatcaccctacc

SEQ ID NO: 354486 - DNA, 12 bp, Artificial Sequence
  Oligonucleotide primer for the detection of SNP TSC0005076
tttaacccctaa

SEQ ID NO: 354487 - DNA, 12 bp, Artificial Sequence
  Oligonucleotide primer for the detection of SNP TSC0049104
tttccaaaaata

SEQ ID NO: 354488 - DNA, 12 bp, Artificial Sequence
  Oligonucleotide primer for the detection of SNP TSC0049104
atataaatgtat

SEQ ID NO: 354489 - DNA, 12 bp, Artificial Sequence
  Oligonucleotide primer for the detection of SNP TSC0049105
tcaaatcctaac

SEQ ID NO: 354490 - DNA, 12 bp, Artificial Sequence
  Oligonucleotide primer for the detection of SNP TSC0049106
tcaaaaacttat

SEQ ID NO: 354491 - DNA, 12 bp, Artificial Sequence
  Oligonucleotide primer for the detection of SNP TSC0049109
attgttttgggt

SEQ ID NO: 354492 - DNA, 12 bp, Artificial Sequence
  Oligonucleotide primer for the detection of SNP TSC0049110
ttccccaaaact

SEQ ID NO: 354493 - DNA, 12 bp, Artificial Sequence
  Oligonucleotide primer for the detection of SNP TSC0049110
agagttttaatg

SEQ ID NO: 354494 - DNA, 12 bp, Artificial Sequence
  Oligonucleotide primer for the detection of SNP TSC0049110
agagttttaacg

SEQ ID NO: 354495 - DNA, 12 bp, Artificial Sequence
  Oligonucleotide primer for the detection of SNP TSC0049111
caacctctcaaa

SEQ ID NO: 354496 - DNA, 12 bp, Artificial Sequence
  Oligonucleotide primer for the detection of SNP TSC0049112
tcctcactaact

SEQ ID NO: 354497 - DNA, 12 bp, Artificial Sequence
  Oligonucleotide primer for the detection of SNP TSC0049113
taaaaacattaa

SEQ ID NO: 354498 - DNA, 12 bp, Artificial Sequence
  Oligonucleotide primer for the detection of SNP TSC0049113
ctcaataatcta

SEQ ID NO: 354499 - DNA, 12 bp, Artificial Sequence
  Oligonucleotide primer for the detection of SNP TSC0049113
ttgaaagtatta

SEQ ID NO: 354500 - DNA, 12 bp, Artificial Sequence
  Oligonucleotide primer for the detection of SNP TSC0049114
aaaaggtttatg

SEQ ID NO: 354501 - DNA, 12 bp, Artificial Sequence
  Oligonucleotide primer for the detection of SNP TSC0049114
aaaaaattcata

SEQ ID NO: 354502 - DNA, 12 bp, Artificial Sequence
  Oligonucleotide primer for the detection of SNP TSC0049114
ttattgaaattt

SEQ ID NO: 354503 - DNA, 12 bp, Artificial Sequence
  Oligonucleotide primer for the detection of SNP TSC0009330
tcaaaataattt

SEQ ID NO: 354504 - DNA, 12 bp, Artificial Sequence
  Oligonucleotide primer for the detection of SNP TSC0009330
ctaactatctca

SEQ ID NO: 354505 - DNA, 12 bp, Artificial Sequence
  Oligonucleotide primer for the detection of SNP TSC0009330
gaataatttttt

SEQ ID NO: 354506 - DNA, 12 bp, Artificial Sequence
  Oligonucleotide primer for the detection of SNP TSC0009330
gaataatttttc

SEQ ID NO: 354507 - DNA, 12 bp, Artificial Sequence
  Oligonucleotide primer for the detection of SNP TSC0009331
cgaaaaattatt

SEQ ID NO: 354508 - DNA, 12 bp, Artificial Sequence
  Oligonucleotide primer for the detection of SNP TSC0009331
gggaagaagtta

SEQ ID NO: 354509 - DNA, 12 bp, Artificial Sequence
  Oligonucleotide primer for the detection of SNP TSC0049115
aacataacgaaa

SEQ ID NO: 354510 - DNA, 12 bp, Artificial Sequence
  Oligonucleotide primer for the detection of SNP TSC0049116
gaaaccccatct

SEQ ID NO: 354511 - DNA, 12 bp, Artificial Sequence
  Oligonucleotide primer for the detection of SNP TSC0006754
tttcccatacat

SEQ ID NO: 354512 - DNA, 12 bp, Artificial Sequence
  Oligonucleotide primer for the detection of SNP TSC0006754
gttgagtaaata

SEQ ID NO: 354513 - DNA, 12 bp, Artificial Sequence
  Oligonucleotide primer for the detection of SNP TSC0006755
aaaatactacac

SEQ ID NO: 354514 - DNA, 12 bp, Artificial Sequence
  Oligonucleotide primer for the detection of SNP TSC0006755
ttatttaggtga

SEQ ID NO: 354515 - DNA, 12 bp, Artificial Sequence
  Oligonucleotide primer for the detection of SNP TSC0049117
aaaaatcaaaca

SEQ ID NO: 354516 - DNA, 12 bp, Artificial Sequence
  Oligonucleotide primer for the detection of SNP TSC0049117
gttgtagaattt

SEQ ID NO: 354517 - DNA, 12 bp, Artificial Sequence
  Oligonucleotide primer for the detection of SNP TSC0049117
tcaattacaaaa

SEQ ID NO: 354518 - DNA, 12 bp, Artificial Sequence
  Oligonucleotide primer for the detection of SNP TSC0049117
aaagaattaagt

SEQ ID NO: 354519 - DNA, 12 bp, Artificial Sequence
  Oligonucleotide primer for the detection of SNP TSC0049118
aatacaataatt

SEQ ID NO: 354520 - DNA, 12 bp, Artificial Sequence
  Oligonucleotide primer for the detection of SNP TSC0049118
gtatttattgta

SEQ ID NO: 354521 - DNA, 12 bp, Artificial Sequence
  Oligonucleotide primer for the detection of SNP TSC0049119
attttagtgggt

SEQ ID NO: 354522 - DNA, 12 bp, Artificial Sequence
  Oligonucleotide primer for the detection of SNP TSC0049119
attttagcgggt

SEQ ID NO: 354523 - DNA, 12 bp, Artificial Sequence
  Oligonucleotide primer for the detection of SNP TSC0049119
attgggtttggg

SEQ ID NO: 354524 - DNA, 12 bp, Artificial Sequence
  Oligonucleotide primer for the detection of SNP TSC0049120
tagtgagtttga

SEQ ID NO: 354525 - DNA, 12 bp, Artificial Sequence
  Oligonucleotide primer for the detection of SNP TSC0005910
gtttggtttggg

SEQ ID NO: 354526 - DNA, 12 bp, Artificial Sequence
  Oligonucleotide primer for the detection of SNP TSC0005910
acctaacctaaa

SEQ ID NO: 354527 - DNA, 12 bp, Artificial Sequence
  Oligonucleotide primer for the detection of SNP TSC0005910
gtagggttgggt

SEQ ID NO: 354528 - DNA, 12 bp, Artificial Sequence
  Oligonucleotide primer for the detection of SNP TSC0005785
aaatttcaccat

SEQ ID NO: 354529 - DNA, 12 bp, Artificial Sequence
  Oligonucleotide primer for the detection of SNP TSC0049124
atacatattttt

SEQ ID NO: 354530 - DNA, 12 bp, Artificial Sequence
  Oligonucleotide primer for the detection of SNP TSC0049124
ttataatagtta

SEQ ID NO: 354531 - DNA, 12 bp, Artificial Sequence
  Oligonucleotide primer for the detection of SNP TSC0049125
ctacctttccct

SEQ ID NO: 354532 - DNA, 12 bp, Artificial Sequence
  Oligonucleotide primer for the detection of SNP TSC0049125
ttagtatgttaa

SEQ ID NO: 354533 - DNA, 12 bp, Artificial Sequence
  Oligonucleotide primer for the detection of SNP TSC0049126
ttaatttaatct

SEQ ID NO: 354534 - DNA, 12 bp, Artificial Sequence
  Oligonucleotide primer for the detection of SNP TSC0049126
ttattagtagta

SEQ ID NO: 354535 - DNA, 12 bp, Artificial Sequence
  Oligonucleotide primer for the detection of SNP TSC0049127
atatataaaatt

SEQ ID NO: 354536 - DNA, 12 bp, Artificial Sequence
  Oligonucleotide primer for the detection of SNP TSC0049127
aattattgttat

SEQ ID NO: 354537 - DNA, 12 bp, Artificial Sequence
  Oligonucleotide primer for the detection of SNP TSC0049127
caatcattacta

SEQ ID NO: 354538 - DNA, 12 bp, Artificial Sequence
  Oligonucleotide primer for the detection of SNP TSC0049127
gtatatgaaatt

SEQ ID NO: 354539 - DNA, 12 bp, Artificial Sequence
  Oligonucleotide primer for the detection of SNP TSC0049128
ataaatcaatca

SEQ ID NO: 354540 - DNA, 12 bp, Artificial Sequence
  Oligonucleotide primer for the detection of SNP TSC0049128
atctattcaata

SEQ ID NO: 354541 - DNA, 12 bp, Artificial Sequence
  Oligonucleotide primer for the detection of SNP TSC0049128
atagattaatta

SEQ ID NO: 354542 - DNA, 12 bp, Artificial Sequence
  Oligonucleotide primer for the detection of SNP TSC0049129
tgtgtaattttg

SEQ ID NO: 354543 - DNA, 12 bp, Artificial Sequence
  Oligonucleotide primer for the detection of SNP TSC0049129
tgtgtaatttcg

SEQ ID NO: 354544 - DNA, 12 bp, Artificial Sequence
  Oligonucleotide primer for the detection of SNP TSC0049130
tggagaagagga

SEQ ID NO: 354545 - DNA, 12 bp, Artificial Sequence
  Oligonucleotide primer for the detection of SNP TSC0007126
tcaacacaaata

SEQ ID NO: 354546 - DNA, 12 bp, Artificial Sequence
  Oligonucleotide primer for the detection of SNP TSC0007126
ttgtggagggag

SEQ ID NO: 354547 - DNA, 12 bp, Artificial Sequence
  Oligonucleotide primer for the detection of SNP TSC0007126
tagtataagtgt

SEQ ID NO: 354548 - DNA, 12 bp, Artificial Sequence
  Oligonucleotide primer for the detection of SNP TSC0049134
atcaacctacct

SEQ ID NO: 354549 - DNA, 12 bp, Artificial Sequence
  Oligonucleotide primer for the detection of SNP TSC0009781
cttttaaatttt

SEQ ID NO: 354550 - DNA, 12 bp, Artificial Sequence
  Oligonucleotide primer for the detection of SNP TSC0049135
cataaactctaa

SEQ ID NO: 354551 - DNA, 12 bp, Artificial Sequence
  Oligonucleotide primer for the detection of SNP TSC0049135
taaagagttaat

SEQ ID NO: 354552 - DNA, 12 bp, Artificial Sequence
  Oligonucleotide primer for the detection of SNP TSC0049135
tataggttttga

SEQ ID NO: 354553 - DNA, 12 bp, Artificial Sequence
  Oligonucleotide primer for the detection of SNP TSC0049136
tataatcttaac

SEQ ID NO: 354554 - DNA, 12 bp, Artificial Sequence
  Oligonucleotide primer for the detection of SNP TSC0049136
gattaaaaaata

SEQ ID NO: 354555 - DNA, 12 bp, Artificial Sequence
  Oligonucleotide primer for the detection of SNP TSC0049137
aggagttgaaga

SEQ ID NO: 354556 - DNA, 12 bp, Artificial Sequence
  Oligonucleotide primer for the detection of SNP TSC0049138
acgaaataaaaa

SEQ ID NO: 354557 - DNA, 12 bp, Artificial Sequence
  Oligonucleotide primer for the detection of SNP TSC0049138
ttttttaggtag

SEQ ID NO: 354558 - DNA, 12 bp, Artificial Sequence
  Oligonucleotide primer for the detection of SNP TSC0049138
ttctccaaacaa

SEQ ID NO: 354559 - DNA, 12 bp, Artificial Sequence
  Oligonucleotide primer for the detection of SNP TSC0049138
atggagtgagaa

SEQ ID NO: 354560 - DNA, 12 bp, Artificial Sequence
  Oligonucleotide primer for the detection of SNP TSC0049138
acggagtgagaa

SEQ ID NO: 354561 - DNA, 12 bp, Artificial Sequence
  Oligonucleotide primer for the detection of SNP TSC0049140
aataaatttcat

SEQ ID NO: 354562 - DNA, 12 bp, Artificial Sequence
  Oligonucleotide primer for the detection of SNP TSC0049140
attatttttaaa

SEQ ID NO: 354563 - DNA, 12 bp, Artificial Sequence
  Oligonucleotide primer for the detection of SNP TSC0049141
catctatacact

SEQ ID NO: 354564 - DNA, 12 bp, Artificial Sequence
  Oligonucleotide primer for the detection of SNP TSC0049141
tgttgagtttgg

SEQ ID NO: 354565 - DNA, 12 bp, Artificial Sequence
  Oligonucleotide primer for the detection of SNP TSC0049146
aattcctttaac

SEQ ID NO: 354566 - DNA, 12 bp, Artificial Sequence
  Oligonucleotide primer for the detection of SNP TSC0049146
taagatatatga

SEQ ID NO: 354567 - DNA, 12 bp, Artificial Sequence
  Oligonucleotide primer for the detection of SNP TSC0049147
acttcatatatc

SEQ ID NO: 354568 - DNA, 12 bp, Artificial Sequence
  Oligonucleotide primer for the detection of SNP TSC0049150
aagttgtttttt

SEQ ID NO: 354569 - DNA, 12 bp, Artificial Sequence
  Oligonucleotide primer for the detection of SNP TSC0049150
aaactatttctt

SEQ ID NO: 354570 - DNA, 12 bp, Artificial Sequence
  Oligonucleotide primer for the detection of SNP TSC0049150
tgatggaaaaaa

SEQ ID NO: 354571 - DNA, 12 bp, Artificial Sequence
  Oligonucleotide primer for the detection of SNP TSC0049153
caccttattctc

SEQ ID NO: 354572 - DNA, 12 bp, Artificial Sequence
  Oligonucleotide primer for the detection of SNP TSC0049153
ttttttagaaga

SEQ ID NO: 354573 - DNA, 12 bp, Artificial Sequence
  Oligonucleotide primer for the detection of SNP TSC0049154
tcatttaaaaaa

SEQ ID NO: 354574 - DNA, 12 bp, Artificial Sequence
  Oligonucleotide primer for the detection of SNP TSC0049154
tgataatatttt

SEQ ID NO: 354575 - DNA, 12 bp, Artificial Sequence
  Oligonucleotide primer for the detection of SNP TSC0049154
attctaacaata

SEQ ID NO: 354576 - DNA, 12 bp, Artificial Sequence
  Oligonucleotide primer for the detection of SNP TSC0049156
aaactattacaa

SEQ ID NO: 354577 - DNA, 12 bp, Artificial Sequence
  Oligonucleotide primer for the detection of SNP TSC0049156
ttttgtttggat

SEQ ID NO: 354578 - DNA, 12 bp, Artificial Sequence
  Oligonucleotide primer for the detection of SNP TSC0049156
cctacctaaaca

SEQ ID NO: 354579 - DNA, 12 bp, Artificial Sequence
  Oligonucleotide primer for the detection of SNP TSC0049156
aggttgttgtag

SEQ ID NO: 354580 - DNA, 12 bp, Artificial Sequence
  Oligonucleotide primer for the detection of SNP TSC0049161
acaacaatataa

SEQ ID NO: 354581 - DNA, 12 bp, Artificial Sequence
  Oligonucleotide primer for the detection of SNP TSC0049161
agtttatggttt

SEQ ID NO: 354582 - DNA, 12 bp, Artificial Sequence
  Oligonucleotide primer for the detection of SNP TSC0049161
agtttacggttt

SEQ ID NO: 354583 - DNA, 12 bp, Artificial Sequence
  Oligonucleotide primer for the detection of SNP TSC0049161
attcacaatcta

SEQ ID NO: 354584 - DNA, 12 bp, Artificial Sequence
  Oligonucleotide primer for the detection of SNP TSC0049161
attcacgatcta

SEQ ID NO: 354585 - DNA, 12 bp, Artificial Sequence
  Oligonucleotide primer for the detection of SNP TSC0049161
gtaataatgtga

SEQ ID NO: 354586 - DNA, 12 bp, Artificial Sequence
  Oligonucleotide primer for the detection of SNP TSC0049162
ctatctacctac

SEQ ID NO: 354587 - DNA, 12 bp, Artificial Sequence
  Oligonucleotide primer for the detection of SNP TSC0049162
tatttatagtag

SEQ ID NO: 354588 - DNA, 12 bp, Artificial Sequence
  Oligonucleotide primer for the detection of SNP TSC0049162
acctacaacaaa

SEQ ID NO: 354589 - DNA, 12 bp, Artificial Sequence
  Oligonucleotide primer for the detection of SNP TSC0049162
ttgtttgtttgt

SEQ ID NO: 354590 - DNA, 12 bp, Artificial Sequence
  Oligonucleotide primer for the detection of SNP TSC0049163
actctccctaat

SEQ ID NO: 354591 - DNA, 12 bp, Artificial Sequence
  Oligonucleotide primer for the detection of SNP TSC0049164
tcttctttataa

SEQ ID NO: 354592 - DNA, 12 bp, Artificial Sequence
  Oligonucleotide primer for the detection of SNP TSC0049164
aaaatttagaaa

SEQ ID NO: 354593 - DNA, 12 bp, Artificial Sequence
  Oligonucleotide primer for the detection of SNP TSC0049165
tagtttgggtgt

SEQ ID NO: 354594 - DNA, 12 bp, Artificial Sequence
  Oligonucleotide primer for the detection of SNP TSC0049171
aaaacaaaatcc

SEQ ID NO: 354595 - DNA, 12 bp, Artificial Sequence
  Oligonucleotide primer for the detection of SNP TSC0049171
tgggtgatagaa

SEQ ID NO: 354596 - DNA, 12 bp, Artificial Sequence
  Oligonucleotide primer for the detection of SNP TSC0049171
tgggcgatagaa

SEQ ID NO: 354597 - DNA, 12 bp, Artificial Sequence
  Oligonucleotide primer for the detection of SNP TSC0049172
accatacttaat

SEQ ID NO: 354598 - DNA, 12 bp, Artificial Sequence
  Oligonucleotide primer for the detection of SNP TSC0049172
agtataaaaatt

SEQ ID NO: 354599 - DNA, 12 bp, Artificial Sequence
  Oligonucleotide primer for the detection of SNP TSC0049173
aaacaatataat

SEQ ID NO: 354600 - DNA, 12 bp, Artificial Sequence
  Oligonucleotide primer for the detection of SNP TSC0049173
attacaaacata

SEQ ID NO: 354601 - DNA, 12 bp, Artificial Sequence
  Oligonucleotide primer for the detection of SNP TSC0049173
aggtagtgtggt

SEQ ID NO: 354602 - DNA, 12 bp, Artificial Sequence
  Oligonucleotide primer for the detection of SNP TSC0049174
tattaaaaaaac

SEQ ID NO: 354603 - DNA, 12 bp, Artificial Sequence
  Oligonucleotide primer for the detection of SNP TSC0049174
ttgtttggttta

SEQ ID NO: 354604 - DNA, 12 bp, Artificial Sequence
  Oligonucleotide primer for the detection of SNP TSC0049175
aaaattccaaaa

SEQ ID NO: 354605 - DNA, 12 bp, Artificial Sequence
  Oligonucleotide primer for the detection of SNP TSC0049175
tttttggggtat

SEQ ID NO: 354606 - DNA, 12 bp, Artificial Sequence
  Oligonucleotide primer for the detection of SNP TSC0049176
catatctctatc

SEQ ID NO: 354607 - DNA, 12 bp, Artificial Sequence
  Oligonucleotide primer for the detection of SNP TSC0049176
tgattaaaatgt

SEQ ID NO: 354608 - DNA, 12 bp, Artificial Sequence
  Oligonucleotide primer for the detection of SNP TSC0049176
tgattaaaatgc

SEQ ID NO: 354609 - DNA, 12 bp, Artificial Sequence
  Oligonucleotide primer for the detection of SNP TSC0049176
tatatttttgtt

SEQ ID NO: 354610 - DNA, 12 bp, Artificial Sequence
  Oligonucleotide primer for the detection of SNP TSC0049177
ccaaattattta

SEQ ID NO: 354611 - DNA, 12 bp, Artificial Sequence
  Oligonucleotide primer for the detection of SNP TSC0049177
ccgaattattta

SEQ ID NO: 354612 - DNA, 12 bp, Artificial Sequence
  Oligonucleotide primer for the detection of SNP TSC0049177
tttgttatattt

SEQ ID NO: 354613 - DNA, 12 bp, Artificial Sequence
  Oligonucleotide primer for the detection of SNP TSC0049177
ctccctattaca

SEQ ID NO: 354614 - DNA, 12 bp, Artificial Sequence
  Oligonucleotide primer for the detection of SNP TSC0049177
gagttatttgtt

SEQ ID NO: 354615 - DNA, 12 bp, Artificial Sequence
  Oligonucleotide primer for the detection of SNP TSC0049178
caaattatttac

SEQ ID NO: 354616 - DNA, 12 bp, Artificial Sequence
  Oligonucleotide primer for the detection of SNP TSC0049178
cgaattatttac

SEQ ID NO: 354617 - DNA, 12 bp, Artificial Sequence
  Oligonucleotide primer for the detection of SNP TSC0049178
ttgttatattta

SEQ ID NO: 354618 - DNA, 12 bp, Artificial Sequence
  Oligonucleotide primer for the detection of SNP TSC0049182
aactaaccctta

SEQ ID NO: 354619 - DNA, 12 bp, Artificial Sequence
  Oligonucleotide primer for the detection of SNP TSC0049182
ttttattgtgtt

SEQ ID NO: 354620 - DNA, 12 bp, Artificial Sequence
  Oligonucleotide primer for the detection of SNP TSC0049182
ttcactatatta

SEQ ID NO: 354621 - DNA, 12 bp, Artificial Sequence
  Oligonucleotide primer for the detection of SNP TSC0049182
agattagttttt

SEQ ID NO: 354622 - DNA, 12 bp, Artificial Sequence
  Oligonucleotide primer for the detection of SNP TSC0049185
aagatgggagga

SEQ ID NO: 354623 - DNA, 12 bp, Artificial Sequence
  Oligonucleotide primer for the detection of SNP TSC0049187
aaggagtgtgag

SEQ ID NO: 354624 - DNA, 12 bp, Artificial Sequence
  Oligonucleotide primer for the detection of SNP TSC0049189
tccactacaaaa

SEQ ID NO: 354625 - DNA, 12 bp, Artificial Sequence
  Oligonucleotide primer for the detection of SNP TSC0049189
ataatcctttaa

SEQ ID NO: 354626 - DNA, 12 bp, Artificial Sequence
  Oligonucleotide primer for the detection of SNP TSC0049189
gtttattgtagg

SEQ ID NO: 354627 - DNA, 12 bp, Artificial Sequence
  Oligonucleotide primer for the detection of SNP TSC0049190
aacactaaactc

SEQ ID NO: 354628 - DNA, 12 bp, Artificial Sequence
  Oligonucleotide primer for the detection of SNP TSC0049190
tgggtttttgtg

SEQ ID NO: 354629 - DNA, 12 bp, Artificial Sequence
  Oligonucleotide primer for the detection of SNP TSC0049190
taaacttctata

SEQ ID NO: 354630 - DNA, 12 bp, Artificial Sequence
  Oligonucleotide primer for the detection of SNP TSC0049190
agtattgagttt

SEQ ID NO: 354631 - DNA, 12 bp, Artificial Sequence
  Oligonucleotide primer for the detection of SNP TSC0049191
acctattcactc

SEQ ID NO: 354632 - DNA, 12 bp, Artificial Sequence
  Oligonucleotide primer for the detection of SNP TSC0049191
tggaaaatgttt

SEQ ID NO: 354633 - DNA, 12 bp, Artificial Sequence
  Oligonucleotide primer for the detection of SNP TSC0049192
tagtgtgatttt

SEQ ID NO: 354634 - DNA, 12 bp, Artificial Sequence
  Oligonucleotide primer for the detection of SNP TSC0049192
tagcgtgatttt

SEQ ID NO: 354635 - DNA, 12 bp, Artificial Sequence
  Oligonucleotide primer for the detection of SNP TSC0049192
tagtgtgatttc

SEQ ID NO: 354636 - DNA, 12 bp, Artificial Sequence
  Oligonucleotide primer for the detection of SNP TSC0049192
tagcgtgatttc

SEQ ID NO: 354637 - DNA, 12 bp, Artificial Sequence
  Oligonucleotide primer for the detection of SNP TSC0007630
aaatatagaggg

SEQ ID NO: 354638 - DNA, 12 bp, Artificial Sequence
  Oligonucleotide primer for the detection of SNP TSC0007630
agaggggaattg

SEQ ID NO: 354639 - DNA, 12 bp, Artificial Sequence
  Oligonucleotide primer for the detection of SNP TSC0007631
accaaaaaaaca

SEQ ID NO: 354640 - DNA, 12 bp, Artificial Sequence
  Oligonucleotide primer for the detection of SNP TSC0007631
tggttgttttgt

SEQ ID NO: 354641 - DNA, 12 bp, Artificial Sequence
  Oligonucleotide primer for the detection of SNP TSC0007631
aactatcctata

SEQ ID NO: 354642 - DNA, 12 bp, Artificial Sequence
  Oligonucleotide primer for the detection of SNP TSC0007631
ggttaagaaaat

SEQ ID NO: 354643 - DNA, 12 bp, Artificial Sequence
  Oligonucleotide primer for the detection of SNP TSC0049202
aaattatctcac

SEQ ID NO: 354644 - DNA, 12 bp, Artificial Sequence
  Oligonucleotide primer for the detection of SNP TSC0049204
acaaaacgaaac

SEQ ID NO: 354645 - DNA, 12 bp, Artificial Sequence
  Oligonucleotide primer for the detection of SNP TSC0049204
tttgggagatgg

SEQ ID NO: 354646 - DNA, 12 bp, Artificial Sequence
  Oligonucleotide primer for the detection of SNP TSC0049204
tttgggagacgg

SEQ ID NO: 354647 - DNA, 12 bp, Artificial Sequence
  Oligonucleotide primer for the detection of SNP TSC0049204
tttaaaaaacga

SEQ ID NO: 354648 - DNA, 12 bp, Artificial Sequence
  Oligonukleotid-Primer
acacccaccact

SEQ ID NO: 354649 - DNA, 12 bp, Artificial Sequence
  Oligonucleotide primer for the detection of SNP TSC0049205
acacccgccact

SEQ ID NO: 354650 - DNA, 12 bp, Artificial Sequence
  Oligonucleotide primer for the detection of SNP TSC0049205
acgcccaccact

SEQ ID NO: 354651 - DNA, 12 bp, Artificial Sequence
  Oligonucleotide primer for the detection of SNP TSC0049205
acgcccgccact

SEQ ID NO: 354652 - DNA, 12 bp, Artificial Sequence
  Oligonucleotide primer for the detection of SNP TSC0049208
ataataataatc

SEQ ID NO: 354653 - DNA, 12 bp, Artificial Sequence
  Oligonucleotide primer for the detection of SNP TSC0049208
gatgtagtttta

SEQ ID NO: 354654 - DNA, 12 bp, Artificial Sequence
  Oligonucleotide primer for the detection of SNP TSC0049208
gacgtagtttta

SEQ ID NO: 354655 - DNA, 12 bp, Artificial Sequence
  Oligonucleotide primer for the detection of SNP TSC0049208
aacataattcta

SEQ ID NO: 354656 - DNA, 12 bp, Artificial Sequence
  Oligonucleotide primer for the detection of SNP TSC0049208
aacgtaattcta

SEQ ID NO: 354657 - DNA, 12 bp, Artificial Sequence
  Oligonucleotide primer for the detection of SNP TSC0049208
ataatgataatt

SEQ ID NO: 354658 - DNA, 12 bp, Artificial Sequence
  Oligonucleotide primer for the detection of SNP TSC0049209
ccccaaaataaa

SEQ ID NO: 354659 - DNA, 12 bp, Artificial Sequence
  Oligonucleotide primer for the detection of SNP TSC0049209
aggagtgaaagt

SEQ ID NO: 354660 - DNA, 12 bp, Artificial Sequence
  Oligonucleotide primer for the detection of SNP TSC0049210
aatcttttcccc

SEQ ID NO: 354661 - DNA, 12 bp, Artificial Sequence
  Oligonucleotide primer for the detection of SNP TSC0049210
gggtttgaaggg

SEQ ID NO: 354662 - DNA, 12 bp, Artificial Sequence
  Oligonucleotide primer for the detection of SNP TSC0010811
ttaaaatgtatt

SEQ ID NO: 354663 - DNA, 12 bp, Artificial Sequence
  Oligonucleotide primer for the detection of SNP TSC0010811
ttaaaatatatt

SEQ ID NO: 354664 - DNA, 12 bp, Artificial Sequence
  Oligonucleotide primer for the detection of SNP TSC0010811
gtaggagtaaaa

SEQ ID NO: 354665 - DNA, 12 bp, Artificial Sequence
  Oligonucleotide primer for the detection of SNP TSC0008906
agatatgattta

SEQ ID NO: 354666 - DNA, 12 bp, Artificial Sequence
  Oligonucleotide primer for the detection of SNP TSC0049216
tttaattttagg

SEQ ID NO: 354667 - DNA, 12 bp, Artificial Sequence
  Oligonucleotide primer for the detection of SNP TSC0049219
tcataaaatcca

SEQ ID NO: 354668 - DNA, 12 bp, Artificial Sequence
  Oligonucleotide primer for the detection of SNP TSC0049219
tatatatgttag

SEQ ID NO: 354669 - DNA, 12 bp, Artificial Sequence
  Oligonucleotide primer for the detection of SNP TSC0049219
tacatataccaa

SEQ ID NO: 354670 - DNA, 12 bp, Artificial Sequence
  Oligonucleotide primer for the detection of SNP TSC0049219
tttatgaggttt

SEQ ID NO: 354671 - DNA, 12 bp, Artificial Sequence
  Oligonucleotide primer for the detection of SNP TSC0006010
aaatacccgaaa

SEQ ID NO: 354672 - DNA, 12 bp, Artificial Sequence
  Oligonucleotide primer for the detection of SNP TSC0006010
tataaattaccc

SEQ ID NO: 354673 - DNA, 12 bp, Artificial Sequence
  Oligonucleotide primer for the detection of SNP TSC0006010
aatatttgagat

SEQ ID NO: 354674 - DNA, 12 bp, Artificial Sequence
  Oligonucleotide primer for the detection of SNP TSC0006010
aatattcgagat

SEQ ID NO: 354675 - DNA, 12 bp, Artificial Sequence
  Oligonucleotide primer for the detection of SNP TSC0006010
aatatttgagac

SEQ ID NO: 354676 - DNA, 12 bp, Artificial Sequence
  Oligonucleotide primer for the detection of SNP TSC0006010
aatattcgagac

SEQ ID NO: 354677 - DNA, 12 bp, Artificial Sequence
  Oligonucleotide primer for the detection of SNP TSC0006011
aacacctccctc

SEQ ID NO: 354678 - DNA, 12 bp, Artificial Sequence
  Oligonucleotide primer for the detection of SNP TSC0006011
aataagtgagag

SEQ ID NO: 354679 - DNA, 12 bp, Artificial Sequence
  Oligonucleotide primer for the detection of SNP TSC0049222
atttaaataaat

SEQ ID NO: 354680 - DNA, 12 bp, Artificial Sequence
  Oligonucleotide primer for the detection of SNP TSC0049223
tttgtttagtat

SEQ ID NO: 354681 - DNA, 12 bp, Artificial Sequence
  Oligonucleotide primer for the detection of SNP TSC0049223
tttactcaacat

SEQ ID NO: 354682 - DNA, 12 bp, Artificial Sequence
  Oligonucleotide primer for the detection of SNP TSC0049223
ggattttaagaa

SEQ ID NO: 354683 - DNA, 12 bp, Artificial Sequence
  Oligonucleotide primer for the detection of SNP TSC0049227
aaattacattca

SEQ ID NO: 354684 - DNA, 12 bp, Artificial Sequence
  Oligonucleotide primer for the detection of SNP TSC0049227
aatcacctaatt

SEQ ID NO: 354685 - DNA, 12 bp, Artificial Sequence
  Oligonucleotide primer for the detection of SNP TSC0049227
aaattatattta

SEQ ID NO: 354686 - DNA, 12 bp, Artificial Sequence
  Oligonucleotide primer for the detection of SNP TSC0049228
tttttataattt

SEQ ID NO: 354687 - DNA, 12 bp, Artificial Sequence
  Oligonucleotide primer for the detection of SNP TSC0049228
tccttacaactt

SEQ ID NO: 354688 - DNA, 12 bp, Artificial Sequence
  Oligonucleotide primer for the detection of SNP TSC0049228
gtagggagaaat

SEQ ID NO: 354689 - DNA, 12 bp, Artificial Sequence
  Oligonucleotide primer for the detection of SNP TSC0049229
ataactttcttt

SEQ ID NO: 354690 - DNA, 12 bp, Artificial Sequence
  Oligonucleotide primer for the detection of SNP TSC0049229
tttttagtataa

SEQ ID NO: 354691 - DNA, 12 bp, Artificial Sequence
  Oligonucleotide primer for the detection of SNP TSC0049230
atttccataacc

SEQ ID NO: 354692 - DNA, 12 bp, Artificial Sequence
  Oligonucleotide primer for the detection of SNP TSC0049230
atgatagtttag

SEQ ID NO: 354693 - DNA, 12 bp, Artificial Sequence
  Oligonucleotide primer for the detection of SNP TSC0049230
taacaacccaaa

SEQ ID NO: 354694 - DNA, 12 bp, Artificial Sequence
  Oligonucleotide primer for the detection of SNP TSC0049231
attcaatttcct

SEQ ID NO: 354695 - DNA, 12 bp, Artificial Sequence
  Oligonucleotide primer for the detection of SNP TSC0049231
tgggaattatta

SEQ ID NO: 354696 - DNA, 12 bp, Artificial Sequence
  Oligonucleotide primer for the detection of SNP TSC0049231
cgggaattatta

SEQ ID NO: 354697 - DNA, 12 bp, Artificial Sequence
  Oligonucleotide primer for the detection of SNP TSC0049232
tctttctaaaat

SEQ ID NO: 354698 - DNA, 12 bp, Artificial Sequence
  Oligonucleotide primer for the detection of SNP TSC0049232
gtggaggtaaaa

SEQ ID NO: 354699 - DNA, 12 bp, Artificial Sequence
  Oligonucleotide primer for the detection of SNP TSC0049233
tttcataaaata

SEQ ID NO: 354700 - DNA, 12 bp, Artificial Sequence
  Oligonucleotide primer for the detection of SNP TSC0049233
aatggtatttag

SEQ ID NO: 354701 - DNA, 12 bp, Artificial Sequence
  Oligonucleotide primer for the detection of SNP TSC0049234
attggaaattga

SEQ ID NO: 354702 - DNA, 12 bp, Artificial Sequence
  Oligonucleotide primer for the detection of SNP TSC0049235
aactcaaacaac

SEQ ID NO: 354703 - DNA, 12 bp, Artificial Sequence
  Oligonucleotide primer for the detection of SNP TSC0049235
attttatgatgg

SEQ ID NO: 354704 - DNA, 12 bp, Artificial Sequence
  Oligonucleotide primer for the detection of SNP TSC0049235
attttacgatgg

SEQ ID NO: 354705 - DNA, 12 bp, Artificial Sequence
  Oligonucleotide primer for the detection of SNP TSC0049235
attttatgacgg

SEQ ID NO: 354706 - DNA, 12 bp, Artificial Sequence
  Oligonucleotide primer for the detection of SNP TSC0049235
attttacgacgg

SEQ ID NO: 354707 - DNA, 12 bp, Artificial Sequence
  Oligonucleotide primer for the detection of SNP TSC0049235
actccacaacaa

SEQ ID NO: 354708 - DNA, 12 bp, Artificial Sequence
  Oligonucleotide primer for the detection of SNP TSC0049235
actccacaacga

SEQ ID NO: 354709 - DNA, 12 bp, Artificial Sequence
  Oligonucleotide primer for the detection of SNP TSC0049235
actccacgacaa

SEQ ID NO: 354710 - DNA, 12 bp, Artificial Sequence
  Oligonucleotide primer for the detection of SNP TSC0049235
actccacgacga

SEQ ID NO: 354711 - DNA, 12 bp, Artificial Sequence
  Oligonucleotide primer for the detection of SNP TSC0049235
agtttagatagt

SEQ ID NO: 354712 - DNA, 12 bp, Artificial Sequence
  Oligonucleotide primer for the detection of SNP TSC0049236
gatagtataaga

SEQ ID NO: 354713 - DNA, 12 bp, Artificial Sequence
  Oligonucleotide primer for the detection of SNP TSC0049238
tccaacctcatc

SEQ ID NO: 354714 - DNA, 12 bp, Artificial Sequence
  Oligonucleotide primer for the detection of SNP TSC0049238
aattaagtagga

SEQ ID NO: 354715 - DNA, 12 bp, Artificial Sequence
  Oligonucleotide primer for the detection of SNP TSC0049241
taatacaacctc

SEQ ID NO: 354716 - DNA, 12 bp, Artificial Sequence
  Oligonucleotide primer for the detection of SNP TSC0049241
taaaattatttg

SEQ ID NO: 354717 - DNA, 12 bp, Artificial Sequence
  Oligonucleotide primer for the detection of SNP TSC0049243
ttctattcctct

SEQ ID NO: 354718 - DNA, 12 bp, Artificial Sequence
  Oligonucleotide primer for the detection of SNP TSC0049243
gaagggtgggga

SEQ ID NO: 354719 - DNA, 12 bp, Artificial Sequence
  Oligonucleotide primer for the detection of SNP TSC0049244
tgtgaatagtgt

SEQ ID NO: 354720 - DNA, 12 bp, Artificial Sequence
  Oligonucleotide primer for the detection of SNP TSC0049244
aatgtttattgt

SEQ ID NO: 354721 - DNA, 12 bp, Artificial Sequence
  Oligonucleotide primer for the detection of SNP TSC0049245
aaccataaacta

SEQ ID NO: 354722 - DNA, 12 bp, Artificial Sequence
  Oligonucleotide primer for the detection of SNP TSC0049245
aaaattattttt

SEQ ID NO: 354723 - DNA, 12 bp, Artificial Sequence
  Oligonucleotide primer for the detection of SNP TSC0049245
aaccacttttaa

SEQ ID NO: 354724 - DNA, 12 bp, Artificial Sequence
  Oligonucleotide primer for the detection of SNP TSC0049245
gaattatagatt

SEQ ID NO: 354725 - DNA, 12 bp, Artificial Sequence
  Oligonucleotide primer for the detection of SNP TSC0049246
tccacctacctt

SEQ ID NO: 354726 - DNA, 12 bp, Artificial Sequence
  Oligonucleotide primer for the detection of SNP TSC0049246
tccgcctacctt

SEQ ID NO: 354727 - DNA, 12 bp, Artificial Sequence
  Oligonucleotide primer for the detection of SNP TSC0049246
gtattgtgggag

SEQ ID NO: 354728 - DNA, 12 bp, Artificial Sequence
  Oligonucleotide primer for the detection of SNP TSC0007814
taatcaaattct

SEQ ID NO: 354729 - DNA, 12 bp, Artificial Sequence
  Oligonucleotide primer for the detection of SNP TSC0049248
ctaacactaact

SEQ ID NO: 354730 - DNA, 12 bp, Artificial Sequence
  Oligonucleotide primer for the detection of SNP TSC0049248
ctaacgctaact

SEQ ID NO: 354731 - DNA, 12 bp, Artificial Sequence
  Oligonucleotide primer for the detection of SNP TSC0049248
tgttttttgagt

SEQ ID NO: 354732 - DNA, 12 bp, Artificial Sequence
  Oligonucleotide primer for the detection of SNP TSC0049248
tatcctttaaat

SEQ ID NO: 354733 - DNA, 12 bp, Artificial Sequence
  Oligonucleotide primer for the detection of SNP TSC0049248
ttgatgttggtt

SEQ ID NO: 354734 - DNA, 12 bp, Artificial Sequence
  Oligonucleotide primer for the detection of SNP TSC0049248
ttgacgttggtt

SEQ ID NO: 354735 - DNA, 12 bp, Artificial Sequence
  Oligonucleotide primer for the detection of SNP TSC0049250
taaattcttaaa

SEQ ID NO: 354736 - DNA, 12 bp, Artificial Sequence
  Oligonucleotide primer for the detection of SNP TSC0049250
tttccattacta

SEQ ID NO: 354737 - DNA, 12 bp, Artificial Sequence
  Oligonucleotide primer for the detection of SNP TSC0049251
acaaaactcatt

SEQ ID NO: 354738 - DNA, 12 bp, Artificial Sequence
  Oligonucleotide primer for the detection of SNP TSC0049251
aaagggttgggg

SEQ ID NO: 354739 - DNA, 12 bp, Artificial Sequence
  Oligonucleotide primer for the detection of SNP TSC0049254
ctatatatatat

SEQ ID NO: 354740 - DNA, 12 bp, Artificial Sequence
  Oligonucleotide primer for the detection of SNP TSC0049256
ttatgtggaatt

SEQ ID NO: 354741 - DNA, 12 bp, Artificial Sequence
  Oligonucleotide primer for the detection of SNP TSC0049256
ggtttaattgaa

SEQ ID NO: 354742 - DNA, 12 bp, Artificial Sequence
  Oligonucleotide primer for the detection of SNP TSC0049257
aattagtttttg

SEQ ID NO: 354743 - DNA, 12 bp, Artificial Sequence
  Oligonucleotide primer for the detection of SNP TSC0049258
tctaaatttatc

SEQ ID NO: 354744 - DNA, 12 bp, Artificial Sequence
  Oligonucleotide primer for the detection of SNP TSC0049258
aaaaattataaa

SEQ ID NO: 354745 - DNA, 12 bp, Artificial Sequence
  Oligonucleotide primer for the detection of SNP TSC0049264
aataaactttaa

SEQ ID NO: 354746 - DNA, 12 bp, Artificial Sequence
  Oligonucleotide primer for the detection of SNP TSC0049264
ttgttagttaga

SEQ ID NO: 354747 - DNA, 12 bp, Artificial Sequence
  Oligonucleotide primer for the detection of SNP TSC0049264
ttatcaactaaa

SEQ ID NO: 354748 - DNA, 12 bp, Artificial Sequence
  unsure (1): Oligonucleotide primer for the detection of SNP TSC0049264
nagatgaatttt

SEQ ID NO: 354749 - DNA, 12 bp, Artificial Sequence
  Oligonucleotide primer for the detection of SNP TSC0049265
gagttaaaattt

SEQ ID NO: 354750 - DNA, 12 bp, Artificial Sequence
  Oligonucleotide primer for the detection of SNP TSC0049265
gtggatttgggg

SEQ ID NO: 354751 - DNA, 12 bp, Artificial Sequence
  Oligonucleotide primer for the detection of SNP TSC0049266
ctaaaatacttc

SEQ ID NO: 354752 - DNA, 12 bp, Artificial Sequence
  Oligonucleotide primer for the detection of SNP TSC0049268
ctaataactaat

SEQ ID NO: 354753 - DNA, 12 bp, Artificial Sequence
  Oligonucleotide primer for the detection of SNP TSC0049268
ttttaaaatgta

SEQ ID NO: 354754 - DNA, 12 bp, Artificial Sequence
  Oligonucleotide primer for the detection of SNP TSC0049268
ctccaaaataca

SEQ ID NO: 354755 - DNA, 12 bp, Artificial Sequence
  Oligonucleotide primer for the detection of SNP TSC0049268
ttggtggttgat

SEQ ID NO: 354756 - DNA, 12 bp, Artificial Sequence
  Oligonucleotide primer for the detection of SNP TSC0049269
tcaaactaatca

SEQ ID NO: 354757 - DNA, 12 bp, Artificial Sequence
  Oligonucleotide primer for the detection of SNP TSC0049269
gttagtggaggg

SEQ ID NO: 354758 - DNA, 12 bp, Artificial Sequence
  Oligonucleotide primer for the detection of SNP TSC0049269
atcaataaaaaa

SEQ ID NO: 354759 - DNA, 12 bp, Artificial Sequence
  Oligonucleotide primer for the detection of SNP TSC0049269
tttaagttggtt

SEQ ID NO: 354760 - DNA, 12 bp, Artificial Sequence
  Oligonucleotide primer for the detection of SNP TSC0049271
tttaaactaaaa

SEQ ID NO: 354761 - DNA, 12 bp, Artificial Sequence
  Oligonucleotide primer for the detection of SNP TSC0049271
tatgtgttagta

SEQ ID NO: 354762 - DNA, 12 bp, Artificial Sequence
  Oligonucleotide primer for the detection of SNP TSC0049271
ttaagttaaaat

SEQ ID NO: 354763 - DNA, 12 bp, Artificial Sequence
  Oligonucleotide primer for the detection of SNP TSC0049272
atcccttttatt

SEQ ID NO: 354764 - DNA, 12 bp, Artificial Sequence
  Oligonucleotide primer for the detection of SNP TSC0049272
tttatattattg

SEQ ID NO: 354765 - DNA, 12 bp, Artificial Sequence
  Oligonucleotide primer for the detection of SNP TSC0049273
aaaatatccatt

SEQ ID NO: 354766 - DNA, 12 bp, Artificial Sequence
  Oligonucleotide primer for the detection of SNP TSC0049273
tccaactttcta

SEQ ID NO: 354767 - DNA, 12 bp, Artificial Sequence
  Oligonucleotide primer for the detection of SNP TSC0049273
aaaatgtttatt

SEQ ID NO: 354768 - DNA, 12 bp, Artificial Sequence
  Oligonucleotide primer for the detection of SNP TSC0049279
aaaataacaatc

SEQ ID NO: 354769 - DNA, 12 bp, Artificial Sequence
  Oligonucleotide primer for the detection of SNP TSC0049281
ataaaagtgtgt

SEQ ID NO: 354770 - DNA, 12 bp, Artificial Sequence
  Oligonucleotide primer for the detection of SNP TSC0049281
taatagtttatt

SEQ ID NO: 354771 - DNA, 12 bp, Artificial Sequence
  Oligonucleotide primer for the detection of SNP TSC0049282
aaaatttacatt

SEQ ID NO: 354772 - DNA, 12 bp, Artificial Sequence
  Oligonucleotide primer for the detection of SNP TSC0049283
taccaaataacc

SEQ ID NO: 354773 - DNA, 12 bp, Artificial Sequence
  Oligonucleotide primer for the detection of SNP TSC0049283
cctttctacaaa

SEQ ID NO: 354774 - DNA, 12 bp, Artificial Sequence
  Oligonucleotide primer for the detection of SNP TSC0049283
tgttagatagtt

SEQ ID NO: 354775 - DNA, 12 bp, Artificial Sequence
  Oligonucleotide primer for the detection of SNP TSC0049283
tgttagatagtc

SEQ ID NO: 354776 - DNA, 12 bp, Artificial Sequence
  Oligonucleotide primer for the detection of SNP TSC0049286
tatccactctca

SEQ ID NO: 354777 - DNA, 12 bp, Artificial Sequence
  Oligonucleotide primer for the detection of SNP TSC0049286
ggtaattaaagt

SEQ ID NO: 354778 - DNA, 12 bp, Artificial Sequence
  Oligonucleotide primer for the detection of SNP TSC0049288
aattttaaataa

SEQ ID NO: 354779 - DNA, 12 bp, Artificial Sequence
  Oligonucleotide primer for the detection of SNP TSC0049290
taagaataataa

SEQ ID NO: 354780 - DNA, 12 bp, Artificial Sequence
  Oligonucleotide primer for the detection of SNP TSC0049293
tgggtaaggtga

SEQ ID NO: 354781 - DNA, 12 bp, Artificial Sequence
  Oligonucleotide primer for the detection of SNP TSC0049294
aataaacttctt

SEQ ID NO: 354782 - DNA, 12 bp, Artificial Sequence
  Oligonucleotide primer for the detection of SNP TSC0049294
agtagggaaata

SEQ ID NO: 354783 - DNA, 12 bp, Artificial Sequence
  Oligonucleotide primer for the detection of SNP TSC0049294
gatagatttttt

SEQ ID NO: 354784 - DNA, 12 bp, Artificial Sequence
  Oligonucleotide primer for the detection of SNP TSC0049295
tttatttaaata

SEQ ID NO: 354785 - DNA, 12 bp, Artificial Sequence
  Oligonucleotide primer for the detection of SNP TSC0049295
cactctccttta

SEQ ID NO: 354786 - DNA, 12 bp, Artificial Sequence
  Oligonucleotide primer for the detection of SNP TSC0049297
agttgggtatgg

SEQ ID NO: 354787 - DNA, 12 bp, Artificial Sequence
  Oligonucleotide primer for the detection of SNP TSC0049297
agtcgggtatgg

SEQ ID NO: 354788 - DNA, 12 bp, Artificial Sequence
  Oligonucleotide primer for the detection of SNP TSC0049300
ttaactataaat

SEQ ID NO: 354789 - DNA, 12 bp, Artificial Sequence
  Oligonucleotide primer for the detection of SNP TSC0049300
tggtagataata

SEQ ID NO: 354790 - DNA, 12 bp, Artificial Sequence
  Oligonucleotide primer for the detection of SNP TSC0049300
taacaaataaca

SEQ ID NO: 354791 - DNA, 12 bp, Artificial Sequence
  Oligonucleotide primer for the detection of SNP TSC0049300
ttaattgtaagt

SEQ ID NO: 354792 - DNA, 12 bp, Artificial Sequence
  Oligonucleotide primer for the detection of SNP TSC0049301
caatattatcta

SEQ ID NO: 354793 - DNA, 12 bp, Artificial Sequence
  Oligonucleotide primer for the detection of SNP TSC0049301
cgatattatcta

SEQ ID NO: 354794 - DNA, 12 bp, Artificial Sequence
  Oligonucleotide primer for the detection of SNP TSC0049301
gttagttatgtt

SEQ ID NO: 354795 - DNA, 12 bp, Artificial Sequence
  Oligonucleotide primer for the detection of SNP TSC0049301
accaactatatc

SEQ ID NO: 354796 - DNA, 12 bp, Artificial Sequence
  Oligonucleotide primer for the detection of SNP TSC0049301
tgatgttatttg

SEQ ID NO: 354797 - DNA, 12 bp, Artificial Sequence
  Oligonucleotide primer for the detection of SNP TSC0049301
cgatgttatttg

SEQ ID NO: 354798 - DNA, 12 bp, Artificial Sequence
  Oligonucleotide primer for the detection of SNP TSC0049302
ctaataattttt

SEQ ID NO: 354799 - DNA, 12 bp, Artificial Sequence
  Oligonucleotide primer for the detection of SNP TSC0049302
atgattaaaaat

SEQ ID NO: 354800 - DNA, 12 bp, Artificial Sequence
  Oligonucleotide primer for the detection of SNP TSC0049302
ttgatagttttt

SEQ ID NO: 354801 - DNA, 12 bp, Artificial Sequence
  Oligonucleotide primer for the detection of SNP TSC0049303
acaatattacct

SEQ ID NO: 354802 - DNA, 12 bp, Artificial Sequence
  Oligonucleotide primer for the detection of SNP TSC0049304
aatataacatca

SEQ ID NO: 354803 - DNA, 12 bp, Artificial Sequence
  Oligonucleotide primer for the detection of SNP TSC0049304
tattaattgttt

SEQ ID NO: 354804 - DNA, 12 bp, Artificial Sequence
  Oligonucleotide primer for the detection of SNP TSC0049304
attaactaccca

SEQ ID NO: 354805 - DNA, 12 bp, Artificial Sequence
  Oligonucleotide primer for the detection of SNP TSC0049304
agtgtgatatta

SEQ ID NO: 354806 - DNA, 12 bp, Artificial Sequence
  Oligonucleotide primer for the detection of SNP TSC0049306
tccaatcatctc

SEQ ID NO: 354807 - DNA, 12 bp, Artificial Sequence
  Oligonucleotide primer for the detection of SNP TSC0049306
tttataaggaga

SEQ ID NO: 354808 - DNA, 12 bp, Artificial Sequence
  Oligonucleotide primer for the detection of SNP TSC0049307
ccataaaatccc

SEQ ID NO: 354809 - DNA, 12 bp, Artificial Sequence
  Oligonucleotide primer for the detection of SNP TSC0049307
ccgtaaaatccc

SEQ ID NO: 354810 - DNA, 12 bp, Artificial Sequence
  Oligonucleotide primer for the detection of SNP TSC0049307
tttggttattgt

SEQ ID NO: 354811 - DNA, 12 bp, Artificial Sequence
  Oligonucleotide primer for the detection of SNP TSC0049307
tttggttattgc

SEQ ID NO: 354812 - DNA, 12 bp, Artificial Sequence
  Oligonucleotide primer for the detection of SNP TSC0049307
atctaattacta

SEQ ID NO: 354813 - DNA, 12 bp, Artificial Sequence
  Oligonucleotide primer for the detection of SNP TSC0049307
gtctaattacta

SEQ ID NO: 354814 - DNA, 12 bp, Artificial Sequence
  Oligonucleotide primer for the detection of SNP TSC0049307
ttgtggaatttt

SEQ ID NO: 354815 - DNA, 12 bp, Artificial Sequence
  Oligonucleotide primer for the detection of SNP TSC0049307
tcgtggaatttt

SEQ ID NO: 354816 - DNA, 12 bp, Artificial Sequence
  Oligonucleotide primer for the detection of SNP TSC0049308
ctttaactttat

SEQ ID NO: 354817 - DNA, 12 bp, Artificial Sequence
  Oligonucleotide primer for the detection of SNP TSC0049308
atagttagtaaa

SEQ ID NO: 354818 - DNA, 12 bp, Artificial Sequence
  Oligonucleotide primer for the detection of SNP TSC0049308
taatcaataaaa

SEQ ID NO: 354819 - DNA, 12 bp, Artificial Sequence
  Oligonucleotide primer for the detection of SNP TSC0049309
gttgagtgttta

SEQ ID NO: 354820 - DNA, 12 bp, Artificial Sequence
  Oligonucleotide primer for the detection of SNP TSC0049313
ttaatttcaaac

SEQ ID NO: 354821 - DNA, 12 bp, Artificial Sequence
  Oligonucleotide primer for the detection of SNP TSC0049314
caaaacctaatc

SEQ ID NO: 354822 - DNA, 12 bp, Artificial Sequence
  Oligonucleotide primer for the detection of SNP TSC0049314
gaagagttggtt

SEQ ID NO: 354823 - DNA, 12 bp, Artificial Sequence
  Oligonucleotide primer for the detection of SNP TSC0049314
aaaaaactaacc

SEQ ID NO: 354824 - DNA, 12 bp, Artificial Sequence
  Oligonucleotide primer for the detection of SNP TSC0049314
tagggtttgatt

SEQ ID NO: 354825 - DNA, 12 bp, Artificial Sequence
  Oligonucleotide primer for the detection of SNP TSC0049316
gagattgagatt

SEQ ID NO: 354826 - DNA, 12 bp, Artificial Sequence
  Oligonucleotide primer for the detection of SNP TSC0049316
aaaactaaaatc

SEQ ID NO: 354827 - DNA, 12 bp, Artificial Sequence
  Oligonucleotide primer for the detection of SNP TSC0049316
agataaataaag

SEQ ID NO: 354828 - DNA, 12 bp, Artificial Sequence
  Oligonucleotide primer for the detection of SNP TSC0049317
caactctacata

SEQ ID NO: 354829 - DNA, 12 bp, Artificial Sequence
  Oligonukleotid-Primer
ttctttactact

SEQ ID NO: 354830 - DNA, 12 bp, Artificial Sequence
  Oligonucleotide primer for the detection of SNP TSC0049318
aactaatttaac

SEQ ID NO: 354831 - DNA, 12 bp, Artificial Sequence
  Oligonucleotide primer for the detection of SNP TSC0049319
taatatcttcat

SEQ ID NO: 354832 - DNA, 12 bp, Artificial Sequence
  Oligonucleotide primer for the detection of SNP TSC0049319
aataagtgttta

SEQ ID NO: 354833 - DNA, 12 bp, Artificial Sequence
  Oligonucleotide primer for the detection of SNP TSC0049320
taacttctctac

SEQ ID NO: 354834 - DNA, 12 bp, Artificial Sequence
  Oligonucleotide primer for the detection of SNP TSC0049320
tatttttgtgga

SEQ ID NO: 354835 - DNA, 12 bp, Artificial Sequence
  Oligonucleotide primer for the detection of SNP TSC0049321
aatttctcatct

SEQ ID NO: 354836 - DNA, 12 bp, Artificial Sequence
  Oligonucleotide primer for the detection of SNP TSC0049321
ttggagaatata

SEQ ID NO: 354837 - DNA, 12 bp, Artificial Sequence
  Oligonucleotide primer for the detection of SNP TSC0049322
tagagtgagtgg

SEQ ID NO: 354838 - DNA, 12 bp, Artificial Sequence
  Oligonucleotide primer for the detection of SNP TSC0049322
caaaataaataa

SEQ ID NO: 354839 - DNA, 12 bp, Artificial Sequence
  Oligonucleotide primer for the detection of SNP TSC0049324
aaactcctccaa

SEQ ID NO: 354840 - DNA, 12 bp, Artificial Sequence
  Oligonucleotide primer for the detection of SNP TSC0049324
gttgtgtttggt

SEQ ID NO: 354841 - DNA, 12 bp, Artificial Sequence
  Oligonukleotid-Primer
aattatacctaa

SEQ ID NO: 354842 - DNA, 12 bp, Artificial Sequence
  Oligonucleotide primer for the detection of SNP TSC0049325
aactatatcatt

SEQ ID NO: 354843 - DNA, 12 bp, Artificial Sequence
  Oligonucleotide primer for the detection of SNP TSC0049325
gaaaaagtaata

SEQ ID NO: 354844 - DNA, 12 bp, Artificial Sequence
  Oligonucleotide primer for the detection of SNP TSC0007186
acttctaaaacc

SEQ ID NO: 354845 - DNA, 12 bp, Artificial Sequence
  Oligonukleotid-Primer
ataagtaaatta

SEQ ID NO: 354846 - DNA, 12 bp, Artificial Sequence
  Oligonucleotide primer for the detection of SNP TSC0007186
acaaataaatta

SEQ ID NO: 354847 - DNA, 12 bp, Artificial Sequence
  Oligonucleotide primer for the detection of SNP TSC0049326
tttgtagatatg

SEQ ID NO: 354848 - DNA, 12 bp, Artificial Sequence
  Oligonucleotide primer for the detection of SNP TSC0049327
tccaacacacta

SEQ ID NO: 354849 - DNA, 12 bp, Artificial Sequence
  Oligonukleotid-Primer
agttttagtttt

SEQ ID NO: 354850 - DNA, 12 bp, Artificial Sequence
  Oligonucleotide primer for the detection of SNP TSC0049327
agttttagtttc

SEQ ID NO: 354851 - DNA, 12 bp, Artificial Sequence
  Oligonucleotide primer for the detection of SNP TSC0049327
aacctcaacctc

SEQ ID NO: 354852 - DNA, 12 bp, Artificial Sequence
  Oligonucleotide primer for the detection of SNP TSC0049327
tttagtatattg

SEQ ID NO: 354853 - DNA, 12 bp, Artificial Sequence
  Oligonukleotid-Primer
caatattatcat

SEQ ID NO: 354854 - DNA, 12 bp, Artificial Sequence
  Oligonucleotide primer for the detection of SNP TSC0049329
caatattatcgt

SEQ ID NO: 354855 - DNA, 12 bp, Artificial Sequence
  Oligonucleotide primer for the detection of SNP TSC0049329
tagtgttgttgt

SEQ ID NO: 354856 - DNA, 12 bp, Artificial Sequence
  Oligonucleotide primer for the detection of SNP TSC0049329
tagtgttgtcgt

SEQ ID NO: 354857 - DNA, 12 bp, Artificial Sequence
  Oligonucleotide primer for the detection of SNP TSC0049330
tcttaattctta

SEQ ID NO: 354858 - DNA, 12 bp, Artificial Sequence
  Oligonucleotide primer for the detection of SNP TSC0049330
gaatttggtgtt

SEQ ID NO: 354859 - DNA, 12 bp, Artificial Sequence
  Oligonucleotide primer for the detection of SNP TSC0007995
taatacataact

SEQ ID NO: 354860 - DNA, 12 bp, Artificial Sequence
  Oligonucleotide primer for the detection of SNP TSC0007995
taatacgtaact

SEQ ID NO: 354861 - DNA, 12 bp, Artificial Sequence
  Oligonucleotide primer for the detection of SNP TSC0007995
gaatgaggagta

SEQ ID NO: 354862 - DNA, 12 bp, Artificial Sequence
  Oligonucleotide primer for the detection of SNP TSC0007995
taatatgtgatt

SEQ ID NO: 354863 - DNA, 12 bp, Artificial Sequence
  Oligonucleotide primer for the detection of SNP TSC0007995
taatacgtgatt

SEQ ID NO: 354864 - DNA, 12 bp, Artificial Sequence
  Oligonucleotide primer for the detection of SNP TSC0049333
agtatgtgttag

SEQ ID NO: 354865 - DNA, 12 bp, Artificial Sequence
  Oligonucleotide primer for the detection of SNP TSC0049334
aataatcataac

SEQ ID NO: 354866 - DNA, 12 bp, Artificial Sequence
  Oligonucleotide primer for the detection of SNP TSC0049334
agatattaggaa

SEQ ID NO: 354867 - DNA, 12 bp, Artificial Sequence
  Oligonucleotide primer for the detection of SNP TSC0049335
aatatataatac

SEQ ID NO: 354868 - DNA, 12 bp, Artificial Sequence
  Oligonucleotide primer for the detection of SNP TSC0049335
aaacacctatta

SEQ ID NO: 354869 - DNA, 12 bp, Artificial Sequence
  Oligonucleotide primer for the detection of SNP TSC0049335
agtgtgtggtat

SEQ ID NO: 354870 - DNA, 12 bp, Artificial Sequence
  Oligonucleotide primer for the detection of SNP TSC0049342
actcctcataaa

SEQ ID NO: 354871 - DNA, 12 bp, Artificial Sequence
  Oligonucleotide primer for the detection of SNP TSC0049342
attattaagtat

SEQ ID NO: 354872 - DNA, 12 bp, Artificial Sequence
  Oligonucleotide primer for the detection of SNP TSC0049342
attattaagtac

SEQ ID NO: 354873 - DNA, 12 bp, Artificial Sequence
  Oligonucleotide primer for the detection of SNP TSC0049342
aactatcaaaca

SEQ ID NO: 354874 - DNA, 12 bp, Artificial Sequence
  Oligonucleotide primer for the detection of SNP TSC0049342
attttttatgaa

SEQ ID NO: 354875 - DNA, 12 bp, Artificial Sequence
  Oligonucleotide primer for the detection of SNP TSC0049343
cctctacaaacc

SEQ ID NO: 354876 - DNA, 12 bp, Artificial Sequence
  Oligonucleotide primer for the detection of SNP TSC0049343
cctctacgaacc

SEQ ID NO: 354877 - DNA, 12 bp, Artificial Sequence
  Oligonucleotide primer for the detection of SNP TSC0049343
aatagagtaaaa

SEQ ID NO: 354878 - DNA, 12 bp, Artificial Sequence
  Oligonucleotide primer for the detection of SNP TSC0049344
ttattattttcc

SEQ ID NO: 354879 - DNA, 12 bp, Artificial Sequence
  Oligonucleotide primer for the detection of SNP TSC0049344
aaatggtattag

SEQ ID NO: 354880 - DNA, 12 bp, Artificial Sequence
  Oligonucleotide primer for the detection of SNP TSC0049345
tagttatttgga

SEQ ID NO: 354881 - DNA, 12 bp, Artificial Sequence
  Oligonucleotide primer for the detection of SNP TSC0049347
aaataatataca

SEQ ID NO: 354882 - DNA, 12 bp, Artificial Sequence
  Oligonucleotide primer for the detection of SNP TSC0049347
aattaataatac

SEQ ID NO: 354883 - DNA, 12 bp, Artificial Sequence
  Oligonucleotide primer for the detection of SNP TSC0049347
tagatagtatgt

SEQ ID NO: 354884 - DNA, 12 bp, Artificial Sequence
  Oligonucleotide primer for the detection of SNP TSC0049349
tttccttatttc

SEQ ID NO: 354885 - DNA, 12 bp, Artificial Sequence
  Oligonucleotide primer for the detection of SNP TSC0049350
ttttaaattatt

SEQ ID NO: 354886 - DNA, 12 bp, Artificial Sequence
  Oligonucleotide primer for the detection of SNP TSC0049350
tattttaaatta

SEQ ID NO: 354887 - DNA, 12 bp, Artificial Sequence
  Oligonucleotide primer for the detection of SNP TSC0049350
tatataaatatt

SEQ ID NO: 354888 - DNA, 12 bp, Artificial Sequence
  Oligonucleotide primer for the detection of SNP TSC0049351
gtttgtgtgtgt

SEQ ID NO: 354889 - DNA, 12 bp, Artificial Sequence
  Oligonucleotide primer for the detection of SNP TSC0049352
aacctataattt

SEQ ID NO: 354890 - DNA, 12 bp, Artificial Sequence
  Oligonucleotide primer for the detection of SNP TSC0049352
agtataattaaa

SEQ ID NO: 354891 - DNA, 12 bp, Artificial Sequence
  Oligonucleotide primer for the detection of SNP TSC0049353
aacaaatacaac

SEQ ID NO: 354892 - DNA, 12 bp, Artificial Sequence
  Oligonucleotide primer for the detection of SNP TSC0049353
aacaaatacgac

SEQ ID NO: 354893 - DNA, 12 bp, Artificial Sequence
  Oligonucleotide primer for the detection of SNP TSC0049353
atgatatgtata

SEQ ID NO: 354894 - DNA, 12 bp, Artificial Sequence
  Oligonucleotide primer for the detection of SNP TSC0049353
ataatatacata

SEQ ID NO: 354895 - DNA, 12 bp, Artificial Sequence
  Oligonucleotide primer for the detection of SNP TSC0049353
aatagatatggt

SEQ ID NO: 354896 - DNA, 12 bp, Artificial Sequence
  Oligonucleotide primer for the detection of SNP TSC0049353
aatagatacggt

SEQ ID NO: 354897 - DNA, 12 bp, Artificial Sequence
  Oligonucleotide primer for the detection of SNP TSC0049355
tcctctctacct

SEQ ID NO: 354898 - DNA, 12 bp, Artificial Sequence
  Oligonucleotide primer for the detection of SNP TSC0049355
ttaggtagtgga

SEQ ID NO: 354899 - DNA, 12 bp, Artificial Sequence
  Oligonucleotide primer for the detection of SNP TSC0049356
atcccctaatcc

SEQ ID NO: 354900 - DNA, 12 bp, Artificial Sequence
  Oligonucleotide primer for the detection of SNP TSC0049358
ttacaatcataa

SEQ ID NO: 354901 - DNA, 12 bp, Artificial Sequence
  Oligonucleotide primer for the detection of SNP TSC0049358
tacttccccttc

SEQ ID NO: 354902 - DNA, 12 bp, Artificial Sequence
  Oligonucleotide primer for the detection of SNP TSC0049358
ttataattatgg

SEQ ID NO: 354903 - DNA, 12 bp, Artificial Sequence
  Oligonucleotide primer for the detection of SNP TSC0009622
aataactcaatc

SEQ ID NO: 354904 - DNA, 12 bp, Artificial Sequence
  Oligonucleotide primer for the detection of SNP TSC0009622
aagattggttta

SEQ ID NO: 354905 - DNA, 12 bp, Artificial Sequence
  Oligonucleotide primer for the detection of SNP TSC0009622
aagatcggttta

SEQ ID NO: 354906 - DNA, 12 bp, Artificial Sequence
  Oligonucleotide primer for the detection of SNP TSC0009622
aaaaccaaccca

SEQ ID NO: 354907 - DNA, 12 bp, Artificial Sequence
  Oligonucleotide primer for the detection of SNP TSC0009622
aaaaccgaccca

SEQ ID NO: 354908 - DNA, 12 bp, Artificial Sequence
  Oligonucleotide primer for the detection of SNP TSC0009622
ggtaatttaatt

SEQ ID NO: 354909 - DNA, 12 bp, Artificial Sequence
  Oligonucleotide primer for the detection of SNP TSC0049361
caacattataac

SEQ ID NO: 354910 - DNA, 12 bp, Artificial Sequence
  Oligonucleotide primer for the detection of SNP TSC0049361
caacgttataac

SEQ ID NO: 354911 - DNA, 12 bp, Artificial Sequence
  Oligonucleotide primer for the detection of SNP TSC0049361
gtattttgttta

SEQ ID NO: 354912 - DNA, 12 bp, Artificial Sequence
  Oligonucleotide primer for the detection of SNP TSC0049362
ttacattaaaaa

SEQ ID NO: 354913 - DNA, 12 bp, Artificial Sequence
  Oligonucleotide primer for the detection of SNP TSC0049362
tacgagtatttt

SEQ ID NO: 354914 - DNA, 12 bp, Artificial Sequence
  Oligonucleotide primer for the detection of SNP TSC0049362
tcacaaacatcc

SEQ ID NO: 354915 - DNA, 12 bp, Artificial Sequence
  Oligonucleotide primer for the detection of SNP TSC0049362
tcacgaacatcc

SEQ ID NO: 354916 - DNA, 12 bp, Artificial Sequence
  Oligonucleotide primer for the detection of SNP TSC0049362
ttgtattgggag

SEQ ID NO: 354917 - DNA, 12 bp, Artificial Sequence
  Oligonucleotide primer for the detection of SNP TSC0006194
ttcttctctact

SEQ ID NO: 354918 - DNA, 12 bp, Artificial Sequence
  Oligonucleotide primer for the detection of SNP TSC0006194
ggttaatttttg

SEQ ID NO: 354919 - DNA, 12 bp, Artificial Sequence
  Oligonucleotide primer for the detection of SNP TSC0049364
ttagtgttgtag

SEQ ID NO: 354920 - DNA, 12 bp, Artificial Sequence
  Oligonucleotide primer for the detection of SNP TSC0049364
tcaatattataa

SEQ ID NO: 354921 - DNA, 12 bp, Artificial Sequence
  Oligonucleotide primer for the detection of SNP TSC0049364
gaattttgatat

SEQ ID NO: 354922 - DNA, 12 bp, Artificial Sequence
  Oligonucleotide primer for the detection of SNP TSC0049365
aattggataaat

SEQ ID NO: 354923 - DNA, 12 bp, Artificial Sequence
  Oligonucleotide primer for the detection of SNP TSC0049365
aattggataaac

SEQ ID NO: 354924 - DNA, 12 bp, Artificial Sequence
  Oligonucleotide primer for the detection of SNP TSC0049365
agtgagaattat

SEQ ID NO: 354925 - DNA, 12 bp, Artificial Sequence
  Oligonucleotide primer for the detection of SNP TSC0049366
accttcaatcta

SEQ ID NO: 354926 - DNA, 12 bp, Artificial Sequence
  Oligonucleotide primer for the detection of SNP TSC0049366
taattaggttat

SEQ ID NO: 354927 - DNA, 12 bp, Artificial Sequence
  Oligonucleotide primer for the detection of SNP TSC0049366
caattaaatcac

SEQ ID NO: 354928 - DNA, 12 bp, Artificial Sequence
  Oligonucleotide primer for the detection of SNP TSC0049366
ggtttttaattt

SEQ ID NO: 354929 - DNA, 12 bp, Artificial Sequence
  Oligonucleotide primer for the detection of SNP TSC0049367
atttgtgttaat

SEQ ID NO: 354930 - DNA, 12 bp, Artificial Sequence
  Oligonucleotide primer for the detection of SNP TSC0049373
tagattggtagg

SEQ ID NO: 354931 - DNA, 12 bp, Artificial Sequence
  Oligonucleotide primer for the detection of SNP TSC0010418
ttgagtagttag

SEQ ID NO: 354932 - DNA, 12 bp, Artificial Sequence
  Oligonucleotide primer for the detection of SNP TSC0010418
gttgaagtggtg

SEQ ID NO: 354933 - DNA, 12 bp, Artificial Sequence
  Oligonucleotide primer for the detection of SNP TSC0049374
ctcttctcactc

SEQ ID NO: 354934 - DNA, 12 bp, Artificial Sequence
  Oligonucleotide primer for the detection of SNP TSC0049375
tctctacctcct

SEQ ID NO: 354935 - DNA, 12 bp, Artificial Sequence
  Oligonucleotide primer for the detection of SNP TSC0049375
gtaggtaggatg

SEQ ID NO: 354936 - DNA, 12 bp, Artificial Sequence
  Oligonucleotide primer for the detection of SNP TSC0049379
aaggtttataaa

SEQ ID NO: 354937 - DNA, 12 bp, Artificial Sequence
  Oligonucleotide primer for the detection of SNP TSC0007203
cctaccacaata

SEQ ID NO: 354938 - DNA, 12 bp, Artificial Sequence
  Oligonucleotide primer for the detection of SNP TSC0007203
tttttatggaag

SEQ ID NO: 354939 - DNA, 12 bp, Artificial Sequence
  Oligonucleotide primer for the detection of SNP TSC0007203
tgttatagtatt

SEQ ID NO: 354940 - DNA, 12 bp, Artificial Sequence
  Oligonucleotide primer for the detection of SNP TSC0049381
ggattttgatta

SEQ ID NO: 354941 - DNA, 12 bp, Artificial Sequence
  Oligonucleotide primer for the detection of SNP TSC0049382
aaattacaaacc

SEQ ID NO: 354942 - DNA, 12 bp, Artificial Sequence
  Oligonucleotide primer for the detection of SNP TSC0049382
atttagggttaa

SEQ ID NO: 354943 - DNA, 12 bp, Artificial Sequence
  Oligonucleotide primer for the detection of SNP TSC0049383
caaccttctact

SEQ ID NO: 354944 - DNA, 12 bp, Artificial Sequence
  Oligonucleotide primer for the detection of SNP TSC0049383
ttttgggaagta

SEQ ID NO: 354945 - DNA, 12 bp, Artificial Sequence
  Oligonucleotide primer for the detection of SNP TSC0049384
ccacattccacc

SEQ ID NO: 354946 - DNA, 12 bp, Artificial Sequence
  Oligonucleotide primer for the detection of SNP TSC0049384
ccgcattccacc

SEQ ID NO: 354947 - DNA, 12 bp, Artificial Sequence
  Oligonucleotide primer for the detection of SNP TSC0049384
tagagtagaagg

SEQ ID NO: 354948 - DNA, 12 bp, Artificial Sequence
  Oligonucleotide primer for the detection of SNP TSC0049385
acatatcccctc

SEQ ID NO: 354949 - DNA, 12 bp, Artificial Sequence
  Oligonucleotide primer for the detection of SNP TSC0049385
tttgagtttgta

SEQ ID NO: 354950 - DNA, 12 bp, Artificial Sequence
  Oligonucleotide primer for the detection of SNP TSC0049385
tttaaacttaca

SEQ ID NO: 354951 - DNA, 12 bp, Artificial Sequence
  Oligonucleotide primer for the detection of SNP TSC0049385
gtatgttttttt

SEQ ID NO: 354952 - DNA, 12 bp, Artificial Sequence
  Oligonucleotide primer for the detection of SNP TSC0008941
ttaaaaacactt

SEQ ID NO: 354953 - DNA, 12 bp, Artificial Sequence
  Oligonucleotide primer for the detection of SNP TSC0008941
taagtggtattg

SEQ ID NO: 354954 - DNA, 12 bp, Artificial Sequence
  Oligonucleotide primer for the detection of SNP TSC0049386
aaaaaacttctc

SEQ ID NO: 354955 - DNA, 12 bp, Artificial Sequence
  Oligonucleotide primer for the detection of SNP TSC0049386
gtgttatgaaaa

SEQ ID NO: 354956 - DNA, 12 bp, Artificial Sequence
  Oligonucleotide primer for the detection of SNP TSC0049387
tcaaaatcctac

SEQ ID NO: 354957 - DNA, 12 bp, Artificial Sequence
  Oligonucleotide primer for the detection of SNP TSC0049389
tcctttttccta

SEQ ID NO: 354958 - DNA, 12 bp, Artificial Sequence
  Oligonucleotide primer for the detection of SNP TSC0049390
gaaaaaaacaca

SEQ ID NO: 354959 - DNA, 12 bp, Artificial Sequence
  Oligonucleotide primer for the detection of SNP TSC0049390
tctttcccctac

SEQ ID NO: 354960 - DNA, 12 bp, Artificial Sequence
  Oligonucleotide primer for the detection of SNP TSC0049390
tgaagggagtat

SEQ ID NO: 354961 - DNA, 12 bp, Artificial Sequence
  Oligonucleotide primer for the detection of SNP TSC0049390
cgaagggagtat

SEQ ID NO: 354962 - DNA, 12 bp, Artificial Sequence
  Oligonucleotide primer for the detection of SNP TSC0049391
aaatcacataat

SEQ ID NO: 354963 - DNA, 12 bp, Artificial Sequence
  Oligonucleotide primer for the detection of SNP TSC0049391
aaatcacgtaat

SEQ ID NO: 354964 - DNA, 12 bp, Artificial Sequence
  Oligonucleotide primer for the detection of SNP TSC0049393
aacaataatatt

SEQ ID NO: 354965 - DNA, 12 bp, Artificial Sequence
  Oligonucleotide primer for the detection of SNP TSC0049393
tttcttccactc

SEQ ID NO: 354966 - DNA, 12 bp, Artificial Sequence
  Oligonucleotide primer for the detection of SNP TSC0049393
ggtagtggtatt

SEQ ID NO: 354967 - DNA, 12 bp, Artificial Sequence
  Oligonucleotide primer for the detection of SNP TSC0049394
aatgtagagttt

SEQ ID NO: 354968 - DNA, 12 bp, Artificial Sequence
  Oligonucleotide primer for the detection of SNP TSC0049394
gtggggtgtatg

SEQ ID NO: 354969 - DNA, 12 bp, Artificial Sequence
  Oligonucleotide primer for the detection of SNP TSC0049395
aatatcctaaat

SEQ ID NO: 354970 - DNA, 12 bp, Artificial Sequence
  Oligonucleotide primer for the detection of SNP TSC0049395
ggatgttttata

SEQ ID NO: 354971 - DNA, 12 bp, Artificial Sequence
  Oligonucleotide primer for the detection of SNP TSC0049397
acatcccatata

SEQ ID NO: 354972 - DNA, 12 bp, Artificial Sequence
  Oligonucleotide primer for the detection of SNP TSC0049397
tctccaatacaa

SEQ ID NO: 354973 - DNA, 12 bp, Artificial Sequence
  Oligonucleotide primer for the detection of SNP TSC0049398
ataaacataatc

SEQ ID NO: 354974 - DNA, 12 bp, Artificial Sequence
  Oligonucleotide primer for the detection of SNP TSC0049398
ataaacgtaatc

SEQ ID NO: 354975 - DNA, 12 bp, Artificial Sequence
  Oligonucleotide primer for the detection of SNP TSC0049398
atttggtatgaa

SEQ ID NO: 354976 - DNA, 12 bp, Artificial Sequence
  Oligonucleotide primer for the detection of SNP TSC0049400
ctatcataaacc

SEQ ID NO: 354977 - DNA, 12 bp, Artificial Sequence
  Oligonucleotide primer for the detection of SNP TSC0049400
agattatgataa

SEQ ID NO: 354978 - DNA, 12 bp, Artificial Sequence
  Oligonucleotide primer for the detection of SNP TSC0049400
ttattatgagtt

SEQ ID NO: 354979 - DNA, 12 bp, Artificial Sequence
  Oligonucleotide primer for the detection of SNP TSC0049401
ctacaaaaccct

SEQ ID NO: 354980 - DNA, 12 bp, Artificial Sequence
  Oligonucleotide primer for the detection of SNP TSC0049402
aactcaactcta

SEQ ID NO: 354981 - DNA, 12 bp, Artificial Sequence
  Oligonucleotide primer for the detection of SNP TSC0049402
aaatccacttta

SEQ ID NO: 354982 - DNA, 12 bp, Artificial Sequence
  Oligonucleotide primer for the detection of SNP TSC0049402
aatttagttttg

SEQ ID NO: 354983 - DNA, 12 bp, Artificial Sequence
  Oligonucleotide primer for the detection of SNP TSC0049403
ccatatcccata

SEQ ID NO: 354984 - DNA, 12 bp, Artificial Sequence
  Oligonucleotide primer for the detection of SNP TSC0049404
cctcccaccaaa

SEQ ID NO: 354985 - DNA, 12 bp, Artificial Sequence
  Oligonucleotide primer for the detection of SNP TSC0049404
tgttaagagagg

SEQ ID NO: 354986 - DNA, 12 bp, Artificial Sequence
  Oligonucleotide primer for the detection of SNP TSC0049404
tttttattaggt

SEQ ID NO: 354987 - DNA, 12 bp, Artificial Sequence
  Oligonucleotide primer for the detection of SNP TSC0049405
acacacaatata

SEQ ID NO: 354988 - DNA, 12 bp, Artificial Sequence
  Oligonucleotide primer for the detection of SNP TSC0049405
aacatattaact

SEQ ID NO: 354989 - DNA, 12 bp, Artificial Sequence
  Oligonucleotide primer for the detection of SNP TSC0049405
tatatatagtat

SEQ ID NO: 354990 - DNA, 12 bp, Artificial Sequence
  Oligonucleotide primer for the detection of SNP TSC0049407
tccttaacatcc

SEQ ID NO: 354991 - DNA, 12 bp, Artificial Sequence
  Oligonucleotide primer for the detection of SNP TSC0049407
ggagaggaagaa

SEQ ID NO: 354992 - DNA, 12 bp, Artificial Sequence
  Oligonucleotide primer for the detection of SNP TSC0049410
ccataccctcac

SEQ ID NO: 354993 - DNA, 12 bp, Artificial Sequence
  Oligonucleotide primer for the detection of SNP TSC0049410
tagaaattgaag

SEQ ID NO: 354994 - DNA, 12 bp, Artificial Sequence
  Oligonucleotide primer for the detection of SNP TSC0049411
aagaatgattta

SEQ ID NO: 354995 - DNA, 12 bp, Artificial Sequence
  Oligonucleotide primer for the detection of SNP TSC0049411
aaaaataattca

SEQ ID NO: 354996 - DNA, 12 bp, Artificial Sequence
  Oligonucleotide primer for the detection of SNP TSC0049411
atgtgtgtttat

SEQ ID NO: 354997 - DNA, 12 bp, Artificial Sequence
  Oligonucleotide primer for the detection of SNP TSC0049413
aacatcctaaaa

SEQ ID NO: 354998 - DNA, 12 bp, Artificial Sequence
  Oligonucleotide primer for the detection of SNP TSC0049413
tgtttataagtt

SEQ ID NO: 354999 - DNA, 12 bp, Artificial Sequence
  Oligonucleotide primer for the detection of SNP TSC0049413
cgtttataagtt

SEQ ID NO: 355000 - DNA, 12 bp, Artificial Sequence
  Oligonucleotide primer for the detection of SNP TSC0049413
acatccataaac

SEQ ID NO: 355001 - DNA, 12 bp, Artificial Sequence
  Oligonucleotide primer for the detection of SNP TSC0049413
acgtccataaac

SEQ ID NO: 355002 - DNA, 12 bp, Artificial Sequence
  Oligonucleotide primer for the detection of SNP TSC0049413
aagggatatttt

SEQ ID NO: 355003 - DNA, 12 bp, Artificial Sequence
  Oligonucleotide primer for the detection of SNP TSC0049414
tatttcattact

SEQ ID NO: 355004 - DNA, 12 bp, Artificial Sequence
  Oligonucleotide primer for the detection of SNP TSC0049414
ttttaaatatta

SEQ ID NO: 355005 - DNA, 12 bp, Artificial Sequence
  Oligonucleotide primer for the detection of SNP TSC0049417
tacctaacctct

SEQ ID NO: 355006 - DNA, 12 bp, Artificial Sequence
  Oligonucleotide primer for the detection of SNP TSC0049417
tagaagagtagg

SEQ ID NO: 355007 - DNA, 12 bp, Artificial Sequence
  Oligonucleotide primer for the detection of SNP TSC0049418
tagataattttt

SEQ ID NO: 355008 - DNA, 12 bp, Artificial Sequence
  Oligonucleotide primer for the detection of SNP TSC0049419
ttaactaaaatc

SEQ ID NO: 355009 - DNA, 12 bp, Artificial Sequence
  Oligonucleotide primer for the detection of SNP TSC0049419
ttcatccacata

SEQ ID NO: 355010 - DNA, 12 bp, Artificial Sequence
  Oligonucleotide primer for the detection of SNP TSC0049419
ttaattgaagtt

SEQ ID NO: 355011 - DNA, 12 bp, Artificial Sequence
  Oligonucleotide primer for the detection of SNP TSC0049421
aaggagggaaga

SEQ ID NO: 355012 - DNA, 12 bp, Artificial Sequence
  Oligonucleotide primer for the detection of SNP TSC0049421
attgttgagttt

SEQ ID NO: 355013 - DNA, 12 bp, Artificial Sequence
  Oligonucleotide primer for the detection of SNP TSC0049422
tttattaaaatt

SEQ ID NO: 355014 - DNA, 12 bp, Artificial Sequence
  Oligonucleotide primer for the detection of SNP TSC0049422
tctactaaaatt

SEQ ID NO: 355015 - DNA, 12 bp, Artificial Sequence
  Oligonucleotide primer for the detection of SNP TSC0049423
taacaataaata

SEQ ID NO: 355016 - DNA, 12 bp, Artificial Sequence
  Oligonucleotide primer for the detection of SNP TSC0049423
tggtaataagta

SEQ ID NO: 355017 - DNA, 12 bp, Artificial Sequence
  Oligonucleotide primer for the detection of SNP TSC0049424
tccactttctaa

SEQ ID NO: 355018 - DNA, 12 bp, Artificial Sequence
  Oligonucleotide primer for the detection of SNP TSC0049424
ttatagtaatat

SEQ ID NO: 355019 - DNA, 12 bp, Artificial Sequence
  Oligonucleotide primer for the detection of SNP TSC0049424
ttacaacaatat

SEQ ID NO: 355020 - DNA, 12 bp, Artificial Sequence
  Oligonucleotide primer for the detection of SNP TSC0049425
ccaacccataat

SEQ ID NO: 355021 - DNA, 12 bp, Artificial Sequence
  Oligonucleotide primer for the detection of SNP TSC0049425
tagaaaatatat

SEQ ID NO: 355022 - DNA, 12 bp, Artificial Sequence
  Oligonucleotide primer for the detection of SNP TSC0049426
aaaatttttctc

SEQ ID NO: 355023 - DNA, 12 bp, Artificial Sequence
  Oligonucleotide primer for the detection of SNP TSC0049426
gtttgattaata

SEQ ID NO: 355024 - DNA, 12 bp, Artificial Sequence
  Oligonucleotide primer for the detection of SNP TSC0049427
ttacaaacacgc

SEQ ID NO: 355025 - DNA, 12 bp, Artificial Sequence
  Oligonucleotide primer for the detection of SNP TSC0049428
tcacctctctaa

SEQ ID NO: 355026 - DNA, 12 bp, Artificial Sequence
  Oligonucleotide primer for the detection of SNP TSC0049428
ttttaatgaaga

SEQ ID NO: 355027 - DNA, 12 bp, Artificial Sequence
  Oligonucleotide primer for the detection of SNP TSC0049429
tactttacactt

SEQ ID NO: 355028 - DNA, 12 bp, Artificial Sequence
  Oligonucleotide primer for the detection of SNP TSC0009603
ttagtttttggg

SEQ ID NO: 355029 - DNA, 12 bp, Artificial Sequence
  Oligonucleotide primer for the detection of SNP TSC0049431
ttatataattat

SEQ ID NO: 355030 - DNA, 12 bp, Artificial Sequence
  Oligonucleotide primer for the detection of SNP TSC0049431
tacataactata

SEQ ID NO: 355031 - DNA, 12 bp, Artificial Sequence
  Oligonucleotide primer for the detection of SNP TSC0049432
tcttccttatat

SEQ ID NO: 355032 - DNA, 12 bp, Artificial Sequence
  Oligonucleotide primer for the detection of SNP TSC0006824
ctttataaattt

SEQ ID NO: 355033 - DNA, 12 bp, Artificial Sequence
  Oligonucleotide primer for the detection of SNP TSC0006824
agaatagaggta

SEQ ID NO: 355034 - DNA, 12 bp, Artificial Sequence
  Oligonucleotide primer for the detection of SNP TSC0000340
tcaatctcctaa

SEQ ID NO: 355035 - DNA, 12 bp, Artificial Sequence
  Oligonucleotide primer for the detection of SNP TSC0000340
tcgatctcctaa

SEQ ID NO: 355036 - DNA, 12 bp, Artificial Sequence
  Oligonucleotide primer for the detection of SNP TSC0000340
aaacaaatcaca

SEQ ID NO: 355037 - DNA, 12 bp, Artificial Sequence
  Oligonucleotide primer for the detection of SNP TSC0000340
aaacaaatcacg

SEQ ID NO: 355038 - DNA, 12 bp, Artificial Sequence
  Oligonucleotide primer for the detection of SNP TSC0000340
aaacgaatcaca

SEQ ID NO: 355039 - DNA, 12 bp, Artificial Sequence
  Oligonucleotide primer for the detection of SNP TSC0000340
gaacaaatcaca

SEQ ID NO: 355040 - DNA, 12 bp, Artificial Sequence
  Oligonucleotide primer for the detection of SNP TSC0000340
aaacgaatcacg

SEQ ID NO: 355041 - DNA, 12 bp, Artificial Sequence
  Oligonucleotide primer for the detection of SNP TSC0000340
gaacaaatcacg

SEQ ID NO: 355042 - DNA, 12 bp, Artificial Sequence
  Oligonucleotide primer for the detection of SNP TSC0000340
gaacgaatcaca

SEQ ID NO: 355043 - DNA, 12 bp, Artificial Sequence
  Oligonucleotide primer for the detection of SNP TSC0000340
gaacgaatcacg

SEQ ID NO: 355044 - DNA, 12 bp, Artificial Sequence
  Oligonucleotide primer for the detection of SNP TSC0000340
gattttttgatt

SEQ ID NO: 355045 - DNA, 12 bp, Artificial Sequence
  Oligonucleotide primer for the detection of SNP TSC0000340
gattttttgatc

SEQ ID NO: 355046 - DNA, 12 bp, Artificial Sequence
  Oligonukleotid-Primer
tcaaccccaaaa

SEQ ID NO: 355047 - DNA, 12 bp, Artificial Sequence
  Oligonucleotide primer for the detection of SNP TSC0049435
tcaaccccgaaa

SEQ ID NO: 355048 - DNA, 12 bp, Artificial Sequence
  Oligonucleotide primer for the detection of SNP TSC0049435
attggaaatgtt

SEQ ID NO: 355049 - DNA, 12 bp, Artificial Sequence
  Oligonucleotide primer for the detection of SNP TSC0049435
tttagttttgaa

SEQ ID NO: 355050 - DNA, 12 bp, Artificial Sequence
  Oligonucleotide primer for the detection of SNP TSC0049435
tttagtttcgaa

SEQ ID NO: 355051 - DNA, 12 bp, Artificial Sequence
  Oligonucleotide primer for the detection of SNP TSC0049436
acaaattcacac

SEQ ID NO: 355052 - DNA, 12 bp, Artificial Sequence
  Oligonucleotide primer for the detection of SNP TSC0049436
gggtataaatta

SEQ ID NO: 355053 - DNA, 12 bp, Artificial Sequence
  Oligonucleotide primer for the detection of SNP TSC0049436
gtaaatttatat

SEQ ID NO: 355054 - DNA, 12 bp, Artificial Sequence
  Oligonucleotide primer for the detection of SNP TSC0049437
gttgagttggtg

SEQ ID NO: 355055 - DNA, 12 bp, Artificial Sequence
  Oligonucleotide primer for the detection of SNP TSC0049440
gggttggaattt

SEQ ID NO: 355056 - DNA, 12 bp, Artificial Sequence
  Oligonucleotide primer for the detection of SNP TSC0049440
gagagtttgaaa

SEQ ID NO: 355057 - DNA, 12 bp, Artificial Sequence
  Oligonucleotide primer for the detection of SNP TSC0009155
tttatatttatc

SEQ ID NO: 355058 - DNA, 12 bp, Artificial Sequence
  Oligonucleotide primer for the detection of SNP TSC0009155
taaagtttaatg

SEQ ID NO: 355059 - DNA, 12 bp, Artificial Sequence
  Oligonucleotide primer for the detection of SNP TSC0009156
ttataattataa

SEQ ID NO: 355060 - DNA, 12 bp, Artificial Sequence
  Oligonucleotide primer for the detection of SNP TSC0009156
tagttaaggaat

SEQ ID NO: 355061 - DNA, 12 bp, Artificial Sequence
  Oligonucleotide primer for the detection of SNP TSC0009156
ttgtggttgtag

SEQ ID NO: 355062 - DNA, 12 bp, Artificial Sequence
  Oligonucleotide primer for the detection of SNP TSC0049444
actttcttattc

SEQ ID NO: 355063 - DNA, 12 bp, Artificial Sequence
  Oligonucleotide primer for the detection of SNP TSC0049444
atctaaacacat

SEQ ID NO: 355064 - DNA, 12 bp, Artificial Sequence
  Oligonucleotide primer for the detection of SNP TSC0049445
tattaatttaaa

SEQ ID NO: 355065 - DNA, 12 bp, Artificial Sequence
  Oligonucleotide primer for the detection of SNP TSC0049445
agtaattattat

SEQ ID NO: 355066 - DNA, 12 bp, Artificial Sequence
  Oligonucleotide primer for the detection of SNP TSC0049445
atattggtttgg

SEQ ID NO: 355067 - DNA, 12 bp, Artificial Sequence
  Oligonucleotide primer for the detection of SNP TSC0049456
atacaactaaaa

SEQ ID NO: 355068 - DNA, 12 bp, Artificial Sequence
  Oligonucleotide primer for the detection of SNP TSC0049456
attatttgggtt

SEQ ID NO: 355069 - DNA, 12 bp, Artificial Sequence
  Oligonucleotide primer for the detection of SNP TSC0049456
accacctaaatt

SEQ ID NO: 355070 - DNA, 12 bp, Artificial Sequence
  Oligonucleotide primer for the detection of SNP TSC0049456
gtgtagttgaaa

SEQ ID NO: 355071 - DNA, 12 bp, Artificial Sequence
  Oligonucleotide primer for the detection of SNP TSC0049457
aaaatattatcc

SEQ ID NO: 355072 - DNA, 12 bp, Artificial Sequence
  Oligonucleotide primer for the detection of SNP TSC0049457
tttttggaaatg

SEQ ID NO: 355073 - DNA, 12 bp, Artificial Sequence
  Oligonucleotide primer for the detection of SNP TSC0049457
agggtattattt

SEQ ID NO: 355074 - DNA, 12 bp, Artificial Sequence
  Oligonucleotide primer for the detection of SNP TSC0049457
agggtattattc

SEQ ID NO: 355075 - DNA, 12 bp, Artificial Sequence
  Oligonucleotide primer for the detection of SNP TSC0049458
aaatatctactt

SEQ ID NO: 355076 - DNA, 12 bp, Artificial Sequence
  Oligonucleotide primer for the detection of SNP TSC0049458
tgatatttagta

SEQ ID NO: 355077 - DNA, 12 bp, Artificial Sequence
  Oligonucleotide primer for the detection of SNP TSC0049458
cgatatttagta

SEQ ID NO: 355078 - DNA, 12 bp, Artificial Sequence
  Oligonucleotide primer for the detection of SNP TSC0049458
caacacctaaca

SEQ ID NO: 355079 - DNA, 12 bp, Artificial Sequence
  Oligonucleotide primer for the detection of SNP TSC0049458
cgacacctaaca

SEQ ID NO: 355080 - DNA, 12 bp, Artificial Sequence
  Oligonucleotide primer for the detection of SNP TSC0049458
gggtgtttattt

SEQ ID NO: 355081 - DNA, 12 bp, Artificial Sequence
  Oligonucleotide primer for the detection of SNP TSC0049459
aaacaaataatc

SEQ ID NO: 355082 - DNA, 12 bp, Artificial Sequence
  Oligonucleotide primer for the detection of SNP TSC0049459
aaacgaataatc

SEQ ID NO: 355083 - DNA, 12 bp, Artificial Sequence
  Oligonucleotide primer for the detection of SNP TSC0049460
taatttatataa

SEQ ID NO: 355084 - DNA, 12 bp, Artificial Sequence
  Oligonucleotide primer for the detection of SNP TSC0049460
aaaaaccatctt

SEQ ID NO: 355085 - DNA, 12 bp, Artificial Sequence
  Oligonucleotide primer for the detection of SNP TSC0049460
tagtttatgtga

SEQ ID NO: 355086 - DNA, 12 bp, Artificial Sequence
  Oligonucleotide primer for the detection of SNP TSC0049464
ttttacttcatt

SEQ ID NO: 355087 - DNA, 12 bp, Artificial Sequence
  Oligonucleotide primer for the detection of SNP TSC0049464
ttgattaaataa

SEQ ID NO: 355088 - DNA, 12 bp, Artificial Sequence
  Oligonucleotide primer for the detection of SNP TSC0049464
ctaattaaataa

SEQ ID NO: 355089 - DNA, 12 bp, Artificial Sequence
  Oligonucleotide primer for the detection of SNP TSC0049466
attataatagaa

SEQ ID NO: 355090 - DNA, 12 bp, Artificial Sequence
  Oligonucleotide primer for the detection of SNP TSC0049467
tattataattta

SEQ ID NO: 355091 - DNA, 12 bp, Artificial Sequence
  Oligonucleotide primer for the detection of SNP TSC0049470
ttaaaaaacttt

SEQ ID NO: 355092 - DNA, 12 bp, Artificial Sequence
  Oligonucleotide primer for the detection of SNP TSC0049475
taaacaatacaa

SEQ ID NO: 355093 - DNA, 12 bp, Artificial Sequence
  Oligonucleotide primer for the detection of SNP TSC0049475
tgtatagtttat

SEQ ID NO: 355094 - DNA, 12 bp, Artificial Sequence
  Oligonucleotide primer for the detection of SNP TSC0049475
tgaatagtgtag

SEQ ID NO: 355095 - DNA, 12 bp, Artificial Sequence
  Oligonucleotide primer for the detection of SNP TSC0049478
atcactaataaa

SEQ ID NO: 355096 - DNA, 12 bp, Artificial Sequence
  Oligonucleotide primer for the detection of SNP TSC0049478
gtcactaataaa

SEQ ID NO: 355097 - DNA, 12 bp, Artificial Sequence
  Oligonucleotide primer for the detection of SNP TSC0049478
tattttttgtac

SEQ ID NO: 355098 - DNA, 12 bp, Artificial Sequence
  Oligonucleotide primer for the detection of SNP TSC0049478
acatcctctaca

SEQ ID NO: 355099 - DNA, 12 bp, Artificial Sequence
  Oligonucleotide primer for the detection of SNP TSC0049478
gttattaatgaa

SEQ ID NO: 355100 - DNA, 12 bp, Artificial Sequence
  Oligonucleotide primer for the detection of SNP TSC0049479
taactactttaa

SEQ ID NO: 355101 - DNA, 12 bp, Artificial Sequence
  Oligonucleotide primer for the detection of SNP TSC0049479
tgtttgagaaat

SEQ ID NO: 355102 - DNA, 12 bp, Artificial Sequence
  Oligonucleotide primer for the detection of SNP TSC0049479
tgtttgagaaac

SEQ ID NO: 355103 - DNA, 12 bp, Artificial Sequence
  Oligonucleotide primer for the detection of SNP TSC0049480
tctacaaattac

SEQ ID NO: 355104 - DNA, 12 bp, Artificial Sequence
  Oligonucleotide primer for the detection of SNP TSC0049481
acaaccataatc

SEQ ID NO: 355105 - DNA, 12 bp, Artificial Sequence
  Oligonucleotide primer for the detection of SNP TSC0049481
atttttttctta

SEQ ID NO: 355106 - DNA, 12 bp, Artificial Sequence
  Oligonucleotide primer for the detection of SNP TSC0049482
taaaaaaacaca

SEQ ID NO: 355107 - DNA, 12 bp, Artificial Sequence
  Oligonucleotide primer for the detection of SNP TSC0049482
ttttaagaatat

SEQ ID NO: 355108 - DNA, 12 bp, Artificial Sequence
  Oligonucleotide primer for the detection of SNP TSC0049482
gtgaaaggatat

SEQ ID NO: 355109 - DNA, 12 bp, Artificial Sequence
  Oligonucleotide primer for the detection of SNP TSC0007469
tcatcaaattat

SEQ ID NO: 355110 - DNA, 12 bp, Artificial Sequence
  Oligonucleotide primer for the detection of SNP TSC0007470
aaataacctaat

SEQ ID NO: 355111 - DNA, 12 bp, Artificial Sequence
  Oligonucleotide primer for the detection of SNP TSC0007470
tgtttgggtata

SEQ ID NO: 355112 - DNA, 12 bp, Artificial Sequence
  Oligonucleotide primer for the detection of SNP TSC0049484
ccaccataccct

SEQ ID NO: 355113 - DNA, 12 bp, Artificial Sequence
  Oligonucleotide primer for the detection of SNP TSC0049484
gtgtaatagtgg

SEQ ID NO: 355114 - DNA, 12 bp, Artificial Sequence
  Oligonucleotide primer for the detection of SNP TSC0049485
cccataaacatt

SEQ ID NO: 355115 - DNA, 12 bp, Artificial Sequence
  Oligonucleotide primer for the detection of SNP TSC0049485
gttgaaaaataa

SEQ ID NO: 355116 - DNA, 12 bp, Artificial Sequence
  Oligonucleotide primer for the detection of SNP TSC0049486
caaataatattc

SEQ ID NO: 355117 - DNA, 12 bp, Artificial Sequence
  Oligonucleotide primer for the detection of SNP TSC0049486
tgtgataaaaga

SEQ ID NO: 355118 - DNA, 12 bp, Artificial Sequence
  Oligonucleotide primer for the detection of SNP TSC0049488
taatatcaataa

SEQ ID NO: 355119 - DNA, 12 bp, Artificial Sequence
  Oligonucleotide primer for the detection of SNP TSC0049489
caccaacataac

SEQ ID NO: 355120 - DNA, 12 bp, Artificial Sequence
  Oligonucleotide primer for the detection of SNP TSC0049490
tctccaaacatc

SEQ ID NO: 355121 - DNA, 12 bp, Artificial Sequence
  Oligonucleotide primer for the detection of SNP TSC0049490
aaataatgagta

SEQ ID NO: 355122 - DNA, 12 bp, Artificial Sequence
  Oligonucleotide primer for the detection of SNP TSC0049494
attcaaatacat

SEQ ID NO: 355123 - DNA, 12 bp, Artificial Sequence
  Oligonucleotide primer for the detection of SNP TSC0049494
attcaaatacgt

SEQ ID NO: 355124 - DNA, 12 bp, Artificial Sequence
  Oligonucleotide primer for the detection of SNP TSC0049494
tgtagattaatg

SEQ ID NO: 355125 - DNA, 12 bp, Artificial Sequence
  Oligonucleotide primer for the detection of SNP TSC0007952
atacattaattt

SEQ ID NO: 355126 - DNA, 12 bp, Artificial Sequence
  Oligonucleotide primer for the detection of SNP TSC0007952
atatattaattt

SEQ ID NO: 355127 - DNA, 12 bp, Artificial Sequence
  Oligonucleotide primer for the detection of SNP TSC0007953
aataattaatat

SEQ ID NO: 355128 - DNA, 12 bp, Artificial Sequence
  Oligonucleotide primer for the detection of SNP TSC0007953
tattagtttaga

SEQ ID NO: 355129 - DNA, 12 bp, Artificial Sequence
  Oligonucleotide primer for the detection of SNP TSC0007953
taccaactcaaa

SEQ ID NO: 355130 - DNA, 12 bp, Artificial Sequence
  Oligonucleotide primer for the detection of SNP TSC0007953
ggtagttaatat

SEQ ID NO: 355131 - DNA, 12 bp, Artificial Sequence
  Oligonucleotide primer for the detection of SNP TSC0049495
tattaaatttaa

SEQ ID NO: 355132 - DNA, 12 bp, Artificial Sequence
  Oligonucleotide primer for the detection of SNP TSC0049495
aaaagttttgga

SEQ ID NO: 355133 - DNA, 12 bp, Artificial Sequence
  Oligonucleotide primer for the detection of SNP TSC0049495
agtgttgaattt

SEQ ID NO: 355134 - DNA, 12 bp, Artificial Sequence
  Oligonucleotide primer for the detection of SNP TSC0049496
agatttggaggg

SEQ ID NO: 355135 - DNA, 12 bp, Artificial Sequence
  Oligonucleotide primer for the detection of SNP TSC0049497
acaaaacctaat

SEQ ID NO: 355136 - DNA, 12 bp, Artificial Sequence
  Oligonucleotide primer for the detection of SNP TSC0049497
tttttttgtaga

SEQ ID NO: 355137 - DNA, 12 bp, Artificial Sequence
  Oligonucleotide primer for the detection of SNP TSC0049498
attcactactat

SEQ ID NO: 355138 - DNA, 12 bp, Artificial Sequence
  Oligonucleotide primer for the detection of SNP TSC0049503
tcacatatataa

SEQ ID NO: 355139 - DNA, 12 bp, Artificial Sequence
  Oligonucleotide primer for the detection of SNP TSC0049503
tcacgtatataa

SEQ ID NO: 355140 - DNA, 12 bp, Artificial Sequence
  Oligonucleotide primer for the detection of SNP TSC0049503
tgtaagtaattt

SEQ ID NO: 355141 - DNA, 12 bp, Artificial Sequence
  Oligonucleotide primer for the detection of SNP TSC0049503
cgtaagtaattt

SEQ ID NO: 355142 - DNA, 12 bp, Artificial Sequence
  Oligonucleotide primer for the detection of SNP TSC0049503
acataaacaatc

SEQ ID NO: 355143 - DNA, 12 bp, Artificial Sequence
  Oligonucleotide primer for the detection of SNP TSC0049503
acgtaaacaatc

SEQ ID NO: 355144 - DNA, 12 bp, Artificial Sequence
  Oligonucleotide primer for the detection of SNP TSC0049503
ttatgtatgtag

SEQ ID NO: 355145 - DNA, 12 bp, Artificial Sequence
  Oligonucleotide primer for the detection of SNP TSC0049503
ttacgtatgtag

SEQ ID NO: 355146 - DNA, 12 bp, Artificial Sequence
  Oligonucleotide primer for the detection of SNP TSC0049504
atcactacaaaa

SEQ ID NO: 355147 - DNA, 12 bp, Artificial Sequence
  Oligonucleotide primer for the detection of SNP TSC0049504
gtttattggaat

SEQ ID NO: 355148 - DNA, 12 bp, Artificial Sequence
  Oligonucleotide primer for the detection of SNP TSC0049504
catccactaaaa

SEQ ID NO: 355149 - DNA, 12 bp, Artificial Sequence
  Oligonucleotide primer for the detection of SNP TSC0049504
cgtccactaaaa

SEQ ID NO: 355150 - DNA, 12 bp, Artificial Sequence
  Oligonucleotide primer for the detection of SNP TSC0049504
attattgtagaa

SEQ ID NO: 355151 - DNA, 12 bp, Artificial Sequence
  Oligonucleotide primer for the detection of SNP TSC0049506
tattaaattaca

SEQ ID NO: 355152 - DNA, 12 bp, Artificial Sequence
  Oligonucleotide primer for the detection of SNP TSC0049506
tttaaggaggat

SEQ ID NO: 355153 - DNA, 12 bp, Artificial Sequence
  Oligonucleotide primer for the detection of SNP TSC0049506
ttgttaggttgt

SEQ ID NO: 355154 - DNA, 12 bp, Artificial Sequence
  Oligonucleotide primer for the detection of SNP TSC0049508
taacaactaaaa

SEQ ID NO: 355155 - DNA, 12 bp, Artificial Sequence
  Oligonucleotide primer for the detection of SNP TSC0049508
taacgactaaaa

SEQ ID NO: 355156 - DNA, 12 bp, Artificial Sequence
  Oligonucleotide primer for the detection of SNP TSC0049508
ttatatagaatt

SEQ ID NO: 355157 - DNA, 12 bp, Artificial Sequence
  Oligonucleotide primer for the detection of SNP TSC0049508
ttatatagaatc

SEQ ID NO: 355158 - DNA, 12 bp, Artificial Sequence
  Oligonucleotide primer for the detection of SNP TSC0049508
ccacacaaaacc

SEQ ID NO: 355159 - DNA, 12 bp, Artificial Sequence
  Oligonucleotide primer for the detection of SNP TSC0049508
tagtgattgggg

SEQ ID NO: 355160 - DNA, 12 bp, Artificial Sequence
  Oligonucleotide primer for the detection of SNP TSC0049508
tagcgattgggg

SEQ ID NO: 355161 - DNA, 12 bp, Artificial Sequence
  Oligonucleotide primer for the detection of SNP TSC0049513
tgataattattt

SEQ ID NO: 355162 - DNA, 12 bp, Artificial Sequence
  Oligonucleotide primer for the detection of SNP TSC0049513
taataattacct

SEQ ID NO: 355163 - DNA, 12 bp, Artificial Sequence
  Oligonucleotide primer for the detection of SNP TSC0049513
tattattgtata

SEQ ID NO: 355164 - DNA, 12 bp, Artificial Sequence
  Oligonucleotide primer for the detection of SNP TSC0049514
taatattcataa

SEQ ID NO: 355165 - DNA, 12 bp, Artificial Sequence
  Oligonucleotide primer for the detection of SNP TSC0049514
aatttatggttt

SEQ ID NO: 355166 - DNA, 12 bp, Artificial Sequence
  Oligonucleotide primer for the detection of SNP TSC0049514
caaaacccataa

SEQ ID NO: 355167 - DNA, 12 bp, Artificial Sequence
  Oligonucleotide primer for the detection of SNP TSC0049514
atgatatttatg

SEQ ID NO: 355168 - DNA, 12 bp, Artificial Sequence
  Oligonucleotide primer for the detection of SNP TSC0049515
gcattataaaaa

SEQ ID NO: 355169 - DNA, 12 bp, Artificial Sequence
  Oligonucleotide primer for the detection of SNP TSC0049515
ctccaaaccaaa

SEQ ID NO: 355170 - DNA, 12 bp, Artificial Sequence
  Oligonucleotide primer for the detection of SNP TSC0049515
tgaatgtattgt

SEQ ID NO: 355171 - DNA, 12 bp, Artificial Sequence
  Oligonucleotide primer for the detection of SNP TSC0049515
tgaacgtattgt

SEQ ID NO: 355172 - DNA, 12 bp, Artificial Sequence
  Oligonucleotide primer for the detection of SNP TSC0049516
atcacttaaaat

SEQ ID NO: 355173 - DNA, 12 bp, Artificial Sequence
  Oligonucleotide primer for the detection of SNP TSC0049516
tttttaaaatta

SEQ ID NO: 355174 - DNA, 12 bp, Artificial Sequence
  Oligonucleotide primer for the detection of SNP TSC0049517
tcataaccaaat

SEQ ID NO: 355175 - DNA, 12 bp, Artificial Sequence
  Oligonucleotide primer for the detection of SNP TSC0049517
tcataaccgaat

SEQ ID NO: 355176 - DNA, 12 bp, Artificial Sequence
  Oligonucleotide primer for the detection of SNP TSC0049517
ttaaatatgaag

SEQ ID NO: 355177 - DNA, 12 bp, Artificial Sequence
  Oligonucleotide primer for the detection of SNP TSC0049518
ctaacaatcaca

SEQ ID NO: 355178 - DNA, 12 bp, Artificial Sequence
  Oligonucleotide primer for the detection of SNP TSC0049518
ctatccttctca

SEQ ID NO: 355179 - DNA, 12 bp, Artificial Sequence
  Oligonucleotide primer for the detection of SNP TSC0049518
tgatagttatat

SEQ ID NO: 355180 - DNA, 12 bp, Artificial Sequence
  Oligonucleotide primer for the detection of SNP TSC0049519
ttaaatccactc

SEQ ID NO: 355181 - DNA, 12 bp, Artificial Sequence
  Oligonucleotide primer for the detection of SNP TSC0049519
atttacatcaaa

SEQ ID NO: 355182 - DNA, 12 bp, Artificial Sequence
  Oligonucleotide primer for the detection of SNP TSC0005000
agtttaatattt

SEQ ID NO: 355183 - DNA, 12 bp, Artificial Sequence
  Oligonucleotide primer for the detection of SNP TSC0005000
aattcaacactt

SEQ ID NO: 355184 - DNA, 12 bp, Artificial Sequence
  Oligonucleotide primer for the detection of SNP TSC0005000
atgtaattgagg

SEQ ID NO: 355185 - DNA, 12 bp, Artificial Sequence
  Oligonucleotide primer for the detection of SNP TSC0005001
tacctttattcc

SEQ ID NO: 355186 - DNA, 12 bp, Artificial Sequence
  Oligonucleotide primer for the detection of SNP TSC0005001
aaatgggtaaag

SEQ ID NO: 355187 - DNA, 12 bp, Artificial Sequence
  Oligonucleotide primer for the detection of SNP TSC0049520
ttaatttattat

SEQ ID NO: 355188 - DNA, 12 bp, Artificial Sequence
  Oligonucleotide primer for the detection of SNP TSC0049520
tagtaaaaataa

SEQ ID NO: 355189 - DNA, 12 bp, Artificial Sequence
  Oligonucleotide primer for the detection of SNP TSC0049521
ttattatattat

SEQ ID NO: 355190 - DNA, 12 bp, Artificial Sequence
  Oligonucleotide primer for the detection of SNP TSC0049521
ttgtgaagatta

SEQ ID NO: 355191 - DNA, 12 bp, Artificial Sequence
  Oligonucleotide primer for the detection of SNP TSC0049522
tcacaccaaaac

SEQ ID NO: 355192 - DNA, 12 bp, Artificial Sequence
  Oligonucleotide primer for the detection of SNP TSC0049522
taagatgaaagg

SEQ ID NO: 355193 - DNA, 12 bp, Artificial Sequence
  Oligonucleotide primer for the detection of SNP TSC0000396
ttctctttctat

SEQ ID NO: 355194 - DNA, 12 bp, Artificial Sequence
  Oligonucleotide primer for the detection of SNP TSC0000396
gaaataagttag

SEQ ID NO: 355195 - DNA, 12 bp, Artificial Sequence
  Oligonucleotide primer for the detection of SNP TSC0049523
atttccacaaaa

SEQ ID NO: 355196 - DNA, 12 bp, Artificial Sequence
  Oligonucleotide primer for the detection of SNP TSC0049523
ttaattgaatga

SEQ ID NO: 355197 - DNA, 12 bp, Artificial Sequence
  Oligonucleotide primer for the detection of SNP TSC0049523
tcaattaaataa

SEQ ID NO: 355198 - DNA, 12 bp, Artificial Sequence
  Oligonucleotide primer for the detection of SNP TSC0049524
accacttaaatt

SEQ ID NO: 355199 - DNA, 12 bp, Artificial Sequence
  Oligonucleotide primer for the detection of SNP TSC0049524
gatttgtatttt

SEQ ID NO: 355200 - DNA, 12 bp, Artificial Sequence
  Oligonucleotide primer for the detection of SNP TSC0049524
acttatacttta

SEQ ID NO: 355201 - DNA, 12 bp, Artificial Sequence
  Oligonucleotide primer for the detection of SNP TSC0049524
tatttgggtttt

SEQ ID NO: 355202 - DNA, 12 bp, Artificial Sequence
  Oligonucleotide primer for the detection of SNP TSC0049525
taatacaaacat

SEQ ID NO: 355203 - DNA, 12 bp, Artificial Sequence
  Oligonucleotide primer for the detection of SNP TSC0049525
aagttatatata

SEQ ID NO: 355204 - DNA, 12 bp, Artificial Sequence
  Oligonucleotide primer for the detection of SNP TSC0049526
acatctatatat

SEQ ID NO: 355205 - DNA, 12 bp, Artificial Sequence
  Oligonucleotide primer for the detection of SNP TSC0049527
ttaactaaaccc

SEQ ID NO: 355206 - DNA, 12 bp, Artificial Sequence
  Oligonucleotide primer for the detection of SNP TSC0049527
gagtattttaga

SEQ ID NO: 355207 - DNA, 12 bp, Artificial Sequence
  Oligonucleotide primer for the detection of SNP TSC0049528
agttttttatga

SEQ ID NO: 355208 - DNA, 12 bp, Artificial Sequence
  Oligonucleotide primer for the detection of SNP TSC0049529
ccttaattactt

SEQ ID NO: 355209 - DNA, 12 bp, Artificial Sequence
  Oligonucleotide primer for the detection of SNP TSC0049529
ggggagaataaa

SEQ ID NO: 355210 - DNA, 12 bp, Artificial Sequence
  Oligonucleotide primer for the detection of SNP TSC0049530
tctcaattcact

SEQ ID NO: 355211 - DNA, 12 bp, Artificial Sequence
  Oligonucleotide primer for the detection of SNP TSC0049530
ttttaaagatga

SEQ ID NO: 355212 - DNA, 12 bp, Artificial Sequence
  Oligonucleotide primer for the detection of SNP TSC0049531
actataatcttt

SEQ ID NO: 355213 - DNA, 12 bp, Artificial Sequence
  Oligonucleotide primer for the detection of SNP TSC0049531
ctaatttttcca

SEQ ID NO: 355214 - DNA, 12 bp, Artificial Sequence
  Oligonucleotide primer for the detection of SNP TSC0049531
gttatggttttt

SEQ ID NO: 355215 - DNA, 12 bp, Artificial Sequence
  Oligonucleotide primer for the detection of SNP TSC0004957
aaaaatactact

SEQ ID NO: 355216 - DNA, 12 bp, Artificial Sequence
  Oligonucleotide primer for the detection of SNP TSC0004957
gagagtgttatt

SEQ ID NO: 355217 - DNA, 12 bp, Artificial Sequence
  Oligonucleotide primer for the detection of SNP TSC0049535
aagaaagatata

SEQ ID NO: 355218 - DNA, 12 bp, Artificial Sequence
  Oligonucleotide primer for the detection of SNP TSC0008094
cccaaaaattaa

SEQ ID NO: 355219 - DNA, 12 bp, Artificial Sequence
  Oligonucleotide primer for the detection of SNP TSC0008094
tttaggttagtt

SEQ ID NO: 355220 - DNA, 12 bp, Artificial Sequence
  Oligonucleotide primer for the detection of SNP TSC0008094
tttaggttagtc

SEQ ID NO: 355221 - DNA, 12 bp, Artificial Sequence
  Oligonucleotide primer for the detection of SNP TSC0008094
acccaaactaat

SEQ ID NO: 355222 - DNA, 12 bp, Artificial Sequence
  Oligonucleotide primer for the detection of SNP TSC0049536
cacaccactata

SEQ ID NO: 355223 - DNA, 12 bp, Artificial Sequence
  Oligonucleotide primer for the detection of SNP TSC0049536
aaaaaattagta

SEQ ID NO: 355224 - DNA, 12 bp, Artificial Sequence
  Oligonucleotide primer for the detection of SNP TSC0049536
tattattatgtc

SEQ ID NO: 355225 - DNA, 12 bp, Artificial Sequence
  Oligonucleotide primer for the detection of SNP TSC0010688
tttgtgtgtttg

SEQ ID NO: 355226 - DNA, 12 bp, Artificial Sequence
  Oligonucleotide primer for the detection of SNP TSC0049537
cttttctaattt

SEQ ID NO: 355227 - DNA, 12 bp, Artificial Sequence
  Oligonucleotide primer for the detection of SNP TSC0049537
tttgagttgtaa

SEQ ID NO: 355228 - DNA, 12 bp, Artificial Sequence
  Oligonucleotide primer for the detection of SNP TSC0009060
ctacaaattaca

SEQ ID NO: 355229 - DNA, 12 bp, Artificial Sequence
  Oligonucleotide primer for the detection of SNP TSC0009060
accccttccaca

SEQ ID NO: 355230 - DNA, 12 bp, Artificial Sequence
  Oligonucleotide primer for the detection of SNP TSC0009060
tgtaaattgtat

SEQ ID NO: 355231 - DNA, 12 bp, Artificial Sequence
  Oligonucleotide primer for the detection of SNP TSC0049538
tttccctcaatt

SEQ ID NO: 355232 - DNA, 12 bp, Artificial Sequence
  Oligonucleotide primer for the detection of SNP TSC0049538
aagaataaaata

SEQ ID NO: 355233 - DNA, 12 bp, Artificial Sequence
  Oligonucleotide primer for the detection of SNP TSC0049540
aaccaatatttt

SEQ ID NO: 355234 - DNA, 12 bp, Artificial Sequence
  Oligonucleotide primer for the detection of SNP TSC0049540
aaggtatttaag

SEQ ID NO: 355235 - DNA, 12 bp, Artificial Sequence
  Oligonucleotide primer for the detection of SNP TSC0049541
aagtagatattt

SEQ ID NO: 355236 - DNA, 12 bp, Artificial Sequence
  Oligonucleotide primer for the detection of SNP TSC0049541
aacaaacactta

SEQ ID NO: 355237 - DNA, 12 bp, Artificial Sequence
  Oligonucleotide primer for the detection of SNP TSC0049541
ttgattgataag

SEQ ID NO: 355238 - DNA, 12 bp, Artificial Sequence
  Oligonucleotide primer for the detection of SNP TSC0010294
aaacctattata

SEQ ID NO: 355239 - DNA, 12 bp, Artificial Sequence
  Oligonucleotide primer for the detection of SNP TSC0010294
agagttattttt

SEQ ID NO: 355240 - DNA, 12 bp, Artificial Sequence
  Oligonucleotide primer for the detection of SNP TSC0010294
aaaattaccctt

SEQ ID NO: 355241 - DNA, 12 bp, Artificial Sequence
  Oligonucleotide primer for the detection of SNP TSC0010294
gagtttgttata

SEQ ID NO: 355242 - DNA, 12 bp, Artificial Sequence
  Oligonucleotide primer for the detection of SNP TSC0049542
atttttttctct

SEQ ID NO: 355243 - DNA, 12 bp, Artificial Sequence
  Oligonucleotide primer for the detection of SNP TSC0049544
tctctaccatac

SEQ ID NO: 355244 - DNA, 12 bp, Artificial Sequence
  Oligonucleotide primer for the detection of SNP TSC0049544
attcccttaaca

SEQ ID NO: 355245 - DNA, 12 bp, Artificial Sequence
  Oligonucleotide primer for the detection of SNP TSC0049544
tttttgttatat

SEQ ID NO: 355246 - DNA, 12 bp, Artificial Sequence
  Oligonucleotide primer for the detection of SNP TSC0049545
ttaataaatcat

SEQ ID NO: 355247 - DNA, 12 bp, Artificial Sequence
  Oligonukleotid-Primer
ttaataaatcgt

SEQ ID NO: 355248 - DNA, 12 bp, Artificial Sequence
  Oligonucleotide primer for the detection of SNP TSC0049545
tattaaataata

SEQ ID NO: 355249 - DNA, 12 bp, Artificial Sequence
  Oligonucleotide primer for the detection of SNP TSC0049546
aacaaaattaat

SEQ ID NO: 355250 - DNA, 12 bp, Artificial Sequence
  Oligonucleotide primer for the detection of SNP TSC0049546
ttagaaaataaa

SEQ ID NO: 355251 - DNA, 12 bp, Artificial Sequence
  Oligonukleotid-Primer
ttaaattcaaaa

SEQ ID NO: 355252 - DNA, 12 bp, Artificial Sequence
  Oligonucleotide primer for the detection of SNP TSC0049547
gttatttattat

SEQ ID NO: 355253 - DNA, 12 bp, Artificial Sequence
  Oligonucleotide primer for the detection of SNP TSC0049547
ttaaatttaaga

SEQ ID NO: 355254 - DNA, 12 bp, Artificial Sequence
  Oligonucleotide primer for the detection of SNP TSC0049549
tagatttttatg

SEQ ID NO: 355255 - DNA, 12 bp, Artificial Sequence
  Oligonukleotid-Primer
caaattcccata

SEQ ID NO: 355256 - DNA, 12 bp, Artificial Sequence
  Oligonucleotide primer for the detection of SNP TSC0049549
gaaaaaaatttt

SEQ ID NO: 355257 - DNA, 12 bp, Artificial Sequence
  Oligonucleotide primer for the detection of SNP TSC0049550
caaatcctaaat

SEQ ID NO: 355258 - DNA, 12 bp, Artificial Sequence
  Oligonucleotide primer for the detection of SNP TSC0049550
ggttttgtttaa

SEQ ID NO: 355259 - DNA, 12 bp, Artificial Sequence
  Oligonucleotide primer for the detection of SNP TSC0049553
aaaattttaaca

SEQ ID NO: 355260 - DNA, 12 bp, Artificial Sequence
  Oligonucleotide primer for the detection of SNP TSC0049553
tgtatgtagttt

SEQ ID NO: 355261 - DNA, 12 bp, Artificial Sequence
  Oligonucleotide primer for the detection of SNP TSC0049556
tataatatacta

SEQ ID NO: 355262 - DNA, 12 bp, Artificial Sequence
  Oligonucleotide primer for the detection of SNP TSC0049556
aagttatagtgt

SEQ ID NO: 355263 - DNA, 12 bp, Artificial Sequence
  Oligonucleotide primer for the detection of SNP TSC0049556
aagttatagtgc

SEQ ID NO: 355264 - DNA, 12 bp, Artificial Sequence
  Oligonucleotide primer for the detection of SNP TSC0049556
aaaccacaatac

SEQ ID NO: 355265 - DNA, 12 bp, Artificial Sequence
  Oligonucleotide primer for the detection of SNP TSC0049556
tgtgatgtgttg

SEQ ID NO: 355266 - DNA, 12 bp, Artificial Sequence
  Oligonucleotide primer for the detection of SNP TSC0049557
tctcaaaccaca

SEQ ID NO: 355267 - DNA, 12 bp, Artificial Sequence
  Oligonukleotid-Primer
gaaaattttttt

SEQ ID NO: 355268 - DNA, 12 bp, Artificial Sequence
  Oligonucleotide primer for the detection of SNP TSC0049557
aaaaattccttt

SEQ ID NO: 355269 - DNA, 12 bp, Artificial Sequence
  Oligonucleotide primer for the detection of SNP TSC0049561
actccacattac

SEQ ID NO: 355270 - DNA, 12 bp, Artificial Sequence
  Oligonucleotide primer for the detection of SNP TSC0049561
tttttggtttga

SEQ ID NO: 355271 - DNA, 12 bp, Artificial Sequence
  Oligonukleotid-Primer
tactaacctttt

SEQ ID NO: 355272 - DNA, 12 bp, Artificial Sequence
  Oligonucleotide primer for the detection of SNP TSC0049562
aataacttaact

SEQ ID NO: 355273 - DNA, 12 bp, Artificial Sequence
  Oligonucleotide primer for the detection of SNP TSC0049563
aaaataacacta

SEQ ID NO: 355274 - DNA, 12 bp, Artificial Sequence
  Oligonucleotide primer for the detection of SNP TSC0049563
gttgagggtgtt

SEQ ID NO: 355275 - DNA, 12 bp, Artificial Sequence
  Oligonucleotide primer for the detection of SNP TSC0049563
ggggtgatattg

SEQ ID NO: 355276 - DNA, 12 bp, Artificial Sequence
  Oligonucleotide primer for the detection of SNP TSC0049564
gggttgggtttt

SEQ ID NO: 355277 - DNA, 12 bp, Artificial Sequence
  Oligonucleotide primer for the detection of SNP TSC0005901
ctattataaatc

SEQ ID NO: 355278 - DNA, 12 bp, Artificial Sequence
  Oligonucleotide primer for the detection of SNP TSC0005901
tctaaatcaata

SEQ ID NO: 355279 - DNA, 12 bp, Artificial Sequence
  Oligonucleotide primer for the detection of SNP TSC0005901
ttattataagtt

SEQ ID NO: 355280 - DNA, 12 bp, Artificial Sequence
  Oligonucleotide primer for the detection of SNP TSC0049570
accccaccaacc

SEQ ID NO: 355281 - DNA, 12 bp, Artificial Sequence
  Oligonucleotide primer for the detection of SNP TSC0049570
ttgggttagttg

SEQ ID NO: 355282 - DNA, 12 bp, Artificial Sequence
  Oligonucleotide primer for the detection of SNP TSC0008813
attaaggtggta

SEQ ID NO: 355283 - DNA, 12 bp, Artificial Sequence
  Oligonucleotide primer for the detection of SNP TSC0008813
ggggatgaaatt

SEQ ID NO: 355284 - DNA, 12 bp, Artificial Sequence
  Oligonucleotide primer for the detection of SNP TSC0049571
tatacttcctcc

SEQ ID NO: 355285 - DNA, 12 bp, Artificial Sequence
  Oligonucleotide primer for the detection of SNP TSC0049571
ggtggagaggag

SEQ ID NO: 355286 - DNA, 12 bp, Artificial Sequence
  Oligonucleotide primer for the detection of SNP TSC0049572
tttaacgcaaac

SEQ ID NO: 355287 - DNA, 12 bp, Artificial Sequence
  Oligonucleotide primer for the detection of SNP TSC0049572
taatttaggata

SEQ ID NO: 355288 - DNA, 12 bp, Artificial Sequence
  Oligonucleotide primer for the detection of SNP TSC0049573
atttagtataat

SEQ ID NO: 355289 - DNA, 12 bp, Artificial Sequence
  Oligonucleotide primer for the detection of SNP TSC0049573
atccaacataac

SEQ ID NO: 355290 - DNA, 12 bp, Artificial Sequence
  Oligonucleotide primer for the detection of SNP TSC0049573
ggtatgataggg

SEQ ID NO: 355291 - DNA, 12 bp, Artificial Sequence
  Oligonukleotid-Primer
cttaaaatccac

SEQ ID NO: 355292 - DNA, 12 bp, Artificial Sequence
  Oligonucleotide primer for the detection of SNP TSC0049575
atattccaccaa

SEQ ID NO: 355293 - DNA, 12 bp, Artificial Sequence
  Oligonucleotide primer for the detection of SNP TSC0049575
tttagaatttat

SEQ ID NO: 355294 - DNA, 12 bp, Artificial Sequence
  Oligonucleotide primer for the detection of SNP TSC0049575
tttagaatttac

SEQ ID NO: 355295 - DNA, 12 bp, Artificial Sequence
  Oligonucleotide primer for the detection of SNP TSC0049581
aaaagggaagtg

SEQ ID NO: 355296 - DNA, 12 bp, Artificial Sequence
  Oligonucleotide primer for the detection of SNP TSC0049582
atattcttatac

SEQ ID NO: 355297 - DNA, 12 bp, Artificial Sequence
  Oligonucleotide primer for the detection of SNP TSC0049582
tttaaataatta

SEQ ID NO: 355298 - DNA, 12 bp, Artificial Sequence
  Oligonucleotide primer for the detection of SNP TSC0007748
taatacaataac

SEQ ID NO: 355299 - DNA, 12 bp, Artificial Sequence
  Oligonukleotid-Primer
aaatctaaatac

SEQ ID NO: 355300 - DNA, 12 bp, Artificial Sequence
  Oligonucleotide primer for the detection of SNP TSC0049584
tacgggttttta

SEQ ID NO: 355301 - DNA, 12 bp, Artificial Sequence
  Oligonucleotide primer for the detection of SNP TSC0049585
taaaatgttatg

SEQ ID NO: 355302 - DNA, 12 bp, Artificial Sequence
  Oligonucleotide primer for the detection of SNP TSC0049586
ataatccttata

SEQ ID NO: 355303 - DNA, 12 bp, Artificial Sequence
  Oligonukleotid-Primer
aattttcataaa

SEQ ID NO: 355304 - DNA, 12 bp, Artificial Sequence
  Oligonucleotide primer for the detection of SNP TSC0049586
tgatttttatgt

SEQ ID NO: 355305 - DNA, 12 bp, Artificial Sequence
  Oligonucleotide primer for the detection of SNP TSC0049587
ttaaatgttaag

SEQ ID NO: 355306 - DNA, 12 bp, Artificial Sequence
  Oligonucleotide primer for the detection of SNP TSC0049588
caaataatccat

SEQ ID NO: 355307 - DNA, 12 bp, Artificial Sequence
  Oligonucleotide primer for the detection of SNP TSC0010670
ataaacacttat

SEQ ID NO: 355308 - DNA, 12 bp, Artificial Sequence
  Oligonucleotide primer for the detection of SNP TSC0010670
atgggttaaaaa

SEQ ID NO: 355309 - DNA, 12 bp, Artificial Sequence
  Oligonucleotide primer for the detection of SNP TSC0049589
acttaaacttaa

SEQ ID NO: 355310 - DNA, 12 bp, Artificial Sequence
  Oligonucleotide primer for the detection of SNP TSC0049589
acaacctcaacc

SEQ ID NO: 355311 - DNA, 12 bp, Artificial Sequence
  Oligonucleotide primer for the detection of SNP TSC0007163
tcaactccaatc

SEQ ID NO: 355312 - DNA, 12 bp, Artificial Sequence
  Oligonucleotide primer for the detection of SNP TSC0007163
ttgtagtagaag

SEQ ID NO: 355313 - DNA, 12 bp, Artificial Sequence
  Oligonucleotide primer for the detection of SNP TSC0007163
ctacaacaaaaa

SEQ ID NO: 355314 - DNA, 12 bp, Artificial Sequence
  Oligonucleotide primer for the detection of SNP TSC0049591
aaacactaactt

SEQ ID NO: 355315 - DNA, 12 bp, Artificial Sequence
  Oligonukleotid-Primer
aagttttagtag

SEQ ID NO: 355316 - DNA, 12 bp, Artificial Sequence
  Oligonucleotide primer for the detection of SNP TSC0049591
aaatctcaacaa

SEQ ID NO: 355317 - DNA, 12 bp, Artificial Sequence
  Oligonucleotide primer for the detection of SNP TSC0049591
aagtattgattt

SEQ ID NO: 355318 - DNA, 12 bp, Artificial Sequence
  Oligonucleotide primer for the detection of SNP TSC0007481
ttggttggggaa

SEQ ID NO: 355319 - DNA, 12 bp, Artificial Sequence
  Oligonucleotide primer for the detection of SNP TSC0007481
ttggtcggggaa

SEQ ID NO: 355320 - DNA, 12 bp, Artificial Sequence
  Oligonucleotide primer for the detection of SNP TSC0049593
tacaatacattt

SEQ ID NO: 355321 - DNA, 12 bp, Artificial Sequence
  Oligonucleotide primer for the detection of SNP TSC0049593
tgttattttgaa

SEQ ID NO: 355322 - DNA, 12 bp, Artificial Sequence
  Oligonucleotide primer for the detection of SNP TSC0049594
tgagagaaattg

SEQ ID NO: 355323 - DNA, 12 bp, Artificial Sequence
  Oligonukleotid-Primer
ataaatactttc

SEQ ID NO: 355324 - DNA, 12 bp, Artificial Sequence
  Oligonucleotide primer for the detection of SNP TSC0007508
tttagggttgtg

SEQ ID NO: 355325 - DNA, 12 bp, Artificial Sequence
  Oligonucleotide primer for the detection of SNP TSC0049595
catcttacataa

SEQ ID NO: 355326 - DNA, 12 bp, Artificial Sequence
  Oligonucleotide primer for the detection of SNP TSC0049595
gtataaagtttt

SEQ ID NO: 355327 - DNA, 12 bp, Artificial Sequence
  Oligonucleotide primer for the detection of SNP TSC0049595
aatataaaattc

SEQ ID NO: 355328 - DNA, 12 bp, Artificial Sequence
  Oligonucleotide primer for the detection of SNP TSC0049596
ttagaatgggtt

SEQ ID NO: 355329 - DNA, 12 bp, Artificial Sequence
  Oligonucleotide primer for the detection of SNP TSC0049596
tcaaaataaatc

SEQ ID NO: 355330 - DNA, 12 bp, Artificial Sequence
  Oligonucleotide primer for the detection of SNP TSC0049596
aggtttttgaga

SEQ ID NO: 355331 - DNA, 12 bp, Artificial Sequence
  Oligonucleotide primer for the detection of SNP TSC0049597
taaaactaaatt

SEQ ID NO: 355332 - DNA, 12 bp, Artificial Sequence
  Oligonucleotide primer for the detection of SNP TSC0007816
aaaaacaattac

SEQ ID NO: 355333 - DNA, 12 bp, Artificial Sequence
  Oligonucleotide primer for the detection of SNP TSC0007816
aaaaaatataag

SEQ ID NO: 355334 - DNA, 12 bp, Artificial Sequence
  Oligonucleotide primer for the detection of SNP TSC0049598
actacctttatt

SEQ ID NO: 355335 - DNA, 12 bp, Artificial Sequence
  Oligonucleotide primer for the detection of SNP TSC0049598
ttataaaggtag

SEQ ID NO: 355336 - DNA, 12 bp, Artificial Sequence
  Oligonucleotide primer for the detection of SNP TSC0049599
aaactctaatta

SEQ ID NO: 355337 - DNA, 12 bp, Artificial Sequence
  Oligonucleotide primer for the detection of SNP TSC0049599
gtttagaaattt

SEQ ID NO: 355338 - DNA, 12 bp, Artificial Sequence
  Oligonucleotide primer for the detection of SNP TSC0049599
atttaaaaacct

SEQ ID NO: 355339 - DNA, 12 bp, Artificial Sequence
  Oligonucleotide primer for the detection of SNP TSC0049599
agattttaatta

SEQ ID NO: 355340 - DNA, 12 bp, Artificial Sequence
  Oligonucleotide primer for the detection of SNP TSC0049600
ttcatcataaaa

SEQ ID NO: 355341 - DNA, 12 bp, Artificial Sequence
  Oligonucleotide primer for the detection of SNP TSC0049600
tttttgtgcgtg

SEQ ID NO: 355342 - DNA, 12 bp, Artificial Sequence
  Oligonucleotide primer for the detection of SNP TSC0049600
cccttatacata

SEQ ID NO: 355343 - DNA, 12 bp, Artificial Sequence
  Oligonucleotide primer for the detection of SNP TSC0049600
cccttatacgta

SEQ ID NO: 355344 - DNA, 12 bp, Artificial Sequence
  Oligonucleotide primer for the detection of SNP TSC0049600
gtttattatgaa

SEQ ID NO: 355345 - DNA, 12 bp, Artificial Sequence
  Oligonucleotide primer for the detection of SNP TSC0007599
cttaacttaaac

SEQ ID NO: 355346 - DNA, 12 bp, Artificial Sequence
  Oligonucleotide primer for the detection of SNP TSC0007599
tttggtttaagt

SEQ ID NO: 355347 - DNA, 12 bp, Artificial Sequence
  Oligonucleotide primer for the detection of SNP TSC0010747
attcaaaaaact

SEQ ID NO: 355348 - DNA, 12 bp, Artificial Sequence
  Oligonucleotide primer for the detection of SNP TSC0010748
tcaaaacaaatt

SEQ ID NO: 355349 - DNA, 12 bp, Artificial Sequence
  Oligonucleotide primer for the detection of SNP TSC0010748
aaggttttataa

SEQ ID NO: 355350 - DNA, 12 bp, Artificial Sequence
  Oligonucleotide primer for the detection of SNP TSC0010749
cacatttcaaat

SEQ ID NO: 355351 - DNA, 12 bp, Artificial Sequence
  Oligonucleotide primer for the detection of SNP TSC0010749
cgcatttcaaat

SEQ ID NO: 355352 - DNA, 12 bp, Artificial Sequence
  Oligonucleotide primer for the detection of SNP TSC0010749
ttaatgaggaga

SEQ ID NO: 355353 - DNA, 12 bp, Artificial Sequence
  Oligonucleotide primer for the detection of SNP TSC0049602
agttgggagatg

SEQ ID NO: 355354 - DNA, 12 bp, Artificial Sequence
  Oligonucleotide primer for the detection of SNP TSC0049603
atattagttatt

SEQ ID NO: 355355 - DNA, 12 bp, Artificial Sequence
  Oligonucleotide primer for the detection of SNP TSC0049603
tatcaatcacta

SEQ ID NO: 355356 - DNA, 12 bp, Artificial Sequence
  Oligonucleotide primer for the detection of SNP TSC0049603
atatgattaaat

SEQ ID NO: 355357 - DNA, 12 bp, Artificial Sequence
  Oligonucleotide primer for the detection of SNP TSC0006294
ccaaaaattaat

SEQ ID NO: 355358 - DNA, 12 bp, Artificial Sequence
  Oligonucleotide primer for the detection of SNP TSC0010621
aaacatttcccc

SEQ ID NO: 355359 - DNA, 12 bp, Artificial Sequence
  Oligonucleotide primer for the detection of SNP TSC0010621
ttagtgttttta

SEQ ID NO: 355360 - DNA, 12 bp, Artificial Sequence
  Oligonucleotide primer for the detection of SNP TSC0010621
ttaatatctcta

SEQ ID NO: 355361 - DNA, 12 bp, Artificial Sequence
  Oligonucleotide primer for the detection of SNP TSC0049608
acataaatcaat

SEQ ID NO: 355362 - DNA, 12 bp, Artificial Sequence
  Oligonucleotide primer for the detection of SNP TSC0049609
gaaataaaataa

SEQ ID NO: 355363 - DNA, 12 bp, Artificial Sequence
  Oligonucleotide primer for the detection of SNP TSC0008876
agtgttaagagg

SEQ ID NO: 355364 - DNA, 12 bp, Artificial Sequence
  Oligonucleotide primer for the detection of SNP TSC0008877
taaaatacaact

SEQ ID NO: 355365 - DNA, 12 bp, Artificial Sequence
  Oligonucleotide primer for the detection of SNP TSC0049613
tctaattatata

SEQ ID NO: 355366 - DNA, 12 bp, Artificial Sequence
  Oligonucleotide primer for the detection of SNP TSC0049613
ttactctaaaat

SEQ ID NO: 355367 - DNA, 12 bp, Artificial Sequence
  Oligonucleotide primer for the detection of SNP TSC0049613
tttgattatgtg

SEQ ID NO: 355368 - DNA, 12 bp, Artificial Sequence
  Oligonucleotide primer for the detection of SNP TSC0049614
tcttctactaac

SEQ ID NO: 355369 - DNA, 12 bp, Artificial Sequence
  Oligonucleotide primer for the detection of SNP TSC0049614
gtaaatagattt

SEQ ID NO: 355370 - DNA, 12 bp, Artificial Sequence
  Oligonucleotide primer for the detection of SNP TSC0049614
gtaaatagattc

SEQ ID NO: 355371 - DNA, 12 bp, Artificial Sequence
  Oligonucleotide primer for the detection of SNP TSC0049614
acaaacaaaccc

SEQ ID NO: 355372 - DNA, 12 bp, Artificial Sequence
  Oligonucleotide primer for the detection of SNP TSC0049615
tttactttttta

SEQ ID NO: 355373 - DNA, 12 bp, Artificial Sequence
  Oligonucleotide primer for the detection of SNP TSC0049615
ggaataatagat

SEQ ID NO: 355374 - DNA, 12 bp, Artificial Sequence
  Oligonucleotide primer for the detection of SNP TSC0049616
cattttaaaaac

SEQ ID NO: 355375 - DNA, 12 bp, Artificial Sequence
  Oligonucleotide primer for the detection of SNP TSC0049617
attttcattttt

SEQ ID NO: 355376 - DNA, 12 bp, Artificial Sequence
  Oligonucleotide primer for the detection of SNP TSC0049617
aattagaataaa

SEQ ID NO: 355377 - DNA, 12 bp, Artificial Sequence
  Oligonucleotide primer for the detection of SNP TSC0049618
cactaacccatc

SEQ ID NO: 355378 - DNA, 12 bp, Artificial Sequence
  Oligonucleotide primer for the detection of SNP TSC0049618
tgattaatagga

SEQ ID NO: 355379 - DNA, 12 bp, Artificial Sequence
  Oligonucleotide primer for the detection of SNP TSC0005262
aaaactactcac

SEQ ID NO: 355380 - DNA, 12 bp, Artificial Sequence
  Oligonucleotide primer for the detection of SNP TSC0005262
atatatatagaa

SEQ ID NO: 355381 - DNA, 12 bp, Artificial Sequence
  Oligonucleotide primer for the detection of SNP TSC0005263
ttaaggtaaaag

SEQ ID NO: 355382 - DNA, 12 bp, Artificial Sequence
  Oligonucleotide primer for the detection of SNP TSC0049621
ataatcaacacc

SEQ ID NO: 355383 - DNA, 12 bp, Artificial Sequence
  Oligonukleotid-Primer
atcctaatctaa

SEQ ID NO: 355384 - DNA, 12 bp, Artificial Sequence
  Oligonucleotide primer for the detection of SNP TSC0049622
ttatttagtggt

SEQ ID NO: 355385 - DNA, 12 bp, Artificial Sequence
  Oligonucleotide primer for the detection of SNP TSC0049622
atcacttaataa

SEQ ID NO: 355386 - DNA, 12 bp, Artificial Sequence
  Oligonucleotide primer for the detection of SNP TSC0049622
gttttagtttag

SEQ ID NO: 355387 - DNA, 12 bp, Artificial Sequence
  Oligonucleotide primer for the detection of SNP TSC0009412
aaacacaaatcc

SEQ ID NO: 355388 - DNA, 12 bp, Artificial Sequence
  Oligonucleotide primer for the detection of SNP TSC0009412
tatattgatatg

SEQ ID NO: 355389 - DNA, 12 bp, Artificial Sequence
  Oligonucleotide primer for the detection of SNP TSC0009413
tcccaaatctca

SEQ ID NO: 355390 - DNA, 12 bp, Artificial Sequence
  Oligonucleotide primer for the detection of SNP TSC0009413
ttaaaatttaaa

SEQ ID NO: 355391 - DNA, 12 bp, Artificial Sequence
  Oligonucleotide primer for the detection of SNP TSC0009414
taggttagtatt

SEQ ID NO: 355392 - DNA, 12 bp, Artificial Sequence
  Oligonucleotide primer for the detection of SNP TSC0009414
aaatcaacatca

SEQ ID NO: 355393 - DNA, 12 bp, Artificial Sequence
  Oligonucleotide primer for the detection of SNP TSC0009414
gttttggagagt

SEQ ID NO: 355394 - DNA, 12 bp, Artificial Sequence
  Oligonucleotide primer for the detection of SNP TSC0049624
cctaacaacaac

SEQ ID NO: 355395 - DNA, 12 bp, Artificial Sequence
  Oligonucleotide primer for the detection of SNP TSC0049625
agatgttaaaga

SEQ ID NO: 355396 - DNA, 12 bp, Artificial Sequence
  Oligonucleotide primer for the detection of SNP TSC0049625
ttttagagatgt

SEQ ID NO: 355397 - DNA, 12 bp, Artificial Sequence
  Oligonucleotide primer for the detection of SNP TSC0049626
tatttattatct

SEQ ID NO: 355398 - DNA, 12 bp, Artificial Sequence
  Oligonucleotide primer for the detection of SNP TSC0049626
ttagaggatgga

SEQ ID NO: 355399 - DNA, 12 bp, Artificial Sequence
  Oligonucleotide primer for the detection of SNP TSC0049628
taacaaccaaaa

SEQ ID NO: 355400 - DNA, 12 bp, Artificial Sequence
  Oligonucleotide primer for the detection of SNP TSC0049628
tttatattggtt

SEQ ID NO: 355401 - DNA, 12 bp, Artificial Sequence
  Oligonucleotide primer for the detection of SNP TSC0049628
atctatactaac

SEQ ID NO: 355402 - DNA, 12 bp, Artificial Sequence
  Oligonucleotide primer for the detection of SNP TSC0049628
gagttgatagtt

SEQ ID NO: 355403 - DNA, 12 bp, Artificial Sequence
  Oligonucleotide primer for the detection of SNP TSC0049629
ataataaaacaa

SEQ ID NO: 355404 - DNA, 12 bp, Artificial Sequence
  Oligonucleotide primer for the detection of SNP TSC0049629
gtaataaaacaa

SEQ ID NO: 355405 - DNA, 12 bp, Artificial Sequence
  Oligonucleotide primer for the detection of SNP TSC0049629
gttagtttttgt

SEQ ID NO: 355406 - DNA, 12 bp, Artificial Sequence
  Oligonucleotide primer for the detection of SNP TSC0049629
tatcaactccta

SEQ ID NO: 355407 - DNA, 12 bp, Artificial Sequence
  Oligonucleotide primer for the detection of SNP TSC0049629
ttgtgataaaat

SEQ ID NO: 355408 - DNA, 12 bp, Artificial Sequence
  Oligonucleotide primer for the detection of SNP TSC0049629
tcgtgataaaat

SEQ ID NO: 355409 - DNA, 12 bp, Artificial Sequence
  Oligonucleotide primer for the detection of SNP TSC0006468
attaaccatcac

SEQ ID NO: 355410 - DNA, 12 bp, Artificial Sequence
  Oligonucleotide primer for the detection of SNP TSC0006468
gatatataattg

SEQ ID NO: 355411 - DNA, 12 bp, Artificial Sequence
  Oligonucleotide primer for the detection of SNP TSC0049630
tacctacaaaat

SEQ ID NO: 355412 - DNA, 12 bp, Artificial Sequence
  Oligonucleotide primer for the detection of SNP TSC0049630
tatgatgaaagg

SEQ ID NO: 355413 - DNA, 12 bp, Artificial Sequence
  Oligonucleotide primer for the detection of SNP TSC0049632
caacaactcata

SEQ ID NO: 355414 - DNA, 12 bp, Artificial Sequence
  Oligonucleotide primer for the detection of SNP TSC0049632
ctaaccactcca

SEQ ID NO: 355415 - DNA, 12 bp, Artificial Sequence
  Oligonucleotide primer for the detection of SNP TSC0049632
taataatttatg

SEQ ID NO: 355416 - DNA, 12 bp, Artificial Sequence
  Oligonucleotide primer for the detection of SNP TSC0049633
ttgttttttggt

SEQ ID NO: 355417 - DNA, 12 bp, Artificial Sequence
  Oligonucleotide primer for the detection of SNP TSC0049633
ttatcttttaac

SEQ ID NO: 355418 - DNA, 12 bp, Artificial Sequence
  Oligonucleotide primer for the detection of SNP TSC0049633
tagtaaaaggga

SEQ ID NO: 355419 - DNA, 12 bp, Artificial Sequence
  Oligonucleotide primer for the detection of SNP TSC0010471
taaaaccaacct

SEQ ID NO: 355420 - DNA, 12 bp, Artificial Sequence
  Oligonucleotide primer for the detection of SNP TSC0010471
ttttatgttgtt

SEQ ID NO: 355421 - DNA, 12 bp, Artificial Sequence
  Oligonucleotide primer for the detection of SNP TSC0010471
ccctatattacc

SEQ ID NO: 355422 - DNA, 12 bp, Artificial Sequence
  Oligonucleotide primer for the detection of SNP TSC0010471
tgaggttagttt

SEQ ID NO: 355423 - DNA, 12 bp, Artificial Sequence
  Oligonucleotide primer for the detection of SNP TSC0010472
ttttattttact

SEQ ID NO: 355424 - DNA, 12 bp, Artificial Sequence
  Oligonucleotide primer for the detection of SNP TSC0010472
tttttagattta

SEQ ID NO: 355425 - DNA, 12 bp, Artificial Sequence
  Oligonucleotide primer for the detection of SNP TSC0049635
acactatctttt

SEQ ID NO: 355426 - DNA, 12 bp, Artificial Sequence
  Oligonucleotide primer for the detection of SNP TSC0049635
agtaatgtttta

SEQ ID NO: 355427 - DNA, 12 bp, Artificial Sequence
  Oligonucleotide primer for the detection of SNP TSC0049636
cctccacctccc

SEQ ID NO: 355428 - DNA, 12 bp, Artificial Sequence
  Oligonucleotide primer for the detection of SNP TSC0049636
cctccgcctccc

SEQ ID NO: 355429 - DNA, 12 bp, Artificial Sequence
  Oligonucleotide primer for the detection of SNP TSC0049637
aatcttcttctt

SEQ ID NO: 355430 - DNA, 12 bp, Artificial Sequence
  Oligonucleotide primer for the detection of SNP TSC0049638
ccccaacaatac

SEQ ID NO: 355431 - DNA, 12 bp, Artificial Sequence
  Oligonucleotide primer for the detection of SNP TSC0010479
ctaaataataaa

SEQ ID NO: 355432 - DNA, 12 bp, Artificial Sequence
  Oligonucleotide primer for the detection of SNP TSC0010479
ggattgtatttt

SEQ ID NO: 355433 - DNA, 12 bp, Artificial Sequence
  Oligonucleotide primer for the detection of SNP TSC0010479
aaattacattct

SEQ ID NO: 355434 - DNA, 12 bp, Artificial Sequence
  Oligonucleotide primer for the detection of SNP TSC0010479
ttgaataataaa

SEQ ID NO: 355435 - DNA, 12 bp, Artificial Sequence
  Oligonucleotide primer for the detection of SNP TSC0010480
tcccaccaaatc

SEQ ID NO: 355436 - DNA, 12 bp, Artificial Sequence
  Oligonucleotide primer for the detection of SNP TSC0010480
atgttgagggag

SEQ ID NO: 355437 - DNA, 12 bp, Artificial Sequence
  Oligonucleotide primer for the detection of SNP TSC0049639
tctcttttttaa

SEQ ID NO: 355438 - DNA, 12 bp, Artificial Sequence
  Oligonucleotide primer for the detection of SNP TSC0049639
tagatgatagat

SEQ ID NO: 355439 - DNA, 12 bp, Artificial Sequence
  Oligonucleotide primer for the detection of SNP TSC0049640
ctctaaccttat

SEQ ID NO: 355440 - DNA, 12 bp, Artificial Sequence
  Oligonucleotide primer for the detection of SNP TSC0049640
gggaatggaatg

SEQ ID NO: 355441 - DNA, 12 bp, Artificial Sequence
  Oligonucleotide primer for the detection of SNP TSC0049641
gtgatttgattt

SEQ ID NO: 355442 - DNA, 12 bp, Artificial Sequence
  Oligonucleotide primer for the detection of SNP TSC0049641
ataatctaattc

SEQ ID NO: 355443 - DNA, 12 bp, Artificial Sequence
  Oligonucleotide primer for the detection of SNP TSC0049641
ttttatgaaggg

SEQ ID NO: 355444 - DNA, 12 bp, Artificial Sequence
  Oligonucleotide primer for the detection of SNP TSC0008811
aaatcaaaaacg

SEQ ID NO: 355445 - DNA, 12 bp, Artificial Sequence
  Oligonucleotide primer for the detection of SNP TSC0008811
aaatcgaaaaca

SEQ ID NO: 355446 - DNA, 12 bp, Artificial Sequence
  Oligonucleotide primer for the detection of SNP TSC0008811
aaatcgaaaacg

SEQ ID NO: 355447 - DNA, 12 bp, Artificial Sequence
  Oligonucleotide primer for the detection of SNP TSC0008811
tcaataaataaa

SEQ ID NO: 355448 - DNA, 12 bp, Artificial Sequence
  Oligonucleotide primer for the detection of SNP TSC0008811
aagttgagggtg

SEQ ID NO: 355449 - DNA, 12 bp, Artificial Sequence
  Oligonucleotide primer for the detection of SNP TSC0008811
aagtcgagggtg

SEQ ID NO: 355450 - DNA, 12 bp, Artificial Sequence
  Oligonucleotide primer for the detection of SNP TSC0008811
aagttgagggcg

SEQ ID NO: 355451 - DNA, 12 bp, Artificial Sequence
  Oligonucleotide primer for the detection of SNP TSC0008811
aagtcgagggcg

SEQ ID NO: 355452 - DNA, 12 bp, Artificial Sequence
  Oligonucleotide primer for the detection of SNP TSC0008812
attcattacatt

SEQ ID NO: 355453 - DNA, 12 bp, Artificial Sequence
  Oligonucleotide primer for the detection of SNP TSC0008812
attcattacgtt

SEQ ID NO: 355454 - DNA, 12 bp, Artificial Sequence
  Oligonucleotide primer for the detection of SNP TSC0008812
ttatgaagttta

SEQ ID NO: 355455 - DNA, 12 bp, Artificial Sequence
  Oligonucleotide primer for the detection of SNP TSC0008812
ttacgaagttta

SEQ ID NO: 355456 - DNA, 12 bp, Artificial Sequence
  Oligonucleotide primer for the detection of SNP TSC0008812
ccacaaaaccca

SEQ ID NO: 355457 - DNA, 12 bp, Artificial Sequence
  Oligonucleotide primer for the detection of SNP TSC0008812
ccacgaaaccca

SEQ ID NO: 355458 - DNA, 12 bp, Artificial Sequence
  Oligonucleotide primer for the detection of SNP TSC0008812
atttattgtgtt

SEQ ID NO: 355459 - DNA, 12 bp, Artificial Sequence
  Oligonucleotide primer for the detection of SNP TSC0008812
atttattgcgtt

SEQ ID NO: 355460 - DNA, 12 bp, Artificial Sequence
  Oligonucleotide primer for the detection of SNP TSC0049648
taaattctaata

SEQ ID NO: 355461 - DNA, 12 bp, Artificial Sequence
  Oligonucleotide primer for the detection of SNP TSC0049648
tatttgtaggat

SEQ ID NO: 355462 - DNA, 12 bp, Artificial Sequence
  Oligonucleotide primer for the detection of SNP TSC0049648
acacctacaaaa

SEQ ID NO: 355463 - DNA, 12 bp, Artificial Sequence
  Oligonucleotide primer for the detection of SNP TSC0049648
tgaattttagta

SEQ ID NO: 355464 - DNA, 12 bp, Artificial Sequence
  Oligonucleotide primer for the detection of SNP TSC0049650
ccaaaaaaccac

SEQ ID NO: 355465 - DNA, 12 bp, Artificial Sequence
  Oligonucleotide primer for the detection of SNP TSC0049650
ccgaaaaaccac

SEQ ID NO: 355466 - DNA, 12 bp, Artificial Sequence
  Oligonucleotide primer for the detection of SNP TSC0049650
ttggaaggttat

SEQ ID NO: 355467 - DNA, 12 bp, Artificial Sequence
  Oligonucleotide primer for the detection of SNP TSC0049650
tcggaaggttat

SEQ ID NO: 355468 - DNA, 12 bp, Artificial Sequence
  Oligonucleotide primer for the detection of SNP TSC0049651
actaatatatac

SEQ ID NO: 355469 - DNA, 12 bp, Artificial Sequence
  Oligonucleotide primer for the detection of SNP TSC0049651
ggtatatgtggt

SEQ ID NO: 355470 - DNA, 12 bp, Artificial Sequence
  Oligonucleotide primer for the detection of SNP TSC0049651
aacacatataac

SEQ ID NO: 355471 - DNA, 12 bp, Artificial Sequence
  Oligonucleotide primer for the detection of SNP TSC0049651
attggtatatgt

SEQ ID NO: 355472 - DNA, 12 bp, Artificial Sequence
  Oligonucleotide primer for the detection of SNP TSC0049652
ttcacaaaaaat

SEQ ID NO: 355473 - DNA, 12 bp, Artificial Sequence
  Oligonucleotide primer for the detection of SNP TSC0049652
ttcacgaaaaat

SEQ ID NO: 355474 - DNA, 12 bp, Artificial Sequence
  Oligonucleotide primer for the detection of SNP TSC0049652
agggatgtataa

SEQ ID NO: 355475 - DNA, 12 bp, Artificial Sequence
  Oligonucleotide primer for the detection of SNP TSC0049654
catacaatttac

SEQ ID NO: 355476 - DNA, 12 bp, Artificial Sequence
  Oligonukleotid-Primer
catacgatttac

SEQ ID NO: 355477 - DNA, 12 bp, Artificial Sequence
  Oligonucleotide primer for the detection of SNP TSC0049654
attgtgagaaaa

SEQ ID NO: 355478 - DNA, 12 bp, Artificial Sequence
  Oligonucleotide primer for the detection of SNP TSC0049654
atcgtgagaaaa

SEQ ID NO: 355479 - DNA, 12 bp, Artificial Sequence
  Oligonucleotide primer for the detection of SNP TSC0049657
aggaaattgtta

SEQ ID NO: 355480 - DNA, 12 bp, Artificial Sequence
  Oligonucleotide primer for the detection of SNP TSC0049657
aggaaatcgtta

SEQ ID NO: 355481 - DNA, 12 bp, Artificial Sequence
  Oligonucleotide primer for the detection of SNP TSC0049657
aaaaaaccgtca

SEQ ID NO: 355482 - DNA, 12 bp, Artificial Sequence
  Oligonucleotide primer for the detection of SNP TSC0049657
agaggaagtatt

SEQ ID NO: 355483 - DNA, 12 bp, Artificial Sequence
  Oligonucleotide primer for the detection of SNP TSC0049664
ggttataggtgt

SEQ ID NO: 355484 - DNA, 12 bp, Artificial Sequence
  Oligonucleotide primer for the detection of SNP TSC0049664
aactacaaatat

SEQ ID NO: 355485 - DNA, 12 bp, Artificial Sequence
  Oligonucleotide primer for the detection of SNP TSC0049664
tggttataggtt

SEQ ID NO: 355486 - DNA, 12 bp, Artificial Sequence
  Oligonucleotide primer for the detection of SNP TSC0049665
ctccaataataa

SEQ ID NO: 355487 - DNA, 12 bp, Artificial Sequence
  Oligonucleotide primer for the detection of SNP TSC0049665
gggtaagagttg

SEQ ID NO: 355488 - DNA, 12 bp, Artificial Sequence
  Oligonucleotide primer for the detection of SNP TSC0049665
tttttaatgatg

SEQ ID NO: 355489 - DNA, 12 bp, Artificial Sequence
  Oligonucleotide primer for the detection of SNP TSC0049666
aaattagttttt

SEQ ID NO: 355490 - DNA, 12 bp, Artificial Sequence
  Oligonucleotide primer for the detection of SNP TSC0049666
aatcaactttta

SEQ ID NO: 355491 - DNA, 12 bp, Artificial Sequence
  Oligonucleotide primer for the detection of SNP TSC0049666
taataggataga

SEQ ID NO: 355492 - DNA, 12 bp, Artificial Sequence
  Oligonucleotide primer for the detection of SNP TSC0049668
aatttaacactt

SEQ ID NO: 355493 - DNA, 12 bp, Artificial Sequence
  Oligonucleotide primer for the detection of SNP TSC0049668
ataagagtaagg

SEQ ID NO: 355494 - DNA, 12 bp, Artificial Sequence
  Oligonucleotide primer for the detection of SNP TSC0049668
aatttgatattt

SEQ ID NO: 355495 - DNA, 12 bp, Artificial Sequence
  Oligonucleotide primer for the detection of SNP TSC0005407
tatcacttccaa

SEQ ID NO: 355496 - DNA, 12 bp, Artificial Sequence
  Oligonucleotide primer for the detection of SNP TSC0005407
tatcacttccga

SEQ ID NO: 355497 - DNA, 12 bp, Artificial Sequence
  Oligonucleotide primer for the detection of SNP TSC0005407
ttaagattatat

SEQ ID NO: 355498 - DNA, 12 bp, Artificial Sequence
  Oligonucleotide primer for the detection of SNP TSC0005407
ttcaaaattata

SEQ ID NO: 355499 - DNA, 12 bp, Artificial Sequence
  Oligonucleotide primer for the detection of SNP TSC0005407
ttatttttgatt

SEQ ID NO: 355500 - DNA, 12 bp, Artificial Sequence
  Oligonucleotide primer for the detection of SNP TSC0005407
ttattttcgatt

SEQ ID NO: 355501 - DNA, 12 bp, Artificial Sequence
  Oligonucleotide primer for the detection of SNP TSC0005407
ttatttttgatc

SEQ ID NO: 355502 - DNA, 12 bp, Artificial Sequence
  Oligonucleotide primer for the detection of SNP TSC0005407
ttattttcgatc

SEQ ID NO: 355503 - DNA, 12 bp, Artificial Sequence
  Oligonucleotide primer for the detection of SNP TSC0049671
taaataactctt

SEQ ID NO: 355504 - DNA, 12 bp, Artificial Sequence
  Oligonucleotide primer for the detection of SNP TSC0049671
aattgtattttg

SEQ ID NO: 355505 - DNA, 12 bp, Artificial Sequence
  Oligonucleotide primer for the detection of SNP TSC0049671
aatcgtattttg

SEQ ID NO: 355506 - DNA, 12 bp, Artificial Sequence
  Oligonucleotide primer for the detection of SNP TSC0049671
aaccgtatttta

SEQ ID NO: 355507 - DNA, 12 bp, Artificial Sequence
  Oligonucleotide primer for the detection of SNP TSC0049672
tttttttttcca

SEQ ID NO: 355508 - DNA, 12 bp, Artificial Sequence
  Oligonucleotide primer for the detection of SNP TSC0049672
tttatatttgat

SEQ ID NO: 355509 - DNA, 12 bp, Artificial Sequence
  Oligonucleotide primer for the detection of SNP TSC0049672
acatttaacaaa

SEQ ID NO: 355510 - DNA, 12 bp, Artificial Sequence
  Oligonucleotide primer for the detection of SNP TSC0049679
acccaccccaac

SEQ ID NO: 355511 - DNA, 12 bp, Artificial Sequence
  Oligonucleotide primer for the detection of SNP TSC0049679
taggttggggat

SEQ ID NO: 355512 - DNA, 12 bp, Artificial Sequence
  Oligonucleotide primer for the detection of SNP TSC0049679
atttattttagt

SEQ ID NO: 355513 - DNA, 12 bp, Artificial Sequence
  Oligonucleotide primer for the detection of SNP TSC0049681
attattaatttt

SEQ ID NO: 355514 - DNA, 12 bp, Artificial Sequence
  Oligonucleotide primer for the detection of SNP TSC0049681
attattaatttc

SEQ ID NO: 355515 - DNA, 12 bp, Artificial Sequence
  Oligonucleotide primer for the detection of SNP TSC0049681
attattaatctc

SEQ ID NO: 355516 - DNA, 12 bp, Artificial Sequence
  Oligonucleotide primer for the detection of SNP TSC0049681
tataaatgagga

SEQ ID NO: 355517 - DNA, 12 bp, Artificial Sequence
  Oligonucleotide primer for the detection of SNP TSC0049682
caaaaaataatt

SEQ ID NO: 355518 - DNA, 12 bp, Artificial Sequence
  Oligonucleotide primer for the detection of SNP TSC0049682
tcctcatttata

SEQ ID NO: 355519 - DNA, 12 bp, Artificial Sequence
  Oligonucleotide primer for the detection of SNP TSC0049683
tacactaaatta

SEQ ID NO: 355520 - DNA, 12 bp, Artificial Sequence
  Oligonucleotide primer for the detection of SNP TSC0049683
ttataatttgtt

SEQ ID NO: 355521 - DNA, 12 bp, Artificial Sequence
  Oligonucleotide primer for the detection of SNP TSC0049683
tcacaatttatt

SEQ ID NO: 355522 - DNA, 12 bp, Artificial Sequence
  Oligonucleotide primer for the detection of SNP TSC0049683
tatattggatta

SEQ ID NO: 355523 - DNA, 12 bp, Artificial Sequence
  Oligonucleotide primer for the detection of SNP TSC0049684
acccaaataccc

SEQ ID NO: 355524 - DNA, 12 bp, Artificial Sequence
  Oligonucleotide primer for the detection of SNP TSC0049684
agtgtattattg

SEQ ID NO: 355525 - DNA, 12 bp, Artificial Sequence
  Oligonucleotide primer for the detection of SNP TSC0049686
ttaaggggagtt

SEQ ID NO: 355526 - DNA, 12 bp, Artificial Sequence
  Oligonucleotide primer for the detection of SNP TSC0049689
gattgagtttga

SEQ ID NO: 355527 - DNA, 12 bp, Artificial Sequence
  Oligonucleotide primer for the detection of SNP TSC0049689
taggttggggtt

SEQ ID NO: 355528 - DNA, 12 bp, Artificial Sequence
  Oligonucleotide primer for the detection of SNP TSC0049690
gaagaataattt

SEQ ID NO: 355529 - DNA, 12 bp, Artificial Sequence
  Oligonucleotide primer for the detection of SNP TSC0049690
aagttgtatata

SEQ ID NO: 355530 - DNA, 12 bp, Artificial Sequence
  Oligonucleotide primer for the detection of SNP TSC0049691
aaaaaccatttt

SEQ ID NO: 355531 - DNA, 12 bp, Artificial Sequence
  Oligonucleotide primer for the detection of SNP TSC0049691
tggatgaataaa

SEQ ID NO: 355532 - DNA, 12 bp, Artificial Sequence
  Oligonucleotide primer for the detection of SNP TSC0049691
cggatgaataaa

SEQ ID NO: 355533 - DNA, 12 bp, Artificial Sequence
  Oligonucleotide primer for the detection of SNP TSC0049692
tataataatagt

SEQ ID NO: 355534 - DNA, 12 bp, Artificial Sequence
  Oligonucleotide primer for the detection of SNP TSC0049693
aaagggatttta

SEQ ID NO: 355535 - DNA, 12 bp, Artificial Sequence
  Oligonucleotide primer for the detection of SNP TSC0049694
catttatcatat

SEQ ID NO: 355536 - DNA, 12 bp, Artificial Sequence
  Oligonucleotide primer for the detection of SNP TSC0049694
cacctaccttta

SEQ ID NO: 355537 - DNA, 12 bp, Artificial Sequence
  Oligonucleotide primer for the detection of SNP TSC0049694
tatttattatgt

SEQ ID NO: 355538 - DNA, 12 bp, Artificial Sequence
  Oligonucleotide primer for the detection of SNP TSC0049698
ttaccttaataa

SEQ ID NO: 355539 - DNA, 12 bp, Artificial Sequence
  Oligonucleotide primer for the detection of SNP TSC0049698
ggtatttgttgt

SEQ ID NO: 355540 - DNA, 12 bp, Artificial Sequence
  Oligonucleotide primer for the detection of SNP TSC0049698
aacacctactac

SEQ ID NO: 355541 - DNA, 12 bp, Artificial Sequence
  Oligonucleotide primer for the detection of SNP TSC0049698
ttgttttgatga

SEQ ID NO: 355542 - DNA, 12 bp, Artificial Sequence
  Oligonucleotide primer for the detection of SNP TSC0049699
cttaatattttt

SEQ ID NO: 355543 - DNA, 12 bp, Artificial Sequence
  Oligonucleotide primer for the detection of SNP TSC0049699
aatgtttaattt

SEQ ID NO: 355544 - DNA, 12 bp, Artificial Sequence
  Oligonucleotide primer for the detection of SNP TSC0049700
ttttaaggttag

SEQ ID NO: 355545 - DNA, 12 bp, Artificial Sequence
  Oligonucleotide primer for the detection of SNP TSC0049701
ttcctaataatt

SEQ ID NO: 355546 - DNA, 12 bp, Artificial Sequence
  Oligonucleotide primer for the detection of SNP TSC0049701
aaaattgttgta

SEQ ID NO: 355547 - DNA, 12 bp, Artificial Sequence
  Oligonucleotide primer for the detection of SNP TSC0049701
aaaactactata

SEQ ID NO: 355548 - DNA, 12 bp, Artificial Sequence
  Oligonucleotide primer for the detection of SNP TSC0049702
ctcctttctata

SEQ ID NO: 355549 - DNA, 12 bp, Artificial Sequence
  Oligonucleotide primer for the detection of SNP TSC0049702
tttcaaaattta

SEQ ID NO: 355550 - DNA, 12 bp, Artificial Sequence
  Oligonucleotide primer for the detection of SNP TSC0049703
aaaacgaactaa

SEQ ID NO: 355551 - DNA, 12 bp, Artificial Sequence
  Oligonucleotide primer for the detection of SNP TSC0049703
tgagtaggtttt

SEQ ID NO: 355552 - DNA, 12 bp, Artificial Sequence
  Oligonucleotide primer for the detection of SNP TSC0049703
taaacaaaccct

SEQ ID NO: 355553 - DNA, 12 bp, Artificial Sequence
  Oligonucleotide primer for the detection of SNP TSC0049703
ggtgagttagtt

SEQ ID NO: 355554 - DNA, 12 bp, Artificial Sequence
  Oligonucleotide primer for the detection of SNP TSC0049703
ggcgagttagtt

SEQ ID NO: 355555 - DNA, 12 bp, Artificial Sequence
  Oligonucleotide primer for the detection of SNP TSC0049705
aatctaccactt

SEQ ID NO: 355556 - DNA, 12 bp, Artificial Sequence
  Oligonucleotide primer for the detection of SNP TSC0049705
ttggtatttata

SEQ ID NO: 355557 - DNA, 12 bp, Artificial Sequence
  Oligonucleotide primer for the detection of SNP TSC0049706
ctaaacaactaa

SEQ ID NO: 355558 - DNA, 12 bp, Artificial Sequence
  Oligonucleotide primer for the detection of SNP TSC0049706
ggtttagtttag

SEQ ID NO: 355559 - DNA, 12 bp, Artificial Sequence
  Oligonucleotide primer for the detection of SNP TSC0049706
aatttaatttaa

SEQ ID NO: 355560 - DNA, 12 bp, Artificial Sequence
  Oligonucleotide primer for the detection of SNP TSC0049707
caaatctttact

SEQ ID NO: 355561 - DNA, 12 bp, Artificial Sequence
  Oligonucleotide primer for the detection of SNP TSC0049707
gtattttttata

SEQ ID NO: 355562 - DNA, 12 bp, Artificial Sequence
  Oligonucleotide primer for the detection of SNP TSC0049708
ccaaactacaaa

SEQ ID NO: 355563 - DNA, 12 bp, Artificial Sequence
  Oligonucleotide primer for the detection of SNP TSC0049708
tatttattacaa

SEQ ID NO: 355564 - DNA, 12 bp, Artificial Sequence
  Oligonucleotide primer for the detection of SNP TSC0049708
agtttaaattgt

SEQ ID NO: 355565 - DNA, 12 bp, Artificial Sequence
  Oligonucleotide primer for the detection of SNP TSC0049711
cttatttcttaa

SEQ ID NO: 355566 - DNA, 12 bp, Artificial Sequence
  Oligonucleotide primer for the detection of SNP TSC0049712
ttatagttgtag

SEQ ID NO: 355567 - DNA, 12 bp, Artificial Sequence
  Oligonucleotide primer for the detection of SNP TSC0007094
aaaatacctttc

SEQ ID NO: 355568 - DNA, 12 bp, Artificial Sequence
  Oligonucleotide primer for the detection of SNP TSC0007094
tgtttgtgatta

SEQ ID NO: 355569 - DNA, 12 bp, Artificial Sequence
  Oligonucleotide primer for the detection of SNP TSC0049714
tatgatagtgga

SEQ ID NO: 355570 - DNA, 12 bp, Artificial Sequence
  Oligonucleotide primer for the detection of SNP TSC0005456
cctcttacaaat

SEQ ID NO: 355571 - DNA, 12 bp, Artificial Sequence
  Oligonucleotide primer for the detection of SNP TSC0049715
accatattcata

SEQ ID NO: 355572 - DNA, 12 bp, Artificial Sequence
  Oligonucleotide primer for the detection of SNP TSC0049715
ataatatatatt

SEQ ID NO: 355573 - DNA, 12 bp, Artificial Sequence
  Oligonucleotide primer for the detection of SNP TSC0049716
cttaaataatca

SEQ ID NO: 355574 - DNA, 12 bp, Artificial Sequence
  Oligonucleotide primer for the detection of SNP TSC0049716
atattgttttgt

SEQ ID NO: 355575 - DNA, 12 bp, Artificial Sequence
  Oligonucleotide primer for the detection of SNP TSC0049716
atatcgttttgt

SEQ ID NO: 355576 - DNA, 12 bp, Artificial Sequence
  Oligonucleotide primer for the detection of SNP TSC0049716
catatcatttta

SEQ ID NO: 355577 - DNA, 12 bp, Artificial Sequence
  Oligonucleotide primer for the detection of SNP TSC0049716
catatcgtttta

SEQ ID NO: 355578 - DNA, 12 bp, Artificial Sequence
  Oligonucleotide primer for the detection of SNP TSC0049716
ttttaaatggtt

SEQ ID NO: 355579 - DNA, 12 bp, Artificial Sequence
  Oligonucleotide primer for the detection of SNP TSC0049717
aataattaatac

SEQ ID NO: 355580 - DNA, 12 bp, Artificial Sequence
  Oligonucleotide primer for the detection of SNP TSC0049717
tggatattttta

SEQ ID NO: 355581 - DNA, 12 bp, Artificial Sequence
  Oligonucleotide primer for the detection of SNP TSC0049718
attaaaattaaa

SEQ ID NO: 355582 - DNA, 12 bp, Artificial Sequence
  Oligonucleotide primer for the detection of SNP TSC0049718
gttggatttagt

SEQ ID NO: 355583 - DNA, 12 bp, Artificial Sequence
  Oligonucleotide primer for the detection of SNP TSC0049718
ctaaattcaata

SEQ ID NO: 355584 - DNA, 12 bp, Artificial Sequence
  Oligonucleotide primer for the detection of SNP TSC0049718
tgttagaattga

SEQ ID NO: 355585 - DNA, 12 bp, Artificial Sequence
  Oligonucleotide primer for the detection of SNP TSC0049719
caatataattat

SEQ ID NO: 355586 - DNA, 12 bp, Artificial Sequence
  Oligonucleotide primer for the detection of SNP TSC0049719
gaagaaatttta

SEQ ID NO: 355587 - DNA, 12 bp, Artificial Sequence
  Oligonucleotide primer for the detection of SNP TSC0049719
tagtgtggttgt

SEQ ID NO: 355588 - DNA, 12 bp, Artificial Sequence
  Oligonucleotide primer for the detection of SNP TSC0049720
aaacttaaaaac

SEQ ID NO: 355589 - DNA, 12 bp, Artificial Sequence
  Oligonucleotide primer for the detection of SNP TSC0049720
ggttggggaata

SEQ ID NO: 355590 - DNA, 12 bp, Artificial Sequence
  Oligonucleotide primer for the detection of SNP TSC0049723
ccataatacact

SEQ ID NO: 355591 - DNA, 12 bp, Artificial Sequence
  Oligonucleotide primer for the detection of SNP TSC0049723
aagatgtgttta

SEQ ID NO: 355592 - DNA, 12 bp, Artificial Sequence
  Oligonucleotide primer for the detection of SNP TSC0049723
aagacgtgttta

SEQ ID NO: 355593 - DNA, 12 bp, Artificial Sequence
  Oligonucleotide primer for the detection of SNP TSC0049726
gtgtgaaaatgg

SEQ ID NO: 355594 - DNA, 12 bp, Artificial Sequence
  Oligonucleotide primer for the detection of SNP TSC0049726
tggaggtgtatt

SEQ ID NO: 355595 - DNA, 12 bp, Artificial Sequence
  Oligonucleotide primer for the detection of SNP TSC0049727
aggatattatgg

SEQ ID NO: 355596 - DNA, 12 bp, Artificial Sequence
  Oligonucleotide primer for the detection of SNP TSC0049728
tatacacaccct

SEQ ID NO: 355597 - DNA, 12 bp, Artificial Sequence
  Oligonucleotide primer for the detection of SNP TSC0049731
aaactctaatcc

SEQ ID NO: 355598 - DNA, 12 bp, Artificial Sequence
  Oligonucleotide primer for the detection of SNP TSC0049732
tccattttatta

SEQ ID NO: 355599 - DNA, 12 bp, Artificial Sequence
  Oligonucleotide primer for the detection of SNP TSC0049732
gttatagttttt

SEQ ID NO: 355600 - DNA, 12 bp, Artificial Sequence
  Oligonucleotide primer for the detection of SNP TSC0049732
atcataactttc

SEQ ID NO: 355601 - DNA, 12 bp, Artificial Sequence
  Oligonucleotide primer for the detection of SNP TSC0049733
ttatcattaaaa

SEQ ID NO: 355602 - DNA, 12 bp, Artificial Sequence
  Oligonucleotide primer for the detection of SNP TSC0049733
cactttttaccc

SEQ ID NO: 355603 - DNA, 12 bp, Artificial Sequence
  Oligonucleotide primer for the detection of SNP TSC0049733
ttattattaagg

SEQ ID NO: 355604 - DNA, 12 bp, Artificial Sequence
  Oligonucleotide primer for the detection of SNP TSC0049736
ccaaatataatc

SEQ ID NO: 355605 - DNA, 12 bp, Artificial Sequence
  Oligonucleotide primer for the detection of SNP TSC0049736
ccgaatataatc

SEQ ID NO: 355606 - DNA, 12 bp, Artificial Sequence
  Oligonucleotide primer for the detection of SNP TSC0049736
tttataggtgtg

SEQ ID NO: 355607 - DNA, 12 bp, Artificial Sequence
  Oligonucleotide primer for the detection of SNP TSC0049736
cttacaaatata

SEQ ID NO: 355608 - DNA, 12 bp, Artificial Sequence
  Oligonucleotide primer for the detection of SNP TSC0049736
ttgggtgtgatt

SEQ ID NO: 355609 - DNA, 12 bp, Artificial Sequence
  Oligonucleotide primer for the detection of SNP TSC0049736
tcgggtgtgatt

SEQ ID NO: 355610 - DNA, 12 bp, Artificial Sequence
  Oligonucleotide primer for the detection of SNP TSC0049737
aaaccgaaacaa

SEQ ID NO: 355611 - DNA, 12 bp, Artificial Sequence
  Oligonucleotide primer for the detection of SNP TSC0049737
tttgggtgattt

SEQ ID NO: 355612 - DNA, 12 bp, Artificial Sequence
  Oligonucleotide primer for the detection of SNP TSC0049737
ttcgggtgattt

SEQ ID NO: 355613 - DNA, 12 bp, Artificial Sequence
  Oligonukleotid-Primer
tcgaataatcta

SEQ ID NO: 355614 - DNA, 12 bp, Artificial Sequence
  Oligonucleotide primer for the detection of SNP TSC0049737
aggtcgaggtag

SEQ ID NO: 355615 - DNA, 12 bp, Artificial Sequence
  Oligonucleotide primer for the detection of SNP TSC0007716
aaaagggataag

SEQ ID NO: 355616 - DNA, 12 bp, Artificial Sequence
  Oligonucleotide primer for the detection of SNP TSC0007716
aagggtaggaat

SEQ ID NO: 355617 - DNA, 12 bp, Artificial Sequence
  Oligonukleotid-Primer
ttagtgggtgtt

SEQ ID NO: 355618 - DNA, 12 bp, Artificial Sequence
  Oligonucleotide primer for the detection of SNP TSC0007717
ctaataaatatt

SEQ ID NO: 355619 - DNA, 12 bp, Artificial Sequence
  Oligonucleotide primer for the detection of SNP TSC0049738
attcttaactac

SEQ ID NO: 355620 - DNA, 12 bp, Artificial Sequence
  Oligonucleotide primer for the detection of SNP TSC0049738
taataaaaactt

SEQ ID NO: 355621 - DNA, 12 bp, Artificial Sequence
  Oligonukleotid-Primer
atatttatggga

SEQ ID NO: 355622 - DNA, 12 bp, Artificial Sequence
  Oligonucleotide primer for the detection of SNP TSC0049740
tatatcacactt

SEQ ID NO: 355623 - DNA, 12 bp, Artificial Sequence
  Oligonucleotide primer for the detection of SNP TSC0049740
tttagtgttgag

SEQ ID NO: 355624 - DNA, 12 bp, Artificial Sequence
  Oligonucleotide primer for the detection of SNP TSC0049740
tttagtgtcgag

SEQ ID NO: 355625 - DNA, 12 bp, Artificial Sequence
  Oligonukleotid-Primer
aattaattcact

SEQ ID NO: 355626 - DNA, 12 bp, Artificial Sequence
  Oligonucleotide primer for the detection of SNP TSC0049742
ttatatctataa

SEQ ID NO: 355627 - DNA, 12 bp, Artificial Sequence
  Oligonucleotide primer for the detection of SNP TSC0049742
tcaacccctatc

SEQ ID NO: 355628 - DNA, 12 bp, Artificial Sequence
  Oligonucleotide primer for the detection of SNP TSC0049742
ttgtgtttgtag

SEQ ID NO: 355629 - DNA, 12 bp, Artificial Sequence
  Oligonukleotid-Primer
tcccacaataac

SEQ ID NO: 355630 - DNA, 12 bp, Artificial Sequence
  Oligonucleotide primer for the detection of SNP TSC0049743
ttgttatttata

SEQ ID NO: 355631 - DNA, 12 bp, Artificial Sequence
  Oligonucleotide primer for the detection of SNP TSC0049744
attaaaacaaat

SEQ ID NO: 355632 - DNA, 12 bp, Artificial Sequence
  Oligonucleotide primer for the detection of SNP TSC0049746
atccattaaact

SEQ ID NO: 355633 - DNA, 12 bp, Artificial Sequence
  Oligonukleotid-Primer
gtgtttttaaag

SEQ ID NO: 355634 - DNA, 12 bp, Artificial Sequence
  Oligonucleotide primer for the detection of SNP TSC0049747
accatttataac

SEQ ID NO: 355635 - DNA, 12 bp, Artificial Sequence
  Oligonucleotide primer for the detection of SNP TSC0049747
tattagttatgg

SEQ ID NO: 355636 - DNA, 12 bp, Artificial Sequence
  Oligonucleotide primer for the detection of SNP TSC0049749
ttacattcacaa

SEQ ID NO: 355637 - DNA, 12 bp, Artificial Sequence
  Oligonukleotid-Primer
aatattggttag

SEQ ID NO: 355638 - DNA, 12 bp, Artificial Sequence
  Oligonucleotide primer for the detection of SNP TSC0049749
aatattaatcaa

SEQ ID NO: 355639 - DNA, 12 bp, Artificial Sequence
  Oligonucleotide primer for the detection of SNP TSC0049750
aattttcaaaaa

SEQ ID NO: 355640 - DNA, 12 bp, Artificial Sequence
  Oligonucleotide primer for the detection of SNP TSC0049750
tgtaaaggaaaa

SEQ ID NO: 355641 - DNA, 12 bp, Artificial Sequence
  Oligonukleotid-Primer
agaaggggtttt

SEQ ID NO: 355642 - DNA, 12 bp, Artificial Sequence
  Oligonucleotide primer for the detection of SNP TSC0049752
attataccacta

SEQ ID NO: 355643 - DNA, 12 bp, Artificial Sequence
  Oligonucleotide primer for the detection of SNP TSC0049752
tgtggttaggtt

SEQ ID NO: 355644 - DNA, 12 bp, Artificial Sequence
  Oligonucleotide primer for the detection of SNP TSC0049753
ataaacattttt

SEQ ID NO: 355645 - DNA, 12 bp, Artificial Sequence
  Oligonucleotide primer for the detection of SNP TSC0008339
taacactacaca

SEQ ID NO: 355646 - DNA, 12 bp, Artificial Sequence
  Oligonucleotide primer for the detection of SNP TSC0008339
ttttattagagt

SEQ ID NO: 355647 - DNA, 12 bp, Artificial Sequence
  Oligonucleotide primer for the detection of SNP TSC0008339
ctccaccaaaat

SEQ ID NO: 355648 - DNA, 12 bp, Artificial Sequence
  Oligonucleotide primer for the detection of SNP TSC0008339
tggtattgtata

SEQ ID NO: 355649 - DNA, 12 bp, Artificial Sequence
  Oligonukleotid-Primer
actttatttcac

SEQ ID NO: 355650 - DNA, 12 bp, Artificial Sequence
  Oligonucleotide primer for the detection of SNP TSC0049757
agttattagttg

SEQ ID NO: 355651 - DNA, 12 bp, Artificial Sequence
  Oligonucleotide primer for the detection of SNP TSC0049757
aatcattaacta

SEQ ID NO: 355652 - DNA, 12 bp, Artificial Sequence
  Oligonucleotide primer for the detection of SNP TSC0049759
ttttcaaaacct

SEQ ID NO: 355653 - DNA, 12 bp, Artificial Sequence
  Oligonukleotid-Primer
tgttgttggatg

SEQ ID NO: 355654 - DNA, 12 bp, Artificial Sequence
  unsure (2): Oligonucleotide primer for the detection of SNP TSC0049760
gngattttggat

SEQ ID NO: 355655 - DNA, 12 bp, Artificial Sequence
  unsure (2): Oligonucleotide primer for the detection of SNP TSC0049760
gngatttcggat

SEQ ID NO: 355656 - DNA, 12 bp, Artificial Sequence
  unsure (2): Oligonucleotide primer for the detection of SNP TSC0049760
anaaccccaaac

SEQ ID NO: 355657 - DNA, 12 bp, Artificial Sequence
  unsure (2): Oligonucleotide primer for the detection of SNP TSC0049760
anaaccccgaac

SEQ ID NO: 355658 - DNA, 12 bp, Artificial Sequence
  unsure (2): Oligonucleotide primer for the detection of SNP TSC0049760
gnaaccccaaac

SEQ ID NO: 355659 - DNA, 12 bp, Artificial Sequence
  unsure (2): Oligonucleotide primer for the detection of SNP TSC0049760
gnaaccccgaac

SEQ ID NO: 355660 - DNA, 12 bp, Artificial Sequence
  Oligonucleotide primer for the detection of SNP TSC0049760
ttggaatttata

SEQ ID NO: 355661 - DNA, 12 bp, Artificial Sequence
  Oligonucleotide primer for the detection of SNP TSC0049761
ttttgaggttaa

SEQ ID NO: 355662 - DNA, 12 bp, Artificial Sequence
  Oligonucleotide primer for the detection of SNP TSC0049762
tactctaaaact

SEQ ID NO: 355663 - DNA, 12 bp, Artificial Sequence
  Oligonucleotide primer for the detection of SNP TSC0049763
aagggataagaa

SEQ ID NO: 355664 - DNA, 12 bp, Artificial Sequence
  Oligonucleotide primer for the detection of SNP TSC0049764
ctaaatcctcct

SEQ ID NO: 355665 - DNA, 12 bp, Artificial Sequence
  Oligonucleotide primer for the detection of SNP TSC0049764
tagtttaagata

SEQ ID NO: 355666 - DNA, 12 bp, Artificial Sequence
  Oligonucleotide primer for the detection of SNP TSC0049765
attataaacaac

SEQ ID NO: 355667 - DNA, 12 bp, Artificial Sequence
  Oligonucleotide primer for the detection of SNP TSC0049765
aactacctcata

SEQ ID NO: 355668 - DNA, 12 bp, Artificial Sequence
  Oligonucleotide primer for the detection of SNP TSC0049765
gttgtgagtagt

SEQ ID NO: 355669 - DNA, 12 bp, Artificial Sequence
  Oligonucleotide primer for the detection of SNP TSC0049765
gttgtgagtagc

SEQ ID NO: 355670 - DNA, 12 bp, Artificial Sequence
  Oligonucleotide primer for the detection of SNP TSC0049766
taataatgtttt

SEQ ID NO: 355671 - DNA, 12 bp, Artificial Sequence
  Oligonucleotide primer for the detection of SNP TSC0049766
attaataatatc

SEQ ID NO: 355672 - DNA, 12 bp, Artificial Sequence
  Oligonucleotide primer for the detection of SNP TSC0049767
ttaatataacac

SEQ ID NO: 355673 - DNA, 12 bp, Artificial Sequence
  Oligonucleotide primer for the detection of SNP TSC0049767
aaatatttgtta

SEQ ID NO: 355674 - DNA, 12 bp, Artificial Sequence
  Oligonucleotide primer for the detection of SNP TSC0049767
aaatattcgtta

SEQ ID NO: 355675 - DNA, 12 bp, Artificial Sequence
  Oligonucleotide primer for the detection of SNP TSC0049768
tgttaatgttta

SEQ ID NO: 355676 - DNA, 12 bp, Artificial Sequence
  Oligonucleotide primer for the detection of SNP TSC0010741
taataagagtga

SEQ ID NO: 355677 - DNA, 12 bp, Artificial Sequence
  Oligonucleotide primer for the detection of SNP TSC0049769
caacaaaaactc

SEQ ID NO: 355678 - DNA, 12 bp, Artificial Sequence
  Oligonucleotide primer for the detection of SNP TSC0049769
agagtagtaaaa

SEQ ID NO: 355679 - DNA, 12 bp, Artificial Sequence
  Oligonucleotide primer for the detection of SNP TSC0049770
agatgatttttg

SEQ ID NO: 355680 - DNA, 12 bp, Artificial Sequence
  Oligonucleotide primer for the detection of SNP TSC0049770
agaaggggtgtt

SEQ ID NO: 355681 - DNA, 12 bp, Artificial Sequence
  Oligonucleotide primer for the detection of SNP TSC0049770
agaaggggtgtc

SEQ ID NO: 355682 - DNA, 12 bp, Artificial Sequence
  Oligonucleotide primer for the detection of SNP TSC0004944
gacaaaattccc

SEQ ID NO: 355683 - DNA, 12 bp, Artificial Sequence
  Oligonucleotide primer for the detection of SNP TSC0004944
agatagagattg

SEQ ID NO: 355684 - DNA, 12 bp, Artificial Sequence
  Oligonucleotide primer for the detection of SNP TSC0049772
aaaactctatct

SEQ ID NO: 355685 - DNA, 12 bp, Artificial Sequence
  Oligonucleotide primer for the detection of SNP TSC0049772
gagttagataga

SEQ ID NO: 355686 - DNA, 12 bp, Artificial Sequence
  Oligonucleotide primer for the detection of SNP TSC0049773
tggaaagaaaaa

SEQ ID NO: 355687 - DNA, 12 bp, Artificial Sequence
  Oligonucleotide primer for the detection of SNP TSC0049773
cggaaagaaaaa

SEQ ID NO: 355688 - DNA, 12 bp, Artificial Sequence
  Oligonucleotide primer for the detection of SNP TSC0049773
ttttgtaggtaa

SEQ ID NO: 355689 - DNA, 12 bp, Artificial Sequence
  Oligonucleotide primer for the detection of SNP TSC0049776
tcatctaaaaaa

SEQ ID NO: 355690 - DNA, 12 bp, Artificial Sequence
  Oligonucleotide primer for the detection of SNP TSC0049776
attattattttc

SEQ ID NO: 355691 - DNA, 12 bp, Artificial Sequence
  Oligonucleotide primer for the detection of SNP TSC0049776
atcactactctc

SEQ ID NO: 355692 - DNA, 12 bp, Artificial Sequence
  Oligonucleotide primer for the detection of SNP TSC0049776
tttatttagaag

SEQ ID NO: 355693 - DNA, 12 bp, Artificial Sequence
  Oligonucleotide primer for the detection of SNP TSC0049777
aacaaaatattt

SEQ ID NO: 355694 - DNA, 12 bp, Artificial Sequence
  Oligonucleotide primer for the detection of SNP TSC0049777
tattgttaaagg

SEQ ID NO: 355695 - DNA, 12 bp, Artificial Sequence
  Oligonucleotide primer for the detection of SNP TSC0006752
actttttaataa

SEQ ID NO: 355696 - DNA, 12 bp, Artificial Sequence
  Oligonucleotide primer for the detection of SNP TSC0006752
attttttaatgg

SEQ ID NO: 355697 - DNA, 12 bp, Artificial Sequence
  Oligonucleotide primer for the detection of SNP TSC0007600
acctacctcaac

SEQ ID NO: 355698 - DNA, 12 bp, Artificial Sequence
  Oligonucleotide primer for the detection of SNP TSC0007600
acctacctcgac

SEQ ID NO: 355699 - DNA, 12 bp, Artificial Sequence
  Oligonucleotide primer for the detection of SNP TSC0004647
cataatacaaat

SEQ ID NO: 355700 - DNA, 12 bp, Artificial Sequence
  Oligonucleotide primer for the detection of SNP TSC0004647
aacccctaatta

SEQ ID NO: 355701 - DNA, 12 bp, Artificial Sequence
  Oligonucleotide primer for the detection of SNP TSC0004647
tataatataaat

SEQ ID NO: 355702 - DNA, 12 bp, Artificial Sequence
  Oligonucleotide primer for the detection of SNP TSC0004648
tcatccaaaaat

SEQ ID NO: 355703 - DNA, 12 bp, Artificial Sequence
  Oligonucleotide primer for the detection of SNP TSC0004648
ttttagtataga

SEQ ID NO: 355704 - DNA, 12 bp, Artificial Sequence
  Oligonucleotide primer for the detection of SNP TSC0049779
gtaatttaaggg

SEQ ID NO: 355705 - DNA, 12 bp, Artificial Sequence
  Oligonucleotide primer for the detection of SNP TSC0049780
caataacaatat

SEQ ID NO: 355706 - DNA, 12 bp, Artificial Sequence
  Oligonucleotide primer for the detection of SNP TSC0049780
aagttttattta

SEQ ID NO: 355707 - DNA, 12 bp, Artificial Sequence
  Oligonucleotide primer for the detection of SNP TSC0049780
aaactttactta

SEQ ID NO: 355708 - DNA, 12 bp, Artificial Sequence
  Oligonucleotide primer for the detection of SNP TSC0049781
tttagtgggtta

SEQ ID NO: 355709 - DNA, 12 bp, Artificial Sequence
  Oligonucleotide primer for the detection of SNP TSC0049781
ctcaataaatca

SEQ ID NO: 355710 - DNA, 12 bp, Artificial Sequence
  Oligonucleotide primer for the detection of SNP TSC0049781
tgttggaattat

SEQ ID NO: 355711 - DNA, 12 bp, Artificial Sequence
  Oligonucleotide primer for the detection of SNP TSC0049782
ttaaaataatct

SEQ ID NO: 355712 - DNA, 12 bp, Artificial Sequence
  Oligonucleotide primer for the detection of SNP TSC0049782
tgggcgatagag

SEQ ID NO: 355713 - DNA, 12 bp, Artificial Sequence
  Oligonucleotide primer for the detection of SNP TSC0049782
ttgagatggttt

SEQ ID NO: 355714 - DNA, 12 bp, Artificial Sequence
  Oligonucleotide primer for the detection of SNP TSC0049785
ccacaaaattac

SEQ ID NO: 355715 - DNA, 12 bp, Artificial Sequence
  Oligonucleotide primer for the detection of SNP TSC0049785
gtagtgaatttg

SEQ ID NO: 355716 - DNA, 12 bp, Artificial Sequence
  Oligonucleotide primer for the detection of SNP TSC0049786
catacaactttt

SEQ ID NO: 355717 - DNA, 12 bp, Artificial Sequence
  Oligonucleotide primer for the detection of SNP TSC0049786
atataattttta

SEQ ID NO: 355718 - DNA, 12 bp, Artificial Sequence
  Oligonucleotide primer for the detection of SNP TSC0049787
tataaaacttct

SEQ ID NO: 355719 - DNA, 12 bp, Artificial Sequence
  Oligonucleotide primer for the detection of SNP TSC0049787
atgtaaatatta

SEQ ID NO: 355720 - DNA, 12 bp, Artificial Sequence
  Oligonucleotide primer for the detection of SNP TSC0049787
acgtaaatatta

SEQ ID NO: 355721 - DNA, 12 bp, Artificial Sequence
  Oligonucleotide primer for the detection of SNP TSC0007573
gatttaaatttt

SEQ ID NO: 355722 - DNA, 12 bp, Artificial Sequence
  Oligonucleotide primer for the detection of SNP TSC0007573
aacccaaaccct

SEQ ID NO: 355723 - DNA, 12 bp, Artificial Sequence
  Oligonucleotide primer for the detection of SNP TSC0007573
ggggttaggtag

SEQ ID NO: 355724 - DNA, 12 bp, Artificial Sequence
  Oligonucleotide primer for the detection of SNP TSC0007712
aaaccctcacat

SEQ ID NO: 355725 - DNA, 12 bp, Artificial Sequence
  Oligonucleotide primer for the detection of SNP TSC0007712
aaaccctcacgt

SEQ ID NO: 355726 - DNA, 12 bp, Artificial Sequence
  Oligonucleotide primer for the detection of SNP TSC0007712
aaaccctcgcat

SEQ ID NO: 355727 - DNA, 12 bp, Artificial Sequence
  Oligonucleotide primer for the detection of SNP TSC0007712
aaaccctcgcgt

SEQ ID NO: 355728 - DNA, 12 bp, Artificial Sequence
  Oligonucleotide primer for the detection of SNP TSC0007712
gtagagtttagg

SEQ ID NO: 355729 - DNA, 12 bp, Artificial Sequence
  Oligonucleotide primer for the detection of SNP TSC0049792
aattcttaatat

SEQ ID NO: 355730 - DNA, 12 bp, Artificial Sequence
  Oligonucleotide primer for the detection of SNP TSC0049792
tagtgttggata

SEQ ID NO: 355731 - DNA, 12 bp, Artificial Sequence
  Oligonucleotide primer for the detection of SNP TSC0007244
tagaagttagtt

SEQ ID NO: 355732 - DNA, 12 bp, Artificial Sequence
  Oligonucleotide primer for the detection of SNP TSC0007244
caaaaaccaacc

SEQ ID NO: 355733 - DNA, 12 bp, Artificial Sequence
  Oligonucleotide primer for the detection of SNP TSC0007244
agaatataaaaa

SEQ ID NO: 355734 - DNA, 12 bp, Artificial Sequence
  Oligonucleotide primer for the detection of SNP TSC0001530
aaaaataaggaa

SEQ ID NO: 355735 - DNA, 12 bp, Artificial Sequence
  Oligonucleotide primer for the detection of SNP TSC0001530
taaatggtaggt

SEQ ID NO: 355736 - DNA, 12 bp, Artificial Sequence
  Oligonucleotide primer for the detection of SNP TSC0001531
tcaattcatcta

SEQ ID NO: 355737 - DNA, 12 bp, Artificial Sequence
  Oligonucleotide primer for the detection of SNP TSC0001531
ttaatttaaagt

SEQ ID NO: 355738 - DNA, 12 bp, Artificial Sequence
  Oligonucleotide primer for the detection of SNP TSC0001531
ttaatttaaagc

SEQ ID NO: 355739 - DNA, 12 bp, Artificial Sequence
  Oligonucleotide primer for the detection of SNP TSC0001532
acttctttaaat

SEQ ID NO: 355740 - DNA, 12 bp, Artificial Sequence
  Oligonucleotide primer for the detection of SNP TSC0001532
ttgaaatattta

SEQ ID NO: 355741 - DNA, 12 bp, Artificial Sequence
  Oligonucleotide primer for the detection of SNP TSC0001532
ctaaaatattca

SEQ ID NO: 355742 - DNA, 12 bp, Artificial Sequence
  Oligonucleotide primer for the detection of SNP TSC0001532
gtttttttgagt

SEQ ID NO: 355743 - DNA, 12 bp, Artificial Sequence
  Oligonucleotide primer for the detection of SNP TSC0049793
aaccaactataa

SEQ ID NO: 355744 - DNA, 12 bp, Artificial Sequence
  Oligonucleotide primer for the detection of SNP TSC0049793
atacaaaaccta

SEQ ID NO: 355745 - DNA, 12 bp, Artificial Sequence
  Oligonucleotide primer for the detection of SNP TSC0049793
gttagttgtggt

SEQ ID NO: 355746 - DNA, 12 bp, Artificial Sequence
  Oligonucleotide primer for the detection of SNP TSC0049795
tactaatctttc

SEQ ID NO: 355747 - DNA, 12 bp, Artificial Sequence
  Oligonucleotide primer for the detection of SNP TSC0049796
acaattaatcac

SEQ ID NO: 355748 - DNA, 12 bp, Artificial Sequence
  Oligonucleotide primer for the detection of SNP TSC0049796
gcaattaatcac

SEQ ID NO: 355749 - DNA, 12 bp, Artificial Sequence
  Oligonucleotide primer for the detection of SNP TSC0049796
gtcgtgttgtta

SEQ ID NO: 355750 - DNA, 12 bp, Artificial Sequence
  Oligonucleotide primer for the detection of SNP TSC0000962
tactaataacaa

SEQ ID NO: 355751 - DNA, 12 bp, Artificial Sequence
  Oligonucleotide primer for the detection of SNP TSC0000962
tactaataacga

SEQ ID NO: 355752 - DNA, 12 bp, Artificial Sequence
  Oligonucleotide primer for the detection of SNP TSC0000963
taataagaaaaa

SEQ ID NO: 355753 - DNA, 12 bp, Artificial Sequence
  Oligonucleotide primer for the detection of SNP TSC0000963
aagttattttgg

SEQ ID NO: 355754 - DNA, 12 bp, Artificial Sequence
  Oligonucleotide primer for the detection of SNP TSC0049797
tattaattttta

SEQ ID NO: 355755 - DNA, 12 bp, Artificial Sequence
  Oligonucleotide primer for the detection of SNP TSC0049800
ttacaatttaca

SEQ ID NO: 355756 - DNA, 12 bp, Artificial Sequence
  Oligonucleotide primer for the detection of SNP TSC0049800
taggatttaatt

SEQ ID NO: 355757 - DNA, 12 bp, Artificial Sequence
  Oligonucleotide primer for the detection of SNP TSC0049800
ctcaaaacttaa

SEQ ID NO: 355758 - DNA, 12 bp, Artificial Sequence
  Oligonucleotide primer for the detection of SNP TSC0049800
attgtagtttgt

SEQ ID NO: 355759 - DNA, 12 bp, Artificial Sequence
  Oligonucleotide primer for the detection of SNP TSC0010393
tgttaaattgtt

SEQ ID NO: 355760 - DNA, 12 bp, Artificial Sequence
  Oligonucleotide primer for the detection of SNP TSC0010393
gttattataatt

SEQ ID NO: 355761 - DNA, 12 bp, Artificial Sequence
  Oligonucleotide primer for the detection of SNP TSC0049801
ctcattctctaa

SEQ ID NO: 355762 - DNA, 12 bp, Artificial Sequence
  Oligonucleotide primer for the detection of SNP TSC0049801
aaaattttattt

SEQ ID NO: 355763 - DNA, 12 bp, Artificial Sequence
  Oligonucleotide primer for the detection of SNP TSC0049802
tacctttactaa

SEQ ID NO: 355764 - DNA, 12 bp, Artificial Sequence
  Oligonucleotide primer for the detection of SNP TSC0049803
cacaaccaatct

SEQ ID NO: 355765 - DNA, 12 bp, Artificial Sequence
  Oligonucleotide primer for the detection of SNP TSC0049803
cacgaccaatct

SEQ ID NO: 355766 - DNA, 12 bp, Artificial Sequence
  Oligonucleotide primer for the detection of SNP TSC0049803
cgcaaccaatct

SEQ ID NO: 355767 - DNA, 12 bp, Artificial Sequence
  Oligonucleotide primer for the detection of SNP TSC0049803
cgcgaccaatct

SEQ ID NO: 355768 - DNA, 12 bp, Artificial Sequence
  Oligonucleotide primer for the detection of SNP TSC0049804
aattcccatacc

SEQ ID NO: 355769 - DNA, 12 bp, Artificial Sequence
  Oligonucleotide primer for the detection of SNP TSC0049804
gaataggagaaa

SEQ ID NO: 355770 - DNA, 12 bp, Artificial Sequence
  Oligonucleotide primer for the detection of SNP TSC0049806
ctctactaacat

SEQ ID NO: 355771 - DNA, 12 bp, Artificial Sequence
  Oligonucleotide primer for the detection of SNP TSC0049806
tgttataaaaga

SEQ ID NO: 355772 - DNA, 12 bp, Artificial Sequence
  Oligonucleotide primer for the detection of SNP TSC0049807
agtagagtatat

SEQ ID NO: 355773 - DNA, 12 bp, Artificial Sequence
  Oligonucleotide primer for the detection of SNP TSC0049807
caacaaaacaca

SEQ ID NO: 355774 - DNA, 12 bp, Artificial Sequence
  Oligonucleotide primer for the detection of SNP TSC0049807
ttggtagaggaa

SEQ ID NO: 355775 - DNA, 12 bp, Artificial Sequence
  Oligonucleotide primer for the detection of SNP TSC0049808
atctcttaaact

SEQ ID NO: 355776 - DNA, 12 bp, Artificial Sequence
  Oligonucleotide primer for the detection of SNP TSC0049809
aactcaaaaatc

SEQ ID NO: 355777 - DNA, 12 bp, Artificial Sequence
  Oligonucleotide primer for the detection of SNP TSC0049809
aattttaggtga

SEQ ID NO: 355778 - DNA, 12 bp, Artificial Sequence
  Oligonucleotide primer for the detection of SNP TSC0049810
tcattaaactat

SEQ ID NO: 355779 - DNA, 12 bp, Artificial Sequence
  Oligonucleotide primer for the detection of SNP TSC0049810
tgttttaagtat

SEQ ID NO: 355780 - DNA, 12 bp, Artificial Sequence
  Oligonucleotide primer for the detection of SNP TSC0049810
tatcctaaacat

SEQ ID NO: 355781 - DNA, 12 bp, Artificial Sequence
  Oligonucleotide primer for the detection of SNP TSC0049810
tattgggttgtt

SEQ ID NO: 355782 - DNA, 12 bp, Artificial Sequence
  Oligonucleotide primer for the detection of SNP TSC0049811
ccttatatatta

SEQ ID NO: 355783 - DNA, 12 bp, Artificial Sequence
  Oligonucleotide primer for the detection of SNP TSC0049811
tagggtttattt

SEQ ID NO: 355784 - DNA, 12 bp, Artificial Sequence
  Oligonucleotide primer for the detection of SNP TSC0049813
aacaaattctcc

SEQ ID NO: 355785 - DNA, 12 bp, Artificial Sequence
  Oligonucleotide primer for the detection of SNP TSC0049813
tggtttttgtta

SEQ ID NO: 355786 - DNA, 12 bp, Artificial Sequence
  Oligonucleotide primer for the detection of SNP TSC0049813
taacttctatca

SEQ ID NO: 355787 - DNA, 12 bp, Artificial Sequence
  Oligonucleotide primer for the detection of SNP TSC0049813
gataggtttttt

SEQ ID NO: 355788 - DNA, 12 bp, Artificial Sequence
  Oligonucleotide primer for the detection of SNP TSC0049814
ttctaaaccttt

SEQ ID NO: 355789 - DNA, 12 bp, Artificial Sequence
  Oligonucleotide primer for the detection of SNP TSC0049814
tatgtaaggttg

SEQ ID NO: 355790 - DNA, 12 bp, Artificial Sequence
  Oligonucleotide primer for the detection of SNP TSC0006567
aattaatatcac

SEQ ID NO: 355791 - DNA, 12 bp, Artificial Sequence
  Oligonucleotide primer for the detection of SNP TSC0006567
tataaatgttat

SEQ ID NO: 355792 - DNA, 12 bp, Artificial Sequence
  Oligonucleotide primer for the detection of SNP TSC0006567
ataaataccata

SEQ ID NO: 355793 - DNA, 12 bp, Artificial Sequence
  Oligonucleotide primer for the detection of SNP TSC0006567
gattgatattat

SEQ ID NO: 355794 - DNA, 12 bp, Artificial Sequence
  Oligonucleotide primer for the detection of SNP TSC0049817
taatacctttac

SEQ ID NO: 355795 - DNA, 12 bp, Artificial Sequence
  Oligonucleotide primer for the detection of SNP TSC0049817
atcttctatata

SEQ ID NO: 355796 - DNA, 12 bp, Artificial Sequence
  Oligonucleotide primer for the detection of SNP TSC0049817
taatatttttgt

SEQ ID NO: 355797 - DNA, 12 bp, Artificial Sequence
  Oligonucleotide primer for the detection of SNP TSC0049817
taatatttttgc

SEQ ID NO: 355798 - DNA, 12 bp, Artificial Sequence
  Oligonucleotide primer for the detection of SNP TSC0010973
ccccttaaaact

SEQ ID NO: 355799 - DNA, 12 bp, Artificial Sequence
  Oligonucleotide primer for the detection of SNP TSC0049819
atacaaaaatta

SEQ ID NO: 355800 - DNA, 12 bp, Artificial Sequence
  Oligonucleotide primer for the detection of SNP TSC0049819
gttattatattc

SEQ ID NO: 355801 - DNA, 12 bp, Artificial Sequence
  Oligonucleotide primer for the detection of SNP TSC0049820
ttattgtggagg

SEQ ID NO: 355802 - DNA, 12 bp, Artificial Sequence
  Oligonucleotide primer for the detection of SNP TSC0049821
ttccaaaataat

SEQ ID NO: 355803 - DNA, 12 bp, Artificial Sequence
  Oligonucleotide primer for the detection of SNP TSC0049821
agaagtaataaa

SEQ ID NO: 355804 - DNA, 12 bp, Artificial Sequence
  Oligonucleotide primer for the detection of SNP TSC0049822
aactcacgattc

SEQ ID NO: 355805 - DNA, 12 bp, Artificial Sequence
  Oligonucleotide primer for the detection of SNP TSC0049822
ttttttgtaaag

SEQ ID NO: 355806 - DNA, 12 bp, Artificial Sequence
  Oligonucleotide primer for the detection of SNP TSC0049822
cttcctataaaa

SEQ ID NO: 355807 - DNA, 12 bp, Artificial Sequence
  Oligonucleotide primer for the detection of SNP TSC0049823
ttattaaacaca

SEQ ID NO: 355808 - DNA, 12 bp, Artificial Sequence
  Oligonucleotide primer for the detection of SNP TSC0049823
catttacttcta

SEQ ID NO: 355809 - DNA, 12 bp, Artificial Sequence
  Oligonucleotide primer for the detection of SNP TSC0049823
ttattaggtata

SEQ ID NO: 355810 - DNA, 12 bp, Artificial Sequence
  Oligonucleotide primer for the detection of SNP TSC0049825
caaaatttcacc

SEQ ID NO: 355811 - DNA, 12 bp, Artificial Sequence
  Oligonucleotide primer for the detection of SNP TSC0049826
aacttcaactta

SEQ ID NO: 355812 - DNA, 12 bp, Artificial Sequence
  Oligonucleotide primer for the detection of SNP TSC0049826
gtagttgatgat

SEQ ID NO: 355813 - DNA, 12 bp, Artificial Sequence
  Oligonucleotide primer for the detection of SNP TSC0049826
acaactaataac

SEQ ID NO: 355814 - DNA, 12 bp, Artificial Sequence
  Oligonucleotide primer for the detection of SNP TSC0049826
agttttaattta

SEQ ID NO: 355815 - DNA, 12 bp, Artificial Sequence
  Oligonucleotide primer for the detection of SNP TSC0049827
aacaaaatctca

SEQ ID NO: 355816 - DNA, 12 bp, Artificial Sequence
  Oligonucleotide primer for the detection of SNP TSC0049827
tttgggtgatgg

SEQ ID NO: 355817 - DNA, 12 bp, Artificial Sequence
  Oligonucleotide primer for the detection of SNP TSC0049827
tttgggtgacgg

SEQ ID NO: 355818 - DNA, 12 bp, Artificial Sequence
  Oligonucleotide primer for the detection of SNP TSC0049827
ctaaataacaaa

SEQ ID NO: 355819 - DNA, 12 bp, Artificial Sequence
  Oligonucleotide primer for the detection of SNP TSC0049827
ctaaataacgaa

SEQ ID NO: 355820 - DNA, 12 bp, Artificial Sequence
  Oligonucleotide primer for the detection of SNP TSC0049827
gatagagtttta

SEQ ID NO: 355821 - DNA, 12 bp, Artificial Sequence
  Oligonucleotide primer for the detection of SNP TSC0001062
tctttctaacac

SEQ ID NO: 355822 - DNA, 12 bp, Artificial Sequence
  Oligonukleotid-Primer
ttatagtaaatg

SEQ ID NO: 355823 - DNA, 12 bp, Artificial Sequence
  Oligonucleotide primer for the detection of SNP TSC0009585
taaatttatttc

SEQ ID NO: 355824 - DNA, 12 bp, Artificial Sequence
  Oligonucleotide primer for the detection of SNP TSC0009585
taagaattgtag

SEQ ID NO: 355825 - DNA, 12 bp, Artificial Sequence
  Oligonucleotide primer for the detection of SNP TSC0009585
taagaatcgtag

SEQ ID NO: 355826 - DNA, 12 bp, Artificial Sequence
  Oligonukleotid-Primer
aatcaattacta

SEQ ID NO: 355827 - DNA, 12 bp, Artificial Sequence
  Oligonucleotide primer for the detection of SNP TSC0001191
tttgtgagaatt

SEQ ID NO: 355828 - DNA, 12 bp, Artificial Sequence
  Oligonucleotide primer for the detection of SNP TSC0001191
ccttataaaaac

SEQ ID NO: 355829 - DNA, 12 bp, Artificial Sequence
  Oligonucleotide primer for the detection of SNP TSC0001191
gagttaattatt

SEQ ID NO: 355830 - DNA, 12 bp, Artificial Sequence
  Oligonucleotide primer for the detection of SNP TSC0001192
ttcctaaaatta

SEQ ID NO: 355831 - DNA, 12 bp, Artificial Sequence
  Oligonucleotide primer for the detection of SNP TSC0001192
attttgaaattt

SEQ ID NO: 355832 - DNA, 12 bp, Artificial Sequence
  Oligonucleotide primer for the detection of SNP TSC0001192
actctaaaaccc

SEQ ID NO: 355833 - DNA, 12 bp, Artificial Sequence
  Oligonucleotide primer for the detection of SNP TSC0001192
tttttggaatta

SEQ ID NO: 355834 - DNA, 12 bp, Artificial Sequence
  Oligonucleotide primer for the detection of SNP TSC0049830
aatatatacatt

SEQ ID NO: 355835 - DNA, 12 bp, Artificial Sequence
  Oligonucleotide primer for the detection of SNP TSC0049830
aatattgtggaa

SEQ ID NO: 355836 - DNA, 12 bp, Artificial Sequence
  Oligonucleotide primer for the detection of SNP TSC0049830
aacattataaaa

SEQ ID NO: 355837 - DNA, 12 bp, Artificial Sequence
  Oligonucleotide primer for the detection of SNP TSC0049830
aatgtatatatt

SEQ ID NO: 355838 - DNA, 12 bp, Artificial Sequence
  Oligonucleotide primer for the detection of SNP TSC0049832
ttcattcacaca

SEQ ID NO: 355839 - DNA, 12 bp, Artificial Sequence
  Oligonucleotide primer for the detection of SNP TSC0049832
ttcgttcacaca

SEQ ID NO: 355840 - DNA, 12 bp, Artificial Sequence
  Oligonucleotide primer for the detection of SNP TSC0049832
tactttacaaac

SEQ ID NO: 355841 - DNA, 12 bp, Artificial Sequence
  Oligonucleotide primer for the detection of SNP TSC0049832
ttttgtttatat

SEQ ID NO: 355842 - DNA, 12 bp, Artificial Sequence
  Oligonucleotide primer for the detection of SNP TSC0049832
tttcgtttatat

SEQ ID NO: 355843 - DNA, 12 bp, Artificial Sequence
  Oligonucleotide primer for the detection of SNP TSC0008630
acctcctaaatt

SEQ ID NO: 355844 - DNA, 12 bp, Artificial Sequence
  Oligonucleotide primer for the detection of SNP TSC0008630
taattgtgatag

SEQ ID NO: 355845 - DNA, 12 bp, Artificial Sequence
  Oligonucleotide primer for the detection of SNP TSC0008630
caactataataa

SEQ ID NO: 355846 - DNA, 12 bp, Artificial Sequence
  Oligonucleotide primer for the detection of SNP TSC0008630
gttttttgaatt

SEQ ID NO: 355847 - DNA, 12 bp, Artificial Sequence
  Oligonucleotide primer for the detection of SNP TSC0010350
acttctttccac

SEQ ID NO: 355848 - DNA, 12 bp, Artificial Sequence
  Oligonucleotide primer for the detection of SNP TSC0010350
taaagattttta

SEQ ID NO: 355849 - DNA, 12 bp, Artificial Sequence
  Oligonucleotide primer for the detection of SNP TSC0001679
caaataatacaa

SEQ ID NO: 355850 - DNA, 12 bp, Artificial Sequence
  Oligonucleotide primer for the detection of SNP TSC0001679
atggggtttaga

SEQ ID NO: 355851 - DNA, 12 bp, Artificial Sequence
  Oligonucleotide primer for the detection of SNP TSC0001679
tagatggtatag

SEQ ID NO: 355852 - DNA, 12 bp, Artificial Sequence
  Oligonucleotide primer for the detection of SNP TSC0008365
tattcacaatta

SEQ ID NO: 355853 - DNA, 12 bp, Artificial Sequence
  Oligonucleotide primer for the detection of SNP TSC0008365
ttggatattgtt

SEQ ID NO: 355854 - DNA, 12 bp, Artificial Sequence
  Oligonucleotide primer for the detection of SNP TSC0008365
ttggatattgtc

SEQ ID NO: 355855 - DNA, 12 bp, Artificial Sequence
  Oligonucleotide primer for the detection of SNP TSC0008365
ctaaatactatc

SEQ ID NO: 355856 - DNA, 12 bp, Artificial Sequence
  Oligonucleotide primer for the detection of SNP TSC0008365
tgtttatagttg

SEQ ID NO: 355857 - DNA, 12 bp, Artificial Sequence
  Oligonucleotide primer for the detection of SNP TSC0049837
tttccccaatac

SEQ ID NO: 355858 - DNA, 12 bp, Artificial Sequence
  Oligonucleotide primer for the detection of SNP TSC0049837
gagttttaagag

SEQ ID NO: 355859 - DNA, 12 bp, Artificial Sequence
  Oligonucleotide primer for the detection of SNP TSC0049838
ttactccataca

SEQ ID NO: 355860 - DNA, 12 bp, Artificial Sequence
  Oligonucleotide primer for the detection of SNP TSC0049838
tatttgtttgta

SEQ ID NO: 355861 - DNA, 12 bp, Artificial Sequence
  Oligonucleotide primer for the detection of SNP TSC0049838
catttatttata

SEQ ID NO: 355862 - DNA, 12 bp, Artificial Sequence
  Oligonucleotide primer for the detection of SNP TSC0049838
ttgttttatata

SEQ ID NO: 355863 - DNA, 12 bp, Artificial Sequence
  Oligonucleotide primer for the detection of SNP TSC0049839
ttgggtaatagt

SEQ ID NO: 355864 - DNA, 12 bp, Artificial Sequence
  Oligonucleotide primer for the detection of SNP TSC0049839
ctaaacaacaat

SEQ ID NO: 355865 - DNA, 12 bp, Artificial Sequence
  Oligonucleotide primer for the detection of SNP TSC0049839
ttatagatagag

SEQ ID NO: 355866 - DNA, 12 bp, Artificial Sequence
  Oligonucleotide primer for the detection of SNP TSC0001124
tctaactatact

SEQ ID NO: 355867 - DNA, 12 bp, Artificial Sequence
  Oligonucleotide primer for the detection of SNP TSC0001124
tttatagtaacg

SEQ ID NO: 355868 - DNA, 12 bp, Artificial Sequence
  Oligonucleotide primer for the detection of SNP TSC0001125
ctaacacttttc

SEQ ID NO: 355869 - DNA, 12 bp, Artificial Sequence
  Oligonucleotide primer for the detection of SNP TSC0001125
ctaacgcttttc

SEQ ID NO: 355870 - DNA, 12 bp, Artificial Sequence
  Oligonucleotide primer for the detection of SNP TSC0001125
attatagggtga

SEQ ID NO: 355871 - DNA, 12 bp, Artificial Sequence
  Oligonucleotide primer for the detection of SNP TSC0001126
taatctctaaac

SEQ ID NO: 355872 - DNA, 12 bp, Artificial Sequence
  Oligonucleotide primer for the detection of SNP TSC0001126
aaggttaggtag

SEQ ID NO: 355873 - DNA, 12 bp, Artificial Sequence
  Oligonucleotide primer for the detection of SNP TSC0049845
tcatttccaaac

SEQ ID NO: 355874 - DNA, 12 bp, Artificial Sequence
  Oligonucleotide primer for the detection of SNP TSC0049845
ttagtgttatta

SEQ ID NO: 355875 - DNA, 12 bp, Artificial Sequence
  Oligonucleotide primer for the detection of SNP TSC0049845
ttagcgttatta

SEQ ID NO: 355876 - DNA, 12 bp, Artificial Sequence
  Oligonucleotide primer for the detection of SNP TSC0049845
ccaacatcacca

SEQ ID NO: 355877 - DNA, 12 bp, Artificial Sequence
  Oligonucleotide primer for the detection of SNP TSC0049845
ccaacgtcacca

SEQ ID NO: 355878 - DNA, 12 bp, Artificial Sequence
  Oligonucleotide primer for the detection of SNP TSC0001642
atatcttcataa

SEQ ID NO: 355879 - DNA, 12 bp, Artificial Sequence
  Oligonucleotide primer for the detection of SNP TSC0001642
agatagtgaaat

SEQ ID NO: 355880 - DNA, 12 bp, Artificial Sequence
  Oligonucleotide primer for the detection of SNP TSC0001642
aacaataaaata

SEQ ID NO: 355881 - DNA, 12 bp, Artificial Sequence
  Oligonucleotide primer for the detection of SNP TSC0001642
atgtttttatag

SEQ ID NO: 355882 - DNA, 12 bp, Artificial Sequence
  Oligonucleotide primer for the detection of SNP TSC0010068
aaccctaacaaa

SEQ ID NO: 355883 - DNA, 12 bp, Artificial Sequence
  Oligonucleotide primer for the detection of SNP TSC0010068
agattttgagta

SEQ ID NO: 355884 - DNA, 12 bp, Artificial Sequence
  Oligonucleotide primer for the detection of SNP TSC0010068
tttagttttgat

SEQ ID NO: 355885 - DNA, 12 bp, Artificial Sequence
  Oligonucleotide primer for the detection of SNP TSC0049846
aaaacttacaat

SEQ ID NO: 355886 - DNA, 12 bp, Artificial Sequence
  Oligonucleotide primer for the detection of SNP TSC0049846
tataccattcta

SEQ ID NO: 355887 - DNA, 12 bp, Artificial Sequence
  Oligonucleotide primer for the detection of SNP TSC0049846
agatttgtagtt

SEQ ID NO: 355888 - DNA, 12 bp, Artificial Sequence
  Oligonucleotide primer for the detection of SNP TSC0049846
agatttgtagtc

SEQ ID NO: 355889 - DNA, 12 bp, Artificial Sequence
  Oligonucleotide primer for the detection of SNP TSC0049847
ttagtattgaaa

SEQ ID NO: 355890 - DNA, 12 bp, Artificial Sequence
  Oligonucleotide primer for the detection of SNP TSC0001179
aatttattcaat

SEQ ID NO: 355891 - DNA, 12 bp, Artificial Sequence
  Oligonucleotide primer for the detection of SNP TSC0001179
aaagaaaaaaaa

SEQ ID NO: 355892 - DNA, 12 bp, Artificial Sequence
  Oligonucleotide primer for the detection of SNP TSC0049849
cacattatattt

SEQ ID NO: 355893 - DNA, 12 bp, Artificial Sequence
  Oligonucleotide primer for the detection of SNP TSC0049849
atattttccata

SEQ ID NO: 355894 - DNA, 12 bp, Artificial Sequence
  Oligonucleotide primer for the detection of SNP TSC0049850
tacttttaaatt

SEQ ID NO: 355895 - DNA, 12 bp, Artificial Sequence
  Oligonucleotide primer for the detection of SNP TSC0049850
ttagttagatgg

SEQ ID NO: 355896 - DNA, 12 bp, Artificial Sequence
  Oligonucleotide primer for the detection of SNP TSC0049851
tattttaattag

SEQ ID NO: 355897 - DNA, 12 bp, Artificial Sequence
  Oligonucleotide primer for the detection of SNP TSC0049851
tattttaattaa

SEQ ID NO: 355898 - DNA, 12 bp, Artificial Sequence
  Oligonucleotide primer for the detection of SNP TSC0049851
atgaatgattga

SEQ ID NO: 355899 - DNA, 12 bp, Artificial Sequence
  Oligonucleotide primer for the detection of SNP TSC0049855
caacccaaactc

SEQ ID NO: 355900 - DNA, 12 bp, Artificial Sequence
  Oligonucleotide primer for the detection of SNP TSC0049855
cgacccaaactc

SEQ ID NO: 355901 - DNA, 12 bp, Artificial Sequence
  Oligonucleotide primer for the detection of SNP TSC0049855
agggatagagta

SEQ ID NO: 355902 - DNA, 12 bp, Artificial Sequence
  Oligonucleotide primer for the detection of SNP TSC0049857
ctcctactctat

SEQ ID NO: 355903 - DNA, 12 bp, Artificial Sequence
  Oligonucleotide primer for the detection of SNP TSC0049863
ataggaaatgtt

SEQ ID NO: 355904 - DNA, 12 bp, Artificial Sequence
  Oligonucleotide primer for the detection of SNP TSC0049863
ggtaatttttgt

SEQ ID NO: 355905 - DNA, 12 bp, Artificial Sequence
  Oligonucleotide primer for the detection of SNP TSC0049864
accacttacttc

SEQ ID NO: 355906 - DNA, 12 bp, Artificial Sequence
  Oligonucleotide primer for the detection of SNP TSC0049864
aggatttatagg

SEQ ID NO: 355907 - DNA, 12 bp, Artificial Sequence
  Oligonucleotide primer for the detection of SNP TSC0049864
aaaactcacaaa

SEQ ID NO: 355908 - DNA, 12 bp, Artificial Sequence
  Oligonucleotide primer for the detection of SNP TSC0049865
aaaccctaacga

SEQ ID NO: 355909 - DNA, 12 bp, Artificial Sequence
  Oligonucleotide primer for the detection of SNP TSC0049865
attctatattaa

SEQ ID NO: 355910 - DNA, 12 bp, Artificial Sequence
  Oligonucleotide primer for the detection of SNP TSC0049865
gagttttagtga

SEQ ID NO: 355911 - DNA, 12 bp, Artificial Sequence
  Oligonucleotide primer for the detection of SNP TSC0049865
gagttttagcga

SEQ ID NO: 355912 - DNA, 12 bp, Artificial Sequence
  Oligonucleotide primer for the detection of SNP TSC0049866
atcatctaaact

SEQ ID NO: 355913 - DNA, 12 bp, Artificial Sequence
  Oligonucleotide primer for the detection of SNP TSC0049866
ttttagataaaa

SEQ ID NO: 355914 - DNA, 12 bp, Artificial Sequence
  Oligonucleotide primer for the detection of SNP TSC0049867
taatatttataa

SEQ ID NO: 355915 - DNA, 12 bp, Artificial Sequence
  Oligonucleotide primer for the detection of SNP TSC0049867
taatatttatag

SEQ ID NO: 355916 - DNA, 12 bp, Artificial Sequence
  Oligonucleotide primer for the detection of SNP TSC0049869
atttgaatagtt

SEQ ID NO: 355917 - DNA, 12 bp, Artificial Sequence
  Oligonucleotide primer for the detection of SNP TSC0049869
tgtggagggagt

SEQ ID NO: 355918 - DNA, 12 bp, Artificial Sequence
  Oligonucleotide primer for the detection of SNP TSC0049870
tcctctatctca

SEQ ID NO: 355919 - DNA, 12 bp, Artificial Sequence
  Oligonucleotide primer for the detection of SNP TSC0049870
agttatttagga

SEQ ID NO: 355920 - DNA, 12 bp, Artificial Sequence
  Oligonucleotide primer for the detection of SNP TSC0049871
aactacctaact

SEQ ID NO: 355921 - DNA, 12 bp, Artificial Sequence
  Oligonucleotide primer for the detection of SNP TSC0049872
ctactctaataa

SEQ ID NO: 355922 - DNA, 12 bp, Artificial Sequence
  Oligonucleotide primer for the detection of SNP TSC0049872
gtttgttttagt

SEQ ID NO: 355923 - DNA, 12 bp, Artificial Sequence
  Oligonucleotide primer for the detection of SNP TSC0049874
taaggtttagtt

SEQ ID NO: 355924 - DNA, 12 bp, Artificial Sequence
  Oligonucleotide primer for the detection of SNP TSC0049875
aaatcaaaatta

SEQ ID NO: 355925 - DNA, 12 bp, Artificial Sequence
  Oligonucleotide primer for the detection of SNP TSC0049875
ttgttataatat

SEQ ID NO: 355926 - DNA, 12 bp, Artificial Sequence
  Oligonucleotide primer for the detection of SNP TSC0049875
tcgttataatat

SEQ ID NO: 355927 - DNA, 12 bp, Artificial Sequence
  Oligonucleotide primer for the detection of SNP TSC0049875
tcatcataacac

SEQ ID NO: 355928 - DNA, 12 bp, Artificial Sequence
  Oligonucleotide primer for the detection of SNP TSC0049875
tcgtcataacac

SEQ ID NO: 355929 - DNA, 12 bp, Artificial Sequence
  Oligonucleotide primer for the detection of SNP TSC0049875
aagttaaaatta

SEQ ID NO: 355930 - DNA, 12 bp, Artificial Sequence
  Oligonucleotide primer for the detection of SNP TSC0049876
ttatagtaaatt

SEQ ID NO: 355931 - DNA, 12 bp, Artificial Sequence
  Oligonucleotide primer for the detection of SNP TSC0049876
cccataacaaac

SEQ ID NO: 355932 - DNA, 12 bp, Artificial Sequence
  Oligonucleotide primer for the detection of SNP TSC0049876
tggggagttagt

SEQ ID NO: 355933 - DNA, 12 bp, Artificial Sequence
  Oligonucleotide primer for the detection of SNP TSC0049879
acttcctttata

SEQ ID NO: 355934 - DNA, 12 bp, Artificial Sequence
  Oligonucleotide primer for the detection of SNP TSC0049879
tttttgggtgat

SEQ ID NO: 355935 - DNA, 12 bp, Artificial Sequence
  Oligonucleotide primer for the detection of SNP TSC0049880
ttatgtttttga

SEQ ID NO: 355936 - DNA, 12 bp, Artificial Sequence
  Oligonucleotide primer for the detection of SNP TSC0049880
catacttttaaa

SEQ ID NO: 355937 - DNA, 12 bp, Artificial Sequence
  Oligonucleotide primer for the detection of SNP TSC0049880
tttaaaatggtg

SEQ ID NO: 355938 - DNA, 12 bp, Artificial Sequence
  Oligonucleotide primer for the detection of SNP TSC0049881
agttttggttag

SEQ ID NO: 355939 - DNA, 12 bp, Artificial Sequence
  Oligonucleotide primer for the detection of SNP TSC0049882
gagatatgaaaa

SEQ ID NO: 355940 - DNA, 12 bp, Artificial Sequence
  Oligonucleotide primer for the detection of SNP TSC0049882
aatatatttaat

SEQ ID NO: 355941 - DNA, 12 bp, Artificial Sequence
  Oligonucleotide primer for the detection of SNP TSC0049883
catacccacttt

SEQ ID NO: 355942 - DNA, 12 bp, Artificial Sequence
  Oligonucleotide primer for the detection of SNP TSC0049884
tgggggttatta

SEQ ID NO: 355943 - DNA, 12 bp, Artificial Sequence
  Oligonucleotide primer for the detection of SNP TSC0049885
atctcaatatcc

SEQ ID NO: 355944 - DNA, 12 bp, Artificial Sequence
  Oligonucleotide primer for the detection of SNP TSC0049885
ttgtagttatga

SEQ ID NO: 355945 - DNA, 12 bp, Artificial Sequence
  Oligonucleotide primer for the detection of SNP TSC0049886
taacaaactaaa

SEQ ID NO: 355946 - DNA, 12 bp, Artificial Sequence
  Oligonucleotide primer for the detection of SNP TSC0049886
taacgaactaaa

SEQ ID NO: 355947 - DNA, 12 bp, Artificial Sequence
  Oligonucleotide primer for the detection of SNP TSC0049886
ttttagtttatc

SEQ ID NO: 355948 - DNA, 12 bp, Artificial Sequence
  Oligonucleotide primer for the detection of SNP TSC0049886
ccccaacccatc

SEQ ID NO: 355949 - DNA, 12 bp, Artificial Sequence
  Oligonucleotide primer for the detection of SNP TSC0049886
tggtgagttggg

SEQ ID NO: 355950 - DNA, 12 bp, Artificial Sequence
  Oligonucleotide primer for the detection of SNP TSC0049886
tggcgagttggg

SEQ ID NO: 355951 - DNA, 12 bp, Artificial Sequence
  Oligonucleotide primer for the detection of SNP TSC0049887
actacaaactaa

SEQ ID NO: 355952 - DNA, 12 bp, Artificial Sequence
  Oligonucleotide primer for the detection of SNP TSC0049887
catcccccaact

SEQ ID NO: 355953 - DNA, 12 bp, Artificial Sequence
  Oligonucleotide primer for the detection of SNP TSC0049887
gttataggttgg

SEQ ID NO: 355954 - DNA, 12 bp, Artificial Sequence
  Oligonucleotide primer for the detection of SNP TSC0049888
ttttttagtttg

SEQ ID NO: 355955 - DNA, 12 bp, Artificial Sequence
  Oligonucleotide primer for the detection of SNP TSC0049888
ttttttagttcg

SEQ ID NO: 355956 - DNA, 12 bp, Artificial Sequence
  Oligonucleotide primer for the detection of SNP TSC0049888
tcccccaactca

SEQ ID NO: 355957 - DNA, 12 bp, Artificial Sequence
  Oligonucleotide primer for the detection of SNP TSC0049888
tcccccaactcg

SEQ ID NO: 355958 - DNA, 12 bp, Artificial Sequence
  Oligonucleotide primer for the detection of SNP TSC0004905
aaacccaaatat

SEQ ID NO: 355959 - DNA, 12 bp, Artificial Sequence
  Oligonucleotide primer for the detection of SNP TSC0004905
gttatggtttga

SEQ ID NO: 355960 - DNA, 12 bp, Artificial Sequence
  Oligonucleotide primer for the detection of SNP TSC0049889
ctataattatac

SEQ ID NO: 355961 - DNA, 12 bp, Artificial Sequence
  Oligonucleotide primer for the detection of SNP TSC0049889
ttggagtatggg

SEQ ID NO: 355962 - DNA, 12 bp, Artificial Sequence
  Oligonucleotide primer for the detection of SNP TSC0049889
ttggagtacggg

SEQ ID NO: 355963 - DNA, 12 bp, Artificial Sequence
  Oligonucleotide primer for the detection of SNP TSC0049890
ataatctcttac

SEQ ID NO: 355964 - DNA, 12 bp, Artificial Sequence
  Oligonucleotide primer for the detection of SNP TSC0049891
actccaaaacat

SEQ ID NO: 355965 - DNA, 12 bp, Artificial Sequence
  Oligonucleotide primer for the detection of SNP TSC0049891
ttataactttaa

SEQ ID NO: 355966 - DNA, 12 bp, Artificial Sequence
  Oligonucleotide primer for the detection of SNP TSC0049892
ttaaccactcaa

SEQ ID NO: 355967 - DNA, 12 bp, Artificial Sequence
  Oligonucleotide primer for the detection of SNP TSC0049892
ggagggggatgt

SEQ ID NO: 355968 - DNA, 12 bp, Artificial Sequence
  Oligonucleotide primer for the detection of SNP TSC0049892
ttggttatttag

SEQ ID NO: 355969 - DNA, 12 bp, Artificial Sequence
  Oligonucleotide primer for the detection of SNP TSC0049896
aattcttctata

SEQ ID NO: 355970 - DNA, 12 bp, Artificial Sequence
  Oligonucleotide primer for the detection of SNP TSC0049896
cccattttcaaa

SEQ ID NO: 355971 - DNA, 12 bp, Artificial Sequence
  Oligonucleotide primer for the detection of SNP TSC0049896
gatttttttata

SEQ ID NO: 355972 - DNA, 12 bp, Artificial Sequence
  Oligonucleotide primer for the detection of SNP TSC0049899
ttaaaataacaa

SEQ ID NO: 355973 - DNA, 12 bp, Artificial Sequence
  Oligonucleotide primer for the detection of SNP TSC0049899
attattccttca

SEQ ID NO: 355974 - DNA, 12 bp, Artificial Sequence
  Oligonucleotide primer for the detection of SNP TSC0049899
aattaaggtagt

SEQ ID NO: 355975 - DNA, 12 bp, Artificial Sequence
  Oligonucleotide primer for the detection of SNP TSC0049900
ctttcaaaaaaa

SEQ ID NO: 355976 - DNA, 12 bp, Artificial Sequence
  Oligonucleotide primer for the detection of SNP TSC0049900
ctttcgaaaaaa

SEQ ID NO: 355977 - DNA, 12 bp, Artificial Sequence
  Oligonucleotide primer for the detection of SNP TSC0049900
ttttggatattt

SEQ ID NO: 355978 - DNA, 12 bp, Artificial Sequence
  Oligonucleotide primer for the detection of SNP TSC0049900
ttctaaacatct

SEQ ID NO: 355979 - DNA, 12 bp, Artificial Sequence
  Oligonukleotid-Primer
tttttgaagaag

SEQ ID NO: 355980 - DNA, 12 bp, Artificial Sequence
  Oligonucleotide primer for the detection of SNP TSC0049900
ttttcgaagaag

SEQ ID NO: 355981 - DNA, 12 bp, Artificial Sequence
  Oligonucleotide primer for the detection of SNP TSC0049901
accaaaataaca

SEQ ID NO: 355982 - DNA, 12 bp, Artificial Sequence
  Oligonucleotide primer for the detection of SNP TSC0049901
taaatgatagag

SEQ ID NO: 355983 - DNA, 12 bp, Artificial Sequence
  Oligonucleotide primer for the detection of SNP TSC0049901
gttaagataata

SEQ ID NO: 355984 - DNA, 12 bp, Artificial Sequence
  Oligonucleotide primer for the detection of SNP TSC0049902
tacaacctactc

SEQ ID NO: 355985 - DNA, 12 bp, Artificial Sequence
  Oligonucleotide primer for the detection of SNP TSC0049902
tacgacctactc

SEQ ID NO: 355986 - DNA, 12 bp, Artificial Sequence
  Oligonucleotide primer for the detection of SNP TSC0049902
aggagttattta

SEQ ID NO: 355987 - DNA, 12 bp, Artificial Sequence
  Oligonucleotide primer for the detection of SNP TSC0049903
aggtgggaggtt

SEQ ID NO: 355988 - DNA, 12 bp, Artificial Sequence
  Oligonucleotide primer for the detection of SNP TSC0049903
gatttgtttgtt

SEQ ID NO: 355989 - DNA, 12 bp, Artificial Sequence
  Oligonucleotide primer for the detection of SNP TSC0049903
gattcgtttgtt

SEQ ID NO: 355990 - DNA, 12 bp, Artificial Sequence
  Oligonucleotide primer for the detection of SNP TSC0049903
gatttgttcgtt

SEQ ID NO: 355991 - DNA, 12 bp, Artificial Sequence
  Oligonucleotide primer for the detection of SNP TSC0049903
gattcgttcgtt

SEQ ID NO: 355992 - DNA, 12 bp, Artificial Sequence
  Oligonucleotide primer for the detection of SNP TSC0049903
gatttgtttgtc

SEQ ID NO: 355993 - DNA, 12 bp, Artificial Sequence
  Oligonucleotide primer for the detection of SNP TSC0049903
gattcgtttgtc

SEQ ID NO: 355994 - DNA, 12 bp, Artificial Sequence
  Oligonucleotide primer for the detection of SNP TSC0049903
gatttgttcgtc

SEQ ID NO: 355995 - DNA, 12 bp, Artificial Sequence
  Oligonucleotide primer for the detection of SNP TSC0049903
gattcgttcgtc

SEQ ID NO: 355996 - DNA, 12 bp, Artificial Sequence
  Oligonucleotide primer for the detection of SNP TSC0049905
cctttttatttc

SEQ ID NO: 355997 - DNA, 12 bp, Artificial Sequence
  Oligonucleotide primer for the detection of SNP TSC0049906
caaatttcccat

SEQ ID NO: 355998 - DNA, 12 bp, Artificial Sequence
  Oligonucleotide primer for the detection of SNP TSC0049906
gattgaaaatta

SEQ ID NO: 355999 - DNA, 12 bp, Artificial Sequence
  Oligonucleotide primer for the detection of SNP TSC0049908
acaacaaatcca

SEQ ID NO: 356000 - DNA, 12 bp, Artificial Sequence
  Oligonucleotide primer for the detection of SNP TSC0049908
acgacaaatcca

SEQ ID NO: 356001 - DNA, 12 bp, Artificial Sequence
  Oligonucleotide primer for the detection of SNP TSC0049908
tgttgtagattt

SEQ ID NO: 356002 - DNA, 12 bp, Artificial Sequence
  Oligonucleotide primer for the detection of SNP TSC0049908
actacaaaccca

SEQ ID NO: 356003 - DNA, 12 bp, Artificial Sequence
  Oligonucleotide primer for the detection of SNP TSC0049908
tggtaaatttat

SEQ ID NO: 356004 - DNA, 12 bp, Artificial Sequence
  Oligonucleotide primer for the detection of SNP TSC0049908
cggtaaatttat

SEQ ID NO: 356005 - DNA, 12 bp, Artificial Sequence
  Oligonucleotide primer for the detection of SNP TSC0049909
ttttatctatac

SEQ ID NO: 356006 - DNA, 12 bp, Artificial Sequence
  Oligonucleotide primer for the detection of SNP TSC0049909
aaattcttccca

SEQ ID NO: 356007 - DNA, 12 bp, Artificial Sequence
  Oligonucleotide primer for the detection of SNP TSC0049909
aaattcttcccg

SEQ ID NO: 356008 - DNA, 12 bp, Artificial Sequence
  Oligonucleotide primer for the detection of SNP TSC0049909
ttttgtttgtgt

SEQ ID NO: 356009 - DNA, 12 bp, Artificial Sequence
  Oligonucleotide primer for the detection of SNP TSC0049910
ctcccacaaaac

SEQ ID NO: 356010 - DNA, 12 bp, Artificial Sequence
  Oligonucleotide primer for the detection of SNP TSC0049910
gtaagtattggg

SEQ ID NO: 356011 - DNA, 12 bp, Artificial Sequence
  Oligonucleotide primer for the detection of SNP TSC0049911
tgaatgagttta

SEQ ID NO: 356012 - DNA, 12 bp, Artificial Sequence
  Oligonucleotide primer for the detection of SNP TSC0049912
actaaatctatt

SEQ ID NO: 356013 - DNA, 12 bp, Artificial Sequence
  Oligonucleotide primer for the detection of SNP TSC0049912
cttctaaacctt

SEQ ID NO: 356014 - DNA, 12 bp, Artificial Sequence
  Oligonucleotide primer for the detection of SNP TSC0049912
attgagtttatt

SEQ ID NO: 356015 - DNA, 12 bp, Artificial Sequence
  Oligonucleotide primer for the detection of SNP TSC0049914
ttaacattatta

SEQ ID NO: 356016 - DNA, 12 bp, Artificial Sequence
  Oligonucleotide primer for the detection of SNP TSC0049914
ggtaaaagtgta

SEQ ID NO: 356017 - DNA, 12 bp, Artificial Sequence
  Oligonucleotide primer for the detection of SNP TSC0049914
aacaaaaataca

SEQ ID NO: 356018 - DNA, 12 bp, Artificial Sequence
  Oligonucleotide primer for the detection of SNP TSC0049914
ttggtattatta

SEQ ID NO: 356019 - DNA, 12 bp, Artificial Sequence
  Oligonucleotide primer for the detection of SNP TSC0005360
ttttcaaaaatc

SEQ ID NO: 356020 - DNA, 12 bp, Artificial Sequence
  Oligonucleotide primer for the detection of SNP TSC0005360
agggaaatgtaa

SEQ ID NO: 356021 - DNA, 12 bp, Artificial Sequence
  Oligonucleotide primer for the detection of SNP TSC0049922
gtataagaatat

SEQ ID NO: 356022 - DNA, 12 bp, Artificial Sequence
  Oligonucleotide primer for the detection of SNP TSC0049922
gtataagaatac

SEQ ID NO: 356023 - DNA, 12 bp, Artificial Sequence
  Oligonucleotide primer for the detection of SNP TSC0049922
acataaaaacac

SEQ ID NO: 356024 - DNA, 12 bp, Artificial Sequence
  Oligonucleotide primer for the detection of SNP TSC0049922
aatttggaggtt

SEQ ID NO: 356025 - DNA, 12 bp, Artificial Sequence
  Oligonucleotide primer for the detection of SNP TSC0049924
attaaaaaactt

SEQ ID NO: 356026 - DNA, 12 bp, Artificial Sequence
  Oligonucleotide primer for the detection of SNP TSC0049927
ctctctaaactc

SEQ ID NO: 356027 - DNA, 12 bp, Artificial Sequence
  Oligonucleotide primer for the detection of SNP TSC0049927
gggttatgtagg

SEQ ID NO: 356028 - DNA, 12 bp, Artificial Sequence
  Oligonucleotide primer for the detection of SNP TSC0049928
tcaattaacatt

SEQ ID NO: 356029 - DNA, 12 bp, Artificial Sequence
  Oligonucleotide primer for the detection of SNP TSC0049928
tcgattaacatt

SEQ ID NO: 356030 - DNA, 12 bp, Artificial Sequence
  Oligonucleotide primer for the detection of SNP TSC0049928
ttaatgattgag

SEQ ID NO: 356031 - DNA, 12 bp, Artificial Sequence
  Oligonucleotide primer for the detection of SNP TSC0049932
aattatttactt

SEQ ID NO: 356032 - DNA, 12 bp, Artificial Sequence
  Oligonucleotide primer for the detection of SNP TSC0049932
tggttgtttata

SEQ ID NO: 356033 - DNA, 12 bp, Artificial Sequence
  Oligonucleotide primer for the detection of SNP TSC0049933
acaaattaattt

SEQ ID NO: 356034 - DNA, 12 bp, Artificial Sequence
  Oligonucleotide primer for the detection of SNP TSC0049933
tatttttataga

SEQ ID NO: 356035 - DNA, 12 bp, Artificial Sequence
  Oligonucleotide primer for the detection of SNP TSC0049935
tattacctattt

SEQ ID NO: 356036 - DNA, 12 bp, Artificial Sequence
  Oligonucleotide primer for the detection of SNP TSC0049939
atcccaatactt

SEQ ID NO: 356037 - DNA, 12 bp, Artificial Sequence
  Oligonucleotide primer for the detection of SNP TSC0049939
tttatggattag

SEQ ID NO: 356038 - DNA, 12 bp, Artificial Sequence
  Oligonucleotide primer for the detection of SNP TSC0049940
tatagattatgt

SEQ ID NO: 356039 - DNA, 12 bp, Artificial Sequence
  Oligonucleotide primer for the detection of SNP TSC0049940
tatagattatgc

SEQ ID NO: 356040 - DNA, 12 bp, Artificial Sequence
  Oligonucleotide primer for the detection of SNP TSC0049940
cataaactatac

SEQ ID NO: 356041 - DNA, 12 bp, Artificial Sequence
  Oligonucleotide primer for the detection of SNP TSC0049940
aaaaggaaaagg

SEQ ID NO: 356042 - DNA, 12 bp, Artificial Sequence
  Oligonucleotide primer for the detection of SNP TSC0049941
ttactataaatt

SEQ ID NO: 356043 - DNA, 12 bp, Artificial Sequence
  Oligonucleotide primer for the detection of SNP TSC0049941
tgattttgaaag

SEQ ID NO: 356044 - DNA, 12 bp, Artificial Sequence
  Oligonucleotide primer for the detection of SNP TSC0006217
aaaattatttcc

SEQ ID NO: 356045 - DNA, 12 bp, Artificial Sequence
  Oligonucleotide primer for the detection of SNP TSC0006217
tttggaggttaa

SEQ ID NO: 356046 - DNA, 12 bp, Artificial Sequence
  Oligonucleotide primer for the detection of SNP TSC0049944
cttccaaaaaaa

SEQ ID NO: 356047 - DNA, 12 bp, Artificial Sequence
  Oligonucleotide primer for the detection of SNP TSC0049944
gaaatagtaatt

SEQ ID NO: 356048 - DNA, 12 bp, Artificial Sequence
  Oligonucleotide primer for the detection of SNP TSC0006549
ggtgtgtgtgag

SEQ ID NO: 356049 - DNA, 12 bp, Artificial Sequence
  Oligonucleotide primer for the detection of SNP TSC0049947
ttaagttaaatt

SEQ ID NO: 356050 - DNA, 12 bp, Artificial Sequence
  Oligonucleotide primer for the detection of SNP TSC0049947
aattaaactaaa

SEQ ID NO: 356051 - DNA, 12 bp, Artificial Sequence
  Oligonucleotide primer for the detection of SNP TSC0049947
attagggaggag

SEQ ID NO: 356052 - DNA, 12 bp, Artificial Sequence
  Oligonucleotide primer for the detection of SNP TSC0049948
ttcctaaaactc

SEQ ID NO: 356053 - DNA, 12 bp, Artificial Sequence
  Oligonucleotide primer for the detection of SNP TSC0049948
ggggtaaggagt

SEQ ID NO: 356054 - DNA, 12 bp, Artificial Sequence
  Oligonucleotide primer for the detection of SNP TSC0049948
ggggtaaggagc

SEQ ID NO: 356055 - DNA, 12 bp, Artificial Sequence
  Oligonucleotide primer for the detection of SNP TSC0049948
tttttgaggttc

SEQ ID NO: 356056 - DNA, 12 bp, Artificial Sequence
  Oligonucleotide primer for the detection of SNP TSC0005906
aaataacaattc

SEQ ID NO: 356057 - DNA, 12 bp, Artificial Sequence
  Oligonucleotide primer for the detection of SNP TSC0005906
agggagaaatgg

SEQ ID NO: 356058 - DNA, 12 bp, Artificial Sequence
  Oligonucleotide primer for the detection of SNP TSC0049949
aaactctctctc

SEQ ID NO: 356059 - DNA, 12 bp, Artificial Sequence
  Oligonucleotide primer for the detection of SNP TSC0049950
tcatcatttcac

SEQ ID NO: 356060 - DNA, 12 bp, Artificial Sequence
  Oligonucleotide primer for the detection of SNP TSC0049950
ttatagaggtag

SEQ ID NO: 356061 - DNA, 12 bp, Artificial Sequence
  Oligonucleotide primer for the detection of SNP TSC0049951
atctatctctct

SEQ ID NO: 356062 - DNA, 12 bp, Artificial Sequence
  Oligonucleotide primer for the detection of SNP TSC0049951
gatagagagaga

SEQ ID NO: 356063 - DNA, 12 bp, Artificial Sequence
  Oligonucleotide primer for the detection of SNP TSC0049952
aaatccaaccaa

SEQ ID NO: 356064 - DNA, 12 bp, Artificial Sequence
  Oligonucleotide primer for the detection of SNP TSC0049952
aaagtttgtttt

SEQ ID NO: 356065 - DNA, 12 bp, Artificial Sequence
  Oligonucleotide primer for the detection of SNP TSC0049952
aaagtttgtttc

SEQ ID NO: 356066 - DNA, 12 bp, Artificial Sequence
  Oligonucleotide primer for the detection of SNP TSC0049952
ctaaaaatctat

SEQ ID NO: 356067 - DNA, 12 bp, Artificial Sequence
  Oligonucleotide primer for the detection of SNP TSC0049952
aaagtttaatta

SEQ ID NO: 356068 - DNA, 12 bp, Artificial Sequence
  Oligonucleotide primer for the detection of SNP TSC0049953
aatttatctcac

SEQ ID NO: 356069 - DNA, 12 bp, Artificial Sequence
  Oligonucleotide primer for the detection of SNP TSC0049953
tagattgtgttg

SEQ ID NO: 356070 - DNA, 12 bp, Artificial Sequence
  Oligonucleotide primer for the detection of SNP TSC0049953
taaattatacta

SEQ ID NO: 356071 - DNA, 12 bp, Artificial Sequence
  Oligonucleotide primer for the detection of SNP TSC0049953
gatttgttttat

SEQ ID NO: 356072 - DNA, 12 bp, Artificial Sequence
  Oligonucleotide primer for the detection of SNP TSC0049953
gatttgttttac

SEQ ID NO: 356073 - DNA, 12 bp, Artificial Sequence
  Oligonucleotide primer for the detection of SNP TSC0049954
aaattacaaaac

SEQ ID NO: 356074 - DNA, 12 bp, Artificial Sequence
  Oligonucleotide primer for the detection of SNP TSC0049954
tttagattttga

SEQ ID NO: 356075 - DNA, 12 bp, Artificial Sequence
  Oligonucleotide primer for the detection of SNP TSC0049955
taatactctaaa

SEQ ID NO: 356076 - DNA, 12 bp, Artificial Sequence
  Oligonucleotide primer for the detection of SNP TSC0049955
tttattatgggt

SEQ ID NO: 356077 - DNA, 12 bp, Artificial Sequence
  Oligonucleotide primer for the detection of SNP TSC0049955
tttattacgggt

SEQ ID NO: 356078 - DNA, 12 bp, Artificial Sequence
  Oligonucleotide primer for the detection of SNP TSC0049955
ttcatcacaaat

SEQ ID NO: 356079 - DNA, 12 bp, Artificial Sequence
  Oligonucleotide primer for the detection of SNP TSC0049955
ttcatcacgaat

SEQ ID NO: 356080 - DNA, 12 bp, Artificial Sequence
  Oligonucleotide primer for the detection of SNP TSC0049955
taatgttttgag

SEQ ID NO: 356081 - DNA, 12 bp, Artificial Sequence
  Oligonucleotide primer for the detection of SNP TSC0049956
acacaatcttac

SEQ ID NO: 356082 - DNA, 12 bp, Artificial Sequence
  Oligonucleotide primer for the detection of SNP TSC0049956
acacgatcttac

SEQ ID NO: 356083 - DNA, 12 bp, Artificial Sequence
  Oligonucleotide primer for the detection of SNP TSC0049957
aaaaattctcat

SEQ ID NO: 356084 - DNA, 12 bp, Artificial Sequence
  Oligonucleotide primer for the detection of SNP TSC0049957
tagaatttggta

SEQ ID NO: 356085 - DNA, 12 bp, Artificial Sequence
  Oligonucleotide primer for the detection of SNP TSC0049958
ctttaactaaac

SEQ ID NO: 356086 - DNA, 12 bp, Artificial Sequence
  Oligonucleotide primer for the detection of SNP TSC0049958
ggagaatttttg

SEQ ID NO: 356087 - DNA, 12 bp, Artificial Sequence
  Oligonucleotide primer for the detection of SNP TSC0049958
aaaaaactttta

SEQ ID NO: 356088 - DNA, 12 bp, Artificial Sequence
  Oligonucleotide primer for the detection of SNP TSC0049958
ttttagttagat

SEQ ID NO: 356089 - DNA, 12 bp, Artificial Sequence
  Oligonucleotide primer for the detection of SNP TSC0049959
tggtaggaagta

SEQ ID NO: 356090 - DNA, 12 bp, Artificial Sequence
  Oligonucleotide primer for the detection of SNP TSC0049959
cggtaggaagta

SEQ ID NO: 356091 - DNA, 12 bp, Artificial Sequence
  Oligonucleotide primer for the detection of SNP TSC0049959
caataaaaaaca

SEQ ID NO: 356092 - DNA, 12 bp, Artificial Sequence
  Oligonucleotide primer for the detection of SNP TSC0049959
cgataaaaaaca

SEQ ID NO: 356093 - DNA, 12 bp, Artificial Sequence
  Oligonucleotide primer for the detection of SNP TSC0049959
gtatgtggaggg

SEQ ID NO: 356094 - DNA, 12 bp, Artificial Sequence
  Oligonucleotide primer for the detection of SNP TSC0049960
tatttactccca

SEQ ID NO: 356095 - DNA, 12 bp, Artificial Sequence
  Oligonucleotide primer for the detection of SNP TSC0049960
taatttatgtat

SEQ ID NO: 356096 - DNA, 12 bp, Artificial Sequence
  Oligonucleotide primer for the detection of SNP TSC0049961
atcctaacttta

SEQ ID NO: 356097 - DNA, 12 bp, Artificial Sequence
  Oligonucleotide primer for the detection of SNP TSC0049961
aattattagatt

SEQ ID NO: 356098 - DNA, 12 bp, Artificial Sequence
  Oligonucleotide primer for the detection of SNP TSC0049961
aattattaaact

SEQ ID NO: 356099 - DNA, 12 bp, Artificial Sequence
  Oligonucleotide primer for the detection of SNP TSC0049962
acaattaaccaa

SEQ ID NO: 356100 - DNA, 12 bp, Artificial Sequence
  Oligonucleotide primer for the detection of SNP TSC0049962
ttattatgtgtt

SEQ ID NO: 356101 - DNA, 12 bp, Artificial Sequence
  Oligonucleotide primer for the detection of SNP TSC0049962
ctcatcatatac

SEQ ID NO: 356102 - DNA, 12 bp, Artificial Sequence
  Oligonucleotide primer for the detection of SNP TSC0007087
actattttaccc

SEQ ID NO: 356103 - DNA, 12 bp, Artificial Sequence
  Oligonucleotide primer for the detection of SNP TSC0007087
taaagtatgtga

SEQ ID NO: 356104 - DNA, 12 bp, Artificial Sequence
  Oligonucleotide primer for the detection of SNP TSC0049964
gaggtgaagaaa

SEQ ID NO: 356105 - DNA, 12 bp, Artificial Sequence
  Oligonucleotide primer for the detection of SNP TSC0049966
aaatttttgaag

SEQ ID NO: 356106 - DNA, 12 bp, Artificial Sequence
  Oligonucleotide primer for the detection of SNP TSC0049967
aattaacttaaa

SEQ ID NO: 356107 - DNA, 12 bp, Artificial Sequence
  Oligonucleotide primer for the detection of SNP TSC0049967
attgattgtttt

SEQ ID NO: 356108 - DNA, 12 bp, Artificial Sequence
  Oligonucleotide primer for the detection of SNP TSC0049967
attaactacttc

SEQ ID NO: 356109 - DNA, 12 bp, Artificial Sequence
  Oligonucleotide primer for the detection of SNP TSC0049967
gtgagttggttt

SEQ ID NO: 356110 - DNA, 12 bp, Artificial Sequence
  Oligonucleotide primer for the detection of SNP TSC0049968
atttatattact

SEQ ID NO: 356111 - DNA, 12 bp, Artificial Sequence
  Oligonucleotide primer for the detection of SNP TSC0049968
atataggtagat

SEQ ID NO: 356112 - DNA, 12 bp, Artificial Sequence
  Oligonucleotide primer for the detection of SNP TSC0049968
catacaaacaaa

SEQ ID NO: 356113 - DNA, 12 bp, Artificial Sequence
  Oligonucleotide primer for the detection of SNP TSC0049969
tcaaccaacaat

SEQ ID NO: 356114 - DNA, 12 bp, Artificial Sequence
  Oligonucleotide primer for the detection of SNP TSC0049969
tactcatctaaa

SEQ ID NO: 356115 - DNA, 12 bp, Artificial Sequence
  Oligonucleotide primer for the detection of SNP TSC0049969
ttaattagtagt

SEQ ID NO: 356116 - DNA, 12 bp, Artificial Sequence
  Oligonucleotide primer for the detection of SNP TSC0049970
ctattaacacat

SEQ ID NO: 356117 - DNA, 12 bp, Artificial Sequence
  Oligonucleotide primer for the detection of SNP TSC0049970
aggaggagtttg

SEQ ID NO: 356118 - DNA, 12 bp, Artificial Sequence
  Oligonucleotide primer for the detection of SNP TSC0049970
ttgttaatatat

SEQ ID NO: 356119 - DNA, 12 bp, Artificial Sequence
  Oligonucleotide primer for the detection of SNP TSC0049971
taggagttagga

SEQ ID NO: 356120 - DNA, 12 bp, Artificial Sequence
  Oligonucleotide primer for the detection of SNP TSC0049972
ccacctccccct

SEQ ID NO: 356121 - DNA, 12 bp, Artificial Sequence
  Oligonucleotide primer for the detection of SNP TSC0049972
taattgggtata

SEQ ID NO: 356122 - DNA, 12 bp, Artificial Sequence
  Oligonucleotide primer for the detection of SNP TSC0006444
aaaaaaaatctc

SEQ ID NO: 356123 - DNA, 12 bp, Artificial Sequence
  Oligonucleotide primer for the detection of SNP TSC0006444
tttagttttaat

SEQ ID NO: 356124 - DNA, 12 bp, Artificial Sequence
  Oligonukleotid-Primer
ttcaattttaat

SEQ ID NO: 356125 - DNA, 12 bp, Artificial Sequence
  Oligonucleotide primer for the detection of SNP TSC0006444
ggaagaaatttt

SEQ ID NO: 356126 - DNA, 12 bp, Artificial Sequence
  Oligonucleotide primer for the detection of SNP TSC0049973
agaaggatgaat

SEQ ID NO: 356127 - DNA, 12 bp, Artificial Sequence
  Oligonucleotide primer for the detection of SNP TSC0049973
atagaatagaat

SEQ ID NO: 356128 - DNA, 12 bp, Artificial Sequence
  Oligonucleotide primer for the detection of SNP TSC0049973
atagaatagaac

SEQ ID NO: 356129 - DNA, 12 bp, Artificial Sequence
  Oligonucleotide primer for the detection of SNP TSC0049974
atatcttcaaac

SEQ ID NO: 356130 - DNA, 12 bp, Artificial Sequence
  Oligonucleotide primer for the detection of SNP TSC0049974
aaatatttgata

SEQ ID NO: 356131 - DNA, 12 bp, Artificial Sequence
  Oligonucleotide primer for the detection of SNP TSC0049975
aaataatccata

SEQ ID NO: 356132 - DNA, 12 bp, Artificial Sequence
  Oligonucleotide primer for the detection of SNP TSC0049975
aaataatccgta

SEQ ID NO: 356133 - DNA, 12 bp, Artificial Sequence
  Oligonucleotide primer for the detection of SNP TSC0049975
aataaatgtttt

SEQ ID NO: 356134 - DNA, 12 bp, Artificial Sequence
  Oligonucleotide primer for the detection of SNP TSC0049975
aataaatacttt

SEQ ID NO: 356135 - DNA, 12 bp, Artificial Sequence
  Oligonucleotide primer for the detection of SNP TSC0049975
gggtgatttgta

SEQ ID NO: 356136 - DNA, 12 bp, Artificial Sequence
  Oligonucleotide primer for the detection of SNP TSC0049975
gggtgattcgta

SEQ ID NO: 356137 - DNA, 12 bp, Artificial Sequence
  Oligonucleotide primer for the detection of SNP TSC0049976
ccaactaaccct

SEQ ID NO: 356138 - DNA, 12 bp, Artificial Sequence
  Oligonucleotide primer for the detection of SNP TSC0049976
aattgttaagag

SEQ ID NO: 356139 - DNA, 12 bp, Artificial Sequence
  Oligonucleotide primer for the detection of SNP TSC0049976
aatcgttaagag

SEQ ID NO: 356140 - DNA, 12 bp, Artificial Sequence
  Oligonucleotide primer for the detection of SNP TSC0049978
tcaacttatttc

SEQ ID NO: 356141 - DNA, 12 bp, Artificial Sequence
  Oligonucleotide primer for the detection of SNP TSC0049978
ttcaacacccca

SEQ ID NO: 356142 - DNA, 12 bp, Artificial Sequence
  Oligonucleotide primer for the detection of SNP TSC0049979
ataattaatttc

SEQ ID NO: 356143 - DNA, 12 bp, Artificial Sequence
  Oligonucleotide primer for the detection of SNP TSC0049979
tttttgaaatag

SEQ ID NO: 356144 - DNA, 12 bp, Artificial Sequence
  Oligonucleotide primer for the detection of SNP TSC0049980
taatatcaaact

SEQ ID NO: 356145 - DNA, 12 bp, Artificial Sequence
  Oligonucleotide primer for the detection of SNP TSC0049980
aaaatttcatcc

SEQ ID NO: 356146 - DNA, 12 bp, Artificial Sequence
  Oligonucleotide primer for the detection of SNP TSC0049980
tagtgttaaatt

SEQ ID NO: 356147 - DNA, 12 bp, Artificial Sequence
  Oligonucleotide primer for the detection of SNP TSC0049981
cccaccatacct

SEQ ID NO: 356148 - DNA, 12 bp, Artificial Sequence
  Oligonucleotide primer for the detection of SNP TSC0049981
aatattgagata

SEQ ID NO: 356149 - DNA, 12 bp, Artificial Sequence
  Oligonucleotide primer for the detection of SNP TSC0049982
actaacaccaca

SEQ ID NO: 356150 - DNA, 12 bp, Artificial Sequence
  Oligonucleotide primer for the detection of SNP TSC0049982
actaacgccaca

SEQ ID NO: 356151 - DNA, 12 bp, Artificial Sequence
  Oligonucleotide primer for the detection of SNP TSC0049982
gtgggtagggtt

SEQ ID NO: 356152 - DNA, 12 bp, Artificial Sequence
  Oligonucleotide primer for the detection of SNP TSC0049982
ataaacaaaacc

SEQ ID NO: 356153 - DNA, 12 bp, Artificial Sequence
  Oligonucleotide primer for the detection of SNP TSC0049982
gttggtgttata

SEQ ID NO: 356154 - DNA, 12 bp, Artificial Sequence
  Oligonucleotide primer for the detection of SNP TSC0049982
gttggcgttata

SEQ ID NO: 356155 - DNA, 12 bp, Artificial Sequence
  Oligonucleotide primer for the detection of SNP TSC0049984
aactaccttact

SEQ ID NO: 356156 - DNA, 12 bp, Artificial Sequence
  Oligonucleotide primer for the detection of SNP TSC0049984
attttctccaca

SEQ ID NO: 356157 - DNA, 12 bp, Artificial Sequence
  Oligonucleotide primer for the detection of SNP TSC0049987
attaattcctat

SEQ ID NO: 356158 - DNA, 12 bp, Artificial Sequence
  Oligonucleotide primer for the detection of SNP TSC0049987
ttaaatgtttaa

SEQ ID NO: 356159 - DNA, 12 bp, Artificial Sequence
  Oligonucleotide primer for the detection of SNP TSC0049988
ccaaatttaatt

SEQ ID NO: 356160 - DNA, 12 bp, Artificial Sequence
  Oligonucleotide primer for the detection of SNP TSC0049988
atttgtgtttga

SEQ ID NO: 356161 - DNA, 12 bp, Artificial Sequence
  Oligonucleotide primer for the detection of SNP TSC0049989
tataggttgtta

SEQ ID NO: 356162 - DNA, 12 bp, Artificial Sequence
  Oligonucleotide primer for the detection of SNP TSC0049989
tataggtcgtta

SEQ ID NO: 356163 - DNA, 12 bp, Artificial Sequence
  Oligonucleotide primer for the detection of SNP TSC0008641
aaatggaaaaag

SEQ ID NO: 356164 - DNA, 12 bp, Artificial Sequence
  Oligonucleotide primer for the detection of SNP TSC0008641
agtaagaggaga

SEQ ID NO: 356165 - DNA, 12 bp, Artificial Sequence
  Oligonucleotide primer for the detection of SNP TSC0008643
catcatctacct

SEQ ID NO: 356166 - DNA, 12 bp, Artificial Sequence
  Oligonucleotide primer for the detection of SNP TSC0049990
taaaaataaatt

SEQ ID NO: 356167 - DNA, 12 bp, Artificial Sequence
  Oligonucleotide primer for the detection of SNP TSC0049990
atagggaaaata

SEQ ID NO: 356168 - DNA, 12 bp, Artificial Sequence
  Oligonucleotide primer for the detection of SNP TSC0049993
aaaatcactatt

SEQ ID NO: 356169 - DNA, 12 bp, Artificial Sequence
  Oligonucleotide primer for the detection of SNP TSC0049993
aaaatcgctatt

SEQ ID NO: 356170 - DNA, 12 bp, Artificial Sequence
  Oligonucleotide primer for the detection of SNP TSC0049994
aaacaccgtttc

SEQ ID NO: 356171 - DNA, 12 bp, Artificial Sequence
  Oligonucleotide primer for the detection of SNP TSC0049994
atgtgttgttag

SEQ ID NO: 356172 - DNA, 12 bp, Artificial Sequence
  Oligonucleotide primer for the detection of SNP TSC0049994
atgcgttgttag

SEQ ID NO: 356173 - DNA, 12 bp, Artificial Sequence
  Oligonucleotide primer for the detection of SNP TSC0049995
ctactaattcaa

SEQ ID NO: 356174 - DNA, 12 bp, Artificial Sequence
  Oligonucleotide primer for the detection of SNP TSC0049995
tttagatagaag

SEQ ID NO: 356175 - DNA, 12 bp, Artificial Sequence
  Oligonucleotide primer for the detection of SNP TSC0049995
ttgttgatttag

SEQ ID NO: 356176 - DNA, 12 bp, Artificial Sequence
  Oligonucleotide primer for the detection of SNP TSC0049996
accaaactattc

SEQ ID NO: 356177 - DNA, 12 bp, Artificial Sequence
  Oligonucleotide primer for the detection of SNP TSC0049996
gccaaactattc

SEQ ID NO: 356178 - DNA, 12 bp, Artificial Sequence
  Oligonucleotide primer for the detection of SNP TSC0049996
gaagttaatttg

SEQ ID NO: 356179 - DNA, 12 bp, Artificial Sequence
  Oligonucleotide primer for the detection of SNP TSC0049996
gttaagttgttt

SEQ ID NO: 356180 - DNA, 12 bp, Artificial Sequence
  Oligonucleotide primer for the detection of SNP TSC0049999
ttaattgattta

SEQ ID NO: 356181 - DNA, 12 bp, Artificial Sequence
  Oligonucleotide primer for the detection of SNP TSC0049999
ttaattaattca

SEQ ID NO: 356182 - DNA, 12 bp, Artificial Sequence
  Oligonucleotide primer for the detection of SNP TSC0049999
aatttgtggaat

SEQ ID NO: 356183 - DNA, 12 bp, Artificial Sequence
  Oligonucleotide primer for the detection of SNP TSC0005003
aattataataat

SEQ ID NO: 356184 - DNA, 12 bp, Artificial Sequence
  Oligonucleotide primer for the detection of SNP TSC0005003
atttaagaaata

SEQ ID NO: 356185 - DNA, 12 bp, Artificial Sequence
  Oligonucleotide primer for the detection of SNP TSC0005004
tctctcaaaaat

SEQ ID NO: 356186 - DNA, 12 bp, Artificial Sequence
  Oligonucleotide primer for the detection of SNP TSC0005004
aggaggttagta

SEQ ID NO: 356187 - DNA, 12 bp, Artificial Sequence
  Oligonucleotide primer for the detection of SNP TSC0005005
atttacaaatct

SEQ ID NO: 356188 - DNA, 12 bp, Artificial Sequence
  Oligonucleotide primer for the detection of SNP TSC0005444
tttatttagatt

SEQ ID NO: 356189 - DNA, 12 bp, Artificial Sequence
  Oligonucleotide primer for the detection of SNP TSC0005444
tttatttagatc

SEQ ID NO: 356190 - DNA, 12 bp, Artificial Sequence
  Oligonucleotide primer for the detection of SNP TSC0050005
acaatttctact

SEQ ID NO: 356191 - DNA, 12 bp, Artificial Sequence
  Oligonucleotide primer for the detection of SNP TSC0050005
aacaactaaaaa

SEQ ID NO: 356192 - DNA, 12 bp, Artificial Sequence
  Oligonucleotide primer for the detection of SNP TSC0050005
taatttttgttc

SEQ ID NO: 356193 - DNA, 12 bp, Artificial Sequence
  Oligonucleotide primer for the detection of SNP TSC0050009
caatatacttca

SEQ ID NO: 356194 - DNA, 12 bp, Artificial Sequence
  Oligonucleotide primer for the detection of SNP TSC0050009
gtttttaagaat

SEQ ID NO: 356195 - DNA, 12 bp, Artificial Sequence
  Oligonucleotide primer for the detection of SNP TSC0050009
aacttctaaaaa

SEQ ID NO: 356196 - DNA, 12 bp, Artificial Sequence
  Oligonucleotide primer for the detection of SNP TSC0050009
ataatgtgtttt

SEQ ID NO: 356197 - DNA, 12 bp, Artificial Sequence
  Oligonucleotide primer for the detection of SNP TSC0050011
aacgataaaaaa

SEQ ID NO: 356198 - DNA, 12 bp, Artificial Sequence
  Oligonucleotide primer for the detection of SNP TSC0050011
taccacatttca

SEQ ID NO: 356199 - DNA, 12 bp, Artificial Sequence
  Oligonucleotide primer for the detection of SNP TSC0050011
gtgataggaggt

SEQ ID NO: 356200 - DNA, 12 bp, Artificial Sequence
  Oligonucleotide primer for the detection of SNP TSC0050011
gcgataggaggt

SEQ ID NO: 356201 - DNA, 12 bp, Artificial Sequence
  Oligonucleotide primer for the detection of SNP TSC0050011
gtgataggaggc

SEQ ID NO: 356202 - DNA, 12 bp, Artificial Sequence
  Oligonucleotide primer for the detection of SNP TSC0050011
gcgataggaggc

SEQ ID NO: 356203 - DNA, 12 bp, Artificial Sequence
  Oligonucleotide primer for the detection of SNP TSC0050013
gagaatatttat

SEQ ID NO: 356204 - DNA, 12 bp, Artificial Sequence
  Oligonucleotide primer for the detection of SNP TSC0050014
ctcaactacttt

SEQ ID NO: 356205 - DNA, 12 bp, Artificial Sequence
  Oligonucleotide primer for the detection of SNP TSC0050015
atagaaatatag

SEQ ID NO: 356206 - DNA, 12 bp, Artificial Sequence
  Oligonucleotide primer for the detection of SNP TSC0050016
tatccatacaac

SEQ ID NO: 356207 - DNA, 12 bp, Artificial Sequence
  Oligonucleotide primer for the detection of SNP TSC0050017
tattaactatta

SEQ ID NO: 356208 - DNA, 12 bp, Artificial Sequence
  Oligonucleotide primer for the detection of SNP TSC0010803
taaaaacacatt

SEQ ID NO: 356209 - DNA, 12 bp, Artificial Sequence
  Oligonucleotide primer for the detection of SNP TSC0010803
taaaaacgcatt

SEQ ID NO: 356210 - DNA, 12 bp, Artificial Sequence
  Oligonucleotide primer for the detection of SNP TSC0010803
taaaaatgtatt

SEQ ID NO: 356211 - DNA, 12 bp, Artificial Sequence
  Oligonucleotide primer for the detection of SNP TSC0010803
taaaaacgtatt

SEQ ID NO: 356212 - DNA, 12 bp, Artificial Sequence
  Oligonucleotide primer for the detection of SNP TSC0010804
aacactatttac

SEQ ID NO: 356213 - DNA, 12 bp, Artificial Sequence
  Oligonucleotide primer for the detection of SNP TSC0010804
aacgctatttac

SEQ ID NO: 356214 - DNA, 12 bp, Artificial Sequence
  Oligonucleotide primer for the detection of SNP TSC0010804
aagtggtataga

SEQ ID NO: 356215 - DNA, 12 bp, Artificial Sequence
  Oligonucleotide primer for the detection of SNP TSC0010805
aactaaaccccc

SEQ ID NO: 356216 - DNA, 12 bp, Artificial Sequence
  Oligonucleotide primer for the detection of SNP TSC0010805
tagtattttatg

SEQ ID NO: 356217 - DNA, 12 bp, Artificial Sequence
  Oligonucleotide primer for the detection of SNP TSC0050018
attcaattaatt

SEQ ID NO: 356218 - DNA, 12 bp, Artificial Sequence
  Oligonucleotide primer for the detection of SNP TSC0050018
attcgattaatt

SEQ ID NO: 356219 - DNA, 12 bp, Artificial Sequence
  Oligonucleotide primer for the detection of SNP TSC0050018
gttcaattaatt

SEQ ID NO: 356220 - DNA, 12 bp, Artificial Sequence
  Oligonucleotide primer for the detection of SNP TSC0050018
gttcgattaatt

SEQ ID NO: 356221 - DNA, 12 bp, Artificial Sequence
  Oligonucleotide primer for the detection of SNP TSC0050018
gattaggtgaga

SEQ ID NO: 356222 - DNA, 12 bp, Artificial Sequence
  Oligonucleotide primer for the detection of SNP TSC0050019
acccctatcata

SEQ ID NO: 356223 - DNA, 12 bp, Artificial Sequence
  Oligonucleotide primer for the detection of SNP TSC0050019
tttatatttgag

SEQ ID NO: 356224 - DNA, 12 bp, Artificial Sequence
  Oligonucleotide primer for the detection of SNP TSC0050019
ttcacacttaaa

SEQ ID NO: 356225 - DNA, 12 bp, Artificial Sequence
  Oligonucleotide primer for the detection of SNP TSC0050023
ctaattaaatta

SEQ ID NO: 356226 - DNA, 12 bp, Artificial Sequence
  Oligonucleotide primer for the detection of SNP TSC0050023
tatttttcccta

SEQ ID NO: 356227 - DNA, 12 bp, Artificial Sequence
  Oligonucleotide primer for the detection of SNP TSC0050023
ttaattaaatta

SEQ ID NO: 356228 - DNA, 12 bp, Artificial Sequence
  Oligonucleotide primer for the detection of SNP TSC0050024
tgtatttatgta

SEQ ID NO: 356229 - DNA, 12 bp, Artificial Sequence
  Oligonucleotide primer for the detection of SNP TSC0050024
taaataggaatt

SEQ ID NO: 356230 - DNA, 12 bp, Artificial Sequence
  Oligonucleotide primer for the detection of SNP TSC0050025
cttcttcataaa

SEQ ID NO: 356231 - DNA, 12 bp, Artificial Sequence
  Oligonucleotide primer for the detection of SNP TSC0050025
accctccatacc

SEQ ID NO: 356232 - DNA, 12 bp, Artificial Sequence
  Oligonucleotide primer for the detection of SNP TSC0050026
aagaggatttta

SEQ ID NO: 356233 - DNA, 12 bp, Artificial Sequence
  Oligonucleotide primer for the detection of SNP TSC0050026
aaaaaaactcca

SEQ ID NO: 356234 - DNA, 12 bp, Artificial Sequence
  Oligonucleotide primer for the detection of SNP TSC0050027
gatatatatgta

SEQ ID NO: 356235 - DNA, 12 bp, Artificial Sequence
  Oligonucleotide primer for the detection of SNP TSC0050027
aacacatataca

SEQ ID NO: 356236 - DNA, 12 bp, Artificial Sequence
  Oligonucleotide primer for the detection of SNP TSC0050027
tttgtagagagg

SEQ ID NO: 356237 - DNA, 12 bp, Artificial Sequence
  Oligonucleotide primer for the detection of SNP TSC0050028
ttctatatttaa

SEQ ID NO: 356238 - DNA, 12 bp, Artificial Sequence
  Oligonucleotide primer for the detection of SNP TSC0050028
acaaaactccca

SEQ ID NO: 356239 - DNA, 12 bp, Artificial Sequence
  Oligonucleotide primer for the detection of SNP TSC0050029
taatttttccct

SEQ ID NO: 356240 - DNA, 12 bp, Artificial Sequence
  Oligonucleotide primer for the detection of SNP TSC0050029
aagattttttaa

SEQ ID NO: 356241 - DNA, 12 bp, Artificial Sequence
  Oligonucleotide primer for the detection of SNP TSC0050030
attgtttaataa

SEQ ID NO: 356242 - DNA, 12 bp, Artificial Sequence
  Oligonucleotide primer for the detection of SNP TSC0050031
cattttttactc

SEQ ID NO: 356243 - DNA, 12 bp, Artificial Sequence
  Oligonucleotide primer for the detection of SNP TSC0050031
aatttgatgggt

SEQ ID NO: 356244 - DNA, 12 bp, Artificial Sequence
  Oligonucleotide primer for the detection of SNP TSC0008644
gttaagaatttt

SEQ ID NO: 356245 - DNA, 12 bp, Artificial Sequence
  Oligonucleotide primer for the detection of SNP TSC0008644
gttttgttggat

SEQ ID NO: 356246 - DNA, 12 bp, Artificial Sequence
  Oligonucleotide primer for the detection of SNP TSC0050034
actaacaaacaa

SEQ ID NO: 356247 - DNA, 12 bp, Artificial Sequence
  Oligonucleotide primer for the detection of SNP TSC0050034
gagtaattagag

SEQ ID NO: 356248 - DNA, 12 bp, Artificial Sequence
  Oligonucleotide primer for the detection of SNP TSC0050034
attaatagataa

SEQ ID NO: 356249 - DNA, 12 bp, Artificial Sequence
  Oligonucleotide primer for the detection of SNP TSC0050035
cctttaccaaat

SEQ ID NO: 356250 - DNA, 12 bp, Artificial Sequence
  Oligonucleotide primer for the detection of SNP TSC0050035
atttaggggtta

SEQ ID NO: 356251 - DNA, 12 bp, Artificial Sequence
  Oligonucleotide primer for the detection of SNP TSC0050035
tttttgttagat

SEQ ID NO: 356252 - DNA, 12 bp, Artificial Sequence
  Oligonucleotide primer for the detection of SNP TSC0050036
tcttaaaatttc

SEQ ID NO: 356253 - DNA, 12 bp, Artificial Sequence
  Oligonucleotide primer for the detection of SNP TSC0050036
ttttttatagtc

SEQ ID NO: 356254 - DNA, 12 bp, Artificial Sequence
  Oligonucleotide primer for the detection of SNP TSC0050036
atttctcacaat

SEQ ID NO: 356255 - DNA, 12 bp, Artificial Sequence
  Oligonucleotide primer for the detection of SNP TSC0050037
tcttactattct

SEQ ID NO: 356256 - DNA, 12 bp, Artificial Sequence
  Oligonucleotide primer for the detection of SNP TSC0050037
tgaatttattag

SEQ ID NO: 356257 - DNA, 12 bp, Artificial Sequence
  Oligonucleotide primer for the detection of SNP TSC0008312
ctattcttaata

SEQ ID NO: 356258 - DNA, 12 bp, Artificial Sequence
  Oligonucleotide primer for the detection of SNP TSC0008312
aagggattttag

SEQ ID NO: 356259 - DNA, 12 bp, Artificial Sequence
  Oligonucleotide primer for the detection of SNP TSC0008312
aaaaaactccaa

SEQ ID NO: 356260 - DNA, 12 bp, Artificial Sequence
  Oligonucleotide primer for the detection of SNP TSC0008312
ttgtttttgatg

SEQ ID NO: 356261 - DNA, 12 bp, Artificial Sequence
  Oligonucleotide primer for the detection of SNP TSC0006882
aatcatataaac

SEQ ID NO: 356262 - DNA, 12 bp, Artificial Sequence
  Oligonucleotide primer for the detection of SNP TSC0006882
aatcgtataaac

SEQ ID NO: 356263 - DNA, 12 bp, Artificial Sequence
  Oligonucleotide primer for the detection of SNP TSC0006882
gtttaattgggg

SEQ ID NO: 356264 - DNA, 12 bp, Artificial Sequence
  Oligonucleotide primer for the detection of SNP TSC0050038
ttaaatatgttt

SEQ ID NO: 356265 - DNA, 12 bp, Artificial Sequence
  Oligonucleotide primer for the detection of SNP TSC0050038
ttaaatatactc

SEQ ID NO: 356266 - DNA, 12 bp, Artificial Sequence
  Oligonucleotide primer for the detection of SNP TSC0009097
ttgtttatgttg

SEQ ID NO: 356267 - DNA, 12 bp, Artificial Sequence
  Oligonucleotide primer for the detection of SNP TSC0009097
ttactcatatta

SEQ ID NO: 356268 - DNA, 12 bp, Artificial Sequence
  Oligonucleotide primer for the detection of SNP TSC0009097
tgtgaagtgttt

SEQ ID NO: 356269 - DNA, 12 bp, Artificial Sequence
  Oligonucleotide primer for the detection of SNP TSC0050039
attaaatactta

SEQ ID NO: 356270 - DNA, 12 bp, Artificial Sequence
  Oligonucleotide primer for the detection of SNP TSC0050039
ttaagaagattt

SEQ ID NO: 356271 - DNA, 12 bp, Artificial Sequence
  Oligonucleotide primer for the detection of SNP TSC0050039
tcaaaaaaaccc

SEQ ID NO: 356272 - DNA, 12 bp, Artificial Sequence
  Oligonucleotide primer for the detection of SNP TSC0050039
gttaagtgtttg

SEQ ID NO: 356273 - DNA, 12 bp, Artificial Sequence
  Oligonucleotide primer for the detection of SNP TSC0008269
aaaatcataaca

SEQ ID NO: 356274 - DNA, 12 bp, Artificial Sequence
  Oligonucleotide primer for the detection of SNP TSC0008269
tgtaagaaatgt

SEQ ID NO: 356275 - DNA, 12 bp, Artificial Sequence
  Oligonucleotide primer for the detection of SNP TSC0008270
tgatattgaatt

SEQ ID NO: 356276 - DNA, 12 bp, Artificial Sequence
  Oligonucleotide primer for the detection of SNP TSC0008270
taacactaaact

SEQ ID NO: 356277 - DNA, 12 bp, Artificial Sequence
  Oligonucleotide primer for the detection of SNP TSC0008270
aagaaatgtaat

SEQ ID NO: 356278 - DNA, 12 bp, Artificial Sequence
  Oligonucleotide primer for the detection of SNP TSC0010271
aatataaaatca

SEQ ID NO: 356279 - DNA, 12 bp, Artificial Sequence
  Oligonucleotide primer for the detection of SNP TSC0010271
gttggatattta

SEQ ID NO: 356280 - DNA, 12 bp, Artificial Sequence
  Oligonucleotide primer for the detection of SNP TSC0010271
taaacacttaaa

SEQ ID NO: 356281 - DNA, 12 bp, Artificial Sequence
  Oligonucleotide primer for the detection of SNP TSC0010271
gatatggaatta

SEQ ID NO: 356282 - DNA, 12 bp, Artificial Sequence
  Oligonucleotide primer for the detection of SNP TSC0050041
tctcactcctcc

SEQ ID NO: 356283 - DNA, 12 bp, Artificial Sequence
  Oligonucleotide primer for the detection of SNP TSC0050041
tctcgctcctcc

SEQ ID NO: 356284 - DNA, 12 bp, Artificial Sequence
  Oligonucleotide primer for the detection of SNP TSC0050041
tgaagtattgta

SEQ ID NO: 356285 - DNA, 12 bp, Artificial Sequence
  Oligonucleotide primer for the detection of SNP TSC0050041
cgaagtattgta

SEQ ID NO: 356286 - DNA, 12 bp, Artificial Sequence
  Oligonucleotide primer for the detection of SNP TSC0050043
aatctatcactc

SEQ ID NO: 356287 - DNA, 12 bp, Artificial Sequence
  Oligonucleotide primer for the detection of SNP TSC0050043
tagattttagtt

SEQ ID NO: 356288 - DNA, 12 bp, Artificial Sequence
  Oligonucleotide primer for the detection of SNP TSC0050043
aaattttaacca

SEQ ID NO: 356289 - DNA, 12 bp, Artificial Sequence
  Oligonucleotide primer for the detection of SNP TSC0050043
gtttattatttt

SEQ ID NO: 356290 - DNA, 12 bp, Artificial Sequence
  Oligonucleotide primer for the detection of SNP TSC0050044
taatctatcact

SEQ ID NO: 356291 - DNA, 12 bp, Artificial Sequence
  Oligonucleotide primer for the detection of SNP TSC0050044
agattttagtta

SEQ ID NO: 356292 - DNA, 12 bp, Artificial Sequence
  Oligonucleotide primer for the detection of SNP TSC0050047
aatatttccctt

SEQ ID NO: 356293 - DNA, 12 bp, Artificial Sequence
  Oligonucleotide primer for the detection of SNP TSC0050047
gagtatggttga

SEQ ID NO: 356294 - DNA, 12 bp, Artificial Sequence
  Oligonucleotide primer for the detection of SNP TSC0050048
tcctaaaaaaac

SEQ ID NO: 356295 - DNA, 12 bp, Artificial Sequence
  Oligonucleotide primer for the detection of SNP TSC0050048
ttattgatagta

SEQ ID NO: 356296 - DNA, 12 bp, Artificial Sequence
  Oligonucleotide primer for the detection of SNP TSC0050048
ttttggaaaaat

SEQ ID NO: 356297 - DNA, 12 bp, Artificial Sequence
  Oligonucleotide primer for the detection of SNP TSC0050049
caatcttccttc

SEQ ID NO: 356298 - DNA, 12 bp, Artificial Sequence
  Oligonucleotide primer for the detection of SNP TSC0050049
gggtttttttag

SEQ ID NO: 356299 - DNA, 12 bp, Artificial Sequence
  Oligonucleotide primer for the detection of SNP TSC0050050
aatctttaaaaa

SEQ ID NO: 356300 - DNA, 12 bp, Artificial Sequence
  Oligonucleotide primer for the detection of SNP TSC0050050
atatttttttgt

SEQ ID NO: 356301 - DNA, 12 bp, Artificial Sequence
  Oligonukleotid-Primer
atatctccctat

SEQ ID NO: 356302 - DNA, 12 bp, Artificial Sequence
  Oligonucleotide primer for the detection of SNP TSC0050050
gatttttgaaaa

SEQ ID NO: 356303 - DNA, 12 bp, Artificial Sequence
  Oligonucleotide primer for the detection of SNP TSC0050051
ttcaatatatct

SEQ ID NO: 356304 - DNA, 12 bp, Artificial Sequence
  Oligonucleotide primer for the detection of SNP TSC0050051
aaatattatagg

SEQ ID NO: 356305 - DNA, 12 bp, Artificial Sequence
  Oligonukleotid-Primer
ttattaaagttt

SEQ ID NO: 356306 - DNA, 12 bp, Artificial Sequence
  Oligonucleotide primer for the detection of SNP TSC0050052
ttattaaagttc

SEQ ID NO: 356307 - DNA, 12 bp, Artificial Sequence
  Oligonucleotide primer for the detection of SNP TSC0050052
ctactaaaatcc

SEQ ID NO: 356308 - DNA, 12 bp, Artificial Sequence
  Oligonucleotide primer for the detection of SNP TSC0050052
aaattgaaagat

SEQ ID NO: 356309 - DNA, 12 bp, Artificial Sequence
  Oligonucleotide primer for the detection of SNP TSC0050053
tgatatttttta

SEQ ID NO: 356310 - DNA, 12 bp, Artificial Sequence
  Oligonucleotide primer for the detection of SNP TSC0010448
tatcatatctca

SEQ ID NO: 356311 - DNA, 12 bp, Artificial Sequence
  Oligonucleotide primer for the detection of SNP TSC0010448
tatcgtatctca

SEQ ID NO: 356312 - DNA, 12 bp, Artificial Sequence
  Oligonucleotide primer for the detection of SNP TSC0010448
ataatttttggt

SEQ ID NO: 356313 - DNA, 12 bp, Artificial Sequence
  Oligonucleotide primer for the detection of SNP TSC0010448
caatttttaata

SEQ ID NO: 356314 - DNA, 12 bp, Artificial Sequence
  Oligonucleotide primer for the detection of SNP TSC0010448
atatcgtatttt

SEQ ID NO: 356315 - DNA, 12 bp, Artificial Sequence
  Oligonucleotide primer for the detection of SNP TSC0050055
gtttttggttta

SEQ ID NO: 356316 - DNA, 12 bp, Artificial Sequence
  Oligonucleotide primer for the detection of SNP TSC0050056
aaatctaaaata

SEQ ID NO: 356317 - DNA, 12 bp, Artificial Sequence
  Oligonucleotide primer for the detection of SNP TSC0050056
aaagtataattt

SEQ ID NO: 356318 - DNA, 12 bp, Artificial Sequence
  Oligonucleotide primer for the detection of SNP TSC0050056
aaatacaaccta

SEQ ID NO: 356319 - DNA, 12 bp, Artificial Sequence
  Oligonucleotide primer for the detection of SNP TSC0050056
atttgggatgtt

SEQ ID NO: 356320 - DNA, 12 bp, Artificial Sequence
  Oligonucleotide primer for the detection of SNP TSC0050058
aaattagttttc

SEQ ID NO: 356321 - DNA, 12 bp, Artificial Sequence
  Oligonucleotide primer for the detection of SNP TSC0050058
aaatcaaccccc

SEQ ID NO: 356322 - DNA, 12 bp, Artificial Sequence
  Oligonucleotide primer for the detection of SNP TSC0050058
gagtgaagaggt

SEQ ID NO: 356323 - DNA, 12 bp, Artificial Sequence
  Oligonucleotide primer for the detection of SNP TSC0050058
gagcgaagaggt

SEQ ID NO: 356324 - DNA, 12 bp, Artificial Sequence
  Oligonucleotide primer for the detection of SNP TSC0050058
gagtgaagaggc

SEQ ID NO: 356325 - DNA, 12 bp, Artificial Sequence
  Oligonucleotide primer for the detection of SNP TSC0050058
gagcgaagaggc

SEQ ID NO: 356326 - DNA, 12 bp, Artificial Sequence
  Oligonucleotide primer for the detection of SNP TSC0050059
ctaacttaccaa

SEQ ID NO: 356327 - DNA, 12 bp, Artificial Sequence
  Oligonucleotide primer for the detection of SNP TSC0050059
gtatgtatgatt

SEQ ID NO: 356328 - DNA, 12 bp, Artificial Sequence
  Oligonucleotide primer for the detection of SNP TSC0050059
ctacatacataa

SEQ ID NO: 356329 - DNA, 12 bp, Artificial Sequence
  Oligonucleotide primer for the detection of SNP TSC0050059
aattaatttgtt

SEQ ID NO: 356330 - DNA, 12 bp, Artificial Sequence
  Oligonucleotide primer for the detection of SNP TSC0050060
tatgtgtaagat

SEQ ID NO: 356331 - DNA, 12 bp, Artificial Sequence
  Oligonucleotide primer for the detection of SNP TSC0050060
tacgtgtaagat

SEQ ID NO: 356332 - DNA, 12 bp, Artificial Sequence
  Oligonucleotide primer for the detection of SNP TSC0050060
tatgtgtaagac

SEQ ID NO: 356333 - DNA, 12 bp, Artificial Sequence
  Oligonucleotide primer for the detection of SNP TSC0050060
tacgtgtaagac

SEQ ID NO: 356334 - DNA, 12 bp, Artificial Sequence
  Oligonucleotide primer for the detection of SNP TSC0050060
acacatataaaa

SEQ ID NO: 356335 - DNA, 12 bp, Artificial Sequence
  Oligonucleotide primer for the detection of SNP TSC0050060
acacgtataaaa

SEQ ID NO: 356336 - DNA, 12 bp, Artificial Sequence
  Oligonucleotide primer for the detection of SNP TSC0050060
tgaagaggtatt

SEQ ID NO: 356337 - DNA, 12 bp, Artificial Sequence
  Oligonucleotide primer for the detection of SNP TSC0050061
actataaaaact

SEQ ID NO: 356338 - DNA, 12 bp, Artificial Sequence
  Oligonucleotide primer for the detection of SNP TSC0050061
ttaagttttata

SEQ ID NO: 356339 - DNA, 12 bp, Artificial Sequence
  Oligonucleotide primer for the detection of SNP TSC0008066
gtttatgatttg

SEQ ID NO: 356340 - DNA, 12 bp, Artificial Sequence
  Oligonucleotide primer for the detection of SNP TSC0008066
atttataatcta

SEQ ID NO: 356341 - DNA, 12 bp, Artificial Sequence
  Oligonucleotide primer for the detection of SNP TSC0050062
ctcctatccaac

SEQ ID NO: 356342 - DNA, 12 bp, Artificial Sequence
  Oligonucleotide primer for the detection of SNP TSC0050062
ttaatggtgata

SEQ ID NO: 356343 - DNA, 12 bp, Artificial Sequence
  Oligonucleotide primer for the detection of SNP TSC0050064
tcacatcattac

SEQ ID NO: 356344 - DNA, 12 bp, Artificial Sequence
  Oligonucleotide primer for the detection of SNP TSC0050064
tcacgtcattac

SEQ ID NO: 356345 - DNA, 12 bp, Artificial Sequence
  Oligonucleotide primer for the detection of SNP TSC0050064
ttacgttattat

SEQ ID NO: 356346 - DNA, 12 bp, Artificial Sequence
  Oligonucleotide primer for the detection of SNP TSC0050065
tcaccacaacct

SEQ ID NO: 356347 - DNA, 12 bp, Artificial Sequence
  Oligonucleotide primer for the detection of SNP TSC0050065
aatttgggaggt

SEQ ID NO: 356348 - DNA, 12 bp, Artificial Sequence
  Oligonucleotide primer for the detection of SNP TSC0050066
ttataaaattat

SEQ ID NO: 356349 - DNA, 12 bp, Artificial Sequence
  Oligonucleotide primer for the detection of SNP TSC0050066
ttttaatttata

SEQ ID NO: 356350 - DNA, 12 bp, Artificial Sequence
  Oligonucleotide primer for the detection of SNP TSC0050067
ataaaccatacc

SEQ ID NO: 356351 - DNA, 12 bp, Artificial Sequence
  Oligonucleotide primer for the detection of SNP TSC0050068
ggatgagttgta

SEQ ID NO: 356352 - DNA, 12 bp, Artificial Sequence
  Oligonucleotide primer for the detection of SNP TSC0050068
aaataaattata

SEQ ID NO: 356353 - DNA, 12 bp, Artificial Sequence
  Oligonucleotide primer for the detection of SNP TSC0050069
aaaactttattt

SEQ ID NO: 356354 - DNA, 12 bp, Artificial Sequence
  Oligonucleotide primer for the detection of SNP TSC0000814
agaatagtttaa

SEQ ID NO: 356355 - DNA, 12 bp, Artificial Sequence
  Oligonucleotide primer for the detection of SNP TSC0009268
aggagggaggaa

SEQ ID NO: 356356 - DNA, 12 bp, Artificial Sequence
  Oligonucleotide primer for the detection of SNP TSC0009269
taattattctaa

SEQ ID NO: 356357 - DNA, 12 bp, Artificial Sequence
  Oligonucleotide primer for the detection of SNP TSC0009269
catccttcccac

SEQ ID NO: 356358 - DNA, 12 bp, Artificial Sequence
  Oligonucleotide primer for the detection of SNP TSC0009269
taattattttgg

SEQ ID NO: 356359 - DNA, 12 bp, Artificial Sequence
  Oligonucleotide primer for the detection of SNP TSC0009270
tgtggatattgg

SEQ ID NO: 356360 - DNA, 12 bp, Artificial Sequence
  Oligonucleotide primer for the detection of SNP TSC0009270
cgtggatattgg

SEQ ID NO: 356361 - DNA, 12 bp, Artificial Sequence
  Oligonucleotide primer for the detection of SNP TSC0008636
ccctatttctac

SEQ ID NO: 356362 - DNA, 12 bp, Artificial Sequence
  Oligonucleotide primer for the detection of SNP TSC0008636
aagtgttttgta

SEQ ID NO: 356363 - DNA, 12 bp, Artificial Sequence
  Oligonucleotide primer for the detection of SNP TSC0050072
cctttcccttcc

SEQ ID NO: 356364 - DNA, 12 bp, Artificial Sequence
  Oligonucleotide primer for the detection of SNP TSC0050073
aaaaatttctat

SEQ ID NO: 356365 - DNA, 12 bp, Artificial Sequence
  Oligonucleotide primer for the detection of SNP TSC0050073
gaaaggagagag

SEQ ID NO: 356366 - DNA, 12 bp, Artificial Sequence
  Oligonucleotide primer for the detection of SNP TSC0050073
agaggtttttgt

SEQ ID NO: 356367 - DNA, 12 bp, Artificial Sequence
  Oligonucleotide primer for the detection of SNP TSC0009676
aaaaagaaaatg

SEQ ID NO: 356368 - DNA, 12 bp, Artificial Sequence
  Oligonucleotide primer for the detection of SNP TSC0009050
catttccctctt

SEQ ID NO: 356369 - DNA, 12 bp, Artificial Sequence
  Oligonucleotide primer for the detection of SNP TSC0009050
ttatagttataa

SEQ ID NO: 356370 - DNA, 12 bp, Artificial Sequence
  Oligonucleotide primer for the detection of SNP TSC0009050
ctacaaccacaa

SEQ ID NO: 356371 - DNA, 12 bp, Artificial Sequence
  Oligonucleotide primer for the detection of SNP TSC0010346
atcaccccttta

SEQ ID NO: 356372 - DNA, 12 bp, Artificial Sequence
  Oligonucleotide primer for the detection of SNP TSC0010346
tatagatatgtt

SEQ ID NO: 356373 - DNA, 12 bp, Artificial Sequence
  Oligonucleotide primer for the detection of SNP TSC0050079
tgaaaaagaata

SEQ ID NO: 356374 - DNA, 12 bp, Artificial Sequence
  Oligonucleotide primer for the detection of SNP TSC0050080
gtttaatggtta

SEQ ID NO: 356375 - DNA, 12 bp, Artificial Sequence
  Oligonucleotide primer for the detection of SNP TSC0050081
atttagtattaa

SEQ ID NO: 356376 - DNA, 12 bp, Artificial Sequence
  Oligonucleotide primer for the detection of SNP TSC0050081
atctaacattaa

SEQ ID NO: 356377 - DNA, 12 bp, Artificial Sequence
  Oligonucleotide primer for the detection of SNP TSC0050081
tgggaggatgat

SEQ ID NO: 356378 - DNA, 12 bp, Artificial Sequence
  Oligonucleotide primer for the detection of SNP TSC0050082
ataatctaatct

SEQ ID NO: 356379 - DNA, 12 bp, Artificial Sequence
  Oligonucleotide primer for the detection of SNP TSC0050082
tgatgatgttaa

SEQ ID NO: 356380 - DNA, 12 bp, Artificial Sequence
  Oligonucleotide primer for the detection of SNP TSC0050082
tgatgacgttaa

SEQ ID NO: 356381 - DNA, 12 bp, Artificial Sequence
  Oligonucleotide primer for the detection of SNP TSC0050083
actaaatcaaat

SEQ ID NO: 356382 - DNA, 12 bp, Artificial Sequence
  Oligonucleotide primer for the detection of SNP TSC0050083
ttatttaataat

SEQ ID NO: 356383 - DNA, 12 bp, Artificial Sequence
  Oligonucleotide primer for the detection of SNP TSC0050083
ttcactcaacaa

SEQ ID NO: 356384 - DNA, 12 bp, Artificial Sequence
  Oligonucleotide primer for the detection of SNP TSC0050083
gttagattagat

SEQ ID NO: 356385 - DNA, 12 bp, Artificial Sequence
  Oligonucleotide primer for the detection of SNP TSC0050084
tttttgatgtta

SEQ ID NO: 356386 - DNA, 12 bp, Artificial Sequence
  Oligonucleotide primer for the detection of SNP TSC0050085
atcacaaaatat

SEQ ID NO: 356387 - DNA, 12 bp, Artificial Sequence
  Oligonucleotide primer for the detection of SNP TSC0050086
aaaactccatca

SEQ ID NO: 356388 - DNA, 12 bp, Artificial Sequence
  Oligonucleotide primer for the detection of SNP TSC0050087
aacaattcataa

SEQ ID NO: 356389 - DNA, 12 bp, Artificial Sequence
  Oligonucleotide primer for the detection of SNP TSC0050087
gaaagtttaatt

SEQ ID NO: 356390 - DNA, 12 bp, Artificial Sequence
  Oligonucleotide primer for the detection of SNP TSC0050087
aaaaactcaact

SEQ ID NO: 356391 - DNA, 12 bp, Artificial Sequence
  Oligonucleotide primer for the detection of SNP TSC0050087
ggtaatttatga

SEQ ID NO: 356392 - DNA, 12 bp, Artificial Sequence
  Oligonucleotide primer for the detection of SNP TSC0050088
aaaatatttctt

SEQ ID NO: 356393 - DNA, 12 bp, Artificial Sequence
  Oligonucleotide primer for the detection of SNP TSC0050088
gtgtatttttgg

SEQ ID NO: 356394 - DNA, 12 bp, Artificial Sequence
  Oligonucleotide primer for the detection of SNP TSC0050089
atttcttatacc

SEQ ID NO: 356395 - DNA, 12 bp, Artificial Sequence
  Oligonucleotide primer for the detection of SNP TSC0050089
tgagttttagtg

SEQ ID NO: 356396 - DNA, 12 bp, Artificial Sequence
  Oligonucleotide primer for the detection of SNP TSC0050090
aatatcataaac

SEQ ID NO: 356397 - DNA, 12 bp, Artificial Sequence
  Oligonucleotide primer for the detection of SNP TSC0050091
tatgtttgatta

SEQ ID NO: 356398 - DNA, 12 bp, Artificial Sequence
  Oligonucleotide primer for the detection of SNP TSC0050092
aaatttttcctt

SEQ ID NO: 356399 - DNA, 12 bp, Artificial Sequence
  Oligonucleotide primer for the detection of SNP TSC0008569
atttaataaact

SEQ ID NO: 356400 - DNA, 12 bp, Artificial Sequence
  Oligonucleotide primer for the detection of SNP TSC0008569
tatgtggaattg

SEQ ID NO: 356401 - DNA, 12 bp, Artificial Sequence
  Oligonucleotide primer for the detection of SNP TSC0008569
tacgtggaattg

SEQ ID NO: 356402 - DNA, 12 bp, Artificial Sequence
  Oligonucleotide primer for the detection of SNP TSC0000162
aactaactaccc

SEQ ID NO: 356403 - DNA, 12 bp, Artificial Sequence
  Oligonucleotide primer for the detection of SNP TSC0000162
ccaatcttacaa

SEQ ID NO: 356404 - DNA, 12 bp, Artificial Sequence
  Oligonucleotide primer for the detection of SNP TSC0000162
ggttgattgttt

SEQ ID NO: 356405 - DNA, 12 bp, Artificial Sequence
  Oligonucleotide primer for the detection of SNP TSC0000163
caaacaattcca

SEQ ID NO: 356406 - DNA, 12 bp, Artificial Sequence
  Oligonucleotide primer for the detection of SNP TSC0000163
atacatacacta

SEQ ID NO: 356407 - DNA, 12 bp, Artificial Sequence
  Oligonucleotide primer for the detection of SNP TSC0000163
ttagatagtttt

SEQ ID NO: 356408 - DNA, 12 bp, Artificial Sequence
  Oligonucleotide primer for the detection of SNP TSC0050093
caccccaccctt

SEQ ID NO: 356409 - DNA, 12 bp, Artificial Sequence
  Oligonucleotide primer for the detection of SNP TSC0050093
tagttggttggg

SEQ ID NO: 356410 - DNA, 12 bp, Artificial Sequence
  Oligonucleotide primer for the detection of SNP TSC0050098
caactcttatac

SEQ ID NO: 356411 - DNA, 12 bp, Artificial Sequence
  Oligonucleotide primer for the detection of SNP TSC0050098
gttatgtgatgt

SEQ ID NO: 356412 - DNA, 12 bp, Artificial Sequence
  Oligonucleotide primer for the detection of SNP TSC0050098
gttacgtgatgt

SEQ ID NO: 356413 - DNA, 12 bp, Artificial Sequence
  Oligonucleotide primer for the detection of SNP TSC0050098
cataatacaaaa

SEQ ID NO: 356414 - DNA, 12 bp, Artificial Sequence
  Oligonucleotide primer for the detection of SNP TSC0050098
cgtaatacaaaa

SEQ ID NO: 356415 - DNA, 12 bp, Artificial Sequence
  Oligonucleotide primer for the detection of SNP TSC0050099
tggtgtttttat

SEQ ID NO: 356416 - DNA, 12 bp, Artificial Sequence
  Oligonucleotide primer for the detection of SNP TSC0050099
taatattctcac

SEQ ID NO: 356417 - DNA, 12 bp, Artificial Sequence
  Oligonucleotide primer for the detection of SNP TSC0050099
atgaatagagat

SEQ ID NO: 356418 - DNA, 12 bp, Artificial Sequence
  Oligonucleotide primer for the detection of SNP TSC0050100
taaataatctac

SEQ ID NO: 356419 - DNA, 12 bp, Artificial Sequence
  Oligonucleotide primer for the detection of SNP TSC0050100
ggtatagttaga

SEQ ID NO: 356420 - DNA, 12 bp, Artificial Sequence
  Oligonucleotide primer for the detection of SNP TSC0050100
aacacaattaaa

SEQ ID NO: 356421 - DNA, 12 bp, Artificial Sequence
  Oligonucleotide primer for the detection of SNP TSC0050100
taaatgatttgt

SEQ ID NO: 356422 - DNA, 12 bp, Artificial Sequence
  Oligonucleotide primer for the detection of SNP TSC0050100
taaatgatttgc

SEQ ID NO: 356423 - DNA, 12 bp, Artificial Sequence
  Oligonucleotide primer for the detection of SNP TSC0050101
acaacaaaaccc

SEQ ID NO: 356424 - DNA, 12 bp, Artificial Sequence
  Oligonucleotide primer for the detection of SNP TSC0050102
cataattcaatt

SEQ ID NO: 356425 - DNA, 12 bp, Artificial Sequence
  Oligonucleotide primer for the detection of SNP TSC0050102
atttagggggag

SEQ ID NO: 356426 - DNA, 12 bp, Artificial Sequence
  Oligonucleotide primer for the detection of SNP TSC0050103
ttttaaattacc

SEQ ID NO: 356427 - DNA, 12 bp, Artificial Sequence
  Oligonucleotide primer for the detection of SNP TSC0050103
atatgtttgaga

SEQ ID NO: 356428 - DNA, 12 bp, Artificial Sequence
  Oligonucleotide primer for the detection of SNP TSC0050103
acatacctaaaa

SEQ ID NO: 356429 - DNA, 12 bp, Artificial Sequence
  Oligonucleotide primer for the detection of SNP TSC0050104
tatttatttagg

SEQ ID NO: 356430 - DNA, 12 bp, Artificial Sequence
  Oligonucleotide primer for the detection of SNP TSC0050106
acaaccacacac

SEQ ID NO: 356431 - DNA, 12 bp, Artificial Sequence
  Oligonucleotide primer for the detection of SNP TSC0050106
acgaccacacac

SEQ ID NO: 356432 - DNA, 12 bp, Artificial Sequence
  Oligonucleotide primer for the detection of SNP TSC0050106
gttttttgttgg

SEQ ID NO: 356433 - DNA, 12 bp, Artificial Sequence
  Oligonucleotide primer for the detection of SNP TSC0050107
tacaatccacaa

SEQ ID NO: 356434 - DNA, 12 bp, Artificial Sequence
  Oligonucleotide primer for the detection of SNP TSC0050107
ttataaaaaggt

SEQ ID NO: 356435 - DNA, 12 bp, Artificial Sequence
  Oligonucleotide primer for the detection of SNP TSC0050107
tgtagtttataa

SEQ ID NO: 356436 - DNA, 12 bp, Artificial Sequence
  Oligonucleotide primer for the detection of SNP TSC0050109
ctatataatata

SEQ ID NO: 356437 - DNA, 12 bp, Artificial Sequence
  Oligonucleotide primer for the detection of SNP TSC0050110
cctaatacttcc

SEQ ID NO: 356438 - DNA, 12 bp, Artificial Sequence
  Oligonucleotide primer for the detection of SNP TSC0050110
aggtttaggagg

SEQ ID NO: 356439 - DNA, 12 bp, Artificial Sequence
  Oligonucleotide primer for the detection of SNP TSC0050111
tctactaactta

SEQ ID NO: 356440 - DNA, 12 bp, Artificial Sequence
  Oligonucleotide primer for the detection of SNP TSC0050111
taaagataaagt

SEQ ID NO: 356441 - DNA, 12 bp, Artificial Sequence
  Oligonucleotide primer for the detection of SNP TSC0050115
ttatcttccaac

SEQ ID NO: 356442 - DNA, 12 bp, Artificial Sequence
  Oligonucleotide primer for the detection of SNP TSC0050115
gttgaaaatatg

SEQ ID NO: 356443 - DNA, 12 bp, Artificial Sequence
  Oligonucleotide primer for the detection of SNP TSC0050115
gtcgaaaatatg

SEQ ID NO: 356444 - DNA, 12 bp, Artificial Sequence
  Oligonucleotide primer for the detection of SNP TSC0050116
aacaacacatat

SEQ ID NO: 356445 - DNA, 12 bp, Artificial Sequence
  Oligonucleotide primer for the detection of SNP TSC0050117
caactctatcat

SEQ ID NO: 356446 - DNA, 12 bp, Artificial Sequence
  Oligonucleotide primer for the detection of SNP TSC0050117
gagaagtaagaa

SEQ ID NO: 356447 - DNA, 12 bp, Artificial Sequence
  Oligonucleotide primer for the detection of SNP TSC0050118
taatctaataat

SEQ ID NO: 356448 - DNA, 12 bp, Artificial Sequence
  Oligonucleotide primer for the detection of SNP TSC0050118
tttaaaagtttt

SEQ ID NO: 356449 - DNA, 12 bp, Artificial Sequence
  Oligonucleotide primer for the detection of SNP TSC0050118
taatttaaaaac

SEQ ID NO: 356450 - DNA, 12 bp, Artificial Sequence
  Oligonucleotide primer for the detection of SNP TSC0050119
ataatttttggg

SEQ ID NO: 356451 - DNA, 12 bp, Artificial Sequence
  Oligonucleotide primer for the detection of SNP TSC0050120
ttatggtaagag

SEQ ID NO: 356452 - DNA, 12 bp, Artificial Sequence
  Oligonucleotide primer for the detection of SNP TSC0050120
tgttagaaaagt

SEQ ID NO: 356453 - DNA, 12 bp, Artificial Sequence
  Oligonucleotide primer for the detection of SNP TSC0050122
ataaaattaacc

SEQ ID NO: 356454 - DNA, 12 bp, Artificial Sequence
  Oligonucleotide primer for the detection of SNP TSC0050125
acatattattac

SEQ ID NO: 356455 - DNA, 12 bp, Artificial Sequence
  Oligonucleotide primer for the detection of SNP TSC0050125
gtatgttgttat

SEQ ID NO: 356456 - DNA, 12 bp, Artificial Sequence
  Oligonucleotide primer for the detection of SNP TSC0050126
tttaaaattaga

SEQ ID NO: 356457 - DNA, 12 bp, Artificial Sequence
  Oligonucleotide primer for the detection of SNP TSC0050126
ataaaaatatga

SEQ ID NO: 356458 - DNA, 12 bp, Artificial Sequence
  Oligonucleotide primer for the detection of SNP TSC0050126
ataaaaatacga

SEQ ID NO: 356459 - DNA, 12 bp, Artificial Sequence
  Oligonucleotide primer for the detection of SNP TSC0050132
gggaagttgttg

SEQ ID NO: 356460 - DNA, 12 bp, Artificial Sequence
  Oligonucleotide primer for the detection of SNP TSC0050133
atcaaaaaaacc

SEQ ID NO: 356461 - DNA, 12 bp, Artificial Sequence
  Oligonucleotide primer for the detection of SNP TSC0050133
gtagtgtttttg

SEQ ID NO: 356462 - DNA, 12 bp, Artificial Sequence
  Oligonucleotide primer for the detection of SNP TSC0050134
aaacttatacaa

SEQ ID NO: 356463 - DNA, 12 bp, Artificial Sequence
  Oligonucleotide primer for the detection of SNP TSC0050134
agaaaaaaattg

SEQ ID NO: 356464 - DNA, 12 bp, Artificial Sequence
  Oligonucleotide primer for the detection of SNP TSC0050134
aatttgtataat

SEQ ID NO: 356465 - DNA, 12 bp, Artificial Sequence
  Oligonucleotide primer for the detection of SNP TSC0050135
tcatctttcttt

SEQ ID NO: 356466 - DNA, 12 bp, Artificial Sequence
  Oligonucleotide primer for the detection of SNP TSC0050135
tcgtctttcttt

SEQ ID NO: 356467 - DNA, 12 bp, Artificial Sequence
  Oligonucleotide primer for the detection of SNP TSC0050135
aagatgttgtgt

SEQ ID NO: 356468 - DNA, 12 bp, Artificial Sequence
  Oligonucleotide primer for the detection of SNP TSC0050135
aaatactatata

SEQ ID NO: 356469 - DNA, 12 bp, Artificial Sequence
  Oligonucleotide primer for the detection of SNP TSC0050136
tttagggtgtaa

SEQ ID NO: 356470 - DNA, 12 bp, Artificial Sequence
  Oligonucleotide primer for the detection of SNP TSC0050136
tttaaaatataa

SEQ ID NO: 356471 - DNA, 12 bp, Artificial Sequence
  Oligonucleotide primer for the detection of SNP TSC0050136
gtggtttttggt

SEQ ID NO: 356472 - DNA, 12 bp, Artificial Sequence
  Oligonucleotide primer for the detection of SNP TSC0050137
accactaactta

SEQ ID NO: 356473 - DNA, 12 bp, Artificial Sequence
  Oligonucleotide primer for the detection of SNP TSC0050137
ggaaggagtatt

SEQ ID NO: 356474 - DNA, 12 bp, Artificial Sequence
  Oligonucleotide primer for the detection of SNP TSC0050140
atataattgtga

SEQ ID NO: 356475 - DNA, 12 bp, Artificial Sequence
  Oligonucleotide primer for the detection of SNP TSC0050140
atacaattataa

SEQ ID NO: 356476 - DNA, 12 bp, Artificial Sequence
  Oligonucleotide primer for the detection of SNP TSC0050140
tagatgtgatat

SEQ ID NO: 356477 - DNA, 12 bp, Artificial Sequence
  Oligonucleotide primer for the detection of SNP TSC0050142
taaatttaaatt

SEQ ID NO: 356478 - DNA, 12 bp, Artificial Sequence
  Oligonucleotide primer for the detection of SNP TSC0050142
ttatttatttaa

SEQ ID NO: 356479 - DNA, 12 bp, Artificial Sequence
  Oligonucleotide primer for the detection of SNP TSC0050142
ttatctacttaa

SEQ ID NO: 356480 - DNA, 12 bp, Artificial Sequence
  Oligonucleotide primer for the detection of SNP TSC0050142
tgagtttgaatt

SEQ ID NO: 356481 - DNA, 12 bp, Artificial Sequence
  Oligonucleotide primer for the detection of SNP TSC0050143
atttcaaaatat

SEQ ID NO: 356482 - DNA, 12 bp, Artificial Sequence
  Oligonucleotide primer for the detection of SNP TSC0050143
tcaaaaaatata

SEQ ID NO: 356483 - DNA, 12 bp, Artificial Sequence
  Oligonucleotide primer for the detection of SNP TSC0005094
ttaaacattttt

SEQ ID NO: 356484 - DNA, 12 bp, Artificial Sequence
  Oligonucleotide primer for the detection of SNP TSC0005094
ttataattatgt

SEQ ID NO: 356485 - DNA, 12 bp, Artificial Sequence
  Oligonucleotide primer for the detection of SNP TSC0005094
ttacaaccatat

SEQ ID NO: 356486 - DNA, 12 bp, Artificial Sequence
  Oligonucleotide primer for the detection of SNP TSC0005094
ttgggtattttt

SEQ ID NO: 356487 - DNA, 12 bp, Artificial Sequence
  Oligonucleotide primer for the detection of SNP TSC0005095
ccatctcaccta

SEQ ID NO: 356488 - DNA, 12 bp, Artificial Sequence
  Oligonucleotide primer for the detection of SNP TSC0005095
gagtaagtgttg

SEQ ID NO: 356489 - DNA, 12 bp, Artificial Sequence
  Oligonucleotide primer for the detection of SNP TSC0050144
ttaaaaacaatc

SEQ ID NO: 356490 - DNA, 12 bp, Artificial Sequence
  Oligonucleotide primer for the detection of SNP TSC0050144
tttagaaaggaa

SEQ ID NO: 356491 - DNA, 12 bp, Artificial Sequence
  Oligonucleotide primer for the detection of SNP TSC0050151
aaaaatcacaat

SEQ ID NO: 356492 - DNA, 12 bp, Artificial Sequence
  Oligonucleotide primer for the detection of SNP TSC0050151
aaaaatcacgat

SEQ ID NO: 356493 - DNA, 12 bp, Artificial Sequence
  Oligonucleotide primer for the detection of SNP TSC0050151
atagttgttata

SEQ ID NO: 356494 - DNA, 12 bp, Artificial Sequence
  Oligonucleotide primer for the detection of SNP TSC0050152
tatcactaaatt

SEQ ID NO: 356495 - DNA, 12 bp, Artificial Sequence
  Oligonucleotide primer for the detection of SNP TSC0050152
gataaatgagta

SEQ ID NO: 356496 - DNA, 12 bp, Artificial Sequence
  Oligonucleotide primer for the detection of SNP TSC0050152
tgttattaagtt

SEQ ID NO: 356497 - DNA, 12 bp, Artificial Sequence
  Oligonucleotide primer for the detection of SNP TSC0050153
ttatttaatagg

SEQ ID NO: 356498 - DNA, 12 bp, Artificial Sequence
  Oligonucleotide primer for the detection of SNP TSC0050154
atcataatattt

SEQ ID NO: 356499 - DNA, 12 bp, Artificial Sequence
  Oligonucleotide primer for the detection of SNP TSC0050154
tttatatgttag

SEQ ID NO: 356500 - DNA, 12 bp, Artificial Sequence
  Oligonucleotide primer for the detection of SNP TSC0050155
atatgaaattta

SEQ ID NO: 356501 - DNA, 12 bp, Artificial Sequence
  Oligonucleotide primer for the detection of SNP TSC0050156
cattacataata

SEQ ID NO: 356502 - DNA, 12 bp, Artificial Sequence
  Oligonucleotide primer for the detection of SNP TSC0050156
aagttttattgg

SEQ ID NO: 356503 - DNA, 12 bp, Artificial Sequence
  Oligonucleotide primer for the detection of SNP TSC0050156
attttattaaaa

SEQ ID NO: 356504 - DNA, 12 bp, Artificial Sequence
  Oligonucleotide primer for the detection of SNP TSC0050156
attatatagtgt

SEQ ID NO: 356505 - DNA, 12 bp, Artificial Sequence
  Oligonucleotide primer for the detection of SNP TSC0006358
aaatatatcatc

SEQ ID NO: 356506 - DNA, 12 bp, Artificial Sequence
  Oligonucleotide primer for the detection of SNP TSC0050158
attattatatgg

SEQ ID NO: 356507 - DNA, 12 bp, Artificial Sequence
  Oligonucleotide primer for the detection of SNP TSC0050158
atcaccacataa

SEQ ID NO: 356508 - DNA, 12 bp, Artificial Sequence
  Oligonucleotide primer for the detection of SNP TSC0050158
gttttagaatat

SEQ ID NO: 356509 - DNA, 12 bp, Artificial Sequence
  Oligonucleotide primer for the detection of SNP TSC0050159
caaaataactac

SEQ ID NO: 356510 - DNA, 12 bp, Artificial Sequence
  Oligonucleotide primer for the detection of SNP TSC0050160
aaatgtgttgta

SEQ ID NO: 356511 - DNA, 12 bp, Artificial Sequence
  Oligonucleotide primer for the detection of SNP TSC0050161
taaatttacaat

SEQ ID NO: 356512 - DNA, 12 bp, Artificial Sequence
  Oligonucleotide primer for the detection of SNP TSC0050161
atagtggttttg

SEQ ID NO: 356513 - DNA, 12 bp, Artificial Sequence
  Oligonucleotide primer for the detection of SNP TSC0050161
ataataatttta

SEQ ID NO: 356514 - DNA, 12 bp, Artificial Sequence
  Oligonucleotide primer for the detection of SNP TSC0050161
tagatttatagt

SEQ ID NO: 356515 - DNA, 12 bp, Artificial Sequence
  Oligonucleotide primer for the detection of SNP TSC0050162
aataatatattt

SEQ ID NO: 356516 - DNA, 12 bp, Artificial Sequence
  Oligonucleotide primer for the detection of SNP TSC0050162
ggatttaatgta

SEQ ID NO: 356517 - DNA, 12 bp, Artificial Sequence
  Oligonucleotide primer for the detection of SNP TSC0050164
ttaaacgataac

SEQ ID NO: 356518 - DNA, 12 bp, Artificial Sequence
  Oligonucleotide primer for the detection of SNP TSC0050164
taggaattgttt

SEQ ID NO: 356519 - DNA, 12 bp, Artificial Sequence
  Oligonucleotide primer for the detection of SNP TSC0050164
taaaaactactt

SEQ ID NO: 356520 - DNA, 12 bp, Artificial Sequence
  Oligonucleotide primer for the detection of SNP TSC0050164
tggatggtaatt

SEQ ID NO: 356521 - DNA, 12 bp, Artificial Sequence
  Oligonucleotide primer for the detection of SNP TSC0050164
tggacggtaatt

SEQ ID NO: 356522 - DNA, 12 bp, Artificial Sequence
  Oligonucleotide primer for the detection of SNP TSC0009441
acacaaatcaat

SEQ ID NO: 356523 - DNA, 12 bp, Artificial Sequence
  Oligonucleotide primer for the detection of SNP TSC0009441
acacaaatcgat

SEQ ID NO: 356524 - DNA, 12 bp, Artificial Sequence
  Oligonucleotide primer for the detection of SNP TSC0009441
aaaagagaatta

SEQ ID NO: 356525 - DNA, 12 bp, Artificial Sequence
  Oligonucleotide primer for the detection of SNP TSC0050165
atcctaaactaa

SEQ ID NO: 356526 - DNA, 12 bp, Artificial Sequence
  Oligonucleotide primer for the detection of SNP TSC0050165
ccactccccaac

SEQ ID NO: 356527 - DNA, 12 bp, Artificial Sequence
  Oligonucleotide primer for the detection of SNP TSC0050165
gttttagattag

SEQ ID NO: 356528 - DNA, 12 bp, Artificial Sequence
  Oligonucleotide primer for the detection of SNP TSC0050166
ctacctaaaaaa

SEQ ID NO: 356529 - DNA, 12 bp, Artificial Sequence
  Oligonucleotide primer for the detection of SNP TSC0050166
ggatttaatggt

SEQ ID NO: 356530 - DNA, 12 bp, Artificial Sequence
  Oligonukleotid-Primer
taaatccaataa

SEQ ID NO: 356531 - DNA, 12 bp, Artificial Sequence
  Oligonucleotide primer for the detection of SNP TSC0050166
tgtttaaagggt

SEQ ID NO: 356532 - DNA, 12 bp, Artificial Sequence
  Oligonucleotide primer for the detection of SNP TSC0050167
taatgatgagta

SEQ ID NO: 356533 - DNA, 12 bp, Artificial Sequence
  Oligonucleotide primer for the detection of SNP TSC0050169
catttaccaatc

SEQ ID NO: 356534 - DNA, 12 bp, Artificial Sequence
  Oligonukleotid-Primer
taaatttttttg

SEQ ID NO: 356535 - DNA, 12 bp, Artificial Sequence
  Oligonucleotide primer for the detection of SNP TSC0050169
caaactctctta

SEQ ID NO: 356536 - DNA, 12 bp, Artificial Sequence
  Oligonucleotide primer for the detection of SNP TSC0050169
tatttattagtt

SEQ ID NO: 356537 - DNA, 12 bp, Artificial Sequence
  Oligonucleotide primer for the detection of SNP TSC0050170
cgtatagttata

SEQ ID NO: 356538 - DNA, 12 bp, Artificial Sequence
  Oligonucleotide primer for the detection of SNP TSC0050170
acacaatcacaa

SEQ ID NO: 356539 - DNA, 12 bp, Artificial Sequence
  Oligonucleotide primer for the detection of SNP TSC0050170
gcacaatcacaa

SEQ ID NO: 356540 - DNA, 12 bp, Artificial Sequence
  Oligonucleotide primer for the detection of SNP TSC0050170
tttgtagtaggt

SEQ ID NO: 356541 - DNA, 12 bp, Artificial Sequence
  Oligonucleotide primer for the detection of SNP TSC0050172
tattcctacaac

SEQ ID NO: 356542 - DNA, 12 bp, Artificial Sequence
  Oligonucleotide primer for the detection of SNP TSC0050172
agaagtggttgg

SEQ ID NO: 356543 - DNA, 12 bp, Artificial Sequence
  Oligonucleotide primer for the detection of SNP TSC0050172
agaagtggtcgg

SEQ ID NO: 356544 - DNA, 12 bp, Artificial Sequence
  Oligonucleotide primer for the detection of SNP TSC0050175
tcttatctatct

SEQ ID NO: 356545 - DNA, 12 bp, Artificial Sequence
  Oligonucleotide primer for the detection of SNP TSC0050175
attttaagagta

SEQ ID NO: 356546 - DNA, 12 bp, Artificial Sequence
  Oligonucleotide primer for the detection of SNP TSC0050176
tatcattaccat

SEQ ID NO: 356547 - DNA, 12 bp, Artificial Sequence
  Oligonucleotide primer for the detection of SNP TSC0050176
tccttcctttaa

SEQ ID NO: 356548 - DNA, 12 bp, Artificial Sequence
  Oligonucleotide primer for the detection of SNP TSC0050177
tattacacacac

SEQ ID NO: 356549 - DNA, 12 bp, Artificial Sequence
  Oligonucleotide primer for the detection of SNP TSC0050178
cctctaacaatt

SEQ ID NO: 356550 - DNA, 12 bp, Artificial Sequence
  Oligonucleotide primer for the detection of SNP TSC0050178
ataaatagaatg

SEQ ID NO: 356551 - DNA, 12 bp, Artificial Sequence
  Oligonucleotide primer for the detection of SNP TSC0050179
cacccccccccc

SEQ ID NO: 356552 - DNA, 12 bp, Artificial Sequence
  Oligonucleotide primer for the detection of SNP TSC0050179
gtaaataaaatg

SEQ ID NO: 356553 - DNA, 12 bp, Artificial Sequence
  Oligonucleotide primer for the detection of SNP TSC0050180
aataacaattac

SEQ ID NO: 356554 - DNA, 12 bp, Artificial Sequence
  Oligonucleotide primer for the detection of SNP TSC0050180
tacccctcatca

SEQ ID NO: 356555 - DNA, 12 bp, Artificial Sequence
  Oligonucleotide primer for the detection of SNP TSC0050180
agtggtagttgt

SEQ ID NO: 356556 - DNA, 12 bp, Artificial Sequence
  Oligonucleotide primer for the detection of SNP TSC0050181
aaaacattaaac

SEQ ID NO: 356557 - DNA, 12 bp, Artificial Sequence
  Oligonucleotide primer for the detection of SNP TSC0050181
aggatttattaa

SEQ ID NO: 356558 - DNA, 12 bp, Artificial Sequence
  Oligonucleotide primer for the detection of SNP TSC0050182
ctaacaattact

SEQ ID NO: 356559 - DNA, 12 bp, Artificial Sequence
  Oligonucleotide primer for the detection of SNP TSC0050182
attgtgttatag

SEQ ID NO: 356560 - DNA, 12 bp, Artificial Sequence
  Oligonucleotide primer for the detection of SNP TSC0050187
ttataatatcac

SEQ ID NO: 356561 - DNA, 12 bp, Artificial Sequence
  Oligonucleotide primer for the detection of SNP TSC0050187
agattttttgga

SEQ ID NO: 356562 - DNA, 12 bp, Artificial Sequence
  Oligonukleotid-Primer
tttttaaaaatg

SEQ ID NO: 356563 - DNA, 12 bp, Artificial Sequence
  Oligonucleotide primer for the detection of SNP TSC0050188
aatgtgggtatt

SEQ ID NO: 356564 - DNA, 12 bp, Artificial Sequence
  Oligonucleotide primer for the detection of SNP TSC0050191
cttcacaaaatt

SEQ ID NO: 356565 - DNA, 12 bp, Artificial Sequence
  Oligonucleotide primer for the detection of SNP TSC0050191
agtgtagttata

SEQ ID NO: 356566 - DNA, 12 bp, Artificial Sequence
  Oligonukleotid-Primer
ccctttaccttc

SEQ ID NO: 356567 - DNA, 12 bp, Artificial Sequence
  Oligonucleotide primer for the detection of SNP TSC0050193
actaactaaaat

SEQ ID NO: 356568 - DNA, 12 bp, Artificial Sequence
  Oligonucleotide primer for the detection of SNP TSC0050193
attggttgagat

SEQ ID NO: 356569 - DNA, 12 bp, Artificial Sequence
  Oligonucleotide primer for the detection of SNP TSC0050194
tccttcattcat

SEQ ID NO: 356570 - DNA, 12 bp, Artificial Sequence
  Oligonukleotid-Primer
atattagttaaa

SEQ ID NO: 356571 - DNA, 12 bp, Artificial Sequence
  Oligonucleotide primer for the detection of SNP TSC0050199
aaacatcacaat

SEQ ID NO: 356572 - DNA, 12 bp, Artificial Sequence
  Oligonucleotide primer for the detection of SNP TSC0050199
aaggattataaa

SEQ ID NO: 356573 - DNA, 12 bp, Artificial Sequence
  Oligonucleotide primer for the detection of SNP TSC0050200
tcccttttcttc

SEQ ID NO: 356574 - DNA, 12 bp, Artificial Sequence
  Oligonukleotid-Primer
tagtttatatta

SEQ ID NO: 356575 - DNA, 12 bp, Artificial Sequence
  Oligonucleotide primer for the detection of SNP TSC0050201
taaacaaaactc

SEQ ID NO: 356576 - DNA, 12 bp, Artificial Sequence
  Oligonucleotide primer for the detection of SNP TSC0050202
ttacttctatct

SEQ ID NO: 356577 - DNA, 12 bp, Artificial Sequence
  Oligonucleotide primer for the detection of SNP TSC0050202
tatataggttga

SEQ ID NO: 356578 - DNA, 12 bp, Artificial Sequence
  Oligonucleotide primer for the detection of SNP TSC0050203
agagatgaagag

SEQ ID NO: 356579 - DNA, 12 bp, Artificial Sequence
  Oligonucleotide primer for the detection of SNP TSC0050203
tttgtattaaat

SEQ ID NO: 356580 - DNA, 12 bp, Artificial Sequence
  Oligonucleotide primer for the detection of SNP TSC0006287
cttctcattccc

SEQ ID NO: 356581 - DNA, 12 bp, Artificial Sequence
  Oligonucleotide primer for the detection of SNP TSC0006287
gtgtggggaggg

SEQ ID NO: 356582 - DNA, 12 bp, Artificial Sequence
  Oligonucleotide primer for the detection of SNP TSC0050204
taagtaatatat

SEQ ID NO: 356583 - DNA, 12 bp, Artificial Sequence
  Oligonucleotide primer for the detection of SNP TSC0050204
aaagattttatt

SEQ ID NO: 356584 - DNA, 12 bp, Artificial Sequence
  Oligonucleotide primer for the detection of SNP TSC0050205
aatactattctc

SEQ ID NO: 356585 - DNA, 12 bp, Artificial Sequence
  Oligonucleotide primer for the detection of SNP TSC0050206
aaacttaactac

SEQ ID NO: 356586 - DNA, 12 bp, Artificial Sequence
  Oligonucleotide primer for the detection of SNP TSC0050206
agatatggtaag

SEQ ID NO: 356587 - DNA, 12 bp, Artificial Sequence
  Oligonucleotide primer for the detection of SNP TSC0050209
tgaagggatttg

SEQ ID NO: 356588 - DNA, 12 bp, Artificial Sequence
  Oligonucleotide primer for the detection of SNP TSC0050210
tcaatttcattt

SEQ ID NO: 356589 - DNA, 12 bp, Artificial Sequence
  Oligonucleotide primer for the detection of SNP TSC0050210
tcgatttcattt

SEQ ID NO: 356590 - DNA, 12 bp, Artificial Sequence
  Oligonucleotide primer for the detection of SNP TSC0050210
aatgtatttaag

SEQ ID NO: 356591 - DNA, 12 bp, Artificial Sequence
  Oligonucleotide primer for the detection of SNP TSC0050211
ttcaaaaaacct

SEQ ID NO: 356592 - DNA, 12 bp, Artificial Sequence
  Oligonucleotide primer for the detection of SNP TSC0050211
aggtagatatta

SEQ ID NO: 356593 - DNA, 12 bp, Artificial Sequence
  Oligonucleotide primer for the detection of SNP TSC0050212
gtaatataattt

SEQ ID NO: 356594 - DNA, 12 bp, Artificial Sequence
  Oligonucleotide primer for the detection of SNP TSC0050212
caacacaattta

SEQ ID NO: 356595 - DNA, 12 bp, Artificial Sequence
  Oligonucleotide primer for the detection of SNP TSC0050212
ggaggtgattgt

SEQ ID NO: 356596 - DNA, 12 bp, Artificial Sequence
  Oligonucleotide primer for the detection of SNP TSC0050216
atatgagttaga

SEQ ID NO: 356597 - DNA, 12 bp, Artificial Sequence
  Oligonucleotide primer for the detection of SNP TSC0050217
aatcaaaatttt

SEQ ID NO: 356598 - DNA, 12 bp, Artificial Sequence
  Oligonucleotide primer for the detection of SNP TSC0050217
aaaggaagggta

SEQ ID NO: 356599 - DNA, 12 bp, Artificial Sequence
  Oligonucleotide primer for the detection of SNP TSC0005472
tgttttatggta

SEQ ID NO: 356600 - DNA, 12 bp, Artificial Sequence
  Oligonucleotide primer for the detection of SNP TSC0005473
atactataacat

SEQ ID NO: 356601 - DNA, 12 bp, Artificial Sequence
  Oligonucleotide primer for the detection of SNP TSC0005473
taataatgggaa

SEQ ID NO: 356602 - DNA, 12 bp, Artificial Sequence
  Oligonucleotide primer for the detection of SNP TSC0005473
taataacgggaa

SEQ ID NO: 356603 - DNA, 12 bp, Artificial Sequence
  Oligonucleotide primer for the detection of SNP TSC0050218
tcataaactatt

SEQ ID NO: 356604 - DNA, 12 bp, Artificial Sequence
  Oligonucleotide primer for the detection of SNP TSC0050218
gtagataattga

SEQ ID NO: 356605 - DNA, 12 bp, Artificial Sequence
  Oligonucleotide primer for the detection of SNP TSC0050218
ttatggattgtt

SEQ ID NO: 356606 - DNA, 12 bp, Artificial Sequence
  Oligonucleotide primer for the detection of SNP TSC0050219
tactaatatacc

SEQ ID NO: 356607 - DNA, 12 bp, Artificial Sequence
  Oligonucleotide primer for the detection of SNP TSC0050219
tagtaagttttg

SEQ ID NO: 356608 - DNA, 12 bp, Artificial Sequence
  Oligonucleotide primer for the detection of SNP TSC0050220
tcatacttttta

SEQ ID NO: 356609 - DNA, 12 bp, Artificial Sequence
  Oligonucleotide primer for the detection of SNP TSC0050220
tcgtacttttta

SEQ ID NO: 356610 - DNA, 12 bp, Artificial Sequence
  Oligonukleotid-Primer
atagagataagt

SEQ ID NO: 356611 - DNA, 12 bp, Artificial Sequence
  Oligonucleotide primer for the detection of SNP TSC0001562
cctttttcttac

SEQ ID NO: 356612 - DNA, 12 bp, Artificial Sequence
  Oligonucleotide primer for the detection of SNP TSC0001562
tatttatagata

SEQ ID NO: 356613 - DNA, 12 bp, Artificial Sequence
  Oligonucleotide primer for the detection of SNP TSC0050221
caaaccatatta

SEQ ID NO: 356614 - DNA, 12 bp, Artificial Sequence
  Oligonukleotid-Primer
ttcaatctcatt

SEQ ID NO: 356615 - DNA, 12 bp, Artificial Sequence
  Oligonucleotide primer for the detection of SNP TSC0050221
aaattatattat

SEQ ID NO: 356616 - DNA, 12 bp, Artificial Sequence
  Oligonucleotide primer for the detection of SNP TSC0050222
cttcaaactcta

SEQ ID NO: 356617 - DNA, 12 bp, Artificial Sequence
  Oligonucleotide primer for the detection of SNP TSC0050222
taggattgagag

SEQ ID NO: 356618 - DNA, 12 bp, Artificial Sequence
  Oligonucleotide primer for the detection of SNP TSC0050222
ttttaagttttg

SEQ ID NO: 356619 - DNA, 12 bp, Artificial Sequence
  Oligonucleotide primer for the detection of SNP TSC0050223
tagtagggtttg

SEQ ID NO: 356620 - DNA, 12 bp, Artificial Sequence
  Oligonucleotide primer for the detection of SNP TSC0050223
taacaaaatcta

SEQ ID NO: 356621 - DNA, 12 bp, Artificial Sequence
  Oligonucleotide primer for the detection of SNP TSC0050223
ggattgattagg

SEQ ID NO: 356622 - DNA, 12 bp, Artificial Sequence
  Oligonucleotide primer for the detection of SNP TSC0050224
aaatacacatac

SEQ ID NO: 356623 - DNA, 12 bp, Artificial Sequence
  Oligonucleotide primer for the detection of SNP TSC0050224
aaatacacgtac

SEQ ID NO: 356624 - DNA, 12 bp, Artificial Sequence
  Oligonucleotide primer for the detection of SNP TSC0050224
gatatatgtgtt

SEQ ID NO: 356625 - DNA, 12 bp, Artificial Sequence
  Oligonucleotide primer for the detection of SNP TSC0050224
gatatacgtgtt

SEQ ID NO: 356626 - DNA, 12 bp, Artificial Sequence
  Oligonucleotide primer for the detection of SNP TSC0050225
cctttatctctc

SEQ ID NO: 356627 - DNA, 12 bp, Artificial Sequence
  Oligonucleotide primer for the detection of SNP TSC0050227
atatcaaccaac

SEQ ID NO: 356628 - DNA, 12 bp, Artificial Sequence
  Oligonucleotide primer for the detection of SNP TSC0050227
gttgtgaattaa

SEQ ID NO: 356629 - DNA, 12 bp, Artificial Sequence
  Oligonucleotide primer for the detection of SNP TSC0050228
aaaatgttattg

SEQ ID NO: 356630 - DNA, 12 bp, Artificial Sequence
  Oligonukleotid-Primer
tataaactaatt

SEQ ID NO: 356631 - DNA, 12 bp, Artificial Sequence
  Oligonucleotide primer for the detection of SNP TSC0050229
tttttaaatcgg

SEQ ID NO: 356632 - DNA, 12 bp, Artificial Sequence
  Oligonucleotide primer for the detection of SNP TSC0050230
atttcattaacc

SEQ ID NO: 356633 - DNA, 12 bp, Artificial Sequence
  Oligonucleotide primer for the detection of SNP TSC0050230
attaaacttcta

SEQ ID NO: 356634 - DNA, 12 bp, Artificial Sequence
  Oligonucleotide primer for the detection of SNP TSC0050230
attttattgatt

SEQ ID NO: 356635 - DNA, 12 bp, Artificial Sequence
  Oligonucleotide primer for the detection of SNP TSC0050230
attttattgatc

SEQ ID NO: 356636 - DNA, 12 bp, Artificial Sequence
  Oligonucleotide primer for the detection of SNP TSC0050232
taccacaatcta

SEQ ID NO: 356637 - DNA, 12 bp, Artificial Sequence
  Oligonucleotide primer for the detection of SNP TSC0050232
aacatccctatc

SEQ ID NO: 356638 - DNA, 12 bp, Artificial Sequence
  Oligonucleotide primer for the detection of SNP TSC0050232
tgttataattta

SEQ ID NO: 356639 - DNA, 12 bp, Artificial Sequence
  Oligonucleotide primer for the detection of SNP TSC0050233
cctttttcaaac

SEQ ID NO: 356640 - DNA, 12 bp, Artificial Sequence
  Oligonucleotide primer for the detection of SNP TSC0050233
taggtttggttt

SEQ ID NO: 356641 - DNA, 12 bp, Artificial Sequence
  Oligonucleotide primer for the detection of SNP TSC0050233
caaacttaatcc

SEQ ID NO: 356642 - DNA, 12 bp, Artificial Sequence
  Oligonucleotide primer for the detection of SNP TSC0050234
tacttacctcct

SEQ ID NO: 356643 - DNA, 12 bp, Artificial Sequence
  Oligonucleotide primer for the detection of SNP TSC0006722
ccaatatatatt

SEQ ID NO: 356644 - DNA, 12 bp, Artificial Sequence
  Oligonucleotide primer for the detection of SNP TSC0006722
atagggagggga

SEQ ID NO: 356645 - DNA, 12 bp, Artificial Sequence
  Oligonucleotide primer for the detection of SNP TSC0050236
attaaaacaata

SEQ ID NO: 356646 - DNA, 12 bp, Artificial Sequence
  Oligonucleotide primer for the detection of SNP TSC0050236
attaaaacgata

SEQ ID NO: 356647 - DNA, 12 bp, Artificial Sequence
  Oligonucleotide primer for the detection of SNP TSC0050236
aaaagaatgtaa

SEQ ID NO: 356648 - DNA, 12 bp, Artificial Sequence
  Oligonucleotide primer for the detection of SNP TSC0050236
ttaaggtgatat

SEQ ID NO: 356649 - DNA, 12 bp, Artificial Sequence
  Oligonucleotide primer for the detection of SNP TSC0050236
ttaaggcgatat

SEQ ID NO: 356650 - DNA, 12 bp, Artificial Sequence
  Oligonucleotide primer for the detection of SNP TSC0050237
acatatatctac

SEQ ID NO: 356651 - DNA, 12 bp, Artificial Sequence
  Oligonucleotide primer for the detection of SNP TSC0050237
acgtatatctac

SEQ ID NO: 356652 - DNA, 12 bp, Artificial Sequence
  Oligonucleotide primer for the detection of SNP TSC0050237
aagtagagtgag

SEQ ID NO: 356653 - DNA, 12 bp, Artificial Sequence
  Oligonucleotide primer for the detection of SNP TSC0050238
aaataaataatc

SEQ ID NO: 356654 - DNA, 12 bp, Artificial Sequence
  Oligonucleotide primer for the detection of SNP TSC0050238
aaagaatgtaaa

SEQ ID NO: 356655 - DNA, 12 bp, Artificial Sequence
  Oligonucleotide primer for the detection of SNP TSC0050239
caaaacaacatc

SEQ ID NO: 356656 - DNA, 12 bp, Artificial Sequence
  Oligonucleotide primer for the detection of SNP TSC0050239
ttattatggatg

SEQ ID NO: 356657 - DNA, 12 bp, Artificial Sequence
  Oligonucleotide primer for the detection of SNP TSC0009546
ttggttatatag

SEQ ID NO: 356658 - DNA, 12 bp, Artificial Sequence
  Oligonucleotide primer for the detection of SNP TSC0009546
ttaaccacacaa

SEQ ID NO: 356659 - DNA, 12 bp, Artificial Sequence
  Oligonucleotide primer for the detection of SNP TSC0050240
ttctaaaccaat

SEQ ID NO: 356660 - DNA, 12 bp, Artificial Sequence
  Oligonucleotide primer for the detection of SNP TSC0050240
gatattattttg

SEQ ID NO: 356661 - DNA, 12 bp, Artificial Sequence
  Oligonucleotide primer for the detection of SNP TSC0050240
gatattatttcg

SEQ ID NO: 356662 - DNA, 12 bp, Artificial Sequence
  Oligonucleotide primer for the detection of SNP TSC0010064
cctactcaaaca

SEQ ID NO: 356663 - DNA, 12 bp, Artificial Sequence
  Oligonucleotide primer for the detection of SNP TSC0010064
tgttagaagaat

SEQ ID NO: 356664 - DNA, 12 bp, Artificial Sequence
  Oligonucleotide primer for the detection of SNP TSC0010066
ttaaaatattaa

SEQ ID NO: 356665 - DNA, 12 bp, Artificial Sequence
  Oligonucleotide primer for the detection of SNP TSC0010066
gtttagatatta

SEQ ID NO: 356666 - DNA, 12 bp, Artificial Sequence
  Oligonucleotide primer for the detection of SNP TSC0010066
ttagggtgttag

SEQ ID NO: 356667 - DNA, 12 bp, Artificial Sequence
  Oligonucleotide primer for the detection of SNP TSC0050241
attttaacaaca

SEQ ID NO: 356668 - DNA, 12 bp, Artificial Sequence
  Oligonucleotide primer for the detection of SNP TSC0050241
cttcctttcctt

SEQ ID NO: 356669 - DNA, 12 bp, Artificial Sequence
  Oligonucleotide primer for the detection of SNP TSC0050241
gttttgataata

SEQ ID NO: 356670 - DNA, 12 bp, Artificial Sequence
  Oligonucleotide primer for the detection of SNP TSC0010223
ataaacccaaac

SEQ ID NO: 356671 - DNA, 12 bp, Artificial Sequence
  Oligonucleotide primer for the detection of SNP TSC0050245
ataattaacaaa

SEQ ID NO: 356672 - DNA, 12 bp, Artificial Sequence
  Oligonucleotide primer for the detection of SNP TSC0050245
ttatttgaattt

SEQ ID NO: 356673 - DNA, 12 bp, Artificial Sequence
  Oligonucleotide primer for the detection of SNP TSC0050245
ttattcgaattt

SEQ ID NO: 356674 - DNA, 12 bp, Artificial Sequence
  Oligonucleotide primer for the detection of SNP TSC0050245
ttactcaaattt

SEQ ID NO: 356675 - DNA, 12 bp, Artificial Sequence
  Oligonucleotide primer for the detection of SNP TSC0050245
ttactcgaattt

SEQ ID NO: 356676 - DNA, 12 bp, Artificial Sequence
  Oligonucleotide primer for the detection of SNP TSC0050245
ataattagtaaa

SEQ ID NO: 356677 - DNA, 12 bp, Artificial Sequence
  Oligonucleotide primer for the detection of SNP TSC0050246
ttacctattatt

SEQ ID NO: 356678 - DNA, 12 bp, Artificial Sequence
  Oligonucleotide primer for the detection of SNP TSC0050247
tttctcacttat

SEQ ID NO: 356679 - DNA, 12 bp, Artificial Sequence
  Oligonucleotide primer for the detection of SNP TSC0050248
aaaattatactt

SEQ ID NO: 356680 - DNA, 12 bp, Artificial Sequence
  Oligonucleotide primer for the detection of SNP TSC0050254
attataactttc

SEQ ID NO: 356681 - DNA, 12 bp, Artificial Sequence
  Oligonucleotide primer for the detection of SNP TSC0050254
gtaagattagta

SEQ ID NO: 356682 - DNA, 12 bp, Artificial Sequence
  Oligonucleotide primer for the detection of SNP TSC0050255
tcttctatatat

SEQ ID NO: 356683 - DNA, 12 bp, Artificial Sequence
  Oligonucleotide primer for the detection of SNP TSC0050255
gttagttgttta

SEQ ID NO: 356684 - DNA, 12 bp, Artificial Sequence
  Oligonucleotide primer for the detection of SNP TSC0050255
accaactaccta

SEQ ID NO: 356685 - DNA, 12 bp, Artificial Sequence
  Oligonucleotide primer for the detection of SNP TSC0050256
acctaaacacta

SEQ ID NO: 356686 - DNA, 12 bp, Artificial Sequence
  Oligonucleotide primer for the detection of SNP TSC0050256
atttactttaaa

SEQ ID NO: 356687 - DNA, 12 bp, Artificial Sequence
  Oligonucleotide primer for the detection of SNP TSC0050256
tttgaatattat

SEQ ID NO: 356688 - DNA, 12 bp, Artificial Sequence
  Oligonucleotide primer for the detection of SNP TSC0050257
aagattagttag

SEQ ID NO: 356689 - DNA, 12 bp, Artificial Sequence
  Oligonucleotide primer for the detection of SNP TSC0050259
aacccatccacc

SEQ ID NO: 356690 - DNA, 12 bp, Artificial Sequence
  Oligonucleotide primer for the detection of SNP TSC0050259
aacccatccgcc

SEQ ID NO: 356691 - DNA, 12 bp, Artificial Sequence
  Oligonucleotide primer for the detection of SNP TSC0006331
accctatataaa

SEQ ID NO: 356692 - DNA, 12 bp, Artificial Sequence
  Oligonucleotide primer for the detection of SNP TSC0006331
aactaaaatcct

SEQ ID NO: 356693 - DNA, 12 bp, Artificial Sequence
  Oligonucleotide primer for the detection of SNP TSC0009276
cacaaaataaat

SEQ ID NO: 356694 - DNA, 12 bp, Artificial Sequence
  Oligonucleotide primer for the detection of SNP TSC0009276
tttggaagttga

SEQ ID NO: 356695 - DNA, 12 bp, Artificial Sequence
  Oligonucleotide primer for the detection of SNP TSC0007189
atcaccaaataa

SEQ ID NO: 356696 - DNA, 12 bp, Artificial Sequence
  Oligonucleotide primer for the detection of SNP TSC0007189
atcaccgaataa

SEQ ID NO: 356697 - DNA, 12 bp, Artificial Sequence
  Oligonucleotide primer for the detection of SNP TSC0007189
tcctcttatctt

SEQ ID NO: 356698 - DNA, 12 bp, Artificial Sequence
  Oligonucleotide primer for the detection of SNP TSC0007189
gtgttattggat

SEQ ID NO: 356699 - DNA, 12 bp, Artificial Sequence
  Oligonucleotide primer for the detection of SNP TSC0007189
gtgttatcggat

SEQ ID NO: 356700 - DNA, 12 bp, Artificial Sequence
  Oligonucleotide primer for the detection of SNP TSC0050266
tctcataaaact

SEQ ID NO: 356701 - DNA, 12 bp, Artificial Sequence
  Oligonucleotide primer for the detection of SNP TSC0050266
tctcgtaaaact

SEQ ID NO: 356702 - DNA, 12 bp, Artificial Sequence
  Oligonucleotide primer for the detection of SNP TSC0050266
tatgatagtgag

SEQ ID NO: 356703 - DNA, 12 bp, Artificial Sequence
  Oligonucleotide primer for the detection of SNP TSC0050267
tattcaatcttc

SEQ ID NO: 356704 - DNA, 12 bp, Artificial Sequence
  Oligonucleotide primer for the detection of SNP TSC0050267
aatttgtgtaag

SEQ ID NO: 356705 - DNA, 12 bp, Artificial Sequence
  Oligonucleotide primer for the detection of SNP TSC0050268
tatattaaaaaa

SEQ ID NO: 356706 - DNA, 12 bp, Artificial Sequence
  Oligonucleotide primer for the detection of SNP TSC0050268
ttaaattatatc

SEQ ID NO: 356707 - DNA, 12 bp, Artificial Sequence
  Oligonucleotide primer for the detection of SNP TSC0050268
tgtattagaggg

SEQ ID NO: 356708 - DNA, 12 bp, Artificial Sequence
  Oligonucleotide primer for the detection of SNP TSC0050270
aatttaacatac

SEQ ID NO: 356709 - DNA, 12 bp, Artificial Sequence
  Oligonucleotide primer for the detection of SNP TSC0050270
atgaagaaatgg

SEQ ID NO: 356710 - DNA, 12 bp, Artificial Sequence
  Oligonucleotide primer for the detection of SNP TSC0050271
ctaaaaccaata

SEQ ID NO: 356711 - DNA, 12 bp, Artificial Sequence
  Oligonucleotide primer for the detection of SNP TSC0050271
tatgttaaattt

SEQ ID NO: 356712 - DNA, 12 bp, Artificial Sequence
  Oligonucleotide primer for the detection of SNP TSC0050272
caataaaactac

SEQ ID NO: 356713 - DNA, 12 bp, Artificial Sequence
  Oligonucleotide primer for the detection of SNP TSC0050272
attaaggatatg

SEQ ID NO: 356714 - DNA, 12 bp, Artificial Sequence
  Oligonucleotide primer for the detection of SNP TSC0050274
aaggaaaagaag

SEQ ID NO: 356715 - DNA, 12 bp, Artificial Sequence
  Oligonucleotide primer for the detection of SNP TSC0050275
actaccactaac

SEQ ID NO: 356716 - DNA, 12 bp, Artificial Sequence
  Oligonucleotide primer for the detection of SNP TSC0050278
caacaaaatact

SEQ ID NO: 356717 - DNA, 12 bp, Artificial Sequence
  Oligonucleotide primer for the detection of SNP TSC0050278
tttagaaaagtt

SEQ ID NO: 356718 - DNA, 12 bp, Artificial Sequence
  Oligonucleotide primer for the detection of SNP TSC0050279
cattacctaatt

SEQ ID NO: 356719 - DNA, 12 bp, Artificial Sequence
  Oligonucleotide primer for the detection of SNP TSC0050279
ggtttggttata

SEQ ID NO: 356720 - DNA, 12 bp, Artificial Sequence
  Oligonucleotide primer for the detection of SNP TSC0050280
gttttttagtaa

SEQ ID NO: 356721 - DNA, 12 bp, Artificial Sequence
  Oligonucleotide primer for the detection of SNP TSC0010675
ttaaatttatga

SEQ ID NO: 356722 - DNA, 12 bp, Artificial Sequence
  Oligonucleotide primer for the detection of SNP TSC0010675
caaacccataaa

SEQ ID NO: 356723 - DNA, 12 bp, Artificial Sequence
  Oligonucleotide primer for the detection of SNP TSC0010675
gggaggtgattg

SEQ ID NO: 356724 - DNA, 12 bp, Artificial Sequence
  Oligonucleotide primer for the detection of SNP TSC0050281
acaccactctac

SEQ ID NO: 356725 - DNA, 12 bp, Artificial Sequence
  Oligonucleotide primer for the detection of SNP TSC0050281
gggggttattta

SEQ ID NO: 356726 - DNA, 12 bp, Artificial Sequence
  Oligonucleotide primer for the detection of SNP TSC0050283
attttactaaaa

SEQ ID NO: 356727 - DNA, 12 bp, Artificial Sequence
  Oligonucleotide primer for the detection of SNP TSC0050283
atattttatgaa

SEQ ID NO: 356728 - DNA, 12 bp, Artificial Sequence
  Oligonucleotide primer for the detection of SNP TSC0050283
atattttacgaa

SEQ ID NO: 356729 - DNA, 12 bp, Artificial Sequence
  Oligonucleotide primer for the detection of SNP TSC0050283
atacttcacaaa

SEQ ID NO: 356730 - DNA, 12 bp, Artificial Sequence
  Oligonucleotide primer for the detection of SNP TSC0050283
atacttcacgaa

SEQ ID NO: 356731 - DNA, 12 bp, Artificial Sequence
  Oligonucleotide primer for the detection of SNP TSC0050283
taggttttattg

SEQ ID NO: 356732 - DNA, 12 bp, Artificial Sequence
  Oligonucleotide primer for the detection of SNP TSC0050284
tgagtttgtttt

SEQ ID NO: 356733 - DNA, 12 bp, Artificial Sequence
  Oligonucleotide primer for the detection of SNP TSC0050284
taaacctatcct

SEQ ID NO: 356734 - DNA, 12 bp, Artificial Sequence
  Oligonucleotide primer for the detection of SNP TSC0050284
gagaaagtgaag

SEQ ID NO: 356735 - DNA, 12 bp, Artificial Sequence
  Oligonucleotide primer for the detection of SNP TSC0050288
atttaaatcctt

SEQ ID NO: 356736 - DNA, 12 bp, Artificial Sequence
  Oligonucleotide primer for the detection of SNP TSC0006976
cacacaccacac

SEQ ID NO: 356737 - DNA, 12 bp, Artificial Sequence
  Oligonucleotide primer for the detection of SNP TSC0006210
aataaagataaa

SEQ ID NO: 356738 - DNA, 12 bp, Artificial Sequence
  Oligonucleotide primer for the detection of SNP TSC0050290
ctaaaactacaa

SEQ ID NO: 356739 - DNA, 12 bp, Artificial Sequence
  Oligonucleotide primer for the detection of SNP TSC0050290
tggtggtatgta

SEQ ID NO: 356740 - DNA, 12 bp, Artificial Sequence
  Oligonucleotide primer for the detection of SNP TSC0050290
taataacataca

SEQ ID NO: 356741 - DNA, 12 bp, Artificial Sequence
  Oligonucleotide primer for the detection of SNP TSC0050291
taacctaacaat

SEQ ID NO: 356742 - DNA, 12 bp, Artificial Sequence
  Oligonucleotide primer for the detection of SNP TSC0050292
ccaaccttctac

SEQ ID NO: 356743 - DNA, 12 bp, Artificial Sequence
  Oligonucleotide primer for the detection of SNP TSC0050292
ttggaagtgtta

SEQ ID NO: 356744 - DNA, 12 bp, Artificial Sequence
  Oligonucleotide primer for the detection of SNP TSC0050293
catacatttcaa

SEQ ID NO: 356745 - DNA, 12 bp, Artificial Sequence
  Oligonucleotide primer for the detection of SNP TSC0050293
aagtaagtgagt

SEQ ID NO: 356746 - DNA, 12 bp, Artificial Sequence
  Oligonucleotide primer for the detection of SNP TSC0050293
aaacaaataaat

SEQ ID NO: 356747 - DNA, 12 bp, Artificial Sequence
  Oligonucleotide primer for the detection of SNP TSC0050295
atctaatcaaaa

SEQ ID NO: 356748 - DNA, 12 bp, Artificial Sequence
  Oligonucleotide primer for the detection of SNP TSC0050295
attagtaaattt

SEQ ID NO: 356749 - DNA, 12 bp, Artificial Sequence
  Oligonucleotide primer for the detection of SNP TSC0050295
atcaacaaacct

SEQ ID NO: 356750 - DNA, 12 bp, Artificial Sequence
  Oligonucleotide primer for the detection of SNP TSC0050295
atttaattagaa

SEQ ID NO: 356751 - DNA, 12 bp, Artificial Sequence
  Oligonucleotide primer for the detection of SNP TSC0050299
acttaaaatctt

SEQ ID NO: 356752 - DNA, 12 bp, Artificial Sequence
  Oligonucleotide primer for the detection of SNP TSC0050299
tttaagaggaaa

SEQ ID NO: 356753 - DNA, 12 bp, Artificial Sequence
  Oligonucleotide primer for the detection of SNP TSC0006146
taaaaagggtat

SEQ ID NO: 356754 - DNA, 12 bp, Artificial Sequence
  Oligonucleotide primer for the detection of SNP TSC0006146
aggtagtgtgtt

SEQ ID NO: 356755 - DNA, 12 bp, Artificial Sequence
  Oligonucleotide primer for the detection of SNP TSC0006146
aggtagtgtgtc

SEQ ID NO: 356756 - DNA, 12 bp, Artificial Sequence
  Oligonucleotide primer for the detection of SNP TSC0010661
aaccaatctctc

SEQ ID NO: 356757 - DNA, 12 bp, Artificial Sequence
  Oligonucleotide primer for the detection of SNP TSC0010661
taatgtattgtg

SEQ ID NO: 356758 - DNA, 12 bp, Artificial Sequence
  Oligonucleotide primer for the detection of SNP TSC0010662
gataataaaaat

SEQ ID NO: 356759 - DNA, 12 bp, Artificial Sequence
  Oligonucleotide primer for the detection of SNP TSC0010662
aataatagaata

SEQ ID NO: 356760 - DNA, 12 bp, Artificial Sequence
  Oligonucleotide primer for the detection of SNP TSC0050304
tgaagtagaaaa

SEQ ID NO: 356761 - DNA, 12 bp, Artificial Sequence
  Oligonucleotide primer for the detection of SNP TSC0050305
taaaatacgtac

SEQ ID NO: 356762 - DNA, 12 bp, Artificial Sequence
  Oligonucleotide primer for the detection of SNP TSC0050305
ttattattgtat

SEQ ID NO: 356763 - DNA, 12 bp, Artificial Sequence
  Oligonucleotide primer for the detection of SNP TSC0050305
ttattatcgtat

SEQ ID NO: 356764 - DNA, 12 bp, Artificial Sequence
  Oligonucleotide primer for the detection of SNP TSC0050305
ttatcaccacat

SEQ ID NO: 356765 - DNA, 12 bp, Artificial Sequence
  Oligonucleotide primer for the detection of SNP TSC0050305
ttatcaccgcat

SEQ ID NO: 356766 - DNA, 12 bp, Artificial Sequence
  Oligonucleotide primer for the detection of SNP TSC0050305
tagaatatgtgt

SEQ ID NO: 356767 - DNA, 12 bp, Artificial Sequence
  Oligonucleotide primer for the detection of SNP TSC0050305
tagaatacgtgt

SEQ ID NO: 356768 - DNA, 12 bp, Artificial Sequence
  Oligonucleotide primer for the detection of SNP TSC0050307
atacatctataa

SEQ ID NO: 356769 - DNA, 12 bp, Artificial Sequence
  Oligonucleotide primer for the detection of SNP TSC0050307
tattagatataa

SEQ ID NO: 356770 - DNA, 12 bp, Artificial Sequence
  Oligonucleotide primer for the detection of SNP TSC0050308
catttatatttc

SEQ ID NO: 356771 - DNA, 12 bp, Artificial Sequence
  Oligonucleotide primer for the detection of SNP TSC0050308
acacttcacaaa

SEQ ID NO: 356772 - DNA, 12 bp, Artificial Sequence
  Oligonucleotide primer for the detection of SNP TSC0050308
tatttgtatttt

SEQ ID NO: 356773 - DNA, 12 bp, Artificial Sequence
  Oligonucleotide primer for the detection of SNP TSC0050308
tatttgtatttc

SEQ ID NO: 356774 - DNA, 12 bp, Artificial Sequence
  Oligonucleotide primer for the detection of SNP TSC0007348
aaaaattactaa

SEQ ID NO: 356775 - DNA, 12 bp, Artificial Sequence
  Oligonucleotide primer for the detection of SNP TSC0007348
tttgtgattttt

SEQ ID NO: 356776 - DNA, 12 bp, Artificial Sequence
  Oligonucleotide primer for the detection of SNP TSC0007348
tctataactttt

SEQ ID NO: 356777 - DNA, 12 bp, Artificial Sequence
  Oligonucleotide primer for the detection of SNP TSC0007348
gaagattgttgg

SEQ ID NO: 356778 - DNA, 12 bp, Artificial Sequence
  Oligonucleotide primer for the detection of SNP TSC0050309
tgaattgtgatt

SEQ ID NO: 356779 - DNA, 12 bp, Artificial Sequence
  Oligonucleotide primer for the detection of SNP TSC0050310
tttcaaaaatat

SEQ ID NO: 356780 - DNA, 12 bp, Artificial Sequence
  Oligonucleotide primer for the detection of SNP TSC0050311
aatatatattta

SEQ ID NO: 356781 - DNA, 12 bp, Artificial Sequence
  Oligonucleotide primer for the detection of SNP TSC0050311
gatgtatttgga

SEQ ID NO: 356782 - DNA, 12 bp, Artificial Sequence
  Oligonucleotide primer for the detection of SNP TSC0050311
aggtgtatattt

SEQ ID NO: 356783 - DNA, 12 bp, Artificial Sequence
  Oligonucleotide primer for the detection of SNP TSC0050312
tctaccctcttt

SEQ ID NO: 356784 - DNA, 12 bp, Artificial Sequence
  Oligonucleotide primer for the detection of SNP TSC0050312
aataagaataaa

SEQ ID NO: 356785 - DNA, 12 bp, Artificial Sequence
  Oligonucleotide primer for the detection of SNP TSC0050313
aaaatcttcaaa

SEQ ID NO: 356786 - DNA, 12 bp, Artificial Sequence
  Oligonucleotide primer for the detection of SNP TSC0050313
atccccaaaaaa

SEQ ID NO: 356787 - DNA, 12 bp, Artificial Sequence
  Oligonucleotide primer for the detection of SNP TSC0050313
gaggtttttagg

SEQ ID NO: 356788 - DNA, 12 bp, Artificial Sequence
  Oligonucleotide primer for the detection of SNP TSC0050314
tcattataactt

SEQ ID NO: 356789 - DNA, 12 bp, Artificial Sequence
  Oligonucleotide primer for the detection of SNP TSC0050315
ttgggttatggg

SEQ ID NO: 356790 - DNA, 12 bp, Artificial Sequence
  Oligonucleotide primer for the detection of SNP TSC0050315
tgaaagatttat

SEQ ID NO: 356791 - DNA, 12 bp, Artificial Sequence
  Oligonucleotide primer for the detection of SNP TSC0050316
gtgtgaaatagt

SEQ ID NO: 356792 - DNA, 12 bp, Artificial Sequence
  Oligonucleotide primer for the detection of SNP TSC0050316
aagggtaagtag

SEQ ID NO: 356793 - DNA, 12 bp, Artificial Sequence
  Oligonucleotide primer for the detection of SNP TSC0010261
tttatgtagata

SEQ ID NO: 356794 - DNA, 12 bp, Artificial Sequence
  Oligonucleotide primer for the detection of SNP TSC0010262
catttatcttcc

SEQ ID NO: 356795 - DNA, 12 bp, Artificial Sequence
  Oligonucleotide primer for the detection of SNP TSC0010262
cgtttatcttcc

SEQ ID NO: 356796 - DNA, 12 bp, Artificial Sequence
  Oligonucleotide primer for the detection of SNP TSC0010262
ttttatatattg

SEQ ID NO: 356797 - DNA, 12 bp, Artificial Sequence
  Oligonucleotide primer for the detection of SNP TSC0050317
tatcataaactc

SEQ ID NO: 356798 - DNA, 12 bp, Artificial Sequence
  Oligonucleotide primer for the detection of SNP TSC0050317
tgaatattggtg

SEQ ID NO: 356799 - DNA, 12 bp, Artificial Sequence
  Oligonucleotide primer for the detection of SNP TSC0050317
tgaatatcggtg

SEQ ID NO: 356800 - DNA, 12 bp, Artificial Sequence
  Oligonucleotide primer for the detection of SNP TSC0050317
taaacaccaata

SEQ ID NO: 356801 - DNA, 12 bp, Artificial Sequence
  Oligonucleotide primer for the detection of SNP TSC0050317
taaacaccgata

SEQ ID NO: 356802 - DNA, 12 bp, Artificial Sequence
  Oligonucleotide primer for the detection of SNP TSC0050317
tattatgggttt

SEQ ID NO: 356803 - DNA, 12 bp, Artificial Sequence
  Oligonucleotide primer for the detection of SNP TSC0050317
tattatgggttc

SEQ ID NO: 356804 - DNA, 12 bp, Artificial Sequence
  Oligonucleotide primer for the detection of SNP TSC0000659
acacttaccaat

SEQ ID NO: 356805 - DNA, 12 bp, Artificial Sequence
  Oligonucleotide primer for the detection of SNP TSC0000659
ggtttattttga

SEQ ID NO: 356806 - DNA, 12 bp, Artificial Sequence
  Oligonucleotide primer for the detection of SNP TSC0000660
atatttaactca

SEQ ID NO: 356807 - DNA, 12 bp, Artificial Sequence
  Oligonucleotide primer for the detection of SNP TSC0000660
tggtgttaggga

SEQ ID NO: 356808 - DNA, 12 bp, Artificial Sequence
  Oligonucleotide primer for the detection of SNP TSC0050318
ttctaattctat

SEQ ID NO: 356809 - DNA, 12 bp, Artificial Sequence
  Oligonucleotide primer for the detection of SNP TSC0050318
aatttaaagaag

SEQ ID NO: 356810 - DNA, 12 bp, Artificial Sequence
  Oligonucleotide primer for the detection of SNP TSC0000845
agagttggtaaa

SEQ ID NO: 356811 - DNA, 12 bp, Artificial Sequence
  Oligonucleotide primer for the detection of SNP TSC0050320
acaaattaaaca

SEQ ID NO: 356812 - DNA, 12 bp, Artificial Sequence
  Oligonucleotide primer for the detection of SNP TSC0050320
tattataagagg

SEQ ID NO: 356813 - DNA, 12 bp, Artificial Sequence
  Oligonucleotide primer for the detection of SNP TSC0050321
tctattatatct

SEQ ID NO: 356814 - DNA, 12 bp, Artificial Sequence
  Oligonucleotide primer for the detection of SNP TSC0050321
attttttagaga

SEQ ID NO: 356815 - DNA, 12 bp, Artificial Sequence
  Oligonucleotide primer for the detection of SNP TSC0050322
acctaatactat

SEQ ID NO: 356816 - DNA, 12 bp, Artificial Sequence
  Oligonucleotide primer for the detection of SNP TSC0050322
agtgttagtaat

SEQ ID NO: 356817 - DNA, 12 bp, Artificial Sequence
  Oligonucleotide primer for the detection of SNP TSC0050322
aaatatcaacaa

SEQ ID NO: 356818 - DNA, 12 bp, Artificial Sequence
  Oligonucleotide primer for the detection of SNP TSC0050322
gtttgatgttgt

SEQ ID NO: 356819 - DNA, 12 bp, Artificial Sequence
  Oligonucleotide primer for the detection of SNP TSC0050323
caacactatact

SEQ ID NO: 356820 - DNA, 12 bp, Artificial Sequence
  Oligonucleotide primer for the detection of SNP TSC0050323
atatatagagta

SEQ ID NO: 356821 - DNA, 12 bp, Artificial Sequence
  Oligonucleotide primer for the detection of SNP TSC0050324
tactattattat

SEQ ID NO: 356822 - DNA, 12 bp, Artificial Sequence
  Oligonucleotide primer for the detection of SNP TSC0050324
gtgtaaaatggg

SEQ ID NO: 356823 - DNA, 12 bp, Artificial Sequence
  Oligonucleotide primer for the detection of SNP TSC0050324
gtgtaaaacggg

SEQ ID NO: 356824 - DNA, 12 bp, Artificial Sequence
  Oligonucleotide primer for the detection of SNP TSC0050325
ttaataattaac

SEQ ID NO: 356825 - DNA, 12 bp, Artificial Sequence
  Oligonucleotide primer for the detection of SNP TSC0050328
catcctcaaaac

SEQ ID NO: 356826 - DNA, 12 bp, Artificial Sequence
  Oligonucleotide primer for the detection of SNP TSC0050328
ggttgaatagta

SEQ ID NO: 356827 - DNA, 12 bp, Artificial Sequence
  Oligonucleotide primer for the detection of SNP TSC0050329
ttccataacaaa

SEQ ID NO: 356828 - DNA, 12 bp, Artificial Sequence
  Oligonucleotide primer for the detection of SNP TSC0050330
ctaatcaaaatt

SEQ ID NO: 356829 - DNA, 12 bp, Artificial Sequence
  Oligonucleotide primer for the detection of SNP TSC0050330
attattaattgg

SEQ ID NO: 356830 - DNA, 12 bp, Artificial Sequence
  Oligonucleotide primer for the detection of SNP TSC0050331
atataataaatc

SEQ ID NO: 356831 - DNA, 12 bp, Artificial Sequence
  Oligonucleotide primer for the detection of SNP TSC0050331
tggtttagttag

SEQ ID NO: 356832 - DNA, 12 bp, Artificial Sequence
  Oligonucleotide primer for the detection of SNP TSC0050331
taatccaattaa

SEQ ID NO: 356833 - DNA, 12 bp, Artificial Sequence
  Oligonucleotide primer for the detection of SNP TSC0050331
atatgatagatt

SEQ ID NO: 356834 - DNA, 12 bp, Artificial Sequence
  Oligonucleotide primer for the detection of SNP TSC0001315
atatgtttaaat

SEQ ID NO: 356835 - DNA, 12 bp, Artificial Sequence
  Oligonucleotide primer for the detection of SNP TSC0001315
tatatctaaaca

SEQ ID NO: 356836 - DNA, 12 bp, Artificial Sequence
  Oligonucleotide primer for the detection of SNP TSC0001315
atgtgtatttat

SEQ ID NO: 356837 - DNA, 12 bp, Artificial Sequence
  Oligonucleotide primer for the detection of SNP TSC0050333
ttgtatggttat

SEQ ID NO: 356838 - DNA, 12 bp, Artificial Sequence
  Oligonucleotide primer for the detection of SNP TSC0050333
tcgtatggttat

SEQ ID NO: 356839 - DNA, 12 bp, Artificial Sequence
  Oligonucleotide primer for the detection of SNP TSC0050333
ccatataatcat

SEQ ID NO: 356840 - DNA, 12 bp, Artificial Sequence
  Oligonucleotide primer for the detection of SNP TSC0050333
ccgtataatcat

SEQ ID NO: 356841 - DNA, 12 bp, Artificial Sequence
  Oligonucleotide primer for the detection of SNP TSC0050333
gtattggggatg

SEQ ID NO: 356842 - DNA, 12 bp, Artificial Sequence
  Oligonucleotide primer for the detection of SNP TSC0050338
agagggaataga

SEQ ID NO: 356843 - DNA, 12 bp, Artificial Sequence
  Oligonucleotide primer for the detection of SNP TSC0050338
ggttatgaaaat

SEQ ID NO: 356844 - DNA, 12 bp, Artificial Sequence
  Oligonucleotide primer for the detection of SNP TSC0050341
cccttcccactt

SEQ ID NO: 356845 - DNA, 12 bp, Artificial Sequence
  Oligonucleotide primer for the detection of SNP TSC0050341
gaaagagagagt

SEQ ID NO: 356846 - DNA, 12 bp, Artificial Sequence
  Oligonucleotide primer for the detection of SNP TSC0050342
attaaattccta

SEQ ID NO: 356847 - DNA, 12 bp, Artificial Sequence
  Oligonucleotide primer for the detection of SNP TSC0050342
ggaagtattatg

SEQ ID NO: 356848 - DNA, 12 bp, Artificial Sequence
  Oligonucleotide primer for the detection of SNP TSC0050342
aaaatattataa

SEQ ID NO: 356849 - DNA, 12 bp, Artificial Sequence
  Oligonucleotide primer for the detection of SNP TSC0050343
attccccatatt

SEQ ID NO: 356850 - DNA, 12 bp, Artificial Sequence
  Oligonucleotide primer for the detection of SNP TSC0050343
tttctactacca

SEQ ID NO: 356851 - DNA, 12 bp, Artificial Sequence
  Oligonucleotide primer for the detection of SNP TSC0050344
ttaaactttcca

SEQ ID NO: 356852 - DNA, 12 bp, Artificial Sequence
  Oligonucleotide primer for the detection of SNP TSC0050344
aagaaggtagat

SEQ ID NO: 356853 - DNA, 12 bp, Artificial Sequence
  Oligonucleotide primer for the detection of SNP TSC0050345
ccataaatcaaa

SEQ ID NO: 356854 - DNA, 12 bp, Artificial Sequence
  Oligonucleotide primer for the detection of SNP TSC0050345
tgtttgttatta

SEQ ID NO: 356855 - DNA, 12 bp, Artificial Sequence
  Oligonucleotide primer for the detection of SNP TSC0050345
tgttcgttatta

SEQ ID NO: 356856 - DNA, 12 bp, Artificial Sequence
  Oligonucleotide primer for the detection of SNP TSC0050345
tatccactatta

SEQ ID NO: 356857 - DNA, 12 bp, Artificial Sequence
  Oligonucleotide primer for the detection of SNP TSC0050345
tatccgctatta

SEQ ID NO: 356858 - DNA, 12 bp, Artificial Sequence
  Oligonucleotide primer for the detection of SNP TSC0050345
ttatggattaag

SEQ ID NO: 356859 - DNA, 12 bp, Artificial Sequence
  Oligonucleotide primer for the detection of SNP TSC0008170
acaacaaactcc

SEQ ID NO: 356860 - DNA, 12 bp, Artificial Sequence
  Oligonucleotide primer for the detection of SNP TSC0008170
gtaatagatttt

SEQ ID NO: 356861 - DNA, 12 bp, Artificial Sequence
  Oligonucleotide primer for the detection of SNP TSC0050348
taacttcataaa

SEQ ID NO: 356862 - DNA, 12 bp, Artificial Sequence
  Oligonucleotide primer for the detection of SNP TSC0050348
aggagttttggg

SEQ ID NO: 356863 - DNA, 12 bp, Artificial Sequence
  Oligonukleotid-Primer
atggttttatag

SEQ ID NO: 356864 - DNA, 12 bp, Artificial Sequence
  Oligonucleotide primer for the detection of SNP TSC0050349
actaaattactc

SEQ ID NO: 356865 - DNA, 12 bp, Artificial Sequence
  Oligonucleotide primer for the detection of SNP TSC0050349
aattaggattta

SEQ ID NO: 356866 - DNA, 12 bp, Artificial Sequence
  Oligonucleotide primer for the detection of SNP TSC0050350
ctttccaccttt

SEQ ID NO: 356867 - DNA, 12 bp, Artificial Sequence
  Oligonukleotid-Primer
gagtttatagag

SEQ ID NO: 356868 - DNA, 12 bp, Artificial Sequence
  Oligonucleotide primer for the detection of SNP TSC0050351
acctcaccacaa

SEQ ID NO: 356869 - DNA, 12 bp, Artificial Sequence
  Oligonucleotide primer for the detection of SNP TSC0050351
gcctcaccacaa

SEQ ID NO: 356870 - DNA, 12 bp, Artificial Sequence
  Oligonucleotide primer for the detection of SNP TSC0050351
ggtttgagttta

SEQ ID NO: 356871 - DNA, 12 bp, Artificial Sequence
  Oligonukleotid-Primer
ataaccaaacta

SEQ ID NO: 356872 - DNA, 12 bp, Artificial Sequence
  Oligonucleotide primer for the detection of SNP TSC0050352
gttattatgtgt

SEQ ID NO: 356873 - DNA, 12 bp, Artificial Sequence
  Oligonucleotide primer for the detection of SNP TSC0050352
gttattatgcgt

SEQ ID NO: 356874 - DNA, 12 bp, Artificial Sequence
  Oligonucleotide primer for the detection of SNP TSC0050352
caccatacataa

SEQ ID NO: 356875 - DNA, 12 bp, Artificial Sequence
  Oligonucleotide primer for the detection of SNP TSC0050352
caccatacgtaa

SEQ ID NO: 356876 - DNA, 12 bp, Artificial Sequence
  Oligonucleotide primer for the detection of SNP TSC0050352
ggttaggttgtt

SEQ ID NO: 356877 - DNA, 12 bp, Artificial Sequence
  Oligonucleotide primer for the detection of SNP TSC0050352
ggttaggttgtc

SEQ ID NO: 356878 - DNA, 12 bp, Artificial Sequence
  Oligonucleotide primer for the detection of SNP TSC0050355
cctctaccacat

SEQ ID NO: 356879 - DNA, 12 bp, Artificial Sequence
  Oligonucleotide primer for the detection of SNP TSC0050355
aacccctctccc

SEQ ID NO: 356880 - DNA, 12 bp, Artificial Sequence
  Oligonucleotide primer for the detection of SNP TSC0050355
ttttattatatc

SEQ ID NO: 356881 - DNA, 12 bp, Artificial Sequence
  Oligonucleotide primer for the detection of SNP TSC0050356
tataaaaaccct

SEQ ID NO: 356882 - DNA, 12 bp, Artificial Sequence
  Oligonucleotide primer for the detection of SNP TSC0050357
ccatcataaatt

SEQ ID NO: 356883 - DNA, 12 bp, Artificial Sequence
  Oligonucleotide primer for the detection of SNP TSC0050357
gggataatagaa

SEQ ID NO: 356884 - DNA, 12 bp, Artificial Sequence
  Oligonucleotide primer for the detection of SNP TSC0050358
taaaataagtag

SEQ ID NO: 356885 - DNA, 12 bp, Artificial Sequence
  Oligonucleotide primer for the detection of SNP TSC0050359
ctacataaaaca

SEQ ID NO: 356886 - DNA, 12 bp, Artificial Sequence
  Oligonucleotide primer for the detection of SNP TSC0050359
gtataataaaat

SEQ ID NO: 356887 - DNA, 12 bp, Artificial Sequence
  Oligonucleotide primer for the detection of SNP TSC0050361
agtttggttgga

SEQ ID NO: 356888 - DNA, 12 bp, Artificial Sequence
  Oligonucleotide primer for the detection of SNP TSC0050361
acttaactaaaa

SEQ ID NO: 356889 - DNA, 12 bp, Artificial Sequence
  Oligonucleotide primer for the detection of SNP TSC0050361
tataaaaaatat

SEQ ID NO: 356890 - DNA, 12 bp, Artificial Sequence
  Oligonucleotide primer for the detection of SNP TSC0050362
aatctttcatcc

SEQ ID NO: 356891 - DNA, 12 bp, Artificial Sequence
  Oligonucleotide primer for the detection of SNP TSC0050362
agagatagattg

SEQ ID NO: 356892 - DNA, 12 bp, Artificial Sequence
  Oligonucleotide primer for the detection of SNP TSC0050363
gtatgtaagttt

SEQ ID NO: 356893 - DNA, 12 bp, Artificial Sequence
  Oligonucleotide primer for the detection of SNP TSC0050363
gtacgtaagttt

SEQ ID NO: 356894 - DNA, 12 bp, Artificial Sequence
  Oligonucleotide primer for the detection of SNP TSC0050363
acacataaattc

SEQ ID NO: 356895 - DNA, 12 bp, Artificial Sequence
  Oligonucleotide primer for the detection of SNP TSC0050363
acacgtaaattc

SEQ ID NO: 356896 - DNA, 12 bp, Artificial Sequence
  Oligonucleotide primer for the detection of SNP TSC0050363
agtgatgtttgt

SEQ ID NO: 356897 - DNA, 12 bp, Artificial Sequence
  Oligonucleotide primer for the detection of SNP TSC0050364
aaaatcctactt

SEQ ID NO: 356898 - DNA, 12 bp, Artificial Sequence
  Oligonucleotide primer for the detection of SNP TSC0050364
aagaaagtaaaa

SEQ ID NO: 356899 - DNA, 12 bp, Artificial Sequence
  Oligonucleotide primer for the detection of SNP TSC0050365
agtattttgaga

SEQ ID NO: 356900 - DNA, 12 bp, Artificial Sequence
  Oligonucleotide primer for the detection of SNP TSC0050366
tagatgaaatga

SEQ ID NO: 356901 - DNA, 12 bp, Artificial Sequence
  Oligonucleotide primer for the detection of SNP TSC0050366
tagatgaaacga

SEQ ID NO: 356902 - DNA, 12 bp, Artificial Sequence
  Oligonucleotide primer for the detection of SNP TSC0050367
ccacttcccata

SEQ ID NO: 356903 - DNA, 12 bp, Artificial Sequence
  Oligonucleotide primer for the detection of SNP TSC0050367
ttttattgaggt

SEQ ID NO: 356904 - DNA, 12 bp, Artificial Sequence
  Oligonucleotide primer for the detection of SNP TSC0050367
ttttatcgaggt

SEQ ID NO: 356905 - DNA, 12 bp, Artificial Sequence
  Oligonucleotide primer for the detection of SNP TSC0050367
ctaccgaaataa

SEQ ID NO: 356906 - DNA, 12 bp, Artificial Sequence
  Oligonucleotide primer for the detection of SNP TSC0050369
aatcaatcttaa

SEQ ID NO: 356907 - DNA, 12 bp, Artificial Sequence
  Oligonucleotide primer for the detection of SNP TSC0050369
ctttctatttta

SEQ ID NO: 356908 - DNA, 12 bp, Artificial Sequence
  Oligonucleotide primer for the detection of SNP TSC0050369
agttaattttaa

SEQ ID NO: 356909 - DNA, 12 bp, Artificial Sequence
  Oligonucleotide primer for the detection of SNP TSC0050370
ttacttttacac

SEQ ID NO: 356910 - DNA, 12 bp, Artificial Sequence
  Oligonucleotide primer for the detection of SNP TSC0050370
tatatttatagg

SEQ ID NO: 356911 - DNA, 12 bp, Artificial Sequence
  Oligonucleotide primer for the detection of SNP TSC0050372
ataaaatcacac

SEQ ID NO: 356912 - DNA, 12 bp, Artificial Sequence
  Oligonucleotide primer for the detection of SNP TSC0050372
ggaattattttt

SEQ ID NO: 356913 - DNA, 12 bp, Artificial Sequence
  Oligonucleotide primer for the detection of SNP TSC0050372
aaaaccattttt

SEQ ID NO: 356914 - DNA, 12 bp, Artificial Sequence
  Oligonucleotide primer for the detection of SNP TSC0050372
tgaagttatatt

SEQ ID NO: 356915 - DNA, 12 bp, Artificial Sequence
  Oligonucleotide primer for the detection of SNP TSC0050373
ttaatttatctt

SEQ ID NO: 356916 - DNA, 12 bp, Artificial Sequence
  Oligonucleotide primer for the detection of SNP TSC0050373
tgaaggagaaaa

SEQ ID NO: 356917 - DNA, 12 bp, Artificial Sequence
  Oligonucleotide primer for the detection of SNP TSC0050374
aaaccttatact

SEQ ID NO: 356918 - DNA, 12 bp, Artificial Sequence
  Oligonucleotide primer for the detection of SNP TSC0050374
tttttaaatatt

SEQ ID NO: 356919 - DNA, 12 bp, Artificial Sequence
  Oligonucleotide primer for the detection of SNP TSC0050374
tctttaaatatc

SEQ ID NO: 356920 - DNA, 12 bp, Artificial Sequence
  Oligonucleotide primer for the detection of SNP TSC0050374
aattttatattc

SEQ ID NO: 356921 - DNA, 12 bp, Artificial Sequence
  Oligonucleotide primer for the detection of SNP TSC0050375
ccctcttccacc

SEQ ID NO: 356922 - DNA, 12 bp, Artificial Sequence
  Oligonucleotide primer for the detection of SNP TSC0050375
aattgaatatga

SEQ ID NO: 356923 - DNA, 12 bp, Artificial Sequence
  Oligonucleotide primer for the detection of SNP TSC0050377
ttacttaaattt

SEQ ID NO: 356924 - DNA, 12 bp, Artificial Sequence
  Oligonucleotide primer for the detection of SNP TSC0050377
aatgttgttgtg

SEQ ID NO: 356925 - DNA, 12 bp, Artificial Sequence
  Oligonucleotide primer for the detection of SNP TSC0050377
aacgttgttgtg

SEQ ID NO: 356926 - DNA, 12 bp, Artificial Sequence
  Oligonucleotide primer for the detection of SNP TSC0050377
aacattattata

SEQ ID NO: 356927 - DNA, 12 bp, Artificial Sequence
  Oligonucleotide primer for the detection of SNP TSC0050377
aacgttattata

SEQ ID NO: 356928 - DNA, 12 bp, Artificial Sequence
  Oligonucleotide primer for the detection of SNP TSC0050379
tattttaccttt

SEQ ID NO: 356929 - DNA, 12 bp, Artificial Sequence
  Oligonucleotide primer for the detection of SNP TSC0050379
ttaattatgtat

SEQ ID NO: 356930 - DNA, 12 bp, Artificial Sequence
  Oligonucleotide primer for the detection of SNP TSC0050379
ttaattatatat

SEQ ID NO: 356931 - DNA, 12 bp, Artificial Sequence
  Oligonucleotide primer for the detection of SNP TSC0050381
ccatctcaaaat

SEQ ID NO: 356932 - DNA, 12 bp, Artificial Sequence
  Oligonucleotide primer for the detection of SNP TSC0050381
taaataagaaag

SEQ ID NO: 356933 - DNA, 12 bp, Artificial Sequence
  Oligonucleotide primer for the detection of SNP TSC0050382
aaccaccatcta

SEQ ID NO: 356934 - DNA, 12 bp, Artificial Sequence
  Oligonucleotide primer for the detection of SNP TSC0050382
aataagagaaat

SEQ ID NO: 356935 - DNA, 12 bp, Artificial Sequence
  Oligonucleotide primer for the detection of SNP TSC0050383
aaaacatacatt

SEQ ID NO: 356936 - DNA, 12 bp, Artificial Sequence
  Oligonucleotide primer for the detection of SNP TSC0050383
aaaacatacgtt

SEQ ID NO: 356937 - DNA, 12 bp, Artificial Sequence
  Oligonucleotide primer for the detection of SNP TSC0050383
cctccatcctta

SEQ ID NO: 356938 - DNA, 12 bp, Artificial Sequence
  Oligonucleotide primer for the detection of SNP TSC0050383
agggtatatgtt

SEQ ID NO: 356939 - DNA, 12 bp, Artificial Sequence
  Oligonucleotide primer for the detection of SNP TSC0050383
agggtatacgtt

SEQ ID NO: 356940 - DNA, 12 bp, Artificial Sequence
  Oligonucleotide primer for the detection of SNP TSC0050384
ccaactcaaaat

SEQ ID NO: 356941 - DNA, 12 bp, Artificial Sequence
  Oligonucleotide primer for the detection of SNP TSC0050384
gagtttaggata

SEQ ID NO: 356942 - DNA, 12 bp, Artificial Sequence
  Oligonucleotide primer for the detection of SNP TSC0050385
tactaacttatt

SEQ ID NO: 356943 - DNA, 12 bp, Artificial Sequence
  Oligonucleotide primer for the detection of SNP TSC0050385
gggagtttgttt

SEQ ID NO: 356944 - DNA, 12 bp, Artificial Sequence
  Oligonucleotide primer for the detection of SNP TSC0050385
tgttaatttatt

SEQ ID NO: 356945 - DNA, 12 bp, Artificial Sequence
  Oligonucleotide primer for the detection of SNP TSC0050387
gttttattaatt

SEQ ID NO: 356946 - DNA, 12 bp, Artificial Sequence
  Oligonucleotide primer for the detection of SNP TSC0050387
atattccattaa

SEQ ID NO: 356947 - DNA, 12 bp, Artificial Sequence
  Oligonucleotide primer for the detection of SNP TSC0050387
gatttggggatt

SEQ ID NO: 356948 - DNA, 12 bp, Artificial Sequence
  Oligonucleotide primer for the detection of SNP TSC0050388
cttccattccta

SEQ ID NO: 356949 - DNA, 12 bp, Artificial Sequence
  Oligonucleotide primer for the detection of SNP TSC0050388
aaaatggttgtt

SEQ ID NO: 356950 - DNA, 12 bp, Artificial Sequence
  Oligonucleotide primer for the detection of SNP TSC0050389
attttatcaata

SEQ ID NO: 356951 - DNA, 12 bp, Artificial Sequence
  Oligonucleotide primer for the detection of SNP TSC0050389
tccaaaaataaa

SEQ ID NO: 356952 - DNA, 12 bp, Artificial Sequence
  Oligonucleotide primer for the detection of SNP TSC0050390
ttttataattct

SEQ ID NO: 356953 - DNA, 12 bp, Artificial Sequence
  Oligonucleotide primer for the detection of SNP TSC0050390
atatttagtaat

SEQ ID NO: 356954 - DNA, 12 bp, Artificial Sequence
  Oligonucleotide primer for the detection of SNP TSC0050394
acattctactac

SEQ ID NO: 356955 - DNA, 12 bp, Artificial Sequence
  Oligonucleotide primer for the detection of SNP TSC0050395
ttcaaatatctc

SEQ ID NO: 356956 - DNA, 12 bp, Artificial Sequence
  Oligonucleotide primer for the detection of SNP TSC0050396
atattttggtgt

SEQ ID NO: 356957 - DNA, 12 bp, Artificial Sequence
  Oligonucleotide primer for the detection of SNP TSC0050396
acatcctaatat

SEQ ID NO: 356958 - DNA, 12 bp, Artificial Sequence
  Oligonucleotide primer for the detection of SNP TSC0050396
tgtgttgaaaaa

SEQ ID NO: 356959 - DNA, 12 bp, Artificial Sequence
  Oligonucleotide primer for the detection of SNP TSC0050397
taaaatttatca

SEQ ID NO: 356960 - DNA, 12 bp, Artificial Sequence
  Oligonucleotide primer for the detection of SNP TSC0050397
atggggtaatat

SEQ ID NO: 356961 - DNA, 12 bp, Artificial Sequence
  Oligonucleotide primer for the detection of SNP TSC0050397
atggggtaatac

SEQ ID NO: 356962 - DNA, 12 bp, Artificial Sequence
  Oligonucleotide primer for the detection of SNP TSC0050397
ataggatttgtt

SEQ ID NO: 356963 - DNA, 12 bp, Artificial Sequence
  Oligonucleotide primer for the detection of SNP TSC0050398
ctaatttccatt

SEQ ID NO: 356964 - DNA, 12 bp, Artificial Sequence
  Oligonucleotide primer for the detection of SNP TSC0050398
ggaagtgaaaga

SEQ ID NO: 356965 - DNA, 12 bp, Artificial Sequence
  Oligonucleotide primer for the detection of SNP TSC0050399
cccatttataat

SEQ ID NO: 356966 - DNA, 12 bp, Artificial Sequence
  Oligonucleotide primer for the detection of SNP TSC0050406
ttcaatctattc

SEQ ID NO: 356967 - DNA, 12 bp, Artificial Sequence
  Oligonucleotide primer for the detection of SNP TSC0050406
ggtttttatgtg

SEQ ID NO: 356968 - DNA, 12 bp, Artificial Sequence
  Oligonucleotide primer for the detection of SNP TSC0050406
aacttccatata

SEQ ID NO: 356969 - DNA, 12 bp, Artificial Sequence
  Oligonucleotide primer for the detection of SNP TSC0006551
tcactactctat

SEQ ID NO: 356970 - DNA, 12 bp, Artificial Sequence
  Oligonucleotide primer for the detection of SNP TSC0006551
tataagagtgga

SEQ ID NO: 356971 - DNA, 12 bp, Artificial Sequence
  Oligonucleotide primer for the detection of SNP TSC0050409
caaaccaatctt

SEQ ID NO: 356972 - DNA, 12 bp, Artificial Sequence
  Oligonucleotide primer for the detection of SNP TSC0050409
caaaccgatctt

SEQ ID NO: 356973 - DNA, 12 bp, Artificial Sequence
  Oligonucleotide primer for the detection of SNP TSC0050409
ttgaggttagga

SEQ ID NO: 356974 - DNA, 12 bp, Artificial Sequence
  Oligonucleotide primer for the detection of SNP TSC0050410
actacaacgccc

SEQ ID NO: 356975 - DNA, 12 bp, Artificial Sequence
  Oligonucleotide primer for the detection of SNP TSC0050412
aattcctctacc

SEQ ID NO: 356976 - DNA, 12 bp, Artificial Sequence
  Oligonucleotide primer for the detection of SNP TSC0050412
ttaagataaaag

SEQ ID NO: 356977 - DNA, 12 bp, Artificial Sequence
  Oligonucleotide primer for the detection of SNP TSC0008145
taaaataaccaa

SEQ ID NO: 356978 - DNA, 12 bp, Artificial Sequence
  Oligonucleotide primer for the detection of SNP TSC0008145
aaaaaaattctt

SEQ ID NO: 356979 - DNA, 12 bp, Artificial Sequence
  Oligonucleotide primer for the detection of SNP TSC0008145
taaaatagttag

SEQ ID NO: 356980 - DNA, 12 bp, Artificial Sequence
  Oligonucleotide primer for the detection of SNP TSC0008146
ctaaaacctccc

SEQ ID NO: 356981 - DNA, 12 bp, Artificial Sequence
  Oligonucleotide primer for the detection of SNP TSC0008146
agttttatatga

SEQ ID NO: 356982 - DNA, 12 bp, Artificial Sequence
  Oligonucleotide primer for the detection of SNP TSC0008147
aatttattacac

SEQ ID NO: 356983 - DNA, 12 bp, Artificial Sequence
  Oligonucleotide primer for the detection of SNP TSC0008147
aatttattacgc

SEQ ID NO: 356984 - DNA, 12 bp, Artificial Sequence
  Oligonucleotide primer for the detection of SNP TSC0008147
gtatatattggt

SEQ ID NO: 356985 - DNA, 12 bp, Artificial Sequence
  Oligonucleotide primer for the detection of SNP TSC0050418
cttttccactac

SEQ ID NO: 356986 - DNA, 12 bp, Artificial Sequence
  Oligonucleotide primer for the detection of SNP TSC0050418
tattattttgag

SEQ ID NO: 356987 - DNA, 12 bp, Artificial Sequence
  Oligonucleotide primer for the detection of SNP TSC0050418
tactattttaaa

SEQ ID NO: 356988 - DNA, 12 bp, Artificial Sequence
  Oligonucleotide primer for the detection of SNP TSC0050419
atttctaactta

SEQ ID NO: 356989 - DNA, 12 bp, Artificial Sequence
  Oligonucleotide primer for the detection of SNP TSC0050419
tattatattgat

SEQ ID NO: 356990 - DNA, 12 bp, Artificial Sequence
  Oligonucleotide primer for the detection of SNP TSC0050419
tattatattgac

SEQ ID NO: 356991 - DNA, 12 bp, Artificial Sequence
  Oligonucleotide primer for the detection of SNP TSC0050420
cctaaattttac

SEQ ID NO: 356992 - DNA, 12 bp, Artificial Sequence
  Oligonucleotide primer for the detection of SNP TSC0050421
acacctctttct

SEQ ID NO: 356993 - DNA, 12 bp, Artificial Sequence
  Oligonucleotide primer for the detection of SNP TSC0050421
gtttgtgatgaa

SEQ ID NO: 356994 - DNA, 12 bp, Artificial Sequence
  Oligonucleotide primer for the detection of SNP TSC0050423
aaaaactcccat

SEQ ID NO: 356995 - DNA, 12 bp, Artificial Sequence
  Oligonucleotide primer for the detection of SNP TSC0050423
tgttatgtagaa

SEQ ID NO: 356996 - DNA, 12 bp, Artificial Sequence
  Oligonucleotide primer for the detection of SNP TSC0050424
caacttccttta

SEQ ID NO: 356997 - DNA, 12 bp, Artificial Sequence
  Oligonucleotide primer for the detection of SNP TSC0050424
gttataagggat

SEQ ID NO: 356998 - DNA, 12 bp, Artificial Sequence
  Oligonucleotide primer for the detection of SNP TSC0050424
accacaaaaaat

SEQ ID NO: 356999 - DNA, 12 bp, Artificial Sequence
  Oligonucleotide primer for the detection of SNP TSC0050425
aaaacaatcaat

SEQ ID NO: 357000 - DNA, 12 bp, Artificial Sequence
  Oligonucleotide primer for the detection of SNP TSC0050425
cttctctcataa

SEQ ID NO: 357001 - DNA, 12 bp, Artificial Sequence
  Oligonucleotide primer for the detection of SNP TSC0050425
gagataattaat

SEQ ID NO: 357002 - DNA, 12 bp, Artificial Sequence
  Oligonucleotide primer for the detection of SNP TSC0050426
tcaataataaaa

SEQ ID NO: 357003 - DNA, 12 bp, Artificial Sequence
  Oligonucleotide primer for the detection of SNP TSC0050426
ttaacttctctc

SEQ ID NO: 357004 - DNA, 12 bp, Artificial Sequence
  Oligonucleotide primer for the detection of SNP TSC0050426
ttaatgatgaag

SEQ ID NO: 357005 - DNA, 12 bp, Artificial Sequence
  Oligonucleotide primer for the detection of SNP TSC0050427
tttatatttgtg

SEQ ID NO: 357006 - DNA, 12 bp, Artificial Sequence
  Oligonucleotide primer for the detection of SNP TSC0050428
tccactctcata

SEQ ID NO: 357007 - DNA, 12 bp, Artificial Sequence
  Oligonucleotide primer for the detection of SNP TSC0050429
cttttaaaaact

SEQ ID NO: 357008 - DNA, 12 bp, Artificial Sequence
  Oligonucleotide primer for the detection of SNP TSC0050430
ttcaacttaaaa

SEQ ID NO: 357009 - DNA, 12 bp, Artificial Sequence
  Oligonucleotide primer for the detection of SNP TSC0050430
tgtattgttttt

SEQ ID NO: 357010 - DNA, 12 bp, Artificial Sequence
  Oligonucleotide primer for the detection of SNP TSC0050430
cgtattgttttt

SEQ ID NO: 357011 - DNA, 12 bp, Artificial Sequence
  Oligonucleotide primer for the detection of SNP TSC0050430
cacattatttcc

SEQ ID NO: 357012 - DNA, 12 bp, Artificial Sequence
  Oligonucleotide primer for the detection of SNP TSC0050430
cgcattatttcc

SEQ ID NO: 357013 - DNA, 12 bp, Artificial Sequence
  Oligonucleotide primer for the detection of SNP TSC0050431
ttttagaagttg

SEQ ID NO: 357014 - DNA, 12 bp, Artificial Sequence
  Oligonucleotide primer for the detection of SNP TSC0050432
acttttatctcc

SEQ ID NO: 357015 - DNA, 12 bp, Artificial Sequence
  Oligonucleotide primer for the detection of SNP TSC0050432
ttgtttgtattg

SEQ ID NO: 357016 - DNA, 12 bp, Artificial Sequence
  Oligonucleotide primer for the detection of SNP TSC0050432
ttgttcgtattg

SEQ ID NO: 357017 - DNA, 12 bp, Artificial Sequence
  Oligonucleotide primer for the detection of SNP TSC0050433
tatctcacccta

SEQ ID NO: 357018 - DNA, 12 bp, Artificial Sequence
  Oligonucleotide primer for the detection of SNP TSC0050433
tttatttaggga

SEQ ID NO: 357019 - DNA, 12 bp, Artificial Sequence
  Oligonucleotide primer for the detection of SNP TSC0050435
gggtatggtggt

SEQ ID NO: 357020 - DNA, 12 bp, Artificial Sequence
  Oligonucleotide primer for the detection of SNP TSC0050437
ttcttttatatc

SEQ ID NO: 357021 - DNA, 12 bp, Artificial Sequence
  Oligonucleotide primer for the detection of SNP TSC0050437
ataatggaggaa

SEQ ID NO: 357022 - DNA, 12 bp, Artificial Sequence
  Oligonucleotide primer for the detection of SNP TSC0050438
cacctcccgaat

SEQ ID NO: 357023 - DNA, 12 bp, Artificial Sequence
  Oligonucleotide primer for the detection of SNP TSC0050438
cgcctcccgaat

SEQ ID NO: 357024 - DNA, 12 bp, Artificial Sequence
  Oligonucleotide primer for the detection of SNP TSC0050438
gagaatggtgtg

SEQ ID NO: 357025 - DNA, 12 bp, Artificial Sequence
  Oligonucleotide primer for the detection of SNP TSC0050438
gagaatggcgtg

SEQ ID NO: 357026 - DNA, 12 bp, Artificial Sequence
  Oligonucleotide primer for the detection of SNP TSC0050440
cccttaatattt

SEQ ID NO: 357027 - DNA, 12 bp, Artificial Sequence
  Oligonucleotide primer for the detection of SNP TSC0050440
gaaatttatgta

SEQ ID NO: 357028 - DNA, 12 bp, Artificial Sequence
  Oligonucleotide primer for the detection of SNP TSC0050441
taggtttggttg

SEQ ID NO: 357029 - DNA, 12 bp, Artificial Sequence
  Oligonucleotide primer for the detection of SNP TSC0050441
caaacctaacta

SEQ ID NO: 357030 - DNA, 12 bp, Artificial Sequence
  Oligonucleotide primer for the detection of SNP TSC0050441
taggtgaaaaag

SEQ ID NO: 357031 - DNA, 12 bp, Artificial Sequence
  Oligonucleotide primer for the detection of SNP TSC0050442
cctttttcacct

SEQ ID NO: 357032 - DNA, 12 bp, Artificial Sequence
  Oligonucleotide primer for the detection of SNP TSC0050442
gttttataatta

SEQ ID NO: 357033 - DNA, 12 bp, Artificial Sequence
  Oligonucleotide primer for the detection of SNP TSC0050443
aaactcctcaaa

SEQ ID NO: 357034 - DNA, 12 bp, Artificial Sequence
  Oligonucleotide primer for the detection of SNP TSC0050443
ccacattattac

SEQ ID NO: 357035 - DNA, 12 bp, Artificial Sequence
  Oligonucleotide primer for the detection of SNP TSC0050444
acactattcaca

SEQ ID NO: 357036 - DNA, 12 bp, Artificial Sequence
  Oligonucleotide primer for the detection of SNP TSC0050445
tttatataatac

SEQ ID NO: 357037 - DNA, 12 bp, Artificial Sequence
  Oligonucleotide primer for the detection of SNP TSC0050445
tgataaattgga

SEQ ID NO: 357038 - DNA, 12 bp, Artificial Sequence
  Oligonucleotide primer for the detection of SNP TSC0050446
atttacactatt

SEQ ID NO: 357039 - DNA, 12 bp, Artificial Sequence
  Oligonucleotide primer for the detection of SNP TSC0050446
gatggtttggag

SEQ ID NO: 357040 - DNA, 12 bp, Artificial Sequence
  Oligonucleotide primer for the detection of SNP TSC0050447
ttctaaccttta

SEQ ID NO: 357041 - DNA, 12 bp, Artificial Sequence
  Oligonucleotide primer for the detection of SNP TSC0050447
ggatatgaagaa

SEQ ID NO: 357042 - DNA, 12 bp, Artificial Sequence
  Oligonucleotide primer for the detection of SNP TSC0050448
attgtatagttt

SEQ ID NO: 357043 - DNA, 12 bp, Artificial Sequence
  Oligonucleotide primer for the detection of SNP TSC0050448
atcgtatagttt

SEQ ID NO: 357044 - DNA, 12 bp, Artificial Sequence
  Oligonucleotide primer for the detection of SNP TSC0050448
atcacataattt

SEQ ID NO: 357045 - DNA, 12 bp, Artificial Sequence
  Oligonucleotide primer for the detection of SNP TSC0050448
atcgcataattt

SEQ ID NO: 357046 - DNA, 12 bp, Artificial Sequence
  Oligonucleotide primer for the detection of SNP TSC0050448
agatgaaagtta

SEQ ID NO: 357047 - DNA, 12 bp, Artificial Sequence
  Oligonucleotide primer for the detection of SNP TSC0050449
tctaaacaatct

SEQ ID NO: 357048 - DNA, 12 bp, Artificial Sequence
  Oligonucleotide primer for the detection of SNP TSC0050449
taaagagattta

SEQ ID NO: 357049 - DNA, 12 bp, Artificial Sequence
  Oligonucleotide primer for the detection of SNP TSC0050450
atcattaaaaaa

SEQ ID NO: 357050 - DNA, 12 bp, Artificial Sequence
  Oligonucleotide primer for the detection of SNP TSC0050450
ttaataaatttt

SEQ ID NO: 357051 - DNA, 12 bp, Artificial Sequence
  Oligonucleotide primer for the detection of SNP TSC0050450
ttaataaatctt

SEQ ID NO: 357052 - DNA, 12 bp, Artificial Sequence
  Oligonucleotide primer for the detection of SNP TSC0050450
attattagaaag

SEQ ID NO: 357053 - DNA, 12 bp, Artificial Sequence
  Oligonucleotide primer for the detection of SNP TSC0050453
caaaatataaac

SEQ ID NO: 357054 - DNA, 12 bp, Artificial Sequence
  Oligonucleotide primer for the detection of SNP TSC0050454
attggatttttg

SEQ ID NO: 357055 - DNA, 12 bp, Artificial Sequence
  Oligonucleotide primer for the detection of SNP TSC0050456
cattacaaccaa

SEQ ID NO: 357056 - DNA, 12 bp, Artificial Sequence
  Oligonucleotide primer for the detection of SNP TSC0050456
ctataaacataa

SEQ ID NO: 357057 - DNA, 12 bp, Artificial Sequence
  Oligonucleotide primer for the detection of SNP TSC0050456
gtattataatta

SEQ ID NO: 357058 - DNA, 12 bp, Artificial Sequence
  Oligonucleotide primer for the detection of SNP TSC0050462
caaaaccataaa

SEQ ID NO: 357059 - DNA, 12 bp, Artificial Sequence
  Oligonucleotide primer for the detection of SNP TSC0050462
caaaaccgtaaa

SEQ ID NO: 357060 - DNA, 12 bp, Artificial Sequence
  Oligonucleotide primer for the detection of SNP TSC0050462
gaataatggttt

SEQ ID NO: 357061 - DNA, 12 bp, Artificial Sequence
  Oligonucleotide primer for the detection of SNP TSC0050462
gaataatggttc

SEQ ID NO: 357062 - DNA, 12 bp, Artificial Sequence
  Oligonucleotide primer for the detection of SNP TSC0050462
aaataataactc

SEQ ID NO: 357063 - DNA, 12 bp, Artificial Sequence
  Oligonucleotide primer for the detection of SNP TSC0050462
tagaattgtgga

SEQ ID NO: 357064 - DNA, 12 bp, Artificial Sequence
  Oligonucleotide primer for the detection of SNP TSC0050462
tagaatcgtgga

SEQ ID NO: 357065 - DNA, 12 bp, Artificial Sequence
  Oligonucleotide primer for the detection of SNP TSC0050464
atagagatattg

SEQ ID NO: 357066 - DNA, 12 bp, Artificial Sequence
  Oligonucleotide primer for the detection of SNP TSC0050465
aacaaaattaaa

SEQ ID NO: 357067 - DNA, 12 bp, Artificial Sequence
  Oligonucleotide primer for the detection of SNP TSC0050465
cttttcttattc

SEQ ID NO: 357068 - DNA, 12 bp, Artificial Sequence
  Oligonucleotide primer for the detection of SNP TSC0050466
taaccttctttt

SEQ ID NO: 357069 - DNA, 12 bp, Artificial Sequence
  Oligonucleotide primer for the detection of SNP TSC0050466
tagagagaataa

SEQ ID NO: 357070 - DNA, 12 bp, Artificial Sequence
  Oligonucleotide primer for the detection of SNP TSC0050467
taaacccttatc

SEQ ID NO: 357071 - DNA, 12 bp, Artificial Sequence
  Oligonucleotide primer for the detection of SNP TSC0050467
gaaagtttagga

SEQ ID NO: 357072 - DNA, 12 bp, Artificial Sequence
  Oligonucleotide primer for the detection of SNP TSC0007802
ttaatttttcta

SEQ ID NO: 357073 - DNA, 12 bp, Artificial Sequence
  Oligonucleotide primer for the detection of SNP TSC0007802
ttaattatgtgt

SEQ ID NO: 357074 - DNA, 12 bp, Artificial Sequence
  Oligonucleotide primer for the detection of SNP TSC0007802
ttaattatgtgc

SEQ ID NO: 357075 - DNA, 12 bp, Artificial Sequence
  Oligonucleotide primer for the detection of SNP TSC0007802
cctaattatata

SEQ ID NO: 357076 - DNA, 12 bp, Artificial Sequence
  Oligonucleotide primer for the detection of SNP TSC0050471
taaataataatt

SEQ ID NO: 357077 - DNA, 12 bp, Artificial Sequence
  Oligonucleotide primer for the detection of SNP TSC0004570
acaacataacaa

SEQ ID NO: 357078 - DNA, 12 bp, Artificial Sequence
  Oligonucleotide primer for the detection of SNP TSC0004570
ctctcataaaac

SEQ ID NO: 357079 - DNA, 12 bp, Artificial Sequence
  Oligonucleotide primer for the detection of SNP TSC0004570
atagtatagtag

SEQ ID NO: 357080 - DNA, 12 bp, Artificial Sequence
  Oligonucleotide primer for the detection of SNP TSC0004571
aaaatataaggt

SEQ ID NO: 357081 - DNA, 12 bp, Artificial Sequence
  Oligonucleotide primer for the detection of SNP TSC0004572
tacttattctat

SEQ ID NO: 357082 - DNA, 12 bp, Artificial Sequence
  Oligonucleotide primer for the detection of SNP TSC0004749
attaatttttag

SEQ ID NO: 357083 - DNA, 12 bp, Artificial Sequence
  Oligonucleotide primer for the detection of SNP TSC0004749
attaatttctaa

SEQ ID NO: 357084 - DNA, 12 bp, Artificial Sequence
  Oligonucleotide primer for the detection of SNP TSC0004749
ttgggaagtggg

SEQ ID NO: 357085 - DNA, 12 bp, Artificial Sequence
  Oligonucleotide primer for the detection of SNP TSC0004706
ctaattttaact

SEQ ID NO: 357086 - DNA, 12 bp, Artificial Sequence
  Oligonucleotide primer for the detection of SNP TSC0004706
agaggatagaga

SEQ ID NO: 357087 - DNA, 12 bp, Artificial Sequence
  Oligonucleotide primer for the detection of SNP TSC0004706
ttggttttgatt

SEQ ID NO: 357088 - DNA, 12 bp, Artificial Sequence
  Oligonucleotide primer for the detection of SNP TSC0050473
aaattggttggt

SEQ ID NO: 357089 - DNA, 12 bp, Artificial Sequence
  Oligonucleotide primer for the detection of SNP TSC0050473
aaattggtcggt

SEQ ID NO: 357090 - DNA, 12 bp, Artificial Sequence
  Oligonucleotide primer for the detection of SNP TSC0050473
aaactaaccaat

SEQ ID NO: 357091 - DNA, 12 bp, Artificial Sequence
  Oligonucleotide primer for the detection of SNP TSC0050473
aaactaaccgat

SEQ ID NO: 357092 - DNA, 12 bp, Artificial Sequence
  Oligonucleotide primer for the detection of SNP TSC0008378
ttaatctatatc

SEQ ID NO: 357093 - DNA, 12 bp, Artificial Sequence
  Oligonucleotide primer for the detection of SNP TSC0050474
taaccaaatcct

SEQ ID NO: 357094 - DNA, 12 bp, Artificial Sequence
  Oligonucleotide primer for the detection of SNP TSC0050474
agggaggatgaa

SEQ ID NO: 357095 - DNA, 12 bp, Artificial Sequence
  Oligonucleotide primer for the detection of SNP TSC0050475
ctaaccaatcac

SEQ ID NO: 357096 - DNA, 12 bp, Artificial Sequence
  Oligonucleotide primer for the detection of SNP TSC0050475
ctaaccaatcgc

SEQ ID NO: 357097 - DNA, 12 bp, Artificial Sequence
  Oligonucleotide primer for the detection of SNP TSC0050475
ttttagagaaaa

SEQ ID NO: 357098 - DNA, 12 bp, Artificial Sequence
  Oligonucleotide primer for the detection of SNP TSC0008264
tctaaaacaata

SEQ ID NO: 357099 - DNA, 12 bp, Artificial Sequence
  Oligonucleotide primer for the detection of SNP TSC0008264
tggaaaatattt

SEQ ID NO: 357100 - DNA, 12 bp, Artificial Sequence
  Oligonucleotide primer for the detection of SNP TSC0008265
caatttcattcc

SEQ ID NO: 357101 - DNA, 12 bp, Artificial Sequence
  Oligonucleotide primer for the detection of SNP TSC0008265
taattgttgggg

SEQ ID NO: 357102 - DNA, 12 bp, Artificial Sequence
  Oligonucleotide primer for the detection of SNP TSC0050476
acactacattca

SEQ ID NO: 357103 - DNA, 12 bp, Artificial Sequence
  Oligonucleotide primer for the detection of SNP TSC0050476
ttttgttatgta

SEQ ID NO: 357104 - DNA, 12 bp, Artificial Sequence
  Oligonukleotid-Primer
gtattgtattta

SEQ ID NO: 357105 - DNA, 12 bp, Artificial Sequence
  Oligonucleotide primer for the detection of SNP TSC0050477
ttaatagaatga

SEQ ID NO: 357106 - DNA, 12 bp, Artificial Sequence
  Oligonucleotide primer for the detection of SNP TSC0050477
ttaatagaacga

SEQ ID NO: 357107 - DNA, 12 bp, Artificial Sequence
  Oligonucleotide primer for the detection of SNP TSC0050478
accttccaaaat

SEQ ID NO: 357108 - DNA, 12 bp, Artificial Sequence
  Oligonukleotid-Primer
gtattgattggg

SEQ ID NO: 357109 - DNA, 12 bp, Artificial Sequence
  Oligonucleotide primer for the detection of SNP TSC0008206
tttaaatagtgg

SEQ ID NO: 357110 - DNA, 12 bp, Artificial Sequence
  Oligonucleotide primer for the detection of SNP TSC0008206
ctcaaacaataa

SEQ ID NO: 357111 - DNA, 12 bp, Artificial Sequence
  Oligonucleotide primer for the detection of SNP TSC0008206
gaaattagagga

SEQ ID NO: 357112 - DNA, 12 bp, Artificial Sequence
  Oligonucleotide primer for the detection of SNP TSC0050480
tactaaataata

SEQ ID NO: 357113 - DNA, 12 bp, Artificial Sequence
  Oligonucleotide primer for the detection of SNP TSC0050480
ttatataatgga

SEQ ID NO: 357114 - DNA, 12 bp, Artificial Sequence
  Oligonucleotide primer for the detection of SNP TSC0050480
ccatacaataaa

SEQ ID NO: 357115 - DNA, 12 bp, Artificial Sequence
  Oligonucleotide primer for the detection of SNP TSC0050480
ttgttaaataat

SEQ ID NO: 357116 - DNA, 12 bp, Artificial Sequence
  Oligonukleotid-Primer
aacatattaaaa

SEQ ID NO: 357117 - DNA, 12 bp, Artificial Sequence
  Oligonucleotide primer for the detection of SNP TSC0007438
ttgttataggaa

SEQ ID NO: 357118 - DNA, 12 bp, Artificial Sequence
  Oligonucleotide primer for the detection of SNP TSC0007438
ttatcacaaaaa

SEQ ID NO: 357119 - DNA, 12 bp, Artificial Sequence
  Oligonucleotide primer for the detection of SNP TSC0007438
aggtatattgag

SEQ ID NO: 357120 - DNA, 12 bp, Artificial Sequence
  Oligonucleotide primer for the detection of SNP TSC0007439
tcactaaatacc

SEQ ID NO: 357121 - DNA, 12 bp, Artificial Sequence
  Oligonucleotide primer for the detection of SNP TSC0007439
agtttgtttgta

SEQ ID NO: 357122 - DNA, 12 bp, Artificial Sequence
  Oligonucleotide primer for the detection of SNP TSC0007440
actaacccacca

SEQ ID NO: 357123 - DNA, 12 bp, Artificial Sequence
  Oligonucleotide primer for the detection of SNP TSC0007440
ttaaattttttt

SEQ ID NO: 357124 - DNA, 12 bp, Artificial Sequence
  Oligonucleotide primer for the detection of SNP TSC0007440
caaattcttcca

SEQ ID NO: 357125 - DNA, 12 bp, Artificial Sequence
  Oligonucleotide primer for the detection of SNP TSC0007440
gttagtttatta

SEQ ID NO: 357126 - DNA, 12 bp, Artificial Sequence
  Oligonucleotide primer for the detection of SNP TSC0050481
atcttcaaaata

SEQ ID NO: 357127 - DNA, 12 bp, Artificial Sequence
  Oligonucleotide primer for the detection of SNP TSC0050481
agaaataagttt

SEQ ID NO: 357128 - DNA, 12 bp, Artificial Sequence
  Oligonucleotide primer for the detection of SNP TSC0050481
agaaataagttc

SEQ ID NO: 357129 - DNA, 12 bp, Artificial Sequence
  Oligonucleotide primer for the detection of SNP TSC0050481
gtttttaaaata

SEQ ID NO: 357130 - DNA, 12 bp, Artificial Sequence
  Oligonucleotide primer for the detection of SNP TSC0050482
catcaaaatctc

SEQ ID NO: 357131 - DNA, 12 bp, Artificial Sequence
  Oligonucleotide primer for the detection of SNP TSC0050482
attttgttatga

SEQ ID NO: 357132 - DNA, 12 bp, Artificial Sequence
  Oligonucleotide primer for the detection of SNP TSC0004922
tgtgttaatgta

SEQ ID NO: 357133 - DNA, 12 bp, Artificial Sequence
  Oligonucleotide primer for the detection of SNP TSC0004923
aaaatttcttta

SEQ ID NO: 357134 - DNA, 12 bp, Artificial Sequence
  Oligonucleotide primer for the detection of SNP TSC0004923
gattagtttggt

SEQ ID NO: 357135 - DNA, 12 bp, Artificial Sequence
  Oligonucleotide primer for the detection of SNP TSC0004923
ggggtttttttg

SEQ ID NO: 357136 - DNA, 12 bp, Artificial Sequence
  Oligonucleotide primer for the detection of SNP TSC0050483
cttcacaactca

SEQ ID NO: 357137 - DNA, 12 bp, Artificial Sequence
  Oligonucleotide primer for the detection of SNP TSC0050483
tatgagttgttt

SEQ ID NO: 357138 - DNA, 12 bp, Artificial Sequence
  Oligonucleotide primer for the detection of SNP TSC0050483
cataaactatcc

SEQ ID NO: 357139 - DNA, 12 bp, Artificial Sequence
  Oligonucleotide primer for the detection of SNP TSC0050484
atacttatctca

SEQ ID NO: 357140 - DNA, 12 bp, Artificial Sequence
  Oligonucleotide primer for the detection of SNP TSC0050484
gtgtttataaaa

SEQ ID NO: 357141 - DNA, 12 bp, Artificial Sequence
  Oligonucleotide primer for the detection of SNP TSC0050485
cacattcaacct

SEQ ID NO: 357142 - DNA, 12 bp, Artificial Sequence
  Oligonucleotide primer for the detection of SNP TSC0050485
gataagataggt

SEQ ID NO: 357143 - DNA, 12 bp, Artificial Sequence
  Oligonucleotide primer for the detection of SNP TSC0050485
aataaaataaac

SEQ ID NO: 357144 - DNA, 12 bp, Artificial Sequence
  Oligonucleotide primer for the detection of SNP TSC0050485
tatatttagttt

SEQ ID NO: 357145 - DNA, 12 bp, Artificial Sequence
  Oligonucleotide primer for the detection of SNP TSC0050490
tactacaataac

SEQ ID NO: 357146 - DNA, 12 bp, Artificial Sequence
  Oligonucleotide primer for the detection of SNP TSC0050490
ttattgttaaga

SEQ ID NO: 357147 - DNA, 12 bp, Artificial Sequence
  Oligonucleotide primer for the detection of SNP TSC0001320
atgtttagatag

SEQ ID NO: 357148 - DNA, 12 bp, Artificial Sequence
  Oligonucleotide primer for the detection of SNP TSC0050491
ttagaatttttc

SEQ ID NO: 357149 - DNA, 12 bp, Artificial Sequence
  Oligonucleotide primer for the detection of SNP TSC0050491
ccaaaatttctc

SEQ ID NO: 357150 - DNA, 12 bp, Artificial Sequence
  Oligonucleotide primer for the detection of SNP TSC0050491
attaaaaagaat

SEQ ID NO: 357151 - DNA, 12 bp, Artificial Sequence
  Oligonucleotide primer for the detection of SNP TSC0050492
ggaaaaagttaa

SEQ ID NO: 357152 - DNA, 12 bp, Artificial Sequence
  Oligonucleotide primer for the detection of SNP TSC0050493
gatttaggagaa

SEQ ID NO: 357153 - DNA, 12 bp, Artificial Sequence
  Oligonucleotide primer for the detection of SNP TSC0050494
tatttgttaagg

SEQ ID NO: 357154 - DNA, 12 bp, Artificial Sequence
  Oligonucleotide primer for the detection of SNP TSC0050495
aatatttaaatt

SEQ ID NO: 357155 - DNA, 12 bp, Artificial Sequence
  Oligonucleotide primer for the detection of SNP TSC0050495
tttgagttattg

SEQ ID NO: 357156 - DNA, 12 bp, Artificial Sequence
  Oligonucleotide primer for the detection of SNP TSC0050496
cattatatatat

SEQ ID NO: 357157 - DNA, 12 bp, Artificial Sequence
  Oligonucleotide primer for the detection of SNP TSC0050496
gaaaaattgtgg

SEQ ID NO: 357158 - DNA, 12 bp, Artificial Sequence
  Oligonucleotide primer for the detection of SNP TSC0050496
aaaaaattataa

SEQ ID NO: 357159 - DNA, 12 bp, Artificial Sequence
  Oligonucleotide primer for the detection of SNP TSC0050496
tattgtatatat

SEQ ID NO: 357160 - DNA, 12 bp, Artificial Sequence
  Oligonucleotide primer for the detection of SNP TSC0050497
atattgtatata

SEQ ID NO: 357161 - DNA, 12 bp, Artificial Sequence
  Oligonucleotide primer for the detection of SNP TSC0050498
ccaaaaaaacac

SEQ ID NO: 357162 - DNA, 12 bp, Artificial Sequence
  Oligonucleotide primer for the detection of SNP TSC0050498
tgatgaatttta

SEQ ID NO: 357163 - DNA, 12 bp, Artificial Sequence
  Oligonucleotide primer for the detection of SNP TSC0050499
attcaaaatatc

SEQ ID NO: 357164 - DNA, 12 bp, Artificial Sequence
  Oligonucleotide primer for the detection of SNP TSC0050499
tattttgtaaaa

SEQ ID NO: 357165 - DNA, 12 bp, Artificial Sequence
  Oligonucleotide primer for the detection of SNP TSC0050499
gtttagaatgtt

SEQ ID NO: 357166 - DNA, 12 bp, Artificial Sequence
  Oligonucleotide primer for the detection of SNP TSC0050499
gtttagaatgtc

SEQ ID NO: 357167 - DNA, 12 bp, Artificial Sequence
  Oligonucleotide primer for the detection of SNP TSC0050500
aaaattcatttc

SEQ ID NO: 357168 - DNA, 12 bp, Artificial Sequence
  Oligonucleotide primer for the detection of SNP TSC0050500
tggggtggaaga

SEQ ID NO: 357169 - DNA, 12 bp, Artificial Sequence
  Oligonucleotide primer for the detection of SNP TSC0050501
aaactcccattt

SEQ ID NO: 357170 - DNA, 12 bp, Artificial Sequence
  Oligonucleotide primer for the detection of SNP TSC0050501
aaactcccgttt

SEQ ID NO: 357171 - DNA, 12 bp, Artificial Sequence
  Oligonucleotide primer for the detection of SNP TSC0050501
aagtttagaatg

SEQ ID NO: 357172 - DNA, 12 bp, Artificial Sequence
  Oligonucleotide primer for the detection of SNP TSC0050502
accaatcaaaaa

SEQ ID NO: 357173 - DNA, 12 bp, Artificial Sequence
  Oligonucleotide primer for the detection of SNP TSC0050502
ggattttaaagg

SEQ ID NO: 357174 - DNA, 12 bp, Artificial Sequence
  Oligonucleotide primer for the detection of SNP TSC0050502
agttagttagga

SEQ ID NO: 357175 - DNA, 12 bp, Artificial Sequence
  Oligonucleotide primer for the detection of SNP TSC0007142
cattacttcttc

SEQ ID NO: 357176 - DNA, 12 bp, Artificial Sequence
  Oligonucleotide primer for the detection of SNP TSC0007142
ttgtgtaaattg

SEQ ID NO: 357177 - DNA, 12 bp, Artificial Sequence
  Oligonucleotide primer for the detection of SNP TSC0050503
aaaactatatcc

SEQ ID NO: 357178 - DNA, 12 bp, Artificial Sequence
  Oligonucleotide primer for the detection of SNP TSC0050503
tattaagggtgg

SEQ ID NO: 357179 - DNA, 12 bp, Artificial Sequence
  Oligonucleotide primer for the detection of SNP TSC0050504
ttacatacataa

SEQ ID NO: 357180 - DNA, 12 bp, Artificial Sequence
  Oligonucleotide primer for the detection of SNP TSC0050504
tgtgggttgatt

SEQ ID NO: 357181 - DNA, 12 bp, Artificial Sequence
  Oligonucleotide primer for the detection of SNP TSC0050504
cgtgggttgatt

SEQ ID NO: 357182 - DNA, 12 bp, Artificial Sequence
  Oligonucleotide primer for the detection of SNP TSC0050504
cataaattaatc

SEQ ID NO: 357183 - DNA, 12 bp, Artificial Sequence
  Oligonucleotide primer for the detection of SNP TSC0050504
cgtaaattaatc

SEQ ID NO: 357184 - DNA, 12 bp, Artificial Sequence
  Oligonucleotide primer for the detection of SNP TSC0050504
ttatatgtataa

SEQ ID NO: 357185 - DNA, 12 bp, Artificial Sequence
  Oligonucleotide primer for the detection of SNP TSC0050505
tatattttacat

SEQ ID NO: 357186 - DNA, 12 bp, Artificial Sequence
  Oligonucleotide primer for the detection of SNP TSC0050505
ttgattatgtta

SEQ ID NO: 357187 - DNA, 12 bp, Artificial Sequence
  Oligonucleotide primer for the detection of SNP TSC0050506
cacaaacaccac

SEQ ID NO: 357188 - DNA, 12 bp, Artificial Sequence
  Oligonucleotide primer for the detection of SNP TSC0050506
cgcaaacaccac

SEQ ID NO: 357189 - DNA, 12 bp, Artificial Sequence
  Oligonucleotide primer for the detection of SNP TSC0050506
tttattctatta

SEQ ID NO: 357190 - DNA, 12 bp, Artificial Sequence
  Oligonucleotide primer for the detection of SNP TSC0050506
tgtaggtattat

SEQ ID NO: 357191 - DNA, 12 bp, Artificial Sequence
  Oligonucleotide primer for the detection of SNP TSC0050506
cgtaggtattat

SEQ ID NO: 357192 - DNA, 12 bp, Artificial Sequence
  Oligonucleotide primer for the detection of SNP TSC0050507
tccataactata

SEQ ID NO: 357193 - DNA, 12 bp, Artificial Sequence
  Oligonucleotide primer for the detection of SNP TSC0050507
ggggaattggtt

SEQ ID NO: 357194 - DNA, 12 bp, Artificial Sequence
  Oligonucleotide primer for the detection of SNP TSC0050508
tacacaaacacc

SEQ ID NO: 357195 - DNA, 12 bp, Artificial Sequence
  Oligonucleotide primer for the detection of SNP TSC0050508
tacgcaaacacc

SEQ ID NO: 357196 - DNA, 12 bp, Artificial Sequence
  Oligonucleotide primer for the detection of SNP TSC0006293
ttgtttatatga

SEQ ID NO: 357197 - DNA, 12 bp, Artificial Sequence
  Oligonucleotide primer for the detection of SNP TSC0006293
tcgtttatatga

SEQ ID NO: 357198 - DNA, 12 bp, Artificial Sequence
  Oligonucleotide primer for the detection of SNP TSC0050509
ttagttttttag

SEQ ID NO: 357199 - DNA, 12 bp, Artificial Sequence
  Oligonucleotide primer for the detection of SNP TSC0050509
ctaacttctcaa

SEQ ID NO: 357200 - DNA, 12 bp, Artificial Sequence
  Oligonucleotide primer for the detection of SNP TSC0050510
ggaaaaatattt

SEQ ID NO: 357201 - DNA, 12 bp, Artificial Sequence
  Oligonucleotide primer for the detection of SNP TSC0050510
aaatatttgggt

SEQ ID NO: 357202 - DNA, 12 bp, Artificial Sequence
  Oligonucleotide primer for the detection of SNP TSC0050511
taattcactaaa

SEQ ID NO: 357203 - DNA, 12 bp, Artificial Sequence
  Oligonucleotide primer for the detection of SNP TSC0050511
tatacccaaata

SEQ ID NO: 357204 - DNA, 12 bp, Artificial Sequence
  Oligonucleotide primer for the detection of SNP TSC0050512
tcataattcact

SEQ ID NO: 357205 - DNA, 12 bp, Artificial Sequence
  Oligonucleotide primer for the detection of SNP TSC0050512
gtgttttaaatt

SEQ ID NO: 357206 - DNA, 12 bp, Artificial Sequence
  Oligonucleotide primer for the detection of SNP TSC0050512
ttatagtttatt

SEQ ID NO: 357207 - DNA, 12 bp, Artificial Sequence
  Oligonucleotide primer for the detection of SNP TSC0050513
acttcataacct

SEQ ID NO: 357208 - DNA, 12 bp, Artificial Sequence
  Oligonucleotide primer for the detection of SNP TSC0050514
cctaactatatc

SEQ ID NO: 357209 - DNA, 12 bp, Artificial Sequence
  Oligonucleotide primer for the detection of SNP TSC0050514
tcctcaacctta

SEQ ID NO: 357210 - DNA, 12 bp, Artificial Sequence
  Oligonucleotide primer for the detection of SNP TSC0050514
ttgattgtgttt

SEQ ID NO: 357211 - DNA, 12 bp, Artificial Sequence
  Oligonucleotide primer for the detection of SNP TSC0001226
ctcaacctatac

SEQ ID NO: 357212 - DNA, 12 bp, Artificial Sequence
  Oligonucleotide primer for the detection of SNP TSC0001226
tttcattatact

SEQ ID NO: 357213 - DNA, 12 bp, Artificial Sequence
  Oligonucleotide primer for the detection of SNP TSC0001226
tttagtttgtat

SEQ ID NO: 357214 - DNA, 12 bp, Artificial Sequence
  Oligonucleotide primer for the detection of SNP TSC0001659
tattttatcaaa

SEQ ID NO: 357215 - DNA, 12 bp, Artificial Sequence
  Oligonucleotide primer for the detection of SNP TSC0001659
atcacctttcca

SEQ ID NO: 357216 - DNA, 12 bp, Artificial Sequence
  Oligonucleotide primer for the detection of SNP TSC0001659
tgttttgttagg

SEQ ID NO: 357217 - DNA, 12 bp, Artificial Sequence
  Oligonucleotide primer for the detection of SNP TSC0001660
aaaaaataactc

SEQ ID NO: 357218 - DNA, 12 bp, Artificial Sequence
  Oligonucleotide primer for the detection of SNP TSC0001660
ttatttaaaggt

SEQ ID NO: 357219 - DNA, 12 bp, Artificial Sequence
  Oligonucleotide primer for the detection of SNP TSC0001660
tcacccaaaaat

SEQ ID NO: 357220 - DNA, 12 bp, Artificial Sequence
  Oligonucleotide primer for the detection of SNP TSC0001660
gaaaggtgattt

SEQ ID NO: 357221 - DNA, 12 bp, Artificial Sequence
  Oligonucleotide primer for the detection of SNP TSC0050515
ttttatacccta

SEQ ID NO: 357222 - DNA, 12 bp, Artificial Sequence
  Oligonucleotide primer for the detection of SNP TSC0050515
tataaagaaatt

SEQ ID NO: 357223 - DNA, 12 bp, Artificial Sequence
  Oligonucleotide primer for the detection of SNP TSC0050516
tgtgtagtttta

SEQ ID NO: 357224 - DNA, 12 bp, Artificial Sequence
  Oligonucleotide primer for the detection of SNP TSC0050519
tataattttacc

SEQ ID NO: 357225 - DNA, 12 bp, Artificial Sequence
  Oligonucleotide primer for the detection of SNP TSC0050519
agaatgaaatat

SEQ ID NO: 357226 - DNA, 12 bp, Artificial Sequence
  Oligonucleotide primer for the detection of SNP TSC0050522
atcccaaacttt

SEQ ID NO: 357227 - DNA, 12 bp, Artificial Sequence
  Oligonucleotide primer for the detection of SNP TSC0050522
agtgagatgagg

SEQ ID NO: 357228 - DNA, 12 bp, Artificial Sequence
  Oligonucleotide primer for the detection of SNP TSC0050523
aaatcttctact

SEQ ID NO: 357229 - DNA, 12 bp, Artificial Sequence
  Oligonucleotide primer for the detection of SNP TSC0050523
ataaattaagtt

SEQ ID NO: 357230 - DNA, 12 bp, Artificial Sequence
  Oligonucleotide primer for the detection of SNP TSC0050524
acaaaccacaaa

SEQ ID NO: 357231 - DNA, 12 bp, Artificial Sequence
  Oligonucleotide primer for the detection of SNP TSC0050524
acaaaccacgaa

SEQ ID NO: 357232 - DNA, 12 bp, Artificial Sequence
  Oligonucleotide primer for the detection of SNP TSC0050524
atgaaattgtat

SEQ ID NO: 357233 - DNA, 12 bp, Artificial Sequence
  Oligonucleotide primer for the detection of SNP TSC0050524
atgaaatcgtat

SEQ ID NO: 357234 - DNA, 12 bp, Artificial Sequence
  Oligonucleotide primer for the detection of SNP TSC0050524
ataaaatcatac

SEQ ID NO: 357235 - DNA, 12 bp, Artificial Sequence
  Oligonucleotide primer for the detection of SNP TSC0050524
ataaaatcgtac

SEQ ID NO: 357236 - DNA, 12 bp, Artificial Sequence
  Oligonucleotide primer for the detection of SNP TSC0050524
ataggttatgag

SEQ ID NO: 357237 - DNA, 12 bp, Artificial Sequence
  Oligonucleotide primer for the detection of SNP TSC0050524
ataggttacgag

SEQ ID NO: 357238 - DNA, 12 bp, Artificial Sequence
  Oligonucleotide primer for the detection of SNP TSC0050525
aaaccaaaccac

SEQ ID NO: 357239 - DNA, 12 bp, Artificial Sequence
  Oligonucleotide primer for the detection of SNP TSC0000284
gttgggagtggg

SEQ ID NO: 357240 - DNA, 12 bp, Artificial Sequence
  Oligonucleotide primer for the detection of SNP TSC0000284
aaatataaatgt

SEQ ID NO: 357241 - DNA, 12 bp, Artificial Sequence
  Oligonucleotide primer for the detection of SNP TSC0050529
gtggggatatgg

SEQ ID NO: 357242 - DNA, 12 bp, Artificial Sequence
  Oligonucleotide primer for the detection of SNP TSC0050529
ataaaaacataa

SEQ ID NO: 357243 - DNA, 12 bp, Artificial Sequence
  Oligonucleotide primer for the detection of SNP TSC0050529
tatgataaggtt

SEQ ID NO: 357244 - DNA, 12 bp, Artificial Sequence
  Oligonucleotide primer for the detection of SNP TSC0050530
ctaaatctctct

SEQ ID NO: 357245 - DNA, 12 bp, Artificial Sequence
  Oligonucleotide primer for the detection of SNP TSC0050530
ttgagattttta

SEQ ID NO: 357246 - DNA, 12 bp, Artificial Sequence
  Oligonucleotide primer for the detection of SNP TSC0050531
gattttatcgta

SEQ ID NO: 357247 - DNA, 12 bp, Artificial Sequence
  Oligonucleotide primer for the detection of SNP TSC0050531
aatcttaccaca

SEQ ID NO: 357248 - DNA, 12 bp, Artificial Sequence
  Oligonucleotide primer for the detection of SNP TSC0050531
aatcttaccgca

SEQ ID NO: 357249 - DNA, 12 bp, Artificial Sequence
  Oligonucleotide primer for the detection of SNP TSC0050534
ccaataaaaaac

SEQ ID NO: 357250 - DNA, 12 bp, Artificial Sequence
  Oligonucleotide primer for the detection of SNP TSC0050535
acttccccactt

SEQ ID NO: 357251 - DNA, 12 bp, Artificial Sequence
  Oligonucleotide primer for the detection of SNP TSC0050535
taggaaaggata

SEQ ID NO: 357252 - DNA, 12 bp, Artificial Sequence
  Oligonucleotide primer for the detection of SNP TSC0000667
acaacttatatt

SEQ ID NO: 357253 - DNA, 12 bp, Artificial Sequence
  Oligonucleotide primer for the detection of SNP TSC0000667
ttttcctaatca

SEQ ID NO: 357254 - DNA, 12 bp, Artificial Sequence
  Oligonucleotide primer for the detection of SNP TSC0000667
atagtttgtatt

SEQ ID NO: 357255 - DNA, 12 bp, Artificial Sequence
  Oligonucleotide primer for the detection of SNP TSC0009772
tttaaactacaa

SEQ ID NO: 357256 - DNA, 12 bp, Artificial Sequence
  Oligonucleotide primer for the detection of SNP TSC0009772
caacatcacccc

SEQ ID NO: 357257 - DNA, 12 bp, Artificial Sequence
  Oligonucleotide primer for the detection of SNP TSC0009772
ttgagttgtagc

SEQ ID NO: 357258 - DNA, 12 bp, Artificial Sequence
  Oligonucleotide primer for the detection of SNP TSC0000107
tcatatctctat

SEQ ID NO: 357259 - DNA, 12 bp, Artificial Sequence
  Oligonucleotide primer for the detection of SNP TSC0000107
ttttaagaagag

SEQ ID NO: 357260 - DNA, 12 bp, Artificial Sequence
  Oligonucleotide primer for the detection of SNP TSC0000108
cttcacaatatt

SEQ ID NO: 357261 - DNA, 12 bp, Artificial Sequence
  Oligonucleotide primer for the detection of SNP TSC0050537
atattttctttt

SEQ ID NO: 357262 - DNA, 12 bp, Artificial Sequence
  Oligonucleotide primer for the detection of SNP TSC0050537
attttttagtta

SEQ ID NO: 357263 - DNA, 12 bp, Artificial Sequence
  Oligonucleotide primer for the detection of SNP TSC0050537
attttccaatta

SEQ ID NO: 357264 - DNA, 12 bp, Artificial Sequence
  Oligonucleotide primer for the detection of SNP TSC0050540
acctaaactaat

SEQ ID NO: 357265 - DNA, 12 bp, Artificial Sequence
  Oligonucleotide primer for the detection of SNP TSC0050540
ataattattgta

SEQ ID NO: 357266 - DNA, 12 bp, Artificial Sequence
  Oligonucleotide primer for the detection of SNP TSC0000682
acctttatttca

SEQ ID NO: 357267 - DNA, 12 bp, Artificial Sequence
  Oligonucleotide primer for the detection of SNP TSC0000682
aatttattttgt

SEQ ID NO: 357268 - DNA, 12 bp, Artificial Sequence
  Oligonucleotide primer for the detection of SNP TSC0000682
aaacttatttta

SEQ ID NO: 357269 - DNA, 12 bp, Artificial Sequence
  Oligonucleotide primer for the detection of SNP TSC0000683
aaccctaaacta

SEQ ID NO: 357270 - DNA, 12 bp, Artificial Sequence
  Oligonucleotide primer for the detection of SNP TSC0000683
attattttttaa

SEQ ID NO: 357271 - DNA, 12 bp, Artificial Sequence
  Oligonucleotide primer for the detection of SNP TSC0000683
ttttaaattgtt

SEQ ID NO: 357272 - DNA, 12 bp, Artificial Sequence
  Oligonucleotide primer for the detection of SNP TSC0000684
ctttttttaatt

SEQ ID NO: 357273 - DNA, 12 bp, Artificial Sequence
  Oligonucleotide primer for the detection of SNP TSC0000685
atatacgaaaaa

SEQ ID NO: 357274 - DNA, 12 bp, Artificial Sequence
  Oligonucleotide primer for the detection of SNP TSC0000685
tggttataaaat

SEQ ID NO: 357275 - DNA, 12 bp, Artificial Sequence
  Oligonucleotide primer for the detection of SNP TSC0000685
aactacaaaaca

SEQ ID NO: 357276 - DNA, 12 bp, Artificial Sequence
  Oligonucleotide primer for the detection of SNP TSC0000685
tgtatatgaaaa

SEQ ID NO: 357277 - DNA, 12 bp, Artificial Sequence
  Oligonucleotide primer for the detection of SNP TSC0000685
tgtatacgaaaa

SEQ ID NO: 357278 - DNA, 12 bp, Artificial Sequence
  Oligonucleotide primer for the detection of SNP TSC0050541
taactaaattaa

SEQ ID NO: 357279 - DNA, 12 bp, Artificial Sequence
  Oligonucleotide primer for the detection of SNP TSC0050541
gttttagttttc

SEQ ID NO: 357280 - DNA, 12 bp, Artificial Sequence
  Oligonucleotide primer for the detection of SNP TSC0050541
atcttaatttcc

SEQ ID NO: 357281 - DNA, 12 bp, Artificial Sequence
  Oligonukleotid-Primer
gtcttaatttcc

SEQ ID NO: 357282 - DNA, 12 bp, Artificial Sequence
  Oligonucleotide primer for the detection of SNP TSC0050541
ttaattgagttg

SEQ ID NO: 357283 - DNA, 12 bp, Artificial Sequence
  Oligonucleotide primer for the detection of SNP TSC0050542
ttatatgaagat

SEQ ID NO: 357284 - DNA, 12 bp, Artificial Sequence
  Oligonucleotide primer for the detection of SNP TSC0050542
ttatacgaagat

SEQ ID NO: 357285 - DNA, 12 bp, Artificial Sequence
  Oligonucleotide primer for the detection of SNP TSC0050542
ttacacaaaaac

SEQ ID NO: 357286 - DNA, 12 bp, Artificial Sequence
  Oligonucleotide primer for the detection of SNP TSC0050542
ttacacgaaaac

SEQ ID NO: 357287 - DNA, 12 bp, Artificial Sequence
  Oligonucleotide primer for the detection of SNP TSC0050542
atgaatgaatgt

SEQ ID NO: 357288 - DNA, 12 bp, Artificial Sequence
  Oligonucleotide primer for the detection of SNP TSC0050543
ataaaagtgttg

SEQ ID NO: 357289 - DNA, 12 bp, Artificial Sequence
  Oligonucleotide primer for the detection of SNP TSC0050543
ggatgattgaaa

SEQ ID NO: 357290 - DNA, 12 bp, Artificial Sequence
  Oligonucleotide primer for the detection of SNP TSC0050545
catcataaacac

SEQ ID NO: 357291 - DNA, 12 bp, Artificial Sequence
  Oligonucleotide primer for the detection of SNP TSC0050545
gaaaatgagata

SEQ ID NO: 357292 - DNA, 12 bp, Artificial Sequence
  Oligonucleotide primer for the detection of SNP TSC0050546
taccaactcccc

SEQ ID NO: 357293 - DNA, 12 bp, Artificial Sequence
  Oligonucleotide primer for the detection of SNP TSC0050546
ttatgggggagg

SEQ ID NO: 357294 - DNA, 12 bp, Artificial Sequence
  Oligonucleotide primer for the detection of SNP TSC0050547
agttaaatggtt

SEQ ID NO: 357295 - DNA, 12 bp, Artificial Sequence
  Oligonucleotide primer for the detection of SNP TSC0050548
aagttattttaa

SEQ ID NO: 357296 - DNA, 12 bp, Artificial Sequence
  Oligonucleotide primer for the detection of SNP TSC0050548
aaattatcccaa

SEQ ID NO: 357297 - DNA, 12 bp, Artificial Sequence
  Oligonucleotide primer for the detection of SNP TSC0050548
aatgaatgaaga

SEQ ID NO: 357298 - DNA, 12 bp, Artificial Sequence
  Oligonucleotide primer for the detection of SNP TSC0050549
tgggttttggtg

SEQ ID NO: 357299 - DNA, 12 bp, Artificial Sequence
  Oligonucleotide primer for the detection of SNP TSC0050549
taaactttaata

SEQ ID NO: 357300 - DNA, 12 bp, Artificial Sequence
  Oligonucleotide primer for the detection of SNP TSC0050549
tttttttaattc

SEQ ID NO: 357301 - DNA, 12 bp, Artificial Sequence
  Oligonucleotide primer for the detection of SNP TSC0050553
ataatcctctac

SEQ ID NO: 357302 - DNA, 12 bp, Artificial Sequence
  Oligonucleotide primer for the detection of SNP TSC0050553
gagttaggaaag

SEQ ID NO: 357303 - DNA, 12 bp, Artificial Sequence
  Oligonucleotide primer for the detection of SNP TSC0050554
attgaattgttg

SEQ ID NO: 357304 - DNA, 12 bp, Artificial Sequence
  Oligonucleotide primer for the detection of SNP TSC0050555
atacttaaataa

SEQ ID NO: 357305 - DNA, 12 bp, Artificial Sequence
  Oligonucleotide primer for the detection of SNP TSC0050555
gtacttaaataa

SEQ ID NO: 357306 - DNA, 12 bp, Artificial Sequence
  Oligonucleotide primer for the detection of SNP TSC0050555
tgttaattaaat

SEQ ID NO: 357307 - DNA, 12 bp, Artificial Sequence
  Oligonucleotide primer for the detection of SNP TSC0050555
tatcaattaaat

SEQ ID NO: 357308 - DNA, 12 bp, Artificial Sequence
  Oligonucleotide primer for the detection of SNP TSC0050555
cgtatttaaata

SEQ ID NO: 357309 - DNA, 12 bp, Artificial Sequence
  Oligonucleotide primer for the detection of SNP TSC0050556
atatattaaagg

SEQ ID NO: 357310 - DNA, 12 bp, Artificial Sequence
  Oligonucleotide primer for the detection of SNP TSC0050558
caataaaactaa

SEQ ID NO: 357311 - DNA, 12 bp, Artificial Sequence
  Oligonucleotide primer for the detection of SNP TSC0050558
ttattggggttt

SEQ ID NO: 357312 - DNA, 12 bp, Artificial Sequence
  Oligonucleotide primer for the detection of SNP TSC0050558
gtggaattgatt

SEQ ID NO: 357313 - DNA, 12 bp, Artificial Sequence
  Oligonucleotide primer for the detection of SNP TSC0050559
tcatttatattc

SEQ ID NO: 357314 - DNA, 12 bp, Artificial Sequence
  Oligonucleotide primer for the detection of SNP TSC0050559
attgattaaatg

SEQ ID NO: 357315 - DNA, 12 bp, Artificial Sequence
  Oligonucleotide primer for the detection of SNP TSC0050559
ttaactaaataa

SEQ ID NO: 357316 - DNA, 12 bp, Artificial Sequence
  Oligonucleotide primer for the detection of SNP TSC0050559
tatttatgtttt

SEQ ID NO: 357317 - DNA, 12 bp, Artificial Sequence
  Oligonucleotide primer for the detection of SNP TSC0050560
cactataatcca

SEQ ID NO: 357318 - DNA, 12 bp, Artificial Sequence
  Oligonucleotide primer for the detection of SNP TSC0050560
ttattgtggttt

SEQ ID NO: 357319 - DNA, 12 bp, Artificial Sequence
  Oligonucleotide primer for the detection of SNP TSC0050561
tacccacaccct

SEQ ID NO: 357320 - DNA, 12 bp, Artificial Sequence
  Oligonucleotide primer for the detection of SNP TSC0050562
tataatattcac

SEQ ID NO: 357321 - DNA, 12 bp, Artificial Sequence
  Oligonucleotide primer for the detection of SNP TSC0050562
ttttaaaagtta

SEQ ID NO: 357322 - DNA, 12 bp, Artificial Sequence
  Oligonucleotide primer for the detection of SNP TSC0050563
taaaccttctac

SEQ ID NO: 357323 - DNA, 12 bp, Artificial Sequence
  Oligonucleotide primer for the detection of SNP TSC0050565
caaatattacca

SEQ ID NO: 357324 - DNA, 12 bp, Artificial Sequence
  Oligonucleotide primer for the detection of SNP TSC0050565
cactataatcaa

SEQ ID NO: 357325 - DNA, 12 bp, Artificial Sequence
  Oligonucleotide primer for the detection of SNP TSC0050565
ataaatgttatt

SEQ ID NO: 357326 - DNA, 12 bp, Artificial Sequence
  Oligonucleotide primer for the detection of SNP TSC0050566
aaaccaacttta

SEQ ID NO: 357327 - DNA, 12 bp, Artificial Sequence
  Oligonucleotide primer for the detection of SNP TSC0050566
tcctatttattt

SEQ ID NO: 357328 - DNA, 12 bp, Artificial Sequence
  Oligonucleotide primer for the detection of SNP TSC0050566
aaattagtttta

SEQ ID NO: 357329 - DNA, 12 bp, Artificial Sequence
  Oligonucleotide primer for the detection of SNP TSC0050567
cattatttcata

SEQ ID NO: 357330 - DNA, 12 bp, Artificial Sequence
  Oligonucleotide primer for the detection of SNP TSC0050567
cgttatttcata

SEQ ID NO: 357331 - DNA, 12 bp, Artificial Sequence
  Oligonucleotide primer for the detection of SNP TSC0050567
tgtaatagtatg

SEQ ID NO: 357332 - DNA, 12 bp, Artificial Sequence
  Oligonucleotide primer for the detection of SNP TSC0050567
tgttattttatg

SEQ ID NO: 357333 - DNA, 12 bp, Artificial Sequence
  Oligonucleotide primer for the detection of SNP TSC0050567
cgttattttatg

SEQ ID NO: 357334 - DNA, 12 bp, Artificial Sequence
  Oligonucleotide primer for the detection of SNP TSC0050568
ataactaaaaaa

SEQ ID NO: 357335 - DNA, 12 bp, Artificial Sequence
  Oligonucleotide primer for the detection of SNP TSC0050568
atggttagggag

SEQ ID NO: 357336 - DNA, 12 bp, Artificial Sequence
  Oligonucleotide primer for the detection of SNP TSC0050569
taattaaactta

SEQ ID NO: 357337 - DNA, 12 bp, Artificial Sequence
  Oligonucleotide primer for the detection of SNP TSC0050569
ttaattggattt

SEQ ID NO: 357338 - DNA, 12 bp, Artificial Sequence
  Oligonucleotide primer for the detection of SNP TSC0050570
actaacaaatta

SEQ ID NO: 357339 - DNA, 12 bp, Artificial Sequence
  Oligonucleotide primer for the detection of SNP TSC0050570
tattatttaagt

SEQ ID NO: 357340 - DNA, 12 bp, Artificial Sequence
  Oligonucleotide primer for the detection of SNP TSC0050570
caccatttaaat

SEQ ID NO: 357341 - DNA, 12 bp, Artificial Sequence
  Oligonucleotide primer for the detection of SNP TSC0050570
attgataaatta

SEQ ID NO: 357342 - DNA, 12 bp, Artificial Sequence
  Oligonucleotide primer for the detection of SNP TSC0050571
ttgtaaaatttt

SEQ ID NO: 357343 - DNA, 12 bp, Artificial Sequence
  Oligonucleotide primer for the detection of SNP TSC0050571
cttacaaaactc

SEQ ID NO: 357344 - DNA, 12 bp, Artificial Sequence
  Oligonucleotide primer for the detection of SNP TSC0050571
tattaagtggtt

SEQ ID NO: 357345 - DNA, 12 bp, Artificial Sequence
  Oligonucleotide primer for the detection of SNP TSC0050572
acatatatcaac

SEQ ID NO: 357346 - DNA, 12 bp, Artificial Sequence
  Oligonucleotide primer for the detection of SNP TSC0050572
atatagaatttt

SEQ ID NO: 357347 - DNA, 12 bp, Artificial Sequence
  Oligonucleotide primer for the detection of SNP TSC0050572
tataaaattcta

SEQ ID NO: 357348 - DNA, 12 bp, Artificial Sequence
  Oligonucleotide primer for the detection of SNP TSC0050572
atatgtattaat

SEQ ID NO: 357349 - DNA, 12 bp, Artificial Sequence
  Oligonucleotide primer for the detection of SNP TSC0050572
atatgtattaac

SEQ ID NO: 357350 - DNA, 12 bp, Artificial Sequence
  Oligonucleotide primer for the detection of SNP TSC0050573
ctttaaataata

SEQ ID NO: 357351 - DNA, 12 bp, Artificial Sequence
  Oligonucleotide primer for the detection of SNP TSC0050573
gatttaaatgat

SEQ ID NO: 357352 - DNA, 12 bp, Artificial Sequence
  Oligonucleotide primer for the detection of SNP TSC0050573
gatttaaatgac

SEQ ID NO: 357353 - DNA, 12 bp, Artificial Sequence
  Oligonucleotide primer for the detection of SNP TSC0050573
tttgagtagtat

SEQ ID NO: 357354 - DNA, 12 bp, Artificial Sequence
  Oligonucleotide primer for the detection of SNP TSC0050574
aaaagaataaag

SEQ ID NO: 357355 - DNA, 12 bp, Artificial Sequence
  Oligonucleotide primer for the detection of SNP TSC0050574
atgtgatgtttt

SEQ ID NO: 357356 - DNA, 12 bp, Artificial Sequence
  Oligonucleotide primer for the detection of SNP TSC0050575
acccaataaatc

SEQ ID NO: 357357 - DNA, 12 bp, Artificial Sequence
  Oligonucleotide primer for the detection of SNP TSC0005806
ccaacaaatctt

SEQ ID NO: 357358 - DNA, 12 bp, Artificial Sequence
  Oligonucleotide primer for the detection of SNP TSC0005806
gtaggtgtttag

SEQ ID NO: 357359 - DNA, 12 bp, Artificial Sequence
  Oligonucleotide primer for the detection of SNP TSC0005807
tagggttttgtt

SEQ ID NO: 357360 - DNA, 12 bp, Artificial Sequence
  Oligonucleotide primer for the detection of SNP TSC0005808
aactttactaac

SEQ ID NO: 357361 - DNA, 12 bp, Artificial Sequence
  Oligonucleotide primer for the detection of SNP TSC0005808
aaaaataatatg

SEQ ID NO: 357362 - DNA, 12 bp, Artificial Sequence
  Oligonucleotide primer for the detection of SNP TSC0005808
aaaaataatacg

SEQ ID NO: 357363 - DNA, 12 bp, Artificial Sequence
  Oligonucleotide primer for the detection of SNP TSC0050576
tttttatctttc

SEQ ID NO: 357364 - DNA, 12 bp, Artificial Sequence
  Oligonucleotide primer for the detection of SNP TSC0050576
tatgttttgtgg

SEQ ID NO: 357365 - DNA, 12 bp, Artificial Sequence
  Oligonucleotide primer for the detection of SNP TSC0050576
tatgttttgcgg

SEQ ID NO: 357366 - DNA, 12 bp, Artificial Sequence
  Oligonucleotide primer for the detection of SNP TSC0050577
tacctataaccc

SEQ ID NO: 357367 - DNA, 12 bp, Artificial Sequence
  Oligonucleotide primer for the detection of SNP TSC0050577
gtttttcgatta

SEQ ID NO: 357368 - DNA, 12 bp, Artificial Sequence
  Oligonucleotide primer for the detection of SNP TSC0050578
tacctcttcatc

SEQ ID NO: 357369 - DNA, 12 bp, Artificial Sequence
  Oligonucleotide primer for the detection of SNP TSC0050578
tagaaaaagaat

SEQ ID NO: 357370 - DNA, 12 bp, Artificial Sequence
  Oligonucleotide primer for the detection of SNP TSC0050579
acaaatacaacc

SEQ ID NO: 357371 - DNA, 12 bp, Artificial Sequence
  Oligonucleotide primer for the detection of SNP TSC0050579
ttaaagattagt

SEQ ID NO: 357372 - DNA, 12 bp, Artificial Sequence
  Oligonucleotide primer for the detection of SNP TSC0050579
tcaaaaaccaat

SEQ ID NO: 357373 - DNA, 12 bp, Artificial Sequence
  Oligonucleotide primer for the detection of SNP TSC0000455
aaaaaatcattc

SEQ ID NO: 357374 - DNA, 12 bp, Artificial Sequence
  Oligonucleotide primer for the detection of SNP TSC0000455
gaaaaatcattc

SEQ ID NO: 357375 - DNA, 12 bp, Artificial Sequence
  Oligonucleotide primer for the detection of SNP TSC0000455
tttatagtgtga

SEQ ID NO: 357376 - DNA, 12 bp, Artificial Sequence
  Oligonucleotide primer for the detection of SNP TSC0050580
atttttataatc

SEQ ID NO: 357377 - DNA, 12 bp, Artificial Sequence
  Oligonucleotide primer for the detection of SNP TSC0050580
aatatataatca

SEQ ID NO: 357378 - DNA, 12 bp, Artificial Sequence
  Oligonucleotide primer for the detection of SNP TSC0050581
actaataacaat

SEQ ID NO: 357379 - DNA, 12 bp, Artificial Sequence
  Oligonucleotide primer for the detection of SNP TSC0050581
gggggtggttta

SEQ ID NO: 357380 - DNA, 12 bp, Artificial Sequence
  Oligonucleotide primer for the detection of SNP TSC0007585
aaataaacttat

SEQ ID NO: 357381 - DNA, 12 bp, Artificial Sequence
  Oligonucleotide primer for the detection of SNP TSC0007585
ccctctatctat

SEQ ID NO: 357382 - DNA, 12 bp, Artificial Sequence
  Oligonucleotide primer for the detection of SNP TSC0007585
aggtgagtttgt

SEQ ID NO: 357383 - DNA, 12 bp, Artificial Sequence
  Oligonucleotide primer for the detection of SNP TSC0050582
aattctaaatac

SEQ ID NO: 357384 - DNA, 12 bp, Artificial Sequence
  Oligonucleotide primer for the detection of SNP TSC0050582
ttagttatattc

SEQ ID NO: 357385 - DNA, 12 bp, Artificial Sequence
  Oligonucleotide primer for the detection of SNP TSC0050582
ctaaccacattc

SEQ ID NO: 357386 - DNA, 12 bp, Artificial Sequence
  Oligonucleotide primer for the detection of SNP TSC0050583
aataaaccaccc

SEQ ID NO: 357387 - DNA, 12 bp, Artificial Sequence
  Oligonucleotide primer for the detection of SNP TSC0050583
ccctacttaccc

SEQ ID NO: 357388 - DNA, 12 bp, Artificial Sequence
  Oligonucleotide primer for the detection of SNP TSC0050583
aatgggttattt

SEQ ID NO: 357389 - DNA, 12 bp, Artificial Sequence
  Oligonucleotide primer for the detection of SNP TSC0050583
aatgggttattc

SEQ ID NO: 357390 - DNA, 12 bp, Artificial Sequence
  Oligonucleotide primer for the detection of SNP TSC0050584
tttgttgtagtt

SEQ ID NO: 357391 - DNA, 12 bp, Artificial Sequence
  Oligonucleotide primer for the detection of SNP TSC0050584
cctactacaatt

SEQ ID NO: 357392 - DNA, 12 bp, Artificial Sequence
  Oligonucleotide primer for the detection of SNP TSC0050584
tgatgtggggaa

SEQ ID NO: 357393 - DNA, 12 bp, Artificial Sequence
  Oligonucleotide primer for the detection of SNP TSC0050587
attttccccacc

SEQ ID NO: 357394 - DNA, 12 bp, Artificial Sequence
  Oligonucleotide primer for the detection of SNP TSC0050588
tctcccttcctc

SEQ ID NO: 357395 - DNA, 12 bp, Artificial Sequence
  Oligonucleotide primer for the detection of SNP TSC0050588
ttgtaatgatta

SEQ ID NO: 357396 - DNA, 12 bp, Artificial Sequence
  Oligonucleotide primer for the detection of SNP TSC0050589
ttatatattgta

SEQ ID NO: 357397 - DNA, 12 bp, Artificial Sequence
  Oligonucleotide primer for the detection of SNP TSC0050589
ttacacactaca

SEQ ID NO: 357398 - DNA, 12 bp, Artificial Sequence
  Oligonucleotide primer for the detection of SNP TSC0050589
gtttaggaagat

SEQ ID NO: 357399 - DNA, 12 bp, Artificial Sequence
  Oligonucleotide primer for the detection of SNP TSC0050593
agtaattttgaa

SEQ ID NO: 357400 - DNA, 12 bp, Artificial Sequence
  Oligonucleotide primer for the detection of SNP TSC0050593
aacaattttaaa

SEQ ID NO: 357401 - DNA, 12 bp, Artificial Sequence
  Oligonucleotide primer for the detection of SNP TSC0050593
atgtattatata

SEQ ID NO: 357402 - DNA, 12 bp, Artificial Sequence
  Oligonucleotide primer for the detection of SNP TSC0050594
tccttaaaaaat

SEQ ID NO: 357403 - DNA, 12 bp, Artificial Sequence
  Oligonucleotide primer for the detection of SNP TSC0050594
tttgggaattaa

SEQ ID NO: 357404 - DNA, 12 bp, Artificial Sequence
  Oligonucleotide primer for the detection of SNP TSC0050594
cctaaaaatcaa

SEQ ID NO: 357405 - DNA, 12 bp, Artificial Sequence
  Oligonucleotide primer for the detection of SNP TSC0050594
tttttaaggaat

SEQ ID NO: 357406 - DNA, 12 bp, Artificial Sequence
  Oligonucleotide primer for the detection of SNP TSC0050597
taataaaatttc

SEQ ID NO: 357407 - DNA, 12 bp, Artificial Sequence
  Oligonucleotide primer for the detection of SNP TSC0050597
tattttaaaagg

SEQ ID NO: 357408 - DNA, 12 bp, Artificial Sequence
  Oligonucleotide primer for the detection of SNP TSC0050597
taatagaatttt

SEQ ID NO: 357409 - DNA, 12 bp, Artificial Sequence
  Oligonucleotide primer for the detection of SNP TSC0050598
accttcatatac

SEQ ID NO: 357410 - DNA, 12 bp, Artificial Sequence
  Oligonucleotide primer for the detection of SNP TSC0050598
accttcgtatac

SEQ ID NO: 357411 - DNA, 12 bp, Artificial Sequence
  Oligonucleotide primer for the detection of SNP TSC0050598
aggtttggttta

SEQ ID NO: 357412 - DNA, 12 bp, Artificial Sequence
  Oligonucleotide primer for the detection of SNP TSC0050599
taaactatttac

SEQ ID NO: 357413 - DNA, 12 bp, Artificial Sequence
  Oligonucleotide primer for the detection of SNP TSC0050599
aattatagagag

SEQ ID NO: 357414 - DNA, 12 bp, Artificial Sequence
  Oligonucleotide primer for the detection of SNP TSC0050600
actttaattatc

SEQ ID NO: 357415 - DNA, 12 bp, Artificial Sequence
  Oligonucleotide primer for the detection of SNP TSC0050600
taatatagaaaa

SEQ ID NO: 357416 - DNA, 12 bp, Artificial Sequence
  Oligonucleotide primer for the detection of SNP TSC0050604
tttttgtatgtt

SEQ ID NO: 357417 - DNA, 12 bp, Artificial Sequence
  Oligonucleotide primer for the detection of SNP TSC0050604
ttttcttatata

SEQ ID NO: 357418 - DNA, 12 bp, Artificial Sequence
  Oligonucleotide primer for the detection of SNP TSC0050604
ttatgtaaaagt

SEQ ID NO: 357419 - DNA, 12 bp, Artificial Sequence
  Oligonucleotide primer for the detection of SNP TSC0050605
ctatacacaaat

SEQ ID NO: 357420 - DNA, 12 bp, Artificial Sequence
  Oligonucleotide primer for the detection of SNP TSC0050605
tttgttgtttaa

SEQ ID NO: 357421 - DNA, 12 bp, Artificial Sequence
  Oligonucleotide primer for the detection of SNP TSC0050605
tctactacctaa

SEQ ID NO: 357422 - DNA, 12 bp, Artificial Sequence
  Oligonucleotide primer for the detection of SNP TSC0050605
ttatgtataaat

SEQ ID NO: 357423 - DNA, 12 bp, Artificial Sequence
  Oligonucleotide primer for the detection of SNP TSC0050606
catttatttctc

SEQ ID NO: 357424 - DNA, 12 bp, Artificial Sequence
  Oligonucleotide primer for the detection of SNP TSC0050606
tttttgaatata

SEQ ID NO: 357425 - DNA, 12 bp, Artificial Sequence
  Oligonucleotide primer for the detection of SNP TSC0050608
tacattcattat

SEQ ID NO: 357426 - DNA, 12 bp, Artificial Sequence
  Oligonucleotide primer for the detection of SNP TSC0050608
tgtttgtattta

SEQ ID NO: 357427 - DNA, 12 bp, Artificial Sequence
  Oligonucleotide primer for the detection of SNP TSC0050609
tcacctactaaa

SEQ ID NO: 357428 - DNA, 12 bp, Artificial Sequence
  Oligonucleotide primer for the detection of SNP TSC0050609
agaaaggattgt

SEQ ID NO: 357429 - DNA, 12 bp, Artificial Sequence
  Oligonucleotide primer for the detection of SNP TSC0050609
gttatttgttgg

SEQ ID NO: 357430 - DNA, 12 bp, Artificial Sequence
  Oligonucleotide primer for the detection of SNP TSC0050610
tgaaggtattga

SEQ ID NO: 357431 - DNA, 12 bp, Artificial Sequence
  Oligonucleotide primer for the detection of SNP TSC0004801
tatattgaatag

SEQ ID NO: 357432 - DNA, 12 bp, Artificial Sequence
  Oligonucleotide primer for the detection of SNP TSC0050613
aatatataataa

SEQ ID NO: 357433 - DNA, 12 bp, Artificial Sequence
  Oligonucleotide primer for the detection of SNP TSC0050613
cttttcacataa

SEQ ID NO: 357434 - DNA, 12 bp, Artificial Sequence
  Oligonucleotide primer for the detection of SNP TSC0050613
ggtgtgtagtag

SEQ ID NO: 357435 - DNA, 12 bp, Artificial Sequence
  Oligonucleotide primer for the detection of SNP TSC0050614
tacccttattct

SEQ ID NO: 357436 - DNA, 12 bp, Artificial Sequence
  Oligonucleotide primer for the detection of SNP TSC0050614
attttagtaaag

SEQ ID NO: 357437 - DNA, 12 bp, Artificial Sequence
  Oligonucleotide primer for the detection of SNP TSC0050615
tagttttgtagg

SEQ ID NO: 357438 - DNA, 12 bp, Artificial Sequence
  Oligonucleotide primer for the detection of SNP TSC0050615
caactttacaaa

SEQ ID NO: 357439 - DNA, 12 bp, Artificial Sequence
  Oligonucleotide primer for the detection of SNP TSC0050615
attttgaaatgg

SEQ ID NO: 357440 - DNA, 12 bp, Artificial Sequence
  Oligonucleotide primer for the detection of SNP TSC0050616
ctactatctatt

SEQ ID NO: 357441 - DNA, 12 bp, Artificial Sequence
  Oligonucleotide primer for the detection of SNP TSC0050620
ttccctcttaac

SEQ ID NO: 357442 - DNA, 12 bp, Artificial Sequence
  Oligonucleotide primer for the detection of SNP TSC0050620
ccaatcatatca

SEQ ID NO: 357443 - DNA, 12 bp, Artificial Sequence
  Oligonucleotide primer for the detection of SNP TSC0050621
aacattataatt

SEQ ID NO: 357444 - DNA, 12 bp, Artificial Sequence
  Oligonucleotide primer for the detection of SNP TSC0050621
aacgttataatt

SEQ ID NO: 357445 - DNA, 12 bp, Artificial Sequence
  Oligonucleotide primer for the detection of SNP TSC0050621
ttaagttgtgta

SEQ ID NO: 357446 - DNA, 12 bp, Artificial Sequence
  Oligonucleotide primer for the detection of SNP TSC0050621
ttaagttgcgta

SEQ ID NO: 357447 - DNA, 12 bp, Artificial Sequence
  Oligonucleotide primer for the detection of SNP TSC0050621
ttaaattacaca

SEQ ID NO: 357448 - DNA, 12 bp, Artificial Sequence
  Oligonucleotide primer for the detection of SNP TSC0050621
ttaaattacgca

SEQ ID NO: 357449 - DNA, 12 bp, Artificial Sequence
  Oligonucleotide primer for the detection of SNP TSC0050621
aatgttgtaatt

SEQ ID NO: 357450 - DNA, 12 bp, Artificial Sequence
  Oligonukleotid-Primer
aacgttgtaatt

SEQ ID NO: 357451 - DNA, 12 bp, Artificial Sequence
  Oligonucleotide primer for the detection of SNP TSC0050623
tatctataaaac

SEQ ID NO: 357452 - DNA, 12 bp, Artificial Sequence
  Oligonucleotide primer for the detection of SNP TSC0050623
attattatttaa

SEQ ID NO: 357453 - DNA, 12 bp, Artificial Sequence
  Oligonucleotide primer for the detection of SNP TSC0050624
tcaaaaaataca

SEQ ID NO: 357454 - DNA, 12 bp, Artificial Sequence
  Oligonukleotid-Primer
aaatcttactaa

SEQ ID NO: 357455 - DNA, 12 bp, Artificial Sequence
  Oligonucleotide primer for the detection of SNP TSC0050624
ttagaaaatata

SEQ ID NO: 357456 - DNA, 12 bp, Artificial Sequence
  Oligonucleotide primer for the detection of SNP TSC0050626
agggaaaaaaag

SEQ ID NO: 357457 - DNA, 12 bp, Artificial Sequence
  Oligonucleotide primer for the detection of SNP TSC0005194
attttttaaacc

SEQ ID NO: 357458 - DNA, 12 bp, Artificial Sequence
  Oligonucleotide primer for the detection of SNP TSC0050632
acataatctcac

SEQ ID NO: 357459 - DNA, 12 bp, Artificial Sequence
  Oligonucleotide primer for the detection of SNP TSC0050632
tcgatttttatt

SEQ ID NO: 357460 - DNA, 12 bp, Artificial Sequence
  Oligonucleotide primer for the detection of SNP TSC0050632
tcaatccccatt

SEQ ID NO: 357461 - DNA, 12 bp, Artificial Sequence
  Oligonucleotide primer for the detection of SNP TSC0050632
tcgatccccatt

SEQ ID NO: 357462 - DNA, 12 bp, Artificial Sequence
  Oligonucleotide primer for the detection of SNP TSC0050632
gtatggttttat

SEQ ID NO: 357463 - DNA, 12 bp, Artificial Sequence
  Oligonucleotide primer for the detection of SNP TSC0050633
aattaaaatacc

SEQ ID NO: 357464 - DNA, 12 bp, Artificial Sequence
  Oligonucleotide primer for the detection of SNP TSC0050633
tagaaaaaattt

SEQ ID NO: 357465 - DNA, 12 bp, Artificial Sequence
  Oligonucleotide primer for the detection of SNP TSC0050633
gattaaaatatt

SEQ ID NO: 357466 - DNA, 12 bp, Artificial Sequence
  Oligonucleotide primer for the detection of SNP TSC0050634
tgaaagtaataa

SEQ ID NO: 357467 - DNA, 12 bp, Artificial Sequence
  Oligonucleotide primer for the detection of SNP TSC0050637
cccttcctaatt

SEQ ID NO: 357468 - DNA, 12 bp, Artificial Sequence
  Oligonucleotide primer for the detection of SNP TSC0050637
gggtaggttata

SEQ ID NO: 357469 - DNA, 12 bp, Artificial Sequence
  Oligonucleotide primer for the detection of SNP TSC0050638
aataatcatcct

SEQ ID NO: 357470 - DNA, 12 bp, Artificial Sequence
  Oligonukleotid-Primer
ttttgtataggg

SEQ ID NO: 357471 - DNA, 12 bp, Artificial Sequence
  Oligonucleotide primer for the detection of SNP TSC0050640
aaggaataattg

SEQ ID NO: 357472 - DNA, 12 bp, Artificial Sequence
  Oligonucleotide primer for the detection of SNP TSC0050640
tataataaaaat

SEQ ID NO: 357473 - DNA, 12 bp, Artificial Sequence
  Oligonucleotide primer for the detection of SNP TSC0050641
tattacctactt

SEQ ID NO: 357474 - DNA, 12 bp, Artificial Sequence
  Oligonukleotid-Primer
agaagtaaatga

SEQ ID NO: 357475 - DNA, 12 bp, Artificial Sequence
  Oligonucleotide primer for the detection of SNP TSC0050642
aaataaaacttt

SEQ ID NO: 357476 - DNA, 12 bp, Artificial Sequence
  Oligonucleotide primer for the detection of SNP TSC0050642
gatttaattata

SEQ ID NO: 357477 - DNA, 12 bp, Artificial Sequence
  Oligonucleotide primer for the detection of SNP TSC0050644
tactaactattt

SEQ ID NO: 357478 - DNA, 12 bp, Artificial Sequence
  Oligonucleotide primer for the detection of SNP TSC0050645
tctaaaaatcta

SEQ ID NO: 357479 - DNA, 12 bp, Artificial Sequence
  Oligonucleotide primer for the detection of SNP TSC0050645
agtagattatag

SEQ ID NO: 357480 - DNA, 12 bp, Artificial Sequence
  Oligonucleotide primer for the detection of SNP TSC0050645
aataaaccataa

SEQ ID NO: 357481 - DNA, 12 bp, Artificial Sequence
  Oligonucleotide primer for the detection of SNP TSC0050645
ttggaaatttat

SEQ ID NO: 357482 - DNA, 12 bp, Artificial Sequence
  Oligonukleotid-Primer
tataaaaaaatc

SEQ ID NO: 357483 - DNA, 12 bp, Artificial Sequence
  Oligonucleotide primer for the detection of SNP TSC0007007
gaattatggggg

SEQ ID NO: 357484 - DNA, 12 bp, Artificial Sequence
  Oligonucleotide primer for the detection of SNP TSC0007007
tataggaaaatt

SEQ ID NO: 357485 - DNA, 12 bp, Artificial Sequence
  Oligonucleotide primer for the detection of SNP TSC0050646
atacatttacac

SEQ ID NO: 357486 - DNA, 12 bp, Artificial Sequence
  Oligonucleotide primer for the detection of SNP TSC0050646
tattatatggta

SEQ ID NO: 357487 - DNA, 12 bp, Artificial Sequence
  Oligonucleotide primer for the detection of SNP TSC0050647
ccccaaaacatc

SEQ ID NO: 357488 - DNA, 12 bp, Artificial Sequence
  Oligonucleotide primer for the detection of SNP TSC0050647
acatatacatac

SEQ ID NO: 357489 - DNA, 12 bp, Artificial Sequence
  Oligonucleotide primer for the detection of SNP TSC0050648
gttttttagtat

SEQ ID NO: 357490 - DNA, 12 bp, Artificial Sequence
  Oligonucleotide primer for the detection of SNP TSC0050648
actctccaacac

SEQ ID NO: 357491 - DNA, 12 bp, Artificial Sequence
  Oligonucleotide primer for the detection of SNP TSC0050648
atggtaagaaag

SEQ ID NO: 357492 - DNA, 12 bp, Artificial Sequence
  Oligonucleotide primer for the detection of SNP TSC0050649
aaaaccttattc

SEQ ID NO: 357493 - DNA, 12 bp, Artificial Sequence
  Oligonucleotide primer for the detection of SNP TSC0050649
tgatgaagagtt

SEQ ID NO: 357494 - DNA, 12 bp, Artificial Sequence
  Oligonucleotide primer for the detection of SNP TSC0050649
taataaaaaact

SEQ ID NO: 357495 - DNA, 12 bp, Artificial Sequence
  Oligonucleotide primer for the detection of SNP TSC0050651
aaacaatattca

SEQ ID NO: 357496 - DNA, 12 bp, Artificial Sequence
  Oligonucleotide primer for the detection of SNP TSC0050651
aaacaatattcg

SEQ ID NO: 357497 - DNA, 12 bp, Artificial Sequence
  Oligonucleotide primer for the detection of SNP TSC0050651
aggtatgatggt

SEQ ID NO: 357498 - DNA, 12 bp, Artificial Sequence
  Oligonucleotide primer for the detection of SNP TSC0050651
gaatagtgtttg

SEQ ID NO: 357499 - DNA, 12 bp, Artificial Sequence
  Oligonucleotide primer for the detection of SNP TSC0050651
gaatagtgttcg

SEQ ID NO: 357500 - DNA, 12 bp, Artificial Sequence
  Oligonucleotide primer for the detection of SNP TSC0050652
catttactaact

SEQ ID NO: 357501 - DNA, 12 bp, Artificial Sequence
  Oligonucleotide primer for the detection of SNP TSC0050652
ggtttgtggtaa

SEQ ID NO: 357502 - DNA, 12 bp, Artificial Sequence
  Oligonucleotide primer for the detection of SNP TSC0050653
ggtttggttttg

SEQ ID NO: 357503 - DNA, 12 bp, Artificial Sequence
  Oligonucleotide primer for the detection of SNP TSC0050653
aacttaactcta

SEQ ID NO: 357504 - DNA, 12 bp, Artificial Sequence
  Oligonucleotide primer for the detection of SNP TSC0050653
ttggatgagaat

SEQ ID NO: 357505 - DNA, 12 bp, Artificial Sequence
  Oligonucleotide primer for the detection of SNP TSC0050654
accaaaataata

SEQ ID NO: 357506 - DNA, 12 bp, Artificial Sequence
  Oligonucleotide primer for the detection of SNP TSC0050654
gtaggaaatagt

SEQ ID NO: 357507 - DNA, 12 bp, Artificial Sequence
  Oligonucleotide primer for the detection of SNP TSC0050654
gtaggaaatagc

SEQ ID NO: 357508 - DNA, 12 bp, Artificial Sequence
  Oligonucleotide primer for the detection of SNP TSC0050654
tattagggtgat

SEQ ID NO: 357509 - DNA, 12 bp, Artificial Sequence
  Oligonucleotide primer for the detection of SNP TSC0050655
aattcaatttct

SEQ ID NO: 357510 - DNA, 12 bp, Artificial Sequence
  Oligonucleotide primer for the detection of SNP TSC0050655
ctatatctatta

SEQ ID NO: 357511 - DNA, 12 bp, Artificial Sequence
  Oligonucleotide primer for the detection of SNP TSC0050656
aaaataaaccac

SEQ ID NO: 357512 - DNA, 12 bp, Artificial Sequence
  Oligonucleotide primer for the detection of SNP TSC0050656
tatttatttgta

SEQ ID NO: 357513 - DNA, 12 bp, Artificial Sequence
  Oligonucleotide primer for the detection of SNP TSC0004692
tatacataccaa

SEQ ID NO: 357514 - DNA, 12 bp, Artificial Sequence
  Oligonucleotide primer for the detection of SNP TSC0004692
cattttatttaa

SEQ ID NO: 357515 - DNA, 12 bp, Artificial Sequence
  Oligonucleotide primer for the detection of SNP TSC0004692
atatatgttaat

SEQ ID NO: 357516 - DNA, 12 bp, Artificial Sequence
  Oligonucleotide primer for the detection of SNP TSC0050660
agttttttatgg

SEQ ID NO: 357517 - DNA, 12 bp, Artificial Sequence
  Oligonucleotide primer for the detection of SNP TSC0000304
attcttctaatc

SEQ ID NO: 357518 - DNA, 12 bp, Artificial Sequence
  Oligonucleotide primer for the detection of SNP TSC0000304
cactttatacta

SEQ ID NO: 357519 - DNA, 12 bp, Artificial Sequence
  Oligonucleotide primer for the detection of SNP TSC0050661
gatagtttagat

SEQ ID NO: 357520 - DNA, 12 bp, Artificial Sequence
  Oligonucleotide primer for the detection of SNP TSC0050661
gatagtttagac

SEQ ID NO: 357521 - DNA, 12 bp, Artificial Sequence
  Oligonucleotide primer for the detection of SNP TSC0050661
aacaattcaaac

SEQ ID NO: 357522 - DNA, 12 bp, Artificial Sequence
  Oligonucleotide primer for the detection of SNP TSC0050661
ttgagggaaaat

SEQ ID NO: 357523 - DNA, 12 bp, Artificial Sequence
  Oligonucleotide primer for the detection of SNP TSC0050668
taaacatactat

SEQ ID NO: 357524 - DNA, 12 bp, Artificial Sequence
  Oligonucleotide primer for the detection of SNP TSC0050668
taaacgtactat

SEQ ID NO: 357525 - DNA, 12 bp, Artificial Sequence
  Oligonucleotide primer for the detection of SNP TSC0050668
taaatatatgta

SEQ ID NO: 357526 - DNA, 12 bp, Artificial Sequence
  Oligonucleotide primer for the detection of SNP TSC0050669
tcttctaccctc

SEQ ID NO: 357527 - DNA, 12 bp, Artificial Sequence
  Oligonucleotide primer for the detection of SNP TSC0050670
tccctccaaata

SEQ ID NO: 357528 - DNA, 12 bp, Artificial Sequence
  Oligonucleotide primer for the detection of SNP TSC0050670
tagattttgtgt

SEQ ID NO: 357529 - DNA, 12 bp, Artificial Sequence
  Oligonucleotide primer for the detection of SNP TSC0050670
caaaccctatac

SEQ ID NO: 357530 - DNA, 12 bp, Artificial Sequence
  Oligonucleotide primer for the detection of SNP TSC0050670
tttttttaggtg

SEQ ID NO: 357531 - DNA, 12 bp, Artificial Sequence
  Oligonucleotide primer for the detection of SNP TSC0050673
tattattatcaa

SEQ ID NO: 357532 - DNA, 12 bp, Artificial Sequence
  Oligonucleotide primer for the detection of SNP TSC0050673
aattaattatgt

SEQ ID NO: 357533 - DNA, 12 bp, Artificial Sequence
  Oligonucleotide primer for the detection of SNP TSC0050673
caaccaaccata

SEQ ID NO: 357534 - DNA, 12 bp, Artificial Sequence
  Oligonucleotide primer for the detection of SNP TSC0050673
ttgttgttgtta

SEQ ID NO: 357535 - DNA, 12 bp, Artificial Sequence
  Oligonucleotide primer for the detection of SNP TSC0050674
tacccaaactac

SEQ ID NO: 357536 - DNA, 12 bp, Artificial Sequence
  Oligonucleotide primer for the detection of SNP TSC0050674
taaagaggatta

SEQ ID NO: 357537 - DNA, 12 bp, Artificial Sequence
  Oligonucleotide primer for the detection of SNP TSC0050678
ttttgtgaaatt

SEQ ID NO: 357538 - DNA, 12 bp, Artificial Sequence
  Oligonucleotide primer for the detection of SNP TSC0050678
aaaaaattttag

SEQ ID NO: 357539 - DNA, 12 bp, Artificial Sequence
  Oligonucleotide primer for the detection of SNP TSC0050679
gtgaaataaata

SEQ ID NO: 357540 - DNA, 12 bp, Artificial Sequence
  Oligonucleotide primer for the detection of SNP TSC0050679
ttttgaaaagat

SEQ ID NO: 357541 - DNA, 12 bp, Artificial Sequence
  Oligonucleotide primer for the detection of SNP TSC0050680
ttaataagatat

SEQ ID NO: 357542 - DNA, 12 bp, Artificial Sequence
  Oligonucleotide primer for the detection of SNP TSC0050680
ctcaacaaaata

SEQ ID NO: 357543 - DNA, 12 bp, Artificial Sequence
  Oligonucleotide primer for the detection of SNP TSC0000846
ataaaaacttat

SEQ ID NO: 357544 - DNA, 12 bp, Artificial Sequence
  Oligonucleotide primer for the detection of SNP TSC0000846
taaggattttta

SEQ ID NO: 357545 - DNA, 12 bp, Artificial Sequence
  Oligonucleotide primer for the detection of SNP TSC0006728
aaacacattaac

SEQ ID NO: 357546 - DNA, 12 bp, Artificial Sequence
  Oligonucleotide primer for the detection of SNP TSC0006728
agtagatgttgg

SEQ ID NO: 357547 - DNA, 12 bp, Artificial Sequence
  Oligonucleotide primer for the detection of SNP TSC0050686
atatataaaaat

SEQ ID NO: 357548 - DNA, 12 bp, Artificial Sequence
  Oligonucleotide primer for the detection of SNP TSC0005419
aattagggtatt

SEQ ID NO: 357549 - DNA, 12 bp, Artificial Sequence
  Oligonucleotide primer for the detection of SNP TSC0005419
aatcaaaacatt

SEQ ID NO: 357550 - DNA, 12 bp, Artificial Sequence
  Oligonucleotide primer for the detection of SNP TSC0005419
ggtaaagattga

SEQ ID NO: 357551 - DNA, 12 bp, Artificial Sequence
  Oligonucleotide primer for the detection of SNP TSC0007335
tatccctctttc

SEQ ID NO: 357552 - DNA, 12 bp, Artificial Sequence
  Oligonucleotide primer for the detection of SNP TSC0007335
gagtggttagag

SEQ ID NO: 357553 - DNA, 12 bp, Artificial Sequence
  Oligonucleotide primer for the detection of SNP TSC0007336
aaattttaaacc

SEQ ID NO: 357554 - DNA, 12 bp, Artificial Sequence
  Oligonucleotide primer for the detection of SNP TSC0007336
tttagatgttta

SEQ ID NO: 357555 - DNA, 12 bp, Artificial Sequence
  Oligonucleotide primer for the detection of SNP TSC0007336
cccaaatattca

SEQ ID NO: 357556 - DNA, 12 bp, Artificial Sequence
  Oligonucleotide primer for the detection of SNP TSC0007336
aggttttggatt

SEQ ID NO: 357557 - DNA, 12 bp, Artificial Sequence
  Oligonucleotide primer for the detection of SNP TSC0007337
tttaagatgttt

SEQ ID NO: 357558 - DNA, 12 bp, Artificial Sequence
  Oligonucleotide primer for the detection of SNP TSC0005525
aataccaaaatt

SEQ ID NO: 357559 - DNA, 12 bp, Artificial Sequence
  Oligonucleotide primer for the detection of SNP TSC0005525
acctcattaaaa

SEQ ID NO: 357560 - DNA, 12 bp, Artificial Sequence
  Oligonucleotide primer for the detection of SNP TSC0050690
ccctctatctca

SEQ ID NO: 357561 - DNA, 12 bp, Artificial Sequence
  Oligonucleotide primer for the detection of SNP TSC0050690
agttgtttagga

SEQ ID NO: 357562 - DNA, 12 bp, Artificial Sequence
  Oligonucleotide primer for the detection of SNP TSC0050691
agtgaaatataa

SEQ ID NO: 357563 - DNA, 12 bp, Artificial Sequence
  Oligonucleotide primer for the detection of SNP TSC0050693
catataaataat

SEQ ID NO: 357564 - DNA, 12 bp, Artificial Sequence
  Oligonucleotide primer for the detection of SNP TSC0050693
ttggttaaaaga

SEQ ID NO: 357565 - DNA, 12 bp, Artificial Sequence
  Oligonucleotide primer for the detection of SNP TSC0050693
ttaactaaaaaa

SEQ ID NO: 357566 - DNA, 12 bp, Artificial Sequence
  Oligonucleotide primer for the detection of SNP TSC0050693
tatgtaaataat

SEQ ID NO: 357567 - DNA, 12 bp, Artificial Sequence
  Oligonucleotide primer for the detection of SNP TSC0007211
cacctaaaccct

SEQ ID NO: 357568 - DNA, 12 bp, Artificial Sequence
  Oligonucleotide primer for the detection of SNP TSC0007211
cgcctaaaccct

SEQ ID NO: 357569 - DNA, 12 bp, Artificial Sequence
  Oligonucleotide primer for the detection of SNP TSC0007211
ataaatgtgaaa

SEQ ID NO: 357570 - DNA, 12 bp, Artificial Sequence
  Oligonucleotide primer for the detection of SNP TSC0007259
tataaacttcac

SEQ ID NO: 357571 - DNA, 12 bp, Artificial Sequence
  Oligonucleotide primer for the detection of SNP TSC0007259
gtttttagaggg

SEQ ID NO: 357572 - DNA, 12 bp, Artificial Sequence
  Oligonucleotide primer for the detection of SNP TSC0050697
catctataataa

SEQ ID NO: 357573 - DNA, 12 bp, Artificial Sequence
  Oligonucleotide primer for the detection of SNP TSC0050697
taagtggttaag

SEQ ID NO: 357574 - DNA, 12 bp, Artificial Sequence
  Oligonucleotide primer for the detection of SNP TSC0050697
ataaccaaaaaa

SEQ ID NO: 357575 - DNA, 12 bp, Artificial Sequence
  Oligonucleotide primer for the detection of SNP TSC0050697
atttgtaatgat

SEQ ID NO: 357576 - DNA, 12 bp, Artificial Sequence
  Oligonucleotide primer for the detection of SNP TSC0050698
atctccttaaat

SEQ ID NO: 357577 - DNA, 12 bp, Artificial Sequence
  Oligonucleotide primer for the detection of SNP TSC0050698
tttatgttgata

SEQ ID NO: 357578 - DNA, 12 bp, Artificial Sequence
  Oligonucleotide primer for the detection of SNP TSC0050699
tcccaaacacac

SEQ ID NO: 357579 - DNA, 12 bp, Artificial Sequence
  Oligonucleotide primer for the detection of SNP TSC0050699
tcccgaacacac

SEQ ID NO: 357580 - DNA, 12 bp, Artificial Sequence
  Oligonucleotide primer for the detection of SNP TSC0050699
ttaatggttttt

SEQ ID NO: 357581 - DNA, 12 bp, Artificial Sequence
  Oligonucleotide primer for the detection of SNP TSC0050699
tttgagtatatt

SEQ ID NO: 357582 - DNA, 12 bp, Artificial Sequence
  Oligonucleotide primer for the detection of SNP TSC0050699
ttcgagtatatt

SEQ ID NO: 357583 - DNA, 12 bp, Artificial Sequence
  Oligonucleotide primer for the detection of SNP TSC0007354
attggtgtataa

SEQ ID NO: 357584 - DNA, 12 bp, Artificial Sequence
  Oligonucleotide primer for the detection of SNP TSC0007355
catcaccaaata

SEQ ID NO: 357585 - DNA, 12 bp, Artificial Sequence
  Oligonucleotide primer for the detection of SNP TSC0007355
ttgaagttatat

SEQ ID NO: 357586 - DNA, 12 bp, Artificial Sequence
  Oligonucleotide primer for the detection of SNP TSC0007355
aaaatcatacaa

SEQ ID NO: 357587 - DNA, 12 bp, Artificial Sequence
  Oligonucleotide primer for the detection of SNP TSC0007355
ttattattaagt

SEQ ID NO: 357588 - DNA, 12 bp, Artificial Sequence
  Oligonucleotide primer for the detection of SNP TSC0007356
accttaaaacaa

SEQ ID NO: 357589 - DNA, 12 bp, Artificial Sequence
  Oligonucleotide primer for the detection of SNP TSC0007356
gccttaaaacaa

SEQ ID NO: 357590 - DNA, 12 bp, Artificial Sequence
  Oligonucleotide primer for the detection of SNP TSC0007356
taaaggatatat

SEQ ID NO: 357591 - DNA, 12 bp, Artificial Sequence
  Oligonucleotide primer for the detection of SNP TSC0007356
gttttaaggtag

SEQ ID NO: 357592 - DNA, 12 bp, Artificial Sequence
  Oligonucleotide primer for the detection of SNP TSC0010024
ctatccctcact

SEQ ID NO: 357593 - DNA, 12 bp, Artificial Sequence
  Oligonucleotide primer for the detection of SNP TSC0010024
aataaagttgta

SEQ ID NO: 357594 - DNA, 12 bp, Artificial Sequence
  Oligonucleotide primer for the detection of SNP TSC0006162
aactaaacaatt

SEQ ID NO: 357595 - DNA, 12 bp, Artificial Sequence
  Oligonucleotide primer for the detection of SNP TSC0050704
ttatagtgaatt

SEQ ID NO: 357596 - DNA, 12 bp, Artificial Sequence
  Oligonucleotide primer for the detection of SNP TSC0050704
ttttacaataaa

SEQ ID NO: 357597 - DNA, 12 bp, Artificial Sequence
  Oligonucleotide primer for the detection of SNP TSC0050704
ttaaggaagtag

SEQ ID NO: 357598 - DNA, 12 bp, Artificial Sequence
  Oligonucleotide primer for the detection of SNP TSC0050705
gatagtggtttt

SEQ ID NO: 357599 - DNA, 12 bp, Artificial Sequence
  Oligonucleotide primer for the detection of SNP TSC0050705
aactaacaataa

SEQ ID NO: 357600 - DNA, 12 bp, Artificial Sequence
  Oligonucleotide primer for the detection of SNP TSC0050705
aagtttatagat

SEQ ID NO: 357601 - DNA, 12 bp, Artificial Sequence
  Oligonucleotide primer for the detection of SNP TSC0007000
tttgaagatttt

SEQ ID NO: 357602 - DNA, 12 bp, Artificial Sequence
  Oligonucleotide primer for the detection of SNP TSC0007000
tctaaaaactcc

SEQ ID NO: 357603 - DNA, 12 bp, Artificial Sequence
  Oligonucleotide primer for the detection of SNP TSC0007000
aggaggtgtagg

SEQ ID NO: 357604 - DNA, 12 bp, Artificial Sequence
  Oligonucleotide primer for the detection of SNP TSC0007001
aatcaccaatta

SEQ ID NO: 357605 - DNA, 12 bp, Artificial Sequence
  Oligonucleotide primer for the detection of SNP TSC0000130
tccaaaaactat

SEQ ID NO: 357606 - DNA, 12 bp, Artificial Sequence
  Oligonucleotide primer for the detection of SNP TSC0000130
atccccattcac

SEQ ID NO: 357607 - DNA, 12 bp, Artificial Sequence
  Oligonucleotide primer for the detection of SNP TSC0000130
gagttgtttttt

SEQ ID NO: 357608 - DNA, 12 bp, Artificial Sequence
  Oligonucleotide primer for the detection of SNP TSC0000131
ctccacaacaac

SEQ ID NO: 357609 - DNA, 12 bp, Artificial Sequence
  Oligonucleotide primer for the detection of SNP TSC0000131
ataatgtatgta

SEQ ID NO: 357610 - DNA, 12 bp, Artificial Sequence
  Oligonucleotide primer for the detection of SNP TSC0050707
ccatatatctcc

SEQ ID NO: 357611 - DNA, 12 bp, Artificial Sequence
  Oligonucleotide primer for the detection of SNP TSC0050707
ttagggttaatg

SEQ ID NO: 357612 - DNA, 12 bp, Artificial Sequence
  Oligonucleotide primer for the detection of SNP TSC0050708
tagattgtggtt

SEQ ID NO: 357613 - DNA, 12 bp, Artificial Sequence
  Oligonucleotide primer for the detection of SNP TSC0050708
tagattgtggtc

SEQ ID NO: 357614 - DNA, 12 bp, Artificial Sequence
  Oligonucleotide primer for the detection of SNP TSC0050708
acaaactataat

SEQ ID NO: 357615 - DNA, 12 bp, Artificial Sequence
  Oligonucleotide primer for the detection of SNP TSC0050708
agaatggattta

SEQ ID NO: 357616 - DNA, 12 bp, Artificial Sequence
  Oligonucleotide primer for the detection of SNP TSC0005948
cataatactaaa

SEQ ID NO: 357617 - DNA, 12 bp, Artificial Sequence
  Oligonucleotide primer for the detection of SNP TSC0005948
catccttaaaaa

SEQ ID NO: 357618 - DNA, 12 bp, Artificial Sequence
  Oligonucleotide primer for the detection of SNP TSC0005948
tggtattggatt

SEQ ID NO: 357619 - DNA, 12 bp, Artificial Sequence
  Oligonucleotide primer for the detection of SNP TSC0050710
atataaataaaa

SEQ ID NO: 357620 - DNA, 12 bp, Artificial Sequence
  Oligonucleotide primer for the detection of SNP TSC0050710
gtttggttttgt

SEQ ID NO: 357621 - DNA, 12 bp, Artificial Sequence
  Oligonucleotide primer for the detection of SNP TSC0050710
tttaactctata

SEQ ID NO: 357622 - DNA, 12 bp, Artificial Sequence
  Oligonucleotide primer for the detection of SNP TSC0050710
tgagatgtgggt

SEQ ID NO: 357623 - DNA, 12 bp, Artificial Sequence
  Oligonucleotide primer for the detection of SNP TSC0050711
ccaaaactaaat

SEQ ID NO: 357624 - DNA, 12 bp, Artificial Sequence
  Oligonucleotide primer for the detection of SNP TSC0010273
acaaaaaaaccc

SEQ ID NO: 357625 - DNA, 12 bp, Artificial Sequence
  Oligonucleotide primer for the detection of SNP TSC0010273
acgaaaaaaccc

SEQ ID NO: 357626 - DNA, 12 bp, Artificial Sequence
  Oligonucleotide primer for the detection of SNP TSC0010273
tagttagtgaaa

SEQ ID NO: 357627 - DNA, 12 bp, Artificial Sequence
  Oligonucleotide primer for the detection of SNP TSC0010273
caatcaataaaa

SEQ ID NO: 357628 - DNA, 12 bp, Artificial Sequence
  Oligonucleotide primer for the detection of SNP TSC0010273
gtggggagattt

SEQ ID NO: 357629 - DNA, 12 bp, Artificial Sequence
  Oligonucleotide primer for the detection of SNP TSC0010273
gcggggagattt

SEQ ID NO: 357630 - DNA, 12 bp, Artificial Sequence
  Oligonucleotide primer for the detection of SNP TSC0000658
tacaatcaattc

SEQ ID NO: 357631 - DNA, 12 bp, Artificial Sequence
  Oligonukleotid-Primer
gattatagagtg

SEQ ID NO: 357632 - DNA, 12 bp, Artificial Sequence
  Oligonucleotide primer for the detection of SNP TSC0050716
gtaagagtaatg

SEQ ID NO: 357633 - DNA, 12 bp, Artificial Sequence
  Oligonucleotide primer for the detection of SNP TSC0050717
ttacataatata

SEQ ID NO: 357634 - DNA, 12 bp, Artificial Sequence
  Oligonucleotide primer for the detection of SNP TSC0050717
gtattgtaatag

SEQ ID NO: 357635 - DNA, 12 bp, Artificial Sequence
  Oligonukleotid-Primer
atattataacaa

SEQ ID NO: 357636 - DNA, 12 bp, Artificial Sequence
  Oligonucleotide primer for the detection of SNP TSC0050717
gtataatatatt

SEQ ID NO: 357637 - DNA, 12 bp, Artificial Sequence
  Oligonucleotide primer for the detection of SNP TSC0050718
tactatcaattc

SEQ ID NO: 357638 - DNA, 12 bp, Artificial Sequence
  Oligonucleotide primer for the detection of SNP TSC0005904
aataataacata

SEQ ID NO: 357639 - DNA, 12 bp, Artificial Sequence
  Oligonukleotid-Primer
tatatatacgtt

SEQ ID NO: 357640 - DNA, 12 bp, Artificial Sequence
  Oligonucleotide primer for the detection of SNP TSC0005904
tatatatatgtc

SEQ ID NO: 357641 - DNA, 12 bp, Artificial Sequence
  Oligonucleotide primer for the detection of SNP TSC0005904
tatatatacgtc

SEQ ID NO: 357642 - DNA, 12 bp, Artificial Sequence
  Oligonucleotide primer for the detection of SNP TSC0005904
cacacacacatc

SEQ ID NO: 357643 - DNA, 12 bp, Artificial Sequence
  Oligonucleotide primer for the detection of SNP TSC0005904
cacacacacgtc

SEQ ID NO: 357644 - DNA, 12 bp, Artificial Sequence
  Oligonucleotide primer for the detection of SNP TSC0050720
tatttacaaact

SEQ ID NO: 357645 - DNA, 12 bp, Artificial Sequence
  Oligonucleotide primer for the detection of SNP TSC0050720
tatttacgaact

SEQ ID NO: 357646 - DNA, 12 bp, Artificial Sequence
  Oligonucleotide primer for the detection of SNP TSC0006563
atcccttctctc

SEQ ID NO: 357647 - DNA, 12 bp, Artificial Sequence
  Oligonucleotide primer for the detection of SNP TSC0006563
gaggattagaat

SEQ ID NO: 357648 - DNA, 12 bp, Artificial Sequence
  Oligonucleotide primer for the detection of SNP TSC0006563
gaggattagaac

SEQ ID NO: 357649 - DNA, 12 bp, Artificial Sequence
  Oligonucleotide primer for the detection of SNP TSC0007065
ttttataattag

SEQ ID NO: 357650 - DNA, 12 bp, Artificial Sequence
  Oligonucleotide primer for the detection of SNP TSC0007066
catctcccctcc

SEQ ID NO: 357651 - DNA, 12 bp, Artificial Sequence
  Oligonucleotide primer for the detection of SNP TSC0007066
agggtaatgggt

SEQ ID NO: 357652 - DNA, 12 bp, Artificial Sequence
  Oligonucleotide primer for the detection of SNP TSC0001422
taaatattaact

SEQ ID NO: 357653 - DNA, 12 bp, Artificial Sequence
  Oligonucleotide primer for the detection of SNP TSC0001422
agtatttaatta

SEQ ID NO: 357654 - DNA, 12 bp, Artificial Sequence
  Oligonucleotide primer for the detection of SNP TSC0001422
aacacctaatta

SEQ ID NO: 357655 - DNA, 12 bp, Artificial Sequence
  Oligonucleotide primer for the detection of SNP TSC0001423
ctttaaaattat

SEQ ID NO: 357656 - DNA, 12 bp, Artificial Sequence
  Oligonucleotide primer for the detection of SNP TSC0001423
tatagataagaa

SEQ ID NO: 357657 - DNA, 12 bp, Artificial Sequence
  Oligonucleotide primer for the detection of SNP TSC0050723
tcaaaactatct

SEQ ID NO: 357658 - DNA, 12 bp, Artificial Sequence
  Oligonucleotide primer for the detection of SNP TSC0050723
taatttctctct

SEQ ID NO: 357659 - DNA, 12 bp, Artificial Sequence
  Oligonucleotide primer for the detection of SNP TSC0050723
ttaaggttgttt

SEQ ID NO: 357660 - DNA, 12 bp, Artificial Sequence
  Oligonucleotide primer for the detection of SNP TSC0050727
ttttcttaaact

SEQ ID NO: 357661 - DNA, 12 bp, Artificial Sequence
  Oligonucleotide primer for the detection of SNP TSC0050728
cattttttaaat

SEQ ID NO: 357662 - DNA, 12 bp, Artificial Sequence
  Oligonucleotide primer for the detection of SNP TSC0050728
aagtggtaatga

SEQ ID NO: 357663 - DNA, 12 bp, Artificial Sequence
  Oligonucleotide primer for the detection of SNP TSC0050729
attaaataacta

SEQ ID NO: 357664 - DNA, 12 bp, Artificial Sequence
  Oligonucleotide primer for the detection of SNP TSC0050729
tttacctcttat

SEQ ID NO: 357665 - DNA, 12 bp, Artificial Sequence
  Oligonucleotide primer for the detection of SNP TSC0050729
gttgaatgattg

SEQ ID NO: 357666 - DNA, 12 bp, Artificial Sequence
  Oligonucleotide primer for the detection of SNP TSC0009608
tttcacatcttc

SEQ ID NO: 357667 - DNA, 12 bp, Artificial Sequence
  Oligonucleotide primer for the detection of SNP TSC0009608
atgttatataga

SEQ ID NO: 357668 - DNA, 12 bp, Artificial Sequence
  Oligonucleotide primer for the detection of SNP TSC0009609
ccaaaaacaaat

SEQ ID NO: 357669 - DNA, 12 bp, Artificial Sequence
  Oligonucleotide primer for the detection of SNP TSC0009609
ggtatggtattg

SEQ ID NO: 357670 - DNA, 12 bp, Artificial Sequence
  Oligonucleotide primer for the detection of SNP TSC0050730
ttaatatatcaa

SEQ ID NO: 357671 - DNA, 12 bp, Artificial Sequence
  Oligonucleotide primer for the detection of SNP TSC0050730
tatattattgat

SEQ ID NO: 357672 - DNA, 12 bp, Artificial Sequence
  Oligonucleotide primer for the detection of SNP TSC0000514
tattaaaaccac

SEQ ID NO: 357673 - DNA, 12 bp, Artificial Sequence
  Oligonucleotide primer for the detection of SNP TSC0000514
tattgaaattat

SEQ ID NO: 357674 - DNA, 12 bp, Artificial Sequence
  Oligonucleotide primer for the detection of SNP TSC0000514
tattgaaattac

SEQ ID NO: 357675 - DNA, 12 bp, Artificial Sequence
  Oligonucleotide primer for the detection of SNP TSC0004531
aactaattttac

SEQ ID NO: 357676 - DNA, 12 bp, Artificial Sequence
  Oligonucleotide primer for the detection of SNP TSC0004531
attttttgggga

SEQ ID NO: 357677 - DNA, 12 bp, Artificial Sequence
  Oligonucleotide primer for the detection of SNP TSC0050732
aaaacccctact

SEQ ID NO: 357678 - DNA, 12 bp, Artificial Sequence
  Oligonucleotide primer for the detection of SNP TSC0050732
ttatgtaatata

SEQ ID NO: 357679 - DNA, 12 bp, Artificial Sequence
  Oligonucleotide primer for the detection of SNP TSC0005077
tatttaataata

SEQ ID NO: 357680 - DNA, 12 bp, Artificial Sequence
  Oligonucleotide primer for the detection of SNP TSC0005077
aggagaaataat

SEQ ID NO: 357681 - DNA, 12 bp, Artificial Sequence
  Oligonucleotide primer for the detection of SNP TSC0005077
tgtttgatggta

SEQ ID NO: 357682 - DNA, 12 bp, Artificial Sequence
  Oligonucleotide primer for the detection of SNP TSC0050733
cataaacccaaa

SEQ ID NO: 357683 - DNA, 12 bp, Artificial Sequence
  Oligonucleotide primer for the detection of SNP TSC0050733
gaagtaggaatt

SEQ ID NO: 357684 - DNA, 12 bp, Artificial Sequence
  Oligonucleotide primer for the detection of SNP TSC0050737
tcactcctaaaa

SEQ ID NO: 357685 - DNA, 12 bp, Artificial Sequence
  Oligonucleotide primer for the detection of SNP TSC0050737
gtggttttgttg

SEQ ID NO: 357686 - DNA, 12 bp, Artificial Sequence
  Oligonucleotide primer for the detection of SNP TSC0050737
gtggtttcgttg

SEQ ID NO: 357687 - DNA, 12 bp, Artificial Sequence
  Oligonucleotide primer for the detection of SNP TSC0050737
ataatctcacta

SEQ ID NO: 357688 - DNA, 12 bp, Artificial Sequence
  Oligonucleotide primer for the detection of SNP TSC0050737
ataatctcgcta

SEQ ID NO: 357689 - DNA, 12 bp, Artificial Sequence
  Oligonucleotide primer for the detection of SNP TSC0050737
gtaatctcacta

SEQ ID NO: 357690 - DNA, 12 bp, Artificial Sequence
  Oligonucleotide primer for the detection of SNP TSC0050737
gtaatctcgcta

SEQ ID NO: 357691 - DNA, 12 bp, Artificial Sequence
  Oligonucleotide primer for the detection of SNP TSC0050737
ttatttttgaag

SEQ ID NO: 357692 - DNA, 12 bp, Artificial Sequence
  Oligonucleotide primer for the detection of SNP TSC0050738
ttttaatataat

SEQ ID NO: 357693 - DNA, 12 bp, Artificial Sequence
  Oligonucleotide primer for the detection of SNP TSC0050738
attgtattgttt

SEQ ID NO: 357694 - DNA, 12 bp, Artificial Sequence
  Oligonucleotide primer for the detection of SNP TSC0050738
ttttgatatggt

SEQ ID NO: 357695 - DNA, 12 bp, Artificial Sequence
  Oligonucleotide primer for the detection of SNP TSC0050739
tggtttaatttg

SEQ ID NO: 357696 - DNA, 12 bp, Artificial Sequence
  Oligonucleotide primer for the detection of SNP TSC0050741
ttgatgagattt

SEQ ID NO: 357697 - DNA, 12 bp, Artificial Sequence
  Oligonucleotide primer for the detection of SNP TSC0050741
gaatagatatat

SEQ ID NO: 357698 - DNA, 12 bp, Artificial Sequence
  Oligonucleotide primer for the detection of SNP TSC0050742
acttattttatt

SEQ ID NO: 357699 - DNA, 12 bp, Artificial Sequence
  Oligonucleotide primer for the detection of SNP TSC0050742
atttgttttgtt

SEQ ID NO: 357700 - DNA, 12 bp, Artificial Sequence
  Oligonucleotide primer for the detection of SNP TSC0050744
aacacctaacac

SEQ ID NO: 357701 - DNA, 12 bp, Artificial Sequence
  Oligonucleotide primer for the detection of SNP TSC0005638
accatttcaaaa

SEQ ID NO: 357702 - DNA, 12 bp, Artificial Sequence
  Oligonucleotide primer for the detection of SNP TSC0005638
agatttttttat

SEQ ID NO: 357703 - DNA, 12 bp, Artificial Sequence
  Oligonucleotide primer for the detection of SNP TSC0005638
aaacctccccac

SEQ ID NO: 357704 - DNA, 12 bp, Artificial Sequence
  Oligonucleotide primer for the detection of SNP TSC0005638
ggttattttagg

SEQ ID NO: 357705 - DNA, 12 bp, Artificial Sequence
  Oligonucleotide primer for the detection of SNP TSC0005639
tcaaacaccaac

SEQ ID NO: 357706 - DNA, 12 bp, Artificial Sequence
  Oligonucleotide primer for the detection of SNP TSC0005639
tcgaacaccaac

SEQ ID NO: 357707 - DNA, 12 bp, Artificial Sequence
  Oligonucleotide primer for the detection of SNP TSC0050745
tataattcatac

SEQ ID NO: 357708 - DNA, 12 bp, Artificial Sequence
  Oligonucleotide primer for the detection of SNP TSC0050745
gttattattata

SEQ ID NO: 357709 - DNA, 12 bp, Artificial Sequence
  Oligonucleotide primer for the detection of SNP TSC0050745
accaccaccaca

SEQ ID NO: 357710 - DNA, 12 bp, Artificial Sequence
  Oligonucleotide primer for the detection of SNP TSC0050745
tatggtttatgt

SEQ ID NO: 357711 - DNA, 12 bp, Artificial Sequence
  Oligonucleotide primer for the detection of SNP TSC0050746
tttaaattgttt

SEQ ID NO: 357712 - DNA, 12 bp, Artificial Sequence
  Oligonucleotide primer for the detection of SNP TSC0050747
aaatcctaaaat

SEQ ID NO: 357713 - DNA, 12 bp, Artificial Sequence
  Oligonucleotide primer for the detection of SNP TSC0050747
gttaatgtttgt

SEQ ID NO: 357714 - DNA, 12 bp, Artificial Sequence
  Oligonucleotide primer for the detection of SNP TSC0050747
actaatacctat

SEQ ID NO: 357715 - DNA, 12 bp, Artificial Sequence
  Oligonucleotide primer for the detection of SNP TSC0050747
aagttttgggat

SEQ ID NO: 357716 - DNA, 12 bp, Artificial Sequence
  Oligonucleotide primer for the detection of SNP TSC0050748
aacccttttttt

SEQ ID NO: 357717 - DNA, 12 bp, Artificial Sequence
  Oligonucleotide primer for the detection of SNP TSC0050748
gtttttatagta

SEQ ID NO: 357718 - DNA, 12 bp, Artificial Sequence
  Oligonucleotide primer for the detection of SNP TSC0050749
aaacaaaccctt

SEQ ID NO: 357719 - DNA, 12 bp, Artificial Sequence
  Oligonucleotide primer for the detection of SNP TSC0050749
atagtagtaaaa

SEQ ID NO: 357720 - DNA, 12 bp, Artificial Sequence
  Oligonucleotide primer for the detection of SNP TSC0050750
aatatcccccaa

SEQ ID NO: 357721 - DNA, 12 bp, Artificial Sequence
  Oligonucleotide primer for the detection of SNP TSC0050750
gtagttatgggt

SEQ ID NO: 357722 - DNA, 12 bp, Artificial Sequence
  Oligonucleotide primer for the detection of SNP TSC0050750
gatgttttttag

SEQ ID NO: 357723 - DNA, 12 bp, Artificial Sequence
  Oligonucleotide primer for the detection of SNP TSC0050751
aatatcctactt

SEQ ID NO: 357724 - DNA, 12 bp, Artificial Sequence
  Oligonucleotide primer for the detection of SNP TSC0050752
atccacaaatta

SEQ ID NO: 357725 - DNA, 12 bp, Artificial Sequence
  Oligonucleotide primer for the detection of SNP TSC0050752
attaaaatttct

SEQ ID NO: 357726 - DNA, 12 bp, Artificial Sequence
  Oligonucleotide primer for the detection of SNP TSC0050752
ggtttatagatt

SEQ ID NO: 357727 - DNA, 12 bp, Artificial Sequence
  Oligonucleotide primer for the detection of SNP TSC0050753
ttttacatttat

SEQ ID NO: 357728 - DNA, 12 bp, Artificial Sequence
  Oligonucleotide primer for the detection of SNP TSC0050753
ttgaaggttaga

SEQ ID NO: 357729 - DNA, 12 bp, Artificial Sequence
  Oligonucleotide primer for the detection of SNP TSC0004679
ctctacactaca

SEQ ID NO: 357730 - DNA, 12 bp, Artificial Sequence
  Oligonucleotide primer for the detection of SNP TSC0004679
ctctacactacg

SEQ ID NO: 357731 - DNA, 12 bp, Artificial Sequence
  Oligonucleotide primer for the detection of SNP TSC0004679
attaaatttgtt

SEQ ID NO: 357732 - DNA, 12 bp, Artificial Sequence
  Oligonucleotide primer for the detection of SNP TSC0004679
accaaatctatt

SEQ ID NO: 357733 - DNA, 12 bp, Artificial Sequence
  Oligonucleotide primer for the detection of SNP TSC0004679
ttttatattgtg

SEQ ID NO: 357734 - DNA, 12 bp, Artificial Sequence
  Oligonucleotide primer for the detection of SNP TSC0004679
ttttatattgcg

SEQ ID NO: 357735 - DNA, 12 bp, Artificial Sequence
  Oligonucleotide primer for the detection of SNP TSC0050754
ataataatcctt

SEQ ID NO: 357736 - DNA, 12 bp, Artificial Sequence
  Oligonucleotide primer for the detection of SNP TSC0050754
tttaccataata

SEQ ID NO: 357737 - DNA, 12 bp, Artificial Sequence
  Oligonucleotide primer for the detection of SNP TSC0050754
gtggtagttttt

SEQ ID NO: 357738 - DNA, 12 bp, Artificial Sequence
  Oligonucleotide primer for the detection of SNP TSC0050756
tcatctcccacc

SEQ ID NO: 357739 - DNA, 12 bp, Artificial Sequence
  Oligonucleotide primer for the detection of SNP TSC0050756
tgttgggtgtgg

SEQ ID NO: 357740 - DNA, 12 bp, Artificial Sequence
  Oligonucleotide primer for the detection of SNP TSC0050757
catttaaatatt

SEQ ID NO: 357741 - DNA, 12 bp, Artificial Sequence
  Oligonucleotide primer for the detection of SNP TSC0050757
tgagattggaaa

SEQ ID NO: 357742 - DNA, 12 bp, Artificial Sequence
  Oligonucleotide primer for the detection of SNP TSC0050758
cccacctactac

SEQ ID NO: 357743 - DNA, 12 bp, Artificial Sequence
  Oligonucleotide primer for the detection of SNP TSC0050758
atgtgattttta

SEQ ID NO: 357744 - DNA, 12 bp, Artificial Sequence
  Oligonucleotide primer for the detection of SNP TSC0005411
ccaacacccccc

SEQ ID NO: 357745 - DNA, 12 bp, Artificial Sequence
  Oligonucleotide primer for the detection of SNP TSC0005411
ttgtgggagggg

SEQ ID NO: 357746 - DNA, 12 bp, Artificial Sequence
  Oligonucleotide primer for the detection of SNP TSC0005412
ttcctaactact

SEQ ID NO: 357747 - DNA, 12 bp, Artificial Sequence
  Oligonucleotide primer for the detection of SNP TSC0005412
gtggggtatata

SEQ ID NO: 357748 - DNA, 12 bp, Artificial Sequence
  Oligonucleotide primer for the detection of SNP TSC0050759
aagggggtaaag

SEQ ID NO: 357749 - DNA, 12 bp, Artificial Sequence
  Oligonucleotide primer for the detection of SNP TSC0050759
tggggggtagat

SEQ ID NO: 357750 - DNA, 12 bp, Artificial Sequence
  Oligonucleotide primer for the detection of SNP TSC0008132
cacattaaatta

SEQ ID NO: 357751 - DNA, 12 bp, Artificial Sequence
  Oligonucleotide primer for the detection of SNP TSC0008132
ccacaaaccata

SEQ ID NO: 357752 - DNA, 12 bp, Artificial Sequence
  Oligonucleotide primer for the detection of SNP TSC0008132
attaagttattt

SEQ ID NO: 357753 - DNA, 12 bp, Artificial Sequence
  Oligonucleotide primer for the detection of SNP TSC0050766
tatatatgtatg

SEQ ID NO: 357754 - DNA, 12 bp, Artificial Sequence
  Oligonucleotide primer for the detection of SNP TSC0050766
tatatacgtatg

SEQ ID NO: 357755 - DNA, 12 bp, Artificial Sequence
  Oligonucleotide primer for the detection of SNP TSC0050766
tatatatgtacg

SEQ ID NO: 357756 - DNA, 12 bp, Artificial Sequence
  Oligonucleotide primer for the detection of SNP TSC0050766
tatatacgtacg

SEQ ID NO: 357757 - DNA, 12 bp, Artificial Sequence
  Oligonucleotide primer for the detection of SNP TSC0050767
ttggaattaggt

SEQ ID NO: 357758 - DNA, 12 bp, Artificial Sequence
  Oligonucleotide primer for the detection of SNP TSC0050767
ttggaattaggc

SEQ ID NO: 357759 - DNA, 12 bp, Artificial Sequence
  Oligonucleotide primer for the detection of SNP TSC0050767
taggatggatta

SEQ ID NO: 357760 - DNA, 12 bp, Artificial Sequence
  Oligonucleotide primer for the detection of SNP TSC0050768
tttaaagtaata

SEQ ID NO: 357761 - DNA, 12 bp, Artificial Sequence
  Oligonucleotide primer for the detection of SNP TSC0050769
aacaaatctaac

SEQ ID NO: 357762 - DNA, 12 bp, Artificial Sequence
  Oligonucleotide primer for the detection of SNP TSC0050769
attgggtttttt

SEQ ID NO: 357763 - DNA, 12 bp, Artificial Sequence
  Oligonucleotide primer for the detection of SNP TSC0050769
atcgggtttttt

SEQ ID NO: 357764 - DNA, 12 bp, Artificial Sequence
  Oligonucleotide primer for the detection of SNP TSC0050773
acaaaattactt

SEQ ID NO: 357765 - DNA, 12 bp, Artificial Sequence
  Oligonucleotide primer for the detection of SNP TSC0050773
gtatgtatatgg

SEQ ID NO: 357766 - DNA, 12 bp, Artificial Sequence
  Oligonucleotide primer for the detection of SNP TSC0050774
acattaataatc

SEQ ID NO: 357767 - DNA, 12 bp, Artificial Sequence
  Oligonucleotide primer for the detection of SNP TSC0050774
tgttaaaaatta

SEQ ID NO: 357768 - DNA, 12 bp, Artificial Sequence
  Oligonucleotide primer for the detection of SNP TSC0050778
caaacacaatat

SEQ ID NO: 357769 - DNA, 12 bp, Artificial Sequence
  Oligonucleotide primer for the detection of SNP TSC0050778
tattgtaatgaa

SEQ ID NO: 357770 - DNA, 12 bp, Artificial Sequence
  Oligonucleotide primer for the detection of SNP TSC0050780
ccactaaataat

SEQ ID NO: 357771 - DNA, 12 bp, Artificial Sequence
  Oligonucleotide primer for the detection of SNP TSC0050781
atatttacgaat

SEQ ID NO: 357772 - DNA, 12 bp, Artificial Sequence
  Oligonucleotide primer for the detection of SNP TSC0050781
atacccacaaac

SEQ ID NO: 357773 - DNA, 12 bp, Artificial Sequence
  Oligonucleotide primer for the detection of SNP TSC0050781
atacccacgaac

SEQ ID NO: 357774 - DNA, 12 bp, Artificial Sequence
  Oligonucleotide primer for the detection of SNP TSC0050781
gaaagggaggga

SEQ ID NO: 357775 - DNA, 12 bp, Artificial Sequence
  Oligonucleotide primer for the detection of SNP TSC0050784
caaaaatcattc

SEQ ID NO: 357776 - DNA, 12 bp, Artificial Sequence
  Oligonucleotide primer for the detection of SNP TSC0050784
gtaatttgtttt

SEQ ID NO: 357777 - DNA, 12 bp, Artificial Sequence
  Oligonucleotide primer for the detection of SNP TSC0050784
gtaatttgtttc

SEQ ID NO: 357778 - DNA, 12 bp, Artificial Sequence
  Oligonucleotide primer for the detection of SNP TSC0050784
aacaacttactt

SEQ ID NO: 357779 - DNA, 12 bp, Artificial Sequence
  Oligonucleotide primer for the detection of SNP TSC0050786
tcacataattac

SEQ ID NO: 357780 - DNA, 12 bp, Artificial Sequence
  Oligonucleotide primer for the detection of SNP TSC0050786
tatatatattta

SEQ ID NO: 357781 - DNA, 12 bp, Artificial Sequence
  Oligonucleotide primer for the detection of SNP TSC0050787
tttttttaaaac

SEQ ID NO: 357782 - DNA, 12 bp, Artificial Sequence
  Oligonucleotide primer for the detection of SNP TSC0050787
taataaagtgag

SEQ ID NO: 357783 - DNA, 12 bp, Artificial Sequence
  Oligonucleotide primer for the detection of SNP TSC0050787
taataaagcgag

SEQ ID NO: 357784 - DNA, 12 bp, Artificial Sequence
  Oligonucleotide primer for the detection of SNP TSC0050788
ccacttaacatt

SEQ ID NO: 357785 - DNA, 12 bp, Artificial Sequence
  Oligonucleotide primer for the detection of SNP TSC0050790
caaacacttatt

SEQ ID NO: 357786 - DNA, 12 bp, Artificial Sequence
  Oligonucleotide primer for the detection of SNP TSC0050790
taatggtaagta

SEQ ID NO: 357787 - DNA, 12 bp, Artificial Sequence
  Oligonucleotide primer for the detection of SNP TSC0050790
caataataaaca

SEQ ID NO: 357788 - DNA, 12 bp, Artificial Sequence
  Oligonucleotide primer for the detection of SNP TSC0050790
taagtatttatt

SEQ ID NO: 357789 - DNA, 12 bp, Artificial Sequence
  Oligonucleotide primer for the detection of SNP TSC0050791
ctcccaaatcta

SEQ ID NO: 357790 - DNA, 12 bp, Artificial Sequence
  Oligonucleotide primer for the detection of SNP TSC0050791
atatgaaataag

SEQ ID NO: 357791 - DNA, 12 bp, Artificial Sequence
  Oligonucleotide primer for the detection of SNP TSC0050792
tcttctataata

SEQ ID NO: 357792 - DNA, 12 bp, Artificial Sequence
  Oligonucleotide primer for the detection of SNP TSC0050792
taattttagatt

SEQ ID NO: 357793 - DNA, 12 bp, Artificial Sequence
  Oligonucleotide primer for the detection of SNP TSC0050793
ttctatcttcac

SEQ ID NO: 357794 - DNA, 12 bp, Artificial Sequence
  Oligonucleotide primer for the detection of SNP TSC0050793
aataataagtaa

SEQ ID NO: 357795 - DNA, 12 bp, Artificial Sequence
  Oligonucleotide primer for the detection of SNP TSC0050796
tataatataccc

SEQ ID NO: 357796 - DNA, 12 bp, Artificial Sequence
  Oligonucleotide primer for the detection of SNP TSC0050797
agattattataa

SEQ ID NO: 357797 - DNA, 12 bp, Artificial Sequence
  Oligonucleotide primer for the detection of SNP TSC0050798
tatcatttccat

SEQ ID NO: 357798 - DNA, 12 bp, Artificial Sequence
  Oligonucleotide primer for the detection of SNP TSC0050798
ttaaatagaaaa

SEQ ID NO: 357799 - DNA, 12 bp, Artificial Sequence
  Oligonucleotide primer for the detection of SNP TSC0050798
tgttatttttat

SEQ ID NO: 357800 - DNA, 12 bp, Artificial Sequence
  Oligonucleotide primer for the detection of SNP TSC0050799
cacaccaaaaat

SEQ ID NO: 357801 - DNA, 12 bp, Artificial Sequence
  Oligonucleotide primer for the detection of SNP TSC0050799
cgcaccaaaaat

SEQ ID NO: 357802 - DNA, 12 bp, Artificial Sequence
  Oligonucleotide primer for the detection of SNP TSC0050803
ttaattatctac

SEQ ID NO: 357803 - DNA, 12 bp, Artificial Sequence
  Oligonucleotide primer for the detection of SNP TSC0050803
taataaaaagta

SEQ ID NO: 357804 - DNA, 12 bp, Artificial Sequence
  Oligonucleotide primer for the detection of SNP TSC0050805
actaactaactt

SEQ ID NO: 357805 - DNA, 12 bp, Artificial Sequence
  Oligonucleotide primer for the detection of SNP TSC0050805
gctaactaactt

SEQ ID NO: 357806 - DNA, 12 bp, Artificial Sequence
  Oligonucleotide primer for the detection of SNP TSC0050805
gagttggtatgg

SEQ ID NO: 357807 - DNA, 12 bp, Artificial Sequence
  Oligonucleotide primer for the detection of SNP TSC0050805
gagtcggtatgg

SEQ ID NO: 357808 - DNA, 12 bp, Artificial Sequence
  Oligonucleotide primer for the detection of SNP TSC0050805
gagttggtacgg

SEQ ID NO: 357809 - DNA, 12 bp, Artificial Sequence
  Oligonucleotide primer for the detection of SNP TSC0050805
gagtcggtacgg

SEQ ID NO: 357810 - DNA, 12 bp, Artificial Sequence
  Oligonucleotide primer for the detection of SNP TSC0050805
aaatcaacacga

SEQ ID NO: 357811 - DNA, 12 bp, Artificial Sequence
  Oligonucleotide primer for the detection of SNP TSC0050805
aaatcgacacaa

SEQ ID NO: 357812 - DNA, 12 bp, Artificial Sequence
  Oligonucleotide primer for the detection of SNP TSC0050805
aaatcgacacga

SEQ ID NO: 357813 - DNA, 12 bp, Artificial Sequence
  Oligonucleotide primer for the detection of SNP TSC0050805
gttaattggttt

SEQ ID NO: 357814 - DNA, 12 bp, Artificial Sequence
  Oligonucleotide primer for the detection of SNP TSC0050809
tcttatattatc

SEQ ID NO: 357815 - DNA, 12 bp, Artificial Sequence
  Oligonucleotide primer for the detection of SNP TSC0050810
ttgtatgtttga

SEQ ID NO: 357816 - DNA, 12 bp, Artificial Sequence
  Oligonucleotide primer for the detection of SNP TSC0050811
tcaaaaacatct

SEQ ID NO: 357817 - DNA, 12 bp, Artificial Sequence
  Oligonucleotide primer for the detection of SNP TSC0050811
gggtgtggagaa

SEQ ID NO: 357818 - DNA, 12 bp, Artificial Sequence
  Oligonucleotide primer for the detection of SNP TSC0050811
gggcgtggagaa

SEQ ID NO: 357819 - DNA, 12 bp, Artificial Sequence
  Oligonucleotide primer for the detection of SNP TSC0050814
catccatacaat

SEQ ID NO: 357820 - DNA, 12 bp, Artificial Sequence
  Oligonucleotide primer for the detection of SNP TSC0050814
tatttagtttaa

SEQ ID NO: 357821 - DNA, 12 bp, Artificial Sequence
  Oligonucleotide primer for the detection of SNP TSC0050815
tataatttaatt

SEQ ID NO: 357822 - DNA, 12 bp, Artificial Sequence
  Oligonucleotide primer for the detection of SNP TSC0050815
tacaacctaact

SEQ ID NO: 357823 - DNA, 12 bp, Artificial Sequence
  Oligonucleotide primer for the detection of SNP TSC0050816
ctaacaaaccac

SEQ ID NO: 357824 - DNA, 12 bp, Artificial Sequence
  Oligonucleotide primer for the detection of SNP TSC0050816
ttcattcttcta

SEQ ID NO: 357825 - DNA, 12 bp, Artificial Sequence
  Oligonucleotide primer for the detection of SNP TSC0050816
ttggtaaattat

SEQ ID NO: 357826 - DNA, 12 bp, Artificial Sequence
  Oligonucleotide primer for the detection of SNP TSC0000449
gaattgatattt

SEQ ID NO: 357827 - DNA, 12 bp, Artificial Sequence
  Oligonucleotide primer for the detection of SNP TSC0000449
aaactaatattc

SEQ ID NO: 357828 - DNA, 12 bp, Artificial Sequence
  Oligonucleotide primer for the detection of SNP TSC0000449
aatttaatgaga

SEQ ID NO: 357829 - DNA, 12 bp, Artificial Sequence
  Oligonucleotide primer for the detection of SNP TSC0050817
atcctaaaaata

SEQ ID NO: 357830 - DNA, 12 bp, Artificial Sequence
  Oligonucleotide primer for the detection of SNP TSC0050817
aagaatggtttt

SEQ ID NO: 357831 - DNA, 12 bp, Artificial Sequence
  Oligonucleotide primer for the detection of SNP TSC0050819
agaagtgatata

SEQ ID NO: 357832 - DNA, 12 bp, Artificial Sequence
  Oligonucleotide primer for the detection of SNP TSC0050824
ttaacaaatact

SEQ ID NO: 357833 - DNA, 12 bp, Artificial Sequence
  Oligonucleotide primer for the detection of SNP TSC0050824
ttaataaatgtt

SEQ ID NO: 357834 - DNA, 12 bp, Artificial Sequence
  Oligonucleotide primer for the detection of SNP TSC0050825
taaaactatatc

SEQ ID NO: 357835 - DNA, 12 bp, Artificial Sequence
  Oligonucleotide primer for the detection of SNP TSC0050825
tagggttatatc

SEQ ID NO: 357836 - DNA, 12 bp, Artificial Sequence
  Oligonucleotide primer for the detection of SNP TSC0050827
ataataaatgag

SEQ ID NO: 357837 - DNA, 12 bp, Artificial Sequence
  Oligonucleotide primer for the detection of SNP TSC0050828
cataatatcatc

SEQ ID NO: 357838 - DNA, 12 bp, Artificial Sequence
  Oligonucleotide primer for the detection of SNP TSC0050828
cataatatcgtc

SEQ ID NO: 357839 - DNA, 12 bp, Artificial Sequence
  Oligonucleotide primer for the detection of SNP TSC0050828
cgtaatatcatc

SEQ ID NO: 357840 - DNA, 12 bp, Artificial Sequence
  Oligonucleotide primer for the detection of SNP TSC0050828
cgtaatatcgtc

SEQ ID NO: 357841 - DNA, 12 bp, Artificial Sequence
  Oligonucleotide primer for the detection of SNP TSC0050828
tttgggtgttga

SEQ ID NO: 357842 - DNA, 12 bp, Artificial Sequence
  Oligonucleotide primer for the detection of SNP TSC0050829
atactacttaac

SEQ ID NO: 357843 - DNA, 12 bp, Artificial Sequence
  Oligonucleotide primer for the detection of SNP TSC0050829
attaataggaat

SEQ ID NO: 357844 - DNA, 12 bp, Artificial Sequence
  Oligonucleotide primer for the detection of SNP TSC0050829
atgttatttagt

SEQ ID NO: 357845 - DNA, 12 bp, Artificial Sequence
  Oligonucleotide primer for the detection of SNP TSC0050829
atgttatttagc

SEQ ID NO: 357846 - DNA, 12 bp, Artificial Sequence
  Oligonucleotide primer for the detection of SNP TSC0050831
actcatacacta

SEQ ID NO: 357847 - DNA, 12 bp, Artificial Sequence
  Oligonucleotide primer for the detection of SNP TSC0050831
atttacgttttt

SEQ ID NO: 357848 - DNA, 12 bp, Artificial Sequence
  Oligonukleotid-Primer
atttacattccc

SEQ ID NO: 357849 - DNA, 12 bp, Artificial Sequence
  Oligonucleotide primer for the detection of SNP TSC0050831
atttacgttccc

SEQ ID NO: 357850 - DNA, 12 bp, Artificial Sequence
  Oligonucleotide primer for the detection of SNP TSC0050831
gtttatatattg

SEQ ID NO: 357851 - DNA, 12 bp, Artificial Sequence
  Oligonucleotide primer for the detection of SNP TSC0050833
tctactcattta

SEQ ID NO: 357852 - DNA, 12 bp, Artificial Sequence
  Oligonucleotide primer for the detection of SNP TSC0050833
aaatttccctta

SEQ ID NO: 357853 - DNA, 12 bp, Artificial Sequence
  Oligonucleotide primer for the detection of SNP TSC0050835
tagttgtaaata

SEQ ID NO: 357854 - DNA, 12 bp, Artificial Sequence
  Oligonucleotide primer for the detection of SNP TSC0050835
caactataaata

SEQ ID NO: 357855 - DNA, 12 bp, Artificial Sequence
  Oligonucleotide primer for the detection of SNP TSC0050835
tgaagttttatt

SEQ ID NO: 357856 - DNA, 12 bp, Artificial Sequence
  Oligonucleotide primer for the detection of SNP TSC0050836
tatatatttaac

SEQ ID NO: 357857 - DNA, 12 bp, Artificial Sequence
  Oligonucleotide primer for the detection of SNP TSC0050836
gataatttaaag

SEQ ID NO: 357858 - DNA, 12 bp, Artificial Sequence
  Oligonucleotide primer for the detection of SNP TSC0050838
cctttatattta

SEQ ID NO: 357859 - DNA, 12 bp, Artificial Sequence
  Oligonucleotide primer for the detection of SNP TSC0050838
aaaaaattatga

SEQ ID NO: 357860 - DNA, 12 bp, Artificial Sequence
  Oligonukleotid-Primer
atacttacaatt

SEQ ID NO: 357861 - DNA, 12 bp, Artificial Sequence
  Oligonucleotide primer for the detection of SNP TSC0050839
gttaatttataa

SEQ ID NO: 357862 - DNA, 12 bp, Artificial Sequence
  Oligonucleotide primer for the detection of SNP TSC0050841
caaaattttctc

SEQ ID NO: 357863 - DNA, 12 bp, Artificial Sequence
  Oligonucleotide primer for the detection of SNP TSC0050841
tttaggtattta

SEQ ID NO: 357864 - DNA, 12 bp, Artificial Sequence
  Oligonucleotide primer for the detection of SNP TSC0007746
tttgaataatag

SEQ ID NO: 357865 - DNA, 12 bp, Artificial Sequence
  Oligonucleotide primer for the detection of SNP TSC0007746
gggattatgaga

SEQ ID NO: 357866 - DNA, 12 bp, Artificial Sequence
  Oligonucleotide primer for the detection of SNP TSC0007747
acatatcctaac

SEQ ID NO: 357867 - DNA, 12 bp, Artificial Sequence
  Oligonucleotide primer for the detection of SNP TSC0007747
aaaattaaaatc

SEQ ID NO: 357868 - DNA, 12 bp, Artificial Sequence
  Oligonucleotide primer for the detection of SNP TSC0007747
gtatattttaat

SEQ ID NO: 357869 - DNA, 12 bp, Artificial Sequence
  Oligonucleotide primer for the detection of SNP TSC0050843
acccataaaatt

SEQ ID NO: 357870 - DNA, 12 bp, Artificial Sequence
  Oligonucleotide primer for the detection of SNP TSC0050843
gagttatattta

SEQ ID NO: 357871 - DNA, 12 bp, Artificial Sequence
  Oligonucleotide primer for the detection of SNP TSC0050844
atttttaatgtt

SEQ ID NO: 357872 - DNA, 12 bp, Artificial Sequence
  Oligonucleotide primer for the detection of SNP TSC0050844
atttttaatatt

SEQ ID NO: 357873 - DNA, 12 bp, Artificial Sequence
  Oligonucleotide primer for the detection of SNP TSC0050844
gaagtagaaata

SEQ ID NO: 357874 - DNA, 12 bp, Artificial Sequence
  Oligonucleotide primer for the detection of SNP TSC0050845
gtgttttttggt

SEQ ID NO: 357875 - DNA, 12 bp, Artificial Sequence
  Oligonucleotide primer for the detection of SNP TSC0050845
tatactttttaa

SEQ ID NO: 357876 - DNA, 12 bp, Artificial Sequence
  Oligonukleotid-Primer
gttatggaggtt

SEQ ID NO: 357877 - DNA, 12 bp, Artificial Sequence
  Oligonucleotide primer for the detection of SNP TSC0050846
tatctacaattt

SEQ ID NO: 357878 - DNA, 12 bp, Artificial Sequence
  Oligonucleotide primer for the detection of SNP TSC0050850
ttaacatcaaaa

SEQ ID NO: 357879 - DNA, 12 bp, Artificial Sequence
  Oligonucleotide primer for the detection of SNP TSC0050850
ttttaaaagaag

SEQ ID NO: 357880 - DNA, 12 bp, Artificial Sequence
  Oligonucleotide primer for the detection of SNP TSC0050851
tgagagtaagag

SEQ ID NO: 357881 - DNA, 12 bp, Artificial Sequence
  Oligonucleotide primer for the detection of SNP TSC0050851
agtaaggttagt

SEQ ID NO: 357882 - DNA, 12 bp, Artificial Sequence
  Oligonucleotide primer for the detection of SNP TSC0050852
aaagtaaggtta

SEQ ID NO: 357883 - DNA, 12 bp, Artificial Sequence
  Oligonucleotide primer for the detection of SNP TSC0050853
acacaataatta

SEQ ID NO: 357884 - DNA, 12 bp, Artificial Sequence
  Oligonucleotide primer for the detection of SNP TSC0050853
tatataaatttg

SEQ ID NO: 357885 - DNA, 12 bp, Artificial Sequence
  Oligonucleotide primer for the detection of SNP TSC0050853
ataataattgtt

SEQ ID NO: 357886 - DNA, 12 bp, Artificial Sequence
  Oligonucleotide primer for the detection of SNP TSC0005268
aaacaataacac

SEQ ID NO: 357887 - DNA, 12 bp, Artificial Sequence
  Oligonucleotide primer for the detection of SNP TSC0005268
aaacgataacac

SEQ ID NO: 357888 - DNA, 12 bp, Artificial Sequence
  Oligonukleotid-Primer
aactactcctta

SEQ ID NO: 357889 - DNA, 12 bp, Artificial Sequence
  Oligonucleotide primer for the detection of SNP TSC0005268
aggtggtaatat

SEQ ID NO: 357890 - DNA, 12 bp, Artificial Sequence
  Oligonucleotide primer for the detection of SNP TSC0005268
aggcggtaatat

SEQ ID NO: 357891 - DNA, 12 bp, Artificial Sequence
  Oligonucleotide primer for the detection of SNP TSC0005269
caaatccccaac

SEQ ID NO: 357892 - DNA, 12 bp, Artificial Sequence
  Oligonucleotide primer for the detection of SNP TSC0005269
tttaggtgttag

SEQ ID NO: 357893 - DNA, 12 bp, Artificial Sequence
  Oligonucleotide primer for the detection of SNP TSC0005269
taggtttttaat

SEQ ID NO: 357894 - DNA, 12 bp, Artificial Sequence
  Oligonucleotide primer for the detection of SNP TSC0050857
caaaacctcatc

SEQ ID NO: 357895 - DNA, 12 bp, Artificial Sequence
  Oligonucleotide primer for the detection of SNP TSC0050857
gggaagtggtaa

SEQ ID NO: 357896 - DNA, 12 bp, Artificial Sequence
  Oligonukleotid-Primer
ttaccctccccc

SEQ ID NO: 357897 - DNA, 12 bp, Artificial Sequence
  Oligonucleotide primer for the detection of SNP TSC0050859
tcttaacttacc

SEQ ID NO: 357898 - DNA, 12 bp, Artificial Sequence
  Oligonucleotide primer for the detection of SNP TSC0050859
taagaaatgtta

SEQ ID NO: 357899 - DNA, 12 bp, Artificial Sequence
  Oligonucleotide primer for the detection of SNP TSC0050862
ttattttaaatt

SEQ ID NO: 357900 - DNA, 12 bp, Artificial Sequence
  Oligonukleotid-Primer
gtgagtgtaata

SEQ ID NO: 357901 - DNA, 12 bp, Artificial Sequence
  Oligonucleotide primer for the detection of SNP TSC0050863
actactataata

SEQ ID NO: 357902 - DNA, 12 bp, Artificial Sequence
  Oligonucleotide primer for the detection of SNP TSC0050863
gaagaggagtag

SEQ ID NO: 357903 - DNA, 12 bp, Artificial Sequence
  Oligonucleotide primer for the detection of SNP TSC0050863
ttgttgtaatat

SEQ ID NO: 357904 - DNA, 12 bp, Artificial Sequence
  Oligonukleotid-Primer
tttaaaagtagg

SEQ ID NO: 357905 - DNA, 12 bp, Artificial Sequence
  Oligonucleotide primer for the detection of SNP TSC0004855
ctcctctttctt

SEQ ID NO: 357906 - DNA, 12 bp, Artificial Sequence
  Oligonucleotide primer for the detection of SNP TSC0004855
aattattgataa

SEQ ID NO: 357907 - DNA, 12 bp, Artificial Sequence
  Oligonucleotide primer for the detection of SNP TSC0004855
aatcattaacaa

SEQ ID NO: 357908 - DNA, 12 bp, Artificial Sequence
  Oligonukleotid-Primer
ccaaactaaata

SEQ ID NO: 357909 - DNA, 12 bp, Artificial Sequence
  Oligonucleotide primer for the detection of SNP TSC0004806
attttttgttgt

SEQ ID NO: 357910 - DNA, 12 bp, Artificial Sequence
  Oligonucleotide primer for the detection of SNP TSC0004806
atttcttattat

SEQ ID NO: 357911 - DNA, 12 bp, Artificial Sequence
  Oligonucleotide primer for the detection of SNP TSC0050871
cctcctatctta

SEQ ID NO: 357912 - DNA, 12 bp, Artificial Sequence
  Oligonucleotide primer for the detection of SNP TSC0050871
gaatttgggaga

SEQ ID NO: 357913 - DNA, 12 bp, Artificial Sequence
  Oligonucleotide primer for the detection of SNP TSC0005816
acaaaaactccc

SEQ ID NO: 357914 - DNA, 12 bp, Artificial Sequence
  Oligonucleotide primer for the detection of SNP TSC0005113
aaatcttacata

SEQ ID NO: 357915 - DNA, 12 bp, Artificial Sequence
  Oligonucleotide primer for the detection of SNP TSC0005113
atagaattagat

SEQ ID NO: 357916 - DNA, 12 bp, Artificial Sequence
  Oligonucleotide primer for the detection of SNP TSC0005113
gattttatatgt

SEQ ID NO: 357917 - DNA, 12 bp, Artificial Sequence
  Oligonucleotide primer for the detection of SNP TSC0050872
atcattttcttt

SEQ ID NO: 357918 - DNA, 12 bp, Artificial Sequence
  Oligonucleotide primer for the detection of SNP TSC0050872
ttgtatttaaaa

SEQ ID NO: 357919 - DNA, 12 bp, Artificial Sequence
  Oligonucleotide primer for the detection of SNP TSC0050873
attagtagaatt

SEQ ID NO: 357920 - DNA, 12 bp, Artificial Sequence
  Oligonucleotide primer for the detection of SNP TSC0050873
agagaggggatg

SEQ ID NO: 357921 - DNA, 12 bp, Artificial Sequence
  Oligonucleotide primer for the detection of SNP TSC0050874
ttaataattact

SEQ ID NO: 357922 - DNA, 12 bp, Artificial Sequence
  Oligonucleotide primer for the detection of SNP TSC0050874
aaatgttttaaa

SEQ ID NO: 357923 - DNA, 12 bp, Artificial Sequence
  Oligonucleotide primer for the detection of SNP TSC0050875
aattagattgaa

SEQ ID NO: 357924 - DNA, 12 bp, Artificial Sequence
  Oligonukleotid-Primer
aataaattaatt

SEQ ID NO: 357925 - DNA, 12 bp, Artificial Sequence
  Oligonucleotide primer for the detection of SNP TSC0050876
aggtttttaagg

SEQ ID NO: 357926 - DNA, 12 bp, Artificial Sequence
  Oligonucleotide primer for the detection of SNP TSC0050877
tataactttata

SEQ ID NO: 357927 - DNA, 12 bp, Artificial Sequence
  Oligonucleotide primer for the detection of SNP TSC0050877
aaaatgtgtttg

SEQ ID NO: 357928 - DNA, 12 bp, Artificial Sequence
  Oligonucleotide primer for the detection of SNP TSC0050877
aaaatatatcta

SEQ ID NO: 357929 - DNA, 12 bp, Artificial Sequence
  Oligonucleotide primer for the detection of SNP TSC0000424
acacttttaatt

SEQ ID NO: 357930 - DNA, 12 bp, Artificial Sequence
  Oligonucleotide primer for the detection of SNP TSC0000424
tataggtaaaat

SEQ ID NO: 357931 - DNA, 12 bp, Artificial Sequence
  Oligonucleotide primer for the detection of SNP TSC0000424
tataaacaaaat

SEQ ID NO: 357932 - DNA, 12 bp, Artificial Sequence
  Oligonucleotide primer for the detection of SNP TSC0000424
gtatttttaatt

SEQ ID NO: 357933 - DNA, 12 bp, Artificial Sequence
  Oligonucleotide primer for the detection of SNP TSC0000425
ccataaacactt

SEQ ID NO: 357934 - DNA, 12 bp, Artificial Sequence
  Oligonucleotide primer for the detection of SNP TSC0000425
tagtttataaga

SEQ ID NO: 357935 - DNA, 12 bp, Artificial Sequence
  Oligonucleotide primer for the detection of SNP TSC0000426
actaatacatta

SEQ ID NO: 357936 - DNA, 12 bp, Artificial Sequence
  Oligonucleotide primer for the detection of SNP TSC0000426
tagaaataaaat

SEQ ID NO: 357937 - DNA, 12 bp, Artificial Sequence
  Oligonucleotide primer for the detection of SNP TSC0000426
attgatatattg

SEQ ID NO: 357938 - DNA, 12 bp, Artificial Sequence
  Oligonucleotide primer for the detection of SNP TSC0050881
ctaactaatttt

SEQ ID NO: 357939 - DNA, 12 bp, Artificial Sequence
  Oligonucleotide primer for the detection of SNP TSC0050882
tctatattctac

SEQ ID NO: 357940 - DNA, 12 bp, Artificial Sequence
  Oligonucleotide primer for the detection of SNP TSC0050882
agaagtataaaa

SEQ ID NO: 357941 - DNA, 12 bp, Artificial Sequence
  Oligonucleotide primer for the detection of SNP TSC0050883
acctattctatc

SEQ ID NO: 357942 - DNA, 12 bp, Artificial Sequence
  Oligonucleotide primer for the detection of SNP TSC0050884
ctaaactcacta

SEQ ID NO: 357943 - DNA, 12 bp, Artificial Sequence
  Oligonucleotide primer for the detection of SNP TSC0050884
gaagtggaggtt

SEQ ID NO: 357944 - DNA, 12 bp, Artificial Sequence
  Oligonukleotid-Primer
aaataataaacg

SEQ ID NO: 357945 - DNA, 12 bp, Artificial Sequence
  Oligonucleotide primer for the detection of SNP TSC0050885
ttgttatttatt

SEQ ID NO: 357946 - DNA, 12 bp, Artificial Sequence
  Oligonucleotide primer for the detection of SNP TSC0050885
ctactactcact

SEQ ID NO: 357947 - DNA, 12 bp, Artificial Sequence
  Oligonucleotide primer for the detection of SNP TSC0050885
gaatgataagtg

SEQ ID NO: 357948 - DNA, 12 bp, Artificial Sequence
  Oligonucleotide primer for the detection of SNP TSC0050885
gaatgataagcg

SEQ ID NO: 357949 - DNA, 12 bp, Artificial Sequence
  Oligonucleotide primer for the detection of SNP TSC0050891
acacaaaacact

SEQ ID NO: 357950 - DNA, 12 bp, Artificial Sequence
  Oligonucleotide primer for the detection of SNP TSC0050891
ggaagattttta

SEQ ID NO: 357951 - DNA, 12 bp, Artificial Sequence
  Oligonucleotide primer for the detection of SNP TSC0050892
cgacacaaaaca

SEQ ID NO: 357952 - DNA, 12 bp, Artificial Sequence
  Oligonucleotide primer for the detection of SNP TSC0050892
gaagatttttaa

SEQ ID NO: 357953 - DNA, 12 bp, Artificial Sequence
  Oligonucleotide primer for the detection of SNP TSC0050892
aaaaactcccaa

SEQ ID NO: 357954 - DNA, 12 bp, Artificial Sequence
  Oligonucleotide primer for the detection of SNP TSC0050892
ggtatagggtat

SEQ ID NO: 357955 - DNA, 12 bp, Artificial Sequence
  Oligonucleotide primer for the detection of SNP TSC0050892
ggtatagggtac

SEQ ID NO: 357956 - DNA, 12 bp, Artificial Sequence
  Oligonucleotide primer for the detection of SNP TSC0050893
cattaccattct

SEQ ID NO: 357957 - DNA, 12 bp, Artificial Sequence
  Oligonucleotide primer for the detection of SNP TSC0050893
tagaaggataga

SEQ ID NO: 357958 - DNA, 12 bp, Artificial Sequence
  Oligonucleotide primer for the detection of SNP TSC0050894
agagaggattat

SEQ ID NO: 357959 - DNA, 12 bp, Artificial Sequence
  Oligonucleotide primer for the detection of SNP TSC0050895
tcttattatata

SEQ ID NO: 357960 - DNA, 12 bp, Artificial Sequence
  Oligonucleotide primer for the detection of SNP TSC0050895
tagtatatttgt

SEQ ID NO: 357961 - DNA, 12 bp, Artificial Sequence
  Oligonucleotide primer for the detection of SNP TSC0050895
tcaatatactta

SEQ ID NO: 357962 - DNA, 12 bp, Artificial Sequence
  Oligonucleotide primer for the detection of SNP TSC0050896
ttttgtttcggt

SEQ ID NO: 357963 - DNA, 12 bp, Artificial Sequence
  Oligonucleotide primer for the detection of SNP TSC0050897
taaaaatctaca

SEQ ID NO: 357964 - DNA, 12 bp, Artificial Sequence
  Oligonucleotide primer for the detection of SNP TSC0050897
ttattggaatgt

SEQ ID NO: 357965 - DNA, 12 bp, Artificial Sequence
  Oligonucleotide primer for the detection of SNP TSC0050897
ttatcggaatgt

SEQ ID NO: 357966 - DNA, 12 bp, Artificial Sequence
  Oligonucleotide primer for the detection of SNP TSC0050897
ttattggaacgt

SEQ ID NO: 357967 - DNA, 12 bp, Artificial Sequence
  Oligonucleotide primer for the detection of SNP TSC0050897
ttatcggaacgt

SEQ ID NO: 357968 - DNA, 12 bp, Artificial Sequence
  Oligonucleotide primer for the detection of SNP TSC0050897
tccaccaaaacg

SEQ ID NO: 357969 - DNA, 12 bp, Artificial Sequence
  Oligonucleotide primer for the detection of SNP TSC0050897
tccaccgaaaca

SEQ ID NO: 357970 - DNA, 12 bp, Artificial Sequence
  Oligonucleotide primer for the detection of SNP TSC0050897
tccaccgaaacg

SEQ ID NO: 357971 - DNA, 12 bp, Artificial Sequence
  Oligonucleotide primer for the detection of SNP TSC0050897
ttgagggtttgt

SEQ ID NO: 357972 - DNA, 12 bp, Artificial Sequence
  Oligonucleotide primer for the detection of SNP TSC0050898
aaaacaatacaa

SEQ ID NO: 357973 - DNA, 12 bp, Artificial Sequence
  Oligonucleotide primer for the detection of SNP TSC0050898
aaaacaatacga

SEQ ID NO: 357974 - DNA, 12 bp, Artificial Sequence
  Oligonucleotide primer for the detection of SNP TSC0050898
agcgtttttttt

SEQ ID NO: 357975 - DNA, 12 bp, Artificial Sequence
  Oligonucleotide primer for the detection of SNP TSC0050898
aacgcccccccc

SEQ ID NO: 357976 - DNA, 12 bp, Artificial Sequence
  Oligonucleotide primer for the detection of SNP TSC0050898
agagtagtgtgg

SEQ ID NO: 357977 - DNA, 12 bp, Artificial Sequence
  Oligonucleotide primer for the detection of SNP TSC0050898
agagtagtgcgg

SEQ ID NO: 357978 - DNA, 12 bp, Artificial Sequence
  Oligonucleotide primer for the detection of SNP TSC0050902
attcctatttaa

SEQ ID NO: 357979 - DNA, 12 bp, Artificial Sequence
  Oligonucleotide primer for the detection of SNP TSC0050902
tttttgtttaat

SEQ ID NO: 357980 - DNA, 12 bp, Artificial Sequence
  Oligonucleotide primer for the detection of SNP TSC0050902
tttttgtttaac

SEQ ID NO: 357981 - DNA, 12 bp, Artificial Sequence
  Oligonucleotide primer for the detection of SNP TSC0050903
atggtggtttat

SEQ ID NO: 357982 - DNA, 12 bp, Artificial Sequence
  Oligonucleotide primer for the detection of SNP TSC0050903
ataataactcat

SEQ ID NO: 357983 - DNA, 12 bp, Artificial Sequence
  Oligonucleotide primer for the detection of SNP TSC0050904
cataataactca

SEQ ID NO: 357984 - DNA, 12 bp, Artificial Sequence
  Oligonucleotide primer for the detection of SNP TSC0050905
caaacattccaa

SEQ ID NO: 357985 - DNA, 12 bp, Artificial Sequence
  Oligonucleotide primer for the detection of SNP TSC0050905
ttataattaata

SEQ ID NO: 357986 - DNA, 12 bp, Artificial Sequence
  Oligonucleotide primer for the detection of SNP TSC0050906
ttaataaaacta

SEQ ID NO: 357987 - DNA, 12 bp, Artificial Sequence
  Oligonucleotide primer for the detection of SNP TSC0050906
aatgtttgtttt

SEQ ID NO: 357988 - DNA, 12 bp, Artificial Sequence
  Oligonucleotide primer for the detection of SNP TSC0050906
aatacttacttt

SEQ ID NO: 357989 - DNA, 12 bp, Artificial Sequence
  Oligonucleotide primer for the detection of SNP TSC0050906
ttgataaaattg

SEQ ID NO: 357990 - DNA, 12 bp, Artificial Sequence
  Oligonucleotide primer for the detection of SNP TSC0050907
acacctaacaca

SEQ ID NO: 357991 - DNA, 12 bp, Artificial Sequence
  Oligonucleotide primer for the detection of SNP TSC0050907
aaatactttatt

SEQ ID NO: 357992 - DNA, 12 bp, Artificial Sequence
  Oligonucleotide primer for the detection of SNP TSC0050907
gtatttggtata

SEQ ID NO: 357993 - DNA, 12 bp, Artificial Sequence
  Oligonucleotide primer for the detection of SNP TSC0007564
atattaaaaaaa

SEQ ID NO: 357994 - DNA, 12 bp, Artificial Sequence
  Oligonucleotide primer for the detection of SNP TSC0007564
ttctttctaata

SEQ ID NO: 357995 - DNA, 12 bp, Artificial Sequence
  Oligonucleotide primer for the detection of SNP TSC0007564
attaaaaagatt

SEQ ID NO: 357996 - DNA, 12 bp, Artificial Sequence
  Oligonucleotide primer for the detection of SNP TSC0050908
aaattaaaaaac

SEQ ID NO: 357997 - DNA, 12 bp, Artificial Sequence
  Oligonucleotide primer for the detection of SNP TSC0050908
tttgttatgtaa

SEQ ID NO: 357998 - DNA, 12 bp, Artificial Sequence
  Oligonucleotide primer for the detection of SNP TSC0050908
tttgttacgtaa

SEQ ID NO: 357999 - DNA, 12 bp, Artificial Sequence
  Oligonucleotide primer for the detection of SNP TSC0050910
aatttccccttt

SEQ ID NO: 358000 - DNA, 12 bp, Artificial Sequence
  Oligonucleotide primer for the detection of SNP TSC0050910
gagagtgtaaaa

SEQ ID NO: 358001 - DNA, 12 bp, Artificial Sequence
  Oligonucleotide primer for the detection of SNP TSC0050911
tctctcttatcc

SEQ ID NO: 358002 - DNA, 12 bp, Artificial Sequence
  Oligonucleotide primer for the detection of SNP TSC0050911
aaattttgggga

SEQ ID NO: 358003 - DNA, 12 bp, Artificial Sequence
  Oligonucleotide primer for the detection of SNP TSC0008845
aaaacatctcct

SEQ ID NO: 358004 - DNA, 12 bp, Artificial Sequence
  Oligonucleotide primer for the detection of SNP TSC0050914
atataaccacac

SEQ ID NO: 358005 - DNA, 12 bp, Artificial Sequence
  Oligonucleotide primer for the detection of SNP TSC0050915
gaggatagaaga

SEQ ID NO: 358006 - DNA, 12 bp, Artificial Sequence
  Oligonucleotide primer for the detection of SNP TSC0004674
aactcatctact

SEQ ID NO: 358007 - DNA, 12 bp, Artificial Sequence
  Oligonucleotide primer for the detection of SNP TSC0004674
attttagtttga

SEQ ID NO: 358008 - DNA, 12 bp, Artificial Sequence
  Oligonucleotide primer for the detection of SNP TSC0005274
tggtgtattttt

SEQ ID NO: 358009 - DNA, 12 bp, Artificial Sequence
  Oligonucleotide primer for the detection of SNP TSC0005274
tggcgtattttt

SEQ ID NO: 358010 - DNA, 12 bp, Artificial Sequence
  Oligonucleotide primer for the detection of SNP TSC0005274
aacatacttcca

SEQ ID NO: 358011 - DNA, 12 bp, Artificial Sequence
  Oligonucleotide primer for the detection of SNP TSC0005274
aacgtacttcca

SEQ ID NO: 358012 - DNA, 12 bp, Artificial Sequence
  Oligonucleotide primer for the detection of SNP TSC0005274
taaggtaagatt

SEQ ID NO: 358013 - DNA, 12 bp, Artificial Sequence
  Oligonucleotide primer for the detection of SNP TSC0005275
aatatatttact

SEQ ID NO: 358014 - DNA, 12 bp, Artificial Sequence
  Oligonucleotide primer for the detection of SNP TSC0005275
agtatgtgtgta

SEQ ID NO: 358015 - DNA, 12 bp, Artificial Sequence
  Oligonucleotide primer for the detection of SNP TSC0050918
aactcaaaactt

SEQ ID NO: 358016 - DNA, 12 bp, Artificial Sequence
  Oligonucleotide primer for the detection of SNP TSC0050918
atttattatttg

SEQ ID NO: 358017 - DNA, 12 bp, Artificial Sequence
  Oligonucleotide primer for the detection of SNP TSC0050919
aaacaataattc

SEQ ID NO: 358018 - DNA, 12 bp, Artificial Sequence
  Oligonucleotide primer for the detection of SNP TSC0050920
aaattaaaaact

SEQ ID NO: 358019 - DNA, 12 bp, Artificial Sequence
  Oligonucleotide primer for the detection of SNP TSC0050920
tttatggattaa

SEQ ID NO: 358020 - DNA, 12 bp, Artificial Sequence
  Oligonucleotide primer for the detection of SNP TSC0006150
aactacccacct

SEQ ID NO: 358021 - DNA, 12 bp, Artificial Sequence
  Oligonucleotide primer for the detection of SNP TSC0006150
agtgagggtgag

SEQ ID NO: 358022 - DNA, 12 bp, Artificial Sequence
  Oligonucleotide primer for the detection of SNP TSC0004999
atacctatactc

SEQ ID NO: 358023 - DNA, 12 bp, Artificial Sequence
  Oligonucleotide primer for the detection of SNP TSC0004999
ttttccttcaca

SEQ ID NO: 358024 - DNA, 12 bp, Artificial Sequence
  Oligonucleotide primer for the detection of SNP TSC0004999
gtatttgtgttt

SEQ ID NO: 358025 - DNA, 12 bp, Artificial Sequence
  Oligonucleotide primer for the detection of SNP TSC0050921
aaggatggaggt

SEQ ID NO: 358026 - DNA, 12 bp, Artificial Sequence
  Oligonucleotide primer for the detection of SNP TSC0050921
aaggatggaggc

SEQ ID NO: 358027 - DNA, 12 bp, Artificial Sequence
  Oligonucleotide primer for the detection of SNP TSC0050921
ggggtagagttt

SEQ ID NO: 358028 - DNA, 12 bp, Artificial Sequence
  Oligonucleotide primer for the detection of SNP TSC0050921
ggggtagagttc

SEQ ID NO: 358029 - DNA, 12 bp, Artificial Sequence
  Oligonucleotide primer for the detection of SNP TSC0050922
ggagttgttgga

SEQ ID NO: 358030 - DNA, 12 bp, Artificial Sequence
  Oligonucleotide primer for the detection of SNP TSC0050922
ggagttgtcgga

SEQ ID NO: 358031 - DNA, 12 bp, Artificial Sequence
  Oligonucleotide primer for the detection of SNP TSC0050923
gggtatggttaa

SEQ ID NO: 358032 - DNA, 12 bp, Artificial Sequence
  Oligonucleotide primer for the detection of SNP TSC0006885
tccttacctatt

SEQ ID NO: 358033 - DNA, 12 bp, Artificial Sequence
  Oligonucleotide primer for the detection of SNP TSC0006885
tattagaagttg

SEQ ID NO: 358034 - DNA, 12 bp, Artificial Sequence
  Oligonucleotide primer for the detection of SNP TSC0050924
acattaactaca

SEQ ID NO: 358035 - DNA, 12 bp, Artificial Sequence
  Oligonucleotide primer for the detection of SNP TSC0050924
caacttttatta

SEQ ID NO: 358036 - DNA, 12 bp, Artificial Sequence
  Oligonucleotide primer for the detection of SNP TSC0050924
gtattgattgta

SEQ ID NO: 358037 - DNA, 12 bp, Artificial Sequence
  Oligonucleotide primer for the detection of SNP TSC0050926
aaccctaacatc

SEQ ID NO: 358038 - DNA, 12 bp, Artificial Sequence
  Oligonucleotide primer for the detection of SNP TSC0050926
tggatttagttt

SEQ ID NO: 358039 - DNA, 12 bp, Artificial Sequence
  Oligonucleotide primer for the detection of SNP TSC0050926
aaattcaaccca

SEQ ID NO: 358040 - DNA, 12 bp, Artificial Sequence
  Oligonucleotide primer for the detection of SNP TSC0050926
agttttgatatt

SEQ ID NO: 358041 - DNA, 12 bp, Artificial Sequence
  Oligonucleotide primer for the detection of SNP TSC0050927
atacaacaactc

SEQ ID NO: 358042 - DNA, 12 bp, Artificial Sequence
  Oligonucleotide primer for the detection of SNP TSC0050927
atacaacgactc

SEQ ID NO: 358043 - DNA, 12 bp, Artificial Sequence
  Oligonucleotide primer for the detection of SNP TSC0050927
gtgagttgtgat

SEQ ID NO: 358044 - DNA, 12 bp, Artificial Sequence
  Oligonucleotide primer for the detection of SNP TSC0050927
gtgagtcgtgat

SEQ ID NO: 358045 - DNA, 12 bp, Artificial Sequence
  Oligonucleotide primer for the detection of SNP TSC0050927
ataaatcataat

SEQ ID NO: 358046 - DNA, 12 bp, Artificial Sequence
  Oligonucleotide primer for the detection of SNP TSC0050927
ataaatcgtaat

SEQ ID NO: 358047 - DNA, 12 bp, Artificial Sequence
  Oligonucleotide primer for the detection of SNP TSC0050927
gtgtagcggttt

SEQ ID NO: 358048 - DNA, 12 bp, Artificial Sequence
  Oligonucleotide primer for the detection of SNP TSC0050928
ccataaaaacac

SEQ ID NO: 358049 - DNA, 12 bp, Artificial Sequence
  Oligonucleotide primer for the detection of SNP TSC0050929
actccaacttca

SEQ ID NO: 358050 - DNA, 12 bp, Artificial Sequence
  Oligonucleotide primer for the detection of SNP TSC0050929
ttttctacttta

SEQ ID NO: 358051 - DNA, 12 bp, Artificial Sequence
  Oligonucleotide primer for the detection of SNP TSC0050930
ttttaaaaaaac

SEQ ID NO: 358052 - DNA, 12 bp, Artificial Sequence
  Oligonucleotide primer for the detection of SNP TSC0050930
tatatttattca

SEQ ID NO: 358053 - DNA, 12 bp, Artificial Sequence
  Oligonucleotide primer for the detection of SNP TSC0050931
tataaatttcca

SEQ ID NO: 358054 - DNA, 12 bp, Artificial Sequence
  Oligonucleotide primer for the detection of SNP TSC0050931
acaatcctttcc

SEQ ID NO: 358055 - DNA, 12 bp, Artificial Sequence
  Oligonucleotide primer for the detection of SNP TSC0050931
atatgaattttt

SEQ ID NO: 358056 - DNA, 12 bp, Artificial Sequence
  Oligonucleotide primer for the detection of SNP TSC0005793
cactaaacttcc

SEQ ID NO: 358057 - DNA, 12 bp, Artificial Sequence
  Oligonucleotide primer for the detection of SNP TSC0005793
gtggatttggaa

SEQ ID NO: 358058 - DNA, 12 bp, Artificial Sequence
  Oligonucleotide primer for the detection of SNP TSC0009179
tggaagataatt

SEQ ID NO: 358059 - DNA, 12 bp, Artificial Sequence
  Oligonucleotide primer for the detection of SNP TSC0009180
atttaaaataat

SEQ ID NO: 358060 - DNA, 12 bp, Artificial Sequence
  Oligonucleotide primer for the detection of SNP TSC0009180
acctaaaataac

SEQ ID NO: 358061 - DNA, 12 bp, Artificial Sequence
  Oligonucleotide primer for the detection of SNP TSC0009180
tatagatagaat

SEQ ID NO: 358062 - DNA, 12 bp, Artificial Sequence
  Oligonucleotide primer for the detection of SNP TSC0050935
ttataaaacact

SEQ ID NO: 358063 - DNA, 12 bp, Artificial Sequence
  Oligonucleotide primer for the detection of SNP TSC0050935
attatttggtta

SEQ ID NO: 358064 - DNA, 12 bp, Artificial Sequence
  Oligonucleotide primer for the detection of SNP TSC0050938
ttatcttcctac

SEQ ID NO: 358065 - DNA, 12 bp, Artificial Sequence
  Oligonucleotide primer for the detection of SNP TSC0050938
ttccccccctta

SEQ ID NO: 358066 - DNA, 12 bp, Artificial Sequence
  Oligonucleotide primer for the detection of SNP TSC0050939
ccaataaacaca

SEQ ID NO: 358067 - DNA, 12 bp, Artificial Sequence
  Oligonucleotide primer for the detection of SNP TSC0050939
taactctttttc

SEQ ID NO: 358068 - DNA, 12 bp, Artificial Sequence
  Oligonucleotide primer for the detection of SNP TSC0050939
tttagtggatat

SEQ ID NO: 358069 - DNA, 12 bp, Artificial Sequence
  Oligonucleotide primer for the detection of SNP TSC0050940
caattcaaaact

SEQ ID NO: 358070 - DNA, 12 bp, Artificial Sequence
  Oligonucleotide primer for the detection of SNP TSC0050940
agtgtgatgtgt

SEQ ID NO: 358071 - DNA, 12 bp, Artificial Sequence
  Oligonucleotide primer for the detection of SNP TSC0050940
tagtttaaggtt

SEQ ID NO: 358072 - DNA, 12 bp, Artificial Sequence
  Oligonucleotide primer for the detection of SNP TSC0050942
actcattacaac

SEQ ID NO: 358073 - DNA, 12 bp, Artificial Sequence
  Oligonukleotid-Primer
ttgggaggtgga

SEQ ID NO: 358074 - DNA, 12 bp, Artificial Sequence
  Oligonucleotide primer for the detection of SNP TSC0050942
ttgggaggcgga

SEQ ID NO: 358075 - DNA, 12 bp, Artificial Sequence
  Oligonucleotide primer for the detection of SNP TSC0050943
ctcaccctatac

SEQ ID NO: 358076 - DNA, 12 bp, Artificial Sequence
  Oligonucleotide primer for the detection of SNP TSC0050943
gttagtagattt

SEQ ID NO: 358077 - DNA, 12 bp, Artificial Sequence
  Oligonucleotide primer for the detection of SNP TSC0050943
atcaacaaactt

SEQ ID NO: 358078 - DNA, 12 bp, Artificial Sequence
  Oligonucleotide primer for the detection of SNP TSC0050944
tgttggaagtag

SEQ ID NO: 358079 - DNA, 12 bp, Artificial Sequence
  Oligonucleotide primer for the detection of SNP TSC0008485
cacacataaaac

SEQ ID NO: 358080 - DNA, 12 bp, Artificial Sequence
  Oligonucleotide primer for the detection of SNP TSC0008485
gagttggaatga

SEQ ID NO: 358081 - DNA, 12 bp, Artificial Sequence
  Oligonukleotid-Primer
tttccaatatca

SEQ ID NO: 358082 - DNA, 12 bp, Artificial Sequence
  Oligonucleotide primer for the detection of SNP TSC0004846
gaggaagtttta

SEQ ID NO: 358083 - DNA, 12 bp, Artificial Sequence
  Oligonucleotide primer for the detection of SNP TSC0050945
ctacaaccacct

SEQ ID NO: 358084 - DNA, 12 bp, Artificial Sequence
  Oligonucleotide primer for the detection of SNP TSC0007822
aatcatataatc

SEQ ID NO: 358085 - DNA, 12 bp, Artificial Sequence
  Oligonukleotid-Primer
ttattaagggaa

SEQ ID NO: 358086 - DNA, 12 bp, Artificial Sequence
  Oligonucleotide primer for the detection of SNP TSC0050946
aaaaacgaaatc

SEQ ID NO: 358087 - DNA, 12 bp, Artificial Sequence
  Oligonucleotide primer for the detection of SNP TSC0050946
tatttgtatata

SEQ ID NO: 358088 - DNA, 12 bp, Artificial Sequence
  Oligonucleotide primer for the detection of SNP TSC0050949
ctaccttccata

SEQ ID NO: 358089 - DNA, 12 bp, Artificial Sequence
  Oligonukleotid-Primer
aaagaatagtaa

SEQ ID NO: 358090 - DNA, 12 bp, Artificial Sequence
  Oligonucleotide primer for the detection of SNP TSC0050950
ctaaaattattt

SEQ ID NO: 358091 - DNA, 12 bp, Artificial Sequence
  Oligonucleotide primer for the detection of SNP TSC0050950
ggaggtgtttag

SEQ ID NO: 358092 - DNA, 12 bp, Artificial Sequence
  Oligonucleotide primer for the detection of SNP TSC0006232
caatctatattt

SEQ ID NO: 358093 - DNA, 12 bp, Artificial Sequence
  Oligonukleotid-Primer
cgatctatattt

SEQ ID NO: 358094 - DNA, 12 bp, Artificial Sequence
  Oligonucleotide primer for the detection of SNP TSC0006232
ttatgagttggg

SEQ ID NO: 358095 - DNA, 12 bp, Artificial Sequence
  Oligonucleotide primer for the detection of SNP TSC0006232
ttatgagtcggg

SEQ ID NO: 358096 - DNA, 12 bp, Artificial Sequence
  Oligonucleotide primer for the detection of SNP TSC0050951
tttttctttttc

SEQ ID NO: 358097 - DNA, 12 bp, Artificial Sequence
  Oligonukleotid-Primer
atccccaaatct

SEQ ID NO: 358098 - DNA, 12 bp, Artificial Sequence
  Oligonucleotide primer for the detection of SNP TSC0006508
tataatttgata

SEQ ID NO: 358099 - DNA, 12 bp, Artificial Sequence
  Oligonucleotide primer for the detection of SNP TSC0050952
tcatcctcaccc

SEQ ID NO: 358100 - DNA, 12 bp, Artificial Sequence
  Oligonucleotide primer for the detection of SNP TSC0050952
cccccattcccc

SEQ ID NO: 358101 - DNA, 12 bp, Artificial Sequence
  Oligonukleotid-Primer
gtatttttaggg

SEQ ID NO: 358102 - DNA, 12 bp, Artificial Sequence
  Oligonucleotide primer for the detection of SNP TSC0050953
acactttcaaaa

SEQ ID NO: 358103 - DNA, 12 bp, Artificial Sequence
  Oligonucleotide primer for the detection of SNP TSC0050953
ttagaggttttt

SEQ ID NO: 358104 - DNA, 12 bp, Artificial Sequence
  Oligonucleotide primer for the detection of SNP TSC0006810
actatttctatc

SEQ ID NO: 358105 - DNA, 12 bp, Artificial Sequence
  Oligonucleotide primer for the detection of SNP TSC0006810
tagatgtataaa

SEQ ID NO: 358106 - DNA, 12 bp, Artificial Sequence
  Oligonucleotide primer for the detection of SNP TSC0005978
ttaatatactct

SEQ ID NO: 358107 - DNA, 12 bp, Artificial Sequence
  Oligonucleotide primer for the detection of SNP TSC0005978
atggttataatg

SEQ ID NO: 358108 - DNA, 12 bp, Artificial Sequence
  Oligonucleotide primer for the detection of SNP TSC0050957
aaattatcttca

SEQ ID NO: 358109 - DNA, 12 bp, Artificial Sequence
  Oligonucleotide primer for the detection of SNP TSC0050957
ttgaagttgttt

SEQ ID NO: 358110 - DNA, 12 bp, Artificial Sequence
  Oligonucleotide primer for the detection of SNP TSC0050957
ttaaaattatct

SEQ ID NO: 358111 - DNA, 12 bp, Artificial Sequence
  Oligonucleotide primer for the detection of SNP TSC0006636
caaatctcatct

SEQ ID NO: 358112 - DNA, 12 bp, Artificial Sequence
  Oligonucleotide primer for the detection of SNP TSC0050962
taatacaaataa

SEQ ID NO: 358113 - DNA, 12 bp, Artificial Sequence
  Oligonukleotid-Primer
taatacgaataa

SEQ ID NO: 358114 - DNA, 12 bp, Artificial Sequence
  Oligonucleotide primer for the detection of SNP TSC0050962
ggaaggtatgga

SEQ ID NO: 358115 - DNA, 12 bp, Artificial Sequence
  Oligonucleotide primer for the detection of SNP TSC0050962
tttgatgtgggt

SEQ ID NO: 358116 - DNA, 12 bp, Artificial Sequence
  Oligonucleotide primer for the detection of SNP TSC0050962
tttgatgcgggt

SEQ ID NO: 358117 - DNA, 12 bp, Artificial Sequence
  Oligonucleotide primer for the detection of SNP TSC0050963
ctaacaccaaaa

SEQ ID NO: 358118 - DNA, 12 bp, Artificial Sequence
  Oligonucleotide primer for the detection of SNP TSC0050963
ctaacaccgaaa

SEQ ID NO: 358119 - DNA, 12 bp, Artificial Sequence
  Oligonucleotide primer for the detection of SNP TSC0050963
aattgaaatttg

SEQ ID NO: 358120 - DNA, 12 bp, Artificial Sequence
  Oligonucleotide primer for the detection of SNP TSC0050963
aattgaaattcg

SEQ ID NO: 358121 - DNA, 12 bp, Artificial Sequence
  Oligonucleotide primer for the detection of SNP TSC0050963
aattaaaattcg

SEQ ID NO: 358122 - DNA, 12 bp, Artificial Sequence
  Oligonucleotide primer for the detection of SNP TSC0050963
atttggtattgg

SEQ ID NO: 358123 - DNA, 12 bp, Artificial Sequence
  Oligonucleotide primer for the detection of SNP TSC0050963
atttggtatcgg

SEQ ID NO: 358124 - DNA, 12 bp, Artificial Sequence
  Oligonucleotide primer for the detection of SNP TSC0050964
aaatcaaaatct

SEQ ID NO: 358125 - DNA, 12 bp, Artificial Sequence
  Oligonucleotide primer for the detection of SNP TSC0050965
tattcaataatt

SEQ ID NO: 358126 - DNA, 12 bp, Artificial Sequence
  Oligonucleotide primer for the detection of SNP TSC0050966
ttcacttatttc

SEQ ID NO: 358127 - DNA, 12 bp, Artificial Sequence
  Oligonucleotide primer for the detection of SNP TSC0050967
tccctaaatata

SEQ ID NO: 358128 - DNA, 12 bp, Artificial Sequence
  Oligonucleotide primer for the detection of SNP TSC0050967
tgattttttttc

SEQ ID NO: 358129 - DNA, 12 bp, Artificial Sequence
  Oligonucleotide primer for the detection of SNP TSC0050967
ataactcctttt

SEQ ID NO: 358130 - DNA, 12 bp, Artificial Sequence
  Oligonucleotide primer for the detection of SNP TSC0050967
ttttttaaatgt

SEQ ID NO: 358131 - DNA, 12 bp, Artificial Sequence
  Oligonucleotide primer for the detection of SNP TSC0050968
actatacctacc

SEQ ID NO: 358132 - DNA, 12 bp, Artificial Sequence
  Oligonucleotide primer for the detection of SNP TSC0050969
aaaactcacaac

SEQ ID NO: 358133 - DNA, 12 bp, Artificial Sequence
  Oligonucleotide primer for the detection of SNP TSC0050969
aaaactcacgac

SEQ ID NO: 358134 - DNA, 12 bp, Artificial Sequence
  Oligonucleotide primer for the detection of SNP TSC0009157
acttctaaaaac

SEQ ID NO: 358135 - DNA, 12 bp, Artificial Sequence
  Oligonucleotide primer for the detection of SNP TSC0009157
gtttgaaaggtg

SEQ ID NO: 358136 - DNA, 12 bp, Artificial Sequence
  Oligonucleotide primer for the detection of SNP TSC0008048
ttctctataaaa

SEQ ID NO: 358137 - DNA, 12 bp, Artificial Sequence
  Oligonucleotide primer for the detection of SNP TSC0008048
ggatttatagtt

SEQ ID NO: 358138 - DNA, 12 bp, Artificial Sequence
  Oligonucleotide primer for the detection of SNP TSC0008048
ataaattcacaa

SEQ ID NO: 358139 - DNA, 12 bp, Artificial Sequence
  Oligonucleotide primer for the detection of SNP TSC0008048
ttttttgtaagg

SEQ ID NO: 358140 - DNA, 12 bp, Artificial Sequence
  Oligonucleotide primer for the detection of SNP TSC0050970
tacttacattat

SEQ ID NO: 358141 - DNA, 12 bp, Artificial Sequence
  Oligonucleotide primer for the detection of SNP TSC0050970
taggaattgaaa

SEQ ID NO: 358142 - DNA, 12 bp, Artificial Sequence
  Oligonucleotide primer for the detection of SNP TSC0050971
tggatataaaaa

SEQ ID NO: 358143 - DNA, 12 bp, Artificial Sequence
  Oligonucleotide primer for the detection of SNP TSC0050972
acaataacacat

SEQ ID NO: 358144 - DNA, 12 bp, Artificial Sequence
  Oligonucleotide primer for the detection of SNP TSC0050972
tagaattttata

SEQ ID NO: 358145 - DNA, 12 bp, Artificial Sequence
  Oligonucleotide primer for the detection of SNP TSC0050973
aaatcactcaat

SEQ ID NO: 358146 - DNA, 12 bp, Artificial Sequence
  Oligonucleotide primer for the detection of SNP TSC0050973
ggaaagaagaaa

SEQ ID NO: 358147 - DNA, 12 bp, Artificial Sequence
  Oligonucleotide primer for the detection of SNP TSC0005053
attctaattaac

SEQ ID NO: 358148 - DNA, 12 bp, Artificial Sequence
  Oligonucleotide primer for the detection of SNP TSC0005053
atgggaattaat

SEQ ID NO: 358149 - DNA, 12 bp, Artificial Sequence
  Oligonucleotide primer for the detection of SNP TSC0005053
tataaaaatcaa

SEQ ID NO: 358150 - DNA, 12 bp, Artificial Sequence
  Oligonucleotide primer for the detection of SNP TSC0005053
attttgattaac

SEQ ID NO: 358151 - DNA, 12 bp, Artificial Sequence
  Oligonucleotide primer for the detection of SNP TSC0005054
atctcatttcct

SEQ ID NO: 358152 - DNA, 12 bp, Artificial Sequence
  Oligonucleotide primer for the detection of SNP TSC0005054
aaattattaaga

SEQ ID NO: 358153 - DNA, 12 bp, Artificial Sequence
  Oligonucleotide primer for the detection of SNP TSC0005054
aaaccaccaaaa

SEQ ID NO: 358154 - DNA, 12 bp, Artificial Sequence
  Oligonucleotide primer for the detection of SNP TSC0005055
accaaaccaata

SEQ ID NO: 358155 - DNA, 12 bp, Artificial Sequence
  Oligonucleotide primer for the detection of SNP TSC0005055
agaatgtgagta

SEQ ID NO: 358156 - DNA, 12 bp, Artificial Sequence
  Oligonucleotide primer for the detection of SNP TSC0005055
attaaattaatg

SEQ ID NO: 358157 - DNA, 12 bp, Artificial Sequence
  Oligonucleotide primer for the detection of SNP TSC0050974
aatcgaaaaacc

SEQ ID NO: 358158 - DNA, 12 bp, Artificial Sequence
  Oligonucleotide primer for the detection of SNP TSC0050974
taatagggggag

SEQ ID NO: 358159 - DNA, 12 bp, Artificial Sequence
  Oligonucleotide primer for the detection of SNP TSC0050974
aattgagaagtt

SEQ ID NO: 358160 - DNA, 12 bp, Artificial Sequence
  Oligonucleotide primer for the detection of SNP TSC0050974
aatcgagaagtt

SEQ ID NO: 358161 - DNA, 12 bp, Artificial Sequence
  Oligonucleotide primer for the detection of SNP TSC0010901
ctttttccctca

SEQ ID NO: 358162 - DNA, 12 bp, Artificial Sequence
  Oligonucleotide primer for the detection of SNP TSC0010901
gatttgtgtgta

SEQ ID NO: 358163 - DNA, 12 bp, Artificial Sequence
  Oligonucleotide primer for the detection of SNP TSC0050977
aattccaaaatc

SEQ ID NO: 358164 - DNA, 12 bp, Artificial Sequence
  Oligonucleotide primer for the detection of SNP TSC0050977
tttataatttga

SEQ ID NO: 358165 - DNA, 12 bp, Artificial Sequence
  Oligonucleotide primer for the detection of SNP TSC0050978
aattctcttatt

SEQ ID NO: 358166 - DNA, 12 bp, Artificial Sequence
  Oligonucleotide primer for the detection of SNP TSC0050978
ttggagaaattg

SEQ ID NO: 358167 - DNA, 12 bp, Artificial Sequence
  Oligonucleotide primer for the detection of SNP TSC0050979
cccttccttaaa

SEQ ID NO: 358168 - DNA, 12 bp, Artificial Sequence
  Oligonucleotide primer for the detection of SNP TSC0050979
aaggtatagtgt

SEQ ID NO: 358169 - DNA, 12 bp, Artificial Sequence
  Oligonucleotide primer for the detection of SNP TSC0050979
aaaacacaatac

SEQ ID NO: 358170 - DNA, 12 bp, Artificial Sequence
  Oligonucleotide primer for the detection of SNP TSC0000597
ccccaaatcata

SEQ ID NO: 358171 - DNA, 12 bp, Artificial Sequence
  Oligonucleotide primer for the detection of SNP TSC0000597
ttattgttatgt

SEQ ID NO: 358172 - DNA, 12 bp, Artificial Sequence
  Oligonucleotide primer for the detection of SNP TSC0000597
ctactattatat

SEQ ID NO: 358173 - DNA, 12 bp, Artificial Sequence
  Oligonucleotide primer for the detection of SNP TSC0000598
aatacccaataa

SEQ ID NO: 358174 - DNA, 12 bp, Artificial Sequence
  Oligonucleotide primer for the detection of SNP TSC0000598
ggtttttatgta

SEQ ID NO: 358175 - DNA, 12 bp, Artificial Sequence
  Oligonucleotide primer for the detection of SNP TSC0050980
aaaaaaatctct

SEQ ID NO: 358176 - DNA, 12 bp, Artificial Sequence
  Oligonucleotide primer for the detection of SNP TSC0050981
ttcaaatcatat

SEQ ID NO: 358177 - DNA, 12 bp, Artificial Sequence
  Oligonucleotide primer for the detection of SNP TSC0050982
aacattttatac

SEQ ID NO: 358178 - DNA, 12 bp, Artificial Sequence
  Oligonucleotide primer for the detection of SNP TSC0050982
aacgttttatac

SEQ ID NO: 358179 - DNA, 12 bp, Artificial Sequence
  Oligonucleotide primer for the detection of SNP TSC0050982
tataaaattatg

SEQ ID NO: 358180 - DNA, 12 bp, Artificial Sequence
  Oligonucleotide primer for the detection of SNP TSC0006003
ctcatctataaa

SEQ ID NO: 358181 - DNA, 12 bp, Artificial Sequence
  Oligonucleotide primer for the detection of SNP TSC0006003
taattttatggt

SEQ ID NO: 358182 - DNA, 12 bp, Artificial Sequence
  Oligonucleotide primer for the detection of SNP TSC0006003
taattttacggt

SEQ ID NO: 358183 - DNA, 12 bp, Artificial Sequence
  Oligonucleotide primer for the detection of SNP TSC0006003
caactctacaac

SEQ ID NO: 358184 - DNA, 12 bp, Artificial Sequence
  Oligonucleotide primer for the detection of SNP TSC0006003
caactctacgac

SEQ ID NO: 358185 - DNA, 12 bp, Artificial Sequence
  Oligonucleotide primer for the detection of SNP TSC0050983
atctctcctcta

SEQ ID NO: 358186 - DNA, 12 bp, Artificial Sequence
  Oligonucleotide primer for the detection of SNP TSC0050983
gaggaatatatg

SEQ ID NO: 358187 - DNA, 12 bp, Artificial Sequence
  Oligonucleotide primer for the detection of SNP TSC0050985
atatttaaatat

SEQ ID NO: 358188 - DNA, 12 bp, Artificial Sequence
  Oligonucleotide primer for the detection of SNP TSC0050985
tgtattatgtgg

SEQ ID NO: 358189 - DNA, 12 bp, Artificial Sequence
  Oligonucleotide primer for the detection of SNP TSC0050986
agttagagtttt

SEQ ID NO: 358190 - DNA, 12 bp, Artificial Sequence
  Oligonucleotide primer for the detection of SNP TSC0050986
aatcaaaatctt

SEQ ID NO: 358191 - DNA, 12 bp, Artificial Sequence
  Oligonucleotide primer for the detection of SNP TSC0050986
tgggtaatagaa

SEQ ID NO: 358192 - DNA, 12 bp, Artificial Sequence
  Oligonucleotide primer for the detection of SNP TSC0050987
aaattcaaataa

SEQ ID NO: 358193 - DNA, 12 bp, Artificial Sequence
  Oligonucleotide primer for the detection of SNP TSC0050988
actttatcaaca

SEQ ID NO: 358194 - DNA, 12 bp, Artificial Sequence
  Oligonucleotide primer for the detection of SNP TSC0050988
acctataatttc

SEQ ID NO: 358195 - DNA, 12 bp, Artificial Sequence
  Oligonucleotide primer for the detection of SNP TSC0050989
aaactacccccc

SEQ ID NO: 358196 - DNA, 12 bp, Artificial Sequence
  Oligonucleotide primer for the detection of SNP TSC0050989
attgaattaagt

SEQ ID NO: 358197 - DNA, 12 bp, Artificial Sequence
  Oligonucleotide primer for the detection of SNP TSC0050989
attaaatcaaat

SEQ ID NO: 358198 - DNA, 12 bp, Artificial Sequence
  Oligonucleotide primer for the detection of SNP TSC0050990
aacgaaaactac

SEQ ID NO: 358199 - DNA, 12 bp, Artificial Sequence
  Oligonucleotide primer for the detection of SNP TSC0050990
attaagttgggg

SEQ ID NO: 358200 - DNA, 12 bp, Artificial Sequence
  Oligonucleotide primer for the detection of SNP TSC0050991
taaaggttttta

SEQ ID NO: 358201 - DNA, 12 bp, Artificial Sequence
  Oligonucleotide primer for the detection of SNP TSC0050991
taaaaacctcca

SEQ ID NO: 358202 - DNA, 12 bp, Artificial Sequence
  Oligonucleotide primer for the detection of SNP TSC0050991
ttagttgaagat

SEQ ID NO: 358203 - DNA, 12 bp, Artificial Sequence
  Oligonucleotide primer for the detection of SNP TSC0050992
tattttccacaa

SEQ ID NO: 358204 - DNA, 12 bp, Artificial Sequence
  Oligonucleotide primer for the detection of SNP TSC0050992
atatatgttttt

SEQ ID NO: 358205 - DNA, 12 bp, Artificial Sequence
  Oligonucleotide primer for the detection of SNP TSC0050994
gtgtgaaaatga

SEQ ID NO: 358206 - DNA, 12 bp, Artificial Sequence
  Oligonucleotide primer for the detection of SNP TSC0008529
taattttaggag

SEQ ID NO: 358207 - DNA, 12 bp, Artificial Sequence
  Oligonucleotide primer for the detection of SNP TSC0050995
aatctttactaa

SEQ ID NO: 358208 - DNA, 12 bp, Artificial Sequence
  Oligonucleotide primer for the detection of SNP TSC0050995
tatttaaggaat

SEQ ID NO: 358209 - DNA, 12 bp, Artificial Sequence
  Oligonucleotide primer for the detection of SNP TSC0050995
acactcaaaaaa

SEQ ID NO: 358210 - DNA, 12 bp, Artificial Sequence
  Oligonucleotide primer for the detection of SNP TSC0050996
atttataaattt

SEQ ID NO: 358211 - DNA, 12 bp, Artificial Sequence
  Oligonucleotide primer for the detection of SNP TSC0050996
ggaaaataatga

SEQ ID NO: 358212 - DNA, 12 bp, Artificial Sequence
  Oligonucleotide primer for the detection of SNP TSC0050996
atttgtggattt

SEQ ID NO: 358213 - DNA, 12 bp, Artificial Sequence
  Oligonucleotide primer for the detection of SNP TSC0050997
cattttcaaaat

SEQ ID NO: 358214 - DNA, 12 bp, Artificial Sequence
  Oligonucleotide primer for the detection of SNP TSC0050997
tagtttttagaa

SEQ ID NO: 358215 - DNA, 12 bp, Artificial Sequence
  Oligonucleotide primer for the detection of SNP TSC0050998
cctcctcgtcca

SEQ ID NO: 358216 - DNA, 12 bp, Artificial Sequence
  Oligonucleotide primer for the detection of SNP TSC0050998
attttgttagtt

SEQ ID NO: 358217 - DNA, 12 bp, Artificial Sequence
  Oligonucleotide primer for the detection of SNP TSC0050998
attctaccaacc

SEQ ID NO: 358218 - DNA, 12 bp, Artificial Sequence
  Oligonucleotide primer for the detection of SNP TSC0050998
ttttttcgttta

SEQ ID NO: 358219 - DNA, 12 bp, Artificial Sequence
  Oligonucleotide primer for the detection of SNP TSC0050999
aaacacctacat

SEQ ID NO: 358220 - DNA, 12 bp, Artificial Sequence
  Oligonucleotide primer for the detection of SNP TSC0050999
aaacgcctacat

SEQ ID NO: 358221 - DNA, 12 bp, Artificial Sequence
  Oligonucleotide primer for the detection of SNP TSC0050999
tgagttttttag

SEQ ID NO: 358222 - DNA, 12 bp, Artificial Sequence
  Oligonucleotide primer for the detection of SNP TSC0050999
taaaccccccaa

SEQ ID NO: 358223 - DNA, 12 bp, Artificial Sequence
  Oligonucleotide primer for the detection of SNP TSC0050999
ggatgtttgtat

SEQ ID NO: 358224 - DNA, 12 bp, Artificial Sequence
  Oligonucleotide primer for the detection of SNP TSC0050999
ggacgtttgtat

SEQ ID NO: 358225 - DNA, 12 bp, Artificial Sequence
  Oligonucleotide primer for the detection of SNP TSC0051000
tatttccacaca

SEQ ID NO: 358226 - DNA, 12 bp, Artificial Sequence
  Oligonucleotide primer for the detection of SNP TSC0051000
cctaatcttaaa

SEQ ID NO: 358227 - DNA, 12 bp, Artificial Sequence
  Oligonucleotide primer for the detection of SNP TSC0051000
ttgtttttatat

SEQ ID NO: 358228 - DNA, 12 bp, Artificial Sequence
  Oligonucleotide primer for the detection of SNP TSC0051001
ggggtagtaagg

SEQ ID NO: 358229 - DNA, 12 bp, Artificial Sequence
  Oligonucleotide primer for the detection of SNP TSC0051002
aaaatatccctc

SEQ ID NO: 358230 - DNA, 12 bp, Artificial Sequence
  Oligonucleotide primer for the detection of SNP TSC0051002
tagaagggttta

SEQ ID NO: 358231 - DNA, 12 bp, Artificial Sequence
  Oligonucleotide primer for the detection of SNP TSC0051003
aaaacctacatt

SEQ ID NO: 358232 - DNA, 12 bp, Artificial Sequence
  Oligonucleotide primer for the detection of SNP TSC0051003
aaaacctacgtt

SEQ ID NO: 358233 - DNA, 12 bp, Artificial Sequence
  Oligonucleotide primer for the detection of SNP TSC0051004
taaacctaaaca

SEQ ID NO: 358234 - DNA, 12 bp, Artificial Sequence
  Oligonucleotide primer for the detection of SNP TSC0051004
atatattttttc

SEQ ID NO: 358235 - DNA, 12 bp, Artificial Sequence
  Oligonucleotide primer for the detection of SNP TSC0051004
atatattttccc

SEQ ID NO: 358236 - DNA, 12 bp, Artificial Sequence
  Oligonucleotide primer for the detection of SNP TSC0051004
ataaatttgagt

SEQ ID NO: 358237 - DNA, 12 bp, Artificial Sequence
  Oligonucleotide primer for the detection of SNP TSC0051005
aactactataaa

SEQ ID NO: 358238 - DNA, 12 bp, Artificial Sequence
  Oligonucleotide primer for the detection of SNP TSC0051005
aaatataatgtg

SEQ ID NO: 358239 - DNA, 12 bp, Artificial Sequence
  Oligonucleotide primer for the detection of SNP TSC0051005
tagggttgttgt

SEQ ID NO: 358240 - DNA, 12 bp, Artificial Sequence
  Oligonucleotide primer for the detection of SNP TSC0051006
aataacatcaaa

SEQ ID NO: 358241 - DNA, 12 bp, Artificial Sequence
  Oligonucleotide primer for the detection of SNP TSC0051006
tacattttctat

SEQ ID NO: 358242 - DNA, 12 bp, Artificial Sequence
  Oligonucleotide primer for the detection of SNP TSC0051006
gatggtattaag

SEQ ID NO: 358243 - DNA, 12 bp, Artificial Sequence
  Oligonucleotide primer for the detection of SNP TSC0051007
tgttagattttt

SEQ ID NO: 358244 - DNA, 12 bp, Artificial Sequence
  Oligonucleotide primer for the detection of SNP TSC0051007
tgttagattttc

SEQ ID NO: 358245 - DNA, 12 bp, Artificial Sequence
  Oligonucleotide primer for the detection of SNP TSC0051007
cctactaaattt

SEQ ID NO: 358246 - DNA, 12 bp, Artificial Sequence
  Oligonucleotide primer for the detection of SNP TSC0051007
aaaaaatgattt

SEQ ID NO: 358247 - DNA, 12 bp, Artificial Sequence
  Oligonucleotide primer for the detection of SNP TSC0006015
aattccatcttt

SEQ ID NO: 358248 - DNA, 12 bp, Artificial Sequence
  Oligonucleotide primer for the detection of SNP TSC0006015
ggtttgggatat

SEQ ID NO: 358249 - DNA, 12 bp, Artificial Sequence
  Oligonucleotide primer for the detection of SNP TSC0008319
ccttttctcact

SEQ ID NO: 358250 - DNA, 12 bp, Artificial Sequence
  Oligonucleotide primer for the detection of SNP TSC0008319
agtaggattgta

SEQ ID NO: 358251 - DNA, 12 bp, Artificial Sequence
  Oligonucleotide primer for the detection of SNP TSC0006947
aattttccatat

SEQ ID NO: 358252 - DNA, 12 bp, Artificial Sequence
  Oligonucleotide primer for the detection of SNP TSC0006947
tgtgaaaatgga

SEQ ID NO: 358253 - DNA, 12 bp, Artificial Sequence
  Oligonucleotide primer for the detection of SNP TSC0007531
aaaaaattaact

SEQ ID NO: 358254 - DNA, 12 bp, Artificial Sequence
  Oligonucleotide primer for the detection of SNP TSC0007531
ccctcctaaaca

SEQ ID NO: 358255 - DNA, 12 bp, Artificial Sequence
  Oligonucleotide primer for the detection of SNP TSC0007531
ggaaaattagtt

SEQ ID NO: 358256 - DNA, 12 bp, Artificial Sequence
  Oligonucleotide primer for the detection of SNP TSC0051008
tccaataaataa

SEQ ID NO: 358257 - DNA, 12 bp, Artificial Sequence
  Oligonucleotide primer for the detection of SNP TSC0051008
tatggtatattt

SEQ ID NO: 358258 - DNA, 12 bp, Artificial Sequence
  Oligonucleotide primer for the detection of SNP TSC0051008
ctttataacaca

SEQ ID NO: 358259 - DNA, 12 bp, Artificial Sequence
  Oligonucleotide primer for the detection of SNP TSC0051008
tttttagtgaat

SEQ ID NO: 358260 - DNA, 12 bp, Artificial Sequence
  Oligonucleotide primer for the detection of SNP TSC0051009
ttttttgttagg

SEQ ID NO: 358261 - DNA, 12 bp, Artificial Sequence
  Oligonucleotide primer for the detection of SNP TSC0051010
acccccaaaaat

SEQ ID NO: 358262 - DNA, 12 bp, Artificial Sequence
  Oligonucleotide primer for the detection of SNP TSC0051010
gaagaatttggg

SEQ ID NO: 358263 - DNA, 12 bp, Artificial Sequence
  Oligonucleotide primer for the detection of SNP TSC0051014
aaggaaaaataa

SEQ ID NO: 358264 - DNA, 12 bp, Artificial Sequence
  Oligonucleotide primer for the detection of SNP TSC0051015
aagttatagtaa

SEQ ID NO: 358265 - DNA, 12 bp, Artificial Sequence
  Oligonucleotide primer for the detection of SNP TSC0051017
aaaatcaactcc

SEQ ID NO: 358266 - DNA, 12 bp, Artificial Sequence
  Oligonucleotide primer for the detection of SNP TSC0051017
tttgggttggag

SEQ ID NO: 358267 - DNA, 12 bp, Artificial Sequence
  Oligonucleotide primer for the detection of SNP TSC0051023
atataattggat

SEQ ID NO: 358268 - DNA, 12 bp, Artificial Sequence
  Oligonucleotide primer for the detection of SNP TSC0051023
tacataattaaa

SEQ ID NO: 358269 - DNA, 12 bp, Artificial Sequence
  Oligonucleotide primer for the detection of SNP TSC0051023
agatagggttgt

SEQ ID NO: 358270 - DNA, 12 bp, Artificial Sequence
  Oligonucleotide primer for the detection of SNP TSC0051025
gtatgtatattt

SEQ ID NO: 358271 - DNA, 12 bp, Artificial Sequence
  Oligonucleotide primer for the detection of SNP TSC0051025
tacatatatatc

SEQ ID NO: 358272 - DNA, 12 bp, Artificial Sequence
  Oligonucleotide primer for the detection of SNP TSC0051025
aaaatgataaat

SEQ ID NO: 358273 - DNA, 12 bp, Artificial Sequence
  Oligonucleotide primer for the detection of SNP TSC0051026
ttaactaaattt

SEQ ID NO: 358274 - DNA, 12 bp, Artificial Sequence
  Oligonucleotide primer for the detection of SNP TSC0051026
ttgagaagtatg

SEQ ID NO: 358275 - DNA, 12 bp, Artificial Sequence
  Oligonucleotide primer for the detection of SNP TSC0051027
gattagggttat

SEQ ID NO: 358276 - DNA, 12 bp, Artificial Sequence
  Oligonucleotide primer for the detection of SNP TSC0051028
tctctaccatca

SEQ ID NO: 358277 - DNA, 12 bp, Artificial Sequence
  Oligonucleotide primer for the detection of SNP TSC0051028
gatagattttat

SEQ ID NO: 358278 - DNA, 12 bp, Artificial Sequence
  Oligonucleotide primer for the detection of SNP TSC0051028
aaacaaatttca

SEQ ID NO: 358279 - DNA, 12 bp, Artificial Sequence
  Oligonucleotide primer for the detection of SNP TSC0051032
aataaaacttct

SEQ ID NO: 358280 - DNA, 12 bp, Artificial Sequence
  Oligonucleotide primer for the detection of SNP TSC0051032
ttttttaggaag

SEQ ID NO: 358281 - DNA, 12 bp, Artificial Sequence
  Oligonucleotide primer for the detection of SNP TSC0051034
tttaaaaagata

SEQ ID NO: 358282 - DNA, 12 bp, Artificial Sequence
  Oligonucleotide primer for the detection of SNP TSC0051035
aacccaaaccaa

SEQ ID NO: 358283 - DNA, 12 bp, Artificial Sequence
  Oligonucleotide primer for the detection of SNP TSC0051035
cgtgttgtttag

SEQ ID NO: 358284 - DNA, 12 bp, Artificial Sequence
  Oligonucleotide primer for the detection of SNP TSC0051035
catattacccaa

SEQ ID NO: 358285 - DNA, 12 bp, Artificial Sequence
  Oligonucleotide primer for the detection of SNP TSC0051035
cgtattacccaa

SEQ ID NO: 358286 - DNA, 12 bp, Artificial Sequence
  Oligonucleotide primer for the detection of SNP TSC0051035
agtttaggttag

SEQ ID NO: 358287 - DNA, 12 bp, Artificial Sequence
  Oligonucleotide primer for the detection of SNP TSC0051036
actcaacttttt

SEQ ID NO: 358288 - DNA, 12 bp, Artificial Sequence
  Oligonucleotide primer for the detection of SNP TSC0051036
tgatattataaa

SEQ ID NO: 358289 - DNA, 12 bp, Artificial Sequence
  Oligonucleotide primer for the detection of SNP TSC0051037
aatcttataacc

SEQ ID NO: 358290 - DNA, 12 bp, Artificial Sequence
  Oligonucleotide primer for the detection of SNP TSC0051037
cttcaccttcca

SEQ ID NO: 358291 - DNA, 12 bp, Artificial Sequence
  Oligonucleotide primer for the detection of SNP TSC0051038
aaattatataac

SEQ ID NO: 358292 - DNA, 12 bp, Artificial Sequence
  Oligonucleotide primer for the detection of SNP TSC0051039
tcaatcaaatac

SEQ ID NO: 358293 - DNA, 12 bp, Artificial Sequence
  Oligonucleotide primer for the detection of SNP TSC0051039
tagataggattt

SEQ ID NO: 358294 - DNA, 12 bp, Artificial Sequence
  Oligonucleotide primer for the detection of SNP TSC0051039
taattaggtatt

SEQ ID NO: 358295 - DNA, 12 bp, Artificial Sequence
  Oligonucleotide primer for the detection of SNP TSC0051040
ttaaatttcctt

SEQ ID NO: 358296 - DNA, 12 bp, Artificial Sequence
  Oligonucleotide primer for the detection of SNP TSC0051040
atataatattga

SEQ ID NO: 358297 - DNA, 12 bp, Artificial Sequence
  Oligonucleotide primer for the detection of SNP TSC0051043
tatctctcttac

SEQ ID NO: 358298 - DNA, 12 bp, Artificial Sequence
  Oligonucleotide primer for the detection of SNP TSC0051043
ttgatgtattta

SEQ ID NO: 358299 - DNA, 12 bp, Artificial Sequence
  Oligonucleotide primer for the detection of SNP TSC0051044
aaaatttagaat

SEQ ID NO: 358300 - DNA, 12 bp, Artificial Sequence
  Oligonucleotide primer for the detection of SNP TSC0051044
ggataatgtgat

SEQ ID NO: 358301 - DNA, 12 bp, Artificial Sequence
  Oligonucleotide primer for the detection of SNP TSC0051045
cactaattactt

SEQ ID NO: 358302 - DNA, 12 bp, Artificial Sequence
  Oligonucleotide primer for the detection of SNP TSC0051045
gatgaagttatg

SEQ ID NO: 358303 - DNA, 12 bp, Artificial Sequence
  Oligonucleotide primer for the detection of SNP TSC0051048
cctctttaataa

SEQ ID NO: 358304 - DNA, 12 bp, Artificial Sequence
  Oligonucleotide primer for the detection of SNP TSC0051048
attaatgtgttt

SEQ ID NO: 358305 - DNA, 12 bp, Artificial Sequence
  Oligonucleotide primer for the detection of SNP TSC0051048
actaatatattc

SEQ ID NO: 358306 - DNA, 12 bp, Artificial Sequence
  Oligonucleotide primer for the detection of SNP TSC0051048
tttttttggtaa

SEQ ID NO: 358307 - DNA, 12 bp, Artificial Sequence
  Oligonucleotide primer for the detection of SNP TSC0051049
gagtatataata

SEQ ID NO: 358308 - DNA, 12 bp, Artificial Sequence
  Oligonucleotide primer for the detection of SNP TSC0051049
aaatacacaaca

SEQ ID NO: 358309 - DNA, 12 bp, Artificial Sequence
  Oligonucleotide primer for the detection of SNP TSC0051049
ggggtaatggta

SEQ ID NO: 358310 - DNA, 12 bp, Artificial Sequence
  Oligonucleotide primer for the detection of SNP TSC0051050
cccactcccata

SEQ ID NO: 358311 - DNA, 12 bp, Artificial Sequence
  Oligonucleotide primer for the detection of SNP TSC0051050
ctttaaaataaa

SEQ ID NO: 358312 - DNA, 12 bp, Artificial Sequence
  Oligonucleotide primer for the detection of SNP TSC0051054
ttacataaaatt

SEQ ID NO: 358313 - DNA, 12 bp, Artificial Sequence
  Oligonucleotide primer for the detection of SNP TSC0051054
tatgtaaatgtg

SEQ ID NO: 358314 - DNA, 12 bp, Artificial Sequence
  Oligonucleotide primer for the detection of SNP TSC0051054
tatacaaatata

SEQ ID NO: 358315 - DNA, 12 bp, Artificial Sequence
  Oligonucleotide primer for the detection of SNP TSC0051054
ttgtatggagtt

SEQ ID NO: 358316 - DNA, 12 bp, Artificial Sequence
  Oligonucleotide primer for the detection of SNP TSC0051056
atcaatataaaa

SEQ ID NO: 358317 - DNA, 12 bp, Artificial Sequence
  Oligonucleotide primer for the detection of SNP TSC0051056
tttaaggaatta

SEQ ID NO: 358318 - DNA, 12 bp, Artificial Sequence
  Oligonucleotide primer for the detection of SNP TSC0051056
tttaattaatgt

SEQ ID NO: 358319 - DNA, 12 bp, Artificial Sequence
  Oligonucleotide primer for the detection of SNP TSC0051057
ttagtgtgtgtg

SEQ ID NO: 358320 - DNA, 12 bp, Artificial Sequence
  Oligonucleotide primer for the detection of SNP TSC0051066
ataccacaaatc

SEQ ID NO: 358321 - DNA, 12 bp, Artificial Sequence
  Oligonucleotide primer for the detection of SNP TSC0051066
tgattgttagtg

SEQ ID NO: 358322 - DNA, 12 bp, Artificial Sequence
  Oligonucleotide primer for the detection of SNP TSC0051066
gtattatagatt

SEQ ID NO: 358323 - DNA, 12 bp, Artificial Sequence
  Oligonucleotide primer for the detection of SNP TSC0051067
taagagaaatgt

SEQ ID NO: 358324 - DNA, 12 bp, Artificial Sequence
  Oligonucleotide primer for the detection of SNP TSC0051067
agttaagggtat

SEQ ID NO: 358325 - DNA, 12 bp, Artificial Sequence
  Oligonucleotide primer for the detection of SNP TSC0051067
agttaagggtac

SEQ ID NO: 358326 - DNA, 12 bp, Artificial Sequence
  Oligonucleotide primer for the detection of SNP TSC0051068
aaaaaacataca

SEQ ID NO: 358327 - DNA, 12 bp, Artificial Sequence
  Oligonucleotide primer for the detection of SNP TSC0051068
tatggggttgaa

SEQ ID NO: 358328 - DNA, 12 bp, Artificial Sequence
  Oligonucleotide primer for the detection of SNP TSC0051068
cataaaattaaa

SEQ ID NO: 358329 - DNA, 12 bp, Artificial Sequence
  Oligonucleotide primer for the detection of SNP TSC0051068
ggggagtatgta

SEQ ID NO: 358330 - DNA, 12 bp, Artificial Sequence
  Oligonucleotide primer for the detection of SNP TSC0051070
tatattaattta

SEQ ID NO: 358331 - DNA, 12 bp, Artificial Sequence
  Oligonucleotide primer for the detection of SNP TSC0051070
attagtagtttg

SEQ ID NO: 358332 - DNA, 12 bp, Artificial Sequence
  Oligonucleotide primer for the detection of SNP TSC0051070
tcaacaacctaa

SEQ ID NO: 358333 - DNA, 12 bp, Artificial Sequence
  Oligonucleotide primer for the detection of SNP TSC0051070
tattagtttgtt

SEQ ID NO: 358334 - DNA, 12 bp, Artificial Sequence
  Oligonucleotide primer for the detection of SNP TSC0051072
cccatctatcct

SEQ ID NO: 358335 - DNA, 12 bp, Artificial Sequence
  Oligonucleotide primer for the detection of SNP TSC0051072
gtagggaattta

SEQ ID NO: 358336 - DNA, 12 bp, Artificial Sequence
  Oligonucleotide primer for the detection of SNP TSC0051073
aacttaactaaa

SEQ ID NO: 358337 - DNA, 12 bp, Artificial Sequence
  Oligonucleotide primer for the detection of SNP TSC0051073
tttatataaggt

SEQ ID NO: 358338 - DNA, 12 bp, Artificial Sequence
  Oligonukleotid-Primer
actcatacaaaa

SEQ ID NO: 358339 - DNA, 12 bp, Artificial Sequence
  Oligonucleotide primer for the detection of SNP TSC0051073
gtttaattgagt

SEQ ID NO: 358340 - DNA, 12 bp, Artificial Sequence
  Oligonucleotide primer for the detection of SNP TSC0051074
ctccccatttct

SEQ ID NO: 358341 - DNA, 12 bp, Artificial Sequence
  Oligonucleotide primer for the detection of SNP TSC0051074
ctccccgtttct

SEQ ID NO: 358342 - DNA, 12 bp, Artificial Sequence
  Oligonucleotide primer for the detection of SNP TSC0051074
gatgaggattga

SEQ ID NO: 358343 - DNA, 12 bp, Artificial Sequence
  Oligonucleotide primer for the detection of SNP TSC0051075
cccccatttcct

SEQ ID NO: 358344 - DNA, 12 bp, Artificial Sequence
  Oligonucleotide primer for the detection of SNP TSC0051075
tggagaggatta

SEQ ID NO: 358345 - DNA, 12 bp, Artificial Sequence
  Oligonucleotide primer for the detection of SNP TSC0051076
tatatctaacat

SEQ ID NO: 358346 - DNA, 12 bp, Artificial Sequence
  Oligonucleotide primer for the detection of SNP TSC0051076
tagaggtggagg

SEQ ID NO: 358347 - DNA, 12 bp, Artificial Sequence
  Oligonucleotide primer for the detection of SNP TSC0051076
tgtgtttgatat

SEQ ID NO: 358348 - DNA, 12 bp, Artificial Sequence
  Oligonucleotide primer for the detection of SNP TSC0051078
ataacaacctat

SEQ ID NO: 358349 - DNA, 12 bp, Artificial Sequence
  Oligonucleotide primer for the detection of SNP TSC0051078
tagtagtgtttg

SEQ ID NO: 358350 - DNA, 12 bp, Artificial Sequence
  Oligonucleotide primer for the detection of SNP TSC0051079
tcaataattaaa

SEQ ID NO: 358351 - DNA, 12 bp, Artificial Sequence
  Oligonucleotide primer for the detection of SNP TSC0051080
ataaacttccac

SEQ ID NO: 358352 - DNA, 12 bp, Artificial Sequence
  Oligonucleotide primer for the detection of SNP TSC0051080
ccaaatacttca

SEQ ID NO: 358353 - DNA, 12 bp, Artificial Sequence
  Oligonucleotide primer for the detection of SNP TSC0051080
atgagtttttat

SEQ ID NO: 358354 - DNA, 12 bp, Artificial Sequence
  Oligonucleotide primer for the detection of SNP TSC0051081
cggtatgggttt

SEQ ID NO: 358355 - DNA, 12 bp, Artificial Sequence
  Oligonucleotide primer for the detection of SNP TSC0051081
tggtacgggttt

SEQ ID NO: 358356 - DNA, 12 bp, Artificial Sequence
  Oligonucleotide primer for the detection of SNP TSC0051081
cggtacgggttt

SEQ ID NO: 358357 - DNA, 12 bp, Artificial Sequence
  Oligonucleotide primer for the detection of SNP TSC0051081
caatacaaatct

SEQ ID NO: 358358 - DNA, 12 bp, Artificial Sequence
  Oligonucleotide primer for the detection of SNP TSC0051081
caatacgaatct

SEQ ID NO: 358359 - DNA, 12 bp, Artificial Sequence
  Oligonucleotide primer for the detection of SNP TSC0051081
cgatacaaatct

SEQ ID NO: 358360 - DNA, 12 bp, Artificial Sequence
  Oligonucleotide primer for the detection of SNP TSC0051081
cgatacgaatct

SEQ ID NO: 358361 - DNA, 12 bp, Artificial Sequence
  Oligonucleotide primer for the detection of SNP TSC0051081
gagggaagtttt

SEQ ID NO: 358362 - DNA, 12 bp, Artificial Sequence
  Oligonucleotide primer for the detection of SNP TSC0051084
tacccccttaaa

SEQ ID NO: 358363 - DNA, 12 bp, Artificial Sequence
  Oligonucleotide primer for the detection of SNP TSC0051084
ttattattatga

SEQ ID NO: 358364 - DNA, 12 bp, Artificial Sequence
  Oligonucleotide primer for the detection of SNP TSC0051084
ttattattacga

SEQ ID NO: 358365 - DNA, 12 bp, Artificial Sequence
  Oligonucleotide primer for the detection of SNP TSC0051084
tcactattacaa

SEQ ID NO: 358366 - DNA, 12 bp, Artificial Sequence
  Oligonucleotide primer for the detection of SNP TSC0051084
tcactattacga

SEQ ID NO: 358367 - DNA, 12 bp, Artificial Sequence
  Oligonucleotide primer for the detection of SNP TSC0051084
gtttttttggat

SEQ ID NO: 358368 - DNA, 12 bp, Artificial Sequence
  Oligonucleotide primer for the detection of SNP TSC0051085
ttttatatttaa

SEQ ID NO: 358369 - DNA, 12 bp, Artificial Sequence
  Oligonucleotide primer for the detection of SNP TSC0051085
aaatttattata

SEQ ID NO: 358370 - DNA, 12 bp, Artificial Sequence
  Oligonucleotide primer for the detection of SNP TSC0051085
atttattataaa

SEQ ID NO: 358371 - DNA, 12 bp, Artificial Sequence
  Oligonucleotide primer for the detection of SNP TSC0051086
ttggagggaagg

SEQ ID NO: 358372 - DNA, 12 bp, Artificial Sequence
  Oligonucleotide primer for the detection of SNP TSC0051088
catatactaact

SEQ ID NO: 358373 - DNA, 12 bp, Artificial Sequence
  Oligonucleotide primer for the detection of SNP TSC0051088
tagtttatttgg

SEQ ID NO: 358374 - DNA, 12 bp, Artificial Sequence
  Oligonucleotide primer for the detection of SNP TSC0006526
ctttaaatctct

SEQ ID NO: 358375 - DNA, 12 bp, Artificial Sequence
  Oligonucleotide primer for the detection of SNP TSC0006526
gaaataggaaaa

SEQ ID NO: 358376 - DNA, 12 bp, Artificial Sequence
  Oligonucleotide primer for the detection of SNP TSC0005284
aacttatctacc

SEQ ID NO: 358377 - DNA, 12 bp, Artificial Sequence
  Oligonucleotide primer for the detection of SNP TSC0005284
atattacttcta

SEQ ID NO: 358378 - DNA, 12 bp, Artificial Sequence
  Oligonucleotide primer for the detection of SNP TSC0005284
aatttgtttgtt

SEQ ID NO: 358379 - DNA, 12 bp, Artificial Sequence
  Oligonucleotide primer for the detection of SNP TSC0005285
tttaaagaatga

SEQ ID NO: 358380 - DNA, 12 bp, Artificial Sequence
  Oligonucleotide primer for the detection of SNP TSC0005285
attaaagaagat

SEQ ID NO: 358381 - DNA, 12 bp, Artificial Sequence
  Oligonucleotide primer for the detection of SNP TSC0051094
ctctacccctta

SEQ ID NO: 358382 - DNA, 12 bp, Artificial Sequence
  Oligonucleotide primer for the detection of SNP TSC0051094
ggggtatagagg

SEQ ID NO: 358383 - DNA, 12 bp, Artificial Sequence
  Oligonucleotide primer for the detection of SNP TSC0051094
aaaacacaaaaa

SEQ ID NO: 358384 - DNA, 12 bp, Artificial Sequence
  Oligonucleotide primer for the detection of SNP TSC0051095
gaactaaaatta

SEQ ID NO: 358385 - DNA, 12 bp, Artificial Sequence
  Oligonucleotide primer for the detection of SNP TSC0051095
ggagtatagtga

SEQ ID NO: 358386 - DNA, 12 bp, Artificial Sequence
  Oligonucleotide primer for the detection of SNP TSC0051096
tataattttcaa

SEQ ID NO: 358387 - DNA, 12 bp, Artificial Sequence
  Oligonucleotide primer for the detection of SNP TSC0051096
tataattttcga

SEQ ID NO: 358388 - DNA, 12 bp, Artificial Sequence
  Oligonucleotide primer for the detection of SNP TSC0051096
gttattgtgttt

SEQ ID NO: 358389 - DNA, 12 bp, Artificial Sequence
  Oligonucleotide primer for the detection of SNP TSC0051096
gttatcgtgttt

SEQ ID NO: 358390 - DNA, 12 bp, Artificial Sequence
  Oligonucleotide primer for the detection of SNP TSC0051096
gttattgcgttt

SEQ ID NO: 358391 - DNA, 12 bp, Artificial Sequence
  Oligonucleotide primer for the detection of SNP TSC0051096
gttatcgcgttt

SEQ ID NO: 358392 - DNA, 12 bp, Artificial Sequence
  Oligonucleotide primer for the detection of SNP TSC0051096
ccaccgcaccca

SEQ ID NO: 358393 - DNA, 12 bp, Artificial Sequence
  Oligonucleotide primer for the detection of SNP TSC0051096
ccaccgcgccca

SEQ ID NO: 358394 - DNA, 12 bp, Artificial Sequence
  Oligonucleotide primer for the detection of SNP TSC0051096
aatgtagttttt

SEQ ID NO: 358395 - DNA, 12 bp, Artificial Sequence
  Oligonucleotide primer for the detection of SNP TSC0051096
aatgtagttttc

SEQ ID NO: 358396 - DNA, 12 bp, Artificial Sequence
  Oligonucleotide primer for the detection of SNP TSC0009061
atctaactaatc

SEQ ID NO: 358397 - DNA, 12 bp, Artificial Sequence
  Oligonucleotide primer for the detection of SNP TSC0009061
gtagatatatta

SEQ ID NO: 358398 - DNA, 12 bp, Artificial Sequence
  Oligonucleotide primer for the detection of SNP TSC0051098
tagggattgggg

SEQ ID NO: 358399 - DNA, 12 bp, Artificial Sequence
  Oligonucleotide primer for the detection of SNP TSC0051099
atctcattaaaa

SEQ ID NO: 358400 - DNA, 12 bp, Artificial Sequence
  Oligonucleotide primer for the detection of SNP TSC0051099
atctcgttaaaa

SEQ ID NO: 358401 - DNA, 12 bp, Artificial Sequence
  Oligonucleotide primer for the detection of SNP TSC0051099
taaacatcaaaa

SEQ ID NO: 358402 - DNA, 12 bp, Artificial Sequence
  Oligonucleotide primer for the detection of SNP TSC0051099
ggttttgttaag

SEQ ID NO: 358403 - DNA, 12 bp, Artificial Sequence
  Oligonucleotide primer for the detection of SNP TSC0051099
ggtttcgttaag

SEQ ID NO: 358404 - DNA, 12 bp, Artificial Sequence
  Oligonucleotide primer for the detection of SNP TSC0004532
cctcctccaaat

SEQ ID NO: 358405 - DNA, 12 bp, Artificial Sequence
  Oligonucleotide primer for the detection of SNP TSC0004532
cctcctccgaat

SEQ ID NO: 358406 - DNA, 12 bp, Artificial Sequence
  Oligonucleotide primer for the detection of SNP TSC0004532
gatttgatttta

SEQ ID NO: 358407 - DNA, 12 bp, Artificial Sequence
  Oligonucleotide primer for the detection of SNP TSC0051100
ctaatttcctct

SEQ ID NO: 358408 - DNA, 12 bp, Artificial Sequence
  Oligonucleotide primer for the detection of SNP TSC0051100
gaaaatttaaag

SEQ ID NO: 358409 - DNA, 12 bp, Artificial Sequence
  Oligonucleotide primer for the detection of SNP TSC0051101
attcttttaaaa

SEQ ID NO: 358410 - DNA, 12 bp, Artificial Sequence
  Oligonucleotide primer for the detection of SNP TSC0051101
aaagaaaaatgt

SEQ ID NO: 358411 - DNA, 12 bp, Artificial Sequence
  Oligonucleotide primer for the detection of SNP TSC0051102
caatataaacac

SEQ ID NO: 358412 - DNA, 12 bp, Artificial Sequence
  Oligonucleotide primer for the detection of SNP TSC0051102
attagataatgt

SEQ ID NO: 358413 - DNA, 12 bp, Artificial Sequence
  Oligonucleotide primer for the detection of SNP TSC0051102
ctaaacaataca

SEQ ID NO: 358414 - DNA, 12 bp, Artificial Sequence
  Oligonucleotide primer for the detection of SNP TSC0051102
taatgtagatac

SEQ ID NO: 358415 - DNA, 12 bp, Artificial Sequence
  Oligonucleotide primer for the detection of SNP TSC0008690
ttaaagagtaag

SEQ ID NO: 358416 - DNA, 12 bp, Artificial Sequence
  Oligonucleotide primer for the detection of SNP TSC0005342
tttatttagagt

SEQ ID NO: 358417 - DNA, 12 bp, Artificial Sequence
  Oligonucleotide primer for the detection of SNP TSC0005342
tccacttaaaat

SEQ ID NO: 358418 - DNA, 12 bp, Artificial Sequence
  Oligonucleotide primer for the detection of SNP TSC0005342
gtaagaaatata

SEQ ID NO: 358419 - DNA, 12 bp, Artificial Sequence
  Oligonucleotide primer for the detection of SNP TSC0006458
actaatttacac

SEQ ID NO: 358420 - DNA, 12 bp, Artificial Sequence
  Oligonucleotide primer for the detection of SNP TSC0006458
ttaaaatacaat

SEQ ID NO: 358421 - DNA, 12 bp, Artificial Sequence
  Oligonucleotide primer for the detection of SNP TSC0006458
gttaatttgtat

SEQ ID NO: 358422 - DNA, 12 bp, Artificial Sequence
  Oligonucleotide primer for the detection of SNP TSC0051107
catatttaactc

SEQ ID NO: 358423 - DNA, 12 bp, Artificial Sequence
  Oligonucleotide primer for the detection of SNP TSC0051107
taaagaagttta

SEQ ID NO: 358424 - DNA, 12 bp, Artificial Sequence
  Oligonucleotide primer for the detection of SNP TSC0051111
atcctacttaat

SEQ ID NO: 358425 - DNA, 12 bp, Artificial Sequence
  Oligonucleotide primer for the detection of SNP TSC0051111
aaattaaattta

SEQ ID NO: 358426 - DNA, 12 bp, Artificial Sequence
  Oligonucleotide primer for the detection of SNP TSC0051112
ttttatcttatt

SEQ ID NO: 358427 - DNA, 12 bp, Artificial Sequence
  Oligonucleotide primer for the detection of SNP TSC0051112
ttgagtgttgga

SEQ ID NO: 358428 - DNA, 12 bp, Artificial Sequence
  Oligonucleotide primer for the detection of SNP TSC0051112
tcgagtgttgga

SEQ ID NO: 358429 - DNA, 12 bp, Artificial Sequence
  Oligonucleotide primer for the detection of SNP TSC0051113
atacatcatttt

SEQ ID NO: 358430 - DNA, 12 bp, Artificial Sequence
  Oligonucleotide primer for the detection of SNP TSC0051113
gtacatcatttt

SEQ ID NO: 358431 - DNA, 12 bp, Artificial Sequence
  Oligonucleotide primer for the detection of SNP TSC0051114
aaatcccataaa

SEQ ID NO: 358432 - DNA, 12 bp, Artificial Sequence
  Oligonucleotide primer for the detection of SNP TSC0051114
ttatttgttcgt

SEQ ID NO: 358433 - DNA, 12 bp, Artificial Sequence
  Oligonucleotide primer for the detection of SNP TSC0051114
ttatttattcat

SEQ ID NO: 358434 - DNA, 12 bp, Artificial Sequence
  Oligonucleotide primer for the detection of SNP TSC0051114
ttatttattcgt

SEQ ID NO: 358435 - DNA, 12 bp, Artificial Sequence
  Oligonucleotide primer for the detection of SNP TSC0051114
aaattttatgga

SEQ ID NO: 358436 - DNA, 12 bp, Artificial Sequence
  Oligonucleotide primer for the detection of SNP TSC0051115
atcactatatcc

SEQ ID NO: 358437 - DNA, 12 bp, Artificial Sequence
  Oligonucleotide primer for the detection of SNP TSC0051115
ttttagaaatag

SEQ ID NO: 358438 - DNA, 12 bp, Artificial Sequence
  Oligonucleotide primer for the detection of SNP TSC0051115
tctcaaaaacaa

SEQ ID NO: 358439 - DNA, 12 bp, Artificial Sequence
  Oligonucleotide primer for the detection of SNP TSC0051116
ataaacaacaac

SEQ ID NO: 358440 - DNA, 12 bp, Artificial Sequence
  Oligonucleotide primer for the detection of SNP TSC0051116
aaggtatttata

SEQ ID NO: 358441 - DNA, 12 bp, Artificial Sequence
  Oligonucleotide primer for the detection of SNP TSC0051122
ttcaaacaaaca

SEQ ID NO: 358442 - DNA, 12 bp, Artificial Sequence
  Oligonucleotide primer for the detection of SNP TSC0051122
agatagtgaatt

SEQ ID NO: 358443 - DNA, 12 bp, Artificial Sequence
  Oligonucleotide primer for the detection of SNP TSC0051122
gtttaggtagat

SEQ ID NO: 358444 - DNA, 12 bp, Artificial Sequence
  Oligonucleotide primer for the detection of SNP TSC0051123
atctacctaaac

SEQ ID NO: 358445 - DNA, 12 bp, Artificial Sequence
  Oligonucleotide primer for the detection of SNP TSC0051123
ttaatttatatg

SEQ ID NO: 358446 - DNA, 12 bp, Artificial Sequence
  Oligonucleotide primer for the detection of SNP TSC0005237
tcccaaataaaa

SEQ ID NO: 358447 - DNA, 12 bp, Artificial Sequence
  Oligonucleotide primer for the detection of SNP TSC0005237
tagaaaattttt

SEQ ID NO: 358448 - DNA, 12 bp, Artificial Sequence
  Oligonucleotide primer for the detection of SNP TSC0005237
caaaaaatcttt

SEQ ID NO: 358449 - DNA, 12 bp, Artificial Sequence
  Oligonucleotide primer for the detection of SNP TSC0005237
tttagatggagt

SEQ ID NO: 358450 - DNA, 12 bp, Artificial Sequence
  Oligonucleotide primer for the detection of SNP TSC0051124
catttctaattc

SEQ ID NO: 358451 - DNA, 12 bp, Artificial Sequence
  Oligonukleotid-Primer
tataaggatgta

SEQ ID NO: 358452 - DNA, 12 bp, Artificial Sequence
  Oligonucleotide primer for the detection of SNP TSC0051125
ttttttatctca

SEQ ID NO: 358453 - DNA, 12 bp, Artificial Sequence
  Oligonucleotide primer for the detection of SNP TSC0051125
ataatacaaaca

SEQ ID NO: 358454 - DNA, 12 bp, Artificial Sequence
  Oligonucleotide primer for the detection of SNP TSC0051128
aaactcaaatac

SEQ ID NO: 358455 - DNA, 12 bp, Artificial Sequence
  Oligonucleotide primer for the detection of SNP TSC0051128
tatgtttagttt

SEQ ID NO: 358456 - DNA, 12 bp, Artificial Sequence
  Oligonucleotide primer for the detection of SNP TSC0051128
tatgtttagttc

SEQ ID NO: 358457 - DNA, 12 bp, Artificial Sequence
  Oligonucleotide primer for the detection of SNP TSC0051128
ctatatacttaa

SEQ ID NO: 358458 - DNA, 12 bp, Artificial Sequence
  Oligonucleotide primer for the detection of SNP TSC0051128
agatttaggtgt

SEQ ID NO: 358459 - DNA, 12 bp, Artificial Sequence
  Oligonukleotid-Primer
tactcccctttc

SEQ ID NO: 358460 - DNA, 12 bp, Artificial Sequence
  Oligonucleotide primer for the detection of SNP TSC0007911
tgtattttatgg

SEQ ID NO: 358461 - DNA, 12 bp, Artificial Sequence
  Oligonucleotide primer for the detection of SNP TSC0051129
gttattgatatt

SEQ ID NO: 358462 - DNA, 12 bp, Artificial Sequence
  Oligonucleotide primer for the detection of SNP TSC0051129
ttactactaata

SEQ ID NO: 358463 - DNA, 12 bp, Artificial Sequence
  Oligonukleotid-Primer
tcatcttttttt

SEQ ID NO: 358464 - DNA, 12 bp, Artificial Sequence
  Oligonucleotide primer for the detection of SNP TSC0051130
aattatgaaaaa

SEQ ID NO: 358465 - DNA, 12 bp, Artificial Sequence
  Oligonucleotide primer for the detection of SNP TSC0051130
aattacgaaaaa

SEQ ID NO: 358466 - DNA, 12 bp, Artificial Sequence
  Oligonucleotide primer for the detection of SNP TSC0051131
cttcattcaccc

SEQ ID NO: 358467 - DNA, 12 bp, Artificial Sequence
  Oligonucleotide primer for the detection of SNP TSC0051131
cttcgttcaccc

SEQ ID NO: 358468 - DNA, 12 bp, Artificial Sequence
  Oligonucleotide primer for the detection of SNP TSC0051131
gaggttttaagg

SEQ ID NO: 358469 - DNA, 12 bp, Artificial Sequence
  Oligonucleotide primer for the detection of SNP TSC0051140
tatcttcaaccc

SEQ ID NO: 358470 - DNA, 12 bp, Artificial Sequence
  Oligonucleotide primer for the detection of SNP TSC0051140
agttttgggttt

SEQ ID NO: 358471 - DNA, 12 bp, Artificial Sequence
  Oligonucleotide primer for the detection of SNP TSC0051140
aaaccctaaacc

SEQ ID NO: 358472 - DNA, 12 bp, Artificial Sequence
  Oligonucleotide primer for the detection of SNP TSC0051141
aaattttcctac

SEQ ID NO: 358473 - DNA, 12 bp, Artificial Sequence
  Oligonucleotide primer for the detection of SNP TSC0051141
gtaaagagagag

SEQ ID NO: 358474 - DNA, 12 bp, Artificial Sequence
  Oligonucleotide primer for the detection of SNP TSC0051144
tggagaaatttt

SEQ ID NO: 358475 - DNA, 12 bp, Artificial Sequence
  Oligonucleotide primer for the detection of SNP TSC0051145
tactatttatat

SEQ ID NO: 358476 - DNA, 12 bp, Artificial Sequence
  Oligonucleotide primer for the detection of SNP TSC0051145
ttatgataaaag

SEQ ID NO: 358477 - DNA, 12 bp, Artificial Sequence
  Oligonucleotide primer for the detection of SNP TSC0051145
ttacgataaaag

SEQ ID NO: 358478 - DNA, 12 bp, Artificial Sequence
  Oligonucleotide primer for the detection of SNP TSC0051145
ccacaataaaaa

SEQ ID NO: 358479 - DNA, 12 bp, Artificial Sequence
  Oligonucleotide primer for the detection of SNP TSC0051145
ccacgataaaaa

SEQ ID NO: 358480 - DNA, 12 bp, Artificial Sequence
  Oligonucleotide primer for the detection of SNP TSC0051145
tgttgtttgtgt

SEQ ID NO: 358481 - DNA, 12 bp, Artificial Sequence
  Oligonucleotide primer for the detection of SNP TSC0051146
taatttaatata

SEQ ID NO: 358482 - DNA, 12 bp, Artificial Sequence
  Oligonucleotide primer for the detection of SNP TSC0051149
tcaacctaccat

SEQ ID NO: 358483 - DNA, 12 bp, Artificial Sequence
  Oligonucleotide primer for the detection of SNP TSC0051149
agttaaagagta

SEQ ID NO: 358484 - DNA, 12 bp, Artificial Sequence
  Oligonucleotide primer for the detection of SNP TSC0051149
aatcaaaaaaca

SEQ ID NO: 358485 - DNA, 12 bp, Artificial Sequence
  Oligonucleotide primer for the detection of SNP TSC0051149
ttagtttgttat

SEQ ID NO: 358486 - DNA, 12 bp, Artificial Sequence
  Oligonucleotide primer for the detection of SNP TSC0051150
tttagtaagatt

SEQ ID NO: 358487 - DNA, 12 bp, Artificial Sequence
  Oligonucleotide primer for the detection of SNP TSC0051150
tgatgaatggta

SEQ ID NO: 358488 - DNA, 12 bp, Artificial Sequence
  Oligonucleotide primer for the detection of SNP TSC0007847
acaatcacactt

SEQ ID NO: 358489 - DNA, 12 bp, Artificial Sequence
  Oligonucleotide primer for the detection of SNP TSC0051152
ggtataattatg

SEQ ID NO: 358490 - DNA, 12 bp, Artificial Sequence
  Oligonucleotide primer for the detection of SNP TSC0051152
aacacaattata

SEQ ID NO: 358491 - DNA, 12 bp, Artificial Sequence
  Oligonucleotide primer for the detection of SNP TSC0051152
aggtaatatatt

SEQ ID NO: 358492 - DNA, 12 bp, Artificial Sequence
  Oligonucleotide primer for the detection of SNP TSC0051153
ttaaaaaggtta

SEQ ID NO: 358493 - DNA, 12 bp, Artificial Sequence
  Oligonucleotide primer for the detection of SNP TSC0051159
tcacataataat

SEQ ID NO: 358494 - DNA, 12 bp, Artificial Sequence
  Oligonucleotide primer for the detection of SNP TSC0051160
aactccaccata

SEQ ID NO: 358495 - DNA, 12 bp, Artificial Sequence
  Oligonucleotide primer for the detection of SNP TSC0051160
aaacttccccaa

SEQ ID NO: 358496 - DNA, 12 bp, Artificial Sequence
  Oligonucleotide primer for the detection of SNP TSC0051162
tcttattctctt

SEQ ID NO: 358497 - DNA, 12 bp, Artificial Sequence
  Oligonucleotide primer for the detection of SNP TSC0051162
aagtgtattatg

SEQ ID NO: 358498 - DNA, 12 bp, Artificial Sequence
  Oligonucleotide primer for the detection of SNP TSC0051163
ccttatcaatta

SEQ ID NO: 358499 - DNA, 12 bp, Artificial Sequence
  Oligonucleotide primer for the detection of SNP TSC0051163
gaattatggaat

SEQ ID NO: 358500 - DNA, 12 bp, Artificial Sequence
  Oligonucleotide primer for the detection of SNP TSC0051163
aaccataaaata

SEQ ID NO: 358501 - DNA, 12 bp, Artificial Sequence
  Oligonucleotide primer for the detection of SNP TSC0051164
actctctaatat

SEQ ID NO: 358502 - DNA, 12 bp, Artificial Sequence
  Oligonucleotide primer for the detection of SNP TSC0051164
tgtaagataaat

SEQ ID NO: 358503 - DNA, 12 bp, Artificial Sequence
  Oligonucleotide primer for the detection of SNP TSC0051164
tacaaaataaac

SEQ ID NO: 358504 - DNA, 12 bp, Artificial Sequence
  Oligonucleotide primer for the detection of SNP TSC0051166
aaaaaaactcac

SEQ ID NO: 358505 - DNA, 12 bp, Artificial Sequence
  Oligonucleotide primer for the detection of SNP TSC0051166
aaaaaaactcgc

SEQ ID NO: 358506 - DNA, 12 bp, Artificial Sequence
  Oligonucleotide primer for the detection of SNP TSC0051166
gaaaaaactcac

SEQ ID NO: 358507 - DNA, 12 bp, Artificial Sequence
  Oligonucleotide primer for the detection of SNP TSC0051166
gaaaaaactcgc

SEQ ID NO: 358508 - DNA, 12 bp, Artificial Sequence
  Oligonucleotide primer for the detection of SNP TSC0051166
tatttaaattta

SEQ ID NO: 358509 - DNA, 12 bp, Artificial Sequence
  Oligonucleotide primer for the detection of SNP TSC0051166
cattcaaaccca

SEQ ID NO: 358510 - DNA, 12 bp, Artificial Sequence
  Oligonucleotide primer for the detection of SNP TSC0051166
gggaaaatttgt

SEQ ID NO: 358511 - DNA, 12 bp, Artificial Sequence
  Oligonucleotide primer for the detection of SNP TSC0051166
gggaaaattcgt

SEQ ID NO: 358512 - DNA, 12 bp, Artificial Sequence
  Oligonucleotide primer for the detection of SNP TSC0051167
caaaaacaaaac

SEQ ID NO: 358513 - DNA, 12 bp, Artificial Sequence
  Oligonucleotide primer for the detection of SNP TSC0051167
agttattgataa

SEQ ID NO: 358514 - DNA, 12 bp, Artificial Sequence
  Oligonucleotide primer for the detection of SNP TSC0051168
ataataacaaaa

SEQ ID NO: 358515 - DNA, 12 bp, Artificial Sequence
  Oligonucleotide primer for the detection of SNP TSC0051168
ctcctcctcttt

SEQ ID NO: 358516 - DNA, 12 bp, Artificial Sequence
  Oligonucleotide primer for the detection of SNP TSC0051168
tggtggtaagat

SEQ ID NO: 358517 - DNA, 12 bp, Artificial Sequence
  Oligonucleotide primer for the detection of SNP TSC0007206
aaccttatacct

SEQ ID NO: 358518 - DNA, 12 bp, Artificial Sequence
  Oligonucleotide primer for the detection of SNP TSC0007206
gttagaattttt

SEQ ID NO: 358519 - DNA, 12 bp, Artificial Sequence
  Oligonucleotide primer for the detection of SNP TSC0007206
gttagaattttc

SEQ ID NO: 358520 - DNA, 12 bp, Artificial Sequence
  Oligonucleotide primer for the detection of SNP TSC0007206
accaaaaccctc

SEQ ID NO: 358521 - DNA, 12 bp, Artificial Sequence
  Oligonucleotide primer for the detection of SNP TSC0007206
agttttatattt

SEQ ID NO: 358522 - DNA, 12 bp, Artificial Sequence
  Oligonucleotide primer for the detection of SNP TSC0051169
tttcgtaatttg

SEQ ID NO: 358523 - DNA, 12 bp, Artificial Sequence
  Oligonucleotide primer for the detection of SNP TSC0051169
cttcataattta

SEQ ID NO: 358524 - DNA, 12 bp, Artificial Sequence
  Oligonucleotide primer for the detection of SNP TSC0051169
cttcgtaattta

SEQ ID NO: 358525 - DNA, 12 bp, Artificial Sequence
  Oligonucleotide primer for the detection of SNP TSC0051172
atcatctcatat

SEQ ID NO: 358526 - DNA, 12 bp, Artificial Sequence
  Oligonucleotide primer for the detection of SNP TSC0051172
aagaatgggtaa

SEQ ID NO: 358527 - DNA, 12 bp, Artificial Sequence
  Oligonucleotide primer for the detection of SNP TSC0004873
tatctataatct

SEQ ID NO: 358528 - DNA, 12 bp, Artificial Sequence
  Oligonucleotide primer for the detection of SNP TSC0051173
atacttaccctc

SEQ ID NO: 358529 - DNA, 12 bp, Artificial Sequence
  Oligonucleotide primer for the detection of SNP TSC0051173
tttgaaaagaaa

SEQ ID NO: 358530 - DNA, 12 bp, Artificial Sequence
  Oligonucleotide primer for the detection of SNP TSC0051174
cttttctcttat

SEQ ID NO: 358531 - DNA, 12 bp, Artificial Sequence
  Oligonucleotide primer for the detection of SNP TSC0051174
ataataaaaagg

SEQ ID NO: 358532 - DNA, 12 bp, Artificial Sequence
  Oligonucleotide primer for the detection of SNP TSC0051175
ccctacatcaaa

SEQ ID NO: 358533 - DNA, 12 bp, Artificial Sequence
  Oligonucleotide primer for the detection of SNP TSC0051175
gtagatagaatt

SEQ ID NO: 358534 - DNA, 12 bp, Artificial Sequence
  Oligonucleotide primer for the detection of SNP TSC0051175
acaaataaaatt

SEQ ID NO: 358535 - DNA, 12 bp, Artificial Sequence
  Oligonucleotide primer for the detection of SNP TSC0051175
ttttatattaaa

SEQ ID NO: 358536 - DNA, 12 bp, Artificial Sequence
  Oligonucleotide primer for the detection of SNP TSC0051176
ccatatctaaaa

SEQ ID NO: 358537 - DNA, 12 bp, Artificial Sequence
  Oligonucleotide primer for the detection of SNP TSC0051176
atatttaaagtt

SEQ ID NO: 358538 - DNA, 12 bp, Artificial Sequence
  Oligonucleotide primer for the detection of SNP TSC0008764
tctcattttcca

SEQ ID NO: 358539 - DNA, 12 bp, Artificial Sequence
  Oligonucleotide primer for the detection of SNP TSC0008764
tttataggattt

SEQ ID NO: 358540 - DNA, 12 bp, Artificial Sequence
  Oligonucleotide primer for the detection of SNP TSC0008764
tttataggattc

SEQ ID NO: 358541 - DNA, 12 bp, Artificial Sequence
  Oligonucleotide primer for the detection of SNP TSC0008764
tctataaaaccc

SEQ ID NO: 358542 - DNA, 12 bp, Artificial Sequence
  Oligonucleotide primer for the detection of SNP TSC0051179
ggtgtagtggtg

SEQ ID NO: 358543 - DNA, 12 bp, Artificial Sequence
  Oligonucleotide primer for the detection of SNP TSC0051179
ggtgtagtggcg

SEQ ID NO: 358544 - DNA, 12 bp, Artificial Sequence
  Oligonucleotide primer for the detection of SNP TSC0051180
ctaaaaactacc

SEQ ID NO: 358545 - DNA, 12 bp, Artificial Sequence
  Oligonucleotide primer for the detection of SNP TSC0051180
tttaggtaatag

SEQ ID NO: 358546 - DNA, 12 bp, Artificial Sequence
  Oligonucleotide primer for the detection of SNP TSC0051180
tccaaacaacaa

SEQ ID NO: 358547 - DNA, 12 bp, Artificial Sequence
  Oligonucleotide primer for the detection of SNP TSC0051180
ttgagggttgtt

SEQ ID NO: 358548 - DNA, 12 bp, Artificial Sequence
  Oligonucleotide primer for the detection of SNP TSC0051180
ttgagggttgtc

SEQ ID NO: 358549 - DNA, 12 bp, Artificial Sequence
  Oligonucleotide primer for the detection of SNP TSC0005944
attttaaatcct

SEQ ID NO: 358550 - DNA, 12 bp, Artificial Sequence
  Oligonucleotide primer for the detection of SNP TSC0005944
ttgagttaatta

SEQ ID NO: 358551 - DNA, 12 bp, Artificial Sequence
  Oligonucleotide primer for the detection of SNP TSC0051181
caaaatatctta

SEQ ID NO: 358552 - DNA, 12 bp, Artificial Sequence
  Oligonucleotide primer for the detection of SNP TSC0051181
cgaaatatctta

SEQ ID NO: 358553 - DNA, 12 bp, Artificial Sequence
  Oligonucleotide primer for the detection of SNP TSC0051181
agattataggat

SEQ ID NO: 358554 - DNA, 12 bp, Artificial Sequence
  Oligonucleotide primer for the detection of SNP TSC0051181
tggggtgttttg

SEQ ID NO: 358555 - DNA, 12 bp, Artificial Sequence
  Oligonucleotide primer for the detection of SNP TSC0051181
cggggtgttttg

SEQ ID NO: 358556 - DNA, 12 bp, Artificial Sequence
  Oligonucleotide primer for the detection of SNP TSC0051182
tcacaactataa

SEQ ID NO: 358557 - DNA, 12 bp, Artificial Sequence
  Oligonucleotide primer for the detection of SNP TSC0051182
tcctaaattact

SEQ ID NO: 358558 - DNA, 12 bp, Artificial Sequence
  Oligonucleotide primer for the detection of SNP TSC0051182
ttataattgtaa

SEQ ID NO: 358559 - DNA, 12 bp, Artificial Sequence
  Oligonucleotide primer for the detection of SNP TSC0051183
gagagattaagt

SEQ ID NO: 358560 - DNA, 12 bp, Artificial Sequence
  Oligonucleotide primer for the detection of SNP TSC0051183
aaggttaaatag

SEQ ID NO: 358561 - DNA, 12 bp, Artificial Sequence
  Oligonucleotide primer for the detection of SNP TSC0051184
tcttttactacc

SEQ ID NO: 358562 - DNA, 12 bp, Artificial Sequence
  Oligonucleotide primer for the detection of SNP TSC0051184
aaatataaagga

SEQ ID NO: 358563 - DNA, 12 bp, Artificial Sequence
  Oligonucleotide primer for the detection of SNP TSC0051185
atagtaaggttt

SEQ ID NO: 358564 - DNA, 12 bp, Artificial Sequence
  Oligonucleotide primer for the detection of SNP TSC0051186
tttatctaatat

SEQ ID NO: 358565 - DNA, 12 bp, Artificial Sequence
  Oligonucleotide primer for the detection of SNP TSC0051186
tagaggtggtta

SEQ ID NO: 358566 - DNA, 12 bp, Artificial Sequence
  Oligonucleotide primer for the detection of SNP TSC0051187
tatttttaactt

SEQ ID NO: 358567 - DNA, 12 bp, Artificial Sequence
  Oligonucleotide primer for the detection of SNP TSC0051187
gataaaaatgaa

SEQ ID NO: 358568 - DNA, 12 bp, Artificial Sequence
  Oligonucleotide primer for the detection of SNP TSC0007550
tttaacttattt

SEQ ID NO: 358569 - DNA, 12 bp, Artificial Sequence
  Oligonucleotide primer for the detection of SNP TSC0007550
tattatgttaag

SEQ ID NO: 358570 - DNA, 12 bp, Artificial Sequence
  Oligonucleotide primer for the detection of SNP TSC0051188
actcctcaaaac

SEQ ID NO: 358571 - DNA, 12 bp, Artificial Sequence
  Oligonucleotide primer for the detection of SNP TSC0051188
tagaattatttg

SEQ ID NO: 358572 - DNA, 12 bp, Artificial Sequence
  Oligonucleotide primer for the detection of SNP TSC0009811
aattaggagtgg

SEQ ID NO: 358573 - DNA, 12 bp, Artificial Sequence
  Oligonucleotide primer for the detection of SNP TSC0051189
atatatcttaaa

SEQ ID NO: 358574 - DNA, 12 bp, Artificial Sequence
  Oligonucleotide primer for the detection of SNP TSC0051189
ttgggtgtaggt

SEQ ID NO: 358575 - DNA, 12 bp, Artificial Sequence
  Oligonucleotide primer for the detection of SNP TSC0051189
ttgggcgtaggt

SEQ ID NO: 358576 - DNA, 12 bp, Artificial Sequence
  Oligonucleotide primer for the detection of SNP TSC0051189
ttgggtgtaggc

SEQ ID NO: 358577 - DNA, 12 bp, Artificial Sequence
  Oligonucleotide primer for the detection of SNP TSC0051189
ttgggcgtaggc

SEQ ID NO: 358578 - DNA, 12 bp, Artificial Sequence
  Oligonucleotide primer for the detection of SNP TSC0051189
ctaaacacaaac

SEQ ID NO: 358579 - DNA, 12 bp, Artificial Sequence
  Oligonucleotide primer for the detection of SNP TSC0051189
ctaaacgcaaac

SEQ ID NO: 358580 - DNA, 12 bp, Artificial Sequence
  Oligonucleotide primer for the detection of SNP TSC0051189
atgtattttggg

SEQ ID NO: 358581 - DNA, 12 bp, Artificial Sequence
  Oligonucleotide primer for the detection of SNP TSC0007328
ccatccatcaat

SEQ ID NO: 358582 - DNA, 12 bp, Artificial Sequence
  Oligonucleotide primer for the detection of SNP TSC0051190
ctaattttctcc

SEQ ID NO: 358583 - DNA, 12 bp, Artificial Sequence
  Oligonucleotide primer for the detection of SNP TSC0051190
aataggaaatta

SEQ ID NO: 358584 - DNA, 12 bp, Artificial Sequence
  Oligonucleotide primer for the detection of SNP TSC0051192
ttaaaacataaa

SEQ ID NO: 358585 - DNA, 12 bp, Artificial Sequence
  Oligonucleotide primer for the detection of SNP TSC0051192
agtgggtttggt

SEQ ID NO: 358586 - DNA, 12 bp, Artificial Sequence
  Oligonucleotide primer for the detection of SNP TSC0051192
ttgaagtataaa

SEQ ID NO: 358587 - DNA, 12 bp, Artificial Sequence
  Oligonucleotide primer for the detection of SNP TSC0051193
tttacttatttt

SEQ ID NO: 358588 - DNA, 12 bp, Artificial Sequence
  Oligonucleotide primer for the detection of SNP TSC0051194
ttttccaccata

SEQ ID NO: 358589 - DNA, 12 bp, Artificial Sequence
  Oligonucleotide primer for the detection of SNP TSC0051194
tattaaatacta

SEQ ID NO: 358590 - DNA, 12 bp, Artificial Sequence
  Oligonucleotide primer for the detection of SNP TSC0008119
ccccaactctaa

SEQ ID NO: 358591 - DNA, 12 bp, Artificial Sequence
  Oligonucleotide primer for the detection of SNP TSC0008119
aaatcctaccct

SEQ ID NO: 358592 - DNA, 12 bp, Artificial Sequence
  Oligonucleotide primer for the detection of SNP TSC0051195
ttatctttctcc

SEQ ID NO: 358593 - DNA, 12 bp, Artificial Sequence
  Oligonucleotide primer for the detection of SNP TSC0051195
aaaaacttattt

SEQ ID NO: 358594 - DNA, 12 bp, Artificial Sequence
  Oligonucleotide primer for the detection of SNP TSC0051196
gaggatttagta

SEQ ID NO: 358595 - DNA, 12 bp, Artificial Sequence
  Oligonucleotide primer for the detection of SNP TSC0051197
aattctatcctt

SEQ ID NO: 358596 - DNA, 12 bp, Artificial Sequence
  Oligonucleotide primer for the detection of SNP TSC0051198
aaccataaaacc

SEQ ID NO: 358597 - DNA, 12 bp, Artificial Sequence
  Oligonucleotide primer for the detection of SNP TSC0051199
tacttcttaaaa

SEQ ID NO: 358598 - DNA, 12 bp, Artificial Sequence
  Oligonucleotide primer for the detection of SNP TSC0051199
gatagaggagag

SEQ ID NO: 358599 - DNA, 12 bp, Artificial Sequence
  Oligonucleotide primer for the detection of SNP TSC0051203
caaaatattttc

SEQ ID NO: 358600 - DNA, 12 bp, Artificial Sequence
  Oligonucleotide primer for the detection of SNP TSC0051203
ttagggtgtgga

SEQ ID NO: 358601 - DNA, 12 bp, Artificial Sequence
  Oligonucleotide primer for the detection of SNP TSC0051203
ctaaaatataaa

SEQ ID NO: 358602 - DNA, 12 bp, Artificial Sequence
  Oligonucleotide primer for the detection of SNP TSC0051203
tagaatattttt

SEQ ID NO: 358603 - DNA, 12 bp, Artificial Sequence
  Oligonucleotide primer for the detection of SNP TSC0051204
aacatttttaat

SEQ ID NO: 358604 - DNA, 12 bp, Artificial Sequence
  Oligonucleotide primer for the detection of SNP TSC0051204
aaatgaattata

SEQ ID NO: 358605 - DNA, 12 bp, Artificial Sequence
  Oligonucleotide primer for the detection of SNP TSC0006593
caaaatttacaa

SEQ ID NO: 358606 - DNA, 12 bp, Artificial Sequence
  Oligonucleotide primer for the detection of SNP TSC0006593
gtagtgtgtgag

SEQ ID NO: 358607 - DNA, 12 bp, Artificial Sequence
  Oligonucleotide primer for the detection of SNP TSC0006593
gtagcgtgtgag

SEQ ID NO: 358608 - DNA, 12 bp, Artificial Sequence
  Oligonucleotide primer for the detection of SNP TSC0006593
caacgtataaaa

SEQ ID NO: 358609 - DNA, 12 bp, Artificial Sequence
  Oligonucleotide primer for the detection of SNP TSC0006593
tagggtttgtaa

SEQ ID NO: 358610 - DNA, 12 bp, Artificial Sequence
  Oligonucleotide primer for the detection of SNP TSC0006594
ctaaactcactc

SEQ ID NO: 358611 - DNA, 12 bp, Artificial Sequence
  Oligonucleotide primer for the detection of SNP TSC0006594
tgttaatgatga

SEQ ID NO: 358612 - DNA, 12 bp, Artificial Sequence
  Oligonukleotid-Primer
tgttaacgatga

SEQ ID NO: 358613 - DNA, 12 bp, Artificial Sequence
  Oligonucleotide primer for the detection of SNP TSC0006594
taccaacaataa

SEQ ID NO: 358614 - DNA, 12 bp, Artificial Sequence
  Oligonucleotide primer for the detection of SNP TSC0006594
taccaacgataa

SEQ ID NO: 358615 - DNA, 12 bp, Artificial Sequence
  Oligonucleotide primer for the detection of SNP TSC0051207
ttttctttaatt

SEQ ID NO: 358616 - DNA, 12 bp, Artificial Sequence
  Oligonucleotide primer for the detection of SNP TSC0051207
attgtggaagta

SEQ ID NO: 358617 - DNA, 12 bp, Artificial Sequence
  Oligonucleotide primer for the detection of SNP TSC0051208
aactattaaata

SEQ ID NO: 358618 - DNA, 12 bp, Artificial Sequence
  Oligonucleotide primer for the detection of SNP TSC0051208
tttagtgtttga

SEQ ID NO: 358619 - DNA, 12 bp, Artificial Sequence
  Oligonucleotide primer for the detection of SNP TSC0051208
tttaatatctaa

SEQ ID NO: 358620 - DNA, 12 bp, Artificial Sequence
  Oligonucleotide primer for the detection of SNP TSC0051208
agttgttaaata

SEQ ID NO: 358621 - DNA, 12 bp, Artificial Sequence
  Oligonucleotide primer for the detection of SNP TSC0051209
aacataaataac

SEQ ID NO: 358622 - DNA, 12 bp, Artificial Sequence
  Oligonucleotide primer for the detection of SNP TSC0051209
gaggtgggtaaa

SEQ ID NO: 358623 - DNA, 12 bp, Artificial Sequence
  Oligonucleotide primer for the detection of SNP TSC0051210
atattgagggta

SEQ ID NO: 358624 - DNA, 12 bp, Artificial Sequence
  Oligonucleotide primer for the detection of SNP TSC0051210
atatcgagggta

SEQ ID NO: 358625 - DNA, 12 bp, Artificial Sequence
  Oligonucleotide primer for the detection of SNP TSC0051210
acaccgaaaaca

SEQ ID NO: 358626 - DNA, 12 bp, Artificial Sequence
  Oligonucleotide primer for the detection of SNP TSC0051210
tggataaattaa

SEQ ID NO: 358627 - DNA, 12 bp, Artificial Sequence
  Oligonucleotide primer for the detection of SNP TSC0051211
aagttttatata

SEQ ID NO: 358628 - DNA, 12 bp, Artificial Sequence
  Oligonucleotide primer for the detection of SNP TSC0051212
tatttaattcac

SEQ ID NO: 358629 - DNA, 12 bp, Artificial Sequence
  Oligonucleotide primer for the detection of SNP TSC0051214
ttttttatgata

SEQ ID NO: 358630 - DNA, 12 bp, Artificial Sequence
  Oligonucleotide primer for the detection of SNP TSC0051214
ttttttacgata

SEQ ID NO: 358631 - DNA, 12 bp, Artificial Sequence
  Oligonucleotide primer for the detection of SNP TSC0051215
ctcaaaaactta

SEQ ID NO: 358632 - DNA, 12 bp, Artificial Sequence
  Oligonucleotide primer for the detection of SNP TSC0051215
ttcccccacact

SEQ ID NO: 358633 - DNA, 12 bp, Artificial Sequence
  Oligonucleotide primer for the detection of SNP TSC0051216
acacaaaacctc

SEQ ID NO: 358634 - DNA, 12 bp, Artificial Sequence
  Oligonucleotide primer for the detection of SNP TSC0051216
acacgaaacctc

SEQ ID NO: 358635 - DNA, 12 bp, Artificial Sequence
  Oligonucleotide primer for the detection of SNP TSC0051216
agtgaggaattg

SEQ ID NO: 358636 - DNA, 12 bp, Artificial Sequence
  Oligonucleotide primer for the detection of SNP TSC0051217
ttattagatttt

SEQ ID NO: 358637 - DNA, 12 bp, Artificial Sequence
  Oligonucleotide primer for the detection of SNP TSC0051217
ttaccaaatctt

SEQ ID NO: 358638 - DNA, 12 bp, Artificial Sequence
  Oligonucleotide primer for the detection of SNP TSC0051217
ttgaaaaatatg

SEQ ID NO: 358639 - DNA, 12 bp, Artificial Sequence
  Oligonucleotide primer for the detection of SNP TSC0051218
tatcataacaac

SEQ ID NO: 358640 - DNA, 12 bp, Artificial Sequence
  Oligonucleotide primer for the detection of SNP TSC0051218
tttagataggaa

SEQ ID NO: 358641 - DNA, 12 bp, Artificial Sequence
  Oligonucleotide primer for the detection of SNP TSC0051219
acatttccacca

SEQ ID NO: 358642 - DNA, 12 bp, Artificial Sequence
  Oligonucleotide primer for the detection of SNP TSC0051219
aaatttaagagt

SEQ ID NO: 358643 - DNA, 12 bp, Artificial Sequence
  Oligonucleotide primer for the detection of SNP TSC0051219
ggtatttttatt

SEQ ID NO: 358644 - DNA, 12 bp, Artificial Sequence
  Oligonucleotide primer for the detection of SNP TSC0051220
taattaaaatac

SEQ ID NO: 358645 - DNA, 12 bp, Artificial Sequence
  Oligonucleotide primer for the detection of SNP TSC0051220
tatatttttatc

SEQ ID NO: 358646 - DNA, 12 bp, Artificial Sequence
  Oligonucleotide primer for the detection of SNP TSC0051220
atcacattctta

SEQ ID NO: 358647 - DNA, 12 bp, Artificial Sequence
  Oligonucleotide primer for the detection of SNP TSC0051220
tggttggagtgt

SEQ ID NO: 358648 - DNA, 12 bp, Artificial Sequence
  Oligonucleotide primer for the detection of SNP TSC0051221
tttccccccata

SEQ ID NO: 358649 - DNA, 12 bp, Artificial Sequence
  Oligonucleotide primer for the detection of SNP TSC0051221
tttccccccgta

SEQ ID NO: 358650 - DNA, 12 bp, Artificial Sequence
  Oligonucleotide primer for the detection of SNP TSC0051221
aggttttgaatt

SEQ ID NO: 358651 - DNA, 12 bp, Artificial Sequence
  Oligonucleotide primer for the detection of SNP TSC0051223
aaggttttgtta

SEQ ID NO: 358652 - DNA, 12 bp, Artificial Sequence
  Oligonucleotide primer for the detection of SNP TSC0051224
aactaatccact

SEQ ID NO: 358653 - DNA, 12 bp, Artificial Sequence
  Oligonucleotide primer for the detection of SNP TSC0051224
aactaatccgct

SEQ ID NO: 358654 - DNA, 12 bp, Artificial Sequence
  Oligonucleotide primer for the detection of SNP TSC0051224
aaagagtagggg

SEQ ID NO: 358655 - DNA, 12 bp, Artificial Sequence
  Oligonucleotide primer for the detection of SNP TSC0051225
aacaactaaaat

SEQ ID NO: 358656 - DNA, 12 bp, Artificial Sequence
  Oligonucleotide primer for the detection of SNP TSC0051225
tgaatatggtaa

SEQ ID NO: 358657 - DNA, 12 bp, Artificial Sequence
  Oligonucleotide primer for the detection of SNP TSC0009890
aatatattttac

SEQ ID NO: 358658 - DNA, 12 bp, Artificial Sequence
  Oligonucleotide primer for the detection of SNP TSC0010120
gaagtatggaag

SEQ ID NO: 358659 - DNA, 12 bp, Artificial Sequence
  Oligonucleotide primer for the detection of SNP TSC0010120
atgaatattaga

SEQ ID NO: 358660 - DNA, 12 bp, Artificial Sequence
  Oligonucleotide primer for the detection of SNP TSC0005245
aacacctcctaa

SEQ ID NO: 358661 - DNA, 12 bp, Artificial Sequence
  Oligonucleotide primer for the detection of SNP TSC0005245
atttatgtttat

SEQ ID NO: 358662 - DNA, 12 bp, Artificial Sequence
  Oligonucleotide primer for the detection of SNP TSC0005245
aggatatttttt

SEQ ID NO: 358663 - DNA, 12 bp, Artificial Sequence
  Oligonucleotide primer for the detection of SNP TSC0007657
aaaattcaattc

SEQ ID NO: 358664 - DNA, 12 bp, Artificial Sequence
  Oligonucleotide primer for the detection of SNP TSC0051227
tccccccctttt

SEQ ID NO: 358665 - DNA, 12 bp, Artificial Sequence
  Oligonucleotide primer for the detection of SNP TSC0051227
gtcgttaaaaaa

SEQ ID NO: 358666 - DNA, 12 bp, Artificial Sequence
  Oligonucleotide primer for the detection of SNP TSC0009262
tgattagaaaag

SEQ ID NO: 358667 - DNA, 12 bp, Artificial Sequence
  Oligonucleotide primer for the detection of SNP TSC0009262
tttattttgatc

SEQ ID NO: 358668 - DNA, 12 bp, Artificial Sequence
  Oligonucleotide primer for the detection of SNP TSC0051228
aaactcaaatat

SEQ ID NO: 358669 - DNA, 12 bp, Artificial Sequence
  Oligonucleotide primer for the detection of SNP TSC0051228
ttagttttagag

SEQ ID NO: 358670 - DNA, 12 bp, Artificial Sequence
  Oligonucleotide primer for the detection of SNP TSC0051232
aaactaatatat

SEQ ID NO: 358671 - DNA, 12 bp, Artificial Sequence
  Oligonucleotide primer for the detection of SNP TSC0051232
atttatttaggg

SEQ ID NO: 358672 - DNA, 12 bp, Artificial Sequence
  Oligonukleotid-Primer
caaaaaatatat

SEQ ID NO: 358673 - DNA, 12 bp, Artificial Sequence
  Oligonucleotide primer for the detection of SNP TSC0051238
atatgtttggga

SEQ ID NO: 358674 - DNA, 12 bp, Artificial Sequence
  Oligonucleotide primer for the detection of SNP TSC0051238
acatacttaaaa

SEQ ID NO: 358675 - DNA, 12 bp, Artificial Sequence
  Oligonucleotide primer for the detection of SNP TSC0051238
tagggagtgtgt

SEQ ID NO: 358676 - DNA, 12 bp, Artificial Sequence
  Oligonucleotide primer for the detection of SNP TSC0051239
atcatcatcaat

SEQ ID NO: 358677 - DNA, 12 bp, Artificial Sequence
  Oligonucleotide primer for the detection of SNP TSC0051239
ggggtaggggtg

SEQ ID NO: 358678 - DNA, 12 bp, Artificial Sequence
  Oligonucleotide primer for the detection of SNP TSC0051239
ggggtaggggcg

SEQ ID NO: 358679 - DNA, 12 bp, Artificial Sequence
  Oligonucleotide primer for the detection of SNP TSC0051240
ccgatcttacaa

SEQ ID NO: 358680 - DNA, 12 bp, Artificial Sequence
  Oligonucleotide primer for the detection of SNP TSC0051240
tttaatagtggt

SEQ ID NO: 358681 - DNA, 12 bp, Artificial Sequence
  Oligonucleotide primer for the detection of SNP TSC0051240
acttaataataa

SEQ ID NO: 358682 - DNA, 12 bp, Artificial Sequence
  Oligonucleotide primer for the detection of SNP TSC0051240
atttgattttgt

SEQ ID NO: 358683 - DNA, 12 bp, Artificial Sequence
  Oligonucleotide primer for the detection of SNP TSC0051240
attcgattttgt

SEQ ID NO: 358684 - DNA, 12 bp, Artificial Sequence
  Oligonucleotide primer for the detection of SNP TSC0051242
ccaaattaattc

SEQ ID NO: 358685 - DNA, 12 bp, Artificial Sequence
  Oligonucleotide primer for the detection of SNP TSC0051242
ggtagaatttag

SEQ ID NO: 358686 - DNA, 12 bp, Artificial Sequence
  Oligonucleotide primer for the detection of SNP TSC0051243
ttaaacttttat

SEQ ID NO: 358687 - DNA, 12 bp, Artificial Sequence
  Oligonucleotide primer for the detection of SNP TSC0051243
tgaaagaaaaaa

SEQ ID NO: 358688 - DNA, 12 bp, Artificial Sequence
  Oligonucleotide primer for the detection of SNP TSC0051246
ataaattaccct

SEQ ID NO: 358689 - DNA, 12 bp, Artificial Sequence
  Oligonucleotide primer for the detection of SNP TSC0051250
tctcaaaaaaat

SEQ ID NO: 358690 - DNA, 12 bp, Artificial Sequence
  Oligonucleotide primer for the detection of SNP TSC0051250
ggttgttttgta

SEQ ID NO: 358691 - DNA, 12 bp, Artificial Sequence
  Oligonucleotide primer for the detection of SNP TSC0051251
acttcatcaaaa

SEQ ID NO: 358692 - DNA, 12 bp, Artificial Sequence
  Oligonucleotide primer for the detection of SNP TSC0051251
acttcgtcaaaa

SEQ ID NO: 358693 - DNA, 12 bp, Artificial Sequence
  Oligonucleotide primer for the detection of SNP TSC0051251
ggatattaatat

SEQ ID NO: 358694 - DNA, 12 bp, Artificial Sequence
  Oligonucleotide primer for the detection of SNP TSC0051251
aaacactaatac

SEQ ID NO: 358695 - DNA, 12 bp, Artificial Sequence
  Oligonucleotide primer for the detection of SNP TSC0051251
attttgttaaga

SEQ ID NO: 358696 - DNA, 12 bp, Artificial Sequence
  Oligonucleotide primer for the detection of SNP TSC0051251
atttcgttaaga

SEQ ID NO: 358697 - DNA, 12 bp, Artificial Sequence
  Oligonucleotide primer for the detection of SNP TSC0051252
ccttaaataatt

SEQ ID NO: 358698 - DNA, 12 bp, Artificial Sequence
  Oligonucleotide primer for the detection of SNP TSC0051252
tttagaaggata

SEQ ID NO: 358699 - DNA, 12 bp, Artificial Sequence
  Oligonucleotide primer for the detection of SNP TSC0051252
ctcaaaaaaata

SEQ ID NO: 358700 - DNA, 12 bp, Artificial Sequence
  Oligonucleotide primer for the detection of SNP TSC0051253
atataactattt

SEQ ID NO: 358701 - DNA, 12 bp, Artificial Sequence
  Oligonucleotide primer for the detection of SNP TSC0051257
cttcttaaataa

SEQ ID NO: 358702 - DNA, 12 bp, Artificial Sequence
  Oligonucleotide primer for the detection of SNP TSC0051257
gggtttaaaaat

SEQ ID NO: 358703 - DNA, 12 bp, Artificial Sequence
  Oligonucleotide primer for the detection of SNP TSC0051258
ccaataaatcca

SEQ ID NO: 358704 - DNA, 12 bp, Artificial Sequence
  Oligonucleotide primer for the detection of SNP TSC0051258
aacaaccctaat

SEQ ID NO: 358705 - DNA, 12 bp, Artificial Sequence
  Oligonucleotide primer for the detection of SNP TSC0051258
ttagtgaattta

SEQ ID NO: 358706 - DNA, 12 bp, Artificial Sequence
  Oligonucleotide primer for the detection of SNP TSC0051259
aaggaggatttt

SEQ ID NO: 358707 - DNA, 12 bp, Artificial Sequence
  Oligonucleotide primer for the detection of SNP TSC0051259
aaaaaaatctca

SEQ ID NO: 358708 - DNA, 12 bp, Artificial Sequence
  Oligonucleotide primer for the detection of SNP TSC0051260
ctctaataacat

SEQ ID NO: 358709 - DNA, 12 bp, Artificial Sequence
  Oligonucleotide primer for the detection of SNP TSC0051260
tagttaagaaaa

SEQ ID NO: 358710 - DNA, 12 bp, Artificial Sequence
  Oligonucleotide primer for the detection of SNP TSC0051261
tattcctatcat

SEQ ID NO: 358711 - DNA, 12 bp, Artificial Sequence
  Oligonucleotide primer for the detection of SNP TSC0051261
tagatttgataa

SEQ ID NO: 358712 - DNA, 12 bp, Artificial Sequence
  Oligonucleotide primer for the detection of SNP TSC0051262
ctttaaaccttt

SEQ ID NO: 358713 - DNA, 12 bp, Artificial Sequence
  Oligonucleotide primer for the detection of SNP TSC0051262
aattagggttta

SEQ ID NO: 358714 - DNA, 12 bp, Artificial Sequence
  Oligonucleotide primer for the detection of SNP TSC0051263
tcaattttaaac

SEQ ID NO: 358715 - DNA, 12 bp, Artificial Sequence
  Oligonucleotide primer for the detection of SNP TSC0051263
tcgattttaaac

SEQ ID NO: 358716 - DNA, 12 bp, Artificial Sequence
  Oligonucleotide primer for the detection of SNP TSC0051263
cacataaatata

SEQ ID NO: 358717 - DNA, 12 bp, Artificial Sequence
  Oligonucleotide primer for the detection of SNP TSC0051263
ttgattttaaat

SEQ ID NO: 358718 - DNA, 12 bp, Artificial Sequence
  Oligonucleotide primer for the detection of SNP TSC0051264
atccctataact

SEQ ID NO: 358719 - DNA, 12 bp, Artificial Sequence
  Oligonucleotide primer for the detection of SNP TSC0051264
aggtaaagaata

SEQ ID NO: 358720 - DNA, 12 bp, Artificial Sequence
  Oligonucleotide primer for the detection of SNP TSC0051264
gtttttgtagtt

SEQ ID NO: 358721 - DNA, 12 bp, Artificial Sequence
  Oligonucleotide primer for the detection of SNP TSC0051266
aaaacatcaaac

SEQ ID NO: 358722 - DNA, 12 bp, Artificial Sequence
  Oligonucleotide primer for the detection of SNP TSC0051266
agtgatttgtag

SEQ ID NO: 358723 - DNA, 12 bp, Artificial Sequence
  Oligonucleotide primer for the detection of SNP TSC0051266
agcgatttgtag

SEQ ID NO: 358724 - DNA, 12 bp, Artificial Sequence
  Oligonucleotide primer for the detection of SNP TSC0051267
atgtttgtaaga

SEQ ID NO: 358725 - DNA, 12 bp, Artificial Sequence
  Oligonucleotide primer for the detection of SNP TSC0051268
attaccacaaat

SEQ ID NO: 358726 - DNA, 12 bp, Artificial Sequence
  Oligonucleotide primer for the detection of SNP TSC0051268
ctttaatttata

SEQ ID NO: 358727 - DNA, 12 bp, Artificial Sequence
  Oligonucleotide primer for the detection of SNP TSC0051268
attattataagt

SEQ ID NO: 358728 - DNA, 12 bp, Artificial Sequence
  Oligonucleotide primer for the detection of SNP TSC0051269
tcatcttcttta

SEQ ID NO: 358729 - DNA, 12 bp, Artificial Sequence
  Oligonucleotide primer for the detection of SNP TSC0051269
agatgttgtatg

SEQ ID NO: 358730 - DNA, 12 bp, Artificial Sequence
  Oligonucleotide primer for the detection of SNP TSC0051270
tacctactaaca

SEQ ID NO: 358731 - DNA, 12 bp, Artificial Sequence
  Oligonucleotide primer for the detection of SNP TSC0051270
tagaatggatgt

SEQ ID NO: 358732 - DNA, 12 bp, Artificial Sequence
  Oligonucleotide primer for the detection of SNP TSC0051271
caaacattctta

SEQ ID NO: 358733 - DNA, 12 bp, Artificial Sequence
  Oligonucleotide primer for the detection of SNP TSC0051271
cgaacattctta

SEQ ID NO: 358734 - DNA, 12 bp, Artificial Sequence
  Oligonucleotide primer for the detection of SNP TSC0051271
atttaagagtat

SEQ ID NO: 358735 - DNA, 12 bp, Artificial Sequence
  Oligonucleotide primer for the detection of SNP TSC0051271
gagtatttttgt

SEQ ID NO: 358736 - DNA, 12 bp, Artificial Sequence
  Oligonucleotide primer for the detection of SNP TSC0051273
ttaattacacta

SEQ ID NO: 358737 - DNA, 12 bp, Artificial Sequence
  Oligonucleotide primer for the detection of SNP TSC0051273
ccacaaaaatca

SEQ ID NO: 358738 - DNA, 12 bp, Artificial Sequence
  Oligonucleotide primer for the detection of SNP TSC0051273
ttaattatattg

SEQ ID NO: 358739 - DNA, 12 bp, Artificial Sequence
  Oligonucleotide primer for the detection of SNP TSC0051274
aatattacctcc

SEQ ID NO: 358740 - DNA, 12 bp, Artificial Sequence
  Oligonucleotide primer for the detection of SNP TSC0051274
atgtgggttggg

SEQ ID NO: 358741 - DNA, 12 bp, Artificial Sequence
  Oligonucleotide primer for the detection of SNP TSC0051275
aaccctcaattt

SEQ ID NO: 358742 - DNA, 12 bp, Artificial Sequence
  Oligonucleotide primer for the detection of SNP TSC0051275
aaattaagtata

SEQ ID NO: 358743 - DNA, 12 bp, Artificial Sequence
  Oligonucleotide primer for the detection of SNP TSC0051276
atttcctatata

SEQ ID NO: 358744 - DNA, 12 bp, Artificial Sequence
  Oligonucleotide primer for the detection of SNP TSC0051276
atttaagttatt

SEQ ID NO: 358745 - DNA, 12 bp, Artificial Sequence
  Oligonucleotide primer for the detection of SNP TSC0051276
atctaaatcact

SEQ ID NO: 358746 - DNA, 12 bp, Artificial Sequence
  Oligonucleotide primer for the detection of SNP TSC0051276
gttttttgtgtg

SEQ ID NO: 358747 - DNA, 12 bp, Artificial Sequence
  Oligonucleotide primer for the detection of SNP TSC0051278
tttaatatcttt

SEQ ID NO: 358748 - DNA, 12 bp, Artificial Sequence
  Oligonucleotide primer for the detection of SNP TSC0051278
gggagttatagg

SEQ ID NO: 358749 - DNA, 12 bp, Artificial Sequence
  Oligonucleotide primer for the detection of SNP TSC0051279
tatccaatcaca

SEQ ID NO: 358750 - DNA, 12 bp, Artificial Sequence
  Oligonucleotide primer for the detection of SNP TSC0051279
attagaaataat

SEQ ID NO: 358751 - DNA, 12 bp, Artificial Sequence
  Oligonucleotide primer for the detection of SNP TSC0051279
atcaaaaacaat

SEQ ID NO: 358752 - DNA, 12 bp, Artificial Sequence
  Oligonucleotide primer for the detection of SNP TSC0051279
tgtttaattata

SEQ ID NO: 358753 - DNA, 12 bp, Artificial Sequence
  Oligonucleotide primer for the detection of SNP TSC0051280
tattaaactata

SEQ ID NO: 358754 - DNA, 12 bp, Artificial Sequence
  Oligonucleotide primer for the detection of SNP TSC0051280
gtgtgattggat

SEQ ID NO: 358755 - DNA, 12 bp, Artificial Sequence
  Oligonucleotide primer for the detection of SNP TSC0051280
aatataattaaa

SEQ ID NO: 358756 - DNA, 12 bp, Artificial Sequence
  Oligonucleotide primer for the detection of SNP TSC0051280
gatataattaaa

SEQ ID NO: 358757 - DNA, 12 bp, Artificial Sequence
  Oligonucleotide primer for the detection of SNP TSC0051280
gttaaattatgt

SEQ ID NO: 358758 - DNA, 12 bp, Artificial Sequence
  Oligonucleotide primer for the detection of SNP TSC0051281
taataaactttc

SEQ ID NO: 358759 - DNA, 12 bp, Artificial Sequence
  Oligonucleotide primer for the detection of SNP TSC0051281
ttatttaaataa

SEQ ID NO: 358760 - DNA, 12 bp, Artificial Sequence
  Oligonucleotide primer for the detection of SNP TSC0051283
ctcccaccccaa

SEQ ID NO: 358761 - DNA, 12 bp, Artificial Sequence
  Oligonucleotide primer for the detection of SNP TSC0051290
aaatttccctaa

SEQ ID NO: 358762 - DNA, 12 bp, Artificial Sequence
  Oligonucleotide primer for the detection of SNP TSC0051290
acaaaaatactt

SEQ ID NO: 358763 - DNA, 12 bp, Artificial Sequence
  Oligonucleotide primer for the detection of SNP TSC0051290
gaatttttttaa

SEQ ID NO: 358764 - DNA, 12 bp, Artificial Sequence
  Oligonucleotide primer for the detection of SNP TSC0051291
tgtagtaaatat

SEQ ID NO: 358765 - DNA, 12 bp, Artificial Sequence
  Oligonucleotide primer for the detection of SNP TSC0051291
cgtagtaaatat

SEQ ID NO: 358766 - DNA, 12 bp, Artificial Sequence
  Oligonucleotide primer for the detection of SNP TSC0051293
gattaaagattt

SEQ ID NO: 358767 - DNA, 12 bp, Artificial Sequence
  Oligonucleotide primer for the detection of SNP TSC0051294
gttgtatgggtg

SEQ ID NO: 358768 - DNA, 12 bp, Artificial Sequence
  Oligonucleotide primer for the detection of SNP TSC0051295
tcacttatattt

SEQ ID NO: 358769 - DNA, 12 bp, Artificial Sequence
  Oligonucleotide primer for the detection of SNP TSC0051295
gttggataaata

SEQ ID NO: 358770 - DNA, 12 bp, Artificial Sequence
  Oligonucleotide primer for the detection of SNP TSC0051295
gtcggataaata

SEQ ID NO: 358771 - DNA, 12 bp, Artificial Sequence
  Oligonucleotide primer for the detection of SNP TSC0051295
tcaaacaaacaa

SEQ ID NO: 358772 - DNA, 12 bp, Artificial Sequence
  Oligonucleotide primer for the detection of SNP TSC0051295
tcgaacaaacaa

SEQ ID NO: 358773 - DNA, 12 bp, Artificial Sequence
  Oligonucleotide primer for the detection of SNP TSC0051299
caaactattttc

SEQ ID NO: 358774 - DNA, 12 bp, Artificial Sequence
  Oligonucleotide primer for the detection of SNP TSC0051299
tatagttattag

SEQ ID NO: 358775 - DNA, 12 bp, Artificial Sequence
  Oligonucleotide primer for the detection of SNP TSC0051300
aaaaatcactta

SEQ ID NO: 358776 - DNA, 12 bp, Artificial Sequence
  Oligonucleotide primer for the detection of SNP TSC0051300
cgtttttttagt

SEQ ID NO: 358777 - DNA, 12 bp, Artificial Sequence
  Oligonucleotide primer for the detection of SNP TSC0051300
cacctccccaat

SEQ ID NO: 358778 - DNA, 12 bp, Artificial Sequence
  Oligonucleotide primer for the detection of SNP TSC0051300
cgcctccccaat

SEQ ID NO: 358779 - DNA, 12 bp, Artificial Sequence
  Oligonucleotide primer for the detection of SNP TSC0051301
aatacacttact

SEQ ID NO: 358780 - DNA, 12 bp, Artificial Sequence
  Oligonucleotide primer for the detection of SNP TSC0051301
aaggaaaattaa

SEQ ID NO: 358781 - DNA, 12 bp, Artificial Sequence
  Oligonucleotide primer for the detection of SNP TSC0051305
acaaaaaactca

SEQ ID NO: 358782 - DNA, 12 bp, Artificial Sequence
  Oligonucleotide primer for the detection of SNP TSC0051305
acaaaaaactcg

SEQ ID NO: 358783 - DNA, 12 bp, Artificial Sequence
  Oligonucleotide primer for the detection of SNP TSC0051305
ttttatagatga

SEQ ID NO: 358784 - DNA, 12 bp, Artificial Sequence
  Oligonucleotide primer for the detection of SNP TSC0051305
taagaaatttgt

SEQ ID NO: 358785 - DNA, 12 bp, Artificial Sequence
  Oligonucleotide primer for the detection of SNP TSC0051305
taagaaattcgt

SEQ ID NO: 358786 - DNA, 12 bp, Artificial Sequence
  Oligonucleotide primer for the detection of SNP TSC0051305
taagaaatttgc

SEQ ID NO: 358787 - DNA, 12 bp, Artificial Sequence
  Oligonucleotide primer for the detection of SNP TSC0051305
taagaaattcgc

SEQ ID NO: 358788 - DNA, 12 bp, Artificial Sequence
  Oligonucleotide primer for the detection of SNP TSC0051306
ccacattttcat

SEQ ID NO: 358789 - DNA, 12 bp, Artificial Sequence
  Oligonucleotide primer for the detection of SNP TSC0051307
aaatattaacct

SEQ ID NO: 358790 - DNA, 12 bp, Artificial Sequence
  Oligonucleotide primer for the detection of SNP TSC0051307
aaatatatgtta

SEQ ID NO: 358791 - DNA, 12 bp, Artificial Sequence
  Oligonucleotide primer for the detection of SNP TSC0051308
actcaaataaat

SEQ ID NO: 358792 - DNA, 12 bp, Artificial Sequence
  Oligonucleotide primer for the detection of SNP TSC0051309
cctatatacaac

SEQ ID NO: 358793 - DNA, 12 bp, Artificial Sequence
  Oligonucleotide primer for the detection of SNP TSC0051309
agggaatgagaa

SEQ ID NO: 358794 - DNA, 12 bp, Artificial Sequence
  Oligonucleotide primer for the detection of SNP TSC0051310
tcctatactcta

SEQ ID NO: 358795 - DNA, 12 bp, Artificial Sequence
  Oligonucleotide primer for the detection of SNP TSC0051310
ttaggaagagtt

SEQ ID NO: 358796 - DNA, 12 bp, Artificial Sequence
  Oligonucleotide primer for the detection of SNP TSC0051314
ttttctataaac

SEQ ID NO: 358797 - DNA, 12 bp, Artificial Sequence
  Oligonucleotide primer for the detection of SNP TSC0051314
tagttggtttga

SEQ ID NO: 358798 - DNA, 12 bp, Artificial Sequence
  Oligonucleotide primer for the detection of SNP TSC0051315
ccaaaacatatc

SEQ ID NO: 358799 - DNA, 12 bp, Artificial Sequence
  Oligonucleotide primer for the detection of SNP TSC0051316
ttaacctattta

SEQ ID NO: 358800 - DNA, 12 bp, Artificial Sequence
  Oligonucleotide primer for the detection of SNP TSC0051316
atatatatgtaa

SEQ ID NO: 358801 - DNA, 12 bp, Artificial Sequence
  Oligonucleotide primer for the detection of SNP TSC0051316
atatacatacaa

SEQ ID NO: 358802 - DNA, 12 bp, Artificial Sequence
  Oligonucleotide primer for the detection of SNP TSC0051316
ttgatttgtttg

SEQ ID NO: 358803 - DNA, 12 bp, Artificial Sequence
  Oligonucleotide primer for the detection of SNP TSC0051317
tacctaaaaacc

SEQ ID NO: 358804 - DNA, 12 bp, Artificial Sequence
  Oligonucleotide primer for the detection of SNP TSC0051317
gatttatttaag

SEQ ID NO: 358805 - DNA, 12 bp, Artificial Sequence
  Oligonucleotide primer for the detection of SNP TSC0051319
ataccaataaat

SEQ ID NO: 358806 - DNA, 12 bp, Artificial Sequence
  Oligonucleotide primer for the detection of SNP TSC0051320
taatttataact

SEQ ID NO: 358807 - DNA, 12 bp, Artificial Sequence
  Oligonucleotide primer for the detection of SNP TSC0051320
gaaatagttgta

SEQ ID NO: 358808 - DNA, 12 bp, Artificial Sequence
  Oligonucleotide primer for the detection of SNP TSC0051320
aaaataactaca

SEQ ID NO: 358809 - DNA, 12 bp, Artificial Sequence
  Oligonucleotide primer for the detection of SNP TSC0051320
taatttgtaatt

SEQ ID NO: 358810 - DNA, 12 bp, Artificial Sequence
  Oligonucleotide primer for the detection of SNP TSC0051321
aactacttcctt

SEQ ID NO: 358811 - DNA, 12 bp, Artificial Sequence
  Oligonucleotide primer for the detection of SNP TSC0051321
gtattaaagaga

SEQ ID NO: 358812 - DNA, 12 bp, Artificial Sequence
  Oligonucleotide primer for the detection of SNP TSC0051322
tatttatcaatt

SEQ ID NO: 358813 - DNA, 12 bp, Artificial Sequence
  Oligonucleotide primer for the detection of SNP TSC0051322
atttaattgagg

SEQ ID NO: 358814 - DNA, 12 bp, Artificial Sequence
  Oligonucleotide primer for the detection of SNP TSC0051325
ataaatcaaaaa

SEQ ID NO: 358815 - DNA, 12 bp, Artificial Sequence
  Oligonucleotide primer for the detection of SNP TSC0051325
ataaacttttcc

SEQ ID NO: 358816 - DNA, 12 bp, Artificial Sequence
  Oligonucleotide primer for the detection of SNP TSC0051325
ggattaaaagtt

SEQ ID NO: 358817 - DNA, 12 bp, Artificial Sequence
  Oligonukleotid-Primer
ggattaaaagtc

SEQ ID NO: 358818 - DNA, 12 bp, Artificial Sequence
  Oligonucleotide primer for the detection of SNP TSC0051326
tcaaaaaaatca

SEQ ID NO: 358819 - DNA, 12 bp, Artificial Sequence
  Oligonucleotide primer for the detection of SNP TSC0051326
taatttccctca

SEQ ID NO: 358820 - DNA, 12 bp, Artificial Sequence
  Oligonucleotide primer for the detection of SNP TSC0051331
taatctcataaa

SEQ ID NO: 358821 - DNA, 12 bp, Artificial Sequence
  Oligonukleotid-Primer
tctactctctac

SEQ ID NO: 358822 - DNA, 12 bp, Artificial Sequence
  Oligonucleotide primer for the detection of SNP TSC0051331
ttgattttatag

SEQ ID NO: 358823 - DNA, 12 bp, Artificial Sequence
  Oligonucleotide primer for the detection of SNP TSC0051332
tacaacaaaaaa

SEQ ID NO: 358824 - DNA, 12 bp, Artificial Sequence
  Oligonucleotide primer for the detection of SNP TSC0051332
actcctaactcc

SEQ ID NO: 358825 - DNA, 12 bp, Artificial Sequence
  Oligonucleotide primer for the detection of SNP TSC0051332
tgtagtagggag

SEQ ID NO: 358826 - DNA, 12 bp, Artificial Sequence
  Oligonucleotide primer for the detection of SNP TSC0051333
tcataaataata

SEQ ID NO: 358827 - DNA, 12 bp, Artificial Sequence
  Oligonucleotide primer for the detection of SNP TSC0051333
gtatgtattttg

SEQ ID NO: 358828 - DNA, 12 bp, Artificial Sequence
  Oligonucleotide primer for the detection of SNP TSC0051333
acatatacttta

SEQ ID NO: 358829 - DNA, 12 bp, Artificial Sequence
  Oligonucleotide primer for the detection of SNP TSC0051333
ttatgggtggta

SEQ ID NO: 358830 - DNA, 12 bp, Artificial Sequence
  Oligonucleotide primer for the detection of SNP TSC0051334
caatctaaaatt

SEQ ID NO: 358831 - DNA, 12 bp, Artificial Sequence
  Oligonucleotide primer for the detection of SNP TSC0051334
tagataataaag

SEQ ID NO: 358832 - DNA, 12 bp, Artificial Sequence
  Oligonucleotide primer for the detection of SNP TSC0051335
aatacctcatct

SEQ ID NO: 358833 - DNA, 12 bp, Artificial Sequence
  Oligonucleotide primer for the detection of SNP TSC0051335
tgtagtagtaag

SEQ ID NO: 358834 - DNA, 12 bp, Artificial Sequence
  Oligonucleotide primer for the detection of SNP TSC0051336
ctatacctttaa

SEQ ID NO: 358835 - DNA, 12 bp, Artificial Sequence
  Oligonucleotide primer for the detection of SNP TSC0051336
gtagatataatt

SEQ ID NO: 358836 - DNA, 12 bp, Artificial Sequence
  Oligonucleotide primer for the detection of SNP TSC0051336
acaaatataatt

SEQ ID NO: 358837 - DNA, 12 bp, Artificial Sequence
  Oligonucleotide primer for the detection of SNP TSC0051337
ttttgaaaataa

SEQ ID NO: 358838 - DNA, 12 bp, Artificial Sequence
  Oligonucleotide primer for the detection of SNP TSC0051338
tttggaggaaag

SEQ ID NO: 358839 - DNA, 12 bp, Artificial Sequence
  Oligonucleotide primer for the detection of SNP TSC0051343
tacttaaaaaac

SEQ ID NO: 358840 - DNA, 12 bp, Artificial Sequence
  Oligonucleotide primer for the detection of SNP TSC0051343
tgggggataaag

SEQ ID NO: 358841 - DNA, 12 bp, Artificial Sequence
  Oligonucleotide primer for the detection of SNP TSC0051343
cgggggataaag

SEQ ID NO: 358842 - DNA, 12 bp, Artificial Sequence
  Oligonucleotide primer for the detection of SNP TSC0051343
tgtttgaaaggt

SEQ ID NO: 358843 - DNA, 12 bp, Artificial Sequence
  Oligonucleotide primer for the detection of SNP TSC0051343
tgtttgaaaggc

SEQ ID NO: 358844 - DNA, 12 bp, Artificial Sequence
  Oligonucleotide primer for the detection of SNP TSC0051344
tgaataatttgt

SEQ ID NO: 358845 - DNA, 12 bp, Artificial Sequence
  Oligonucleotide primer for the detection of SNP TSC0051344
tgaataatttgc

SEQ ID NO: 358846 - DNA, 12 bp, Artificial Sequence
  Oligonucleotide primer for the detection of SNP TSC0051344
taaacaatttac

SEQ ID NO: 358847 - DNA, 12 bp, Artificial Sequence
  Oligonucleotide primer for the detection of SNP TSC0051344
gtattgtaaatt

SEQ ID NO: 358848 - DNA, 12 bp, Artificial Sequence
  Oligonucleotide primer for the detection of SNP TSC0051345
ctctctataacc

SEQ ID NO: 358849 - DNA, 12 bp, Artificial Sequence
  Oligonucleotide primer for the detection of SNP TSC0051345
atataatcctca

SEQ ID NO: 358850 - DNA, 12 bp, Artificial Sequence
  Oligonucleotide primer for the detection of SNP TSC0051346
atctatttaatt

SEQ ID NO: 358851 - DNA, 12 bp, Artificial Sequence
  Oligonucleotide primer for the detection of SNP TSC0051346
ccaaaccacata

SEQ ID NO: 358852 - DNA, 12 bp, Artificial Sequence
  Oligonucleotide primer for the detection of SNP TSC0051346
atttatttgatt

SEQ ID NO: 358853 - DNA, 12 bp, Artificial Sequence
  Oligonucleotide primer for the detection of SNP TSC0051347
aaaaactattat

SEQ ID NO: 358854 - DNA, 12 bp, Artificial Sequence
  Oligonucleotide primer for the detection of SNP TSC0051347
ttttgatagtta

SEQ ID NO: 358855 - DNA, 12 bp, Artificial Sequence
  Oligonucleotide primer for the detection of SNP TSC0051347
tttcgatagtta

SEQ ID NO: 358856 - DNA, 12 bp, Artificial Sequence
  Oligonucleotide primer for the detection of SNP TSC0008847
cttacaaattaa

SEQ ID NO: 358857 - DNA, 12 bp, Artificial Sequence
  Oligonucleotide primer for the detection of SNP TSC0008847
tagaaatttgat

SEQ ID NO: 358858 - DNA, 12 bp, Artificial Sequence
  Oligonucleotide primer for the detection of SNP TSC0051348
ctctccatcact

SEQ ID NO: 358859 - DNA, 12 bp, Artificial Sequence
  Oligonucleotide primer for the detection of SNP TSC0051348
ctctccgtcact

SEQ ID NO: 358860 - DNA, 12 bp, Artificial Sequence
  Oligonucleotide primer for the detection of SNP TSC0051348
gaaggggaggga

SEQ ID NO: 358861 - DNA, 12 bp, Artificial Sequence
  Oligonucleotide primer for the detection of SNP TSC0051348
tttttcgttatt

SEQ ID NO: 358862 - DNA, 12 bp, Artificial Sequence
  Oligonucleotide primer for the detection of SNP TSC0051352
ctcaataataat

SEQ ID NO: 358863 - DNA, 12 bp, Artificial Sequence
  Oligonucleotide primer for the detection of SNP TSC0051352
aatttatagtaa

SEQ ID NO: 358864 - DNA, 12 bp, Artificial Sequence
  Oligonucleotide primer for the detection of SNP TSC0005129
taaaaaatacac

SEQ ID NO: 358865 - DNA, 12 bp, Artificial Sequence
  Oligonucleotide primer for the detection of SNP TSC0005129
ttatgtagaatt

SEQ ID NO: 358866 - DNA, 12 bp, Artificial Sequence
  Oligonucleotide primer for the detection of SNP TSC0005129
ccatataaaact

SEQ ID NO: 358867 - DNA, 12 bp, Artificial Sequence
  Oligonucleotide primer for the detection of SNP TSC0005129
tgagaaatgtat

SEQ ID NO: 358868 - DNA, 12 bp, Artificial Sequence
  Oligonucleotide primer for the detection of SNP TSC0051353
gtaaaaattatt

SEQ ID NO: 358869 - DNA, 12 bp, Artificial Sequence
  Oligonucleotide primer for the detection of SNP TSC0051354
tatattatgaat

SEQ ID NO: 358870 - DNA, 12 bp, Artificial Sequence
  Oligonucleotide primer for the detection of SNP TSC0051354
gtaaggttttta

SEQ ID NO: 358871 - DNA, 12 bp, Artificial Sequence
  Oligonucleotide primer for the detection of SNP TSC0007817
aaaactactttt

SEQ ID NO: 358872 - DNA, 12 bp, Artificial Sequence
  Oligonucleotide primer for the detection of SNP TSC0007818
ccttttaataat

SEQ ID NO: 358873 - DNA, 12 bp, Artificial Sequence
  Oligonucleotide primer for the detection of SNP TSC0007818
ttggttaaaagg

SEQ ID NO: 358874 - DNA, 12 bp, Artificial Sequence
  Oligonucleotide primer for the detection of SNP TSC0051358
ctttcttcatac

SEQ ID NO: 358875 - DNA, 12 bp, Artificial Sequence
  Oligonucleotide primer for the detection of SNP TSC0051358
tgagtttaatta

SEQ ID NO: 358876 - DNA, 12 bp, Artificial Sequence
  Oligonucleotide primer for the detection of SNP TSC0051359
atatacgtatat

SEQ ID NO: 358877 - DNA, 12 bp, Artificial Sequence
  Oligonucleotide primer for the detection of SNP TSC0051359
gtatacatatat

SEQ ID NO: 358878 - DNA, 12 bp, Artificial Sequence
  Oligonucleotide primer for the detection of SNP TSC0051359
gtatacgtatat

SEQ ID NO: 358879 - DNA, 12 bp, Artificial Sequence
  Oligonucleotide primer for the detection of SNP TSC0051359
tatacgtatata

SEQ ID NO: 358880 - DNA, 12 bp, Artificial Sequence
  Oligonucleotide primer for the detection of SNP TSC0051360
aatatatgttag

SEQ ID NO: 358881 - DNA, 12 bp, Artificial Sequence
  Oligonucleotide primer for the detection of SNP TSC0051360
aatacatattaa

SEQ ID NO: 358882 - DNA, 12 bp, Artificial Sequence
  Oligonucleotide primer for the detection of SNP TSC0051360
ggtggaatagaa

SEQ ID NO: 358883 - DNA, 12 bp, Artificial Sequence
  Oligonucleotide primer for the detection of SNP TSC0051361
cccacccatcta

SEQ ID NO: 358884 - DNA, 12 bp, Artificial Sequence
  Oligonucleotide primer for the detection of SNP TSC0051361
tatagggttaat

SEQ ID NO: 358885 - DNA, 12 bp, Artificial Sequence
  Oligonucleotide primer for the detection of SNP TSC0051362
ataacctccttt

SEQ ID NO: 358886 - DNA, 12 bp, Artificial Sequence
  Oligonucleotide primer for the detection of SNP TSC0051362
agaattttgatt

SEQ ID NO: 358887 - DNA, 12 bp, Artificial Sequence
  Oligonucleotide primer for the detection of SNP TSC0051363
aaaaattttatc

SEQ ID NO: 358888 - DNA, 12 bp, Artificial Sequence
  Oligonucleotide primer for the detection of SNP TSC0051363
gaggatagggag

SEQ ID NO: 358889 - DNA, 12 bp, Artificial Sequence
  Oligonucleotide primer for the detection of SNP TSC0051365
acaatctatttc

SEQ ID NO: 358890 - DNA, 12 bp, Artificial Sequence
  Oligonucleotide primer for the detection of SNP TSC0051365
atataatatatg

SEQ ID NO: 358891 - DNA, 12 bp, Artificial Sequence
  Oligonucleotide primer for the detection of SNP TSC0051366
cattttaattat

SEQ ID NO: 358892 - DNA, 12 bp, Artificial Sequence
  Oligonucleotide primer for the detection of SNP TSC0051366
tatgtagtataa

SEQ ID NO: 358893 - DNA, 12 bp, Artificial Sequence
  Oligonucleotide primer for the detection of SNP TSC0051367
aactatacaaac

SEQ ID NO: 358894 - DNA, 12 bp, Artificial Sequence
  Oligonucleotide primer for the detection of SNP TSC0051367
taggttgtttat

SEQ ID NO: 358895 - DNA, 12 bp, Artificial Sequence
  Oligonucleotide primer for the detection of SNP TSC0051367
aattatctataa

SEQ ID NO: 358896 - DNA, 12 bp, Artificial Sequence
  Oligonucleotide primer for the detection of SNP TSC0051367
tgtataaatttt

SEQ ID NO: 358897 - DNA, 12 bp, Artificial Sequence
  Oligonucleotide primer for the detection of SNP TSC0051369
aactaaaaaatt

SEQ ID NO: 358898 - DNA, 12 bp, Artificial Sequence
  Oligonucleotide primer for the detection of SNP TSC0051369
gattaagaaatt

SEQ ID NO: 358899 - DNA, 12 bp, Artificial Sequence
  Oligonucleotide primer for the detection of SNP TSC0051370
taggagtttaag

SEQ ID NO: 358900 - DNA, 12 bp, Artificial Sequence
  Oligonucleotide primer for the detection of SNP TSC0051372
tttctttttttc

SEQ ID NO: 358901 - DNA, 12 bp, Artificial Sequence
  Oligonucleotide primer for the detection of SNP TSC0051372
aaaaaaagaaaa

SEQ ID NO: 358902 - DNA, 12 bp, Artificial Sequence
  Oligonucleotide primer for the detection of SNP TSC0008255
ctttaaacatcc

SEQ ID NO: 358903 - DNA, 12 bp, Artificial Sequence
  Oligonucleotide primer for the detection of SNP TSC0051373
attataattact

SEQ ID NO: 358904 - DNA, 12 bp, Artificial Sequence
  Oligonucleotide primer for the detection of SNP TSC0051373
tggaatatattg

SEQ ID NO: 358905 - DNA, 12 bp, Artificial Sequence
  Oligonucleotide primer for the detection of SNP TSC0051374
taaaatcataaa

SEQ ID NO: 358906 - DNA, 12 bp, Artificial Sequence
  Oligonucleotide primer for the detection of SNP TSC0051374
ctcctttatccc

SEQ ID NO: 358907 - DNA, 12 bp, Artificial Sequence
  Oligonucleotide primer for the detection of SNP TSC0051374
tgaggttatggg

SEQ ID NO: 358908 - DNA, 12 bp, Artificial Sequence
  Oligonucleotide primer for the detection of SNP TSC0051375
gttgtgtttttg

SEQ ID NO: 358909 - DNA, 12 bp, Artificial Sequence
  Oligonucleotide primer for the detection of SNP TSC0051375
gttgtgttttcg

SEQ ID NO: 358910 - DNA, 12 bp, Artificial Sequence
  Oligonucleotide primer for the detection of SNP TSC0005915
taaaactttcct

SEQ ID NO: 358911 - DNA, 12 bp, Artificial Sequence
  Oligonucleotide primer for the detection of SNP TSC0005915
gattagtggata

SEQ ID NO: 358912 - DNA, 12 bp, Artificial Sequence
  Oligonucleotide primer for the detection of SNP TSC0051376
tacaacttttcc

SEQ ID NO: 358913 - DNA, 12 bp, Artificial Sequence
  Oligonucleotide primer for the detection of SNP TSC0051376
gtttgtattatg

SEQ ID NO: 358914 - DNA, 12 bp, Artificial Sequence
  Oligonucleotide primer for the detection of SNP TSC0004549
gtgggtttaatg

SEQ ID NO: 358915 - DNA, 12 bp, Artificial Sequence
  Oligonucleotide primer for the detection of SNP TSC0051377
ctttacattaaa

SEQ ID NO: 358916 - DNA, 12 bp, Artificial Sequence
  Oligonucleotide primer for the detection of SNP TSC0051377
ctaaaacaacca

SEQ ID NO: 358917 - DNA, 12 bp, Artificial Sequence
  Oligonucleotide primer for the detection of SNP TSC0051377
ttttatattagg

SEQ ID NO: 358918 - DNA, 12 bp, Artificial Sequence
  Oligonucleotide primer for the detection of SNP TSC0051378
aaaaacatatac

SEQ ID NO: 358919 - DNA, 12 bp, Artificial Sequence
  Oligonucleotide primer for the detection of SNP TSC0051378
tattgtggtttt

SEQ ID NO: 358920 - DNA, 12 bp, Artificial Sequence
  Oligonucleotide primer for the detection of SNP TSC0051378
tatcgtggtttt

SEQ ID NO: 358921 - DNA, 12 bp, Artificial Sequence
  Oligonucleotide primer for the detection of SNP TSC0051378
taccataacttt

SEQ ID NO: 358922 - DNA, 12 bp, Artificial Sequence
  Oligonucleotide primer for the detection of SNP TSC0051378
taccgtaacttt

SEQ ID NO: 358923 - DNA, 12 bp, Artificial Sequence
  Oligonucleotide primer for the detection of SNP TSC0051378
aggagtatgtat

SEQ ID NO: 358924 - DNA, 12 bp, Artificial Sequence
  Oligonucleotide primer for the detection of SNP TSC0051379
aaaaactacttt

SEQ ID NO: 358925 - DNA, 12 bp, Artificial Sequence
  Oligonucleotide primer for the detection of SNP TSC0051380
accaaatacaaa

SEQ ID NO: 358926 - DNA, 12 bp, Artificial Sequence
  Oligonucleotide primer for the detection of SNP TSC0051380
accgaatacaaa

SEQ ID NO: 358927 - DNA, 12 bp, Artificial Sequence
  Oligonucleotide primer for the detection of SNP TSC0051380
attgaataaaat

SEQ ID NO: 358928 - DNA, 12 bp, Artificial Sequence
  Oligonucleotide primer for the detection of SNP TSC0051380
ttaaataaaaca

SEQ ID NO: 358929 - DNA, 12 bp, Artificial Sequence
  Oligonucleotide primer for the detection of SNP TSC0051380
ggaattgaatat

SEQ ID NO: 358930 - DNA, 12 bp, Artificial Sequence
  Oligonucleotide primer for the detection of SNP TSC0051380
ggaatcgaatat

SEQ ID NO: 358931 - DNA, 12 bp, Artificial Sequence
  Oligonucleotide primer for the detection of SNP TSC0051383
tctatatatttt

SEQ ID NO: 358932 - DNA, 12 bp, Artificial Sequence
  Oligonucleotide primer for the detection of SNP TSC0051383
gtgttttagatt

SEQ ID NO: 358933 - DNA, 12 bp, Artificial Sequence
  Oligonucleotide primer for the detection of SNP TSC0051384
tggtttataaat

SEQ ID NO: 358934 - DNA, 12 bp, Artificial Sequence
  Oligonucleotide primer for the detection of SNP TSC0051384
acttacaaataa

SEQ ID NO: 358935 - DNA, 12 bp, Artificial Sequence
  Oligonucleotide primer for the detection of SNP TSC0051385
caaaactaaccc

SEQ ID NO: 358936 - DNA, 12 bp, Artificial Sequence
  Oligonucleotide primer for the detection of SNP TSC0051385
ttgaatatatta

SEQ ID NO: 358937 - DNA, 12 bp, Artificial Sequence
  Oligonucleotide primer for the detection of SNP TSC0051387
atcacaatttct

SEQ ID NO: 358938 - DNA, 12 bp, Artificial Sequence
  Oligonucleotide primer for the detection of SNP TSC0051387
ggtaaaatgagg

SEQ ID NO: 358939 - DNA, 12 bp, Artificial Sequence
  Oligonucleotide primer for the detection of SNP TSC0051388
caataacaaatc

SEQ ID NO: 358940 - DNA, 12 bp, Artificial Sequence
  Oligonucleotide primer for the detection of SNP TSC0004560
atttttaggtaa

SEQ ID NO: 358941 - DNA, 12 bp, Artificial Sequence
  Oligonucleotide primer for the detection of SNP TSC0004560
accctcaaacaa

SEQ ID NO: 358942 - DNA, 12 bp, Artificial Sequence
  Oligonucleotide primer for the detection of SNP TSC0004560
tagaaaatagaa

SEQ ID NO: 358943 - DNA, 12 bp, Artificial Sequence
  Oligonucleotide primer for the detection of SNP TSC0004561
ctaaaatcatta

SEQ ID NO: 358944 - DNA, 12 bp, Artificial Sequence
  Oligonucleotide primer for the detection of SNP TSC0004561
gtaggatttggt

SEQ ID NO: 358945 - DNA, 12 bp, Artificial Sequence
  Oligonucleotide primer for the detection of SNP TSC0004561
ttgaagttattg

SEQ ID NO: 358946 - DNA, 12 bp, Artificial Sequence
  Oligonucleotide primer for the detection of SNP TSC0051393
tctacctaacac

SEQ ID NO: 358947 - DNA, 12 bp, Artificial Sequence
  Oligonucleotide primer for the detection of SNP TSC0051393
ttgatttagttt

SEQ ID NO: 358948 - DNA, 12 bp, Artificial Sequence
  Oligonucleotide primer for the detection of SNP TSC0051393
ctaacccaacct

SEQ ID NO: 358949 - DNA, 12 bp, Artificial Sequence
  Oligonucleotide primer for the detection of SNP TSC0051393
tttatttaatat

SEQ ID NO: 358950 - DNA, 12 bp, Artificial Sequence
  Oligonucleotide primer for the detection of SNP TSC0051394
ttgtgttgaata

SEQ ID NO: 358951 - DNA, 12 bp, Artificial Sequence
  Oligonucleotide primer for the detection of SNP TSC0051395
ataccctcctta

SEQ ID NO: 358952 - DNA, 12 bp, Artificial Sequence
  Oligonucleotide primer for the detection of SNP TSC0051395
aggatggtgtgt

SEQ ID NO: 358953 - DNA, 12 bp, Artificial Sequence
  Oligonucleotide primer for the detection of SNP TSC0051396
taaataaatact

SEQ ID NO: 358954 - DNA, 12 bp, Artificial Sequence
  Oligonucleotide primer for the detection of SNP TSC0051397
aatcaaataatt

SEQ ID NO: 358955 - DNA, 12 bp, Artificial Sequence
  Oligonucleotide primer for the detection of SNP TSC0051397
gagatagtttaa

SEQ ID NO: 358956 - DNA, 12 bp, Artificial Sequence
  Oligonucleotide primer for the detection of SNP TSC0051397
aaaacaatttaa

SEQ ID NO: 358957 - DNA, 12 bp, Artificial Sequence
  Oligonucleotide primer for the detection of SNP TSC0051397
ggttaggtgatt

SEQ ID NO: 358958 - DNA, 12 bp, Artificial Sequence
  Oligonucleotide primer for the detection of SNP TSC0009167
tttccaaaaact

SEQ ID NO: 358959 - DNA, 12 bp, Artificial Sequence
  Oligonucleotide primer for the detection of SNP TSC0009167
ggaaagtattaa

SEQ ID NO: 358960 - DNA, 12 bp, Artificial Sequence
  Oligonucleotide primer for the detection of SNP TSC0009167
aaaaaacactaa

SEQ ID NO: 358961 - DNA, 12 bp, Artificial Sequence
  Oligonucleotide primer for the detection of SNP TSC0009168
aacccataaccc

SEQ ID NO: 358962 - DNA, 12 bp, Artificial Sequence
  Oligonucleotide primer for the detection of SNP TSC0009168
aacccgtaaccc

SEQ ID NO: 358963 - DNA, 12 bp, Artificial Sequence
  Oligonucleotide primer for the detection of SNP TSC0009168
acaaaaaccata

SEQ ID NO: 358964 - DNA, 12 bp, Artificial Sequence
  Oligonucleotide primer for the detection of SNP TSC0009168
agtttgtgattt

SEQ ID NO: 358965 - DNA, 12 bp, Artificial Sequence
  Oligonucleotide primer for the detection of SNP TSC0009168
agttcgtgattt

SEQ ID NO: 358966 - DNA, 12 bp, Artificial Sequence
  Oligonucleotide primer for the detection of SNP TSC0009169
gtgtttttgggg

SEQ ID NO: 358967 - DNA, 12 bp, Artificial Sequence
  Oligonucleotide primer for the detection of SNP TSC0009169
gtgttttcgggg

SEQ ID NO: 358968 - DNA, 12 bp, Artificial Sequence
  Oligonucleotide primer for the detection of SNP TSC0051398
tttattgtttac

SEQ ID NO: 358969 - DNA, 12 bp, Artificial Sequence
  Oligonucleotide primer for the detection of SNP TSC0051398
cttattacccac

SEQ ID NO: 358970 - DNA, 12 bp, Artificial Sequence
  Oligonucleotide primer for the detection of SNP TSC0051398
ttttgtggaggg

SEQ ID NO: 358971 - DNA, 12 bp, Artificial Sequence
  Oligonucleotide primer for the detection of SNP TSC0051399
aatatttcacat

SEQ ID NO: 358972 - DNA, 12 bp, Artificial Sequence
  Oligonucleotide primer for the detection of SNP TSC0051399
gttgtgttaata

SEQ ID NO: 358973 - DNA, 12 bp, Artificial Sequence
  Oligonucleotide primer for the detection of SNP TSC0051400
tcacgaaaaaaa

SEQ ID NO: 358974 - DNA, 12 bp, Artificial Sequence
  Oligonucleotide primer for the detection of SNP TSC0051400
tttatttgaaat

SEQ ID NO: 358975 - DNA, 12 bp, Artificial Sequence
  Oligonucleotide primer for the detection of SNP TSC0051402
atatatatttca

SEQ ID NO: 358976 - DNA, 12 bp, Artificial Sequence
  Oligonucleotide primer for the detection of SNP TSC0051402
tgttatttttgt

SEQ ID NO: 358977 - DNA, 12 bp, Artificial Sequence
  Oligonucleotide primer for the detection of SNP TSC0051402
actatccttaca

SEQ ID NO: 358978 - DNA, 12 bp, Artificial Sequence
  Oligonucleotide primer for the detection of SNP TSC0051403
tctaaattccct

SEQ ID NO: 358979 - DNA, 12 bp, Artificial Sequence
  Oligonucleotide primer for the detection of SNP TSC0051404
atttttcatcct

SEQ ID NO: 358980 - DNA, 12 bp, Artificial Sequence
  Oligonucleotide primer for the detection of SNP TSC0051404
tggttttagtaa

SEQ ID NO: 358981 - DNA, 12 bp, Artificial Sequence
  Oligonucleotide primer for the detection of SNP TSC0051405
gatattgtttta

SEQ ID NO: 358982 - DNA, 12 bp, Artificial Sequence
  Oligonucleotide primer for the detection of SNP TSC0051406
cttaaataaaac

SEQ ID NO: 358983 - DNA, 12 bp, Artificial Sequence
  Oligonucleotide primer for the detection of SNP TSC0051407
ttacacccaaaa

SEQ ID NO: 358984 - DNA, 12 bp, Artificial Sequence
  Oligonucleotide primer for the detection of SNP TSC0051407
ggtaagggaatt

SEQ ID NO: 358985 - DNA, 12 bp, Artificial Sequence
  Oligonucleotide primer for the detection of SNP TSC0051407
ttgtatttaaga

SEQ ID NO: 358986 - DNA, 12 bp, Artificial Sequence
  Oligonucleotide primer for the detection of SNP TSC0051408
ccaaatcaccta

SEQ ID NO: 358987 - DNA, 12 bp, Artificial Sequence
  Oligonucleotide primer for the detection of SNP TSC0051408
aagtttgagggg

SEQ ID NO: 358988 - DNA, 12 bp, Artificial Sequence
  Oligonucleotide primer for the detection of SNP TSC0051408
aagttcgagggg

SEQ ID NO: 358989 - DNA, 12 bp, Artificial Sequence
  Oligonucleotide primer for the detection of SNP TSC0051412
taaaatcatcac

SEQ ID NO: 358990 - DNA, 12 bp, Artificial Sequence
  Oligonucleotide primer for the detection of SNP TSC0051412
tagaatgattag

SEQ ID NO: 358991 - DNA, 12 bp, Artificial Sequence
  Oligonucleotide primer for the detection of SNP TSC0051414
catcacaaacat

SEQ ID NO: 358992 - DNA, 12 bp, Artificial Sequence
  Oligonucleotide primer for the detection of SNP TSC0051415
taaattattata

SEQ ID NO: 358993 - DNA, 12 bp, Artificial Sequence
  Oligonucleotide primer for the detection of SNP TSC0051415
gtaaatagatgg

SEQ ID NO: 358994 - DNA, 12 bp, Artificial Sequence
  Oligonucleotide primer for the detection of SNP TSC0051416
aattctcttacc

SEQ ID NO: 358995 - DNA, 12 bp, Artificial Sequence
  Oligonucleotide primer for the detection of SNP TSC0051416
atataatgtgga

SEQ ID NO: 358996 - DNA, 12 bp, Artificial Sequence
  Oligonucleotide primer for the detection of SNP TSC0051416
atataacgtgga

SEQ ID NO: 358997 - DNA, 12 bp, Artificial Sequence
  Oligonucleotide primer for the detection of SNP TSC0010504
ctccatccccct

SEQ ID NO: 358998 - DNA, 12 bp, Artificial Sequence
  Oligonucleotide primer for the detection of SNP TSC0010504
agaattagtttg

SEQ ID NO: 358999 - DNA, 12 bp, Artificial Sequence
  Oligonucleotide primer for the detection of SNP TSC0051420
attctctacaac

SEQ ID NO: 359000 - DNA, 12 bp, Artificial Sequence
  Oligonucleotide primer for the detection of SNP TSC0051420
tattgggttaag

SEQ ID NO: 359001 - DNA, 12 bp, Artificial Sequence
  Oligonucleotide primer for the detection of SNP TSC0051421
cctaaaatattt

SEQ ID NO: 359002 - DNA, 12 bp, Artificial Sequence
  Oligonucleotide primer for the detection of SNP TSC0051421
ttaggagggata

SEQ ID NO: 359003 - DNA, 12 bp, Artificial Sequence
  Oligonucleotide primer for the detection of SNP TSC0006968
aaatggatgtta

SEQ ID NO: 359004 - DNA, 12 bp, Artificial Sequence
  Oligonucleotide primer for the detection of SNP TSC0006968
aaataaatatca

SEQ ID NO: 359005 - DNA, 12 bp, Artificial Sequence
  Oligonucleotide primer for the detection of SNP TSC0006969
ataaatgtgtta

SEQ ID NO: 359006 - DNA, 12 bp, Artificial Sequence
  Oligonucleotide primer for the detection of SNP TSC0006969
acaaatatacta

SEQ ID NO: 359007 - DNA, 12 bp, Artificial Sequence
  Oligonucleotide primer for the detection of SNP TSC0006969
tgaagataatgt

SEQ ID NO: 359008 - DNA, 12 bp, Artificial Sequence
  Oligonucleotide primer for the detection of SNP TSC0051422
cctacaactccc

SEQ ID NO: 359009 - DNA, 12 bp, Artificial Sequence
  Oligonucleotide primer for the detection of SNP TSC0051422
tcctacacctta

SEQ ID NO: 359010 - DNA, 12 bp, Artificial Sequence
  Oligonucleotide primer for the detection of SNP TSC0051422
tttgtagttttc

SEQ ID NO: 359011 - DNA, 12 bp, Artificial Sequence
  Oligonucleotide primer for the detection of SNP TSC0051423
gttatttataat

SEQ ID NO: 359012 - DNA, 12 bp, Artificial Sequence
  Oligonucleotide primer for the detection of SNP TSC0051423
accatttacaac

SEQ ID NO: 359013 - DNA, 12 bp, Artificial Sequence
  Oligonucleotide primer for the detection of SNP TSC0051423
atggttaggtta

SEQ ID NO: 359014 - DNA, 12 bp, Artificial Sequence
  Oligonucleotide primer for the detection of SNP TSC0010345
actataaaatat

SEQ ID NO: 359015 - DNA, 12 bp, Artificial Sequence
  Oligonucleotide primer for the detection of SNP TSC0010345
attagtatttga

SEQ ID NO: 359016 - DNA, 12 bp, Artificial Sequence
  Oligonucleotide primer for the detection of SNP TSC0051424
aaaatactatcc

SEQ ID NO: 359017 - DNA, 12 bp, Artificial Sequence
  Oligonucleotide primer for the detection of SNP TSC0051425
taactacaacta

SEQ ID NO: 359018 - DNA, 12 bp, Artificial Sequence
  Oligonucleotide primer for the detection of SNP TSC0051425
ttatgttaattt

SEQ ID NO: 359019 - DNA, 12 bp, Artificial Sequence
  Oligonucleotide primer for the detection of SNP TSC0051425
ccatattaactc

SEQ ID NO: 359020 - DNA, 12 bp, Artificial Sequence
  Oligonucleotide primer for the detection of SNP TSC0051425
tggttgtaattg

SEQ ID NO: 359021 - DNA, 12 bp, Artificial Sequence
  Oligonucleotide primer for the detection of SNP TSC0051426
tcctaatacaaa

SEQ ID NO: 359022 - DNA, 12 bp, Artificial Sequence
  Oligonucleotide primer for the detection of SNP TSC0051426
aatgatgaagtt

SEQ ID NO: 359023 - DNA, 12 bp, Artificial Sequence
  Oligonucleotide primer for the detection of SNP TSC0051426
ttggtataagtt

SEQ ID NO: 359024 - DNA, 12 bp, Artificial Sequence
  Oligonucleotide primer for the detection of SNP TSC0051426
ttggtataagtc

SEQ ID NO: 359025 - DNA, 12 bp, Artificial Sequence
  Oligonucleotide primer for the detection of SNP TSC0051427
taaaccattaac

SEQ ID NO: 359026 - DNA, 12 bp, Artificial Sequence
  Oligonucleotide primer for the detection of SNP TSC0051427
atagtgggaaaa

SEQ ID NO: 359027 - DNA, 12 bp, Artificial Sequence
  Oligonucleotide primer for the detection of SNP TSC0051427
atagcgggaaaa

SEQ ID NO: 359028 - DNA, 12 bp, Artificial Sequence
  Oligonucleotide primer for the detection of SNP TSC0010819
aatttaactata

SEQ ID NO: 359029 - DNA, 12 bp, Artificial Sequence
  Oligonucleotide primer for the detection of SNP TSC0010819
aagatgagattt

SEQ ID NO: 359030 - DNA, 12 bp, Artificial Sequence
  Oligonucleotide primer for the detection of SNP TSC0051428
attatataaatt

SEQ ID NO: 359031 - DNA, 12 bp, Artificial Sequence
  Oligonucleotide primer for the detection of SNP TSC0051428
aatgaagatata

SEQ ID NO: 359032 - DNA, 12 bp, Artificial Sequence
  Oligonucleotide primer for the detection of SNP TSC0051429
taataacaataa

SEQ ID NO: 359033 - DNA, 12 bp, Artificial Sequence
  Oligonucleotide primer for the detection of SNP TSC0051429
acatcatcaatt

SEQ ID NO: 359034 - DNA, 12 bp, Artificial Sequence
  Oligonucleotide primer for the detection of SNP TSC0051429
tggtaataatga

SEQ ID NO: 359035 - DNA, 12 bp, Artificial Sequence
  Oligonucleotide primer for the detection of SNP TSC0051430
cattaaacacct

SEQ ID NO: 359036 - DNA, 12 bp, Artificial Sequence
  Oligonucleotide primer for the detection of SNP TSC0051430
attatgtatatg

SEQ ID NO: 359037 - DNA, 12 bp, Artificial Sequence
  Oligonucleotide primer for the detection of SNP TSC0051431
ctaatttctcta

SEQ ID NO: 359038 - DNA, 12 bp, Artificial Sequence
  Oligonucleotide primer for the detection of SNP TSC0051431
tattagaatatt

SEQ ID NO: 359039 - DNA, 12 bp, Artificial Sequence
  Oligonucleotide primer for the detection of SNP TSC0051431
actatcaaaata

SEQ ID NO: 359040 - DNA, 12 bp, Artificial Sequence
  Oligonucleotide primer for the detection of SNP TSC0051431
agtttttttatt

SEQ ID NO: 359041 - DNA, 12 bp, Artificial Sequence
  Oligonucleotide primer for the detection of SNP TSC0006643
ccctaaaataaa

SEQ ID NO: 359042 - DNA, 12 bp, Artificial Sequence
  Oligonukleotid-Primer
agagttttttgg

SEQ ID NO: 359043 - DNA, 12 bp, Artificial Sequence
  Oligonucleotide primer for the detection of SNP TSC0006643
aaaactccttaa

SEQ ID NO: 359044 - DNA, 12 bp, Artificial Sequence
  Oligonucleotide primer for the detection of SNP TSC0006643
ttttggaataaa

SEQ ID NO: 359045 - DNA, 12 bp, Artificial Sequence
  Oligonucleotide primer for the detection of SNP TSC0051432
aaaccaaatacc

SEQ ID NO: 359046 - DNA, 12 bp, Artificial Sequence
  Oligonucleotide primer for the detection of SNP TSC0051432
taagatttgaag

SEQ ID NO: 359047 - DNA, 12 bp, Artificial Sequence
  Oligonucleotide primer for the detection of SNP TSC0009336
gatttaaatgta

SEQ ID NO: 359048 - DNA, 12 bp, Artificial Sequence
  Oligonucleotide primer for the detection of SNP TSC0051436
aattatcaaaaa

SEQ ID NO: 359049 - DNA, 12 bp, Artificial Sequence
  Oligonucleotide primer for the detection of SNP TSC0051436
atataaagtgtg

SEQ ID NO: 359050 - DNA, 12 bp, Artificial Sequence
  Oligonukleotid-Primer
acataaaatata

SEQ ID NO: 359051 - DNA, 12 bp, Artificial Sequence
  Oligonucleotide primer for the detection of SNP TSC0051436
gttgttagaaat

SEQ ID NO: 359052 - DNA, 12 bp, Artificial Sequence
  Oligonucleotide primer for the detection of SNP TSC0005338
cctatcataaaa

SEQ ID NO: 359053 - DNA, 12 bp, Artificial Sequence
  Oligonucleotide primer for the detection of SNP TSC0005338
tcccctatcccc

SEQ ID NO: 359054 - DNA, 12 bp, Artificial Sequence
  Oligonucleotide primer for the detection of SNP TSC0005338
ttattatggagt

SEQ ID NO: 359055 - DNA, 12 bp, Artificial Sequence
  Oligonucleotide primer for the detection of SNP TSC0005338
ttattatggagc

SEQ ID NO: 359056 - DNA, 12 bp, Artificial Sequence
  Oligonucleotide primer for the detection of SNP TSC0051440
catattacaact

SEQ ID NO: 359057 - DNA, 12 bp, Artificial Sequence
  Oligonucleotide primer for the detection of SNP TSC0051440
tgaatattatag

SEQ ID NO: 359058 - DNA, 12 bp, Artificial Sequence
  Oligonucleotide primer for the detection of SNP TSC0051441
taaacttcccca

SEQ ID NO: 359059 - DNA, 12 bp, Artificial Sequence
  Oligonucleotide primer for the detection of SNP TSC0051441
tattttgtatgg

SEQ ID NO: 359060 - DNA, 12 bp, Artificial Sequence
  Oligonucleotide primer for the detection of SNP TSC0051441
catcctatataa

SEQ ID NO: 359061 - DNA, 12 bp, Artificial Sequence
  Oligonucleotide primer for the detection of SNP TSC0051445
ttctccccccta

SEQ ID NO: 359062 - DNA, 12 bp, Artificial Sequence
  Oligonucleotide primer for the detection of SNP TSC0051445
ttatgtaatatt

SEQ ID NO: 359063 - DNA, 12 bp, Artificial Sequence
  Oligonucleotide primer for the detection of SNP TSC0051446
acttttatattt

SEQ ID NO: 359064 - DNA, 12 bp, Artificial Sequence
  Oligonucleotide primer for the detection of SNP TSC0051446
aatttagagagt

SEQ ID NO: 359065 - DNA, 12 bp, Artificial Sequence
  Oligonucleotide primer for the detection of SNP TSC0010437
aacataaattat

SEQ ID NO: 359066 - DNA, 12 bp, Artificial Sequence
  Oligonucleotide primer for the detection of SNP TSC0010437
agatatagagga

SEQ ID NO: 359067 - DNA, 12 bp, Artificial Sequence
  Oligonucleotide primer for the detection of SNP TSC0001074
taacactattaa

SEQ ID NO: 359068 - DNA, 12 bp, Artificial Sequence
  Oligonucleotide primer for the detection of SNP TSC0001074
agtttttttaaa

SEQ ID NO: 359069 - DNA, 12 bp, Artificial Sequence
  Oligonucleotide primer for the detection of SNP TSC0001074
atttcctcaaaa

SEQ ID NO: 359070 - DNA, 12 bp, Artificial Sequence
  Oligonucleotide primer for the detection of SNP TSC0001074
tggtattgttga

SEQ ID NO: 359071 - DNA, 12 bp, Artificial Sequence
  Oligonucleotide primer for the detection of SNP TSC0001075
aaaaaccaaaca

SEQ ID NO: 359072 - DNA, 12 bp, Artificial Sequence
  Oligonucleotide primer for the detection of SNP TSC0001075
ttcctattctaa

SEQ ID NO: 359073 - DNA, 12 bp, Artificial Sequence
  Oligonucleotide primer for the detection of SNP TSC0001075
gaggattagata

SEQ ID NO: 359074 - DNA, 12 bp, Artificial Sequence
  Oligonucleotide primer for the detection of SNP TSC0010483
atacttctaccc

SEQ ID NO: 359075 - DNA, 12 bp, Artificial Sequence
  Oligonucleotide primer for the detection of SNP TSC0010483
ttgtagagtgaa

SEQ ID NO: 359076 - DNA, 12 bp, Artificial Sequence
  Oligonucleotide primer for the detection of SNP TSC0010484
ctcccaatacac

SEQ ID NO: 359077 - DNA, 12 bp, Artificial Sequence
  Oligonucleotide primer for the detection of SNP TSC0010484
gaaaaatgttta

SEQ ID NO: 359078 - DNA, 12 bp, Artificial Sequence
  Oligonucleotide primer for the detection of SNP TSC0051449
tatctacactcc

SEQ ID NO: 359079 - DNA, 12 bp, Artificial Sequence
  Oligonucleotide primer for the detection of SNP TSC0051449
attttattagga

SEQ ID NO: 359080 - DNA, 12 bp, Artificial Sequence
  Oligonucleotide primer for the detection of SNP TSC0051450
tgtgttattacg

SEQ ID NO: 359081 - DNA, 12 bp, Artificial Sequence
  Oligonucleotide primer for the detection of SNP TSC0051450
cgtgttattacg

SEQ ID NO: 359082 - DNA, 12 bp, Artificial Sequence
  Oligonucleotide primer for the detection of SNP TSC0051451
ttagtatgtaat

SEQ ID NO: 359083 - DNA, 12 bp, Artificial Sequence
  Oligonucleotide primer for the detection of SNP TSC0051451
attaatatacaa

SEQ ID NO: 359084 - DNA, 12 bp, Artificial Sequence
  Oligonucleotide primer for the detection of SNP TSC0051452
aatattcataat

SEQ ID NO: 359085 - DNA, 12 bp, Artificial Sequence
  Oligonucleotide primer for the detection of SNP TSC0051452
ttttgttgtata

SEQ ID NO: 359086 - DNA, 12 bp, Artificial Sequence
  Oligonucleotide primer for the detection of SNP TSC0051453
tattacgtttgg

SEQ ID NO: 359087 - DNA, 12 bp, Artificial Sequence
  Oligonucleotide primer for the detection of SNP TSC0004804
taaaatggaaat

SEQ ID NO: 359088 - DNA, 12 bp, Artificial Sequence
  Oligonucleotide primer for the detection of SNP TSC0004804
agttgagttgag

SEQ ID NO: 359089 - DNA, 12 bp, Artificial Sequence
  Oligonucleotide primer for the detection of SNP TSC0004805
tccaatacaata

SEQ ID NO: 359090 - DNA, 12 bp, Artificial Sequence
  Oligonucleotide primer for the detection of SNP TSC0004805
tccgatacaata

SEQ ID NO: 359091 - DNA, 12 bp, Artificial Sequence
  Oligonucleotide primer for the detection of SNP TSC0004805
agtttggtatgt

SEQ ID NO: 359092 - DNA, 12 bp, Artificial Sequence
  Oligonucleotide primer for the detection of SNP TSC0004805
tttgatatagta

SEQ ID NO: 359093 - DNA, 12 bp, Artificial Sequence
  Oligonucleotide primer for the detection of SNP TSC0004805
ttcgatatagta

SEQ ID NO: 359094 - DNA, 12 bp, Artificial Sequence
  Oligonucleotide primer for the detection of SNP TSC0009354
ccataacaactt

SEQ ID NO: 359095 - DNA, 12 bp, Artificial Sequence
  Oligonucleotide primer for the detection of SNP TSC0009354
ttgggtttgaaa

SEQ ID NO: 359096 - DNA, 12 bp, Artificial Sequence
  Oligonucleotide primer for the detection of SNP TSC0051455
taattttaaaca

SEQ ID NO: 359097 - DNA, 12 bp, Artificial Sequence
  Oligonucleotide primer for the detection of SNP TSC0051455
atagtgttttac

SEQ ID NO: 359098 - DNA, 12 bp, Artificial Sequence
  Oligonucleotide primer for the detection of SNP TSC0051455
acaatatcctac

SEQ ID NO: 359099 - DNA, 12 bp, Artificial Sequence
  Oligonucleotide primer for the detection of SNP TSC0051455
atagttttaaat

SEQ ID NO: 359100 - DNA, 12 bp, Artificial Sequence
  Oligonucleotide primer for the detection of SNP TSC0051456
acatctataatc

SEQ ID NO: 359101 - DNA, 12 bp, Artificial Sequence
  Oligonucleotide primer for the detection of SNP TSC0051461
acctcaaaaaac

SEQ ID NO: 359102 - DNA, 12 bp, Artificial Sequence
  Oligonucleotide primer for the detection of SNP TSC0051461
gttatgattgga

SEQ ID NO: 359103 - DNA, 12 bp, Artificial Sequence
  Oligonucleotide primer for the detection of SNP TSC0051463
tcctcacaatac

SEQ ID NO: 359104 - DNA, 12 bp, Artificial Sequence
  Oligonucleotide primer for the detection of SNP TSC0051463
tagagaaggagg

SEQ ID NO: 359105 - DNA, 12 bp, Artificial Sequence
  Oligonucleotide primer for the detection of SNP TSC0051464
tattcaaaaaac

SEQ ID NO: 359106 - DNA, 12 bp, Artificial Sequence
  Oligonucleotide primer for the detection of SNP TSC0051464
atttttttttcg

SEQ ID NO: 359107 - DNA, 12 bp, Artificial Sequence
  Oligonucleotide primer for the detection of SNP TSC0051465
aaatatccaccc

SEQ ID NO: 359108 - DNA, 12 bp, Artificial Sequence
  Oligonucleotide primer for the detection of SNP TSC0051465
aggggaggtggg

SEQ ID NO: 359109 - DNA, 12 bp, Artificial Sequence
  Oligonucleotide primer for the detection of SNP TSC0008874
acctaaacaata

SEQ ID NO: 359110 - DNA, 12 bp, Artificial Sequence
  Oligonucleotide primer for the detection of SNP TSC0008874
tagagttttgtt

SEQ ID NO: 359111 - DNA, 12 bp, Artificial Sequence
  Oligonucleotide primer for the detection of SNP TSC0009017
caccacaattta

SEQ ID NO: 359112 - DNA, 12 bp, Artificial Sequence
  Oligonucleotide primer for the detection of SNP TSC0009017
caccgcaattta

SEQ ID NO: 359113 - DNA, 12 bp, Artificial Sequence
  Oligonucleotide primer for the detection of SNP TSC0009017
agtaggtgaatg

SEQ ID NO: 359114 - DNA, 12 bp, Artificial Sequence
  Oligonucleotide primer for the detection of SNP TSC0009017
attgtagtttat

SEQ ID NO: 359115 - DNA, 12 bp, Artificial Sequence
  Oligonucleotide primer for the detection of SNP TSC0009017
atcgtagtttat

SEQ ID NO: 359116 - DNA, 12 bp, Artificial Sequence
  Oligonucleotide primer for the detection of SNP TSC0051467
actttctaccaa

SEQ ID NO: 359117 - DNA, 12 bp, Artificial Sequence
  Oligonucleotide primer for the detection of SNP TSC0051467
aaggaagttttt

SEQ ID NO: 359118 - DNA, 12 bp, Artificial Sequence
  Oligonucleotide primer for the detection of SNP TSC0005641
acataataatcc

SEQ ID NO: 359119 - DNA, 12 bp, Artificial Sequence
  Oligonucleotide primer for the detection of SNP TSC0005641
aggtgtataata

SEQ ID NO: 359120 - DNA, 12 bp, Artificial Sequence
  Oligonucleotide primer for the detection of SNP TSC0007913
aaatccaattac

SEQ ID NO: 359121 - DNA, 12 bp, Artificial Sequence
  Oligonucleotide primer for the detection of SNP TSC0007913
taatgtttgtaa

SEQ ID NO: 359122 - DNA, 12 bp, Artificial Sequence
  Oligonucleotide primer for the detection of SNP TSC0007913
aaatttagttgt

SEQ ID NO: 359123 - DNA, 12 bp, Artificial Sequence
  Oligonucleotide primer for the detection of SNP TSC0007913
aaatttagttgc

SEQ ID NO: 359124 - DNA, 12 bp, Artificial Sequence
  Oligonucleotide primer for the detection of SNP TSC0051470
atcctttcctct

SEQ ID NO: 359125 - DNA, 12 bp, Artificial Sequence
  Oligonucleotide primer for the detection of SNP TSC0051470
tgttgtaagata

SEQ ID NO: 359126 - DNA, 12 bp, Artificial Sequence
  Oligonucleotide primer for the detection of SNP TSC0051471
ctaaaaacaaat

SEQ ID NO: 359127 - DNA, 12 bp, Artificial Sequence
  Oligonucleotide primer for the detection of SNP TSC0051472
atacactatctc

SEQ ID NO: 359128 - DNA, 12 bp, Artificial Sequence
  Oligonucleotide primer for the detection of SNP TSC0051472
ttgggtaatata

SEQ ID NO: 359129 - DNA, 12 bp, Artificial Sequence
  Oligonucleotide primer for the detection of SNP TSC0051473
aaataaccaacc

SEQ ID NO: 359130 - DNA, 12 bp, Artificial Sequence
  Oligonucleotide primer for the detection of SNP TSC0051473
tacgtattatta

SEQ ID NO: 359131 - DNA, 12 bp, Artificial Sequence
  Oligonucleotide primer for the detection of SNP TSC0051474
acaaccaaaata

SEQ ID NO: 359132 - DNA, 12 bp, Artificial Sequence
  Oligonucleotide primer for the detection of SNP TSC0051474
aggttaggtttt

SEQ ID NO: 359133 - DNA, 12 bp, Artificial Sequence
  Oligonucleotide primer for the detection of SNP TSC0051475
ttgtttgttaag

SEQ ID NO: 359134 - DNA, 12 bp, Artificial Sequence
  Oligonucleotide primer for the detection of SNP TSC0051475
ctacttaccaaa

SEQ ID NO: 359135 - DNA, 12 bp, Artificial Sequence
  Oligonucleotide primer for the detection of SNP TSC0051475
aggtgggtgggt

SEQ ID NO: 359136 - DNA, 12 bp, Artificial Sequence
  Oligonucleotide primer for the detection of SNP TSC0051476
cttaattatcct

SEQ ID NO: 359137 - DNA, 12 bp, Artificial Sequence
  Oligonucleotide primer for the detection of SNP TSC0051476
taatgtgtttgg

SEQ ID NO: 359138 - DNA, 12 bp, Artificial Sequence
  Oligonucleotide primer for the detection of SNP TSC0051476
taacgtgtttgg

SEQ ID NO: 359139 - DNA, 12 bp, Artificial Sequence
  Oligonucleotide primer for the detection of SNP TSC0051476
taatgtgttcgg

SEQ ID NO: 359140 - DNA, 12 bp, Artificial Sequence
  Oligonucleotide primer for the detection of SNP TSC0051476
taacgtgttcgg

SEQ ID NO: 359141 - DNA, 12 bp, Artificial Sequence
  Oligonucleotide primer for the detection of SNP TSC0051477
tttttttagaga

SEQ ID NO: 359142 - DNA, 12 bp, Artificial Sequence
  Oligonucleotide primer for the detection of SNP TSC0051479
aattccaaatac

SEQ ID NO: 359143 - DNA, 12 bp, Artificial Sequence
  Oligonucleotide primer for the detection of SNP TSC0051479
ttgttggtagta

SEQ ID NO: 359144 - DNA, 12 bp, Artificial Sequence
  Oligonucleotide primer for the detection of SNP TSC0051480
accaaaactatt

SEQ ID NO: 359145 - DNA, 12 bp, Artificial Sequence
  Oligonucleotide primer for the detection of SNP TSC0051480
gtaagtagttta

SEQ ID NO: 359146 - DNA, 12 bp, Artificial Sequence
  Oligonucleotide primer for the detection of SNP TSC0051481
aaacaaactaaa

SEQ ID NO: 359147 - DNA, 12 bp, Artificial Sequence
  Oligonucleotide primer for the detection of SNP TSC0051481
aaacgaactaaa

SEQ ID NO: 359148 - DNA, 12 bp, Artificial Sequence
  Oligonucleotide primer for the detection of SNP TSC0051481
aagttaaaattt

SEQ ID NO: 359149 - DNA, 12 bp, Artificial Sequence
  Oligonucleotide primer for the detection of SNP TSC0051481
ccaaaactcaaa

SEQ ID NO: 359150 - DNA, 12 bp, Artificial Sequence
  Oligonucleotide primer for the detection of SNP TSC0051481
agatgggttggg

SEQ ID NO: 359151 - DNA, 12 bp, Artificial Sequence
  Oligonucleotide primer for the detection of SNP TSC0051481
agacgggttggg

SEQ ID NO: 359152 - DNA, 12 bp, Artificial Sequence
  Oligonucleotide primer for the detection of SNP TSC0051482
atacaaaaaccc

SEQ ID NO: 359153 - DNA, 12 bp, Artificial Sequence
  Oligonucleotide primer for the detection of SNP TSC0051482
tccaccatacta

SEQ ID NO: 359154 - DNA, 12 bp, Artificial Sequence
  Oligonucleotide primer for the detection of SNP TSC0051482
gtgtagaaattt

SEQ ID NO: 359155 - DNA, 12 bp, Artificial Sequence
  Oligonucleotide primer for the detection of SNP TSC0009322
caaaaataactt

SEQ ID NO: 359156 - DNA, 12 bp, Artificial Sequence
  Oligonucleotide primer for the detection of SNP TSC0009322
aatattttaaaa

SEQ ID NO: 359157 - DNA, 12 bp, Artificial Sequence
  Oligonucleotide primer for the detection of SNP TSC0051484
ccaaataaaata

SEQ ID NO: 359158 - DNA, 12 bp, Artificial Sequence
  Oligonucleotide primer for the detection of SNP TSC0051484
ccgaataaaata

SEQ ID NO: 359159 - DNA, 12 bp, Artificial Sequence
  Oligonucleotide primer for the detection of SNP TSC0051484
tttgggtagaat

SEQ ID NO: 359160 - DNA, 12 bp, Artificial Sequence
  Oligonucleotide primer for the detection of SNP TSC0051484
ttcgggtagaat

SEQ ID NO: 359161 - DNA, 12 bp, Artificial Sequence
  Oligonucleotide primer for the detection of SNP TSC0051485
tagatattgtta

SEQ ID NO: 359162 - DNA, 12 bp, Artificial Sequence
  Oligonucleotide primer for the detection of SNP TSC0008875
aaacatcaattc

SEQ ID NO: 359163 - DNA, 12 bp, Artificial Sequence
  Oligonucleotide primer for the detection of SNP TSC0051486
aacaatatacat

SEQ ID NO: 359164 - DNA, 12 bp, Artificial Sequence
  Oligonucleotide primer for the detection of SNP TSC0051487
atctaattaaat

SEQ ID NO: 359165 - DNA, 12 bp, Artificial Sequence
  Oligonucleotide primer for the detection of SNP TSC0051487
ttgtaatataga

SEQ ID NO: 359166 - DNA, 12 bp, Artificial Sequence
  Oligonucleotide primer for the detection of SNP TSC0051487
ttataatataaa

SEQ ID NO: 359167 - DNA, 12 bp, Artificial Sequence
  Oligonucleotide primer for the detection of SNP TSC0051487
gtttaattggat

SEQ ID NO: 359168 - DNA, 12 bp, Artificial Sequence
  Oligonucleotide primer for the detection of SNP TSC0009158
ccccctcatcct

SEQ ID NO: 359169 - DNA, 12 bp, Artificial Sequence
  Oligonucleotide primer for the detection of SNP TSC0009158
tttatatgaaaa

SEQ ID NO: 359170 - DNA, 12 bp, Artificial Sequence
  Oligonucleotide primer for the detection of SNP TSC0051489
acccccaaatcc

SEQ ID NO: 359171 - DNA, 12 bp, Artificial Sequence
  Oligonucleotide primer for the detection of SNP TSC0051489
ttgagagagaag

SEQ ID NO: 359172 - DNA, 12 bp, Artificial Sequence
  Oligonucleotide primer for the detection of SNP TSC0051490
tcctctcctctc

SEQ ID NO: 359173 - DNA, 12 bp, Artificial Sequence
  Oligonucleotide primer for the detection of SNP TSC0051490
gaggggaggaga

SEQ ID NO: 359174 - DNA, 12 bp, Artificial Sequence
  Oligonucleotide primer for the detection of SNP TSC0051491
gaagggaaggga

SEQ ID NO: 359175 - DNA, 12 bp, Artificial Sequence
  Oligonucleotide primer for the detection of SNP TSC0051492
ataaactacttt

SEQ ID NO: 359176 - DNA, 12 bp, Artificial Sequence
  Oligonucleotide primer for the detection of SNP TSC0051492
tatagattattg

SEQ ID NO: 359177 - DNA, 12 bp, Artificial Sequence
  Oligonucleotide primer for the detection of SNP TSC0051493
aatacattttaa

SEQ ID NO: 359178 - DNA, 12 bp, Artificial Sequence
  Oligonucleotide primer for the detection of SNP TSC0051493
tattcttaatca

SEQ ID NO: 359179 - DNA, 12 bp, Artificial Sequence
  Oligonucleotide primer for the detection of SNP TSC0051493
gatatattttag

SEQ ID NO: 359180 - DNA, 12 bp, Artificial Sequence
  Oligonucleotide primer for the detection of SNP TSC0051494
aaatcttcctat

SEQ ID NO: 359181 - DNA, 12 bp, Artificial Sequence
  Oligonucleotide primer for the detection of SNP TSC0051494
aaaattttggag

SEQ ID NO: 359182 - DNA, 12 bp, Artificial Sequence
  Oligonucleotide primer for the detection of SNP TSC0051495
ataactcttaat

SEQ ID NO: 359183 - DNA, 12 bp, Artificial Sequence
  Oligonucleotide primer for the detection of SNP TSC0051496
atttggttaggt

SEQ ID NO: 359184 - DNA, 12 bp, Artificial Sequence
  Oligonucleotide primer for the detection of SNP TSC0051496
atttaaccaaac

SEQ ID NO: 359185 - DNA, 12 bp, Artificial Sequence
  Oligonucleotide primer for the detection of SNP TSC0051498
tgggattgttgg

SEQ ID NO: 359186 - DNA, 12 bp, Artificial Sequence
  Oligonucleotide primer for the detection of SNP TSC0051498
taaaactattaa

SEQ ID NO: 359187 - DNA, 12 bp, Artificial Sequence
  Oligonucleotide primer for the detection of SNP TSC0051498
ttagtgaagtat

SEQ ID NO: 359188 - DNA, 12 bp, Artificial Sequence
  Oligonucleotide primer for the detection of SNP TSC0051499
tattaatcatac

SEQ ID NO: 359189 - DNA, 12 bp, Artificial Sequence
  Oligonucleotide primer for the detection of SNP TSC0051499
tggttttagtga

SEQ ID NO: 359190 - DNA, 12 bp, Artificial Sequence
  Oligonucleotide primer for the detection of SNP TSC0051500
aatctcttcatc

SEQ ID NO: 359191 - DNA, 12 bp, Artificial Sequence
  Oligonucleotide primer for the detection of SNP TSC0051500
aatctcttcgtc

SEQ ID NO: 359192 - DNA, 12 bp, Artificial Sequence
  Oligonucleotide primer for the detection of SNP TSC0051500
aattttttcgtt

SEQ ID NO: 359193 - DNA, 12 bp, Artificial Sequence
  Oligonucleotide primer for the detection of SNP TSC0051501
cattatctaaat

SEQ ID NO: 359194 - DNA, 12 bp, Artificial Sequence
  Oligonucleotide primer for the detection of SNP TSC0051501
cgttatctaaat

SEQ ID NO: 359195 - DNA, 12 bp, Artificial Sequence
  Oligonucleotide primer for the detection of SNP TSC0051501
tttgtggtttga

SEQ ID NO: 359196 - DNA, 12 bp, Artificial Sequence
  Oligonucleotide primer for the detection of SNP TSC0051502
caacaacacttt

SEQ ID NO: 359197 - DNA, 12 bp, Artificial Sequence
  Oligonucleotide primer for the detection of SNP TSC0051502
tatgtttttgtg

SEQ ID NO: 359198 - DNA, 12 bp, Artificial Sequence
  Oligonucleotide primer for the detection of SNP TSC0051503
cataaaatctta

SEQ ID NO: 359199 - DNA, 12 bp, Artificial Sequence
  Oligonucleotide primer for the detection of SNP TSC0051503
tataaaattttg

SEQ ID NO: 359200 - DNA, 12 bp, Artificial Sequence
  Oligonucleotide primer for the detection of SNP TSC0051505
agttatgtggaa

SEQ ID NO: 359201 - DNA, 12 bp, Artificial Sequence
  Oligonucleotide primer for the detection of SNP TSC0051505
agttacgtggaa

SEQ ID NO: 359202 - DNA, 12 bp, Artificial Sequence
  Oligonucleotide primer for the detection of SNP TSC0051506
catcaaacaaat

SEQ ID NO: 359203 - DNA, 12 bp, Artificial Sequence
  Oligonucleotide primer for the detection of SNP TSC0051506
gttaatttgata

SEQ ID NO: 359204 - DNA, 12 bp, Artificial Sequence
  Oligonucleotide primer for the detection of SNP TSC0051508
ttccactccctt

SEQ ID NO: 359205 - DNA, 12 bp, Artificial Sequence
  Oligonucleotide primer for the detection of SNP TSC0051508
gagtttagtttt

SEQ ID NO: 359206 - DNA, 12 bp, Artificial Sequence
  Oligonucleotide primer for the detection of SNP TSC0051508
aaactcaatcct

SEQ ID NO: 359207 - DNA, 12 bp, Artificial Sequence
  Oligonucleotide primer for the detection of SNP TSC0051509
acttaataaatt

SEQ ID NO: 359208 - DNA, 12 bp, Artificial Sequence
  Oligonucleotide primer for the detection of SNP TSC0051509
tgtttagtgtta

SEQ ID NO: 359209 - DNA, 12 bp, Artificial Sequence
  Oligonucleotide primer for the detection of SNP TSC0051513
catctctacttt

SEQ ID NO: 359210 - DNA, 12 bp, Artificial Sequence
  Oligonucleotide primer for the detection of SNP TSC0051514
tctacctcaacc

SEQ ID NO: 359211 - DNA, 12 bp, Artificial Sequence
  Oligonucleotide primer for the detection of SNP TSC0051515
tttggttgggta

SEQ ID NO: 359212 - DNA, 12 bp, Artificial Sequence
  Oligonucleotide primer for the detection of SNP TSC0051515
ttcggttgggta

SEQ ID NO: 359213 - DNA, 12 bp, Artificial Sequence
  Oligonucleotide primer for the detection of SNP TSC0051515
tttggtcgggta

SEQ ID NO: 359214 - DNA, 12 bp, Artificial Sequence
  Oligonucleotide primer for the detection of SNP TSC0051515
ttcggtcgggta

SEQ ID NO: 359215 - DNA, 12 bp, Artificial Sequence
  Oligonucleotide primer for the detection of SNP TSC0051515
ctcaaccaaaca

SEQ ID NO: 359216 - DNA, 12 bp, Artificial Sequence
  Oligonucleotide primer for the detection of SNP TSC0051515
ctcaaccgaaca

SEQ ID NO: 359217 - DNA, 12 bp, Artificial Sequence
  Oligonucleotide primer for the detection of SNP TSC0051515
ctcgaccaaaca

SEQ ID NO: 359218 - DNA, 12 bp, Artificial Sequence
  Oligonucleotide primer for the detection of SNP TSC0051515
ctcgaccgaaca

SEQ ID NO: 359219 - DNA, 12 bp, Artificial Sequence
  Oligonucleotide primer for the detection of SNP TSC0008216
tacaccacaaat

SEQ ID NO: 359220 - DNA, 12 bp, Artificial Sequence
  Oligonucleotide primer for the detection of SNP TSC0008216
tttattgttatg

SEQ ID NO: 359221 - DNA, 12 bp, Artificial Sequence
  Oligonucleotide primer for the detection of SNP TSC0008216
tttattgttacg

SEQ ID NO: 359222 - DNA, 12 bp, Artificial Sequence
  Oligonucleotide primer for the detection of SNP TSC0051516
caaatcattaaa

SEQ ID NO: 359223 - DNA, 12 bp, Artificial Sequence
  Oligonucleotide primer for the detection of SNP TSC0051516
gttatgaaggtt

SEQ ID NO: 359224 - DNA, 12 bp, Artificial Sequence
  Oligonucleotide primer for the detection of SNP TSC0051516
taggttattggg

SEQ ID NO: 359225 - DNA, 12 bp, Artificial Sequence
  Oligonucleotide primer for the detection of SNP TSC0051517
caaaaccccaac

SEQ ID NO: 359226 - DNA, 12 bp, Artificial Sequence
  Oligonucleotide primer for the detection of SNP TSC0051517
ttattagtggta

SEQ ID NO: 359227 - DNA, 12 bp, Artificial Sequence
  Oligonucleotide primer for the detection of SNP TSC0051518
tacatattactt

SEQ ID NO: 359228 - DNA, 12 bp, Artificial Sequence
  Oligonucleotide primer for the detection of SNP TSC0051518
atagaataatta

SEQ ID NO: 359229 - DNA, 12 bp, Artificial Sequence
  Oligonucleotide primer for the detection of SNP TSC0051519
ttgaaatttaga

SEQ ID NO: 359230 - DNA, 12 bp, Artificial Sequence
  Oligonucleotide primer for the detection of SNP TSC0051520
tttttgaaacgg

SEQ ID NO: 359231 - DNA, 12 bp, Artificial Sequence
  Oligonucleotide primer for the detection of SNP TSC0051521
acaaaatcttac

SEQ ID NO: 359232 - DNA, 12 bp, Artificial Sequence
  Oligonucleotide primer for the detection of SNP TSC0051521
acgaaatcttac

SEQ ID NO: 359233 - DNA, 12 bp, Artificial Sequence
  Oligonucleotide primer for the detection of SNP TSC0051522
caaacactacac

SEQ ID NO: 359234 - DNA, 12 bp, Artificial Sequence
  Oligonucleotide primer for the detection of SNP TSC0051522
caaacactacgc

SEQ ID NO: 359235 - DNA, 12 bp, Artificial Sequence
  Oligonucleotide primer for the detection of SNP TSC0051523
attatttccaaa

SEQ ID NO: 359236 - DNA, 12 bp, Artificial Sequence
  Oligonucleotide primer for the detection of SNP TSC0051523
atggtatttatt

SEQ ID NO: 359237 - DNA, 12 bp, Artificial Sequence
  Oligonucleotide primer for the detection of SNP TSC0051523
attcattaaaaa

SEQ ID NO: 359238 - DNA, 12 bp, Artificial Sequence
  Oligonucleotide primer for the detection of SNP TSC0051523
tgttgtttttag

SEQ ID NO: 359239 - DNA, 12 bp, Artificial Sequence
  Oligonucleotide primer for the detection of SNP TSC0051524
tatttgagagta

SEQ ID NO: 359240 - DNA, 12 bp, Artificial Sequence
  Oligonucleotide primer for the detection of SNP TSC0051525
ttcaaaaacccc

SEQ ID NO: 359241 - DNA, 12 bp, Artificial Sequence
  Oligonucleotide primer for the detection of SNP TSC0051525
ttaaagattttt

SEQ ID NO: 359242 - DNA, 12 bp, Artificial Sequence
  Oligonucleotide primer for the detection of SNP TSC0051526
cttttcaaaaac

SEQ ID NO: 359243 - DNA, 12 bp, Artificial Sequence
  Oligonucleotide primer for the detection of SNP TSC0051526
gagtttaaattg

SEQ ID NO: 359244 - DNA, 12 bp, Artificial Sequence
  Oligonucleotide primer for the detection of SNP TSC0051526
aaactcaaatta

SEQ ID NO: 359245 - DNA, 12 bp, Artificial Sequence
  Oligonucleotide primer for the detection of SNP TSC0051526
ttttttaaagat

SEQ ID NO: 359246 - DNA, 12 bp, Artificial Sequence
  Oligonucleotide primer for the detection of SNP TSC0051527
ttaaaattctct

SEQ ID NO: 359247 - DNA, 12 bp, Artificial Sequence
  Oligonucleotide primer for the detection of SNP TSC0051527
agtttttatgaa

SEQ ID NO: 359248 - DNA, 12 bp, Artificial Sequence
  Oligonucleotide primer for the detection of SNP TSC0051528
atcctttatata

SEQ ID NO: 359249 - DNA, 12 bp, Artificial Sequence
  Oligonucleotide primer for the detection of SNP TSC0051528
gggtttgtgttt

SEQ ID NO: 359250 - DNA, 12 bp, Artificial Sequence
  Oligonucleotide primer for the detection of SNP TSC0051529
tcataattataa

SEQ ID NO: 359251 - DNA, 12 bp, Artificial Sequence
  Oligonucleotide primer for the detection of SNP TSC0051529
tcgtaattataa

SEQ ID NO: 359252 - DNA, 12 bp, Artificial Sequence
  Oligonucleotide primer for the detection of SNP TSC0051529
gatattttttat

SEQ ID NO: 359253 - DNA, 12 bp, Artificial Sequence
  Oligonucleotide primer for the detection of SNP TSC0051529
aataccccttat

SEQ ID NO: 359254 - DNA, 12 bp, Artificial Sequence
  Oligonucleotide primer for the detection of SNP TSC0051529
ttgtaattatgg

SEQ ID NO: 359255 - DNA, 12 bp, Artificial Sequence
  Oligonucleotide primer for the detection of SNP TSC0051529
tcgtaattatgg

SEQ ID NO: 359256 - DNA, 12 bp, Artificial Sequence
  Oligonucleotide primer for the detection of SNP TSC0051530
tacacaatctat

SEQ ID NO: 359257 - DNA, 12 bp, Artificial Sequence
  Oligonucleotide primer for the detection of SNP TSC0051531
catcccaaaacc

SEQ ID NO: 359258 - DNA, 12 bp, Artificial Sequence
  Oligonucleotide primer for the detection of SNP TSC0051531
aagttttagaaa

SEQ ID NO: 359259 - DNA, 12 bp, Artificial Sequence
  Oligonucleotide primer for the detection of SNP TSC0051531
aaacctcaaaaa

SEQ ID NO: 359260 - DNA, 12 bp, Artificial Sequence
  Oligonucleotide primer for the detection of SNP TSC0051531
tattttagagtt

SEQ ID NO: 359261 - DNA, 12 bp, Artificial Sequence
  Oligonucleotide primer for the detection of SNP TSC0051532
ttagtaattgta

SEQ ID NO: 359262 - DNA, 12 bp, Artificial Sequence
  Oligonucleotide primer for the detection of SNP TSC0051533
gggaatgaagaa

SEQ ID NO: 359263 - DNA, 12 bp, Artificial Sequence
  Oligonucleotide primer for the detection of SNP TSC0051534
taaatgaaaata

SEQ ID NO: 359264 - DNA, 12 bp, Artificial Sequence
  Oligonucleotide primer for the detection of SNP TSC0051535
ttaaaaatcttc

SEQ ID NO: 359265 - DNA, 12 bp, Artificial Sequence
  Oligonucleotide primer for the detection of SNP TSC0051535
aggtagtgagaa

SEQ ID NO: 359266 - DNA, 12 bp, Artificial Sequence
  Oligonucleotide primer for the detection of SNP TSC0051536
caccaacattac

SEQ ID NO: 359267 - DNA, 12 bp, Artificial Sequence
  Oligonucleotide primer for the detection of SNP TSC0051536
ggttttttagtg

SEQ ID NO: 359268 - DNA, 12 bp, Artificial Sequence
  Oligonucleotide primer for the detection of SNP TSC0051538
atcaccataaac

SEQ ID NO: 359269 - DNA, 12 bp, Artificial Sequence
  Oligonucleotide primer for the detection of SNP TSC0051538
ggtttgaaatat

SEQ ID NO: 359270 - DNA, 12 bp, Artificial Sequence
  Oligonucleotide primer for the detection of SNP TSC0051538
taacctaaaaca

SEQ ID NO: 359271 - DNA, 12 bp, Artificial Sequence
  Oligonucleotide primer for the detection of SNP TSC0051538
gttattatgaat

SEQ ID NO: 359272 - DNA, 12 bp, Artificial Sequence
  Oligonucleotide primer for the detection of SNP TSC0051538
gttattatgaac

SEQ ID NO: 359273 - DNA, 12 bp, Artificial Sequence
  Oligonucleotide primer for the detection of SNP TSC0051539
caataaacatac

SEQ ID NO: 359274 - DNA, 12 bp, Artificial Sequence
  Oligonucleotide primer for the detection of SNP TSC0051539
gttatttaaagg

SEQ ID NO: 359275 - DNA, 12 bp, Artificial Sequence
  Oligonucleotide primer for the detection of SNP TSC0008283
ataacacaataa

SEQ ID NO: 359276 - DNA, 12 bp, Artificial Sequence
  Oligonucleotide primer for the detection of SNP TSC0008283
ataacacgataa

SEQ ID NO: 359277 - DNA, 12 bp, Artificial Sequence
  Oligonucleotide primer for the detection of SNP TSC0008283
ttttataatgtg

SEQ ID NO: 359278 - DNA, 12 bp, Artificial Sequence
  Oligonucleotide primer for the detection of SNP TSC0008283
ttttataacgtg

SEQ ID NO: 359279 - DNA, 12 bp, Artificial Sequence
  Oligonucleotide primer for the detection of SNP TSC0008283
ttttataatgcg

SEQ ID NO: 359280 - DNA, 12 bp, Artificial Sequence
  Oligonucleotide primer for the detection of SNP TSC0008283
ttttataacgcg

SEQ ID NO: 359281 - DNA, 12 bp, Artificial Sequence
  Oligonucleotide primer for the detection of SNP TSC0008283
ctccacaacaca

SEQ ID NO: 359282 - DNA, 12 bp, Artificial Sequence
  Oligonucleotide primer for the detection of SNP TSC0008283
ctccacaacacg

SEQ ID NO: 359283 - DNA, 12 bp, Artificial Sequence
  Oligonucleotide primer for the detection of SNP TSC0008283
ctccacaacgca

SEQ ID NO: 359284 - DNA, 12 bp, Artificial Sequence
  Oligonucleotide primer for the detection of SNP TSC0008283
ctccacaacgcg

SEQ ID NO: 359285 - DNA, 12 bp, Artificial Sequence
  Oligonucleotide primer for the detection of SNP TSC0008283
gtagtatggtgg

SEQ ID NO: 359286 - DNA, 12 bp, Artificial Sequence
  Oligonucleotide primer for the detection of SNP TSC0008283
gtagtacggtgg

SEQ ID NO: 359287 - DNA, 12 bp, Artificial Sequence
  Oligonucleotide primer for the detection of SNP TSC0051541
actattttcatt

SEQ ID NO: 359288 - DNA, 12 bp, Artificial Sequence
  Oligonucleotide primer for the detection of SNP TSC0051541
ctatattaccct

SEQ ID NO: 359289 - DNA, 12 bp, Artificial Sequence
  Oligonucleotide primer for the detection of SNP TSC0051542
taccctatccaa

SEQ ID NO: 359290 - DNA, 12 bp, Artificial Sequence
  Oligonucleotide primer for the detection of SNP TSC0051542
taccctatccga

SEQ ID NO: 359291 - DNA, 12 bp, Artificial Sequence
  Oligonukleotid-Primer
tgagtttttggt

SEQ ID NO: 359292 - DNA, 12 bp, Artificial Sequence
  Oligonucleotide primer for the detection of SNP TSC0051542
taaatccttaac

SEQ ID NO: 359293 - DNA, 12 bp, Artificial Sequence
  Oligonucleotide primer for the detection of SNP TSC0051542
tgttttgtttgg

SEQ ID NO: 359294 - DNA, 12 bp, Artificial Sequence
  Oligonucleotide primer for the detection of SNP TSC0051542
tgttttgttcgg

SEQ ID NO: 359295 - DNA, 12 bp, Artificial Sequence
  Oligonucleotide primer for the detection of SNP TSC0051543
ccaacaacttct

SEQ ID NO: 359296 - DNA, 12 bp, Artificial Sequence
  Oligonucleotide primer for the detection of SNP TSC0051543
agtttttgggag

SEQ ID NO: 359297 - DNA, 12 bp, Artificial Sequence
  Oligonucleotide primer for the detection of SNP TSC0051547
taaatcacattt

SEQ ID NO: 359298 - DNA, 12 bp, Artificial Sequence
  Oligonucleotide primer for the detection of SNP TSC0051547
aaaggttagaga

SEQ ID NO: 359299 - DNA, 12 bp, Artificial Sequence
  Oligonucleotide primer for the detection of SNP TSC0051547
taggttatattt

SEQ ID NO: 359300 - DNA, 12 bp, Artificial Sequence
  Oligonucleotide primer for the detection of SNP TSC0051553
caacccgaaaac

SEQ ID NO: 359301 - DNA, 12 bp, Artificial Sequence
  Oligonucleotide primer for the detection of SNP TSC0051553
ggtattagagtt

SEQ ID NO: 359302 - DNA, 12 bp, Artificial Sequence
  Oligonucleotide primer for the detection of SNP TSC0051553
tagtttgaaagt

SEQ ID NO: 359303 - DNA, 12 bp, Artificial Sequence
  Oligonucleotide primer for the detection of SNP TSC0051553
tagttcgaaagt

SEQ ID NO: 359304 - DNA, 12 bp, Artificial Sequence
  Oligonucleotide primer for the detection of SNP TSC0051554
ttcaattacccc

SEQ ID NO: 359305 - DNA, 12 bp, Artificial Sequence
  Oligonucleotide primer for the detection of SNP TSC0051554
aatggaaatttt

SEQ ID NO: 359306 - DNA, 12 bp, Artificial Sequence
  Oligonucleotide primer for the detection of SNP TSC0051554
aacggaaatttt

SEQ ID NO: 359307 - DNA, 12 bp, Artificial Sequence
  Oligonucleotide primer for the detection of SNP TSC0051555
ataaaatttcat

SEQ ID NO: 359308 - DNA, 12 bp, Artificial Sequence
  Oligonucleotide primer for the detection of SNP TSC0051556
agatgttgtttt

SEQ ID NO: 359309 - DNA, 12 bp, Artificial Sequence
  Oligonucleotide primer for the detection of SNP TSC0051556
aaatactacccc

SEQ ID NO: 359310 - DNA, 12 bp, Artificial Sequence
  Oligonucleotide primer for the detection of SNP TSC0051559
ctatattaacac

SEQ ID NO: 359311 - DNA, 12 bp, Artificial Sequence
  Oligonucleotide primer for the detection of SNP TSC0051559
gtgttaatattt

SEQ ID NO: 359312 - DNA, 12 bp, Artificial Sequence
  Oligonucleotide primer for the detection of SNP TSC0051560
atacatcaatct

SEQ ID NO: 359313 - DNA, 12 bp, Artificial Sequence
  Oligonucleotide primer for the detection of SNP TSC0051563
atttcttctaac

SEQ ID NO: 359314 - DNA, 12 bp, Artificial Sequence
  Oligonucleotide primer for the detection of SNP TSC0051563
acctcatatcta

SEQ ID NO: 359315 - DNA, 12 bp, Artificial Sequence
  Oligonucleotide primer for the detection of SNP TSC0051563
attttttttgat

SEQ ID NO: 359316 - DNA, 12 bp, Artificial Sequence
  Oligonucleotide primer for the detection of SNP TSC0051563
attttttttgac

SEQ ID NO: 359317 - DNA, 12 bp, Artificial Sequence
  Oligonucleotide primer for the detection of SNP TSC0051564
ttccactttata

SEQ ID NO: 359318 - DNA, 12 bp, Artificial Sequence
  Oligonucleotide primer for the detection of SNP TSC0051564
atgagggatggt

SEQ ID NO: 359319 - DNA, 12 bp, Artificial Sequence
  Oligonucleotide primer for the detection of SNP TSC0051565
tcaattataaaa

SEQ ID NO: 359320 - DNA, 12 bp, Artificial Sequence
  Oligonucleotide primer for the detection of SNP TSC0051565
gtattgtatttt

SEQ ID NO: 359321 - DNA, 12 bp, Artificial Sequence
  Oligonucleotide primer for the detection of SNP TSC0051565
aacactacactc

SEQ ID NO: 359322 - DNA, 12 bp, Artificial Sequence
  Oligonucleotide primer for the detection of SNP TSC0051565
tttaattgtggg

SEQ ID NO: 359323 - DNA, 12 bp, Artificial Sequence
  Oligonucleotide primer for the detection of SNP TSC0051566
cattacataatt

SEQ ID NO: 359324 - DNA, 12 bp, Artificial Sequence
  Oligonucleotide primer for the detection of SNP TSC0051566
ttttacgtttta

SEQ ID NO: 359325 - DNA, 12 bp, Artificial Sequence
  Oligonucleotide primer for the detection of SNP TSC0051567
taactttaaatt

SEQ ID NO: 359326 - DNA, 12 bp, Artificial Sequence
  Oligonucleotide primer for the detection of SNP TSC0051567
aatgaatattgg

SEQ ID NO: 359327 - DNA, 12 bp, Artificial Sequence
  Oligonucleotide primer for the detection of SNP TSC0051568
ttttacaacata

SEQ ID NO: 359328 - DNA, 12 bp, Artificial Sequence
  Oligonucleotide primer for the detection of SNP TSC0051568
tattcaataaaa

SEQ ID NO: 359329 - DNA, 12 bp, Artificial Sequence
  Oligonucleotide primer for the detection of SNP TSC0051569
tcatttaactta

SEQ ID NO: 359330 - DNA, 12 bp, Artificial Sequence
  Oligonucleotide primer for the detection of SNP TSC0051569
atgagagtatgg

SEQ ID NO: 359331 - DNA, 12 bp, Artificial Sequence
  Oligonucleotide primer for the detection of SNP TSC0051569
tatttgatttgt

SEQ ID NO: 359332 - DNA, 12 bp, Artificial Sequence
  Oligonucleotide primer for the detection of SNP TSC0051570
taataacttacc

SEQ ID NO: 359333 - DNA, 12 bp, Artificial Sequence
  Oligonucleotide primer for the detection of SNP TSC0051570
agtatttttgga

SEQ ID NO: 359334 - DNA, 12 bp, Artificial Sequence
  Oligonucleotide primer for the detection of SNP TSC0051571
caaattcataaa

SEQ ID NO: 359335 - DNA, 12 bp, Artificial Sequence
  Oligonucleotide primer for the detection of SNP TSC0051571
caaattcgtaaa

SEQ ID NO: 359336 - DNA, 12 bp, Artificial Sequence
  Oligonucleotide primer for the detection of SNP TSC0051571
gggttaggatat

SEQ ID NO: 359337 - DNA, 12 bp, Artificial Sequence
  Oligonucleotide primer for the detection of SNP TSC0051571
aaattaaaatac

SEQ ID NO: 359338 - DNA, 12 bp, Artificial Sequence
  Oligonucleotide primer for the detection of SNP TSC0051571
taaatttgtgga

SEQ ID NO: 359339 - DNA, 12 bp, Artificial Sequence
  Oligonucleotide primer for the detection of SNP TSC0051571
taaattcgtgga

SEQ ID NO: 359340 - DNA, 12 bp, Artificial Sequence
  Oligonucleotide primer for the detection of SNP TSC0005034
ccttactactta

SEQ ID NO: 359341 - DNA, 12 bp, Artificial Sequence
  Oligonucleotide primer for the detection of SNP TSC0005034
ttaaaagtgaag

SEQ ID NO: 359342 - DNA, 12 bp, Artificial Sequence
  Oligonucleotide primer for the detection of SNP TSC0005035
aacaatctcata

SEQ ID NO: 359343 - DNA, 12 bp, Artificial Sequence
  Oligonucleotide primer for the detection of SNP TSC0005035
aacaatctcgta

SEQ ID NO: 359344 - DNA, 12 bp, Artificial Sequence
  Oligonucleotide primer for the detection of SNP TSC0005035
agagtttttggg

SEQ ID NO: 359345 - DNA, 12 bp, Artificial Sequence
  Oligonucleotide primer for the detection of SNP TSC0005035
aaacttctaaaa

SEQ ID NO: 359346 - DNA, 12 bp, Artificial Sequence
  Oligonucleotide primer for the detection of SNP TSC0005035
tagtaattttgt

SEQ ID NO: 359347 - DNA, 12 bp, Artificial Sequence
  Oligonucleotide primer for the detection of SNP TSC0005035
tagtaatttcgt

SEQ ID NO: 359348 - DNA, 12 bp, Artificial Sequence
  Oligonucleotide primer for the detection of SNP TSC0005036
actcccaaaaac

SEQ ID NO: 359349 - DNA, 12 bp, Artificial Sequence
  Oligonucleotide primer for the detection of SNP TSC0005036
atagtggggtag

SEQ ID NO: 359350 - DNA, 12 bp, Artificial Sequence
  Oligonucleotide primer for the detection of SNP TSC0000917
ctataaaataac

SEQ ID NO: 359351 - DNA, 12 bp, Artificial Sequence
  Oligonucleotide primer for the detection of SNP TSC0000917
tattatataggg

SEQ ID NO: 359352 - DNA, 12 bp, Artificial Sequence
  Oligonucleotide primer for the detection of SNP TSC0051573
caacaacacatt

SEQ ID NO: 359353 - DNA, 12 bp, Artificial Sequence
  Oligonucleotide primer for the detection of SNP TSC0051573
agttgatttgta

SEQ ID NO: 359354 - DNA, 12 bp, Artificial Sequence
  Oligonucleotide primer for the detection of SNP TSC0051574
ccaacatttaat

SEQ ID NO: 359355 - DNA, 12 bp, Artificial Sequence
  Oligonucleotide primer for the detection of SNP TSC0051574
ggtatggtttta

SEQ ID NO: 359356 - DNA, 12 bp, Artificial Sequence
  Oligonucleotide primer for the detection of SNP TSC0005314
aagtttgagatt

SEQ ID NO: 359357 - DNA, 12 bp, Artificial Sequence
  Oligonucleotide primer for the detection of SNP TSC0005314
aagttcgagatt

SEQ ID NO: 359358 - DNA, 12 bp, Artificial Sequence
  Oligonucleotide primer for the detection of SNP TSC0005314
aaatccgaaatt

SEQ ID NO: 359359 - DNA, 12 bp, Artificial Sequence
  Oligonucleotide primer for the detection of SNP TSC0005314
ataggaaggaga

SEQ ID NO: 359360 - DNA, 12 bp, Artificial Sequence
  Oligonucleotide primer for the detection of SNP TSC0051576
ttttttcttttt

SEQ ID NO: 359361 - DNA, 12 bp, Artificial Sequence
  Oligonucleotide primer for the detection of SNP TSC0051578
actttataaata

SEQ ID NO: 359362 - DNA, 12 bp, Artificial Sequence
  Oligonucleotide primer for the detection of SNP TSC0051578
attattttataa

SEQ ID NO: 359363 - DNA, 12 bp, Artificial Sequence
  Oligonucleotide primer for the detection of SNP TSC0051578
actattccataa

SEQ ID NO: 359364 - DNA, 12 bp, Artificial Sequence
  Oligonucleotide primer for the detection of SNP TSC0051578
gttttgtaaata

SEQ ID NO: 359365 - DNA, 12 bp, Artificial Sequence
  Oligonucleotide primer for the detection of SNP TSC0051581
tttataaacaac

SEQ ID NO: 359366 - DNA, 12 bp, Artificial Sequence
  Oligonucleotide primer for the detection of SNP TSC0051582
ttcaccaaacac

SEQ ID NO: 359367 - DNA, 12 bp, Artificial Sequence
  Oligonucleotide primer for the detection of SNP TSC0051582
gtaggtttggtg

SEQ ID NO: 359368 - DNA, 12 bp, Artificial Sequence
  Oligonucleotide primer for the detection of SNP TSC0006655
taaaaactattc

SEQ ID NO: 359369 - DNA, 12 bp, Artificial Sequence
  Oligonucleotide primer for the detection of SNP TSC0006655
catcttccaaac

SEQ ID NO: 359370 - DNA, 12 bp, Artificial Sequence
  Oligonucleotide primer for the detection of SNP TSC0006655
aaaggttatttt

SEQ ID NO: 359371 - DNA, 12 bp, Artificial Sequence
  Oligonucleotide primer for the detection of SNP TSC0051583
atacacataaat

SEQ ID NO: 359372 - DNA, 12 bp, Artificial Sequence
  Oligonucleotide primer for the detection of SNP TSC0051583
atacacgtaaat

SEQ ID NO: 359373 - DNA, 12 bp, Artificial Sequence
  Oligonucleotide primer for the detection of SNP TSC0051583
agttaaggtata

SEQ ID NO: 359374 - DNA, 12 bp, Artificial Sequence
  Oligonucleotide primer for the detection of SNP TSC0051584
taatacccacca

SEQ ID NO: 359375 - DNA, 12 bp, Artificial Sequence
  Oligonucleotide primer for the detection of SNP TSC0051584
atggtatttagt

SEQ ID NO: 359376 - DNA, 12 bp, Artificial Sequence
  Oligonucleotide primer for the detection of SNP TSC0051584
cataacactcaa

SEQ ID NO: 359377 - DNA, 12 bp, Artificial Sequence
  Oligonucleotide primer for the detection of SNP TSC0051584
gtaatatttatt

SEQ ID NO: 359378 - DNA, 12 bp, Artificial Sequence
  Oligonucleotide primer for the detection of SNP TSC0051585
cacaaaaaataa

SEQ ID NO: 359379 - DNA, 12 bp, Artificial Sequence
  Oligonucleotide primer for the detection of SNP TSC0051586
aatttaaacaaa

SEQ ID NO: 359380 - DNA, 12 bp, Artificial Sequence
  Oligonucleotide primer for the detection of SNP TSC0051586
aaatttattttt

SEQ ID NO: 359381 - DNA, 12 bp, Artificial Sequence
  Oligonucleotide primer for the detection of SNP TSC0051586
aaatttattttc

SEQ ID NO: 359382 - DNA, 12 bp, Artificial Sequence
  Oligonucleotide primer for the detection of SNP TSC0051586
tttaatttaaat

SEQ ID NO: 359383 - DNA, 12 bp, Artificial Sequence
  Oligonucleotide primer for the detection of SNP TSC0051589
aaaaatctaatt

SEQ ID NO: 359384 - DNA, 12 bp, Artificial Sequence
  Oligonucleotide primer for the detection of SNP TSC0051589
ggattaagatta

SEQ ID NO: 359385 - DNA, 12 bp, Artificial Sequence
  Oligonucleotide primer for the detection of SNP TSC0051590
accctatttact

SEQ ID NO: 359386 - DNA, 12 bp, Artificial Sequence
  Oligonucleotide primer for the detection of SNP TSC0051591
aaataattttaa

SEQ ID NO: 359387 - DNA, 12 bp, Artificial Sequence
  Oligonucleotide primer for the detection of SNP TSC0051591
taaagatttaaa

SEQ ID NO: 359388 - DNA, 12 bp, Artificial Sequence
  Oligonucleotide primer for the detection of SNP TSC0051591
gaaatggttttg

SEQ ID NO: 359389 - DNA, 12 bp, Artificial Sequence
  Oligonucleotide primer for the detection of SNP TSC0051593
taaaccctttat

SEQ ID NO: 359390 - DNA, 12 bp, Artificial Sequence
  Oligonucleotide primer for the detection of SNP TSC0051593
gatattatataa

SEQ ID NO: 359391 - DNA, 12 bp, Artificial Sequence
  Oligonucleotide primer for the detection of SNP TSC0051597
aaatctctacac

SEQ ID NO: 359392 - DNA, 12 bp, Artificial Sequence
  Oligonucleotide primer for the detection of SNP TSC0051597
tataagtttttg

SEQ ID NO: 359393 - DNA, 12 bp, Artificial Sequence
  Oligonucleotide primer for the detection of SNP TSC0051597
tataaatcccta

SEQ ID NO: 359394 - DNA, 12 bp, Artificial Sequence
  Oligonucleotide primer for the detection of SNP TSC0051599
tctatatacata

SEQ ID NO: 359395 - DNA, 12 bp, Artificial Sequence
  Oligonucleotide primer for the detection of SNP TSC0051599
tttgataaatgg

SEQ ID NO: 359396 - DNA, 12 bp, Artificial Sequence
  Oligonucleotide primer for the detection of SNP TSC0051599
ttaacaaataaa

SEQ ID NO: 359397 - DNA, 12 bp, Artificial Sequence
  Oligonucleotide primer for the detection of SNP TSC0051599
tttatatgtata

SEQ ID NO: 359398 - DNA, 12 bp, Artificial Sequence
  Oligonucleotide primer for the detection of SNP TSC0051600
cctaacctaata

SEQ ID NO: 359399 - DNA, 12 bp, Artificial Sequence
  Oligonucleotide primer for the detection of SNP TSC0051600
agttgatgatta

SEQ ID NO: 359400 - DNA, 12 bp, Artificial Sequence
  Oligonucleotide primer for the detection of SNP TSC0051600
agtcgatgatta

SEQ ID NO: 359401 - DNA, 12 bp, Artificial Sequence
  Oligonucleotide primer for the detection of SNP TSC0051600
aaccgataatta

SEQ ID NO: 359402 - DNA, 12 bp, Artificial Sequence
  Oligonucleotide primer for the detection of SNP TSC0051600
tttgatttggtg

SEQ ID NO: 359403 - DNA, 12 bp, Artificial Sequence
  Oligonucleotide primer for the detection of SNP TSC0051601
taaaccactacc

SEQ ID NO: 359404 - DNA, 12 bp, Artificial Sequence
  Oligonucleotide primer for the detection of SNP TSC0051601
tcccattctcca

SEQ ID NO: 359405 - DNA, 12 bp, Artificial Sequence
  Oligonucleotide primer for the detection of SNP TSC0051602
atataaactcct

SEQ ID NO: 359406 - DNA, 12 bp, Artificial Sequence
  Oligonucleotide primer for the detection of SNP TSC0051602
taatatttatgt

SEQ ID NO: 359407 - DNA, 12 bp, Artificial Sequence
  Oligonucleotide primer for the detection of SNP TSC0051602
cattcatataaa

SEQ ID NO: 359408 - DNA, 12 bp, Artificial Sequence
  Oligonucleotide primer for the detection of SNP TSC0051602
tgtaggtttttt

SEQ ID NO: 359409 - DNA, 12 bp, Artificial Sequence
  Oligonucleotide primer for the detection of SNP TSC0051602
tgtaggtttttc

SEQ ID NO: 359410 - DNA, 12 bp, Artificial Sequence
  Oligonucleotide primer for the detection of SNP TSC0051603
acatcacttcta

SEQ ID NO: 359411 - DNA, 12 bp, Artificial Sequence
  Oligonucleotide primer for the detection of SNP TSC0051603
acatcgcttcta

SEQ ID NO: 359412 - DNA, 12 bp, Artificial Sequence
  Oligonucleotide primer for the detection of SNP TSC0051603
acgtcacttcta

SEQ ID NO: 359413 - DNA, 12 bp, Artificial Sequence
  Oligonucleotide primer for the detection of SNP TSC0051603
acgtcgcttcta

SEQ ID NO: 359414 - DNA, 12 bp, Artificial Sequence
  Oligonucleotide primer for the detection of SNP TSC0051603
gttttaagttta

SEQ ID NO: 359415 - DNA, 12 bp, Artificial Sequence
  Oligonucleotide primer for the detection of SNP TSC0051603
actttaaatcta

SEQ ID NO: 359416 - DNA, 12 bp, Artificial Sequence
  Oligonucleotide primer for the detection of SNP TSC0051603
tgtcgtttttat

SEQ ID NO: 359417 - DNA, 12 bp, Artificial Sequence
  Oligonucleotide primer for the detection of SNP TSC0051603
cgtcgtttttat

SEQ ID NO: 359418 - DNA, 12 bp, Artificial Sequence
  Oligonucleotide primer for the detection of SNP TSC0005124
tttagttgtttt

SEQ ID NO: 359419 - DNA, 12 bp, Artificial Sequence
  Oligonucleotide primer for the detection of SNP TSC0005124
attttttgaagg

SEQ ID NO: 359420 - DNA, 12 bp, Artificial Sequence
  Oligonucleotide primer for the detection of SNP TSC0051604
aatactcaataa

SEQ ID NO: 359421 - DNA, 12 bp, Artificial Sequence
  Oligonucleotide primer for the detection of SNP TSC0051604
aatactcgataa

SEQ ID NO: 359422 - DNA, 12 bp, Artificial Sequence
  Oligonucleotide primer for the detection of SNP TSC0051604
ataaagggattt

SEQ ID NO: 359423 - DNA, 12 bp, Artificial Sequence
  Oligonucleotide primer for the detection of SNP TSC0051604
ataaagggattc

SEQ ID NO: 359424 - DNA, 12 bp, Artificial Sequence
  Oligonucleotide primer for the detection of SNP TSC0051604
agtatttgatgg

SEQ ID NO: 359425 - DNA, 12 bp, Artificial Sequence
  Oligonucleotide primer for the detection of SNP TSC0051604
agtattcgatgg

SEQ ID NO: 359426 - DNA, 12 bp, Artificial Sequence
  Oligonucleotide primer for the detection of SNP TSC0007433
cttcttcaaaaa

SEQ ID NO: 359427 - DNA, 12 bp, Artificial Sequence
  Oligonucleotide primer for the detection of SNP TSC0007433
tatttagttatt

SEQ ID NO: 359428 - DNA, 12 bp, Artificial Sequence
  Oligonucleotide primer for the detection of SNP TSC0007433
ttattcaatcac

SEQ ID NO: 359429 - DNA, 12 bp, Artificial Sequence
  Oligonucleotide primer for the detection of SNP TSC0051605
ccattaatcaca

SEQ ID NO: 359430 - DNA, 12 bp, Artificial Sequence
  Oligonucleotide primer for the detection of SNP TSC0051605
tgtttagtaatt

SEQ ID NO: 359431 - DNA, 12 bp, Artificial Sequence
  Oligonucleotide primer for the detection of SNP TSC0051605
tactcaataact

SEQ ID NO: 359432 - DNA, 12 bp, Artificial Sequence
  Oligonucleotide primer for the detection of SNP TSC0051605
ttattagttata

SEQ ID NO: 359433 - DNA, 12 bp, Artificial Sequence
  Oligonucleotide primer for the detection of SNP TSC0051606
cacatttaccct

SEQ ID NO: 359434 - DNA, 12 bp, Artificial Sequence
  Oligonucleotide primer for the detection of SNP TSC0051606
cgcatttaccct

SEQ ID NO: 359435 - DNA, 12 bp, Artificial Sequence
  Oligonucleotide primer for the detection of SNP TSC0051606
ttggttaaattg

SEQ ID NO: 359436 - DNA, 12 bp, Artificial Sequence
  Oligonucleotide primer for the detection of SNP TSC0051606
ctaatcaaacta

SEQ ID NO: 359437 - DNA, 12 bp, Artificial Sequence
  Oligonucleotide primer for the detection of SNP TSC0051606
tgtatttgtttt

SEQ ID NO: 359438 - DNA, 12 bp, Artificial Sequence
  Oligonucleotide primer for the detection of SNP TSC0051606
cgtatttgtttt

SEQ ID NO: 359439 - DNA, 12 bp, Artificial Sequence
  Oligonucleotide primer for the detection of SNP TSC0051607
cattctttatta

SEQ ID NO: 359440 - DNA, 12 bp, Artificial Sequence
  Oligonucleotide primer for the detection of SNP TSC0051607
aataagttagtt

SEQ ID NO: 359441 - DNA, 12 bp, Artificial Sequence
  Oligonucleotide primer for the detection of SNP TSC0051607
aaataaaccaat

SEQ ID NO: 359442 - DNA, 12 bp, Artificial Sequence
  Oligonucleotide primer for the detection of SNP TSC0051608
tatagtaaagat

SEQ ID NO: 359443 - DNA, 12 bp, Artificial Sequence
  Oligonucleotide primer for the detection of SNP TSC0051608
tatagtaaagac

SEQ ID NO: 359444 - DNA, 12 bp, Artificial Sequence
  Oligonucleotide primer for the detection of SNP TSC0051608
aatattgtgaaa

SEQ ID NO: 359445 - DNA, 12 bp, Artificial Sequence
  Oligonucleotide primer for the detection of SNP TSC0051609
catttaaaatta

SEQ ID NO: 359446 - DNA, 12 bp, Artificial Sequence
  Oligonucleotide primer for the detection of SNP TSC0051609
aataaaatttgt

SEQ ID NO: 359447 - DNA, 12 bp, Artificial Sequence
  Oligonucleotide primer for the detection of SNP TSC0051611
aaacaaaacact

SEQ ID NO: 359448 - DNA, 12 bp, Artificial Sequence
  Oligonucleotide primer for the detection of SNP TSC0051611
tatgagagttag

SEQ ID NO: 359449 - DNA, 12 bp, Artificial Sequence
  Oligonucleotide primer for the detection of SNP TSC0051611
tacgagagttag

SEQ ID NO: 359450 - DNA, 12 bp, Artificial Sequence
  Oligonucleotide primer for the detection of SNP TSC0051612
tattaatttcaa

SEQ ID NO: 359451 - DNA, 12 bp, Artificial Sequence
  Oligonucleotide primer for the detection of SNP TSC0051612
gatatgtgtgat

SEQ ID NO: 359452 - DNA, 12 bp, Artificial Sequence
  Oligonucleotide primer for the detection of SNP TSC0051612
gatacgtgtgat

SEQ ID NO: 359453 - DNA, 12 bp, Artificial Sequence
  Oligonucleotide primer for the detection of SNP TSC0051612
aacacgtataac

SEQ ID NO: 359454 - DNA, 12 bp, Artificial Sequence
  Oligonucleotide primer for the detection of SNP TSC0051613
aacacacctatt

SEQ ID NO: 359455 - DNA, 12 bp, Artificial Sequence
  Oligonucleotide primer for the detection of SNP TSC0051614
attgcgtttagt

SEQ ID NO: 359456 - DNA, 12 bp, Artificial Sequence
  Oligonucleotide primer for the detection of SNP TSC0051614
atcgcgtttagt

SEQ ID NO: 359457 - DNA, 12 bp, Artificial Sequence
  Oligonucleotide primer for the detection of SNP TSC0051614
attgtgtttagc

SEQ ID NO: 359458 - DNA, 12 bp, Artificial Sequence
  Oligonucleotide primer for the detection of SNP TSC0051614
atcgtgtttagc

SEQ ID NO: 359459 - DNA, 12 bp, Artificial Sequence
  Oligonucleotide primer for the detection of SNP TSC0051614
attgcgtttagc

SEQ ID NO: 359460 - DNA, 12 bp, Artificial Sequence
  Oligonucleotide primer for the detection of SNP TSC0051614
atcgcgtttagc

SEQ ID NO: 359461 - DNA, 12 bp, Artificial Sequence
  Oligonucleotide primer for the detection of SNP TSC0051614
ttaaaaaaagta

SEQ ID NO: 359462 - DNA, 12 bp, Artificial Sequence
  Oligonucleotide primer for the detection of SNP TSC0051615
tctcactccctt

SEQ ID NO: 359463 - DNA, 12 bp, Artificial Sequence
  Oligonucleotide primer for the detection of SNP TSC0051615
aggaaagggaga

SEQ ID NO: 359464 - DNA, 12 bp, Artificial Sequence
  Oligonucleotide primer for the detection of SNP TSC0051618
taattttatttt

SEQ ID NO: 359465 - DNA, 12 bp, Artificial Sequence
  Oligonucleotide primer for the detection of SNP TSC0051618
attttatggaaa

SEQ ID NO: 359466 - DNA, 12 bp, Artificial Sequence
  Oligonucleotide primer for the detection of SNP TSC0051619
ttcaaaataact

SEQ ID NO: 359467 - DNA, 12 bp, Artificial Sequence
  Oligonucleotide primer for the detection of SNP TSC0051619
attttttagtga

SEQ ID NO: 359468 - DNA, 12 bp, Artificial Sequence
  Oligonucleotide primer for the detection of SNP TSC0051621
aaatacaaaact

SEQ ID NO: 359469 - DNA, 12 bp, Artificial Sequence
  Oligonucleotide primer for the detection of SNP TSC0004609
tgtattgagttt

SEQ ID NO: 359470 - DNA, 12 bp, Artificial Sequence
  Oligonucleotide primer for the detection of SNP TSC0004609
cgtattgagttt

SEQ ID NO: 359471 - DNA, 12 bp, Artificial Sequence
  Oligonucleotide primer for the detection of SNP TSC0004609
tgtattgagttc

SEQ ID NO: 359472 - DNA, 12 bp, Artificial Sequence
  Oligonucleotide primer for the detection of SNP TSC0004609
cgtattgagttc

SEQ ID NO: 359473 - DNA, 12 bp, Artificial Sequence
  Oligonucleotide primer for the detection of SNP TSC0004609
cacattaaatcc

SEQ ID NO: 359474 - DNA, 12 bp, Artificial Sequence
  Oligonucleotide primer for the detection of SNP TSC0004609
cgcattaaatcc

SEQ ID NO: 359475 - DNA, 12 bp, Artificial Sequence
  Oligonucleotide primer for the detection of SNP TSC0004609
atgtggtaaaaa

SEQ ID NO: 359476 - DNA, 12 bp, Artificial Sequence
  Oligonucleotide primer for the detection of SNP TSC0051624
tattaccttata

SEQ ID NO: 359477 - DNA, 12 bp, Artificial Sequence
  Oligonucleotide primer for the detection of SNP TSC0051625
taatacctattt

SEQ ID NO: 359478 - DNA, 12 bp, Artificial Sequence
  Oligonucleotide primer for the detection of SNP TSC0051625
gtgagtagggga

SEQ ID NO: 359479 - DNA, 12 bp, Artificial Sequence
  Oligonucleotide primer for the detection of SNP TSC0051625
gcgagtagggga

SEQ ID NO: 359480 - DNA, 12 bp, Artificial Sequence
  Oligonucleotide primer for the detection of SNP TSC0010509
attcaaactcta

SEQ ID NO: 359481 - DNA, 12 bp, Artificial Sequence
  Oligonucleotide primer for the detection of SNP TSC0010509
cccaaattttta

SEQ ID NO: 359482 - DNA, 12 bp, Artificial Sequence
  Oligonucleotide primer for the detection of SNP TSC0010509
tatttagatttt

SEQ ID NO: 359483 - DNA, 12 bp, Artificial Sequence
  Oligonucleotide primer for the detection of SNP TSC0051627
ctattaaaatcc

SEQ ID NO: 359484 - DNA, 12 bp, Artificial Sequence
  Oligonucleotide primer for the detection of SNP TSC0051627
atattttttaaa

SEQ ID NO: 359485 - DNA, 12 bp, Artificial Sequence
  Oligonucleotide primer for the detection of SNP TSC0051628
aactacaaaatt

SEQ ID NO: 359486 - DNA, 12 bp, Artificial Sequence
  Oligonucleotide primer for the detection of SNP TSC0051629
agatagtgtaat

SEQ ID NO: 359487 - DNA, 12 bp, Artificial Sequence
  Oligonucleotide primer for the detection of SNP TSC0051629
aaacaatacaac

SEQ ID NO: 359488 - DNA, 12 bp, Artificial Sequence
  Oligonucleotide primer for the detection of SNP TSC0051629
aagggattttaa

SEQ ID NO: 359489 - DNA, 12 bp, Artificial Sequence
  Oligonucleotide primer for the detection of SNP TSC0051630
tatactcccaac

SEQ ID NO: 359490 - DNA, 12 bp, Artificial Sequence
  Oligonucleotide primer for the detection of SNP TSC0051632
aacccacaatat

SEQ ID NO: 359491 - DNA, 12 bp, Artificial Sequence
  Oligonucleotide primer for the detection of SNP TSC0051632
tctttcaaacca

SEQ ID NO: 359492 - DNA, 12 bp, Artificial Sequence
  Oligonucleotide primer for the detection of SNP TSC0051632
gatttataatat

SEQ ID NO: 359493 - DNA, 12 bp, Artificial Sequence
  Oligonucleotide primer for the detection of SNP TSC0051633
cctttcacattc

SEQ ID NO: 359494 - DNA, 12 bp, Artificial Sequence
  Oligonucleotide primer for the detection of SNP TSC0051633
agagttggataa

SEQ ID NO: 359495 - DNA, 12 bp, Artificial Sequence
  Oligonucleotide primer for the detection of SNP TSC0009054
tatgtatgtgtg

SEQ ID NO: 359496 - DNA, 12 bp, Artificial Sequence
  Oligonucleotide primer for the detection of SNP TSC0009054
tacgtatgtgtg

SEQ ID NO: 359497 - DNA, 12 bp, Artificial Sequence
  Oligonucleotide primer for the detection of SNP TSC0009054
tatgtacgtgtg

SEQ ID NO: 359498 - DNA, 12 bp, Artificial Sequence
  Oligonucleotide primer for the detection of SNP TSC0009054
tatgtatgcgtg

SEQ ID NO: 359499 - DNA, 12 bp, Artificial Sequence
  Oligonucleotide primer for the detection of SNP TSC0009054
tatgtatgtgcg

SEQ ID NO: 359500 - DNA, 12 bp, Artificial Sequence
  Oligonucleotide primer for the detection of SNP TSC0009054
tacgtacgtgtg

SEQ ID NO: 359501 - DNA, 12 bp, Artificial Sequence
  Oligonucleotide primer for the detection of SNP TSC0009054
tacgtatgcgtg

SEQ ID NO: 359502 - DNA, 12 bp, Artificial Sequence
  Oligonucleotide primer for the detection of SNP TSC0009054
tacgtatgtgcg

SEQ ID NO: 359503 - DNA, 12 bp, Artificial Sequence
  Oligonucleotide primer for the detection of SNP TSC0009054
tatgtacgcgtg

SEQ ID NO: 359504 - DNA, 12 bp, Artificial Sequence
  Oligonucleotide primer for the detection of SNP TSC0009054
tatgtacgtgcg

SEQ ID NO: 359505 - DNA, 12 bp, Artificial Sequence
  Oligonucleotide primer for the detection of SNP TSC0009054
tatgtatgcgcg

SEQ ID NO: 359506 - DNA, 12 bp, Artificial Sequence
  Oligonucleotide primer for the detection of SNP TSC0009054
tacgtacgcgtg

SEQ ID NO: 359507 - DNA, 12 bp, Artificial Sequence
  Oligonucleotide primer for the detection of SNP TSC0009054
tacgtacgtgcg

SEQ ID NO: 359508 - DNA, 12 bp, Artificial Sequence
  Oligonucleotide primer for the detection of SNP TSC0009054
tacgtatgcgcg

SEQ ID NO: 359509 - DNA, 12 bp, Artificial Sequence
  Oligonukleotid-Primer
tatgtacgcgcg

SEQ ID NO: 359510 - DNA, 12 bp, Artificial Sequence
  Oligonucleotide primer for the detection of SNP TSC0009054
tacgtacgcgcg

SEQ ID NO: 359511 - DNA, 12 bp, Artificial Sequence
  Oligonucleotide primer for the detection of SNP TSC0051634
aattctataaac

SEQ ID NO: 359512 - DNA, 12 bp, Artificial Sequence
  Oligonucleotide primer for the detection of SNP TSC0051634
agggttttttta

SEQ ID NO: 359513 - DNA, 12 bp, Artificial Sequence
  Oligonukleotid-Primer
cccaaatttccc

SEQ ID NO: 359514 - DNA, 12 bp, Artificial Sequence
  Oligonucleotide primer for the detection of SNP TSC0051635
gaggttggtggg

SEQ ID NO: 359515 - DNA, 12 bp, Artificial Sequence
  Oligonucleotide primer for the detection of SNP TSC0051635
gaggttggcggg

SEQ ID NO: 359516 - DNA, 12 bp, Artificial Sequence
  Oligonucleotide primer for the detection of SNP TSC0010776
accataatttac

SEQ ID NO: 359517 - DNA, 12 bp, Artificial Sequence
  Oligonucleotide primer for the detection of SNP TSC0010776
gtttagagtaaa

SEQ ID NO: 359518 - DNA, 12 bp, Artificial Sequence
  Oligonucleotide primer for the detection of SNP TSC0010776
atctaaaacaaa

SEQ ID NO: 359519 - DNA, 12 bp, Artificial Sequence
  Oligonucleotide primer for the detection of SNP TSC0010776
gttatagtttgt

SEQ ID NO: 359520 - DNA, 12 bp, Artificial Sequence
  Oligonucleotide primer for the detection of SNP TSC0010776
gttatagtttgc

SEQ ID NO: 359521 - DNA, 12 bp, Artificial Sequence
  Oligonucleotide primer for the detection of SNP TSC0051636
aataccatactt

SEQ ID NO: 359522 - DNA, 12 bp, Artificial Sequence
  Oligonucleotide primer for the detection of SNP TSC0051636
atagtaattaga

SEQ ID NO: 359523 - DNA, 12 bp, Artificial Sequence
  Oligonucleotide primer for the detection of SNP TSC0051636
acaataatcaaa

SEQ ID NO: 359524 - DNA, 12 bp, Artificial Sequence
  Oligonucleotide primer for the detection of SNP TSC0051637
ggaggtgtatgt

SEQ ID NO: 359525 - DNA, 12 bp, Artificial Sequence
  Oligonucleotide primer for the detection of SNP TSC0051637
gttttaagtgag

SEQ ID NO: 359526 - DNA, 12 bp, Artificial Sequence
  Oligonucleotide primer for the detection of SNP TSC0006883
tcctctcaccta

SEQ ID NO: 359527 - DNA, 12 bp, Artificial Sequence
  Oligonucleotide primer for the detection of SNP TSC0006883
gttaggtttttt

SEQ ID NO: 359528 - DNA, 12 bp, Artificial Sequence
  Oligonucleotide primer for the detection of SNP TSC0006883
accaaacccttc

SEQ ID NO: 359529 - DNA, 12 bp, Artificial Sequence
  Oligonucleotide primer for the detection of SNP TSC0006884
tatctaaaaaac

SEQ ID NO: 359530 - DNA, 12 bp, Artificial Sequence
  Oligonucleotide primer for the detection of SNP TSC0006884
atgggaaagagt

SEQ ID NO: 359531 - DNA, 12 bp, Artificial Sequence
  Oligonucleotide primer for the detection of SNP TSC0006884
taaaaaaaaaca

SEQ ID NO: 359532 - DNA, 12 bp, Artificial Sequence
  Oligonucleotide primer for the detection of SNP TSC0051639
cctcttaaatat

SEQ ID NO: 359533 - DNA, 12 bp, Artificial Sequence
  Oligonucleotide primer for the detection of SNP TSC0051639
ttaggagaaaga

SEQ ID NO: 359534 - DNA, 12 bp, Artificial Sequence
  Oligonucleotide primer for the detection of SNP TSC0051640
tctttcctcaaa

SEQ ID NO: 359535 - DNA, 12 bp, Artificial Sequence
  Oligonucleotide primer for the detection of SNP TSC0051640
atggaaaaattt

SEQ ID NO: 359536 - DNA, 12 bp, Artificial Sequence
  Oligonucleotide primer for the detection of SNP TSC0051640
ataaaaaaattt

SEQ ID NO: 359537 - DNA, 12 bp, Artificial Sequence
  Oligonucleotide primer for the detection of SNP TSC0007475
ttacaattaata

SEQ ID NO: 359538 - DNA, 12 bp, Artificial Sequence
  Oligonucleotide primer for the detection of SNP TSC0007475
ttttttaagatt

SEQ ID NO: 359539 - DNA, 12 bp, Artificial Sequence
  Oligonucleotide primer for the detection of SNP TSC0007475
ttccccaaaatt

SEQ ID NO: 359540 - DNA, 12 bp, Artificial Sequence
  Oligonucleotide primer for the detection of SNP TSC0051645
taaaatcaaaat

SEQ ID NO: 359541 - DNA, 12 bp, Artificial Sequence
  Oligonucleotide primer for the detection of SNP TSC0051645
atgttaaaaatg

SEQ ID NO: 359542 - DNA, 12 bp, Artificial Sequence
  Oligonucleotide primer for the detection of SNP TSC0051645
ataccaaaaata

SEQ ID NO: 359543 - DNA, 12 bp, Artificial Sequence
  Oligonucleotide primer for the detection of SNP TSC0051645
tagagttagggt

SEQ ID NO: 359544 - DNA, 12 bp, Artificial Sequence
  Oligonucleotide primer for the detection of SNP TSC0051646
aaaaaagaattt

SEQ ID NO: 359545 - DNA, 12 bp, Artificial Sequence
  Oligonucleotide primer for the detection of SNP TSC0051646
tgattagtttta

SEQ ID NO: 359546 - DNA, 12 bp, Artificial Sequence
  Oligonucleotide primer for the detection of SNP TSC0051648
ttcccattctaa

SEQ ID NO: 359547 - DNA, 12 bp, Artificial Sequence
  Oligonucleotide primer for the detection of SNP TSC0051648
agtgggtagaat

SEQ ID NO: 359548 - DNA, 12 bp, Artificial Sequence
  Oligonucleotide primer for the detection of SNP TSC0051649
ttgtaatgtttt

SEQ ID NO: 359549 - DNA, 12 bp, Artificial Sequence
  Oligonucleotide primer for the detection of SNP TSC0051649
ttataatacccc

SEQ ID NO: 359550 - DNA, 12 bp, Artificial Sequence
  Oligonucleotide primer for the detection of SNP TSC0051651
aactctatatct

SEQ ID NO: 359551 - DNA, 12 bp, Artificial Sequence
  Oligonucleotide primer for the detection of SNP TSC0051654
aattatattttt

SEQ ID NO: 359552 - DNA, 12 bp, Artificial Sequence
  Oligonucleotide primer for the detection of SNP TSC0051654
atacttccaaaa

SEQ ID NO: 359553 - DNA, 12 bp, Artificial Sequence
  Oligonucleotide primer for the detection of SNP TSC0051655
aaaacttatttt

SEQ ID NO: 359554 - DNA, 12 bp, Artificial Sequence
  Oligonucleotide primer for the detection of SNP TSC0051655
tatttttaaaag

SEQ ID NO: 359555 - DNA, 12 bp, Artificial Sequence
  Oligonucleotide primer for the detection of SNP TSC0005186
ccaatccactct

SEQ ID NO: 359556 - DNA, 12 bp, Artificial Sequence
  Oligonucleotide primer for the detection of SNP TSC0005186
aggatgtgattt

SEQ ID NO: 359557 - DNA, 12 bp, Artificial Sequence
  Oligonucleotide primer for the detection of SNP TSC0005186
taatttattttc

SEQ ID NO: 359558 - DNA, 12 bp, Artificial Sequence
  Oligonucleotide primer for the detection of SNP TSC0009479
gggaagttttga

SEQ ID NO: 359559 - DNA, 12 bp, Artificial Sequence
  Oligonucleotide primer for the detection of SNP TSC0009479
gggaagtttcga

SEQ ID NO: 359560 - DNA, 12 bp, Artificial Sequence
  Oligonucleotide primer for the detection of SNP TSC0009479
aaaaaactccga

SEQ ID NO: 359561 - DNA, 12 bp, Artificial Sequence
  Oligonucleotide primer for the detection of SNP TSC0009479
attagagggtga

SEQ ID NO: 359562 - DNA, 12 bp, Artificial Sequence
  Oligonucleotide primer for the detection of SNP TSC0010587
tcttaaatttta

SEQ ID NO: 359563 - DNA, 12 bp, Artificial Sequence
  Oligonucleotide primer for the detection of SNP TSC0010587
ttagggaaattt

SEQ ID NO: 359564 - DNA, 12 bp, Artificial Sequence
  Oligonucleotide primer for the detection of SNP TSC0010587
ttagggaaattc

SEQ ID NO: 359565 - DNA, 12 bp, Artificial Sequence
  Oligonucleotide primer for the detection of SNP TSC0010587
tttggattttat

SEQ ID NO: 359566 - DNA, 12 bp, Artificial Sequence
  Oligonucleotide primer for the detection of SNP TSC0051665
tactataaaaat

SEQ ID NO: 359567 - DNA, 12 bp, Artificial Sequence
  Oligonucleotide primer for the detection of SNP TSC0051665
gaaaagtttgta

SEQ ID NO: 359568 - DNA, 12 bp, Artificial Sequence
  Oligonucleotide primer for the detection of SNP TSC0051665
tgttgtgaaaat

SEQ ID NO: 359569 - DNA, 12 bp, Artificial Sequence
  Oligonucleotide primer for the detection of SNP TSC0051666
cccaccaacaat

SEQ ID NO: 359570 - DNA, 12 bp, Artificial Sequence
  Oligonucleotide primer for the detection of SNP TSC0051666
ggaatatttatt

SEQ ID NO: 359571 - DNA, 12 bp, Artificial Sequence
  Oligonucleotide primer for the detection of SNP TSC0051666
tttattagtaat

SEQ ID NO: 359572 - DNA, 12 bp, Artificial Sequence
  Oligonucleotide primer for the detection of SNP TSC0010458
ctaaaataattc

SEQ ID NO: 359573 - DNA, 12 bp, Artificial Sequence
  Oligonucleotide primer for the detection of SNP TSC0010458
tatggagtatag

SEQ ID NO: 359574 - DNA, 12 bp, Artificial Sequence
  Oligonucleotide primer for the detection of SNP TSC0010458
ataaaacacaaa

SEQ ID NO: 359575 - DNA, 12 bp, Artificial Sequence
  Oligonucleotide primer for the detection of SNP TSC0010458
ttgggatggttt

SEQ ID NO: 359576 - DNA, 12 bp, Artificial Sequence
  Oligonucleotide primer for the detection of SNP TSC0010459
attaaaaaaccc

SEQ ID NO: 359577 - DNA, 12 bp, Artificial Sequence
  Oligonucleotide primer for the detection of SNP TSC0010459
tgtaaatgggaa

SEQ ID NO: 359578 - DNA, 12 bp, Artificial Sequence
  Oligonucleotide primer for the detection of SNP TSC0051667
aaccaatttcct

SEQ ID NO: 359579 - DNA, 12 bp, Artificial Sequence
  Oligonucleotide primer for the detection of SNP TSC0051667
tatgtgaggata

SEQ ID NO: 359580 - DNA, 12 bp, Artificial Sequence
  Oligonucleotide primer for the detection of SNP TSC0051667
catataaaaaca

SEQ ID NO: 359581 - DNA, 12 bp, Artificial Sequence
  Oligonucleotide primer for the detection of SNP TSC0004686
aaaccataaaat

SEQ ID NO: 359582 - DNA, 12 bp, Artificial Sequence
  Oligonucleotide primer for the detection of SNP TSC0004686
attctaaaccta

SEQ ID NO: 359583 - DNA, 12 bp, Artificial Sequence
  Oligonucleotide primer for the detection of SNP TSC0004686
aaattatgaaat

SEQ ID NO: 359584 - DNA, 12 bp, Artificial Sequence
  Oligonucleotide primer for the detection of SNP TSC0051670
tttattattacc

SEQ ID NO: 359585 - DNA, 12 bp, Artificial Sequence
  Oligonucleotide primer for the detection of SNP TSC0051670
tatagtttgtgt

SEQ ID NO: 359586 - DNA, 12 bp, Artificial Sequence
  Oligonucleotide primer for the detection of SNP TSC0051670
tatagttcgtgt

SEQ ID NO: 359587 - DNA, 12 bp, Artificial Sequence
  Oligonucleotide primer for the detection of SNP TSC0051670
cacaatccatat

SEQ ID NO: 359588 - DNA, 12 bp, Artificial Sequence
  Oligonucleotide primer for the detection of SNP TSC0051670
cacaatccgtat

SEQ ID NO: 359589 - DNA, 12 bp, Artificial Sequence
  Oligonucleotide primer for the detection of SNP TSC0051670
tttattgttatt

SEQ ID NO: 359590 - DNA, 12 bp, Artificial Sequence
  Oligonucleotide primer for the detection of SNP TSC0051671
aactttcaacta

SEQ ID NO: 359591 - DNA, 12 bp, Artificial Sequence
  Oligonucleotide primer for the detection of SNP TSC0051671
agggtagtgttg

SEQ ID NO: 359592 - DNA, 12 bp, Artificial Sequence
  Oligonucleotide primer for the detection of SNP TSC0051671
atttttagttgt

SEQ ID NO: 359593 - DNA, 12 bp, Artificial Sequence
  Oligonucleotide primer for the detection of SNP TSC0051672
aaactttcaact

SEQ ID NO: 359594 - DNA, 12 bp, Artificial Sequence
  Oligonucleotide primer for the detection of SNP TSC0051672
agatttttagtt

SEQ ID NO: 359595 - DNA, 12 bp, Artificial Sequence
  Oligonucleotide primer for the detection of SNP TSC0051674
aattaattacat

SEQ ID NO: 359596 - DNA, 12 bp, Artificial Sequence
  Oligonucleotide primer for the detection of SNP TSC0051674
gattgtggttgt

SEQ ID NO: 359597 - DNA, 12 bp, Artificial Sequence
  Oligonucleotide primer for the detection of SNP TSC0051674
aattataattac

SEQ ID NO: 359598 - DNA, 12 bp, Artificial Sequence
  Oligonucleotide primer for the detection of SNP TSC0051674
attaattgtatc

SEQ ID NO: 359599 - DNA, 12 bp, Artificial Sequence
  Oligonucleotide primer for the detection of SNP TSC0005975
taaattaactcc

SEQ ID NO: 359600 - DNA, 12 bp, Artificial Sequence
  Oligonucleotide primer for the detection of SNP TSC0005975
tgtagattagag

SEQ ID NO: 359601 - DNA, 12 bp, Artificial Sequence
  Oligonucleotide primer for the detection of SNP TSC0051678
acattctaacaa

SEQ ID NO: 359602 - DNA, 12 bp, Artificial Sequence
  Oligonucleotide primer for the detection of SNP TSC0051678
acattctaacga

SEQ ID NO: 359603 - DNA, 12 bp, Artificial Sequence
  Oligonucleotide primer for the detection of SNP TSC0051678
aattttgatgta

SEQ ID NO: 359604 - DNA, 12 bp, Artificial Sequence
  Oligonucleotide primer for the detection of SNP TSC0051678
aaccctaataca

SEQ ID NO: 359605 - DNA, 12 bp, Artificial Sequence
  Oligonucleotide primer for the detection of SNP TSC0051678
atattttgatga

SEQ ID NO: 359606 - DNA, 12 bp, Artificial Sequence
  Oligonucleotide primer for the detection of SNP TSC0051678
atattttgacga

SEQ ID NO: 359607 - DNA, 12 bp, Artificial Sequence
  Oligonucleotide primer for the detection of SNP TSC0051679
gttttatggttg

SEQ ID NO: 359608 - DNA, 12 bp, Artificial Sequence
  Oligonucleotide primer for the detection of SNP TSC0010648
ttatcaaactac

SEQ ID NO: 359609 - DNA, 12 bp, Artificial Sequence
  Oligonucleotide primer for the detection of SNP TSC0010648
tgaatgattgta

SEQ ID NO: 359610 - DNA, 12 bp, Artificial Sequence
  Oligonucleotide primer for the detection of SNP TSC0010648
tgaatgatcgta

SEQ ID NO: 359611 - DNA, 12 bp, Artificial Sequence
  Oligonucleotide primer for the detection of SNP TSC0010648
taaataatcaca

SEQ ID NO: 359612 - DNA, 12 bp, Artificial Sequence
  Oligonucleotide primer for the detection of SNP TSC0010648
taaataatcgca

SEQ ID NO: 359613 - DNA, 12 bp, Artificial Sequence
  Oligonucleotide primer for the detection of SNP TSC0010649
aaataatccctc

SEQ ID NO: 359614 - DNA, 12 bp, Artificial Sequence
  Oligonucleotide primer for the detection of SNP TSC0010649
ttagtttgatcg

SEQ ID NO: 359615 - DNA, 12 bp, Artificial Sequence
  Oligonucleotide primer for the detection of SNP TSC0051683
actaatataact

SEQ ID NO: 359616 - DNA, 12 bp, Artificial Sequence
  Oligonucleotide primer for the detection of SNP TSC0051683
ggatttttagat

SEQ ID NO: 359617 - DNA, 12 bp, Artificial Sequence
  Oligonucleotide primer for the detection of SNP TSC0051683
aactcccaaata

SEQ ID NO: 359618 - DNA, 12 bp, Artificial Sequence
  Oligonukleotid-Primer
attaatgtgatt

SEQ ID NO: 359619 - DNA, 12 bp, Artificial Sequence
  Oligonucleotide primer for the detection of SNP TSC0051684
taaaattactat

SEQ ID NO: 359620 - DNA, 12 bp, Artificial Sequence
  Oligonucleotide primer for the detection of SNP TSC0051684
ataggaagaata

SEQ ID NO: 359621 - DNA, 12 bp, Artificial Sequence
  Oligonucleotide primer for the detection of SNP TSC0051685
ttcctatctaaa

SEQ ID NO: 359622 - DNA, 12 bp, Artificial Sequence
  Oligonukleotid-Primer
attaaattagag

SEQ ID NO: 359623 - DNA, 12 bp, Artificial Sequence
  Oligonucleotide primer for the detection of SNP TSC0051686
aatctaaactta

SEQ ID NO: 359624 - DNA, 12 bp, Artificial Sequence
  Oligonucleotide primer for the detection of SNP TSC0051686
tttagtgtagat

SEQ ID NO: 359625 - DNA, 12 bp, Artificial Sequence
  Oligonucleotide primer for the detection of SNP TSC0051686
cctaatacaaat

SEQ ID NO: 359626 - DNA, 12 bp, Artificial Sequence
  Oligonucleotide primer for the detection of SNP TSC0051686
aatttgggtttg

SEQ ID NO: 359627 - DNA, 12 bp, Artificial Sequence
  Oligonucleotide primer for the detection of SNP TSC0051687
taaaatacataa

SEQ ID NO: 359628 - DNA, 12 bp, Artificial Sequence
  Oligonucleotide primer for the detection of SNP TSC0051687
aagtatattggt

SEQ ID NO: 359629 - DNA, 12 bp, Artificial Sequence
  Oligonucleotide primer for the detection of SNP TSC0051687
aagtatattggc

SEQ ID NO: 359630 - DNA, 12 bp, Artificial Sequence
  Oligonucleotide primer for the detection of SNP TSC0051687
aaacatattaac

SEQ ID NO: 359631 - DNA, 12 bp, Artificial Sequence
  Oligonucleotide primer for the detection of SNP TSC0051687
aataaaatgtat

SEQ ID NO: 359632 - DNA, 12 bp, Artificial Sequence
  Oligonucleotide primer for the detection of SNP TSC0051688
acttccccctaa

SEQ ID NO: 359633 - DNA, 12 bp, Artificial Sequence
  Oligonucleotide primer for the detection of SNP TSC0051688
tattaaggggtt

SEQ ID NO: 359634 - DNA, 12 bp, Artificial Sequence
  Oligonucleotide primer for the detection of SNP TSC0051688
tatcaaaaaacc

SEQ ID NO: 359635 - DNA, 12 bp, Artificial Sequence
  Oligonucleotide primer for the detection of SNP TSC0051689
actctaatacac

SEQ ID NO: 359636 - DNA, 12 bp, Artificial Sequence
  Oligonucleotide primer for the detection of SNP TSC0051689
attttaatatat

SEQ ID NO: 359637 - DNA, 12 bp, Artificial Sequence
  Oligonucleotide primer for the detection of SNP TSC0051690
actaaataacca

SEQ ID NO: 359638 - DNA, 12 bp, Artificial Sequence
  Oligonucleotide primer for the detection of SNP TSC0051690
atttctacttta

SEQ ID NO: 359639 - DNA, 12 bp, Artificial Sequence
  Oligonucleotide primer for the detection of SNP TSC0051690
gttaagtaatta

SEQ ID NO: 359640 - DNA, 12 bp, Artificial Sequence
  Oligonucleotide primer for the detection of SNP TSC0000533
tacaccaaactc

SEQ ID NO: 359641 - DNA, 12 bp, Artificial Sequence
  Oligonucleotide primer for the detection of SNP TSC0000533
tagtaattagga

SEQ ID NO: 359642 - DNA, 12 bp, Artificial Sequence
  Oligonucleotide primer for the detection of SNP TSC0051694
ataatataactc

SEQ ID NO: 359643 - DNA, 12 bp, Artificial Sequence
  Oligonucleotide primer for the detection of SNP TSC0051694
agttgaggtttg

SEQ ID NO: 359644 - DNA, 12 bp, Artificial Sequence
  Oligonucleotide primer for the detection of SNP TSC0051694
aattaaaactta

SEQ ID NO: 359645 - DNA, 12 bp, Artificial Sequence
  Oligonucleotide primer for the detection of SNP TSC0051695
atttagaattga

SEQ ID NO: 359646 - DNA, 12 bp, Artificial Sequence
  Oligonucleotide primer for the detection of SNP TSC0051696
catcctaatatt

SEQ ID NO: 359647 - DNA, 12 bp, Artificial Sequence
  Oligonucleotide primer for the detection of SNP TSC0051696
agttagaaaata

SEQ ID NO: 359648 - DNA, 12 bp, Artificial Sequence
  Oligonucleotide primer for the detection of SNP TSC0051697
tttgatttaaaa

SEQ ID NO: 359649 - DNA, 12 bp, Artificial Sequence
  Oligonucleotide primer for the detection of SNP TSC0051699
tttggtggtgtg

SEQ ID NO: 359650 - DNA, 12 bp, Artificial Sequence
  Oligonucleotide primer for the detection of SNP TSC0051699
tttggtggcgtg

SEQ ID NO: 359651 - DNA, 12 bp, Artificial Sequence
  Oligonucleotide primer for the detection of SNP TSC0051699
cttaataacata

SEQ ID NO: 359652 - DNA, 12 bp, Artificial Sequence
  Oligonucleotide primer for the detection of SNP TSC0051699
cttaataacgta

SEQ ID NO: 359653 - DNA, 12 bp, Artificial Sequence
  Oligonucleotide primer for the detection of SNP TSC0051700
catctttttttt

SEQ ID NO: 359654 - DNA, 12 bp, Artificial Sequence
  Oligonucleotide primer for the detection of SNP TSC0001691
gtgtttagttag

SEQ ID NO: 359655 - DNA, 12 bp, Artificial Sequence
  Oligonucleotide primer for the detection of SNP TSC0001692
ctataaaatctc

SEQ ID NO: 359656 - DNA, 12 bp, Artificial Sequence
  Oligonucleotide primer for the detection of SNP TSC0001692
ctcacttaccta

SEQ ID NO: 359657 - DNA, 12 bp, Artificial Sequence
  Oligonucleotide primer for the detection of SNP TSC0001692
ctcgcttaccta

SEQ ID NO: 359658 - DNA, 12 bp, Artificial Sequence
  Oligonucleotide primer for the detection of SNP TSC0001692
ttgtgaagtttt

SEQ ID NO: 359659 - DNA, 12 bp, Artificial Sequence
  Oligonucleotide primer for the detection of SNP TSC0051701
atatctaaaaat

SEQ ID NO: 359660 - DNA, 12 bp, Artificial Sequence
  Oligonucleotide primer for the detection of SNP TSC0051701
tttagagttaag

SEQ ID NO: 359661 - DNA, 12 bp, Artificial Sequence
  Oligonucleotide primer for the detection of SNP TSC0051702
cttaatacatat

SEQ ID NO: 359662 - DNA, 12 bp, Artificial Sequence
  Oligonucleotide primer for the detection of SNP TSC0051702
ttatatagaaga

SEQ ID NO: 359663 - DNA, 12 bp, Artificial Sequence
  Oligonucleotide primer for the detection of SNP TSC0009958
cataaaaaatca

SEQ ID NO: 359664 - DNA, 12 bp, Artificial Sequence
  Oligonucleotide primer for the detection of SNP TSC0009958
accattcccctt

SEQ ID NO: 359665 - DNA, 12 bp, Artificial Sequence
  Oligonucleotide primer for the detection of SNP TSC0009958
tatgagaagtta

SEQ ID NO: 359666 - DNA, 12 bp, Artificial Sequence
  Oligonucleotide primer for the detection of SNP TSC0001042
tctactttcact

SEQ ID NO: 359667 - DNA, 12 bp, Artificial Sequence
  Oligonucleotide primer for the detection of SNP TSC0001042
gataataattat

SEQ ID NO: 359668 - DNA, 12 bp, Artificial Sequence
  Oligonucleotide primer for the detection of SNP TSC0001042
taataactataa

SEQ ID NO: 359669 - DNA, 12 bp, Artificial Sequence
  Oligonucleotide primer for the detection of SNP TSC0001043
cttattataact

SEQ ID NO: 359670 - DNA, 12 bp, Artificial Sequence
  Oligonucleotide primer for the detection of SNP TSC0001043
aaaggtaatggg

SEQ ID NO: 359671 - DNA, 12 bp, Artificial Sequence
  Oligonucleotide primer for the detection of SNP TSC0001044
cccaaatataac

SEQ ID NO: 359672 - DNA, 12 bp, Artificial Sequence
  Oligonucleotide primer for the detection of SNP TSC0001044
aggggaggggta

SEQ ID NO: 359673 - DNA, 12 bp, Artificial Sequence
  Oligonucleotide primer for the detection of SNP TSC0051705
ttctatatttta

SEQ ID NO: 359674 - DNA, 12 bp, Artificial Sequence
  Oligonucleotide primer for the detection of SNP TSC0051705
gtaattagattt

SEQ ID NO: 359675 - DNA, 12 bp, Artificial Sequence
  Oligonucleotide primer for the detection of SNP TSC0051705
ataatcaaactc

SEQ ID NO: 359676 - DNA, 12 bp, Artificial Sequence
  Oligonucleotide primer for the detection of SNP TSC0051705
ttttgtgtttta

SEQ ID NO: 359677 - DNA, 12 bp, Artificial Sequence
  Oligonucleotide primer for the detection of SNP TSC0051706
tctaaaattttc

SEQ ID NO: 359678 - DNA, 12 bp, Artificial Sequence
  Oligonucleotide primer for the detection of SNP TSC0051706
atttgtagttta

SEQ ID NO: 359679 - DNA, 12 bp, Artificial Sequence
  Oligonucleotide primer for the detection of SNP TSC0051706
atctacaactca

SEQ ID NO: 359680 - DNA, 12 bp, Artificial Sequence
  Oligonucleotide primer for the detection of SNP TSC0051706
tttagagttttt

SEQ ID NO: 359681 - DNA, 12 bp, Artificial Sequence
  Oligonucleotide primer for the detection of SNP TSC0051707
cttaaaatcaca

SEQ ID NO: 359682 - DNA, 12 bp, Artificial Sequence
  Oligonucleotide primer for the detection of SNP TSC0051707
tttgaaattata

SEQ ID NO: 359683 - DNA, 12 bp, Artificial Sequence
  Oligonucleotide primer for the detection of SNP TSC0051708
agaaagttaata

SEQ ID NO: 359684 - DNA, 12 bp, Artificial Sequence
  Oligonucleotide primer for the detection of SNP TSC0051708
tatttggttagt

SEQ ID NO: 359685 - DNA, 12 bp, Artificial Sequence
  Oligonucleotide primer for the detection of SNP TSC0051709
ttctaaaacatc

SEQ ID NO: 359686 - DNA, 12 bp, Artificial Sequence
  Oligonucleotide primer for the detection of SNP TSC0051709
attagttattaa

SEQ ID NO: 359687 - DNA, 12 bp, Artificial Sequence
  Oligonucleotide primer for the detection of SNP TSC0051709
ttttaaggtatt

SEQ ID NO: 359688 - DNA, 12 bp, Artificial Sequence
  Oligonucleotide primer for the detection of SNP TSC0004558
tttaaatctaca

SEQ ID NO: 359689 - DNA, 12 bp, Artificial Sequence
  Oligonucleotide primer for the detection of SNP TSC0004558
taatcttcctaa

SEQ ID NO: 359690 - DNA, 12 bp, Artificial Sequence
  Oligonucleotide primer for the detection of SNP TSC0004558
taagtttatatt

SEQ ID NO: 359691 - DNA, 12 bp, Artificial Sequence
  Oligonucleotide primer for the detection of SNP TSC0004559
caataaaattac

SEQ ID NO: 359692 - DNA, 12 bp, Artificial Sequence
  Oligonucleotide primer for the detection of SNP TSC0004559
gtattgaggtta

SEQ ID NO: 359693 - DNA, 12 bp, Artificial Sequence
  Oligonucleotide primer for the detection of SNP TSC0051710
aagatgtatttt

SEQ ID NO: 359694 - DNA, 12 bp, Artificial Sequence
  Oligonucleotide primer for the detection of SNP TSC0051710
aaaatacattct

SEQ ID NO: 359695 - DNA, 12 bp, Artificial Sequence
  Oligonucleotide primer for the detection of SNP TSC0051710
aagaaaagtgga

SEQ ID NO: 359696 - DNA, 12 bp, Artificial Sequence
  Oligonucleotide primer for the detection of SNP TSC0051711
caaataatctac

SEQ ID NO: 359697 - DNA, 12 bp, Artificial Sequence
  Oligonucleotide primer for the detection of SNP TSC0051711
gaggtcgaggtg

SEQ ID NO: 359698 - DNA, 12 bp, Artificial Sequence
  Oligonucleotide primer for the detection of SNP TSC0051713
tttgagttatat

SEQ ID NO: 359699 - DNA, 12 bp, Artificial Sequence
  Oligonucleotide primer for the detection of SNP TSC0051713
tttaaaccacac

SEQ ID NO: 359700 - DNA, 12 bp, Artificial Sequence
  Oligonucleotide primer for the detection of SNP TSC0051713
gattatatagaa

SEQ ID NO: 359701 - DNA, 12 bp, Artificial Sequence
  Oligonucleotide primer for the detection of SNP TSC0051714
aattcaattcaa

SEQ ID NO: 359702 - DNA, 12 bp, Artificial Sequence
  Oligonucleotide primer for the detection of SNP TSC0051714
ttaaaacttctt

SEQ ID NO: 359703 - DNA, 12 bp, Artificial Sequence
  Oligonucleotide primer for the detection of SNP TSC0051714
ggtttaatttaa

SEQ ID NO: 359704 - DNA, 12 bp, Artificial Sequence
  Oligonucleotide primer for the detection of SNP TSC0008489
ttttatctctat

SEQ ID NO: 359705 - DNA, 12 bp, Artificial Sequence
  Oligonucleotide primer for the detection of SNP TSC0008489
ttttgggaggaa

SEQ ID NO: 359706 - DNA, 12 bp, Artificial Sequence
  Oligonucleotide primer for the detection of SNP TSC0051715
aacctccataca

SEQ ID NO: 359707 - DNA, 12 bp, Artificial Sequence
  Oligonucleotide primer for the detection of SNP TSC0051715
agttgtttgggt

SEQ ID NO: 359708 - DNA, 12 bp, Artificial Sequence
  Oligonucleotide primer for the detection of SNP TSC0051715
agttgttcgggt

SEQ ID NO: 359709 - DNA, 12 bp, Artificial Sequence
  Oligonucleotide primer for the detection of SNP TSC0051715
aactactcaaac

SEQ ID NO: 359710 - DNA, 12 bp, Artificial Sequence
  Oligonucleotide primer for the detection of SNP TSC0051715
aactactcgaac

SEQ ID NO: 359711 - DNA, 12 bp, Artificial Sequence
  Oligonucleotide primer for the detection of SNP TSC0051715
aggtttttatgt

SEQ ID NO: 359712 - DNA, 12 bp, Artificial Sequence
  Oligonucleotide primer for the detection of SNP TSC0051717
tttcctccctat

SEQ ID NO: 359713 - DNA, 12 bp, Artificial Sequence
  Oligonucleotide primer for the detection of SNP TSC0051718
ttaatatcattt

SEQ ID NO: 359714 - DNA, 12 bp, Artificial Sequence
  Oligonucleotide primer for the detection of SNP TSC0051718
ttttttgaaatt

SEQ ID NO: 359715 - DNA, 12 bp, Artificial Sequence
  Oligonucleotide primer for the detection of SNP TSC0051719
ataccataataa

SEQ ID NO: 359716 - DNA, 12 bp, Artificial Sequence
  Oligonucleotide primer for the detection of SNP TSC0051719
gtaccataataa

SEQ ID NO: 359717 - DNA, 12 bp, Artificial Sequence
  Oligonucleotide primer for the detection of SNP TSC0051719
tgatgagtgtag

SEQ ID NO: 359718 - DNA, 12 bp, Artificial Sequence
  Oligonucleotide primer for the detection of SNP TSC0051719
taataaatacaa

SEQ ID NO: 359719 - DNA, 12 bp, Artificial Sequence
  Oligonucleotide primer for the detection of SNP TSC0051719
ttatggtggttt

SEQ ID NO: 359720 - DNA, 12 bp, Artificial Sequence
  Oligonucleotide primer for the detection of SNP TSC0051720
ttgagatttttt

SEQ ID NO: 359721 - DNA, 12 bp, Artificial Sequence
  Oligonucleotide primer for the detection of SNP TSC0051720
ctaaaacccttt

SEQ ID NO: 359722 - DNA, 12 bp, Artificial Sequence
  Oligonucleotide primer for the detection of SNP TSC0051721
ttttattcaaaa

SEQ ID NO: 359723 - DNA, 12 bp, Artificial Sequence
  Oligonucleotide primer for the detection of SNP TSC0051726
caatttcaccat

SEQ ID NO: 359724 - DNA, 12 bp, Artificial Sequence
  Oligonucleotide primer for the detection of SNP TSC0051726
caatttcaccgt

SEQ ID NO: 359725 - DNA, 12 bp, Artificial Sequence
  Oligonucleotide primer for the detection of SNP TSC0051726
cgatttcaccat

SEQ ID NO: 359726 - DNA, 12 bp, Artificial Sequence
  Oligonucleotide primer for the detection of SNP TSC0051726
cgatttcaccgt

SEQ ID NO: 359727 - DNA, 12 bp, Artificial Sequence
  Oligonucleotide primer for the detection of SNP TSC0051728
acaaactaaaac

SEQ ID NO: 359728 - DNA, 12 bp, Artificial Sequence
  Oligonucleotide primer for the detection of SNP TSC0051728
acgaactaaaac

SEQ ID NO: 359729 - DNA, 12 bp, Artificial Sequence
  Oligonucleotide primer for the detection of SNP TSC0051728
agttttaaagtg

SEQ ID NO: 359730 - DNA, 12 bp, Artificial Sequence
  Oligonucleotide primer for the detection of SNP TSC0051729
accaacttacct

SEQ ID NO: 359731 - DNA, 12 bp, Artificial Sequence
  Oligonucleotide primer for the detection of SNP TSC0051729
cttaaaaattca

SEQ ID NO: 359732 - DNA, 12 bp, Artificial Sequence
  Oligonucleotide primer for the detection of SNP TSC0051729
attagtttgttt

SEQ ID NO: 359733 - DNA, 12 bp, Artificial Sequence
  Oligonucleotide primer for the detection of SNP TSC0051730
gttatagtttta

SEQ ID NO: 359734 - DNA, 12 bp, Artificial Sequence
  Oligonucleotide primer for the detection of SNP TSC0051730
attacaactcca

SEQ ID NO: 359735 - DNA, 12 bp, Artificial Sequence
  Oligonucleotide primer for the detection of SNP TSC0051730
gtaggagtagtt

SEQ ID NO: 359736 - DNA, 12 bp, Artificial Sequence
  Oligonucleotide primer for the detection of SNP TSC0051731
ataatattttgt

SEQ ID NO: 359737 - DNA, 12 bp, Artificial Sequence
  Oligonucleotide primer for the detection of SNP TSC0051731
ataatattttgc

SEQ ID NO: 359738 - DNA, 12 bp, Artificial Sequence
  Oligonucleotide primer for the detection of SNP TSC0051731
ataatattctac

SEQ ID NO: 359739 - DNA, 12 bp, Artificial Sequence
  Oligonucleotide primer for the detection of SNP TSC0051731
atggagagtaat

SEQ ID NO: 359740 - DNA, 12 bp, Artificial Sequence
  Oligonucleotide primer for the detection of SNP TSC0051732
tacctccctacc

SEQ ID NO: 359741 - DNA, 12 bp, Artificial Sequence
  Oligonucleotide primer for the detection of SNP TSC0051732
gaatgaggttgg

SEQ ID NO: 359742 - DNA, 12 bp, Artificial Sequence
  Oligonucleotide primer for the detection of SNP TSC0051733
taaactataata

SEQ ID NO: 359743 - DNA, 12 bp, Artificial Sequence
  Oligonucleotide primer for the detection of SNP TSC0051733
ttattacggtat

SEQ ID NO: 359744 - DNA, 12 bp, Artificial Sequence
  Oligonucleotide primer for the detection of SNP TSC0051733
ccactacaatat

SEQ ID NO: 359745 - DNA, 12 bp, Artificial Sequence
  Oligonucleotide primer for the detection of SNP TSC0051733
ccactacgatat

SEQ ID NO: 359746 - DNA, 12 bp, Artificial Sequence
  Oligonucleotide primer for the detection of SNP TSC0051733
taaattatggta

SEQ ID NO: 359747 - DNA, 12 bp, Artificial Sequence
  Oligonukleotid-Primer
cataaacatata

SEQ ID NO: 359748 - DNA, 12 bp, Artificial Sequence
  Oligonucleotide primer for the detection of SNP TSC0051734
aattccatttct

SEQ ID NO: 359749 - DNA, 12 bp, Artificial Sequence
  Oligonucleotide primer for the detection of SNP TSC0051736
ccattcccactc

SEQ ID NO: 359750 - DNA, 12 bp, Artificial Sequence
  Oligonucleotide primer for the detection of SNP TSC0051736
tttgtagttgga

SEQ ID NO: 359751 - DNA, 12 bp, Artificial Sequence
  Oligonucleotide primer for the detection of SNP TSC0051736
ttcgtagttgga

SEQ ID NO: 359752 - DNA, 12 bp, Artificial Sequence
  Oligonucleotide primer for the detection of SNP TSC0051737
aatactccaaaa

SEQ ID NO: 359753 - DNA, 12 bp, Artificial Sequence
  Oligonucleotide primer for the detection of SNP TSC0051737
tctcataaacga

SEQ ID NO: 359754 - DNA, 12 bp, Artificial Sequence
  Oligonucleotide primer for the detection of SNP TSC0051737
aatattttaaag

SEQ ID NO: 359755 - DNA, 12 bp, Artificial Sequence
  Oligonucleotide primer for the detection of SNP TSC0051738
ctccaactacaa

SEQ ID NO: 359756 - DNA, 12 bp, Artificial Sequence
  Oligonucleotide primer for the detection of SNP TSC0051738
ctccaactacga

SEQ ID NO: 359757 - DNA, 12 bp, Artificial Sequence
  Oligonucleotide primer for the detection of SNP TSC0051738
ttggttaaggat

SEQ ID NO: 359758 - DNA, 12 bp, Artificial Sequence
  Oligonucleotide primer for the detection of SNP TSC0051738
ttggttaaggac

SEQ ID NO: 359759 - DNA, 12 bp, Artificial Sequence
  Oligonucleotide primer for the detection of SNP TSC0051738
ttttaattacga

SEQ ID NO: 359760 - DNA, 12 bp, Artificial Sequence
  Oligonucleotide primer for the detection of SNP TSC0051739
ctattaaacccc

SEQ ID NO: 359761 - DNA, 12 bp, Artificial Sequence
  Oligonucleotide primer for the detection of SNP TSC0051740
ctatcttaattt

SEQ ID NO: 359762 - DNA, 12 bp, Artificial Sequence
  Oligonucleotide primer for the detection of SNP TSC0051740
atagagtttaaa

SEQ ID NO: 359763 - DNA, 12 bp, Artificial Sequence
  Oligonucleotide primer for the detection of SNP TSC0051741
accaaccaaaaa

SEQ ID NO: 359764 - DNA, 12 bp, Artificial Sequence
  Oligonucleotide primer for the detection of SNP TSC0051741
tatgttgaggtt

SEQ ID NO: 359765 - DNA, 12 bp, Artificial Sequence
  Oligonucleotide primer for the detection of SNP TSC0051741
tatactaaaact

SEQ ID NO: 359766 - DNA, 12 bp, Artificial Sequence
  Oligonucleotide primer for the detection of SNP TSC0051741
agttaattagga

SEQ ID NO: 359767 - DNA, 12 bp, Artificial Sequence
  Oligonucleotide primer for the detection of SNP TSC0051743
tactattaaaca

SEQ ID NO: 359768 - DNA, 12 bp, Artificial Sequence
  Oligonucleotide primer for the detection of SNP TSC0051743
agattattagtt

SEQ ID NO: 359769 - DNA, 12 bp, Artificial Sequence
  Oligonucleotide primer for the detection of SNP TSC0051743
aaattactaacc

SEQ ID NO: 359770 - DNA, 12 bp, Artificial Sequence
  Oligonucleotide primer for the detection of SNP TSC0051743
tgttgttgggta

SEQ ID NO: 359771 - DNA, 12 bp, Artificial Sequence
  Oligonucleotide primer for the detection of SNP TSC0051744
aattatagatgt

SEQ ID NO: 359772 - DNA, 12 bp, Artificial Sequence
  Oligonucleotide primer for the detection of SNP TSC0051744
attataaatata

SEQ ID NO: 359773 - DNA, 12 bp, Artificial Sequence
  Oligonucleotide primer for the detection of SNP TSC0051744
atatgtatataa

SEQ ID NO: 359774 - DNA, 12 bp, Artificial Sequence
  Oligonucleotide primer for the detection of SNP TSC0051745
tacatattaaaa

SEQ ID NO: 359775 - DNA, 12 bp, Artificial Sequence
  Oligonucleotide primer for the detection of SNP TSC0051745
aattaatgggat

SEQ ID NO: 359776 - DNA, 12 bp, Artificial Sequence
  Oligonucleotide primer for the detection of SNP TSC0051745
ttaatatatatt

SEQ ID NO: 359777 - DNA, 12 bp, Artificial Sequence
  Oligonucleotide primer for the detection of SNP TSC0051746
ttagttggtgga

SEQ ID NO: 359778 - DNA, 12 bp, Artificial Sequence
  Oligonucleotide primer for the detection of SNP TSC0051748
ctacttattaat

SEQ ID NO: 359779 - DNA, 12 bp, Artificial Sequence
  Oligonucleotide primer for the detection of SNP TSC0051749
cactatcaaaat

SEQ ID NO: 359780 - DNA, 12 bp, Artificial Sequence
  Oligonucleotide primer for the detection of SNP TSC0051749
gttttaaggtta

SEQ ID NO: 359781 - DNA, 12 bp, Artificial Sequence
  Oligonucleotide primer for the detection of SNP TSC0051750
acttaacttcca

SEQ ID NO: 359782 - DNA, 12 bp, Artificial Sequence
  Oligonucleotide primer for the detection of SNP TSC0051750
aggtttagatat

SEQ ID NO: 359783 - DNA, 12 bp, Artificial Sequence
  Oligonucleotide primer for the detection of SNP TSC0051750
aggtttagatac

SEQ ID NO: 359784 - DNA, 12 bp, Artificial Sequence
  Oligonucleotide primer for the detection of SNP TSC0051755
tttcttaaattt

SEQ ID NO: 359785 - DNA, 12 bp, Artificial Sequence
  Oligonucleotide primer for the detection of SNP TSC0051759
agtaataaattt

SEQ ID NO: 359786 - DNA, 12 bp, Artificial Sequence
  Oligonucleotide primer for the detection of SNP TSC0051760
tacccattaaac

SEQ ID NO: 359787 - DNA, 12 bp, Artificial Sequence
  Oligonucleotide primer for the detection of SNP TSC0051760
ggagatggagag

SEQ ID NO: 359788 - DNA, 12 bp, Artificial Sequence
  Oligonucleotide primer for the detection of SNP TSC0051764
atttaaactatc

SEQ ID NO: 359789 - DNA, 12 bp, Artificial Sequence
  Oligonucleotide primer for the detection of SNP TSC0008946
aaaaactaacat

SEQ ID NO: 359790 - DNA, 12 bp, Artificial Sequence
  Oligonucleotide primer for the detection of SNP TSC0008946
aaaaactaacgt

SEQ ID NO: 359791 - DNA, 12 bp, Artificial Sequence
  Oligonucleotide primer for the detection of SNP TSC0008946
aggtggttggag

SEQ ID NO: 359792 - DNA, 12 bp, Artificial Sequence
  Oligonucleotide primer for the detection of SNP TSC0008947
cactacaaaaaa

SEQ ID NO: 359793 - DNA, 12 bp, Artificial Sequence
  Oligonucleotide primer for the detection of SNP TSC0008947
tgaggtagtatt

SEQ ID NO: 359794 - DNA, 12 bp, Artificial Sequence
  Oligonucleotide primer for the detection of SNP TSC0008947
actaaaacaaca

SEQ ID NO: 359795 - DNA, 12 bp, Artificial Sequence
  Oligonucleotide primer for the detection of SNP TSC0008947
gtattataaaaa

SEQ ID NO: 359796 - DNA, 12 bp, Artificial Sequence
  Oligonucleotide primer for the detection of SNP TSC0051765
cataattctctc

SEQ ID NO: 359797 - DNA, 12 bp, Artificial Sequence
  Oligonucleotide primer for the detection of SNP TSC0051765
agattttagtga

SEQ ID NO: 359798 - DNA, 12 bp, Artificial Sequence
  Oligonucleotide primer for the detection of SNP TSC0051767
gttttggatagt

SEQ ID NO: 359799 - DNA, 12 bp, Artificial Sequence
  Oligonucleotide primer for the detection of SNP TSC0051767
gttttggatagc

SEQ ID NO: 359800 - DNA, 12 bp, Artificial Sequence
  Oligonucleotide primer for the detection of SNP TSC0051767
tagaaggaatat

SEQ ID NO: 359801 - DNA, 12 bp, Artificial Sequence
  Oligonucleotide primer for the detection of SNP TSC0051768
aaataactccta

SEQ ID NO: 359802 - DNA, 12 bp, Artificial Sequence
  Oligonucleotide primer for the detection of SNP TSC0051768
aagttataagta

SEQ ID NO: 359803 - DNA, 12 bp, Artificial Sequence
  Oligonucleotide primer for the detection of SNP TSC0051768
aattacaaacaa

SEQ ID NO: 359804 - DNA, 12 bp, Artificial Sequence
  Oligonucleotide primer for the detection of SNP TSC0051768
aggatggttttt

SEQ ID NO: 359805 - DNA, 12 bp, Artificial Sequence
  Oligonucleotide primer for the detection of SNP TSC0051769
ataaactttata

SEQ ID NO: 359806 - DNA, 12 bp, Artificial Sequence
  Oligonucleotide primer for the detection of SNP TSC0051769
gaatttataagt

SEQ ID NO: 359807 - DNA, 12 bp, Artificial Sequence
  Oligonucleotide primer for the detection of SNP TSC0051769
atgaattttgtg

SEQ ID NO: 359808 - DNA, 12 bp, Artificial Sequence
  Oligonucleotide primer for the detection of SNP TSC0051770
taaaatataatt

SEQ ID NO: 359809 - DNA, 12 bp, Artificial Sequence
  Oligonucleotide primer for the detection of SNP TSC0051770
tttagtagtaga

SEQ ID NO: 359810 - DNA, 12 bp, Artificial Sequence
  Oligonucleotide primer for the detection of SNP TSC0051770
tgggatataatt

SEQ ID NO: 359811 - DNA, 12 bp, Artificial Sequence
  Oligonucleotide primer for the detection of SNP TSC0051772
tttctatattta

SEQ ID NO: 359812 - DNA, 12 bp, Artificial Sequence
  Oligonucleotide primer for the detection of SNP TSC0051772
agaatagatttt

SEQ ID NO: 359813 - DNA, 12 bp, Artificial Sequence
  Oligonucleotide primer for the detection of SNP TSC0051772
aaaataaacttc

SEQ ID NO: 359814 - DNA, 12 bp, Artificial Sequence
  Oligonucleotide primer for the detection of SNP TSC0051776
tagttaatatgg

SEQ ID NO: 359815 - DNA, 12 bp, Artificial Sequence
  Oligonucleotide primer for the detection of SNP TSC0051777
gggttaaggaaa

SEQ ID NO: 359816 - DNA, 12 bp, Artificial Sequence
  Oligonucleotide primer for the detection of SNP TSC0051781
actatcacatac

SEQ ID NO: 359817 - DNA, 12 bp, Artificial Sequence
  Oligonucleotide primer for the detection of SNP TSC0051781
actatcgcatac

SEQ ID NO: 359818 - DNA, 12 bp, Artificial Sequence
  Oligonucleotide primer for the detection of SNP TSC0051781
atgtttaaatta

SEQ ID NO: 359819 - DNA, 12 bp, Artificial Sequence
  Oligonucleotide primer for the detection of SNP TSC0051781
atacccaaatca

SEQ ID NO: 359820 - DNA, 12 bp, Artificial Sequence
  Oligonucleotide primer for the detection of SNP TSC0051781
attattgtatat

SEQ ID NO: 359821 - DNA, 12 bp, Artificial Sequence
  Oligonucleotide primer for the detection of SNP TSC0051781
attatcgtatat

SEQ ID NO: 359822 - DNA, 12 bp, Artificial Sequence
  Oligonucleotide primer for the detection of SNP TSC0051782
aattccaaacca

SEQ ID NO: 359823 - DNA, 12 bp, Artificial Sequence
  Oligonucleotide primer for the detection of SNP TSC0051782
gaagttgttggg

SEQ ID NO: 359824 - DNA, 12 bp, Artificial Sequence
  Oligonucleotide primer for the detection of SNP TSC0051783
taaaattagaaa

SEQ ID NO: 359825 - DNA, 12 bp, Artificial Sequence
  Oligonucleotide primer for the detection of SNP TSC0051784
aaaattctaacc

SEQ ID NO: 359826 - DNA, 12 bp, Artificial Sequence
  Oligonucleotide primer for the detection of SNP TSC0051784
gttgattgttag

SEQ ID NO: 359827 - DNA, 12 bp, Artificial Sequence
  Oligonucleotide primer for the detection of SNP TSC0051784
attaattaccaa

SEQ ID NO: 359828 - DNA, 12 bp, Artificial Sequence
  Oligonucleotide primer for the detection of SNP TSC0051785
aataaccttaac

SEQ ID NO: 359829 - DNA, 12 bp, Artificial Sequence
  Oligonucleotide primer for the detection of SNP TSC0051785
taactcaacaca

SEQ ID NO: 359830 - DNA, 12 bp, Artificial Sequence
  Oligonucleotide primer for the detection of SNP TSC0051785
gtggttttgatt

SEQ ID NO: 359831 - DNA, 12 bp, Artificial Sequence
  Oligonucleotide primer for the detection of SNP TSC0051786
tacttttaaaat

SEQ ID NO: 359832 - DNA, 12 bp, Artificial Sequence
  Oligonucleotide primer for the detection of SNP TSC0051786
tatttttaaaat

SEQ ID NO: 359833 - DNA, 12 bp, Artificial Sequence
  Oligonucleotide primer for the detection of SNP TSC0051788
taacattttatt

SEQ ID NO: 359834 - DNA, 12 bp, Artificial Sequence
  Oligonucleotide primer for the detection of SNP TSC0051788
attataaaaata

SEQ ID NO: 359835 - DNA, 12 bp, Artificial Sequence
  Oligonucleotide primer for the detection of SNP TSC0051789
aaaaccgaaaaa

SEQ ID NO: 359836 - DNA, 12 bp, Artificial Sequence
  Oligonucleotide primer for the detection of SNP TSC0051789
aaaattgaaaaa

SEQ ID NO: 359837 - DNA, 12 bp, Artificial Sequence
  Oligonucleotide primer for the detection of SNP TSC0051789
aaaatcgaaaaa

SEQ ID NO: 359838 - DNA, 12 bp, Artificial Sequence
  Oligonucleotide primer for the detection of SNP TSC0051791
aaagaaattgta

SEQ ID NO: 359839 - DNA, 12 bp, Artificial Sequence
  Oligonucleotide primer for the detection of SNP TSC0051792
aaaaccatctat

SEQ ID NO: 359840 - DNA, 12 bp, Artificial Sequence
  unsure (2): Oligonucleotide primer for the detection of SNP TSC0051793
anaaaatatttt

SEQ ID NO: 359841 - DNA, 12 bp, Artificial Sequence
  Oligonucleotide primer for the detection of SNP TSC0051795
tcctaactcctt

SEQ ID NO: 359842 - DNA, 12 bp, Artificial Sequence
  Oligonucleotide primer for the detection of SNP TSC0051795
ttatttcgttta

SEQ ID NO: 359843 - DNA, 12 bp, Artificial Sequence
  Oligonucleotide primer for the detection of SNP TSC0051796
ttctccttttct

SEQ ID NO: 359844 - DNA, 12 bp, Artificial Sequence
  Oligonucleotide primer for the detection of SNP TSC0051796
gtgattgagata

SEQ ID NO: 359845 - DNA, 12 bp, Artificial Sequence
  Oligonucleotide primer for the detection of SNP TSC0051797
aaatatatttaa

SEQ ID NO: 359846 - DNA, 12 bp, Artificial Sequence
  Oligonucleotide primer for the detection of SNP TSC0051797
agaagatattta

SEQ ID NO: 359847 - DNA, 12 bp, Artificial Sequence
  Oligonucleotide primer for the detection of SNP TSC0051800
aactaaatacct

SEQ ID NO: 359848 - DNA, 12 bp, Artificial Sequence
  Oligonucleotide primer for the detection of SNP TSC0051801
aaagtggtatat

SEQ ID NO: 359849 - DNA, 12 bp, Artificial Sequence
  Oligonucleotide primer for the detection of SNP TSC0051801
aaataacacata

SEQ ID NO: 359850 - DNA, 12 bp, Artificial Sequence
  Oligonucleotide primer for the detection of SNP TSC0051801
atggagtgattt

SEQ ID NO: 359851 - DNA, 12 bp, Artificial Sequence
  Oligonucleotide primer for the detection of SNP TSC0051804
acttttaaaatc

SEQ ID NO: 359852 - DNA, 12 bp, Artificial Sequence
  Oligonucleotide primer for the detection of SNP TSC0051804
agagaaaagaaa

SEQ ID NO: 359853 - DNA, 12 bp, Artificial Sequence
  Oligonucleotide primer for the detection of SNP TSC0006247
atccctatctaa

SEQ ID NO: 359854 - DNA, 12 bp, Artificial Sequence
  Oligonucleotide primer for the detection of SNP TSC0006247
caacaatacctt

SEQ ID NO: 359855 - DNA, 12 bp, Artificial Sequence
  Oligonucleotide primer for the detection of SNP TSC0006247
atttttgtttag

SEQ ID NO: 359856 - DNA, 12 bp, Artificial Sequence
  Oligonucleotide primer for the detection of SNP TSC0051807
aagtatattaaa

SEQ ID NO: 359857 - DNA, 12 bp, Artificial Sequence
  Oligonucleotide primer for the detection of SNP TSC0051808
ggtagtggttta

SEQ ID NO: 359858 - DNA, 12 bp, Artificial Sequence
  Oligonucleotide primer for the detection of SNP TSC0051809
ggtaaggtttgg

SEQ ID NO: 359859 - DNA, 12 bp, Artificial Sequence
  Oligonucleotide primer for the detection of SNP TSC0051810
ctccaaaaatat

SEQ ID NO: 359860 - DNA, 12 bp, Artificial Sequence
  Oligonucleotide primer for the detection of SNP TSC0051810
gagaataatatt

SEQ ID NO: 359861 - DNA, 12 bp, Artificial Sequence
  Oligonucleotide primer for the detection of SNP TSC0051810
aaaaacaacact

SEQ ID NO: 359862 - DNA, 12 bp, Artificial Sequence
  Oligonucleotide primer for the detection of SNP TSC0051810
ttttagggatat

SEQ ID NO: 359863 - DNA, 12 bp, Artificial Sequence
  Oligonucleotide primer for the detection of SNP TSC0051812
ttctctttactc

SEQ ID NO: 359864 - DNA, 12 bp, Artificial Sequence
  Oligonucleotide primer for the detection of SNP TSC0051812
tataaattattg

SEQ ID NO: 359865 - DNA, 12 bp, Artificial Sequence
  Oligonucleotide primer for the detection of SNP TSC0051814
ttgatatggtta

SEQ ID NO: 359866 - DNA, 12 bp, Artificial Sequence
  Oligonucleotide primer for the detection of SNP TSC0051816
atattaccacta

SEQ ID NO: 359867 - DNA, 12 bp, Artificial Sequence
  Oligonucleotide primer for the detection of SNP TSC0051816
aagtgttattag

SEQ ID NO: 359868 - DNA, 12 bp, Artificial Sequence
  Oligonucleotide primer for the detection of SNP TSC0051817
tatccaaatatt

SEQ ID NO: 359869 - DNA, 12 bp, Artificial Sequence
  Oligonucleotide primer for the detection of SNP TSC0051817
tatccgaatatt

SEQ ID NO: 359870 - DNA, 12 bp, Artificial Sequence
  Oligonucleotide primer for the detection of SNP TSC0051817
aaatagtggtaa

SEQ ID NO: 359871 - DNA, 12 bp, Artificial Sequence
  Oligonucleotide primer for the detection of SNP TSC0051818
aacttacacact

SEQ ID NO: 359872 - DNA, 12 bp, Artificial Sequence
  Oligonucleotide primer for the detection of SNP TSC0051818
ttttaaaagttg

SEQ ID NO: 359873 - DNA, 12 bp, Artificial Sequence
  Oligonucleotide primer for the detection of SNP TSC0051819
atacttattata

SEQ ID NO: 359874 - DNA, 12 bp, Artificial Sequence
  Oligonucleotide primer for the detection of SNP TSC0051819
ttaaataatata

SEQ ID NO: 359875 - DNA, 12 bp, Artificial Sequence
  Oligonucleotide primer for the detection of SNP TSC0051821
ctaaataatatt

SEQ ID NO: 359876 - DNA, 12 bp, Artificial Sequence
  Oligonucleotide primer for the detection of SNP TSC0051821
gatttataaaag

SEQ ID NO: 359877 - DNA, 12 bp, Artificial Sequence
  Oligonucleotide primer for the detection of SNP TSC0051822
tacccacacaca

SEQ ID NO: 359878 - DNA, 12 bp, Artificial Sequence
  Oligonucleotide primer for the detection of SNP TSC0051822
aagtattttttt

SEQ ID NO: 359879 - DNA, 12 bp, Artificial Sequence
  Oligonucleotide primer for the detection of SNP TSC0051822
tgtttatatata

SEQ ID NO: 359880 - DNA, 12 bp, Artificial Sequence
  Oligonucleotide primer for the detection of SNP TSC0051823
atcattttacaa

SEQ ID NO: 359881 - DNA, 12 bp, Artificial Sequence
  Oligonucleotide primer for the detection of SNP TSC0051823
ttttgtattaat

SEQ ID NO: 359882 - DNA, 12 bp, Artificial Sequence
  Oligonucleotide primer for the detection of SNP TSC0051823
ttctacatcaat

SEQ ID NO: 359883 - DNA, 12 bp, Artificial Sequence
  Oligonucleotide primer for the detection of SNP TSC0051824
ctataatatatc

SEQ ID NO: 359884 - DNA, 12 bp, Artificial Sequence
  Oligonucleotide primer for the detection of SNP TSC0051824
ttaatatgttgt

SEQ ID NO: 359885 - DNA, 12 bp, Artificial Sequence
  Oligonucleotide primer for the detection of SNP TSC0051824
tatattacaaaa

SEQ ID NO: 359886 - DNA, 12 bp, Artificial Sequence
  Oligonucleotide primer for the detection of SNP TSC0051824
ttatgatgtgtt

SEQ ID NO: 359887 - DNA, 12 bp, Artificial Sequence
  Oligonucleotide primer for the detection of SNP TSC0051828
aataaccatcac

SEQ ID NO: 359888 - DNA, 12 bp, Artificial Sequence
  Oligonucleotide primer for the detection of SNP TSC0051828
aataaccatcgc

SEQ ID NO: 359889 - DNA, 12 bp, Artificial Sequence
  Oligonucleotide primer for the detection of SNP TSC0051828
tagttaaaaggt

SEQ ID NO: 359890 - DNA, 12 bp, Artificial Sequence
  Oligonucleotide primer for the detection of SNP TSC0051828
taaccaaaaaac

SEQ ID NO: 359891 - DNA, 12 bp, Artificial Sequence
  Oligonucleotide primer for the detection of SNP TSC0051828
gataattattgt

SEQ ID NO: 359892 - DNA, 12 bp, Artificial Sequence
  Oligonucleotide primer for the detection of SNP TSC0051828
gataattatcgt

SEQ ID NO: 359893 - DNA, 12 bp, Artificial Sequence
  Oligonucleotide primer for the detection of SNP TSC0005270
attatcttttct

SEQ ID NO: 359894 - DNA, 12 bp, Artificial Sequence
  Oligonucleotide primer for the detection of SNP TSC0005270
tattattatatg

SEQ ID NO: 359895 - DNA, 12 bp, Artificial Sequence
  Oligonucleotide primer for the detection of SNP TSC0051830
actttaatctct

SEQ ID NO: 359896 - DNA, 12 bp, Artificial Sequence
  Oligonucleotide primer for the detection of SNP TSC0051830
ttttgaaataag

SEQ ID NO: 359897 - DNA, 12 bp, Artificial Sequence
  Oligonucleotide primer for the detection of SNP TSC0051831
atttattctttt

SEQ ID NO: 359898 - DNA, 12 bp, Artificial Sequence
  Oligonucleotide primer for the detection of SNP TSC0051833
caatcacccccc

SEQ ID NO: 359899 - DNA, 12 bp, Artificial Sequence
  Oligonucleotide primer for the detection of SNP TSC0051834
aatctccttacc

SEQ ID NO: 359900 - DNA, 12 bp, Artificial Sequence
  Oligonucleotide primer for the detection of SNP TSC0051834
gattagagaatg

SEQ ID NO: 359901 - DNA, 12 bp, Artificial Sequence
  Oligonucleotide primer for the detection of SNP TSC0051835
aatacaatatat

SEQ ID NO: 359902 - DNA, 12 bp, Artificial Sequence
  Oligonucleotide primer for the detection of SNP TSC0051835
tagttgtaagga

SEQ ID NO: 359903 - DNA, 12 bp, Artificial Sequence
  Oligonucleotide primer for the detection of SNP TSC0051836
gaatatatattg

SEQ ID NO: 359904 - DNA, 12 bp, Artificial Sequence
  Oligonucleotide primer for the detection of SNP TSC0051836
tagatattaagt

SEQ ID NO: 359905 - DNA, 12 bp, Artificial Sequence
  Oligonucleotide primer for the detection of SNP TSC0007161
ggtgtagtttat

SEQ ID NO: 359906 - DNA, 12 bp, Artificial Sequence
  Oligonucleotide primer for the detection of SNP TSC0007161
aatacaatccac

SEQ ID NO: 359907 - DNA, 12 bp, Artificial Sequence
  Oligonucleotide primer for the detection of SNP TSC0007161
tataaaaatagg

SEQ ID NO: 359908 - DNA, 12 bp, Artificial Sequence
  Oligonucleotide primer for the detection of SNP TSC0007363
ctacatcaactt

SEQ ID NO: 359909 - DNA, 12 bp, Artificial Sequence
  Oligonucleotide primer for the detection of SNP TSC0051837
taaccacatatc

SEQ ID NO: 359910 - DNA, 12 bp, Artificial Sequence
  Oligonucleotide primer for the detection of SNP TSC0051838
tataaattctat

SEQ ID NO: 359911 - DNA, 12 bp, Artificial Sequence
  Oligonucleotide primer for the detection of SNP TSC0051838
ataggaatgttg

SEQ ID NO: 359912 - DNA, 12 bp, Artificial Sequence
  Oligonucleotide primer for the detection of SNP TSC0006118
tacactaattaa

SEQ ID NO: 359913 - DNA, 12 bp, Artificial Sequence
  Oligonucleotide primer for the detection of SNP TSC0006118
gatttattgttg

SEQ ID NO: 359914 - DNA, 12 bp, Artificial Sequence
  Oligonucleotide primer for the detection of SNP TSC0006118
aatccattacta

SEQ ID NO: 359915 - DNA, 12 bp, Artificial Sequence
  Oligonucleotide primer for the detection of SNP TSC0006118
tatattagttaa

SEQ ID NO: 359916 - DNA, 12 bp, Artificial Sequence
  Oligonucleotide primer for the detection of SNP TSC0051839
aaggattttaat

SEQ ID NO: 359917 - DNA, 12 bp, Artificial Sequence
  Oligonucleotide primer for the detection of SNP TSC0051839
aaggattttaac

SEQ ID NO: 359918 - DNA, 12 bp, Artificial Sequence
  Oligonucleotide primer for the detection of SNP TSC0051839
gggaggtgtatt

SEQ ID NO: 359919 - DNA, 12 bp, Artificial Sequence
  Oligonucleotide primer for the detection of SNP TSC0051842
atctatatctat

SEQ ID NO: 359920 - DNA, 12 bp, Artificial Sequence
  Oligonucleotide primer for the detection of SNP TSC0051842
gatagatataga

SEQ ID NO: 359921 - DNA, 12 bp, Artificial Sequence
  Oligonucleotide primer for the detection of SNP TSC0051843
tatctaaatatt

SEQ ID NO: 359922 - DNA, 12 bp, Artificial Sequence
  Oligonucleotide primer for the detection of SNP TSC0051843
agtattttggag

SEQ ID NO: 359923 - DNA, 12 bp, Artificial Sequence
  Oligonucleotide primer for the detection of SNP TSC0051845
tttgttttgatt

SEQ ID NO: 359924 - DNA, 12 bp, Artificial Sequence
  Oligonucleotide primer for the detection of SNP TSC0051845
ttcgttttgatt

SEQ ID NO: 359925 - DNA, 12 bp, Artificial Sequence
  Oligonucleotide primer for the detection of SNP TSC0051845
atccatcttaac

SEQ ID NO: 359926 - DNA, 12 bp, Artificial Sequence
  Oligonucleotide primer for the detection of SNP TSC0051845
atccgtcttaac

SEQ ID NO: 359927 - DNA, 12 bp, Artificial Sequence
  Oligonucleotide primer for the detection of SNP TSC0051845
ataaatgaagtt

SEQ ID NO: 359928 - DNA, 12 bp, Artificial Sequence
  Oligonucleotide primer for the detection of SNP TSC0051846
ccacctttatat

SEQ ID NO: 359929 - DNA, 12 bp, Artificial Sequence
  Oligonucleotide primer for the detection of SNP TSC0051846
gttattattaag

SEQ ID NO: 359930 - DNA, 12 bp, Artificial Sequence
  Oligonucleotide primer for the detection of SNP TSC0051848
aaacacactata

SEQ ID NO: 359931 - DNA, 12 bp, Artificial Sequence
  Oligonucleotide primer for the detection of SNP TSC0051848
tagaagtaatgg

SEQ ID NO: 359932 - DNA, 12 bp, Artificial Sequence
  Oligonucleotide primer for the detection of SNP TSC0051849
accaacaacaat

SEQ ID NO: 359933 - DNA, 12 bp, Artificial Sequence
  Oligonucleotide primer for the detection of SNP TSC0051849
accgacaacaat

SEQ ID NO: 359934 - DNA, 12 bp, Artificial Sequence
  Oligonucleotide primer for the detection of SNP TSC0051849
gaaatagttttt

SEQ ID NO: 359935 - DNA, 12 bp, Artificial Sequence
  Oligonucleotide primer for the detection of SNP TSC0051849
aaaacaaccccc

SEQ ID NO: 359936 - DNA, 12 bp, Artificial Sequence
  Oligonucleotide primer for the detection of SNP TSC0051849
gttggtaatagt

SEQ ID NO: 359937 - DNA, 12 bp, Artificial Sequence
  Oligonucleotide primer for the detection of SNP TSC0051849
gtcggtaatagt

SEQ ID NO: 359938 - DNA, 12 bp, Artificial Sequence
  Oligonucleotide primer for the detection of SNP TSC0051853
ataaatacacta

SEQ ID NO: 359939 - DNA, 12 bp, Artificial Sequence
  Oligonucleotide primer for the detection of SNP TSC0051853
attgtataggtt

SEQ ID NO: 359940 - DNA, 12 bp, Artificial Sequence
  Oligonucleotide primer for the detection of SNP TSC0051853
ctacacaaacta

SEQ ID NO: 359941 - DNA, 12 bp, Artificial Sequence
  Oligonucleotide primer for the detection of SNP TSC0051853
taaatatattat

SEQ ID NO: 359942 - DNA, 12 bp, Artificial Sequence
  Oligonucleotide primer for the detection of SNP TSC0051854
accacttacacc

SEQ ID NO: 359943 - DNA, 12 bp, Artificial Sequence
  Oligonucleotide primer for the detection of SNP TSC0051854
tattgggagttg

SEQ ID NO: 359944 - DNA, 12 bp, Artificial Sequence
  Oligonucleotide primer for the detection of SNP TSC0051854
cactaaaaacta

SEQ ID NO: 359945 - DNA, 12 bp, Artificial Sequence
  Oligonucleotide primer for the detection of SNP TSC0051854
gttatttatatt

SEQ ID NO: 359946 - DNA, 12 bp, Artificial Sequence
  Oligonucleotide primer for the detection of SNP TSC0051856
actaataacttt

SEQ ID NO: 359947 - DNA, 12 bp, Artificial Sequence
  Oligonucleotide primer for the detection of SNP TSC0051856
tagttaatgtgg

SEQ ID NO: 359948 - DNA, 12 bp, Artificial Sequence
  Oligonucleotide primer for the detection of SNP TSC0051857
acaataacacct

SEQ ID NO: 359949 - DNA, 12 bp, Artificial Sequence
  Oligonucleotide primer for the detection of SNP TSC0051857
acgataacacct

SEQ ID NO: 359950 - DNA, 12 bp, Artificial Sequence
  Oligonucleotide primer for the detection of SNP TSC0051857
ttttgtattgag

SEQ ID NO: 359951 - DNA, 12 bp, Artificial Sequence
  Oligonucleotide primer for the detection of SNP TSC0051857
ttttgtatcgag

SEQ ID NO: 359952 - DNA, 12 bp, Artificial Sequence
  Oligonucleotide primer for the detection of SNP TSC0010403
caaactctaaac

SEQ ID NO: 359953 - DNA, 12 bp, Artificial Sequence
  Oligonucleotide primer for the detection of SNP TSC0010403
cgaactctaaac

SEQ ID NO: 359954 - DNA, 12 bp, Artificial Sequence
  Oligonucleotide primer for the detection of SNP TSC0010403
aatagttgtatg

SEQ ID NO: 359955 - DNA, 12 bp, Artificial Sequence
  Oligonucleotide primer for the detection of SNP TSC0010403
acaattacataa

SEQ ID NO: 359956 - DNA, 12 bp, Artificial Sequence
  Oligonucleotide primer for the detection of SNP TSC0010403
tgaattttggat

SEQ ID NO: 359957 - DNA, 12 bp, Artificial Sequence
  Oligonucleotide primer for the detection of SNP TSC0010403
cgaattttggat

SEQ ID NO: 359958 - DNA, 12 bp, Artificial Sequence
  Oligonucleotide primer for the detection of SNP TSC0051858
aatatttcctat

SEQ ID NO: 359959 - DNA, 12 bp, Artificial Sequence
  Oligonucleotide primer for the detection of SNP TSC0051858
gattaatttata

SEQ ID NO: 359960 - DNA, 12 bp, Artificial Sequence
  Oligonucleotide primer for the detection of SNP TSC0051858
aactaatttata

SEQ ID NO: 359961 - DNA, 12 bp, Artificial Sequence
  Oligonucleotide primer for the detection of SNP TSC0051858
aatgttttttat

SEQ ID NO: 359962 - DNA, 12 bp, Artificial Sequence
  Oligonucleotide primer for the detection of SNP TSC0051859
ttacatccccat

SEQ ID NO: 359963 - DNA, 12 bp, Artificial Sequence
  Oligonucleotide primer for the detection of SNP TSC0051859
gttgggtttatt

SEQ ID NO: 359964 - DNA, 12 bp, Artificial Sequence
  Oligonucleotide primer for the detection of SNP TSC0051864
attaacaaaaat

SEQ ID NO: 359965 - DNA, 12 bp, Artificial Sequence
  Oligonucleotide primer for the detection of SNP TSC0051864
ttcccaatatac

SEQ ID NO: 359966 - DNA, 12 bp, Artificial Sequence
  Oligonucleotide primer for the detection of SNP TSC0051864
attaatagagat

SEQ ID NO: 359967 - DNA, 12 bp, Artificial Sequence
  Oligonucleotide primer for the detection of SNP TSC0051865
acaatctctatt

SEQ ID NO: 359968 - DNA, 12 bp, Artificial Sequence
  Oligonucleotide primer for the detection of SNP TSC0051865
ttttgtaatgag

SEQ ID NO: 359969 - DNA, 12 bp, Artificial Sequence
  Oligonucleotide primer for the detection of SNP TSC0051866
atctacatataa

SEQ ID NO: 359970 - DNA, 12 bp, Artificial Sequence
  Oligonucleotide primer for the detection of SNP TSC0051866
atttatttatat

SEQ ID NO: 359971 - DNA, 12 bp, Artificial Sequence
  Oligonucleotide primer for the detection of SNP TSC0051866
acttatctacac

SEQ ID NO: 359972 - DNA, 12 bp, Artificial Sequence
  Oligonucleotide primer for the detection of SNP TSC0051866
atttgtatgtaa

SEQ ID NO: 359973 - DNA, 12 bp, Artificial Sequence
  Oligonucleotide primer for the detection of SNP TSC0051867
caataacccaac

SEQ ID NO: 359974 - DNA, 12 bp, Artificial Sequence
  Oligonucleotide primer for the detection of SNP TSC0051867
gtataggattta

SEQ ID NO: 359975 - DNA, 12 bp, Artificial Sequence
  Oligonucleotide primer for the detection of SNP TSC0051868
ggtagttaaagg

SEQ ID NO: 359976 - DNA, 12 bp, Artificial Sequence
  Oligonucleotide primer for the detection of SNP TSC0051869
acccaatataat

SEQ ID NO: 359977 - DNA, 12 bp, Artificial Sequence
  Oligonucleotide primer for the detection of SNP TSC0051870
agaagtagagta

SEQ ID NO: 359978 - DNA, 12 bp, Artificial Sequence
  Oligonucleotide primer for the detection of SNP TSC0051872
caaatctcatat

SEQ ID NO: 359979 - DNA, 12 bp, Artificial Sequence
  Oligonucleotide primer for the detection of SNP TSC0051872
gggattatagtt

SEQ ID NO: 359980 - DNA, 12 bp, Artificial Sequence
  Oligonucleotide primer for the detection of SNP TSC0051872
aaattttatgtt

SEQ ID NO: 359981 - DNA, 12 bp, Artificial Sequence
  Oligonucleotide primer for the detection of SNP TSC0051873
attaaatgtttt

SEQ ID NO: 359982 - DNA, 12 bp, Artificial Sequence
  Oligonucleotide primer for the detection of SNP TSC0051873
atcaaatacttt

SEQ ID NO: 359983 - DNA, 12 bp, Artificial Sequence
  Oligonucleotide primer for the detection of SNP TSC0051873
taatagattttg

SEQ ID NO: 359984 - DNA, 12 bp, Artificial Sequence
  Oligonucleotide primer for the detection of SNP TSC0051878
aataccaaaaat

SEQ ID NO: 359985 - DNA, 12 bp, Artificial Sequence
  Oligonucleotide primer for the detection of SNP TSC0051878
atgaggtgtttt

SEQ ID NO: 359986 - DNA, 12 bp, Artificial Sequence
  Oligonucleotide primer for the detection of SNP TSC0051878
atgaggtgtttc

SEQ ID NO: 359987 - DNA, 12 bp, Artificial Sequence
  Oligonucleotide primer for the detection of SNP TSC0051878
aataaaatactt

SEQ ID NO: 359988 - DNA, 12 bp, Artificial Sequence
  Oligonucleotide primer for the detection of SNP TSC0006469
cttcaaaattct

SEQ ID NO: 359989 - DNA, 12 bp, Artificial Sequence
  Oligonucleotide primer for the detection of SNP TSC0006469
gggaagtaatga

SEQ ID NO: 359990 - DNA, 12 bp, Artificial Sequence
  Oligonucleotide primer for the detection of SNP TSC0051879
tttaaaaaaccc

SEQ ID NO: 359991 - DNA, 12 bp, Artificial Sequence
  Oligonucleotide primer for the detection of SNP TSC0051879
taggtttggtaa

SEQ ID NO: 359992 - DNA, 12 bp, Artificial Sequence
  Oligonucleotide primer for the detection of SNP TSC0051879
taggttcggtaa

SEQ ID NO: 359993 - DNA, 12 bp, Artificial Sequence
  Oligonucleotide primer for the detection of SNP TSC0051880
attatacatact

SEQ ID NO: 359994 - DNA, 12 bp, Artificial Sequence
  Oligonucleotide primer for the detection of SNP TSC0051880
tttgagtatgta

SEQ ID NO: 359995 - DNA, 12 bp, Artificial Sequence
  Oligonucleotide primer for the detection of SNP TSC0051880
tttgagtacgta

SEQ ID NO: 359996 - DNA, 12 bp, Artificial Sequence
  Oligonucleotide primer for the detection of SNP TSC0051883
atacataaaatc

SEQ ID NO: 359997 - DNA, 12 bp, Artificial Sequence
  Oligonucleotide primer for the detection of SNP TSC0010103
ccaatcctcact

SEQ ID NO: 359998 - DNA, 12 bp, Artificial Sequence
  Oligonucleotide primer for the detection of SNP TSC0010103
ccaatcctcgct

SEQ ID NO: 359999 - DNA, 12 bp, Artificial Sequence
  Oligonucleotide primer for the detection of SNP TSC0010103
gtgaaggatatg

SEQ ID NO: 360000 - DNA, 12 bp, Artificial Sequence
  Oligonucleotide primer for the detection of SNP TSC0051885
agggtgtggttt

SEQ ID NO: 360001 - DNA, 12 bp, Artificial Sequence
  Oligonucleotide primer for the detection of SNP TSC0051885
ataagtagatag

SEQ ID NO: 360002 - DNA, 12 bp, Artificial Sequence
  Oligonucleotide primer for the detection of SNP TSC0051886
gagatattaaat

SEQ ID NO: 360003 - DNA, 12 bp, Artificial Sequence
  Oligonucleotide primer for the detection of SNP TSC0051886
aaaatattaaac

SEQ ID NO: 360004 - DNA, 12 bp, Artificial Sequence
  Oligonukleotid-Primer
atttttattagg

SEQ ID NO: 360005 - DNA, 12 bp, Artificial Sequence
  Oligonucleotide primer for the detection of SNP TSC0051887
ttagaattttta

SEQ ID NO: 360006 - DNA, 12 bp, Artificial Sequence
  Oligonucleotide primer for the detection of SNP TSC0051887
gaagagattatt

SEQ ID NO: 360007 - DNA, 12 bp, Artificial Sequence
  Oligonucleotide primer for the detection of SNP TSC0051888
cataatacaatt

SEQ ID NO: 360008 - DNA, 12 bp, Artificial Sequence
  Oligonucleotide primer for the detection of SNP TSC0051889
tcatataaccct

SEQ ID NO: 360009 - DNA, 12 bp, Artificial Sequence
  Oligonucleotide primer for the detection of SNP TSC0051889
agtggtggtggg

SEQ ID NO: 360010 - DNA, 12 bp, Artificial Sequence
  Oligonucleotide primer for the detection of SNP TSC0051889
ttatgtagtttt

SEQ ID NO: 360011 - DNA, 12 bp, Artificial Sequence
  Oligonucleotide primer for the detection of SNP TSC0007017
taacattttaaa

SEQ ID NO: 360012 - DNA, 12 bp, Artificial Sequence
  Oligonukleotid-Primer
aataattgtgtt

SEQ ID NO: 360013 - DNA, 12 bp, Artificial Sequence
  Oligonucleotide primer for the detection of SNP TSC0007017
aacaattatatt

SEQ ID NO: 360014 - DNA, 12 bp, Artificial Sequence
  Oligonucleotide primer for the detection of SNP TSC0007017
tggtattttgaa

SEQ ID NO: 360015 - DNA, 12 bp, Artificial Sequence
  Oligonucleotide primer for the detection of SNP TSC0007018
attactacaatt

SEQ ID NO: 360016 - DNA, 12 bp, Artificial Sequence
  Oligonucleotide primer for the detection of SNP TSC0007018
atatagatatta

SEQ ID NO: 360017 - DNA, 12 bp, Artificial Sequence
  Oligonucleotide primer for the detection of SNP TSC0007019
ataatttagaaa

SEQ ID NO: 360018 - DNA, 12 bp, Artificial Sequence
  Oligonucleotide primer for the detection of SNP TSC0051890
caaaacttatac

SEQ ID NO: 360019 - DNA, 12 bp, Artificial Sequence
  Oligonucleotide primer for the detection of SNP TSC0051890
attatttagaga

SEQ ID NO: 360020 - DNA, 12 bp, Artificial Sequence
  Oligonukleotid-Primer
aacaacccaaat

SEQ ID NO: 360021 - DNA, 12 bp, Artificial Sequence
  Oligonucleotide primer for the detection of SNP TSC0001746
ttggtttaaaag

SEQ ID NO: 360022 - DNA, 12 bp, Artificial Sequence
  Oligonucleotide primer for the detection of SNP TSC0000317
ctaaacattaat

SEQ ID NO: 360023 - DNA, 12 bp, Artificial Sequence
  Oligonucleotide primer for the detection of SNP TSC0051891
ttattattattt

SEQ ID NO: 360024 - DNA, 12 bp, Artificial Sequence
  Oligonukleotid-Primer
ctatcattattc

SEQ ID NO: 360025 - DNA, 12 bp, Artificial Sequence
  Oligonucleotide primer for the detection of SNP TSC0051891
attgagagggag

SEQ ID NO: 360026 - DNA, 12 bp, Artificial Sequence
  Oligonucleotide primer for the detection of SNP TSC0051893
aaacaaatcaat

SEQ ID NO: 360027 - DNA, 12 bp, Artificial Sequence
  Oligonucleotide primer for the detection of SNP TSC0051893
aattgagattta

SEQ ID NO: 360028 - DNA, 12 bp, Artificial Sequence
  Oligonukleotid-Primer
taataaattttt

SEQ ID NO: 360029 - DNA, 12 bp, Artificial Sequence
  Oligonucleotide primer for the detection of SNP TSC0008246
taaagtattagt

SEQ ID NO: 360030 - DNA, 12 bp, Artificial Sequence
  Oligonucleotide primer for the detection of SNP TSC0008246
tggtagattttt

SEQ ID NO: 360031 - DNA, 12 bp, Artificial Sequence
  Oligonucleotide primer for the detection of SNP TSC0051894
tagagtagttta

SEQ ID NO: 360032 - DNA, 12 bp, Artificial Sequence
  Oligonukleotid-Primer
attaatttaatt

SEQ ID NO: 360033 - DNA, 12 bp, Artificial Sequence
  Oligonucleotide primer for the detection of SNP TSC0051895
attaggaataaa

SEQ ID NO: 360034 - DNA, 12 bp, Artificial Sequence
  Oligonucleotide primer for the detection of SNP TSC0051895
attagtttaatt

SEQ ID NO: 360035 - DNA, 12 bp, Artificial Sequence
  Oligonucleotide primer for the detection of SNP TSC0051896
tatataatactt

SEQ ID NO: 360036 - DNA, 12 bp, Artificial Sequence
  Oligonucleotide primer for the detection of SNP TSC0051896
attatggttttg

SEQ ID NO: 360037 - DNA, 12 bp, Artificial Sequence
  Oligonucleotide primer for the detection of SNP TSC0009711
cctttccccaac

SEQ ID NO: 360038 - DNA, 12 bp, Artificial Sequence
  Oligonucleotide primer for the detection of SNP TSC0009711
ttgataatagta

SEQ ID NO: 360039 - DNA, 12 bp, Artificial Sequence
  Oligonucleotide primer for the detection of SNP TSC0051897
ttttatttaagt

SEQ ID NO: 360040 - DNA, 12 bp, Artificial Sequence
  Oligonucleotide primer for the detection of SNP TSC0051897
ttcatccaaata

SEQ ID NO: 360041 - DNA, 12 bp, Artificial Sequence
  Oligonucleotide primer for the detection of SNP TSC0051897
tgaaaattgttt

SEQ ID NO: 360042 - DNA, 12 bp, Artificial Sequence
  Oligonucleotide primer for the detection of SNP TSC0051898
atcaaaaaaaat

SEQ ID NO: 360043 - DNA, 12 bp, Artificial Sequence
  Oligonucleotide primer for the detection of SNP TSC0051898
atcgaaaaaaat

SEQ ID NO: 360044 - DNA, 12 bp, Artificial Sequence
  Oligonucleotide primer for the detection of SNP TSC0051898
tataggtgttta

SEQ ID NO: 360045 - DNA, 12 bp, Artificial Sequence
  Oligonucleotide primer for the detection of SNP TSC0051899
aaaccttacaat

SEQ ID NO: 360046 - DNA, 12 bp, Artificial Sequence
  Oligonucleotide primer for the detection of SNP TSC0051899
ttatggtgtata

SEQ ID NO: 360047 - DNA, 12 bp, Artificial Sequence
  Oligonucleotide primer for the detection of SNP TSC0051900
taatttgaattg

SEQ ID NO: 360048 - DNA, 12 bp, Artificial Sequence
  Oligonucleotide primer for the detection of SNP TSC0051901
ttgtaaatttaa

SEQ ID NO: 360049 - DNA, 12 bp, Artificial Sequence
  Oligonucleotide primer for the detection of SNP TSC0000592
aataaacttaat

SEQ ID NO: 360050 - DNA, 12 bp, Artificial Sequence
  Oligonucleotide primer for the detection of SNP TSC0000592
aattggttagga

SEQ ID NO: 360051 - DNA, 12 bp, Artificial Sequence
  Oligonucleotide primer for the detection of SNP TSC0051902
tctatctaatcc

SEQ ID NO: 360052 - DNA, 12 bp, Artificial Sequence
  Oligonucleotide primer for the detection of SNP TSC0051902
aaaagtaaatgg

SEQ ID NO: 360053 - DNA, 12 bp, Artificial Sequence
  Oligonucleotide primer for the detection of SNP TSC0051903
ttaaacattaac

SEQ ID NO: 360054 - DNA, 12 bp, Artificial Sequence
  Oligonucleotide primer for the detection of SNP TSC0051903
gatatagtgggg

SEQ ID NO: 360055 - DNA, 12 bp, Artificial Sequence
  Oligonucleotide primer for the detection of SNP TSC0051903
cacaataaaaaa

SEQ ID NO: 360056 - DNA, 12 bp, Artificial Sequence
  Oligonucleotide primer for the detection of SNP TSC0051903
tagatattagtt

SEQ ID NO: 360057 - DNA, 12 bp, Artificial Sequence
  Oligonucleotide primer for the detection of SNP TSC0051905
ccctacctttaa

SEQ ID NO: 360058 - DNA, 12 bp, Artificial Sequence
  Oligonucleotide primer for the detection of SNP TSC0051905
ttatagaaggag

SEQ ID NO: 360059 - DNA, 12 bp, Artificial Sequence
  Oligonucleotide primer for the detection of SNP TSC0007107
aaattccttctt

SEQ ID NO: 360060 - DNA, 12 bp, Artificial Sequence
  Oligonucleotide primer for the detection of SNP TSC0007107
ggtgtggggaat

SEQ ID NO: 360061 - DNA, 12 bp, Artificial Sequence
  Oligonucleotide primer for the detection of SNP TSC0007107
aatataaaaaac

SEQ ID NO: 360062 - DNA, 12 bp, Artificial Sequence
  Oligonucleotide primer for the detection of SNP TSC0007108
taaccttattct

SEQ ID NO: 360063 - DNA, 12 bp, Artificial Sequence
  Oligonucleotide primer for the detection of SNP TSC0007108
taagattggaaa

SEQ ID NO: 360064 - DNA, 12 bp, Artificial Sequence
  Oligonucleotide primer for the detection of SNP TSC0010069
tctcaactaatc

SEQ ID NO: 360065 - DNA, 12 bp, Artificial Sequence
  Oligonucleotide primer for the detection of SNP TSC0010069
aaatagtatggt

SEQ ID NO: 360066 - DNA, 12 bp, Artificial Sequence
  Oligonucleotide primer for the detection of SNP TSC0010069
aacaacataaca

SEQ ID NO: 360067 - DNA, 12 bp, Artificial Sequence
  Oligonucleotide primer for the detection of SNP TSC0010069
ttttagttgatt

SEQ ID NO: 360068 - DNA, 12 bp, Artificial Sequence
  Oligonucleotide primer for the detection of SNP TSC0010069
ttttagttgatc

SEQ ID NO: 360069 - DNA, 12 bp, Artificial Sequence
  Oligonucleotide primer for the detection of SNP TSC0051906
ttataacaaaca

SEQ ID NO: 360070 - DNA, 12 bp, Artificial Sequence
  Oligonucleotide primer for the detection of SNP TSC0051906
tattatgtgggt

SEQ ID NO: 360071 - DNA, 12 bp, Artificial Sequence
  Oligonucleotide primer for the detection of SNP TSC0051906
tattacgtgggt

SEQ ID NO: 360072 - DNA, 12 bp, Artificial Sequence
  Oligonucleotide primer for the detection of SNP TSC0051906
ccacataaacaa

SEQ ID NO: 360073 - DNA, 12 bp, Artificial Sequence
  Oligonucleotide primer for the detection of SNP TSC0051906
ccacgtaaacaa

SEQ ID NO: 360074 - DNA, 12 bp, Artificial Sequence
  Oligonucleotide primer for the detection of SNP TSC0051906
tttatggtaagt

SEQ ID NO: 360075 - DNA, 12 bp, Artificial Sequence
  Oligonucleotide primer for the detection of SNP TSC0001663
ttctaaactcct

SEQ ID NO: 360076 - DNA, 12 bp, Artificial Sequence
  Oligonucleotide primer for the detection of SNP TSC0001663
atttaagataat

SEQ ID NO: 360077 - DNA, 12 bp, Artificial Sequence
  Oligonucleotide primer for the detection of SNP TSC0001663
attcaaaataac

SEQ ID NO: 360078 - DNA, 12 bp, Artificial Sequence
  Oligonucleotide primer for the detection of SNP TSC0005429
aaacctcaatat

SEQ ID NO: 360079 - DNA, 12 bp, Artificial Sequence
  Oligonucleotide primer for the detection of SNP TSC0005429
tatgtttggggt

SEQ ID NO: 360080 - DNA, 12 bp, Artificial Sequence
  Oligonucleotide primer for the detection of SNP TSC0005429
gattttagtgtt

SEQ ID NO: 360081 - DNA, 12 bp, Artificial Sequence
  Oligonucleotide primer for the detection of SNP TSC0005429
gattttagtgtc

SEQ ID NO: 360082 - DNA, 12 bp, Artificial Sequence
  Oligonucleotide primer for the detection of SNP TSC0000394
ttcataaatata

SEQ ID NO: 360083 - DNA, 12 bp, Artificial Sequence
  Oligonucleotide primer for the detection of SNP TSC0000394
atagttttttag

SEQ ID NO: 360084 - DNA, 12 bp, Artificial Sequence
  Oligonucleotide primer for the detection of SNP TSC0000394
aattcttcaaaa

SEQ ID NO: 360085 - DNA, 12 bp, Artificial Sequence
  Oligonucleotide primer for the detection of SNP TSC0000394
atttataagtat

SEQ ID NO: 360086 - DNA, 12 bp, Artificial Sequence
  Oligonucleotide primer for the detection of SNP TSC0051907
atgataaatatg

SEQ ID NO: 360087 - DNA, 12 bp, Artificial Sequence
  Oligonucleotide primer for the detection of SNP TSC0051907
ttttgggattat

SEQ ID NO: 360088 - DNA, 12 bp, Artificial Sequence
  Oligonucleotide primer for the detection of SNP TSC0001557
tctatcttttcc

SEQ ID NO: 360089 - DNA, 12 bp, Artificial Sequence
  Oligonucleotide primer for the detection of SNP TSC0001557
aaaggaaattat

SEQ ID NO: 360090 - DNA, 12 bp, Artificial Sequence
  Oligonucleotide primer for the detection of SNP TSC0001558
taaaactacatt

SEQ ID NO: 360091 - DNA, 12 bp, Artificial Sequence
  Oligonucleotide primer for the detection of SNP TSC0001558
ttatttatgtta

SEQ ID NO: 360092 - DNA, 12 bp, Artificial Sequence
  Oligonucleotide primer for the detection of SNP TSC0001559
ttgtggattatt

SEQ ID NO: 360093 - DNA, 12 bp, Artificial Sequence
  Oligonucleotide primer for the detection of SNP TSC0001559
ctataaaccatt

SEQ ID NO: 360094 - DNA, 12 bp, Artificial Sequence
  Oligonucleotide primer for the detection of SNP TSC0001559
aaaagatagatg

SEQ ID NO: 360095 - DNA, 12 bp, Artificial Sequence
  Oligonucleotide primer for the detection of SNP TSC0051908
tgtgagagagag

SEQ ID NO: 360096 - DNA, 12 bp, Artificial Sequence
  Oligonucleotide primer for the detection of SNP TSC0010105
tactcataaatt

SEQ ID NO: 360097 - DNA, 12 bp, Artificial Sequence
  Oligonucleotide primer for the detection of SNP TSC0010106
aaaaaatttact

SEQ ID NO: 360098 - DNA, 12 bp, Artificial Sequence
  Oligonucleotide primer for the detection of SNP TSC0010106
tgtttgaattaa

SEQ ID NO: 360099 - DNA, 12 bp, Artificial Sequence
  Oligonucleotide primer for the detection of SNP TSC0010034
atctaaactcac

SEQ ID NO: 360100 - DNA, 12 bp, Artificial Sequence
  Oligonucleotide primer for the detection of SNP TSC0010034
aggcggaggttg

SEQ ID NO: 360101 - DNA, 12 bp, Artificial Sequence
  Oligonucleotide primer for the detection of SNP TSC0051915
ctatctaaattc

SEQ ID NO: 360102 - DNA, 12 bp, Artificial Sequence
  Oligonucleotide primer for the detection of SNP TSC0051915
ggaaagtttttg

SEQ ID NO: 360103 - DNA, 12 bp, Artificial Sequence
  Oligonucleotide primer for the detection of SNP TSC0001620
accaaacaaatt

SEQ ID NO: 360104 - DNA, 12 bp, Artificial Sequence
  Oligonucleotide primer for the detection of SNP TSC0001620
gtattttgtata

SEQ ID NO: 360105 - DNA, 12 bp, Artificial Sequence
  Oligonucleotide primer for the detection of SNP TSC0000210
ccaccccatacc

SEQ ID NO: 360106 - DNA, 12 bp, Artificial Sequence
  Oligonucleotide primer for the detection of SNP TSC0000210
ccaccccgtacc

SEQ ID NO: 360107 - DNA, 12 bp, Artificial Sequence
  Oligonucleotide primer for the detection of SNP TSC0000210
ccgccccatacc

SEQ ID NO: 360108 - DNA, 12 bp, Artificial Sequence
  Oligonucleotide primer for the detection of SNP TSC0000210
ccgccccgtacc

SEQ ID NO: 360109 - DNA, 12 bp, Artificial Sequence
  Oligonucleotide primer for the detection of SNP TSC0010019
aatttctatatt

SEQ ID NO: 360110 - DNA, 12 bp, Artificial Sequence
  Oligonucleotide primer for the detection of SNP TSC0010019
attgatgtgaag

SEQ ID NO: 360111 - DNA, 12 bp, Artificial Sequence
  Oligonucleotide primer for the detection of SNP TSC0010019
attgatgcgaag

SEQ ID NO: 360112 - DNA, 12 bp, Artificial Sequence
  Oligonucleotide primer for the detection of SNP TSC0001080
atacttatttcc

SEQ ID NO: 360113 - DNA, 12 bp, Artificial Sequence
  Oligonucleotide primer for the detection of SNP TSC0001080
gtacttatttcc

SEQ ID NO: 360114 - DNA, 12 bp, Artificial Sequence
  Oligonucleotide primer for the detection of SNP TSC0001080
tggaaggtaaag

SEQ ID NO: 360115 - DNA, 12 bp, Artificial Sequence
  Oligonucleotide primer for the detection of SNP TSC0000640
tccataaaaaac

SEQ ID NO: 360116 - DNA, 12 bp, Artificial Sequence
  Oligonucleotide primer for the detection of SNP TSC0000640
cgggttttttcg

SEQ ID NO: 360117 - DNA, 12 bp, Artificial Sequence
  Oligonucleotide primer for the detection of SNP TSC0051919
ttaaagatttta

SEQ ID NO: 360118 - DNA, 12 bp, Artificial Sequence
  Oligonucleotide primer for the detection of SNP TSC0005297
tttttaaaaatc

SEQ ID NO: 360119 - DNA, 12 bp, Artificial Sequence
  Oligonucleotide primer for the detection of SNP TSC0005297
ttattttgtaaa

SEQ ID NO: 360120 - DNA, 12 bp, Artificial Sequence
  Oligonucleotide primer for the detection of SNP TSC0010128
ctttatctatta

SEQ ID NO: 360121 - DNA, 12 bp, Artificial Sequence
  Oligonucleotide primer for the detection of SNP TSC0010128
tttatttgttgt

SEQ ID NO: 360122 - DNA, 12 bp, Artificial Sequence
  Oligonucleotide primer for the detection of SNP TSC0051922
tcataaacacac

SEQ ID NO: 360123 - DNA, 12 bp, Artificial Sequence
  Oligonucleotide primer for the detection of SNP TSC0051922
ggtatatagata

SEQ ID NO: 360124 - DNA, 12 bp, Artificial Sequence
  Oligonucleotide primer for the detection of SNP TSC0010050
acccccttataa

SEQ ID NO: 360125 - DNA, 12 bp, Artificial Sequence
  Oligonucleotide primer for the detection of SNP TSC0051923
ctctccatcccc

SEQ ID NO: 360126 - DNA, 12 bp, Artificial Sequence
  Oligonucleotide primer for the detection of SNP TSC0051924
tcttcatttccc

SEQ ID NO: 360127 - DNA, 12 bp, Artificial Sequence
  Oligonucleotide primer for the detection of SNP TSC0051924
ttattaaagtaa

SEQ ID NO: 360128 - DNA, 12 bp, Artificial Sequence
  Oligonucleotide primer for the detection of SNP TSC0051924
ctactaaaacaa

SEQ ID NO: 360129 - DNA, 12 bp, Artificial Sequence
  Oligonucleotide primer for the detection of SNP TSC0001442
ttaatatctact

SEQ ID NO: 360130 - DNA, 12 bp, Artificial Sequence
  Oligonucleotide primer for the detection of SNP TSC0051925
aacacacacatc

SEQ ID NO: 360131 - DNA, 12 bp, Artificial Sequence
  Oligonucleotide primer for the detection of SNP TSC0051925
ttattttggtta

SEQ ID NO: 360132 - DNA, 12 bp, Artificial Sequence
  Oligonucleotide primer for the detection of SNP TSC0051925
ttatttcggtta

SEQ ID NO: 360133 - DNA, 12 bp, Artificial Sequence
  Oligonucleotide primer for the detection of SNP TSC0001153
ttataaaattta

SEQ ID NO: 360134 - DNA, 12 bp, Artificial Sequence
  Oligonucleotide primer for the detection of SNP TSC0001153
gttttgagaaat

SEQ ID NO: 360135 - DNA, 12 bp, Artificial Sequence
  Oligonucleotide primer for the detection of SNP TSC0051926
aacgaaaatctc

SEQ ID NO: 360136 - DNA, 12 bp, Artificial Sequence
  Oligonucleotide primer for the detection of SNP TSC0051926
tgatattatagg

SEQ ID NO: 360137 - DNA, 12 bp, Artificial Sequence
  Oligonucleotide primer for the detection of SNP TSC0051927
tatatattcata

SEQ ID NO: 360138 - DNA, 12 bp, Artificial Sequence
  Oligonucleotide primer for the detection of SNP TSC0051927
tggataatgttt

SEQ ID NO: 360139 - DNA, 12 bp, Artificial Sequence
  Oligonucleotide primer for the detection of SNP TSC0051927
taaataatattt

SEQ ID NO: 360140 - DNA, 12 bp, Artificial Sequence
  Oligonucleotide primer for the detection of SNP TSC0051927
tatgtgtttata

SEQ ID NO: 360141 - DNA, 12 bp, Artificial Sequence
  Oligonucleotide primer for the detection of SNP TSC0051928
agtggttatgta

SEQ ID NO: 360142 - DNA, 12 bp, Artificial Sequence
  Oligonucleotide primer for the detection of SNP TSC0051929
aagttaaaaaaa

SEQ ID NO: 360143 - DNA, 12 bp, Artificial Sequence
  Oligonucleotide primer for the detection of SNP TSC0051930
ttactctattta

SEQ ID NO: 360144 - DNA, 12 bp, Artificial Sequence
  Oligonucleotide primer for the detection of SNP TSC0051930
tttaggaagttt

SEQ ID NO: 360145 - DNA, 12 bp, Artificial Sequence
  Oligonucleotide primer for the detection of SNP TSC0051931
tcattttatatc

SEQ ID NO: 360146 - DNA, 12 bp, Artificial Sequence
  Oligonucleotide primer for the detection of SNP TSC0051931
ttggaaatgtgt

SEQ ID NO: 360147 - DNA, 12 bp, Artificial Sequence
  Oligonucleotide primer for the detection of SNP TSC0051931
ttggaaatgcgt

SEQ ID NO: 360148 - DNA, 12 bp, Artificial Sequence
  Oligonucleotide primer for the detection of SNP TSC0051931
taaaaatacata

SEQ ID NO: 360149 - DNA, 12 bp, Artificial Sequence
  Oligonucleotide primer for the detection of SNP TSC0051931
taaaaatacgta

SEQ ID NO: 360150 - DNA, 12 bp, Artificial Sequence
  Oligonucleotide primer for the detection of SNP TSC0051931
ttattttgtgtc

SEQ ID NO: 360151 - DNA, 12 bp, Artificial Sequence
  Oligonucleotide primer for the detection of SNP TSC0051932
taaatggttggt

SEQ ID NO: 360152 - DNA, 12 bp, Artificial Sequence
  Oligonucleotide primer for the detection of SNP TSC0051932
ttaaataactaa

SEQ ID NO: 360153 - DNA, 12 bp, Artificial Sequence
  Oligonucleotide primer for the detection of SNP TSC0051932
atataataaagt

SEQ ID NO: 360154 - DNA, 12 bp, Artificial Sequence
  Oligonucleotide primer for the detection of SNP TSC0051934
ctataaatattc

SEQ ID NO: 360155 - DNA, 12 bp, Artificial Sequence
  Oligonucleotide primer for the detection of SNP TSC0051934
ttagtattgtaa

SEQ ID NO: 360156 - DNA, 12 bp, Artificial Sequence
  Oligonucleotide primer for the detection of SNP TSC0051934
ccaatattacaa

SEQ ID NO: 360157 - DNA, 12 bp, Artificial Sequence
  Oligonucleotide primer for the detection of SNP TSC0051934
ttgtggatgttt

SEQ ID NO: 360158 - DNA, 12 bp, Artificial Sequence
  Oligonucleotide primer for the detection of SNP TSC0051935
tatatatcaaaa

SEQ ID NO: 360159 - DNA, 12 bp, Artificial Sequence
  Oligonucleotide primer for the detection of SNP TSC0051935
tgtagtgttttt

SEQ ID NO: 360160 - DNA, 12 bp, Artificial Sequence
  Oligonucleotide primer for the detection of SNP TSC0051935
tacaatattctt

SEQ ID NO: 360161 - DNA, 12 bp, Artificial Sequence
  Oligonucleotide primer for the detection of SNP TSC0051935
tgtatattagag

SEQ ID NO: 360162 - DNA, 12 bp, Artificial Sequence
  Oligonucleotide primer for the detection of SNP TSC0051936
tagggaaggaat

SEQ ID NO: 360163 - DNA, 12 bp, Artificial Sequence
  Oligonucleotide primer for the detection of SNP TSC0051936
ggatgaagtaaa

SEQ ID NO: 360164 - DNA, 12 bp, Artificial Sequence
  Oligonucleotide primer for the detection of SNP TSC0051937
caaaacactctt

SEQ ID NO: 360165 - DNA, 12 bp, Artificial Sequence
  Oligonucleotide primer for the detection of SNP TSC0051940
tactcgaactaa

SEQ ID NO: 360166 - DNA, 12 bp, Artificial Sequence
  Oligonucleotide primer for the detection of SNP TSC0051940
tgtttgagttgg

SEQ ID NO: 360167 - DNA, 12 bp, Artificial Sequence
  Oligonucleotide primer for the detection of SNP TSC0051940
tgttcgagttgg

SEQ ID NO: 360168 - DNA, 12 bp, Artificial Sequence
  Oligonucleotide primer for the detection of SNP TSC0051945
tcccataattac

SEQ ID NO: 360169 - DNA, 12 bp, Artificial Sequence
  Oligonucleotide primer for the detection of SNP TSC0051948
aaagaattatta

SEQ ID NO: 360170 - DNA, 12 bp, Artificial Sequence
  Oligonucleotide primer for the detection of SNP TSC0051949
acctctttatcc

SEQ ID NO: 360171 - DNA, 12 bp, Artificial Sequence
  Oligonucleotide primer for the detection of SNP TSC0051949
atgttttttagg

SEQ ID NO: 360172 - DNA, 12 bp, Artificial Sequence
  Oligonucleotide primer for the detection of SNP TSC0051949
acgttttttagg

SEQ ID NO: 360173 - DNA, 12 bp, Artificial Sequence
  Oligonucleotide primer for the detection of SNP TSC0051949
acattcctcaaa

SEQ ID NO: 360174 - DNA, 12 bp, Artificial Sequence
  Oligonucleotide primer for the detection of SNP TSC0051949
acgttcctcaaa

SEQ ID NO: 360175 - DNA, 12 bp, Artificial Sequence
  Oligonucleotide primer for the detection of SNP TSC0051950
ttttaatattaa

SEQ ID NO: 360176 - DNA, 12 bp, Artificial Sequence
  Oligonucleotide primer for the detection of SNP TSC0051952
caaaaataaata

SEQ ID NO: 360177 - DNA, 12 bp, Artificial Sequence
  Oligonucleotide primer for the detection of SNP TSC0051952
cctaacttttaa

SEQ ID NO: 360178 - DNA, 12 bp, Artificial Sequence
  Oligonucleotide primer for the detection of SNP TSC0051953
atggaagaagag

SEQ ID NO: 360179 - DNA, 12 bp, Artificial Sequence
  Oligonucleotide primer for the detection of SNP TSC0051953
ttaagtgtaggt

SEQ ID NO: 360180 - DNA, 12 bp, Artificial Sequence
  Oligonucleotide primer for the detection of SNP TSC0051954
ttaaaatctttt

SEQ ID NO: 360181 - DNA, 12 bp, Artificial Sequence
  Oligonucleotide primer for the detection of SNP TSC0051954
attttaagatgg

SEQ ID NO: 360182 - DNA, 12 bp, Artificial Sequence
  Oligonucleotide primer for the detection of SNP TSC0051956
tatcttacaatt

SEQ ID NO: 360183 - DNA, 12 bp, Artificial Sequence
  Oligonucleotide primer for the detection of SNP TSC0051956
gaattgttgttg

SEQ ID NO: 360184 - DNA, 12 bp, Artificial Sequence
  Oligonucleotide primer for the detection of SNP TSC0051957
ggggattaagtg

SEQ ID NO: 360185 - DNA, 12 bp, Artificial Sequence
  Oligonucleotide primer for the detection of SNP TSC0051958
tatatttaggta

SEQ ID NO: 360186 - DNA, 12 bp, Artificial Sequence
  Oligonucleotide primer for the detection of SNP TSC0051958
cacactcaaaca

SEQ ID NO: 360187 - DNA, 12 bp, Artificial Sequence
  Oligonucleotide primer for the detection of SNP TSC0051959
atctttaatata

SEQ ID NO: 360188 - DNA, 12 bp, Artificial Sequence
  Oligonucleotide primer for the detection of SNP TSC0051959
tcacacactaac

SEQ ID NO: 360189 - DNA, 12 bp, Artificial Sequence
  Oligonucleotide primer for the detection of SNP TSC0051961
attttaagttta

SEQ ID NO: 360190 - DNA, 12 bp, Artificial Sequence
  Oligonucleotide primer for the detection of SNP TSC0051962
agttttgatgta

SEQ ID NO: 360191 - DNA, 12 bp, Artificial Sequence
  Oligonucleotide primer for the detection of SNP TSC0051962
aaccttaatata

SEQ ID NO: 360192 - DNA, 12 bp, Artificial Sequence
  Oligonucleotide primer for the detection of SNP TSC0051962
gagaaatgtttt

SEQ ID NO: 360193 - DNA, 12 bp, Artificial Sequence
  Oligonucleotide primer for the detection of SNP TSC0051967
cacaattaatta

SEQ ID NO: 360194 - DNA, 12 bp, Artificial Sequence
  Oligonucleotide primer for the detection of SNP TSC0051967
tttctcttattt

SEQ ID NO: 360195 - DNA, 12 bp, Artificial Sequence
  Oligonucleotide primer for the detection of SNP TSC0051967
atagttgattat

SEQ ID NO: 360196 - DNA, 12 bp, Artificial Sequence
  Oligonucleotide primer for the detection of SNP TSC0051968
atctaaatatac

SEQ ID NO: 360197 - DNA, 12 bp, Artificial Sequence
  Oligonucleotide primer for the detection of SNP TSC0051968
tgtgtgagtaga

SEQ ID NO: 360198 - DNA, 12 bp, Artificial Sequence
  Oligonucleotide primer for the detection of SNP TSC0051972
gtttgtgaatta

SEQ ID NO: 360199 - DNA, 12 bp, Artificial Sequence
  Oligonucleotide primer for the detection of SNP TSC0051972
gttcgtgaatta

SEQ ID NO: 360200 - DNA, 12 bp, Artificial Sequence
  Oligonucleotide primer for the detection of SNP TSC0051972
actcgtaaatta

SEQ ID NO: 360201 - DNA, 12 bp, Artificial Sequence
  Oligonucleotide primer for the detection of SNP TSC0006702
cccgaaaattaa

SEQ ID NO: 360202 - DNA, 12 bp, Artificial Sequence
  Oligonucleotide primer for the detection of SNP TSC0006702
aatcctatattt

SEQ ID NO: 360203 - DNA, 12 bp, Artificial Sequence
  Oligonucleotide primer for the detection of SNP TSC0006702
tttgaaagttaa

SEQ ID NO: 360204 - DNA, 12 bp, Artificial Sequence
  Oligonucleotide primer for the detection of SNP TSC0006702
ttcgaaagttaa

SEQ ID NO: 360205 - DNA, 12 bp, Artificial Sequence
  Oligonucleotide primer for the detection of SNP TSC0051976
tattttctctaa

SEQ ID NO: 360206 - DNA, 12 bp, Artificial Sequence
  Oligonucleotide primer for the detection of SNP TSC0051977
ccaaactataaa

SEQ ID NO: 360207 - DNA, 12 bp, Artificial Sequence
  Oligonucleotide primer for the detection of SNP TSC0051977
aaccctaatttt

SEQ ID NO: 360208 - DNA, 12 bp, Artificial Sequence
  Oligonucleotide primer for the detection of SNP TSC0051977
ttagattgtaga

SEQ ID NO: 360209 - DNA, 12 bp, Artificial Sequence
  Oligonucleotide primer for the detection of SNP TSC0008090
tctcataactat

SEQ ID NO: 360210 - DNA, 12 bp, Artificial Sequence
  Oligonucleotide primer for the detection of SNP TSC0008090
atattttattaa

SEQ ID NO: 360211 - DNA, 12 bp, Artificial Sequence
  Oligonucleotide primer for the detection of SNP TSC0051978
ccatttaataac

SEQ ID NO: 360212 - DNA, 12 bp, Artificial Sequence
  Oligonucleotide primer for the detection of SNP TSC0051978
agtattagtaaa

SEQ ID NO: 360213 - DNA, 12 bp, Artificial Sequence
  Oligonucleotide primer for the detection of SNP TSC0051979
tgttttagttgg

SEQ ID NO: 360214 - DNA, 12 bp, Artificial Sequence
  Oligonucleotide primer for the detection of SNP TSC0051979
cgttttagttgg

SEQ ID NO: 360215 - DNA, 12 bp, Artificial Sequence
  Oligonucleotide primer for the detection of SNP TSC0051979
cacttcaactaa

SEQ ID NO: 360216 - DNA, 12 bp, Artificial Sequence
  Oligonucleotide primer for the detection of SNP TSC0051979
cgcttcaactaa

SEQ ID NO: 360217 - DNA, 12 bp, Artificial Sequence
  Oligonucleotide primer for the detection of SNP TSC0051980
actcaaacaaaa

SEQ ID NO: 360218 - DNA, 12 bp, Artificial Sequence
  Oligonucleotide primer for the detection of SNP TSC0051980
atataagtttgg

SEQ ID NO: 360219 - DNA, 12 bp, Artificial Sequence
  Oligonucleotide primer for the detection of SNP TSC0051980
atataagttcgg

SEQ ID NO: 360220 - DNA, 12 bp, Artificial Sequence
  Oligonucleotide primer for the detection of SNP TSC0051980
atataaactcaa

SEQ ID NO: 360221 - DNA, 12 bp, Artificial Sequence
  Oligonucleotide primer for the detection of SNP TSC0051980
atataaactcga

SEQ ID NO: 360222 - DNA, 12 bp, Artificial Sequence
  Oligonucleotide primer for the detection of SNP TSC0051980
gtttaaataaaa

SEQ ID NO: 360223 - DNA, 12 bp, Artificial Sequence
  Oligonucleotide primer for the detection of SNP TSC0051981
taaactaaacat

SEQ ID NO: 360224 - DNA, 12 bp, Artificial Sequence
  Oligonucleotide primer for the detection of SNP TSC0051981
gttaaaatttaa

SEQ ID NO: 360225 - DNA, 12 bp, Artificial Sequence
  Oligonucleotide primer for the detection of SNP TSC0051982
aaaattttcaaa

SEQ ID NO: 360226 - DNA, 12 bp, Artificial Sequence
  Oligonucleotide primer for the detection of SNP TSC0051982
aaatgtttttag

SEQ ID NO: 360227 - DNA, 12 bp, Artificial Sequence
  Oligonucleotide primer for the detection of SNP TSC0051982
aaatactttcaa

SEQ ID NO: 360228 - DNA, 12 bp, Artificial Sequence
  Oligonucleotide primer for the detection of SNP TSC0051982
gagatttttagg

SEQ ID NO: 360229 - DNA, 12 bp, Artificial Sequence
  Oligonucleotide primer for the detection of SNP TSC0051985
atatccacaata

SEQ ID NO: 360230 - DNA, 12 bp, Artificial Sequence
  Oligonucleotide primer for the detection of SNP TSC0051985
gtatccacaata

SEQ ID NO: 360231 - DNA, 12 bp, Artificial Sequence
  Oligonucleotide primer for the detection of SNP TSC0051985
atacctcaacct

SEQ ID NO: 360232 - DNA, 12 bp, Artificial Sequence
  Oligonucleotide primer for the detection of SNP TSC0051985
gtgtttatagtg

SEQ ID NO: 360233 - DNA, 12 bp, Artificial Sequence
  Oligonucleotide primer for the detection of SNP TSC0051986
attatttaaaac

SEQ ID NO: 360234 - DNA, 12 bp, Artificial Sequence
  Oligonucleotide primer for the detection of SNP TSC0051986
tttttaaattcg

SEQ ID NO: 360235 - DNA, 12 bp, Artificial Sequence
  Oligonucleotide primer for the detection of SNP TSC0051987
aaacactcctac

SEQ ID NO: 360236 - DNA, 12 bp, Artificial Sequence
  Oligonucleotide primer for the detection of SNP TSC0051987
aaacgctcctac

SEQ ID NO: 360237 - DNA, 12 bp, Artificial Sequence
  Oligonucleotide primer for the detection of SNP TSC0051987
attttgttgtgg

SEQ ID NO: 360238 - DNA, 12 bp, Artificial Sequence
  Oligonucleotide primer for the detection of SNP TSC0051987
atttcgttgtgg

SEQ ID NO: 360239 - DNA, 12 bp, Artificial Sequence
  Oligonucleotide primer for the detection of SNP TSC0051987
attttgttgcgg

SEQ ID NO: 360240 - DNA, 12 bp, Artificial Sequence
  Oligonucleotide primer for the detection of SNP TSC0051987
atttcgttgcgg

SEQ ID NO: 360241 - DNA, 12 bp, Artificial Sequence
  Oligonucleotide primer for the detection of SNP TSC0051988
ataattataatc

SEQ ID NO: 360242 - DNA, 12 bp, Artificial Sequence
  Oligonucleotide primer for the detection of SNP TSC0051988
gtgggtatatgt

SEQ ID NO: 360243 - DNA, 12 bp, Artificial Sequence
  Oligonucleotide primer for the detection of SNP TSC0051988
gcgggtatatgt

SEQ ID NO: 360244 - DNA, 12 bp, Artificial Sequence
  Oligonucleotide primer for the detection of SNP TSC0051988
gtgggtatatgc

SEQ ID NO: 360245 - DNA, 12 bp, Artificial Sequence
  Oligonucleotide primer for the detection of SNP TSC0051988
gcgggtatatgc

SEQ ID NO: 360246 - DNA, 12 bp, Artificial Sequence
  Oligonucleotide primer for the detection of SNP TSC0051988
aacaaatacata

SEQ ID NO: 360247 - DNA, 12 bp, Artificial Sequence
  Oligonucleotide primer for the detection of SNP TSC0051988
aacgaatacata

SEQ ID NO: 360248 - DNA, 12 bp, Artificial Sequence
  Oligonucleotide primer for the detection of SNP TSC0051988
gtggttatgatt

SEQ ID NO: 360249 - DNA, 12 bp, Artificial Sequence
  Oligonucleotide primer for the detection of SNP TSC0051990
tcacctataata

SEQ ID NO: 360250 - DNA, 12 bp, Artificial Sequence
  Oligonucleotide primer for the detection of SNP TSC0051990
tagaattatgtt

SEQ ID NO: 360251 - DNA, 12 bp, Artificial Sequence
  Oligonucleotide primer for the detection of SNP TSC0051990
ctaaaattatac

SEQ ID NO: 360252 - DNA, 12 bp, Artificial Sequence
  Oligonucleotide primer for the detection of SNP TSC0051991
acttcaaatccc

SEQ ID NO: 360253 - DNA, 12 bp, Artificial Sequence
  Oligonucleotide primer for the detection of SNP TSC0051991
gttttaagtgga

SEQ ID NO: 360254 - DNA, 12 bp, Artificial Sequence
  Oligonucleotide primer for the detection of SNP TSC0051991
gttttaagcgga

SEQ ID NO: 360255 - DNA, 12 bp, Artificial Sequence
  Oligonucleotide primer for the detection of SNP TSC0051995
cattatccatac

SEQ ID NO: 360256 - DNA, 12 bp, Artificial Sequence
  Oligonucleotide primer for the detection of SNP TSC0051995
cattatccgtac

SEQ ID NO: 360257 - DNA, 12 bp, Artificial Sequence
  Oligonucleotide primer for the detection of SNP TSC0051995
cgttatccatac

SEQ ID NO: 360258 - DNA, 12 bp, Artificial Sequence
  Oligonucleotide primer for the detection of SNP TSC0051995
cgttatccgtac

SEQ ID NO: 360259 - DNA, 12 bp, Artificial Sequence
  Oligonucleotide primer for the detection of SNP TSC0052005
attatcatatac

SEQ ID NO: 360260 - DNA, 12 bp, Artificial Sequence
  Oligonucleotide primer for the detection of SNP TSC0052005
gggtttgaaaag

SEQ ID NO: 360261 - DNA, 12 bp, Artificial Sequence
  Oligonucleotide primer for the detection of SNP TSC0052006
atgtttcgtttt

SEQ ID NO: 360262 - DNA, 12 bp, Artificial Sequence
  Oligonucleotide primer for the detection of SNP TSC0052006
tcatattccacc

SEQ ID NO: 360263 - DNA, 12 bp, Artificial Sequence
  Oligonucleotide primer for the detection of SNP TSC0052006
tcatattccgcc

SEQ ID NO: 360264 - DNA, 12 bp, Artificial Sequence
  Oligonucleotide primer for the detection of SNP TSC0052007
caaaataactat

SEQ ID NO: 360265 - DNA, 12 bp, Artificial Sequence
  Oligonucleotide primer for the detection of SNP TSC0052007
gaatgtaaattg

SEQ ID NO: 360266 - DNA, 12 bp, Artificial Sequence
  Oligonucleotide primer for the detection of SNP TSC0052008
ggagattaaatt

SEQ ID NO: 360267 - DNA, 12 bp, Artificial Sequence
  Oligonucleotide primer for the detection of SNP TSC0052008
ggttatttggta

SEQ ID NO: 360268 - DNA, 12 bp, Artificial Sequence
  Oligonucleotide primer for the detection of SNP TSC0052009
ttctaaatacta

SEQ ID NO: 360269 - DNA, 12 bp, Artificial Sequence
  Oligonucleotide primer for the detection of SNP TSC0052009
aaggggagttat

SEQ ID NO: 360270 - DNA, 12 bp, Artificial Sequence
  Oligonucleotide primer for the detection of SNP TSC0052010
tctatctatcct

SEQ ID NO: 360271 - DNA, 12 bp, Artificial Sequence
  Oligonucleotide primer for the detection of SNP TSC0052010
aggtgtaggtta

SEQ ID NO: 360272 - DNA, 12 bp, Artificial Sequence
  Oligonucleotide primer for the detection of SNP TSC0052010
aaatacaaatca

SEQ ID NO: 360273 - DNA, 12 bp, Artificial Sequence
  Oligonucleotide primer for the detection of SNP TSC0052011
cttcctcaatct

SEQ ID NO: 360274 - DNA, 12 bp, Artificial Sequence
  Oligonucleotide primer for the detection of SNP TSC0052011
tttatgtaaata

SEQ ID NO: 360275 - DNA, 12 bp, Artificial Sequence
  Oligonucleotide primer for the detection of SNP TSC0052011
tttacgtaaata

SEQ ID NO: 360276 - DNA, 12 bp, Artificial Sequence
  Oligonucleotide primer for the detection of SNP TSC0052012
aacaatcaattt

SEQ ID NO: 360277 - DNA, 12 bp, Artificial Sequence
  Oligonucleotide primer for the detection of SNP TSC0052012
aacgatcaattt

SEQ ID NO: 360278 - DNA, 12 bp, Artificial Sequence
  Oligonucleotide primer for the detection of SNP TSC0052012
ttatttgggtaa

SEQ ID NO: 360279 - DNA, 12 bp, Artificial Sequence
  Oligonucleotide primer for the detection of SNP TSC0052012
tcacctaaacaa

SEQ ID NO: 360280 - DNA, 12 bp, Artificial Sequence
  Oligonucleotide primer for the detection of SNP TSC0052012
agtgattagttt

SEQ ID NO: 360281 - DNA, 12 bp, Artificial Sequence
  Oligonucleotide primer for the detection of SNP TSC0052012
agcgattagttt

SEQ ID NO: 360282 - DNA, 12 bp, Artificial Sequence
  Oligonucleotide primer for the detection of SNP TSC0052013
ttaattcatcaa

SEQ ID NO: 360283 - DNA, 12 bp, Artificial Sequence
  Oligonucleotide primer for the detection of SNP TSC0052013
tttaaatttgta

SEQ ID NO: 360284 - DNA, 12 bp, Artificial Sequence
  Oligonucleotide primer for the detection of SNP TSC0052014
agattattttta

SEQ ID NO: 360285 - DNA, 12 bp, Artificial Sequence
  Oligonucleotide primer for the detection of SNP TSC0052015
tatattaacttt

SEQ ID NO: 360286 - DNA, 12 bp, Artificial Sequence
  Oligonucleotide primer for the detection of SNP TSC0052015
aatttataagtt

SEQ ID NO: 360287 - DNA, 12 bp, Artificial Sequence
  Oligonucleotide primer for the detection of SNP TSC0052016
ctatccaaacac

SEQ ID NO: 360288 - DNA, 12 bp, Artificial Sequence
  Oligonucleotide primer for the detection of SNP TSC0052016
tttacttttaat

SEQ ID NO: 360289 - DNA, 12 bp, Artificial Sequence
  Oligonucleotide primer for the detection of SNP TSC0052016
ttatttaagtat

SEQ ID NO: 360290 - DNA, 12 bp, Artificial Sequence
  Oligonucleotide primer for the detection of SNP TSC0052017
tatatgatttag

SEQ ID NO: 360291 - DNA, 12 bp, Artificial Sequence
  Oligonucleotide primer for the detection of SNP TSC0052017
tacataattcaa

SEQ ID NO: 360292 - DNA, 12 bp, Artificial Sequence
  Oligonucleotide primer for the detection of SNP TSC0052017
gaaaaatagatt

SEQ ID NO: 360293 - DNA, 12 bp, Artificial Sequence
  Oligonucleotide primer for the detection of SNP TSC0052018
catatacaatat

SEQ ID NO: 360294 - DNA, 12 bp, Artificial Sequence
  Oligonucleotide primer for the detection of SNP TSC0052018
ttagggttaagg

SEQ ID NO: 360295 - DNA, 12 bp, Artificial Sequence
  Oligonucleotide primer for the detection of SNP TSC0052019
aaactccaatcc

SEQ ID NO: 360296 - DNA, 12 bp, Artificial Sequence
  Oligonucleotide primer for the detection of SNP TSC0052019
gaagtggtattg

SEQ ID NO: 360297 - DNA, 12 bp, Artificial Sequence
  Oligonucleotide primer for the detection of SNP TSC0052019
gagttttagttt

SEQ ID NO: 360298 - DNA, 12 bp, Artificial Sequence
  Oligonucleotide primer for the detection of SNP TSC0052020
actcatccctcc

SEQ ID NO: 360299 - DNA, 12 bp, Artificial Sequence
  Oligonucleotide primer for the detection of SNP TSC0052020
agaagggtgagg

SEQ ID NO: 360300 - DNA, 12 bp, Artificial Sequence
  Oligonucleotide primer for the detection of SNP TSC0052021
aaacactaatca

SEQ ID NO: 360301 - DNA, 12 bp, Artificial Sequence
  Oligonucleotide primer for the detection of SNP TSC0052021
ttaaaaatgttt

SEQ ID NO: 360302 - DNA, 12 bp, Artificial Sequence
  Oligonucleotide primer for the detection of SNP TSC0052021
ttaaaaatatcc

SEQ ID NO: 360303 - DNA, 12 bp, Artificial Sequence
  Oligonucleotide primer for the detection of SNP TSC0052021
agatattgatta

SEQ ID NO: 360304 - DNA, 12 bp, Artificial Sequence
  Oligonucleotide primer for the detection of SNP TSC0052022
attcttaatctc

SEQ ID NO: 360305 - DNA, 12 bp, Artificial Sequence
  Oligonucleotide primer for the detection of SNP TSC0052022
ttttgagtattg

SEQ ID NO: 360306 - DNA, 12 bp, Artificial Sequence
  Oligonucleotide primer for the detection of SNP TSC0052023
tttgaatttata

SEQ ID NO: 360307 - DNA, 12 bp, Artificial Sequence
  Oligonucleotide primer for the detection of SNP TSC0052024
tcacctaaacac

SEQ ID NO: 360308 - DNA, 12 bp, Artificial Sequence
  Oligonucleotide primer for the detection of SNP TSC0052025
taatattttcaa

SEQ ID NO: 360309 - DNA, 12 bp, Artificial Sequence
  Oligonucleotide primer for the detection of SNP TSC0052025
acttcttctatc

SEQ ID NO: 360310 - DNA, 12 bp, Artificial Sequence
  Oligonucleotide primer for the detection of SNP TSC0052025
taatatttttaa

SEQ ID NO: 360311 - DNA, 12 bp, Artificial Sequence
  Oligonucleotide primer for the detection of SNP TSC0052026
aatggaatagaa

SEQ ID NO: 360312 - DNA, 12 bp, Artificial Sequence
  Oligonucleotide primer for the detection of SNP TSC0052027
atgttattagga

SEQ ID NO: 360313 - DNA, 12 bp, Artificial Sequence
  Oligonucleotide primer for the detection of SNP TSC0052028
attttattctcc

SEQ ID NO: 360314 - DNA, 12 bp, Artificial Sequence
  Oligonucleotide primer for the detection of SNP TSC0052028
tttttttcaaaa

SEQ ID NO: 360315 - DNA, 12 bp, Artificial Sequence
  Oligonucleotide primer for the detection of SNP TSC0052029
caataaacttta

SEQ ID NO: 360316 - DNA, 12 bp, Artificial Sequence
  Oligonucleotide primer for the detection of SNP TSC0052029
tcaaatcatttt

SEQ ID NO: 360317 - DNA, 12 bp, Artificial Sequence
  Oligonucleotide primer for the detection of SNP TSC0052030
tacctacaaatc

SEQ ID NO: 360318 - DNA, 12 bp, Artificial Sequence
  Oligonucleotide primer for the detection of SNP TSC0052030
tacctacgaatc

SEQ ID NO: 360319 - DNA, 12 bp, Artificial Sequence
  Oligonucleotide primer for the detection of SNP TSC0052030
gaattatatttt

SEQ ID NO: 360320 - DNA, 12 bp, Artificial Sequence
  Oligonucleotide primer for the detection of SNP TSC0052030
aactatatttta

SEQ ID NO: 360321 - DNA, 12 bp, Artificial Sequence
  Oligonucleotide primer for the detection of SNP TSC0052030
tatttatgagtt

SEQ ID NO: 360322 - DNA, 12 bp, Artificial Sequence
  Oligonucleotide primer for the detection of SNP TSC0052030
tatttacgagtt

SEQ ID NO: 360323 - DNA, 12 bp, Artificial Sequence
  Oligonucleotide primer for the detection of SNP TSC0006977
aaactaaattcc

SEQ ID NO: 360324 - DNA, 12 bp, Artificial Sequence
  Oligonucleotide primer for the detection of SNP TSC0006977
actataattcta

SEQ ID NO: 360325 - DNA, 12 bp, Artificial Sequence
  Oligonucleotide primer for the detection of SNP TSC0006977
aagttaaatttt

SEQ ID NO: 360326 - DNA, 12 bp, Artificial Sequence
  Oligonucleotide primer for the detection of SNP TSC0052031
atcacacaaaaa

SEQ ID NO: 360327 - DNA, 12 bp, Artificial Sequence
  Oligonucleotide primer for the detection of SNP TSC0052031
ttagtttattta

SEQ ID NO: 360328 - DNA, 12 bp, Artificial Sequence
  Oligonucleotide primer for the detection of SNP TSC0052031
gtataattatat

SEQ ID NO: 360329 - DNA, 12 bp, Artificial Sequence
  Oligonucleotide primer for the detection of SNP TSC0001139
caccaatatcaa

SEQ ID NO: 360330 - DNA, 12 bp, Artificial Sequence
  Oligonucleotide primer for the detection of SNP TSC0001139
ttaagaaatatt

SEQ ID NO: 360331 - DNA, 12 bp, Artificial Sequence
  Oligonucleotide primer for the detection of SNP TSC0001140
tcttaacttctt

SEQ ID NO: 360332 - DNA, 12 bp, Artificial Sequence
  Oligonucleotide primer for the detection of SNP TSC0007073
taagttttatga

SEQ ID NO: 360333 - DNA, 12 bp, Artificial Sequence
  Oligonucleotide primer for the detection of SNP TSC0007073
gatgatttaatt

SEQ ID NO: 360334 - DNA, 12 bp, Artificial Sequence
  Oligonucleotide primer for the detection of SNP TSC0007073
gatgatttaatc

SEQ ID NO: 360335 - DNA, 12 bp, Artificial Sequence
  Oligonucleotide primer for the detection of SNP TSC0007074
tatctctaaata

SEQ ID NO: 360336 - DNA, 12 bp, Artificial Sequence
  Oligonucleotide primer for the detection of SNP TSC0007074
atttttccaact

SEQ ID NO: 360337 - DNA, 12 bp, Artificial Sequence
  Oligonucleotide primer for the detection of SNP TSC0005588
attattatatac

SEQ ID NO: 360338 - DNA, 12 bp, Artificial Sequence
  Oligonucleotide primer for the detection of SNP TSC0005588
ggtaagtgtata

SEQ ID NO: 360339 - DNA, 12 bp, Artificial Sequence
  Oligonucleotide primer for the detection of SNP TSC0052036
actaccactctc

SEQ ID NO: 360340 - DNA, 12 bp, Artificial Sequence
  Oligonucleotide primer for the detection of SNP TSC0052036
attgaaagatta

SEQ ID NO: 360341 - DNA, 12 bp, Artificial Sequence
  Oligonucleotide primer for the detection of SNP TSC0052037
ctcttctctcca

SEQ ID NO: 360342 - DNA, 12 bp, Artificial Sequence
  Oligonucleotide primer for the detection of SNP TSC0052037
attaaacccaca

SEQ ID NO: 360343 - DNA, 12 bp, Artificial Sequence
  Oligonucleotide primer for the detection of SNP TSC0052038
ttgtaaagtgta

SEQ ID NO: 360344 - DNA, 12 bp, Artificial Sequence
  Oligonucleotide primer for the detection of SNP TSC0052039
tttcattaattt

SEQ ID NO: 360345 - DNA, 12 bp, Artificial Sequence
  Oligonucleotide primer for the detection of SNP TSC0052040
aaaattttacat

SEQ ID NO: 360346 - DNA, 12 bp, Artificial Sequence
  Oligonucleotide primer for the detection of SNP TSC0052040
agtaaatgtaaa

SEQ ID NO: 360347 - DNA, 12 bp, Artificial Sequence
  Oligonucleotide primer for the detection of SNP TSC0052042
ccattaaaaaaa

SEQ ID NO: 360348 - DNA, 12 bp, Artificial Sequence
  Oligonucleotide primer for the detection of SNP TSC0052042
gtggtgatattt

SEQ ID NO: 360349 - DNA, 12 bp, Artificial Sequence
  Oligonucleotide primer for the detection of SNP TSC0052042
ataataacattc

SEQ ID NO: 360350 - DNA, 12 bp, Artificial Sequence
  Oligonucleotide primer for the detection of SNP TSC0052042
gtaataacattc

SEQ ID NO: 360351 - DNA, 12 bp, Artificial Sequence
  Oligonucleotide primer for the detection of SNP TSC0052042
ttattaagaagg

SEQ ID NO: 360352 - DNA, 12 bp, Artificial Sequence
  Oligonucleotide primer for the detection of SNP TSC0052043
gaaaaattaaga

SEQ ID NO: 360353 - DNA, 12 bp, Artificial Sequence
  Oligonucleotide primer for the detection of SNP TSC0052043
gataaaagaaat

SEQ ID NO: 360354 - DNA, 12 bp, Artificial Sequence
  Oligonucleotide primer for the detection of SNP TSC0052044
taaaaatattct

SEQ ID NO: 360355 - DNA, 12 bp, Artificial Sequence
  Oligonucleotide primer for the detection of SNP TSC0052044
ttataatttgaa

SEQ ID NO: 360356 - DNA, 12 bp, Artificial Sequence
  Oligonucleotide primer for the detection of SNP TSC0052044
tgaagatatttt

SEQ ID NO: 360357 - DNA, 12 bp, Artificial Sequence
  Oligonucleotide primer for the detection of SNP TSC0052045
tctttttattta

SEQ ID NO: 360358 - DNA, 12 bp, Artificial Sequence
  Oligonucleotide primer for the detection of SNP TSC0052045
gtattaaaaata

SEQ ID NO: 360359 - DNA, 12 bp, Artificial Sequence
  Oligonucleotide primer for the detection of SNP TSC0052046
aacccctcctat

SEQ ID NO: 360360 - DNA, 12 bp, Artificial Sequence
  Oligonucleotide primer for the detection of SNP TSC0052046
gagaggaggtgg

SEQ ID NO: 360361 - DNA, 12 bp, Artificial Sequence
  Oligonucleotide primer for the detection of SNP TSC0052048
tttctatcacaa

SEQ ID NO: 360362 - DNA, 12 bp, Artificial Sequence
  Oligonucleotide primer for the detection of SNP TSC0052049
ggttattttatt

SEQ ID NO: 360363 - DNA, 12 bp, Artificial Sequence
  Oligonucleotide primer for the detection of SNP TSC0052049
aaccattttact

SEQ ID NO: 360364 - DNA, 12 bp, Artificial Sequence
  Oligonucleotide primer for the detection of SNP TSC0052049
agtatttaatgg

SEQ ID NO: 360365 - DNA, 12 bp, Artificial Sequence
  Oligonucleotide primer for the detection of SNP TSC0052050
taaaaattctac

SEQ ID NO: 360366 - DNA, 12 bp, Artificial Sequence
  Oligonucleotide primer for the detection of SNP TSC0052050
tattgaatgttg

SEQ ID NO: 360367 - DNA, 12 bp, Artificial Sequence
  Oligonucleotide primer for the detection of SNP TSC0052050
cattaaatacta

SEQ ID NO: 360368 - DNA, 12 bp, Artificial Sequence
  Oligonucleotide primer for the detection of SNP TSC0052051
ctctacatttat

SEQ ID NO: 360369 - DNA, 12 bp, Artificial Sequence
  Oligonucleotide primer for the detection of SNP TSC0052051
ttgtgaagtaga

SEQ ID NO: 360370 - DNA, 12 bp, Artificial Sequence
  Oligonucleotide primer for the detection of SNP TSC0052051
ctataaaataaa

SEQ ID NO: 360371 - DNA, 12 bp, Artificial Sequence
  Oligonucleotide primer for the detection of SNP TSC0052053
ctaaaattccct

SEQ ID NO: 360372 - DNA, 12 bp, Artificial Sequence
  Oligonucleotide primer for the detection of SNP TSC0052053
ggttaagggaaa

SEQ ID NO: 360373 - DNA, 12 bp, Artificial Sequence
  Oligonucleotide primer for the detection of SNP TSC0052055
actaataacaac

SEQ ID NO: 360374 - DNA, 12 bp, Artificial Sequence
  Oligonucleotide primer for the detection of SNP TSC0052055
agtttgggtttg

SEQ ID NO: 360375 - DNA, 12 bp, Artificial Sequence
  Oligonucleotide primer for the detection of SNP TSC0052057
ttttaagtaatt

SEQ ID NO: 360376 - DNA, 12 bp, Artificial Sequence
  Oligonucleotide primer for the detection of SNP TSC0052057
ttttaagtaatc

SEQ ID NO: 360377 - DNA, 12 bp, Artificial Sequence
  Oligonucleotide primer for the detection of SNP TSC0052057
cttcaaataatc

SEQ ID NO: 360378 - DNA, 12 bp, Artificial Sequence
  Oligonucleotide primer for the detection of SNP TSC0052058
aataatcaacac

SEQ ID NO: 360379 - DNA, 12 bp, Artificial Sequence
  Oligonucleotide primer for the detection of SNP TSC0052058
aaattatttatg

SEQ ID NO: 360380 - DNA, 12 bp, Artificial Sequence
  Oligonucleotide primer for the detection of SNP TSC0052058
aatcatttataa

SEQ ID NO: 360381 - DNA, 12 bp, Artificial Sequence
  Oligonucleotide primer for the detection of SNP TSC0052058
aatggttaatat

SEQ ID NO: 360382 - DNA, 12 bp, Artificial Sequence
  Oligonucleotide primer for the detection of SNP TSC0052059
attcaatactat

SEQ ID NO: 360383 - DNA, 12 bp, Artificial Sequence
  Oligonucleotide primer for the detection of SNP TSC0052060
aaattaatcttt

SEQ ID NO: 360384 - DNA, 12 bp, Artificial Sequence
  Oligonucleotide primer for the detection of SNP TSC0052060
aattaaataagg

SEQ ID NO: 360385 - DNA, 12 bp, Artificial Sequence
  Oligonucleotide primer for the detection of SNP TSC0006791
ataaaattataa

SEQ ID NO: 360386 - DNA, 12 bp, Artificial Sequence
  Oligonucleotide primer for the detection of SNP TSC0006791
aacaatatactc

SEQ ID NO: 360387 - DNA, 12 bp, Artificial Sequence
  Oligonucleotide primer for the detection of SNP TSC0006791
tatgaaattgtg

SEQ ID NO: 360388 - DNA, 12 bp, Artificial Sequence
  Oligonucleotide primer for the detection of SNP TSC0006036
ttttctatacta

SEQ ID NO: 360389 - DNA, 12 bp, Artificial Sequence
  Oligonucleotide primer for the detection of SNP TSC0006036
gaaaaaggagtt

SEQ ID NO: 360390 - DNA, 12 bp, Artificial Sequence
  Oligonucleotide primer for the detection of SNP TSC0052061
taaattactttc

SEQ ID NO: 360391 - DNA, 12 bp, Artificial Sequence
  Oligonucleotide primer for the detection of SNP TSC0052061
ggtgtataatga

SEQ ID NO: 360392 - DNA, 12 bp, Artificial Sequence
  Oligonucleotide primer for the detection of SNP TSC0006480
taaatagggtaa

SEQ ID NO: 360393 - DNA, 12 bp, Artificial Sequence
  Oligonucleotide primer for the detection of SNP TSC0052064
atttttcactta

SEQ ID NO: 360394 - DNA, 12 bp, Artificial Sequence
  Oligonucleotide primer for the detection of SNP TSC0052064
tgttttttgtgg

SEQ ID NO: 360395 - DNA, 12 bp, Artificial Sequence
  Oligonucleotide primer for the detection of SNP TSC0052064
cgttttttgtgg

SEQ ID NO: 360396 - DNA, 12 bp, Artificial Sequence
  Oligonucleotide primer for the detection of SNP TSC0052064
tctttataaaaa

SEQ ID NO: 360397 - DNA, 12 bp, Artificial Sequence
  Oligonucleotide primer for the detection of SNP TSC0052065
cctaaactctaa

SEQ ID NO: 360398 - DNA, 12 bp, Artificial Sequence
  Oligonucleotide primer for the detection of SNP TSC0052065
agtttatttaat

SEQ ID NO: 360399 - DNA, 12 bp, Artificial Sequence
  Oligonucleotide primer for the detection of SNP TSC0052065
aatctacctaac

SEQ ID NO: 360400 - DNA, 12 bp, Artificial Sequence
  Oligonucleotide primer for the detection of SNP TSC0052066
aaacactaccta

SEQ ID NO: 360401 - DNA, 12 bp, Artificial Sequence
  Oligonucleotide primer for the detection of SNP TSC0052066
atcaccattatt

SEQ ID NO: 360402 - DNA, 12 bp, Artificial Sequence
  Oligonucleotide primer for the detection of SNP TSC0052066
gggtattattta

SEQ ID NO: 360403 - DNA, 12 bp, Artificial Sequence
  Oligonucleotide primer for the detection of SNP TSC0052067
caaattttattt

SEQ ID NO: 360404 - DNA, 12 bp, Artificial Sequence
  Oligonucleotide primer for the detection of SNP TSC0052067
atttggattaga

SEQ ID NO: 360405 - DNA, 12 bp, Artificial Sequence
  Oligonucleotide primer for the detection of SNP TSC0006629
actctactcaac

SEQ ID NO: 360406 - DNA, 12 bp, Artificial Sequence
  Oligonucleotide primer for the detection of SNP TSC0006629
tttaatttaaaa

SEQ ID NO: 360407 - DNA, 12 bp, Artificial Sequence
  Oligonucleotide primer for the detection of SNP TSC0007326
tggttaggatat

SEQ ID NO: 360408 - DNA, 12 bp, Artificial Sequence
  Oligonucleotide primer for the detection of SNP TSC0007326
cggttaggatat

SEQ ID NO: 360409 - DNA, 12 bp, Artificial Sequence
  Oligonucleotide primer for the detection of SNP TSC0007326
ccaaccaaaaca

SEQ ID NO: 360410 - DNA, 12 bp, Artificial Sequence
  Oligonucleotide primer for the detection of SNP TSC0007326
ccgaccaaaaca

SEQ ID NO: 360411 - DNA, 12 bp, Artificial Sequence
  Oligonucleotide primer for the detection of SNP TSC0052068
tataatcccacc

SEQ ID NO: 360412 - DNA, 12 bp, Artificial Sequence
  Oligonucleotide primer for the detection of SNP TSC0007245
taatctataaac

SEQ ID NO: 360413 - DNA, 12 bp, Artificial Sequence
  Oligonucleotide primer for the detection of SNP TSC0007245
taaaaatacaca

SEQ ID NO: 360414 - DNA, 12 bp, Artificial Sequence
  Oligonucleotide primer for the detection of SNP TSC0007245
tgatttgtgggt

SEQ ID NO: 360415 - DNA, 12 bp, Artificial Sequence
  Oligonucleotide primer for the detection of SNP TSC0006142
ttaatcatctca

SEQ ID NO: 360416 - DNA, 12 bp, Artificial Sequence
  Oligonucleotide primer for the detection of SNP TSC0006142
ttttttgggtaa

SEQ ID NO: 360417 - DNA, 12 bp, Artificial Sequence
  Oligonucleotide primer for the detection of SNP TSC0052072
ttactttcttat

SEQ ID NO: 360418 - DNA, 12 bp, Artificial Sequence
  Oligonucleotide primer for the detection of SNP TSC0052072
attgtttaagaa

SEQ ID NO: 360419 - DNA, 12 bp, Artificial Sequence
  Oligonucleotide primer for the detection of SNP TSC0052073
tgggggatattg

SEQ ID NO: 360420 - DNA, 12 bp, Artificial Sequence
  Oligonucleotide primer for the detection of SNP TSC0052074
gattgaggtgga

SEQ ID NO: 360421 - DNA, 12 bp, Artificial Sequence
  Oligonucleotide primer for the detection of SNP TSC0010752
tttattggttta

SEQ ID NO: 360422 - DNA, 12 bp, Artificial Sequence
  Oligonucleotide primer for the detection of SNP TSC0010753
tataatattgat

SEQ ID NO: 360423 - DNA, 12 bp, Artificial Sequence
  Oligonucleotide primer for the detection of SNP TSC0010753
tataatattaat

SEQ ID NO: 360424 - DNA, 12 bp, Artificial Sequence
  Oligonucleotide primer for the detection of SNP TSC0010753
attaagatagtg

SEQ ID NO: 360425 - DNA, 12 bp, Artificial Sequence
  Oligonucleotide primer for the detection of SNP TSC0052075
aacaaaacaaat

SEQ ID NO: 360426 - DNA, 12 bp, Artificial Sequence
  Oligonucleotide primer for the detection of SNP TSC0052075
gtgataaaggta

SEQ ID NO: 360427 - DNA, 12 bp, Artificial Sequence
  Oligonucleotide primer for the detection of SNP TSC0052076
agtagtatcggt

SEQ ID NO: 360428 - DNA, 12 bp, Artificial Sequence
  Oligonucleotide primer for the detection of SNP TSC0052076
taacaacatcaa

SEQ ID NO: 360429 - DNA, 12 bp, Artificial Sequence
  Oligonucleotide primer for the detection of SNP TSC0052076
taacaacatcga

SEQ ID NO: 360430 - DNA, 12 bp, Artificial Sequence
  Oligonucleotide primer for the detection of SNP TSC0052076
tggttatgtttt

SEQ ID NO: 360431 - DNA, 12 bp, Artificial Sequence
  Oligonucleotide primer for the detection of SNP TSC0052078
ttatatgttata

SEQ ID NO: 360432 - DNA, 12 bp, Artificial Sequence
  Oligonucleotide primer for the detection of SNP TSC0052079
actttaattatt

SEQ ID NO: 360433 - DNA, 12 bp, Artificial Sequence
  Oligonucleotide primer for the detection of SNP TSC0052081
gtaagagttgtt

SEQ ID NO: 360434 - DNA, 12 bp, Artificial Sequence
  Oligonucleotide primer for the detection of SNP TSC0052081
gtaagagtcgtt

SEQ ID NO: 360435 - DNA, 12 bp, Artificial Sequence
  Oligonucleotide primer for the detection of SNP TSC0052081
gtaaaaatcatt

SEQ ID NO: 360436 - DNA, 12 bp, Artificial Sequence
  Oligonucleotide primer for the detection of SNP TSC0052081
gtaaaaatcgtt

SEQ ID NO: 360437 - DNA, 12 bp, Artificial Sequence
  Oligonucleotide primer for the detection of SNP TSC0052082
acaacacacaca

SEQ ID NO: 360438 - DNA, 12 bp, Artificial Sequence
  Oligonucleotide primer for the detection of SNP TSC0052083
atattgatagtg

SEQ ID NO: 360439 - DNA, 12 bp, Artificial Sequence
  Oligonucleotide primer for the detection of SNP TSC0052084
ataccctcttat

SEQ ID NO: 360440 - DNA, 12 bp, Artificial Sequence
  Oligonucleotide primer for the detection of SNP TSC0052084
accaaaatcccc

SEQ ID NO: 360441 - DNA, 12 bp, Artificial Sequence
  Oligonucleotide primer for the detection of SNP TSC0008051
tctccaaaaacc

SEQ ID NO: 360442 - DNA, 12 bp, Artificial Sequence
  Oligonucleotide primer for the detection of SNP TSC0008051
ggatatggggga

SEQ ID NO: 360443 - DNA, 12 bp, Artificial Sequence
  Oligonucleotide primer for the detection of SNP TSC0008052
caaaacacctac

SEQ ID NO: 360444 - DNA, 12 bp, Artificial Sequence
  Oligonucleotide primer for the detection of SNP TSC0008052
tttttttatgtc

SEQ ID NO: 360445 - DNA, 12 bp, Artificial Sequence
  Oligonucleotide primer for the detection of SNP TSC0008052
ctcccccatatc

SEQ ID NO: 360446 - DNA, 12 bp, Artificial Sequence
  Oligonucleotide primer for the detection of SNP TSC0008052
aagatatttgtt

SEQ ID NO: 360447 - DNA, 12 bp, Artificial Sequence
  Oligonucleotide primer for the detection of SNP TSC0052086
aatcacatctta

SEQ ID NO: 360448 - DNA, 12 bp, Artificial Sequence
  Oligonucleotide primer for the detection of SNP TSC0052086
ttgttgttattt

SEQ ID NO: 360449 - DNA, 12 bp, Artificial Sequence
  Oligonucleotide primer for the detection of SNP TSC0052086
ctactaccatcc

SEQ ID NO: 360450 - DNA, 12 bp, Artificial Sequence
  Oligonucleotide primer for the detection of SNP TSC0052086
agttatatttta

SEQ ID NO: 360451 - DNA, 12 bp, Artificial Sequence
  Oligonucleotide primer for the detection of SNP TSC0052087
tacaaattattc

SEQ ID NO: 360452 - DNA, 12 bp, Artificial Sequence
  Oligonucleotide primer for the detection of SNP TSC0052087
ttctccatctat

SEQ ID NO: 360453 - DNA, 12 bp, Artificial Sequence
  Oligonucleotide primer for the detection of SNP TSC0001313
ccctttacaaac

SEQ ID NO: 360454 - DNA, 12 bp, Artificial Sequence
  Oligonucleotide primer for the detection of SNP TSC0000823
ctttccccaact

SEQ ID NO: 360455 - DNA, 12 bp, Artificial Sequence
  Oligonucleotide primer for the detection of SNP TSC0000823
ctttccccgact

SEQ ID NO: 360456 - DNA, 12 bp, Artificial Sequence
  Oligonucleotide primer for the detection of SNP TSC0000823
aagaagatttaa

SEQ ID NO: 360457 - DNA, 12 bp, Artificial Sequence
  Oligonucleotide primer for the detection of SNP TSC0009752
tccaattcccaa

SEQ ID NO: 360458 - DNA, 12 bp, Artificial Sequence
  Oligonucleotide primer for the detection of SNP TSC0052088
ctatttaaccaa

SEQ ID NO: 360459 - DNA, 12 bp, Artificial Sequence
  Oligonucleotide primer for the detection of SNP TSC0052088
tgtgaatgtttt

SEQ ID NO: 360460 - DNA, 12 bp, Artificial Sequence
  Oligonucleotide primer for the detection of SNP TSC0052088
cgtgaatgtttt

SEQ ID NO: 360461 - DNA, 12 bp, Artificial Sequence
  Oligonucleotide primer for the detection of SNP TSC0052088
tgtgaacgtttt

SEQ ID NO: 360462 - DNA, 12 bp, Artificial Sequence
  Oligonucleotide primer for the detection of SNP TSC0052088
cgtgaacgtttt

SEQ ID NO: 360463 - DNA, 12 bp, Artificial Sequence
  Oligonucleotide primer for the detection of SNP TSC0052088
cataaacatttt

SEQ ID NO: 360464 - DNA, 12 bp, Artificial Sequence
  Oligonucleotide primer for the detection of SNP TSC0052088
cataaacgtttt

SEQ ID NO: 360465 - DNA, 12 bp, Artificial Sequence
  Oligonucleotide primer for the detection of SNP TSC0052088
cgtaaacatttt

SEQ ID NO: 360466 - DNA, 12 bp, Artificial Sequence
  Oligonucleotide primer for the detection of SNP TSC0052088
cgtaaacgtttt

SEQ ID NO: 360467 - DNA, 12 bp, Artificial Sequence
  Oligonucleotide primer for the detection of SNP TSC0009956
ggtagtattata

SEQ ID NO: 360468 - DNA, 12 bp, Artificial Sequence
  Oligonucleotide primer for the detection of SNP TSC0052089
ccaaaatatact

SEQ ID NO: 360469 - DNA, 12 bp, Artificial Sequence
  Oligonucleotide primer for the detection of SNP TSC0052089
tttggaagttag

SEQ ID NO: 360470 - DNA, 12 bp, Artificial Sequence
  Oligonucleotide primer for the detection of SNP TSC0052089
cttaaaaaccaa

SEQ ID NO: 360471 - DNA, 12 bp, Artificial Sequence
  Oligonucleotide primer for the detection of SNP TSC0052089
ttagggtgtatt

SEQ ID NO: 360472 - DNA, 12 bp, Artificial Sequence
  Oligonucleotide primer for the detection of SNP TSC0052090
atttgtatttga

SEQ ID NO: 360473 - DNA, 12 bp, Artificial Sequence
  Oligonucleotide primer for the detection of SNP TSC0052091
atctaaatcgac

SEQ ID NO: 360474 - DNA, 12 bp, Artificial Sequence
  Oligonucleotide primer for the detection of SNP TSC0052091
aattaagttaaa

SEQ ID NO: 360475 - DNA, 12 bp, Artificial Sequence
  Oligonucleotide primer for the detection of SNP TSC0052092
gtttagttgttg

SEQ ID NO: 360476 - DNA, 12 bp, Artificial Sequence
  Oligonucleotide primer for the detection of SNP TSC0052093
cataaaaacgaa

SEQ ID NO: 360477 - DNA, 12 bp, Artificial Sequence
  Oligonucleotide primer for the detection of SNP TSC0052093
tttgggaaataa

SEQ ID NO: 360478 - DNA, 12 bp, Artificial Sequence
  Oligonucleotide primer for the detection of SNP TSC0052093
atagggatgaat

SEQ ID NO: 360479 - DNA, 12 bp, Artificial Sequence
  Oligonucleotide primer for the detection of SNP TSC0052093
atagggacgaat

SEQ ID NO: 360480 - DNA, 12 bp, Artificial Sequence
  Oligonucleotide primer for the detection of SNP TSC0052093
atagggatgaac

SEQ ID NO: 360481 - DNA, 12 bp, Artificial Sequence
  Oligonucleotide primer for the detection of SNP TSC0052093
atagggacgaac

SEQ ID NO: 360482 - DNA, 12 bp, Artificial Sequence
  Oligonucleotide primer for the detection of SNP TSC0052094
aaaaccatctaa

SEQ ID NO: 360483 - DNA, 12 bp, Artificial Sequence
  Oligonucleotide primer for the detection of SNP TSC0052094
tgtatcgttttt

SEQ ID NO: 360484 - DNA, 12 bp, Artificial Sequence
  Oligonucleotide primer for the detection of SNP TSC0052094
ttacaccactcc

SEQ ID NO: 360485 - DNA, 12 bp, Artificial Sequence
  Oligonucleotide primer for the detection of SNP TSC0052094
ttacaccgctcc

SEQ ID NO: 360486 - DNA, 12 bp, Artificial Sequence
  Oligonucleotide primer for the detection of SNP TSC0052095
agtatgtatgtg

SEQ ID NO: 360487 - DNA, 12 bp, Artificial Sequence
  Oligonucleotide primer for the detection of SNP TSC0052095
agtatgtacgtg

SEQ ID NO: 360488 - DNA, 12 bp, Artificial Sequence
  Oligonucleotide primer for the detection of SNP TSC0052096
caaaaccctttt

SEQ ID NO: 360489 - DNA, 12 bp, Artificial Sequence
  Oligonucleotide primer for the detection of SNP TSC0052096
taaaaagaaata

SEQ ID NO: 360490 - DNA, 12 bp, Artificial Sequence
  Oligonucleotide primer for the detection of SNP TSC0006625
accaaaaactac

SEQ ID NO: 360491 - DNA, 12 bp, Artificial Sequence
  Oligonucleotide primer for the detection of SNP TSC0006625
gaattggagtta

SEQ ID NO: 360492 - DNA, 12 bp, Artificial Sequence
  Oligonucleotide primer for the detection of SNP TSC0052099
gatagttataat

SEQ ID NO: 360493 - DNA, 12 bp, Artificial Sequence
  Oligonucleotide primer for the detection of SNP TSC0052099
acaaccataata

SEQ ID NO: 360494 - DNA, 12 bp, Artificial Sequence
  Oligonucleotide primer for the detection of SNP TSC0000445
ttaataaaattt

SEQ ID NO: 360495 - DNA, 12 bp, Artificial Sequence
  Oligonucleotide primer for the detection of SNP TSC0052101
ataatttacatt

SEQ ID NO: 360496 - DNA, 12 bp, Artificial Sequence
  Oligonucleotide primer for the detection of SNP TSC0052101
attatttattag

SEQ ID NO: 360497 - DNA, 12 bp, Artificial Sequence
  Oligonucleotide primer for the detection of SNP TSC0052102
atgggtttgtaa

SEQ ID NO: 360498 - DNA, 12 bp, Artificial Sequence
  Oligonucleotide primer for the detection of SNP TSC0052103
caaaattaaatc

SEQ ID NO: 360499 - DNA, 12 bp, Artificial Sequence
  Oligonucleotide primer for the detection of SNP TSC0052103
cgaaattaaatc

SEQ ID NO: 360500 - DNA, 12 bp, Artificial Sequence
  Oligonucleotide primer for the detection of SNP TSC0052103
atattagtgttg

SEQ ID NO: 360501 - DNA, 12 bp, Artificial Sequence
  Oligonucleotide primer for the detection of SNP TSC0052103
acatcaatacta

SEQ ID NO: 360502 - DNA, 12 bp, Artificial Sequence
  Oligonucleotide primer for the detection of SNP TSC0052103
tgaaattgagtt

SEQ ID NO: 360503 - DNA, 12 bp, Artificial Sequence
  Oligonucleotide primer for the detection of SNP TSC0052103
cgaaattgagtt

SEQ ID NO: 360504 - DNA, 12 bp, Artificial Sequence
  Oligonucleotide primer for the detection of SNP TSC0052104
tttattatattc

SEQ ID NO: 360505 - DNA, 12 bp, Artificial Sequence
  Oligonucleotide primer for the detection of SNP TSC0052105
ttaatatttatg

SEQ ID NO: 360506 - DNA, 12 bp, Artificial Sequence
  Oligonucleotide primer for the detection of SNP TSC0007345
tcttctatcttt

SEQ ID NO: 360507 - DNA, 12 bp, Artificial Sequence
  Oligonucleotide primer for the detection of SNP TSC0007345
gaagaaagggta

SEQ ID NO: 360508 - DNA, 12 bp, Artificial Sequence
  Oligonucleotide primer for the detection of SNP TSC0052106
attttccttata

SEQ ID NO: 360509 - DNA, 12 bp, Artificial Sequence
  Oligonucleotide primer for the detection of SNP TSC0052106
agtaaaagattt

SEQ ID NO: 360510 - DNA, 12 bp, Artificial Sequence
  Oligonucleotide primer for the detection of SNP TSC0052106
caacaaaaaatc

SEQ ID NO: 360511 - DNA, 12 bp, Artificial Sequence
  Oligonucleotide primer for the detection of SNP TSC0052107
caaaactttacc

SEQ ID NO: 360512 - DNA, 12 bp, Artificial Sequence
  Oligonucleotide primer for the detection of SNP TSC0052107
atagggatatag

SEQ ID NO: 360513 - DNA, 12 bp, Artificial Sequence
  Oligonucleotide primer for the detection of SNP TSC0052109
ggtattttttta

SEQ ID NO: 360514 - DNA, 12 bp, Artificial Sequence
  Oligonucleotide primer for the detection of SNP TSC0052110
actataccacac

SEQ ID NO: 360515 - DNA, 12 bp, Artificial Sequence
  Oligonucleotide primer for the detection of SNP TSC0052110
tttatttagtgg

SEQ ID NO: 360516 - DNA, 12 bp, Artificial Sequence
  Oligonucleotide primer for the detection of SNP TSC0052110
ttcatctaataa

SEQ ID NO: 360517 - DNA, 12 bp, Artificial Sequence
  Oligonucleotide primer for the detection of SNP TSC0052110
attgtattatat

SEQ ID NO: 360518 - DNA, 12 bp, Artificial Sequence
  Oligonucleotide primer for the detection of SNP TSC0052112
attgtggagtgt

SEQ ID NO: 360519 - DNA, 12 bp, Artificial Sequence
  Oligonucleotide primer for the detection of SNP TSC0052112
actataaaatac

SEQ ID NO: 360520 - DNA, 12 bp, Artificial Sequence
  Oligonucleotide primer for the detection of SNP TSC0052112
atgttaaaaaag

SEQ ID NO: 360521 - DNA, 12 bp, Artificial Sequence
  Oligonucleotide primer for the detection of SNP TSC0052113
atacaaattaca

SEQ ID NO: 360522 - DNA, 12 bp, Artificial Sequence
  Oligonucleotide primer for the detection of SNP TSC0052113
tatttttagtgt

SEQ ID NO: 360523 - DNA, 12 bp, Artificial Sequence
  Oligonucleotide primer for the detection of SNP TSC0052113
actttcaatata

SEQ ID NO: 360524 - DNA, 12 bp, Artificial Sequence
  Oligonucleotide primer for the detection of SNP TSC0052113
tataagttgtat

SEQ ID NO: 360525 - DNA, 12 bp, Artificial Sequence
  Oligonucleotide primer for the detection of SNP TSC0052115
ttaattttaatt

SEQ ID NO: 360526 - DNA, 12 bp, Artificial Sequence
  Oligonucleotide primer for the detection of SNP TSC0052115
ttggttttaatt

SEQ ID NO: 360527 - DNA, 12 bp, Artificial Sequence
  Oligonucleotide primer for the detection of SNP TSC0052116
caatatatctct

SEQ ID NO: 360528 - DNA, 12 bp, Artificial Sequence
  Oligonucleotide primer for the detection of SNP TSC0052118
tcaacctttata

SEQ ID NO: 360529 - DNA, 12 bp, Artificial Sequence
  Oligonucleotide primer for the detection of SNP TSC0052118
attatgattaat

SEQ ID NO: 360530 - DNA, 12 bp, Artificial Sequence
  Oligonucleotide primer for the detection of SNP TSC0052118
attataactaat

SEQ ID NO: 360531 - DNA, 12 bp, Artificial Sequence
  Oligonucleotide primer for the detection of SNP TSC0005510
attaataacatt

SEQ ID NO: 360532 - DNA, 12 bp, Artificial Sequence
  Oligonucleotide primer for the detection of SNP TSC0005511
tccaaataattc

SEQ ID NO: 360533 - DNA, 12 bp, Artificial Sequence
  Oligonucleotide primer for the detection of SNP TSC0052119
acctatcaccta

SEQ ID NO: 360534 - DNA, 12 bp, Artificial Sequence
  Oligonucleotide primer for the detection of SNP TSC0052119
agagtttaatat

SEQ ID NO: 360535 - DNA, 12 bp, Artificial Sequence
  Oligonucleotide primer for the detection of SNP TSC0052119
aaaacttaatac

SEQ ID NO: 360536 - DNA, 12 bp, Artificial Sequence
  Oligonucleotide primer for the detection of SNP TSC0052119
aatttattattt

SEQ ID NO: 360537 - DNA, 12 bp, Artificial Sequence
  Oligonucleotide primer for the detection of SNP TSC0052120
taacttcacccc

SEQ ID NO: 360538 - DNA, 12 bp, Artificial Sequence
  Oligonucleotide primer for the detection of SNP TSC0052120
gaggagtgatag

SEQ ID NO: 360539 - DNA, 12 bp, Artificial Sequence
  Oligonucleotide primer for the detection of SNP TSC0052121
ctatctacctaa

SEQ ID NO: 360540 - DNA, 12 bp, Artificial Sequence
  Oligonucleotide primer for the detection of SNP TSC0052121
gtttttggaaat

SEQ ID NO: 360541 - DNA, 12 bp, Artificial Sequence
  Oligonucleotide primer for the detection of SNP TSC0052121
aactcctaaaaa

SEQ ID NO: 360542 - DNA, 12 bp, Artificial Sequence
  Oligonucleotide primer for the detection of SNP TSC0007234
aaaaactaacaa

SEQ ID NO: 360543 - DNA, 12 bp, Artificial Sequence
  Oligonucleotide primer for the detection of SNP TSC0007234
tttggagttaga

SEQ ID NO: 360544 - DNA, 12 bp, Artificial Sequence
  Oligonucleotide primer for the detection of SNP TSC0007234
gggggttgatag

SEQ ID NO: 360545 - DNA, 12 bp, Artificial Sequence
  Oligonucleotide primer for the detection of SNP TSC0007235
taattaaataac

SEQ ID NO: 360546 - DNA, 12 bp, Artificial Sequence
  Oligonucleotide primer for the detection of SNP TSC0052128
attcactaaact

SEQ ID NO: 360547 - DNA, 12 bp, Artificial Sequence
  Oligonucleotide primer for the detection of SNP TSC0052128
atgtggtttata

SEQ ID NO: 360548 - DNA, 12 bp, Artificial Sequence
  Oligonucleotide primer for the detection of SNP TSC0052129
taatacaaccct

SEQ ID NO: 360549 - DNA, 12 bp, Artificial Sequence
  Oligonucleotide primer for the detection of SNP TSC0052129
tagggaattgat

SEQ ID NO: 360550 - DNA, 12 bp, Artificial Sequence
  Oligonucleotide primer for the detection of SNP TSC0052129
tgatataatttt

SEQ ID NO: 360551 - DNA, 12 bp, Artificial Sequence
  Oligonucleotide primer for the detection of SNP TSC0052130
ccaacaaaaccc

SEQ ID NO: 360552 - DNA, 12 bp, Artificial Sequence
  Oligonucleotide primer for the detection of SNP TSC0052130
gatgtttatgta

SEQ ID NO: 360553 - DNA, 12 bp, Artificial Sequence
  Oligonucleotide primer for the detection of SNP TSC0052130
aatatctatata

SEQ ID NO: 360554 - DNA, 12 bp, Artificial Sequence
  Oligonucleotide primer for the detection of SNP TSC0052130
ttagtagggttt

SEQ ID NO: 360555 - DNA, 12 bp, Artificial Sequence
  Oligonucleotide primer for the detection of SNP TSC0052131
aaatccaccatt

SEQ ID NO: 360556 - DNA, 12 bp, Artificial Sequence
  Oligonucleotide primer for the detection of SNP TSC0052131
atagattgtata

SEQ ID NO: 360557 - DNA, 12 bp, Artificial Sequence
  Oligonucleotide primer for the detection of SNP TSC0052132
aaaacacaactc

SEQ ID NO: 360558 - DNA, 12 bp, Artificial Sequence
  Oligonucleotide primer for the detection of SNP TSC0052132
gttggaatggta

SEQ ID NO: 360559 - DNA, 12 bp, Artificial Sequence
  Oligonucleotide primer for the detection of SNP TSC0052132
gttggaacggta

SEQ ID NO: 360560 - DNA, 12 bp, Artificial Sequence
  Oligonucleotide primer for the detection of SNP TSC0052133
aagaaaagagaa

SEQ ID NO: 360561 - DNA, 12 bp, Artificial Sequence
  Oligonucleotide primer for the detection of SNP TSC0052134
caaaataaaacc

SEQ ID NO: 360562 - DNA, 12 bp, Artificial Sequence
  Oligonucleotide primer for the detection of SNP TSC0052135
aaccaccaacca

SEQ ID NO: 360563 - DNA, 12 bp, Artificial Sequence
  Oligonucleotide primer for the detection of SNP TSC0052135
aaccgccaacca

SEQ ID NO: 360564 - DNA, 12 bp, Artificial Sequence
  Oligonucleotide primer for the detection of SNP TSC0052135
aggtgtttaaat

SEQ ID NO: 360565 - DNA, 12 bp, Artificial Sequence
  Oligonucleotide primer for the detection of SNP TSC0052135
aaatactcaaac

SEQ ID NO: 360566 - DNA, 12 bp, Artificial Sequence
  Oligonucleotide primer for the detection of SNP TSC0052135
taattgttagtt

SEQ ID NO: 360567 - DNA, 12 bp, Artificial Sequence
  Oligonucleotide primer for the detection of SNP TSC0052135
taatcgttagtt

SEQ ID NO: 360568 - DNA, 12 bp, Artificial Sequence
  Oligonucleotide primer for the detection of SNP TSC0052137
ttaataatcctt

SEQ ID NO: 360569 - DNA, 12 bp, Artificial Sequence
  Oligonucleotide primer for the detection of SNP TSC0052137
aaaagtttgaaa

SEQ ID NO: 360570 - DNA, 12 bp, Artificial Sequence
  Oligonucleotide primer for the detection of SNP TSC0007659
tgttggtatata

SEQ ID NO: 360571 - DNA, 12 bp, Artificial Sequence
  Oligonucleotide primer for the detection of SNP TSC0052138
aatttattcatt

SEQ ID NO: 360572 - DNA, 12 bp, Artificial Sequence
  Oligonucleotide primer for the detection of SNP TSC0052139
atataaaaaatc

SEQ ID NO: 360573 - DNA, 12 bp, Artificial Sequence
  Oligonucleotide primer for the detection of SNP TSC0052140
atcatctatctc

SEQ ID NO: 360574 - DNA, 12 bp, Artificial Sequence
  Oligonucleotide primer for the detection of SNP TSC0052140
tatagatgggaa

SEQ ID NO: 360575 - DNA, 12 bp, Artificial Sequence
  Oligonucleotide primer for the detection of SNP TSC0052141
cacgattaacac

SEQ ID NO: 360576 - DNA, 12 bp, Artificial Sequence
  Oligonucleotide primer for the detection of SNP TSC0052141
agaatattattg

SEQ ID NO: 360577 - DNA, 12 bp, Artificial Sequence
  Oligonucleotide primer for the detection of SNP TSC0052142
taatttatcaat

SEQ ID NO: 360578 - DNA, 12 bp, Artificial Sequence
  Oligonucleotide primer for the detection of SNP TSC0052143
ataaaatcattc

SEQ ID NO: 360579 - DNA, 12 bp, Artificial Sequence
  Oligonucleotide primer for the detection of SNP TSC0052143
aggaaaagttta

SEQ ID NO: 360580 - DNA, 12 bp, Artificial Sequence
  Oligonucleotide primer for the detection of SNP TSC0052144
catttaaacaaa

SEQ ID NO: 360581 - DNA, 12 bp, Artificial Sequence
  Oligonucleotide primer for the detection of SNP TSC0052144
accctaactcta

SEQ ID NO: 360582 - DNA, 12 bp, Artificial Sequence
  Oligonucleotide primer for the detection of SNP TSC0052144
tatttaaataga

SEQ ID NO: 360583 - DNA, 12 bp, Artificial Sequence
  Oligonucleotide primer for the detection of SNP TSC0052145
tttaaaaaaacc

SEQ ID NO: 360584 - DNA, 12 bp, Artificial Sequence
  Oligonucleotide primer for the detection of SNP TSC0052145
taatttgataag

SEQ ID NO: 360585 - DNA, 12 bp, Artificial Sequence
  Oligonucleotide primer for the detection of SNP TSC0052146
attaattcaaac

SEQ ID NO: 360586 - DNA, 12 bp, Artificial Sequence
  Oligonucleotide primer for the detection of SNP TSC0052146
aattattattta

SEQ ID NO: 360587 - DNA, 12 bp, Artificial Sequence
  Oligonucleotide primer for the detection of SNP TSC0052148
caacctaaaaat

SEQ ID NO: 360588 - DNA, 12 bp, Artificial Sequence
  Oligonucleotide primer for the detection of SNP TSC0052148
ttattattgtga

SEQ ID NO: 360589 - DNA, 12 bp, Artificial Sequence
  Oligonucleotide primer for the detection of SNP TSC0052149
tctataatatct

SEQ ID NO: 360590 - DNA, 12 bp, Artificial Sequence
  Oligonucleotide primer for the detection of SNP TSC0052149
aagaaaaggagg

SEQ ID NO: 360591 - DNA, 12 bp, Artificial Sequence
  Oligonucleotide primer for the detection of SNP TSC0052150
aaaaaacactcg

SEQ ID NO: 360592 - DNA, 12 bp, Artificial Sequence
  Oligonucleotide primer for the detection of SNP TSC0052150
ttaaacatttta

SEQ ID NO: 360593 - DNA, 12 bp, Artificial Sequence
  Oligonucleotide primer for the detection of SNP TSC0052150
gaaaaatatttg

SEQ ID NO: 360594 - DNA, 12 bp, Artificial Sequence
  Oligonucleotide primer for the detection of SNP TSC0052150
gaaaaatattcg

SEQ ID NO: 360595 - DNA, 12 bp, Artificial Sequence
  Oligonucleotide primer for the detection of SNP TSC0052151
atattctatata

SEQ ID NO: 360596 - DNA, 12 bp, Artificial Sequence
  Oligonucleotide primer for the detection of SNP TSC0052151
tgtaatatatat

SEQ ID NO: 360597 - DNA, 12 bp, Artificial Sequence
  Oligonucleotide primer for the detection of SNP TSC0052152
tttttcatttca

SEQ ID NO: 360598 - DNA, 12 bp, Artificial Sequence
  Oligonucleotide primer for the detection of SNP TSC0052152
ttttacccttac

SEQ ID NO: 360599 - DNA, 12 bp, Artificial Sequence
  Oligonucleotide primer for the detection of SNP TSC0052153
tattttgaagaa

SEQ ID NO: 360600 - DNA, 12 bp, Artificial Sequence
  Oligonucleotide primer for the detection of SNP TSC0052154
ttaacttccccc

SEQ ID NO: 360601 - DNA, 12 bp, Artificial Sequence
  Oligonucleotide primer for the detection of SNP TSC0052154
taagggagagga

SEQ ID NO: 360602 - DNA, 12 bp, Artificial Sequence
  Oligonucleotide primer for the detection of SNP TSC0052157
ataatcaatcct

SEQ ID NO: 360603 - DNA, 12 bp, Artificial Sequence
  Oligonucleotide primer for the detection of SNP TSC0052157
gttacgtttaga

SEQ ID NO: 360604 - DNA, 12 bp, Artificial Sequence
  Oligonucleotide primer for the detection of SNP TSC0052158
ctacataaccat

SEQ ID NO: 360605 - DNA, 12 bp, Artificial Sequence
  Oligonucleotide primer for the detection of SNP TSC0052158
ggttaattgtta

SEQ ID NO: 360606 - DNA, 12 bp, Artificial Sequence
  Oligonucleotide primer for the detection of SNP TSC0052159
aaataacactat

SEQ ID NO: 360607 - DNA, 12 bp, Artificial Sequence
  Oligonucleotide primer for the detection of SNP TSC0052159
atttatgaagtg

SEQ ID NO: 360608 - DNA, 12 bp, Artificial Sequence
  Oligonucleotide primer for the detection of SNP TSC0052159
atttacgaagtg

SEQ ID NO: 360609 - DNA, 12 bp, Artificial Sequence
  Oligonucleotide primer for the detection of SNP TSC0052160
ccacccacaaaa

SEQ ID NO: 360610 - DNA, 12 bp, Artificial Sequence
  Oligonucleotide primer for the detection of SNP TSC0052160
ccacccacgaaa

SEQ ID NO: 360611 - DNA, 12 bp, Artificial Sequence
  Oligonucleotide primer for the detection of SNP TSC0052160
ataatattatac

SEQ ID NO: 360612 - DNA, 12 bp, Artificial Sequence
  Oligonucleotide primer for the detection of SNP TSC0052160
ataacactatac

SEQ ID NO: 360613 - DNA, 12 bp, Artificial Sequence
  Oligonucleotide primer for the detection of SNP TSC0052160
tatttacgaagt

SEQ ID NO: 360614 - DNA, 12 bp, Artificial Sequence
  Oligonucleotide primer for the detection of SNP TSC0052163
actccactctac

SEQ ID NO: 360615 - DNA, 12 bp, Artificial Sequence
  Oligonucleotide primer for the detection of SNP TSC0052163
tttttattagta

SEQ ID NO: 360616 - DNA, 12 bp, Artificial Sequence
  Oligonucleotide primer for the detection of SNP TSC0052164
tctatacttttc

SEQ ID NO: 360617 - DNA, 12 bp, Artificial Sequence
  Oligonucleotide primer for the detection of SNP TSC0052164
tataaataaagt

SEQ ID NO: 360618 - DNA, 12 bp, Artificial Sequence
  Oligonucleotide primer for the detection of SNP TSC0052165
ttaatttatgat

SEQ ID NO: 360619 - DNA, 12 bp, Artificial Sequence
  Oligonucleotide primer for the detection of SNP TSC0052165
ttaatttatgac

SEQ ID NO: 360620 - DNA, 12 bp, Artificial Sequence
  Oligonucleotide primer for the detection of SNP TSC0052165
tcaacccataac

SEQ ID NO: 360621 - DNA, 12 bp, Artificial Sequence
  Oligonucleotide primer for the detection of SNP TSC0052167
atacccataacc

SEQ ID NO: 360622 - DNA, 12 bp, Artificial Sequence
  Oligonucleotide primer for the detection of SNP TSC0052167
ttggaggtgtgg

SEQ ID NO: 360623 - DNA, 12 bp, Artificial Sequence
  Oligonucleotide primer for the detection of SNP TSC0052167
ctaaaaatataa

SEQ ID NO: 360624 - DNA, 12 bp, Artificial Sequence
  Oligonucleotide primer for the detection of SNP TSC0052167
atgtttatagtt

SEQ ID NO: 360625 - DNA, 12 bp, Artificial Sequence
  Oligonucleotide primer for the detection of SNP TSC0052168
ggtaaatagaaa

SEQ ID NO: 360626 - DNA, 12 bp, Artificial Sequence
  Oligonucleotide primer for the detection of SNP TSC0052169
ccttcaattaac

SEQ ID NO: 360627 - DNA, 12 bp, Artificial Sequence
  Oligonucleotide primer for the detection of SNP TSC0052169
ggataagttagg

SEQ ID NO: 360628 - DNA, 12 bp, Artificial Sequence
  Oligonucleotide primer for the detection of SNP TSC0052170
ccctaataactc

SEQ ID NO: 360629 - DNA, 12 bp, Artificial Sequence
  Oligonucleotide primer for the detection of SNP TSC0052170
ttttatagaata

SEQ ID NO: 360630 - DNA, 12 bp, Artificial Sequence
  Oligonucleotide primer for the detection of SNP TSC0052172
caatatttacct

SEQ ID NO: 360631 - DNA, 12 bp, Artificial Sequence
  Oligonucleotide primer for the detection of SNP TSC0052173
atggatatgatg

SEQ ID NO: 360632 - DNA, 12 bp, Artificial Sequence
  Oligonucleotide primer for the detection of SNP TSC0052173
aaattaagataa

SEQ ID NO: 360633 - DNA, 12 bp, Artificial Sequence
  Oligonucleotide primer for the detection of SNP TSC0052174
acaacactaaat

SEQ ID NO: 360634 - DNA, 12 bp, Artificial Sequence
  Oligonucleotide primer for the detection of SNP TSC0052177
ttataccaaaaa

SEQ ID NO: 360635 - DNA, 12 bp, Artificial Sequence
  Oligonucleotide primer for the detection of SNP TSC0052177
attttgtaaatt

SEQ ID NO: 360636 - DNA, 12 bp, Artificial Sequence
  Oligonucleotide primer for the detection of SNP TSC0052177
ccttacaaatta

SEQ ID NO: 360637 - DNA, 12 bp, Artificial Sequence
  Oligonucleotide primer for the detection of SNP TSC0052178
atacgaaaatca

SEQ ID NO: 360638 - DNA, 12 bp, Artificial Sequence
  Oligonucleotide primer for the detection of SNP TSC0052178
ttagttatttga

SEQ ID NO: 360639 - DNA, 12 bp, Artificial Sequence
  Oligonucleotide primer for the detection of SNP TSC0052178
ttagttattcga

SEQ ID NO: 360640 - DNA, 12 bp, Artificial Sequence
  Oligonucleotide primer for the detection of SNP TSC0052181
tataggtggaaa

SEQ ID NO: 360641 - DNA, 12 bp, Artificial Sequence
  Oligonucleotide primer for the detection of SNP TSC0052182
taaagtaattat

SEQ ID NO: 360642 - DNA, 12 bp, Artificial Sequence
  Oligonucleotide primer for the detection of SNP TSC0052182
aaaacaaccaca

SEQ ID NO: 360643 - DNA, 12 bp, Artificial Sequence
  Oligonucleotide primer for the detection of SNP TSC0052182
tgtttatgtatt

SEQ ID NO: 360644 - DNA, 12 bp, Artificial Sequence
  Oligonucleotide primer for the detection of SNP TSC0052185
aggaggcggagg

SEQ ID NO: 360645 - DNA, 12 bp, Artificial Sequence
  Oligonucleotide primer for the detection of SNP TSC0052186
ttaattttcttt

SEQ ID NO: 360646 - DNA, 12 bp, Artificial Sequence
  Oligonucleotide primer for the detection of SNP TSC0052189
cctcctccacac

SEQ ID NO: 360647 - DNA, 12 bp, Artificial Sequence
  Oligonucleotide primer for the detection of SNP TSC0052190
cccctcccattc

SEQ ID NO: 360648 - DNA, 12 bp, Artificial Sequence
  Oligonucleotide primer for the detection of SNP TSC0052190
cccctcccgttc

SEQ ID NO: 360649 - DNA, 12 bp, Artificial Sequence
  Oligonucleotide primer for the detection of SNP TSC0052190
tggttagggggt

SEQ ID NO: 360650 - DNA, 12 bp, Artificial Sequence
  Oligonucleotide primer for the detection of SNP TSC0052195
tagtagttaata

SEQ ID NO: 360651 - DNA, 12 bp, Artificial Sequence
  Oligonucleotide primer for the detection of SNP TSC0052201
ttaccaaccata

SEQ ID NO: 360652 - DNA, 12 bp, Artificial Sequence
  Oligonucleotide primer for the detection of SNP TSC0052201
tgattagttgat

SEQ ID NO: 360653 - DNA, 12 bp, Artificial Sequence
  Oligonucleotide primer for the detection of SNP TSC0052201
tgattagttgac

SEQ ID NO: 360654 - DNA, 12 bp, Artificial Sequence
  Oligonucleotide primer for the detection of SNP TSC0052201
gttattaattat

SEQ ID NO: 360655 - DNA, 12 bp, Artificial Sequence
  Oligonucleotide primer for the detection of SNP TSC0052202
cataaaaaaata

SEQ ID NO: 360656 - DNA, 12 bp, Artificial Sequence
  Oligonucleotide primer for the detection of SNP TSC0052202
tttcttctttaa

SEQ ID NO: 360657 - DNA, 12 bp, Artificial Sequence
  Oligonucleotide primer for the detection of SNP TSC0052202
tatggaaaaata

SEQ ID NO: 360658 - DNA, 12 bp, Artificial Sequence
  Oligonucleotide primer for the detection of SNP TSC0052203
ccttttaaatac

SEQ ID NO: 360659 - DNA, 12 bp, Artificial Sequence
  Oligonucleotide primer for the detection of SNP TSC0052203
tgaatgtaggta

SEQ ID NO: 360660 - DNA, 12 bp, Artificial Sequence
  Oligonucleotide primer for the detection of SNP TSC0052204
ttttctataaat

SEQ ID NO: 360661 - DNA, 12 bp, Artificial Sequence
  Oligonucleotide primer for the detection of SNP TSC0052204
ttgaattaattt

SEQ ID NO: 360662 - DNA, 12 bp, Artificial Sequence
  Oligonucleotide primer for the detection of SNP TSC0052204
ttaaatcaatcc

SEQ ID NO: 360663 - DNA, 12 bp, Artificial Sequence
  Oligonucleotide primer for the detection of SNP TSC0052206
tctccatctaat

SEQ ID NO: 360664 - DNA, 12 bp, Artificial Sequence
  Oligonucleotide primer for the detection of SNP TSC0052206
gtatgaggaata

SEQ ID NO: 360665 - DNA, 12 bp, Artificial Sequence
  Oligonucleotide primer for the detection of SNP TSC0052206
gtacgaggaata

SEQ ID NO: 360666 - DNA, 12 bp, Artificial Sequence
  Oligonucleotide primer for the detection of SNP TSC0052209
gaggtgggtgga

SEQ ID NO: 360667 - DNA, 12 bp, Artificial Sequence
  Oligonucleotide primer for the detection of SNP TSC0052209
gaaataaataaa

SEQ ID NO: 360668 - DNA, 12 bp, Artificial Sequence
  Oligonucleotide primer for the detection of SNP TSC0052211
aacctcctcacc

SEQ ID NO: 360669 - DNA, 12 bp, Artificial Sequence
  Oligonucleotide primer for the detection of SNP TSC0052211
tgagggaggggg

SEQ ID NO: 360670 - DNA, 12 bp, Artificial Sequence
  Oligonucleotide primer for the detection of SNP TSC0052211
cgagggaggggg

SEQ ID NO: 360671 - DNA, 12 bp, Artificial Sequence
  Oligonucleotide primer for the detection of SNP TSC0052212
actaacaataat

SEQ ID NO: 360672 - DNA, 12 bp, Artificial Sequence
  Oligonucleotide primer for the detection of SNP TSC0052212
tttatgaagaaa

SEQ ID NO: 360673 - DNA, 12 bp, Artificial Sequence
  Oligonucleotide primer for the detection of SNP TSC0052213
tcataactcact

SEQ ID NO: 360674 - DNA, 12 bp, Artificial Sequence
  Oligonucleotide primer for the detection of SNP TSC0052213
aggagtttgagg

SEQ ID NO: 360675 - DNA, 12 bp, Artificial Sequence
  Oligonucleotide primer for the detection of SNP TSC0052215
acctctaccccc

SEQ ID NO: 360676 - DNA, 12 bp, Artificial Sequence
  Oligonucleotide primer for the detection of SNP TSC0052216
atcacccacatt

SEQ ID NO: 360677 - DNA, 12 bp, Artificial Sequence
  Oligonucleotide primer for the detection of SNP TSC0052216
gaaagtattata

SEQ ID NO: 360678 - DNA, 12 bp, Artificial Sequence
  Oligonucleotide primer for the detection of SNP TSC0052217
ctaaaaactcta

SEQ ID NO: 360679 - DNA, 12 bp, Artificial Sequence
  Oligonucleotide primer for the detection of SNP TSC0052217
ggggttttgaga

SEQ ID NO: 360680 - DNA, 12 bp, Artificial Sequence
  Oligonucleotide primer for the detection of SNP TSC0052224
aaataaacctcc

SEQ ID NO: 360681 - DNA, 12 bp, Artificial Sequence
  Oligonucleotide primer for the detection of SNP TSC0052224
gggtttttaggg

SEQ ID NO: 360682 - DNA, 12 bp, Artificial Sequence
  Oligonucleotide primer for the detection of SNP TSC0052227
aaagtttgtttg

SEQ ID NO: 360683 - DNA, 12 bp, Artificial Sequence
  Oligonucleotide primer for the detection of SNP TSC0052228
aaatcaactttc

SEQ ID NO: 360684 - DNA, 12 bp, Artificial Sequence
  Oligonucleotide primer for the detection of SNP TSC0052228
gtatataggagt

SEQ ID NO: 360685 - DNA, 12 bp, Artificial Sequence
  Oligonucleotide primer for the detection of SNP TSC0052228
tacacaaaaaca

SEQ ID NO: 360686 - DNA, 12 bp, Artificial Sequence
  Oligonucleotide primer for the detection of SNP TSC0052228
ggattagttttt

SEQ ID NO: 360687 - DNA, 12 bp, Artificial Sequence
  Oligonucleotide primer for the detection of SNP TSC0052228
ggattagttttc

SEQ ID NO: 360688 - DNA, 12 bp, Artificial Sequence
  Oligonucleotide primer for the detection of SNP TSC0052229
aaaatctttaac

SEQ ID NO: 360689 - DNA, 12 bp, Artificial Sequence
  Oligonucleotide primer for the detection of SNP TSC0052230
ctctatactttc

SEQ ID NO: 360690 - DNA, 12 bp, Artificial Sequence
  Oligonucleotide primer for the detection of SNP TSC0052230
agaaaaattgag

SEQ ID NO: 360691 - DNA, 12 bp, Artificial Sequence
  Oligonucleotide primer for the detection of SNP TSC0052230
agaaaaatcgag

SEQ ID NO: 360692 - DNA, 12 bp, Artificial Sequence
  Oligonucleotide primer for the detection of SNP TSC0052231
aacccattactt

SEQ ID NO: 360693 - DNA, 12 bp, Artificial Sequence
  Oligonucleotide primer for the detection of SNP TSC0052231
gtggtatatttg

SEQ ID NO: 360694 - DNA, 12 bp, Artificial Sequence
  Oligonucleotide primer for the detection of SNP TSC0052232
tctttctatttt

SEQ ID NO: 360695 - DNA, 12 bp, Artificial Sequence
  Oligonucleotide primer for the detection of SNP TSC0052232
attttttggtgg

SEQ ID NO: 360696 - DNA, 12 bp, Artificial Sequence
  Oligonucleotide primer for the detection of SNP TSC0052232
actctctaataa

SEQ ID NO: 360697 - DNA, 12 bp, Artificial Sequence
  Oligonucleotide primer for the detection of SNP TSC0052233
cctcaattttat

SEQ ID NO: 360698 - DNA, 12 bp, Artificial Sequence
  Oligonucleotide primer for the detection of SNP TSC0052233
ttaaatattgta

SEQ ID NO: 360699 - DNA, 12 bp, Artificial Sequence
  Oligonucleotide primer for the detection of SNP TSC0052236
ttaataacatta

SEQ ID NO: 360700 - DNA, 12 bp, Artificial Sequence
  Oligonucleotide primer for the detection of SNP TSC0052236
atgatgttttag

SEQ ID NO: 360701 - DNA, 12 bp, Artificial Sequence
  Oligonucleotide primer for the detection of SNP TSC0052236
ttagtaatattg

SEQ ID NO: 360702 - DNA, 12 bp, Artificial Sequence
  Oligonucleotide primer for the detection of SNP TSC0052237
ctctctacaatc

SEQ ID NO: 360703 - DNA, 12 bp, Artificial Sequence
  Oligonucleotide primer for the detection of SNP TSC0052237
ctctctacgatc

SEQ ID NO: 360704 - DNA, 12 bp, Artificial Sequence
  Oligonucleotide primer for the detection of SNP TSC0052237
tagtatagagga

SEQ ID NO: 360705 - DNA, 12 bp, Artificial Sequence
  Oligonucleotide primer for the detection of SNP TSC0052238
atcctataaaac

SEQ ID NO: 360706 - DNA, 12 bp, Artificial Sequence
  Oligonucleotide primer for the detection of SNP TSC0052238
tgtgatttggta

SEQ ID NO: 360707 - DNA, 12 bp, Artificial Sequence
  Oligonucleotide primer for the detection of SNP TSC0052238
tgcgatttggta

SEQ ID NO: 360708 - DNA, 12 bp, Artificial Sequence
  Oligonucleotide primer for the detection of SNP TSC0052243
acaaataaccaa

SEQ ID NO: 360709 - DNA, 12 bp, Artificial Sequence
  Oligonucleotide primer for the detection of SNP TSC0052243
gttgtttgtggt

SEQ ID NO: 360710 - DNA, 12 bp, Artificial Sequence
  Oligonucleotide primer for the detection of SNP TSC0052243
attacctataac

SEQ ID NO: 360711 - DNA, 12 bp, Artificial Sequence
  Oligonucleotide primer for the detection of SNP TSC0052243
ataagtggttag

SEQ ID NO: 360712 - DNA, 12 bp, Artificial Sequence
  Oligonucleotide primer for the detection of SNP TSC0052244
atctttccaacc

SEQ ID NO: 360713 - DNA, 12 bp, Artificial Sequence
  Oligonucleotide primer for the detection of SNP TSC0052244
ggttgttggtta

SEQ ID NO: 360714 - DNA, 12 bp, Artificial Sequence
  Oligonucleotide primer for the detection of SNP TSC0052244
ggtcgttggtta

SEQ ID NO: 360715 - DNA, 12 bp, Artificial Sequence
  Oligonucleotide primer for the detection of SNP TSC0052245
gtaaaatgagag

SEQ ID NO: 360716 - DNA, 12 bp, Artificial Sequence
  Oligonucleotide primer for the detection of SNP TSC0052248
acccaacaacta

SEQ ID NO: 360717 - DNA, 12 bp, Artificial Sequence
  Oligonucleotide primer for the detection of SNP TSC0052248
acccgacaacta

SEQ ID NO: 360718 - DNA, 12 bp, Artificial Sequence
  Oligonucleotide primer for the detection of SNP TSC0052248
ttggtatttttt

SEQ ID NO: 360719 - DNA, 12 bp, Artificial Sequence
  Oligonucleotide primer for the detection of SNP TSC0052248
taacattcctta

SEQ ID NO: 360720 - DNA, 12 bp, Artificial Sequence
  Oligonucleotide primer for the detection of SNP TSC0052248
tgtttgatagtt

SEQ ID NO: 360721 - DNA, 12 bp, Artificial Sequence
  Oligonucleotide primer for the detection of SNP TSC0052248
tgttcgatagtt

SEQ ID NO: 360722 - DNA, 12 bp, Artificial Sequence
  Oligonucleotide primer for the detection of SNP TSC0052249
taacatcactac

SEQ ID NO: 360723 - DNA, 12 bp, Artificial Sequence
  Oligonucleotide primer for the detection of SNP TSC0052249
gtaagtgtagta

SEQ ID NO: 360724 - DNA, 12 bp, Artificial Sequence
  Oligonucleotide primer for the detection of SNP TSC0052251
ttcactcattct

SEQ ID NO: 360725 - DNA, 12 bp, Artificial Sequence
  Oligonucleotide primer for the detection of SNP TSC0052252
caaataataatt

SEQ ID NO: 360726 - DNA, 12 bp, Artificial Sequence
  Oligonucleotide primer for the detection of SNP TSC0052252
ttaagagagaag

SEQ ID NO: 360727 - DNA, 12 bp, Artificial Sequence
  Oligonucleotide primer for the detection of SNP TSC0052253
tgaatgtatata

SEQ ID NO: 360728 - DNA, 12 bp, Artificial Sequence
  Oligonucleotide primer for the detection of SNP TSC0052253
taaatacataca

SEQ ID NO: 360729 - DNA, 12 bp, Artificial Sequence
  Oligonucleotide primer for the detection of SNP TSC0052253
taagaggtggtg

SEQ ID NO: 360730 - DNA, 12 bp, Artificial Sequence
  Oligonucleotide primer for the detection of SNP TSC0052255
attctataaaat

SEQ ID NO: 360731 - DNA, 12 bp, Artificial Sequence
  Oligonucleotide primer for the detection of SNP TSC0052255
atttatgtatga

SEQ ID NO: 360732 - DNA, 12 bp, Artificial Sequence
  Oligonucleotide primer for the detection of SNP TSC0052256
ttattcactacc

SEQ ID NO: 360733 - DNA, 12 bp, Artificial Sequence
  Oligonucleotide primer for the detection of SNP TSC0052256
tccatcatacta

SEQ ID NO: 360734 - DNA, 12 bp, Artificial Sequence
  Oligonucleotide primer for the detection of SNP TSC0007027
ttgatattgtat

SEQ ID NO: 360735 - DNA, 12 bp, Artificial Sequence
  Oligonucleotide primer for the detection of SNP TSC0007027
tctaacattata

SEQ ID NO: 360736 - DNA, 12 bp, Artificial Sequence
  Oligonucleotide primer for the detection of SNP TSC0007027
ggaataagatat

SEQ ID NO: 360737 - DNA, 12 bp, Artificial Sequence
  Oligonucleotide primer for the detection of SNP TSC0052261
agttaagttgaa

SEQ ID NO: 360738 - DNA, 12 bp, Artificial Sequence
  Oligonucleotide primer for the detection of SNP TSC0052264
caaaaatttctc

SEQ ID NO: 360739 - DNA, 12 bp, Artificial Sequence
  Oligonucleotide primer for the detection of SNP TSC0052264
ggagatggatgg

SEQ ID NO: 360740 - DNA, 12 bp, Artificial Sequence
  Oligonucleotide primer for the detection of SNP TSC0052265
attacaaatacc

SEQ ID NO: 360741 - DNA, 12 bp, Artificial Sequence
  Oligonucleotide primer for the detection of SNP TSC0005604
tccctccctctc

SEQ ID NO: 360742 - DNA, 12 bp, Artificial Sequence
  Oligonucleotide primer for the detection of SNP TSC0005604
tagggaagaagg

SEQ ID NO: 360743 - DNA, 12 bp, Artificial Sequence
  Oligonucleotide primer for the detection of SNP TSC0005605
cttctatccttc

SEQ ID NO: 360744 - DNA, 12 bp, Artificial Sequence
  Oligonucleotide primer for the detection of SNP TSC0005605
gaatttgttagg

SEQ ID NO: 360745 - DNA, 12 bp, Artificial Sequence
  Oligonucleotide primer for the detection of SNP TSC0005605
acctatcaaaaa

SEQ ID NO: 360746 - DNA, 12 bp, Artificial Sequence
  Oligonucleotide primer for the detection of SNP TSC0052268
ctaaccaactca

SEQ ID NO: 360747 - DNA, 12 bp, Artificial Sequence
  Oligonucleotide primer for the detection of SNP TSC0052268
tgtttttgtatt

SEQ ID NO: 360748 - DNA, 12 bp, Artificial Sequence
  Oligonucleotide primer for the detection of SNP TSC0052268
tgtttttgtatc

SEQ ID NO: 360749 - DNA, 12 bp, Artificial Sequence
  Oligonucleotide primer for the detection of SNP TSC0052268
atttttatatca

SEQ ID NO: 360750 - DNA, 12 bp, Artificial Sequence
  Oligonucleotide primer for the detection of SNP TSC0052269
caacttactata

SEQ ID NO: 360751 - DNA, 12 bp, Artificial Sequence
  Oligonucleotide primer for the detection of SNP TSC0052269
aaaactctaaac

SEQ ID NO: 360752 - DNA, 12 bp, Artificial Sequence
  Oligonucleotide primer for the detection of SNP TSC0052269
gaaactctaaac

SEQ ID NO: 360753 - DNA, 12 bp, Artificial Sequence
  Oligonucleotide primer for the detection of SNP TSC0052269
taatttattgtg

SEQ ID NO: 360754 - DNA, 12 bp, Artificial Sequence
  Oligonucleotide primer for the detection of SNP TSC0052270
ctcctaacctat

SEQ ID NO: 360755 - DNA, 12 bp, Artificial Sequence
  Oligonucleotide primer for the detection of SNP TSC0052270
taaaagtagaaa

SEQ ID NO: 360756 - DNA, 12 bp, Artificial Sequence
  Oligonucleotide primer for the detection of SNP TSC0052273
cccctccactaa

SEQ ID NO: 360757 - DNA, 12 bp, Artificial Sequence
  Oligonucleotide primer for the detection of SNP TSC0052273
aaataggagtat

SEQ ID NO: 360758 - DNA, 12 bp, Artificial Sequence
  Oligonucleotide primer for the detection of SNP TSC0052273
aacaaaaacata

SEQ ID NO: 360759 - DNA, 12 bp, Artificial Sequence
  Oligonucleotide primer for the detection of SNP TSC0052276
ttcatcctaaca

SEQ ID NO: 360760 - DNA, 12 bp, Artificial Sequence
  Oligonucleotide primer for the detection of SNP TSC0052276
ttcatcctaacg

SEQ ID NO: 360761 - DNA, 12 bp, Artificial Sequence
  Oligonucleotide primer for the detection of SNP TSC0052276
attattaattgt

SEQ ID NO: 360762 - DNA, 12 bp, Artificial Sequence
  Oligonucleotide primer for the detection of SNP TSC0052276
aaccaccaacta

SEQ ID NO: 360763 - DNA, 12 bp, Artificial Sequence
  Oligonucleotide primer for the detection of SNP TSC0052276
ttattttggtgt

SEQ ID NO: 360764 - DNA, 12 bp, Artificial Sequence
  Oligonucleotide primer for the detection of SNP TSC0052276
ttattttggcgt

SEQ ID NO: 360765 - DNA, 12 bp, Artificial Sequence
  Oligonucleotide primer for the detection of SNP TSC0052277
ggaaggagtata

SEQ ID NO: 360766 - DNA, 12 bp, Artificial Sequence
  Oligonucleotide primer for the detection of SNP TSC0052279
attattatcctt

SEQ ID NO: 360767 - DNA, 12 bp, Artificial Sequence
  Oligonucleotide primer for the detection of SNP TSC0052279
taaagtgattat

SEQ ID NO: 360768 - DNA, 12 bp, Artificial Sequence
  Oligonucleotide primer for the detection of SNP TSC0052281
taataaacatat

SEQ ID NO: 360769 - DNA, 12 bp, Artificial Sequence
  Oligonucleotide primer for the detection of SNP TSC0052281
tagattattagg

SEQ ID NO: 360770 - DNA, 12 bp, Artificial Sequence
  Oligonucleotide primer for the detection of SNP TSC0008429
tattttcacatc

SEQ ID NO: 360771 - DNA, 12 bp, Artificial Sequence
  Oligonucleotide primer for the detection of SNP TSC0008429
cccaaactacct

SEQ ID NO: 360772 - DNA, 12 bp, Artificial Sequence
  Oligonucleotide primer for the detection of SNP TSC0052285
ctacctataata

SEQ ID NO: 360773 - DNA, 12 bp, Artificial Sequence
  Oligonucleotide primer for the detection of SNP TSC0052285
gtgaaatatttt

SEQ ID NO: 360774 - DNA, 12 bp, Artificial Sequence
  Oligonucleotide primer for the detection of SNP TSC0052285
gtgaaatatttc

SEQ ID NO: 360775 - DNA, 12 bp, Artificial Sequence
  Oligonucleotide primer for the detection of SNP TSC0052285
ataaaatatttc

SEQ ID NO: 360776 - DNA, 12 bp, Artificial Sequence
  Oligonucleotide primer for the detection of SNP TSC0052285
attatttataat

SEQ ID NO: 360777 - DNA, 12 bp, Artificial Sequence
  Oligonucleotide primer for the detection of SNP TSC0052286
acttttactttt

SEQ ID NO: 360778 - DNA, 12 bp, Artificial Sequence
  Oligonucleotide primer for the detection of SNP TSC0052286
gcttttactttt

SEQ ID NO: 360779 - DNA, 12 bp, Artificial Sequence
  Oligonucleotide primer for the detection of SNP TSC0052286
agaaatttgagg

SEQ ID NO: 360780 - DNA, 12 bp, Artificial Sequence
  Oligonucleotide primer for the detection of SNP TSC0052287
ataacacaatcc

SEQ ID NO: 360781 - DNA, 12 bp, Artificial Sequence
  Oligonucleotide primer for the detection of SNP TSC0052287
ataacgcaatcc

SEQ ID NO: 360782 - DNA, 12 bp, Artificial Sequence
  Oligonucleotide primer for the detection of SNP TSC0008091
attcttttataa

SEQ ID NO: 360783 - DNA, 12 bp, Artificial Sequence
  Oligonucleotide primer for the detection of SNP TSC0008091
tctcaaattcat

SEQ ID NO: 360784 - DNA, 12 bp, Artificial Sequence
  Oligonucleotide primer for the detection of SNP TSC0008091
gtttttttgtag

SEQ ID NO: 360785 - DNA, 12 bp, Artificial Sequence
  Oligonucleotide primer for the detection of SNP TSC0052290
atttataccata

SEQ ID NO: 360786 - DNA, 12 bp, Artificial Sequence
  Oligonucleotide primer for the detection of SNP TSC0052290
tgtatagttaat

SEQ ID NO: 360787 - DNA, 12 bp, Artificial Sequence
  Oligonucleotide primer for the detection of SNP TSC0052290
tgtttatattat

SEQ ID NO: 360788 - DNA, 12 bp, Artificial Sequence
  Oligonucleotide primer for the detection of SNP TSC0052292
ctaaaaaacaca

SEQ ID NO: 360789 - DNA, 12 bp, Artificial Sequence
  Oligonucleotide primer for the detection of SNP TSC0052292
ggtttatttttg

SEQ ID NO: 360790 - DNA, 12 bp, Artificial Sequence
  Oligonucleotide primer for the detection of SNP TSC0052292
atttatccctaa

SEQ ID NO: 360791 - DNA, 12 bp, Artificial Sequence
  Oligonukleotid-Primer
tttaagaaatat

SEQ ID NO: 360792 - DNA, 12 bp, Artificial Sequence
  Oligonucleotide primer for the detection of SNP TSC0052293
cttatatttcct

SEQ ID NO: 360793 - DNA, 12 bp, Artificial Sequence
  Oligonucleotide primer for the detection of SNP TSC0052293
tagagataagat

SEQ ID NO: 360794 - DNA, 12 bp, Artificial Sequence
  Oligonucleotide primer for the detection of SNP TSC0052295
ttaaacaaaaca

SEQ ID NO: 360795 - DNA, 12 bp, Artificial Sequence
  Oligonukleotid-Primer
ggagttatttta

SEQ ID NO: 360796 - DNA, 12 bp, Artificial Sequence
  Oligonucleotide primer for the detection of SNP TSC0052295
aaatcattttaa

SEQ ID NO: 360797 - DNA, 12 bp, Artificial Sequence
  Oligonucleotide primer for the detection of SNP TSC0052295
ttaagtaagata

SEQ ID NO: 360798 - DNA, 12 bp, Artificial Sequence
  Oligonucleotide primer for the detection of SNP TSC0052296
ttaaactttacc

SEQ ID NO: 360799 - DNA, 12 bp, Artificial Sequence
  Oligonukleotid-Primer
ataataaataca

SEQ ID NO: 360800 - DNA, 12 bp, Artificial Sequence
  Oligonucleotide primer for the detection of SNP TSC0052298
cctttaacttca

SEQ ID NO: 360801 - DNA, 12 bp, Artificial Sequence
  Oligonucleotide primer for the detection of SNP TSC0052298
agtaatgaatat

SEQ ID NO: 360802 - DNA, 12 bp, Artificial Sequence
  Oligonucleotide primer for the detection of SNP TSC0052299
tttataaaacaa

SEQ ID NO: 360803 - DNA, 12 bp, Artificial Sequence
  Oligonucleotide primer for the detection of SNP TSC0052299
atttacacataa

SEQ ID NO: 360804 - DNA, 12 bp, Artificial Sequence
  Oligonucleotide primer for the detection of SNP TSC0052299
gtttgtaagata

SEQ ID NO: 360805 - DNA, 12 bp, Artificial Sequence
  Oligonucleotide primer for the detection of SNP TSC0008138
tatataacataa

SEQ ID NO: 360806 - DNA, 12 bp, Artificial Sequence
  Oligonucleotide primer for the detection of SNP TSC0008138
gtaatatgattt

SEQ ID NO: 360807 - DNA, 12 bp, Artificial Sequence
  Oligonucleotide primer for the detection of SNP TSC0052300
ataaaattgaaa

SEQ ID NO: 360808 - DNA, 12 bp, Artificial Sequence
  Oligonucleotide primer for the detection of SNP TSC0052301
ttaaatttacca

SEQ ID NO: 360809 - DNA, 12 bp, Artificial Sequence
  Oligonucleotide primer for the detection of SNP TSC0052301
aaaatggttgat

SEQ ID NO: 360810 - DNA, 12 bp, Artificial Sequence
  Oligonucleotide primer for the detection of SNP TSC0052302
accttttataat

SEQ ID NO: 360811 - DNA, 12 bp, Artificial Sequence
  Oligonukleotid-Primer
caccaataatat

SEQ ID NO: 360812 - DNA, 12 bp, Artificial Sequence
  Oligonucleotide primer for the detection of SNP TSC0052304
aataaacataac

SEQ ID NO: 360813 - DNA, 12 bp, Artificial Sequence
  Oligonucleotide primer for the detection of SNP TSC0052304
agatagtttggg

SEQ ID NO: 360814 - DNA, 12 bp, Artificial Sequence
  Oligonucleotide primer for the detection of SNP TSC0052304
agtgggtatagt

SEQ ID NO: 360815 - DNA, 12 bp, Artificial Sequence
  Oligonukleotid-Primer
gaaataaaaaaa

SEQ ID NO: 360816 - DNA, 12 bp, Artificial Sequence
  Oligonucleotide primer for the detection of SNP TSC0052305
gttattgtaagg

SEQ ID NO: 360817 - DNA, 12 bp, Artificial Sequence
  Oligonucleotide primer for the detection of SNP TSC0052305
actactataaaa

SEQ ID NO: 360818 - DNA, 12 bp, Artificial Sequence
  Oligonucleotide primer for the detection of SNP TSC0052305
ggaatgagaaga

SEQ ID NO: 360819 - DNA, 12 bp, Artificial Sequence
  Oligonucleotide primer for the detection of SNP TSC0052306
ctactctttctc

SEQ ID NO: 360820 - DNA, 12 bp, Artificial Sequence
  Oligonucleotide primer for the detection of SNP TSC0052307
tgttattttgta

SEQ ID NO: 360821 - DNA, 12 bp, Artificial Sequence
  Oligonucleotide primer for the detection of SNP TSC0052307
tactactctaca

SEQ ID NO: 360822 - DNA, 12 bp, Artificial Sequence
  Oligonucleotide primer for the detection of SNP TSC0052308
aaaaaaccttca

SEQ ID NO: 360823 - DNA, 12 bp, Artificial Sequence
  Oligonucleotide primer for the detection of SNP TSC0052308
ttataaattgtt

SEQ ID NO: 360824 - DNA, 12 bp, Artificial Sequence
  Oligonucleotide primer for the detection of SNP TSC0052308
tccacaaactac

SEQ ID NO: 360825 - DNA, 12 bp, Artificial Sequence
  Oligonucleotide primer for the detection of SNP TSC0052309
aaatattcaaaa

SEQ ID NO: 360826 - DNA, 12 bp, Artificial Sequence
  Oligonucleotide primer for the detection of SNP TSC0052309
agtgaatagagt

SEQ ID NO: 360827 - DNA, 12 bp, Artificial Sequence
  Oligonucleotide primer for the detection of SNP TSC0052309
taataaataaaa

SEQ ID NO: 360828 - DNA, 12 bp, Artificial Sequence
  Oligonucleotide primer for the detection of SNP TSC0052309
aataagatattt

SEQ ID NO: 360829 - DNA, 12 bp, Artificial Sequence
  Oligonucleotide primer for the detection of SNP TSC0052310
ttaaggtaatgt

SEQ ID NO: 360830 - DNA, 12 bp, Artificial Sequence
  Oligonucleotide primer for the detection of SNP TSC0052310
aaatgagttaga

SEQ ID NO: 360831 - DNA, 12 bp, Artificial Sequence
  Oligonucleotide primer for the detection of SNP TSC0052311
ctcatcaaaatt

SEQ ID NO: 360832 - DNA, 12 bp, Artificial Sequence
  Oligonucleotide primer for the detection of SNP TSC0052311
agtgtaaggtag

SEQ ID NO: 360833 - DNA, 12 bp, Artificial Sequence
  Oligonucleotide primer for the detection of SNP TSC0052312
cttacaatatat

SEQ ID NO: 360834 - DNA, 12 bp, Artificial Sequence
  Oligonucleotide primer for the detection of SNP TSC0052312
tttctctcccta

SEQ ID NO: 360835 - DNA, 12 bp, Artificial Sequence
  Oligonucleotide primer for the detection of SNP TSC0052312
tttatagtgtgt

SEQ ID NO: 360836 - DNA, 12 bp, Artificial Sequence
  Oligonucleotide primer for the detection of SNP TSC0052316
taacaaccctct

SEQ ID NO: 360837 - DNA, 12 bp, Artificial Sequence
  Oligonucleotide primer for the detection of SNP TSC0052316
gatttaatgaag

SEQ ID NO: 360838 - DNA, 12 bp, Artificial Sequence
  Oligonucleotide primer for the detection of SNP TSC0052317
atatcaaaaata

SEQ ID NO: 360839 - DNA, 12 bp, Artificial Sequence
  Oligonucleotide primer for the detection of SNP TSC0052317
ttgatatttttt

SEQ ID NO: 360840 - DNA, 12 bp, Artificial Sequence
  Oligonucleotide primer for the detection of SNP TSC0052317
tttaacactccc

SEQ ID NO: 360841 - DNA, 12 bp, Artificial Sequence
  Oligonucleotide primer for the detection of SNP TSC0052317
atgttaaagatg

SEQ ID NO: 360842 - DNA, 12 bp, Artificial Sequence
  Oligonucleotide primer for the detection of SNP TSC0052318
atttcttatatc

SEQ ID NO: 360843 - DNA, 12 bp, Artificial Sequence
  Oligonucleotide primer for the detection of SNP TSC0052319
ataaactaccta

SEQ ID NO: 360844 - DNA, 12 bp, Artificial Sequence
  Oligonucleotide primer for the detection of SNP TSC0052319
gaagtaaaggag

SEQ ID NO: 360845 - DNA, 12 bp, Artificial Sequence
  Oligonucleotide primer for the detection of SNP TSC0052319
tggattatttgt

SEQ ID NO: 360846 - DNA, 12 bp, Artificial Sequence
  Oligonucleotide primer for the detection of SNP TSC0052320
ctaatacccctt

SEQ ID NO: 360847 - DNA, 12 bp, Artificial Sequence
  Oligonucleotide primer for the detection of SNP TSC0052320
tgttattgtata

SEQ ID NO: 360848 - DNA, 12 bp, Artificial Sequence
  Oligonucleotide primer for the detection of SNP TSC0052321
ttgtaaattgat

SEQ ID NO: 360849 - DNA, 12 bp, Artificial Sequence
  Oligonucleotide primer for the detection of SNP TSC0052321
ttgtaaatcgat

SEQ ID NO: 360850 - DNA, 12 bp, Artificial Sequence
  Oligonucleotide primer for the detection of SNP TSC0052321
ttataaatcaat

SEQ ID NO: 360851 - DNA, 12 bp, Artificial Sequence
  Oligonucleotide primer for the detection of SNP TSC0052321
ttataaatcgat

SEQ ID NO: 360852 - DNA, 12 bp, Artificial Sequence
  Oligonucleotide primer for the detection of SNP TSC0052321
ttagaaagaaag

SEQ ID NO: 360853 - DNA, 12 bp, Artificial Sequence
  Oligonucleotide primer for the detection of SNP TSC0052324
caaaataaacaa

SEQ ID NO: 360854 - DNA, 12 bp, Artificial Sequence
  Oligonucleotide primer for the detection of SNP TSC0052324
agtatagtattg

SEQ ID NO: 360855 - DNA, 12 bp, Artificial Sequence
  Oligonucleotide primer for the detection of SNP TSC0052324
aatacaacatta

SEQ ID NO: 360856 - DNA, 12 bp, Artificial Sequence
  Oligonucleotide primer for the detection of SNP TSC0052324
attagagtggat

SEQ ID NO: 360857 - DNA, 12 bp, Artificial Sequence
  Oligonucleotide primer for the detection of SNP TSC0052325
taccaaaaattc

SEQ ID NO: 360858 - DNA, 12 bp, Artificial Sequence
  Oligonucleotide primer for the detection of SNP TSC0052329
atagtgtagtat

SEQ ID NO: 360859 - DNA, 12 bp, Artificial Sequence
  Oligonucleotide primer for the detection of SNP TSC0052329
acaatataacac

SEQ ID NO: 360860 - DNA, 12 bp, Artificial Sequence
  Oligonucleotide primer for the detection of SNP TSC0052329
tttaatagaaag

SEQ ID NO: 360861 - DNA, 12 bp, Artificial Sequence
  Oligonucleotide primer for the detection of SNP TSC0052330
aataaacaacta

SEQ ID NO: 360862 - DNA, 12 bp, Artificial Sequence
  Oligonucleotide primer for the detection of SNP TSC0052330
gttatttgggtt

SEQ ID NO: 360863 - DNA, 12 bp, Artificial Sequence
  Oligonucleotide primer for the detection of SNP TSC0052330
ccacttaaacta

SEQ ID NO: 360864 - DNA, 12 bp, Artificial Sequence
  Oligonucleotide primer for the detection of SNP TSC0052330
ggtgggtagttg

SEQ ID NO: 360865 - DNA, 12 bp, Artificial Sequence
  Oligonucleotide primer for the detection of SNP TSC0052332
tcctttcaatct

SEQ ID NO: 360866 - DNA, 12 bp, Artificial Sequence
  Oligonucleotide primer for the detection of SNP TSC0052332
aaatattttatg

SEQ ID NO: 360867 - DNA, 12 bp, Artificial Sequence
  Oligonucleotide primer for the detection of SNP TSC0007391
tactattaaaaa

SEQ ID NO: 360868 - DNA, 12 bp, Artificial Sequence
  Oligonucleotide primer for the detection of SNP TSC0007391
caatctcaaaaa

SEQ ID NO: 360869 - DNA, 12 bp, Artificial Sequence
  Oligonucleotide primer for the detection of SNP TSC0007391
gttattaagaat

SEQ ID NO: 360870 - DNA, 12 bp, Artificial Sequence
  Oligonucleotide primer for the detection of SNP TSC0007391
gttattaagaac

SEQ ID NO: 360871 - DNA, 12 bp, Artificial Sequence
  Oligonucleotide primer for the detection of SNP TSC0052334
agggaaattttt

SEQ ID NO: 360872 - DNA, 12 bp, Artificial Sequence
  Oligonucleotide primer for the detection of SNP TSC0052335
atacccatcaac

SEQ ID NO: 360873 - DNA, 12 bp, Artificial Sequence
  Oligonucleotide primer for the detection of SNP TSC0052336
aacccataaaca

SEQ ID NO: 360874 - DNA, 12 bp, Artificial Sequence
  Oligonucleotide primer for the detection of SNP TSC0052336
atttataaatat

SEQ ID NO: 360875 - DNA, 12 bp, Artificial Sequence
  Oligonucleotide primer for the detection of SNP TSC0008254
tttcccctctac

SEQ ID NO: 360876 - DNA, 12 bp, Artificial Sequence
  Oligonucleotide primer for the detection of SNP TSC0008254
agggttgtaggt

SEQ ID NO: 360877 - DNA, 12 bp, Artificial Sequence
  Oligonucleotide primer for the detection of SNP TSC0052338
taagtagtaaaa

SEQ ID NO: 360878 - DNA, 12 bp, Artificial Sequence
  Oligonucleotide primer for the detection of SNP TSC0052346
atttctatttcc

SEQ ID NO: 360879 - DNA, 12 bp, Artificial Sequence
  Oligonucleotide primer for the detection of SNP TSC0052346
tattaaagaaaa

SEQ ID NO: 360880 - DNA, 12 bp, Artificial Sequence
  Oligonucleotide primer for the detection of SNP TSC0052347
ttttaccaaact

SEQ ID NO: 360881 - DNA, 12 bp, Artificial Sequence
  Oligonucleotide primer for the detection of SNP TSC0052347
taaatgagataa

SEQ ID NO: 360882 - DNA, 12 bp, Artificial Sequence
  Oligonucleotide primer for the detection of SNP TSC0052348
caattaccaccc

SEQ ID NO: 360883 - DNA, 12 bp, Artificial Sequence
  Oligonucleotide primer for the detection of SNP TSC0052348
atattgtttaag

SEQ ID NO: 360884 - DNA, 12 bp, Artificial Sequence
  Oligonucleotide primer for the detection of SNP TSC0052348
acactactcaaa

SEQ ID NO: 360885 - DNA, 12 bp, Artificial Sequence
  Oligonucleotide primer for the detection of SNP TSC0052348
tagttgttattt

SEQ ID NO: 360886 - DNA, 12 bp, Artificial Sequence
  Oligonucleotide primer for the detection of SNP TSC0052348
tagttgttattc

SEQ ID NO: 360887 - DNA, 12 bp, Artificial Sequence
  Oligonucleotide primer for the detection of SNP TSC0052349
ttgattgaagat

SEQ ID NO: 360888 - DNA, 12 bp, Artificial Sequence
  Oligonucleotide primer for the detection of SNP TSC0052349
ttgatcgaagat

SEQ ID NO: 360889 - DNA, 12 bp, Artificial Sequence
  Oligonucleotide primer for the detection of SNP TSC0052349
ttaaccaaaaac

SEQ ID NO: 360890 - DNA, 12 bp, Artificial Sequence
  Oligonucleotide primer for the detection of SNP TSC0052349
ttaaccgaaaac

SEQ ID NO: 360891 - DNA, 12 bp, Artificial Sequence
  Oligonucleotide primer for the detection of SNP TSC0052349
aataaaggagga

SEQ ID NO: 360892 - DNA, 12 bp, Artificial Sequence
  Oligonucleotide primer for the detection of SNP TSC0052350
actaaacaaata

SEQ ID NO: 360893 - DNA, 12 bp, Artificial Sequence
  Oligonucleotide primer for the detection of SNP TSC0052350
actaaacgaata

SEQ ID NO: 360894 - DNA, 12 bp, Artificial Sequence
  Oligonucleotide primer for the detection of SNP TSC0052350
gtgagggaggaa

SEQ ID NO: 360895 - DNA, 12 bp, Artificial Sequence
  Oligonucleotide primer for the detection of SNP TSC0052350
ggttaggtgggt

SEQ ID NO: 360896 - DNA, 12 bp, Artificial Sequence
  Oligonucleotide primer for the detection of SNP TSC0052350
ggttaggcgggt

SEQ ID NO: 360897 - DNA, 12 bp, Artificial Sequence
  Oligonucleotide primer for the detection of SNP TSC0052351
acttataattat

SEQ ID NO: 360898 - DNA, 12 bp, Artificial Sequence
  Oligonucleotide primer for the detection of SNP TSC0052351
aattttgatgtg

SEQ ID NO: 360899 - DNA, 12 bp, Artificial Sequence
  Oligonucleotide primer for the detection of SNP TSC0052352
aaggattagaga

SEQ ID NO: 360900 - DNA, 12 bp, Artificial Sequence
  Oligonucleotide primer for the detection of SNP TSC0052353
tactaaaaccat

SEQ ID NO: 360901 - DNA, 12 bp, Artificial Sequence
  Oligonucleotide primer for the detection of SNP TSC0052353
agaagttattag

SEQ ID NO: 360902 - DNA, 12 bp, Artificial Sequence
  Oligonucleotide primer for the detection of SNP TSC0052357
attattcttata

SEQ ID NO: 360903 - DNA, 12 bp, Artificial Sequence
  Oligonucleotide primer for the detection of SNP TSC0052357
gataggataatt

SEQ ID NO: 360904 - DNA, 12 bp, Artificial Sequence
  Oligonucleotide primer for the detection of SNP TSC0052357
aataaaacaact

SEQ ID NO: 360905 - DNA, 12 bp, Artificial Sequence
  Oligonucleotide primer for the detection of SNP TSC0052358
aattatacaatt

SEQ ID NO: 360906 - DNA, 12 bp, Artificial Sequence
  Oligonucleotide primer for the detection of SNP TSC0052358
tatattttcaca

SEQ ID NO: 360907 - DNA, 12 bp, Artificial Sequence
  Oligonucleotide primer for the detection of SNP TSC0052358
ggttatataatt

SEQ ID NO: 360908 - DNA, 12 bp, Artificial Sequence
  Oligonucleotide primer for the detection of SNP TSC0052359
cattataaatat

SEQ ID NO: 360909 - DNA, 12 bp, Artificial Sequence
  Oligonucleotide primer for the detection of SNP TSC0052359
agaattgtaaaa

SEQ ID NO: 360910 - DNA, 12 bp, Artificial Sequence
  Oligonucleotide primer for the detection of SNP TSC0052369
aaatccactata

SEQ ID NO: 360911 - DNA, 12 bp, Artificial Sequence
  Oligonucleotide primer for the detection of SNP TSC0052369
gttttatttgta

SEQ ID NO: 360912 - DNA, 12 bp, Artificial Sequence
  Oligonucleotide primer for the detection of SNP TSC0052370
atgttaatttta

SEQ ID NO: 360913 - DNA, 12 bp, Artificial Sequence
  Oligonucleotide primer for the detection of SNP TSC0007660
ttggttttttgc

SEQ ID NO: 360914 - DNA, 12 bp, Artificial Sequence
  Oligonucleotide primer for the detection of SNP TSC0007660
cttaactcccta

SEQ ID NO: 360915 - DNA, 12 bp, Artificial Sequence
  Oligonucleotide primer for the detection of SNP TSC0007660
tagagaaatttt

SEQ ID NO: 360916 - DNA, 12 bp, Artificial Sequence
  Oligonucleotide primer for the detection of SNP TSC0052373
aaattcacccta

SEQ ID NO: 360917 - DNA, 12 bp, Artificial Sequence
  Oligonucleotide primer for the detection of SNP TSC0052373
gtagtttattaa

SEQ ID NO: 360918 - DNA, 12 bp, Artificial Sequence
  Oligonucleotide primer for the detection of SNP TSC0052373
aatctactaaaa

SEQ ID NO: 360919 - DNA, 12 bp, Artificial Sequence
  Oligonucleotide primer for the detection of SNP TSC0010511
aacaacttaaaa

SEQ ID NO: 360920 - DNA, 12 bp, Artificial Sequence
  Oligonucleotide primer for the detection of SNP TSC0010511
aacgacttaaaa

SEQ ID NO: 360921 - DNA, 12 bp, Artificial Sequence
  Oligonucleotide primer for the detection of SNP TSC0010511
aaaaccctccct

SEQ ID NO: 360922 - DNA, 12 bp, Artificial Sequence
  Oligonucleotide primer for the detection of SNP TSC0010511
aggtggtttaaa

SEQ ID NO: 360923 - DNA, 12 bp, Artificial Sequence
  Oligonucleotide primer for the detection of SNP TSC0010511
aggcggtttaaa

SEQ ID NO: 360924 - DNA, 12 bp, Artificial Sequence
  Oligonucleotide primer for the detection of SNP TSC0052374
cacaacccacca

SEQ ID NO: 360925 - DNA, 12 bp, Artificial Sequence
  Oligonucleotide primer for the detection of SNP TSC0052374
tccctttaaact

SEQ ID NO: 360926 - DNA, 12 bp, Artificial Sequence
  Oligonucleotide primer for the detection of SNP TSC0052374
tatagtttatta

SEQ ID NO: 360927 - DNA, 12 bp, Artificial Sequence
  Oligonucleotide primer for the detection of SNP TSC0052375
attccaaaccta

SEQ ID NO: 360928 - DNA, 12 bp, Artificial Sequence
  Oligonucleotide primer for the detection of SNP TSC0052375
atagaatgttaa

SEQ ID NO: 360929 - DNA, 12 bp, Artificial Sequence
  Oligonucleotide primer for the detection of SNP TSC0052376
atttgttttgaa

SEQ ID NO: 360930 - DNA, 12 bp, Artificial Sequence
  Oligonucleotide primer for the detection of SNP TSC0052380
taaggtttgttg

SEQ ID NO: 360931 - DNA, 12 bp, Artificial Sequence
  Oligonucleotide primer for the detection of SNP TSC0052381
ttctcttccttt

SEQ ID NO: 360932 - DNA, 12 bp, Artificial Sequence
  Oligonucleotide primer for the detection of SNP TSC0052381
tgtttgggagaa

SEQ ID NO: 360933 - DNA, 12 bp, Artificial Sequence
  Oligonucleotide primer for the detection of SNP TSC0008044
gtagtattttgg

SEQ ID NO: 360934 - DNA, 12 bp, Artificial Sequence
  Oligonucleotide primer for the detection of SNP TSC0052383
aaacactaaatt

SEQ ID NO: 360935 - DNA, 12 bp, Artificial Sequence
  Oligonucleotide primer for the detection of SNP TSC0052383
aaacgctaaatt

SEQ ID NO: 360936 - DNA, 12 bp, Artificial Sequence
  Oligonucleotide primer for the detection of SNP TSC0052383
ttgagagaagta

SEQ ID NO: 360937 - DNA, 12 bp, Artificial Sequence
  Oligonucleotide primer for the detection of SNP TSC0052384
tttctcatattt

SEQ ID NO: 360938 - DNA, 12 bp, Artificial Sequence
  Oligonucleotide primer for the detection of SNP TSC0052384
tattgtagttgg

SEQ ID NO: 360939 - DNA, 12 bp, Artificial Sequence
  Oligonucleotide primer for the detection of SNP TSC0007589
ttggtataagag

SEQ ID NO: 360940 - DNA, 12 bp, Artificial Sequence
  Oligonucleotide primer for the detection of SNP TSC0052386
tagtatgaattt

SEQ ID NO: 360941 - DNA, 12 bp, Artificial Sequence
  Oligonucleotide primer for the detection of SNP TSC0052386
taacataaatct

SEQ ID NO: 360942 - DNA, 12 bp, Artificial Sequence
  Oligonucleotide primer for the detection of SNP TSC0052386
tgtattgtattt

SEQ ID NO: 360943 - DNA, 12 bp, Artificial Sequence
  Oligonucleotide primer for the detection of SNP TSC0052389
atctaacaacac

SEQ ID NO: 360944 - DNA, 12 bp, Artificial Sequence
  Oligonucleotide primer for the detection of SNP TSC0052389
actcaccaaata

SEQ ID NO: 360945 - DNA, 12 bp, Artificial Sequence
  Oligonucleotide primer for the detection of SNP TSC0052389
actcaccgaata

SEQ ID NO: 360946 - DNA, 12 bp, Artificial Sequence
  Oligonucleotide primer for the detection of SNP TSC0052389
gtttagtaatat

SEQ ID NO: 360947 - DNA, 12 bp, Artificial Sequence
  Oligonucleotide primer for the detection of SNP TSC0052390
tattgttggtag

SEQ ID NO: 360948 - DNA, 12 bp, Artificial Sequence
  Oligonucleotide primer for the detection of SNP TSC0052390
tattgtcggtag

SEQ ID NO: 360949 - DNA, 12 bp, Artificial Sequence
  Oligonucleotide primer for the detection of SNP TSC0052390
tactatcaacaa

SEQ ID NO: 360950 - DNA, 12 bp, Artificial Sequence
  Oligonucleotide primer for the detection of SNP TSC0052390
tactatcgacaa

SEQ ID NO: 360951 - DNA, 12 bp, Artificial Sequence
  Oligonucleotide primer for the detection of SNP TSC0052390
tggggaggtagt

SEQ ID NO: 360952 - DNA, 12 bp, Artificial Sequence
  Oligonucleotide primer for the detection of SNP TSC0009353
taaaaattaagt

SEQ ID NO: 360953 - DNA, 12 bp, Artificial Sequence
  Oligonucleotide primer for the detection of SNP TSC0009353
ttaaaaattaaa

SEQ ID NO: 360954 - DNA, 12 bp, Artificial Sequence
  Oligonucleotide primer for the detection of SNP TSC0009353
tatttttttgtt

SEQ ID NO: 360955 - DNA, 12 bp, Artificial Sequence
  Oligonucleotide primer for the detection of SNP TSC0052391
ataccaatatat

SEQ ID NO: 360956 - DNA, 12 bp, Artificial Sequence
  Oligonucleotide primer for the detection of SNP TSC0052391
atttttttgatg

SEQ ID NO: 360957 - DNA, 12 bp, Artificial Sequence
  Oligonucleotide primer for the detection of SNP TSC0006400
aaaaatatcact

SEQ ID NO: 360958 - DNA, 12 bp, Artificial Sequence
  Oligonucleotide primer for the detection of SNP TSC0006400
taatttataatg

SEQ ID NO: 360959 - DNA, 12 bp, Artificial Sequence
  Oligonucleotide primer for the detection of SNP TSC0052392
ctccatctttca

SEQ ID NO: 360960 - DNA, 12 bp, Artificial Sequence
  Oligonucleotide primer for the detection of SNP TSC0052392
ctccgtctttca

SEQ ID NO: 360961 - DNA, 12 bp, Artificial Sequence
  Oligonucleotide primer for the detection of SNP TSC0052392
ttttaaaagatt

SEQ ID NO: 360962 - DNA, 12 bp, Artificial Sequence
  Oligonucleotide primer for the detection of SNP TSC0052395
acaaactccttc

SEQ ID NO: 360963 - DNA, 12 bp, Artificial Sequence
  Oligonucleotide primer for the detection of SNP TSC0052395
acgaactccttc

SEQ ID NO: 360964 - DNA, 12 bp, Artificial Sequence
  Oligonucleotide primer for the detection of SNP TSC0052400
ttaataagattc

SEQ ID NO: 360965 - DNA, 12 bp, Artificial Sequence
  Oligonucleotide primer for the detection of SNP TSC0052400
ctaacaaaaccc

SEQ ID NO: 360966 - DNA, 12 bp, Artificial Sequence
  Oligonucleotide primer for the detection of SNP TSC0052400
aggtaaggaatt

SEQ ID NO: 360967 - DNA, 12 bp, Artificial Sequence
  Oligonucleotide primer for the detection of SNP TSC0005611
attatcctaaat

SEQ ID NO: 360968 - DNA, 12 bp, Artificial Sequence
  Oligonucleotide primer for the detection of SNP TSC0005611
ggtttatttata

SEQ ID NO: 360969 - DNA, 12 bp, Artificial Sequence
  Oligonucleotide primer for the detection of SNP TSC0005612
tatatttaaact

SEQ ID NO: 360970 - DNA, 12 bp, Artificial Sequence
  Oligonucleotide primer for the detection of SNP TSC0005612
ttattgataaag

SEQ ID NO: 360971 - DNA, 12 bp, Artificial Sequence
  Oligonucleotide primer for the detection of SNP TSC0052403
caactacattat

SEQ ID NO: 360972 - DNA, 12 bp, Artificial Sequence
  Oligonucleotide primer for the detection of SNP TSC0052403
tgttttagtgga

SEQ ID NO: 360973 - DNA, 12 bp, Artificial Sequence
  Oligonucleotide primer for the detection of SNP TSC0052404
ttacatataaat

SEQ ID NO: 360974 - DNA, 12 bp, Artificial Sequence
  Oligonucleotide primer for the detection of SNP TSC0052404
ttttataatgta

SEQ ID NO: 360975 - DNA, 12 bp, Artificial Sequence
  Oligonucleotide primer for the detection of SNP TSC0052405
aaatttttatct

SEQ ID NO: 360976 - DNA, 12 bp, Artificial Sequence
  Oligonucleotide primer for the detection of SNP TSC0052406
ttaagaggttga

SEQ ID NO: 360977 - DNA, 12 bp, Artificial Sequence
  Oligonucleotide primer for the detection of SNP TSC0052407
tttttccctctc

SEQ ID NO: 360978 - DNA, 12 bp, Artificial Sequence
  Oligonucleotide primer for the detection of SNP TSC0052407
tttagggtggta

SEQ ID NO: 360979 - DNA, 12 bp, Artificial Sequence
  Oligonucleotide primer for the detection of SNP TSC0052407
ctcaaaataaca

SEQ ID NO: 360980 - DNA, 12 bp, Artificial Sequence
  Oligonucleotide primer for the detection of SNP TSC0052408
acctactccaat

SEQ ID NO: 360981 - DNA, 12 bp, Artificial Sequence
  Oligonucleotide primer for the detection of SNP TSC0010639
gttaaatgaata

SEQ ID NO: 360982 - DNA, 12 bp, Artificial Sequence
  Oligonucleotide primer for the detection of SNP TSC0052409
aaaaatatactt

SEQ ID NO: 360983 - DNA, 12 bp, Artificial Sequence
  Oligonucleotide primer for the detection of SNP TSC0052409
aggttttaagta

SEQ ID NO: 360984 - DNA, 12 bp, Artificial Sequence
  Oligonucleotide primer for the detection of SNP TSC0052409
aaagatatattt

SEQ ID NO: 360985 - DNA, 12 bp, Artificial Sequence
  Oligonucleotide primer for the detection of SNP TSC0052410
ttccaatataaa

SEQ ID NO: 360986 - DNA, 12 bp, Artificial Sequence
  Oligonucleotide primer for the detection of SNP TSC0052410
ttccgatataaa

SEQ ID NO: 360987 - DNA, 12 bp, Artificial Sequence
  Oligonucleotide primer for the detection of SNP TSC0052410
tctttctatctt

SEQ ID NO: 360988 - DNA, 12 bp, Artificial Sequence
  Oligonucleotide primer for the detection of SNP TSC0052410
ttttggtataaa

SEQ ID NO: 360989 - DNA, 12 bp, Artificial Sequence
  Oligonucleotide primer for the detection of SNP TSC0052410
tttcggtataaa

SEQ ID NO: 360990 - DNA, 12 bp, Artificial Sequence
  Oligonucleotide primer for the detection of SNP TSC0052411
cgtaacaaaaaa

SEQ ID NO: 360991 - DNA, 12 bp, Artificial Sequence
  Oligonucleotide primer for the detection of SNP TSC0052411
cgtaacgaaaaa

SEQ ID NO: 360992 - DNA, 12 bp, Artificial Sequence
  Oligonucleotide primer for the detection of SNP TSC0052411
tatttcttcttc

SEQ ID NO: 360993 - DNA, 12 bp, Artificial Sequence
  Oligonucleotide primer for the detection of SNP TSC0052411
gtggtgagaaat

SEQ ID NO: 360994 - DNA, 12 bp, Artificial Sequence
  Oligonucleotide primer for the detection of SNP TSC0052411
gtggcgagaaat

SEQ ID NO: 360995 - DNA, 12 bp, Artificial Sequence
  Oligonucleotide primer for the detection of SNP TSC0005291
aatgttggaggt

SEQ ID NO: 360996 - DNA, 12 bp, Artificial Sequence
  Oligonukleotid-Primer
aatattaaaaac

SEQ ID NO: 360997 - DNA, 12 bp, Artificial Sequence
  Oligonucleotide primer for the detection of SNP TSC0005291
taaagataataa

SEQ ID NO: 360998 - DNA, 12 bp, Artificial Sequence
  Oligonucleotide primer for the detection of SNP TSC0005292
caaatctattta

SEQ ID NO: 360999 - DNA, 12 bp, Artificial Sequence
  Oligonucleotide primer for the detection of SNP TSC0005292
tatggtttatta

SEQ ID NO: 361000 - DNA, 12 bp, Artificial Sequence
  Oligonucleotide primer for the detection of SNP TSC0005292
tataatttatta

SEQ ID NO: 361001 - DNA, 12 bp, Artificial Sequence
  Oligonucleotide primer for the detection of SNP TSC0005292
aaatttgtttgt

SEQ ID NO: 361002 - DNA, 12 bp, Artificial Sequence
  Oligonucleotide primer for the detection of SNP TSC0005293
actaattctctt

SEQ ID NO: 361003 - DNA, 12 bp, Artificial Sequence
  Oligonucleotide primer for the detection of SNP TSC0005293
ttgttggatgaa

SEQ ID NO: 361004 - DNA, 12 bp, Artificial Sequence
  Oligonucleotide primer for the detection of SNP TSC0052413
cctctataaata

SEQ ID NO: 361005 - DNA, 12 bp, Artificial Sequence
  Oligonucleotide primer for the detection of SNP TSC0052413
ctacaaatttta

SEQ ID NO: 361006 - DNA, 12 bp, Artificial Sequence
  Oligonucleotide primer for the detection of SNP TSC0052413
tttttgtgaata

SEQ ID NO: 361007 - DNA, 12 bp, Artificial Sequence
  Oligonucleotide primer for the detection of SNP TSC0004841
ggttatttatta

SEQ ID NO: 361008 - DNA, 12 bp, Artificial Sequence
  Oligonucleotide primer for the detection of SNP TSC0004841
aattacctacca

SEQ ID NO: 361009 - DNA, 12 bp, Artificial Sequence
  Oligonucleotide primer for the detection of SNP TSC0004841
tatgatttggaa

SEQ ID NO: 361010 - DNA, 12 bp, Artificial Sequence
  Oligonucleotide primer for the detection of SNP TSC0010161
gataattagttg

SEQ ID NO: 361011 - DNA, 12 bp, Artificial Sequence
  Oligonucleotide primer for the detection of SNP TSC0010161
gttgtagagtgt

SEQ ID NO: 361012 - DNA, 12 bp, Artificial Sequence
  Oligonucleotide primer for the detection of SNP TSC0010161
gttgtagagtgc

SEQ ID NO: 361013 - DNA, 12 bp, Artificial Sequence
  Oligonucleotide primer for the detection of SNP TSC0052414
ttttaggtttgt

SEQ ID NO: 361014 - DNA, 12 bp, Artificial Sequence
  Oligonucleotide primer for the detection of SNP TSC0052414
caaatttataaa

SEQ ID NO: 361015 - DNA, 12 bp, Artificial Sequence
  Oligonucleotide primer for the detection of SNP TSC0052414
gatagaatttgt

SEQ ID NO: 361016 - DNA, 12 bp, Artificial Sequence
  Oligonucleotide primer for the detection of SNP TSC0052415
ctattatcccaa

SEQ ID NO: 361017 - DNA, 12 bp, Artificial Sequence
  Oligonucleotide primer for the detection of SNP TSC0052415
agtatttgaggt

SEQ ID NO: 361018 - DNA, 12 bp, Artificial Sequence
  Oligonucleotide primer for the detection of SNP TSC0052415
taacatttaaaa

SEQ ID NO: 361019 - DNA, 12 bp, Artificial Sequence
  Oligonucleotide primer for the detection of SNP TSC0052415
ttgttgttttag

SEQ ID NO: 361020 - DNA, 12 bp, Artificial Sequence
  Oligonucleotide primer for the detection of SNP TSC0052417
taccacactaaa

SEQ ID NO: 361021 - DNA, 12 bp, Artificial Sequence
  Oligonucleotide primer for the detection of SNP TSC0052417
taccacgctaaa

SEQ ID NO: 361022 - DNA, 12 bp, Artificial Sequence
  Oligonucleotide primer for the detection of SNP TSC0052417
tgttatgttaaa

SEQ ID NO: 361023 - DNA, 12 bp, Artificial Sequence
  Oligonucleotide primer for the detection of SNP TSC0052417
tgttacgttaaa

SEQ ID NO: 361024 - DNA, 12 bp, Artificial Sequence
  Oligonucleotide primer for the detection of SNP TSC0052418
tagtttttttag

SEQ ID NO: 361025 - DNA, 12 bp, Artificial Sequence
  Oligonucleotide primer for the detection of SNP TSC0052419
aatctatttcac

SEQ ID NO: 361026 - DNA, 12 bp, Artificial Sequence
  Oligonucleotide primer for the detection of SNP TSC0052419
gatgttatggtg

SEQ ID NO: 361027 - DNA, 12 bp, Artificial Sequence
  Oligonucleotide primer for the detection of SNP TSC0052419
gatgttacggtg

SEQ ID NO: 361028 - DNA, 12 bp, Artificial Sequence
  Oligonucleotide primer for the detection of SNP TSC0052419
aataccacaata

SEQ ID NO: 361029 - DNA, 12 bp, Artificial Sequence
  Oligonucleotide primer for the detection of SNP TSC0052419
aataccacgata

SEQ ID NO: 361030 - DNA, 12 bp, Artificial Sequence
  Oligonucleotide primer for the detection of SNP TSC0052420
gtgtaggtgttt

SEQ ID NO: 361031 - DNA, 12 bp, Artificial Sequence
  Oligonucleotide primer for the detection of SNP TSC0052420
gcgtaggtgttt

SEQ ID NO: 361032 - DNA, 12 bp, Artificial Sequence
  Oligonucleotide primer for the detection of SNP TSC0052420
acaaatacctaa

SEQ ID NO: 361033 - DNA, 12 bp, Artificial Sequence
  Oligonucleotide primer for the detection of SNP TSC0052420
gcaaatacctaa

SEQ ID NO: 361034 - DNA, 12 bp, Artificial Sequence
  Oligonucleotide primer for the detection of SNP TSC0052420
agggtttatttg

SEQ ID NO: 361035 - DNA, 12 bp, Artificial Sequence
  Oligonucleotide primer for the detection of SNP TSC0052421
aactaatataac

SEQ ID NO: 361036 - DNA, 12 bp, Artificial Sequence
  Oligonucleotide primer for the detection of SNP TSC0052421
ggggattgaatg

SEQ ID NO: 361037 - DNA, 12 bp, Artificial Sequence
  Oligonucleotide primer for the detection of SNP TSC0052421
agttagtatggt

SEQ ID NO: 361038 - DNA, 12 bp, Artificial Sequence
  Oligonucleotide primer for the detection of SNP TSC0052422
tataatgttgat

SEQ ID NO: 361039 - DNA, 12 bp, Artificial Sequence
  Oligonucleotide primer for the detection of SNP TSC0052422
tataatgttgac

SEQ ID NO: 361040 - DNA, 12 bp, Artificial Sequence
  Oligonucleotide primer for the detection of SNP TSC0052424
ataaaaacaaca

SEQ ID NO: 361041 - DNA, 12 bp, Artificial Sequence
  Oligonucleotide primer for the detection of SNP TSC0052424
gatgtaggtatt

SEQ ID NO: 361042 - DNA, 12 bp, Artificial Sequence
  Oligonucleotide primer for the detection of SNP TSC0052424
atggaggtagta

SEQ ID NO: 361043 - DNA, 12 bp, Artificial Sequence
  Oligonucleotide primer for the detection of SNP TSC0052425
ataatcacaaaa

SEQ ID NO: 361044 - DNA, 12 bp, Artificial Sequence
  Oligonucleotide primer for the detection of SNP TSC0052425
ataatcacgaaa

SEQ ID NO: 361045 - DNA, 12 bp, Artificial Sequence
  Oligonucleotide primer for the detection of SNP TSC0052425
ataatcgcaaaa

SEQ ID NO: 361046 - DNA, 12 bp, Artificial Sequence
  Oligonucleotide primer for the detection of SNP TSC0052425
ataatcgcgaaa

SEQ ID NO: 361047 - DNA, 12 bp, Artificial Sequence
  Oligonucleotide primer for the detection of SNP TSC0052425
aattatagttat

SEQ ID NO: 361048 - DNA, 12 bp, Artificial Sequence
  Oligonucleotide primer for the detection of SNP TSC0052425
taaccacaacta

SEQ ID NO: 361049 - DNA, 12 bp, Artificial Sequence
  Oligonucleotide primer for the detection of SNP TSC0052425
ggtggttgtgag

SEQ ID NO: 361050 - DNA, 12 bp, Artificial Sequence
  Oligonucleotide primer for the detection of SNP TSC0052425
ggtggtcgtgag

SEQ ID NO: 361051 - DNA, 12 bp, Artificial Sequence
  Oligonucleotide primer for the detection of SNP TSC0052425
ggtggttgcgag

SEQ ID NO: 361052 - DNA, 12 bp, Artificial Sequence
  Oligonucleotide primer for the detection of SNP TSC0052425
ggtggtcgcgag

SEQ ID NO: 361053 - DNA, 12 bp, Artificial Sequence
  Oligonucleotide primer for the detection of SNP TSC0052426
caataattttac

SEQ ID NO: 361054 - DNA, 12 bp, Artificial Sequence
  Oligonucleotide primer for the detection of SNP TSC0052427
ttatatttagtg

SEQ ID NO: 361055 - DNA, 12 bp, Artificial Sequence
  Oligonucleotide primer for the detection of SNP TSC0052427
ttatatttagcg

SEQ ID NO: 361056 - DNA, 12 bp, Artificial Sequence
  Oligonucleotide primer for the detection of SNP TSC0052427
ccatatccaaca

SEQ ID NO: 361057 - DNA, 12 bp, Artificial Sequence
  Oligonucleotide primer for the detection of SNP TSC0052427
ccatatccaacg

SEQ ID NO: 361058 - DNA, 12 bp, Artificial Sequence
  Oligonucleotide primer for the detection of SNP TSC0052427
tttgtgggaatg

SEQ ID NO: 361059 - DNA, 12 bp, Artificial Sequence
  Oligonucleotide primer for the detection of SNP TSC0052428
acctctaaaaaa

SEQ ID NO: 361060 - DNA, 12 bp, Artificial Sequence
  Oligonucleotide primer for the detection of SNP TSC0052428
taatatgaaatg

SEQ ID NO: 361061 - DNA, 12 bp, Artificial Sequence
  Oligonucleotide primer for the detection of SNP TSC0052428
caatataaaata

SEQ ID NO: 361062 - DNA, 12 bp, Artificial Sequence
  Oligonucleotide primer for the detection of SNP TSC0052428
tgtttttgaaag

SEQ ID NO: 361063 - DNA, 12 bp, Artificial Sequence
  Oligonucleotide primer for the detection of SNP TSC0052430
acataccaaaat

SEQ ID NO: 361064 - DNA, 12 bp, Artificial Sequence
  Oligonucleotide primer for the detection of SNP TSC0052430
tagtattttgat

SEQ ID NO: 361065 - DNA, 12 bp, Artificial Sequence
  Oligonucleotide primer for the detection of SNP TSC0052430
caatattctaat

SEQ ID NO: 361066 - DNA, 12 bp, Artificial Sequence
  Oligonucleotide primer for the detection of SNP TSC0052430
atatattagagt

SEQ ID NO: 361067 - DNA, 12 bp, Artificial Sequence
  Oligonucleotide primer for the detection of SNP TSC0052431
atttttatcttt

SEQ ID NO: 361068 - DNA, 12 bp, Artificial Sequence
  Oligonucleotide primer for the detection of SNP TSC0052431
tgatgttattta

SEQ ID NO: 361069 - DNA, 12 bp, Artificial Sequence
  Oligonucleotide primer for the detection of SNP TSC0052432
acatacataaac

SEQ ID NO: 361070 - DNA, 12 bp, Artificial Sequence
  Oligonucleotide primer for the detection of SNP TSC0052432
acatacgtaaac

SEQ ID NO: 361071 - DNA, 12 bp, Artificial Sequence
  Oligonucleotide primer for the detection of SNP TSC0052432
acgtacataaac

SEQ ID NO: 361072 - DNA, 12 bp, Artificial Sequence
  Oligonucleotide primer for the detection of SNP TSC0052432
acgtacgtaaac

SEQ ID NO: 361073 - DNA, 12 bp, Artificial Sequence
  Oligonukleotid-Primer
atgtgtgtgggt

SEQ ID NO: 361074 - DNA, 12 bp, Artificial Sequence
  Oligonucleotide primer for the detection of SNP TSC0052432
acgtgtgtgggt

SEQ ID NO: 361075 - DNA, 12 bp, Artificial Sequence
  Oligonucleotide primer for the detection of SNP TSC0052432
atgtgcgtgggt

SEQ ID NO: 361076 - DNA, 12 bp, Artificial Sequence
  Oligonucleotide primer for the detection of SNP TSC0052432
atgtgtgtgggc

SEQ ID NO: 361077 - DNA, 12 bp, Artificial Sequence
  Oligonucleotide primer for the detection of SNP TSC0052432
acgtgcgtgggt

SEQ ID NO: 361078 - DNA, 12 bp, Artificial Sequence
  Oligonucleotide primer for the detection of SNP TSC0052432
acgtgtgtgggc

SEQ ID NO: 361079 - DNA, 12 bp, Artificial Sequence
  Oligonucleotide primer for the detection of SNP TSC0052432
atgtgcgtgggc

SEQ ID NO: 361080 - DNA, 12 bp, Artificial Sequence
  Oligonucleotide primer for the detection of SNP TSC0052432
acgtgcgtgggc

SEQ ID NO: 361081 - DNA, 12 bp, Artificial Sequence
  Oligonucleotide primer for the detection of SNP TSC0052433
ttaatattttcc

SEQ ID NO: 361082 - DNA, 12 bp, Artificial Sequence
  Oligonucleotide primer for the detection of SNP TSC0052433
gtagtataataa

SEQ ID NO: 361083 - DNA, 12 bp, Artificial Sequence
  Oligonucleotide primer for the detection of SNP TSC0052434
atttcctacaat

SEQ ID NO: 361084 - DNA, 12 bp, Artificial Sequence
  Oligonucleotide primer for the detection of SNP TSC0052434
ttattttgtaag

SEQ ID NO: 361085 - DNA, 12 bp, Artificial Sequence
  Oligonucleotide primer for the detection of SNP TSC0052435
ccatcctcattt

SEQ ID NO: 361086 - DNA, 12 bp, Artificial Sequence
  Oligonucleotide primer for the detection of SNP TSC0052435
agtgaaaatata

SEQ ID NO: 361087 - DNA, 12 bp, Artificial Sequence
  Oligonucleotide primer for the detection of SNP TSC0052436
tatataaaataa

SEQ ID NO: 361088 - DNA, 12 bp, Artificial Sequence
  Oligonucleotide primer for the detection of SNP TSC0052436
aattgatatatt

SEQ ID NO: 361089 - DNA, 12 bp, Artificial Sequence
  Oligonucleotide primer for the detection of SNP TSC0052436
aactaacatatc

SEQ ID NO: 361090 - DNA, 12 bp, Artificial Sequence
  Oligonucleotide primer for the detection of SNP TSC0052436
tatgtgaggtga

SEQ ID NO: 361091 - DNA, 12 bp, Artificial Sequence
  Oligonucleotide primer for the detection of SNP TSC0052439
caattatcctat

SEQ ID NO: 361092 - DNA, 12 bp, Artificial Sequence
  Oligonucleotide primer for the detection of SNP TSC0052439
gaggtaagaagg

SEQ ID NO: 361093 - DNA, 12 bp, Artificial Sequence
  Oligonucleotide primer for the detection of SNP TSC0052440
cccaacacatat

SEQ ID NO: 361094 - DNA, 12 bp, Artificial Sequence
  Oligonucleotide primer for the detection of SNP TSC0052440
gtttatttttta

SEQ ID NO: 361095 - DNA, 12 bp, Artificial Sequence
  Oligonucleotide primer for the detection of SNP TSC0052441
ttttttgtagta

SEQ ID NO: 361096 - DNA, 12 bp, Artificial Sequence
  Oligonucleotide primer for the detection of SNP TSC0052442
aactccatttaa

SEQ ID NO: 361097 - DNA, 12 bp, Artificial Sequence
  Oligonucleotide primer for the detection of SNP TSC0052442
atgtgaattttt

SEQ ID NO: 361098 - DNA, 12 bp, Artificial Sequence
  Oligonucleotide primer for the detection of SNP TSC0052442
ggttttatttga

SEQ ID NO: 361099 - DNA, 12 bp, Artificial Sequence
  Oligonucleotide primer for the detection of SNP TSC0052443
aatacttccaat

SEQ ID NO: 361100 - DNA, 12 bp, Artificial Sequence
  Oligonucleotide primer for the detection of SNP TSC0052443
gaattagaaaag

SEQ ID NO: 361101 - DNA, 12 bp, Artificial Sequence
  Oligonucleotide primer for the detection of SNP TSC0052444
actttacccata

SEQ ID NO: 361102 - DNA, 12 bp, Artificial Sequence
  Oligonucleotide primer for the detection of SNP TSC0052444
gatattgattta

SEQ ID NO: 361103 - DNA, 12 bp, Artificial Sequence
  Oligonucleotide primer for the detection of SNP TSC0052444
aacattaactta

SEQ ID NO: 361104 - DNA, 12 bp, Artificial Sequence
  Oligonucleotide primer for the detection of SNP TSC0052444
attttgtttata

SEQ ID NO: 361105 - DNA, 12 bp, Artificial Sequence
  Oligonucleotide primer for the detection of SNP TSC0052445
ctaaactacaac

SEQ ID NO: 361106 - DNA, 12 bp, Artificial Sequence
  Oligonucleotide primer for the detection of SNP TSC0052445
ggtatttattaa

SEQ ID NO: 361107 - DNA, 12 bp, Artificial Sequence
  Oligonucleotide primer for the detection of SNP TSC0052448
taacttattata

SEQ ID NO: 361108 - DNA, 12 bp, Artificial Sequence
  Oligonucleotide primer for the detection of SNP TSC0052448
atagtggttatt

SEQ ID NO: 361109 - DNA, 12 bp, Artificial Sequence
  Oligonucleotide primer for the detection of SNP TSC0052448
taataattacta

SEQ ID NO: 361110 - DNA, 12 bp, Artificial Sequence
  Oligonucleotide primer for the detection of SNP TSC0052448
taatttgttatg

SEQ ID NO: 361111 - DNA, 12 bp, Artificial Sequence
  Oligonucleotide primer for the detection of SNP TSC0052449
taggaggaaatg

SEQ ID NO: 361112 - DNA, 12 bp, Artificial Sequence
  Oligonucleotide primer for the detection of SNP TSC0052450
cacacatacata

SEQ ID NO: 361113 - DNA, 12 bp, Artificial Sequence
  Oligonucleotide primer for the detection of SNP TSC0052450
cacacgtacata

SEQ ID NO: 361114 - DNA, 12 bp, Artificial Sequence
  Oligonucleotide primer for the detection of SNP TSC0052450
cacgcatacata

SEQ ID NO: 361115 - DNA, 12 bp, Artificial Sequence
  Oligonucleotide primer for the detection of SNP TSC0052450
cacgcgtacata

SEQ ID NO: 361116 - DNA, 12 bp, Artificial Sequence
  Oligonucleotide primer for the detection of SNP TSC0052450
tatgtgtgtatg

SEQ ID NO: 361117 - DNA, 12 bp, Artificial Sequence
  Oligonucleotide primer for the detection of SNP TSC0052450
tacgtgtgtatg

SEQ ID NO: 361118 - DNA, 12 bp, Artificial Sequence
  Oligonucleotide primer for the detection of SNP TSC0052450
tatgcgtgtatg

SEQ ID NO: 361119 - DNA, 12 bp, Artificial Sequence
  Oligonucleotide primer for the detection of SNP TSC0052450
tacgcgtgtatg

SEQ ID NO: 361120 - DNA, 12 bp, Artificial Sequence
  Oligonucleotide primer for the detection of SNP TSC0052451
gtgttgttgata

SEQ ID NO: 361121 - DNA, 12 bp, Artificial Sequence
  Oligonucleotide primer for the detection of SNP TSC0052453
ttaactctattt

SEQ ID NO: 361122 - DNA, 12 bp, Artificial Sequence
  Oligonucleotide primer for the detection of SNP TSC0052453
attaaaggagtg

SEQ ID NO: 361123 - DNA, 12 bp, Artificial Sequence
  Oligonucleotide primer for the detection of SNP TSC0052454
tacattaaaacc

SEQ ID NO: 361124 - DNA, 12 bp, Artificial Sequence
  Oligonucleotide primer for the detection of SNP TSC0052454
taaagggagaga

SEQ ID NO: 361125 - DNA, 12 bp, Artificial Sequence
  Oligonucleotide primer for the detection of SNP TSC0052456
gttagtggaagg

SEQ ID NO: 361126 - DNA, 12 bp, Artificial Sequence
  Oligonucleotide primer for the detection of SNP TSC0052459
attatatctcca

SEQ ID NO: 361127 - DNA, 12 bp, Artificial Sequence
  Oligonucleotide primer for the detection of SNP TSC0052460
ttagggtagtta

SEQ ID NO: 361128 - DNA, 12 bp, Artificial Sequence
  Oligonucleotide primer for the detection of SNP TSC0052461
gttaattttttg

SEQ ID NO: 361129 - DNA, 12 bp, Artificial Sequence
  Oligonucleotide primer for the detection of SNP TSC0052462
acttctcattcc

SEQ ID NO: 361130 - DNA, 12 bp, Artificial Sequence
  Oligonucleotide primer for the detection of SNP TSC0052462
ttagaaggttta

SEQ ID NO: 361131 - DNA, 12 bp, Artificial Sequence
  Oligonucleotide primer for the detection of SNP TSC0052463
taaccctctcct

SEQ ID NO: 361132 - DNA, 12 bp, Artificial Sequence
  Oligonucleotide primer for the detection of SNP TSC0052463
aagttggggaaa

SEQ ID NO: 361133 - DNA, 12 bp, Artificial Sequence
  Oligonucleotide primer for the detection of SNP TSC0052464
aaacaattcaac

SEQ ID NO: 361134 - DNA, 12 bp, Artificial Sequence
  Oligonucleotide primer for the detection of SNP TSC0052464
attttagttatg

SEQ ID NO: 361135 - DNA, 12 bp, Artificial Sequence
  Oligonucleotide primer for the detection of SNP TSC0052466
aaatctaaataa

SEQ ID NO: 361136 - DNA, 12 bp, Artificial Sequence
  Oligonucleotide primer for the detection of SNP TSC0052466
gataagtgagtt

SEQ ID NO: 361137 - DNA, 12 bp, Artificial Sequence
  Oligonucleotide primer for the detection of SNP TSC0052466
gataagtgagtc

SEQ ID NO: 361138 - DNA, 12 bp, Artificial Sequence
  Oligonucleotide primer for the detection of SNP TSC0052466
aacaaataaacc

SEQ ID NO: 361139 - DNA, 12 bp, Artificial Sequence
  Oligonucleotide primer for the detection of SNP TSC0052466
aaatttggatgg

SEQ ID NO: 361140 - DNA, 12 bp, Artificial Sequence
  Oligonucleotide primer for the detection of SNP TSC0052467
ctaccattctat

SEQ ID NO: 361141 - DNA, 12 bp, Artificial Sequence
  Oligonucleotide primer for the detection of SNP TSC0052467
ttaagggtttta

SEQ ID NO: 361142 - DNA, 12 bp, Artificial Sequence
  Oligonucleotide primer for the detection of SNP TSC0052469
aaattacaccat

SEQ ID NO: 361143 - DNA, 12 bp, Artificial Sequence
  Oligonucleotide primer for the detection of SNP TSC0052469
taggatggagtg

SEQ ID NO: 361144 - DNA, 12 bp, Artificial Sequence
  Oligonucleotide primer for the detection of SNP TSC0052470
gagggtatttaa

SEQ ID NO: 361145 - DNA, 12 bp, Artificial Sequence
  Oligonucleotide primer for the detection of SNP TSC0052471
ataataataaat

SEQ ID NO: 361146 - DNA, 12 bp, Artificial Sequence
  Oligonucleotide primer for the detection of SNP TSC0052472
atcacaatactc

SEQ ID NO: 361147 - DNA, 12 bp, Artificial Sequence
  Oligonucleotide primer for the detection of SNP TSC0052472
tagaaaagattg

SEQ ID NO: 361148 - DNA, 12 bp, Artificial Sequence
  Oligonucleotide primer for the detection of SNP TSC0052473
ttggtaaatatt

SEQ ID NO: 361149 - DNA, 12 bp, Artificial Sequence
  Oligonucleotide primer for the detection of SNP TSC0052474
acatattatttc

SEQ ID NO: 361150 - DNA, 12 bp, Artificial Sequence
  Oligonucleotide primer for the detection of SNP TSC0052475
ttctcttttaat

SEQ ID NO: 361151 - DNA, 12 bp, Artificial Sequence
  Oligonucleotide primer for the detection of SNP TSC0052475
ggagtatataag

SEQ ID NO: 361152 - DNA, 12 bp, Artificial Sequence
  Oligonucleotide primer for the detection of SNP TSC0052476
attatttaaaca

SEQ ID NO: 361153 - DNA, 12 bp, Artificial Sequence
  Oligonucleotide primer for the detection of SNP TSC0052476
ttgtttttagtt

SEQ ID NO: 361154 - DNA, 12 bp, Artificial Sequence
  Oligonucleotide primer for the detection of SNP TSC0052476
ctatctttaatt

SEQ ID NO: 361155 - DNA, 12 bp, Artificial Sequence
  Oligonucleotide primer for the detection of SNP TSC0052477
taatcaatccat

SEQ ID NO: 361156 - DNA, 12 bp, Artificial Sequence
  Oligonucleotide primer for the detection of SNP TSC0052477
atttggggattt

SEQ ID NO: 361157 - DNA, 12 bp, Artificial Sequence
  Oligonucleotide primer for the detection of SNP TSC0052477
aattaatttatt

SEQ ID NO: 361158 - DNA, 12 bp, Artificial Sequence
  Oligonucleotide primer for the detection of SNP TSC0052477
aattaatttatc

SEQ ID NO: 361159 - DNA, 12 bp, Artificial Sequence
  Oligonucleotide primer for the detection of SNP TSC0052478
aattttctactc

SEQ ID NO: 361160 - DNA, 12 bp, Artificial Sequence
  Oligonucleotide primer for the detection of SNP TSC0052479
aaatctttaaac

SEQ ID NO: 361161 - DNA, 12 bp, Artificial Sequence
  Oligonucleotide primer for the detection of SNP TSC0052479
gttttataattt

SEQ ID NO: 361162 - DNA, 12 bp, Artificial Sequence
  Oligonucleotide primer for the detection of SNP TSC0052480
acttctacccaa

SEQ ID NO: 361163 - DNA, 12 bp, Artificial Sequence
  Oligonucleotide primer for the detection of SNP TSC0052480
ttatagaatttg

SEQ ID NO: 361164 - DNA, 12 bp, Artificial Sequence
  Oligonucleotide primer for the detection of SNP TSC0052480
ttatagaattcg

SEQ ID NO: 361165 - DNA, 12 bp, Artificial Sequence
  Oligonucleotide primer for the detection of SNP TSC0052480
tcacaaaaccca

SEQ ID NO: 361166 - DNA, 12 bp, Artificial Sequence
  Oligonucleotide primer for the detection of SNP TSC0052480
tcacaaaacccg

SEQ ID NO: 361167 - DNA, 12 bp, Artificial Sequence
  Oligonucleotide primer for the detection of SNP TSC0052481
agtagtagtcgt

SEQ ID NO: 361168 - DNA, 12 bp, Artificial Sequence
  Oligonucleotide primer for the detection of SNP TSC0052481
aataacaaccac

SEQ ID NO: 361169 - DNA, 12 bp, Artificial Sequence
  Oligonucleotide primer for the detection of SNP TSC0052481
aataacaaccgc

SEQ ID NO: 361170 - DNA, 12 bp, Artificial Sequence
  Oligonucleotide primer for the detection of SNP TSC0052481
aataatagtaac

SEQ ID NO: 361171 - DNA, 12 bp, Artificial Sequence
  Oligonucleotide primer for the detection of SNP TSC0052482
ctaccaatcaac

SEQ ID NO: 361172 - DNA, 12 bp, Artificial Sequence
  Oligonucleotide primer for the detection of SNP TSC0052482
gggttttatggg

SEQ ID NO: 361173 - DNA, 12 bp, Artificial Sequence
  Oligonucleotide primer for the detection of SNP TSC0052482
gggttttacggg

SEQ ID NO: 361174 - DNA, 12 bp, Artificial Sequence
  Oligonucleotide primer for the detection of SNP TSC0052482
aaacttcacaaa

SEQ ID NO: 361175 - DNA, 12 bp, Artificial Sequence
  Oligonucleotide primer for the detection of SNP TSC0052482
aaacttcacgaa

SEQ ID NO: 361176 - DNA, 12 bp, Artificial Sequence
  Oligonucleotide primer for the detection of SNP TSC0052483
tccccctaaaaa

SEQ ID NO: 361177 - DNA, 12 bp, Artificial Sequence
  Oligonucleotide primer for the detection of SNP TSC0052483
ataagattttat

SEQ ID NO: 361178 - DNA, 12 bp, Artificial Sequence
  Oligonucleotide primer for the detection of SNP TSC0052484
ttgtagagataa

SEQ ID NO: 361179 - DNA, 12 bp, Artificial Sequence
  Oligonucleotide primer for the detection of SNP TSC0052488
aattacaacacc

SEQ ID NO: 361180 - DNA, 12 bp, Artificial Sequence
  Oligonucleotide primer for the detection of SNP TSC0052488
aagatttgggag

SEQ ID NO: 361181 - DNA, 12 bp, Artificial Sequence
  Oligonucleotide primer for the detection of SNP TSC0052489
atcctaaaatta

SEQ ID NO: 361182 - DNA, 12 bp, Artificial Sequence
  Oligonucleotide primer for the detection of SNP TSC0052490
ttacataaccac

SEQ ID NO: 361183 - DNA, 12 bp, Artificial Sequence
  Oligonucleotide primer for the detection of SNP TSC0052490
ttacgtaaccac

SEQ ID NO: 361184 - DNA, 12 bp, Artificial Sequence
  Oligonucleotide primer for the detection of SNP TSC0052490
ttttggaatttg

SEQ ID NO: 361185 - DNA, 12 bp, Artificial Sequence
  Oligonucleotide primer for the detection of SNP TSC0052490
ttctaaaatcta

SEQ ID NO: 361186 - DNA, 12 bp, Artificial Sequence
  Oligonucleotide primer for the detection of SNP TSC0052490
ttgtgtgattat

SEQ ID NO: 361187 - DNA, 12 bp, Artificial Sequence
  Oligonucleotide primer for the detection of SNP TSC0052490
ttgcgtgattat

SEQ ID NO: 361188 - DNA, 12 bp, Artificial Sequence
  Oligonucleotide primer for the detection of SNP TSC0052491
gaggattttaac

SEQ ID NO: 361189 - DNA, 12 bp, Artificial Sequence
  Oligonucleotide primer for the detection of SNP TSC0052491
taaaaacttcaa

SEQ ID NO: 361190 - DNA, 12 bp, Artificial Sequence
  Oligonucleotide primer for the detection of SNP TSC0052491
tagggaatttta

SEQ ID NO: 361191 - DNA, 12 bp, Artificial Sequence
  Oligonucleotide primer for the detection of SNP TSC0052492
tatctaaacttc

SEQ ID NO: 361192 - DNA, 12 bp, Artificial Sequence
  Oligonucleotide primer for the detection of SNP TSC0052492
attttagttggt

SEQ ID NO: 361193 - DNA, 12 bp, Artificial Sequence
  Oligonucleotide primer for the detection of SNP TSC0052492
attttagttggc

SEQ ID NO: 361194 - DNA, 12 bp, Artificial Sequence
  Oligonucleotide primer for the detection of SNP TSC0052492
tatttgagtttt

SEQ ID NO: 361195 - DNA, 12 bp, Artificial Sequence
  Oligonucleotide primer for the detection of SNP TSC0052493
aaagggatagtt

SEQ ID NO: 361196 - DNA, 12 bp, Artificial Sequence
  Oligonucleotide primer for the detection of SNP TSC0052493
agatttgagaga

SEQ ID NO: 361197 - DNA, 12 bp, Artificial Sequence
  Oligonucleotide primer for the detection of SNP TSC0052493
agattcgagaga

SEQ ID NO: 361198 - DNA, 12 bp, Artificial Sequence
  Oligonucleotide primer for the detection of SNP TSC0052494
ataattatctct

SEQ ID NO: 361199 - DNA, 12 bp, Artificial Sequence
  Oligonucleotide primer for the detection of SNP TSC0052494
ttataagagaga

SEQ ID NO: 361200 - DNA, 12 bp, Artificial Sequence
  Oligonucleotide primer for the detection of SNP TSC0052495
tataatttttcc

SEQ ID NO: 361201 - DNA, 12 bp, Artificial Sequence
  Oligonucleotide primer for the detection of SNP TSC0052495
aattgattttta

SEQ ID NO: 361202 - DNA, 12 bp, Artificial Sequence
  Oligonucleotide primer for the detection of SNP TSC0052496
caaattaacttt

SEQ ID NO: 361203 - DNA, 12 bp, Artificial Sequence
  Oligonucleotide primer for the detection of SNP TSC0052496
gaattaaagtta

SEQ ID NO: 361204 - DNA, 12 bp, Artificial Sequence
  Oligonucleotide primer for the detection of SNP TSC0052496
aaactaaaacca

SEQ ID NO: 361205 - DNA, 12 bp, Artificial Sequence
  Oligonucleotide primer for the detection of SNP TSC0052496
tagattaatttt

SEQ ID NO: 361206 - DNA, 12 bp, Artificial Sequence
  Oligonucleotide primer for the detection of SNP TSC0052497
ttctttataatt

SEQ ID NO: 361207 - DNA, 12 bp, Artificial Sequence
  Oligonucleotide primer for the detection of SNP TSC0052497
tgtttaaataaa

SEQ ID NO: 361208 - DNA, 12 bp, Artificial Sequence
  Oligonucleotide primer for the detection of SNP TSC0052498
ctctactatttc

SEQ ID NO: 361209 - DNA, 12 bp, Artificial Sequence
  Oligonucleotide primer for the detection of SNP TSC0052498
aaaggttttaaa

SEQ ID NO: 361210 - DNA, 12 bp, Artificial Sequence
  Oligonucleotide primer for the detection of SNP TSC0052499
atctaataactt

SEQ ID NO: 361211 - DNA, 12 bp, Artificial Sequence
  Oligonucleotide primer for the detection of SNP TSC0052500
cacaccaaaaac

SEQ ID NO: 361212 - DNA, 12 bp, Artificial Sequence
  Oligonucleotide primer for the detection of SNP TSC0052500
gaggagggtttg

SEQ ID NO: 361213 - DNA, 12 bp, Artificial Sequence
  Oligonucleotide primer for the detection of SNP TSC0052503
aacattctacca

SEQ ID NO: 361214 - DNA, 12 bp, Artificial Sequence
  Oligonucleotide primer for the detection of SNP TSC0052503
aacgttctacca

SEQ ID NO: 361215 - DNA, 12 bp, Artificial Sequence
  Oligonucleotide primer for the detection of SNP TSC0052503
atttctattctt

SEQ ID NO: 361216 - DNA, 12 bp, Artificial Sequence
  Oligonucleotide primer for the detection of SNP TSC0052503
agtgttttatta

SEQ ID NO: 361217 - DNA, 12 bp, Artificial Sequence
  Oligonucleotide primer for the detection of SNP TSC0052503
agcgttttatta

SEQ ID NO: 361218 - DNA, 12 bp, Artificial Sequence
  Oligonucleotide primer for the detection of SNP TSC0052504
ccatcccaacca

SEQ ID NO: 361219 - DNA, 12 bp, Artificial Sequence
  Oligonucleotide primer for the detection of SNP TSC0052504
tattccctttac

SEQ ID NO: 361220 - DNA, 12 bp, Artificial Sequence
  Oligonucleotide primer for the detection of SNP TSC0052505
aaacattcctaa

SEQ ID NO: 361221 - DNA, 12 bp, Artificial Sequence
  Oligonucleotide primer for the detection of SNP TSC0052505
aggtatttttga

SEQ ID NO: 361222 - DNA, 12 bp, Artificial Sequence
  Oligonucleotide primer for the detection of SNP TSC0052506
tattcaaatttt

SEQ ID NO: 361223 - DNA, 12 bp, Artificial Sequence
  Oligonucleotide primer for the detection of SNP TSC0052506
aataaatattag

SEQ ID NO: 361224 - DNA, 12 bp, Artificial Sequence
  Oligonucleotide primer for the detection of SNP TSC0052507
aattatttcata

SEQ ID NO: 361225 - DNA, 12 bp, Artificial Sequence
  Oligonucleotide primer for the detection of SNP TSC0052507
atatttgagatt

SEQ ID NO: 361226 - DNA, 12 bp, Artificial Sequence
  Oligonucleotide primer for the detection of SNP TSC0052507
atatctaaaatt

SEQ ID NO: 361227 - DNA, 12 bp, Artificial Sequence
  Oligonucleotide primer for the detection of SNP TSC0052509
atattttggtga

SEQ ID NO: 361228 - DNA, 12 bp, Artificial Sequence
  Oligonucleotide primer for the detection of SNP TSC0052510
caaacaaaaatc

SEQ ID NO: 361229 - DNA, 12 bp, Artificial Sequence
  Oligonucleotide primer for the detection of SNP TSC0052510
ggggtaatttta

SEQ ID NO: 361230 - DNA, 12 bp, Artificial Sequence
  Oligonucleotide primer for the detection of SNP TSC0052511
ctttccaactat

SEQ ID NO: 361231 - DNA, 12 bp, Artificial Sequence
  Oligonucleotide primer for the detection of SNP TSC0052511
ttagagataaaa

SEQ ID NO: 361232 - DNA, 12 bp, Artificial Sequence
  Oligonucleotide primer for the detection of SNP TSC0052512
accacacaccac

SEQ ID NO: 361233 - DNA, 12 bp, Artificial Sequence
  Oligonucleotide primer for the detection of SNP TSC0052512
atagtaaatttt

SEQ ID NO: 361234 - DNA, 12 bp, Artificial Sequence
  Oligonucleotide primer for the detection of SNP TSC0052513
gagagagtttgt

SEQ ID NO: 361235 - DNA, 12 bp, Artificial Sequence
  Oligonucleotide primer for the detection of SNP TSC0052513
ttagaatttaga

SEQ ID NO: 361236 - DNA, 12 bp, Artificial Sequence
  Oligonucleotide primer for the detection of SNP TSC0052514
caaaataaccgc

SEQ ID NO: 361237 - DNA, 12 bp, Artificial Sequence
  Oligonucleotide primer for the detection of SNP TSC0052514
gtttattgttag

SEQ ID NO: 361238 - DNA, 12 bp, Artificial Sequence
  Oligonucleotide primer for the detection of SNP TSC0052514
actcactaccaa

SEQ ID NO: 361239 - DNA, 12 bp, Artificial Sequence
  Oligonucleotide primer for the detection of SNP TSC0052514
taaggtagttgt

SEQ ID NO: 361240 - DNA, 12 bp, Artificial Sequence
  Oligonucleotide primer for the detection of SNP TSC0052514
taaggtagtcgt

SEQ ID NO: 361241 - DNA, 12 bp, Artificial Sequence
  Oligonucleotide primer for the detection of SNP TSC0052515
tgttttgtgttt

SEQ ID NO: 361242 - DNA, 12 bp, Artificial Sequence
  Oligonucleotide primer for the detection of SNP TSC0052515
tattctataccc

SEQ ID NO: 361243 - DNA, 12 bp, Artificial Sequence
  Oligonucleotide primer for the detection of SNP TSC0052515
gtgagggagttg

SEQ ID NO: 361244 - DNA, 12 bp, Artificial Sequence
  Oligonucleotide primer for the detection of SNP TSC0052516
aacctaaaaacc

SEQ ID NO: 361245 - DNA, 12 bp, Artificial Sequence
  Oligonucleotide primer for the detection of SNP TSC0052516
gagggtagattt

SEQ ID NO: 361246 - DNA, 12 bp, Artificial Sequence
  Oligonucleotide primer for the detection of SNP TSC0052516
gagggtagattc

SEQ ID NO: 361247 - DNA, 12 bp, Artificial Sequence
  Oligonucleotide primer for the detection of SNP TSC0052516
ggtttgaaaatt

SEQ ID NO: 361248 - DNA, 12 bp, Artificial Sequence
  Oligonucleotide primer for the detection of SNP TSC0052522
tttttctaatta

SEQ ID NO: 361249 - DNA, 12 bp, Artificial Sequence
  Oligonucleotide primer for the detection of SNP TSC0052522
tgttttattggt

SEQ ID NO: 361250 - DNA, 12 bp, Artificial Sequence
  Oligonucleotide primer for the detection of SNP TSC0052522
atatctcactaa

SEQ ID NO: 361251 - DNA, 12 bp, Artificial Sequence
  Oligonucleotide primer for the detection of SNP TSC0052527
acccaaacccta

SEQ ID NO: 361252 - DNA, 12 bp, Artificial Sequence
  Oligonucleotide primer for the detection of SNP TSC0052527
gtagagatgatt

SEQ ID NO: 361253 - DNA, 12 bp, Artificial Sequence
  Oligonucleotide primer for the detection of SNP TSC0052528
aactaacttcat

SEQ ID NO: 361254 - DNA, 12 bp, Artificial Sequence
  Oligonucleotide primer for the detection of SNP TSC0052528
tatgtatttaga

SEQ ID NO: 361255 - DNA, 12 bp, Artificial Sequence
  Oligonucleotide primer for the detection of SNP TSC0052529
ccaacacactac

SEQ ID NO: 361256 - DNA, 12 bp, Artificial Sequence
  Oligonucleotide primer for the detection of SNP TSC0052529
ccgacacactac

SEQ ID NO: 361257 - DNA, 12 bp, Artificial Sequence
  Oligonucleotide primer for the detection of SNP TSC0052529
tattatatgtta

SEQ ID NO: 361258 - DNA, 12 bp, Artificial Sequence
  Oligonucleotide primer for the detection of SNP TSC0052530
tcctatcctaat

SEQ ID NO: 361259 - DNA, 12 bp, Artificial Sequence
  Oligonucleotide primer for the detection of SNP TSC0052530
ttaaaaaaggta

SEQ ID NO: 361260 - DNA, 12 bp, Artificial Sequence
  Oligonucleotide primer for the detection of SNP TSC0052531
attagttttgtg

SEQ ID NO: 361261 - DNA, 12 bp, Artificial Sequence
  Oligonucleotide primer for the detection of SNP TSC0052532
taaagttaataa

SEQ ID NO: 361262 - DNA, 12 bp, Artificial Sequence
  Oligonucleotide primer for the detection of SNP TSC0052534
taacccccaaat

SEQ ID NO: 361263 - DNA, 12 bp, Artificial Sequence
  Oligonucleotide primer for the detection of SNP TSC0052534
atgttgttgttg

SEQ ID NO: 361264 - DNA, 12 bp, Artificial Sequence
  Oligonucleotide primer for the detection of SNP TSC0052535
tagtgtgtgtgt

SEQ ID NO: 361265 - DNA, 12 bp, Artificial Sequence
  Oligonucleotide primer for the detection of SNP TSC0052540
actttaaccact

SEQ ID NO: 361266 - DNA, 12 bp, Artificial Sequence
  Oligonucleotide primer for the detection of SNP TSC0052541
aagatttaatga

SEQ ID NO: 361267 - DNA, 12 bp, Artificial Sequence
  Oligonucleotide primer for the detection of SNP TSC0052542
aatattccaaaa

SEQ ID NO: 361268 - DNA, 12 bp, Artificial Sequence
  Oligonucleotide primer for the detection of SNP TSC0052542
aaccccttataa

SEQ ID NO: 361269 - DNA, 12 bp, Artificial Sequence
  Oligonucleotide primer for the detection of SNP TSC0052542
ggtgttttaaag

SEQ ID NO: 361270 - DNA, 12 bp, Artificial Sequence
  Oligonucleotide primer for the detection of SNP TSC0052543
ctcaacttttct

SEQ ID NO: 361271 - DNA, 12 bp, Artificial Sequence
  Oligonucleotide primer for the detection of SNP TSC0052543
ttagtttgttgg

SEQ ID NO: 361272 - DNA, 12 bp, Artificial Sequence
  Oligonucleotide primer for the detection of SNP TSC0052544
ccatccaaacca

SEQ ID NO: 361273 - DNA, 12 bp, Artificial Sequence
  Oligonucleotide primer for the detection of SNP TSC0052544
tataaaattttt

SEQ ID NO: 361274 - DNA, 12 bp, Artificial Sequence
  Oligonucleotide primer for the detection of SNP TSC0052544
cataaaaccctt

SEQ ID NO: 361275 - DNA, 12 bp, Artificial Sequence
  Oligonucleotide primer for the detection of SNP TSC0052545
aaatccaaaact

SEQ ID NO: 361276 - DNA, 12 bp, Artificial Sequence
  Oligonucleotide primer for the detection of SNP TSC0052545
aggggttttata

SEQ ID NO: 361277 - DNA, 12 bp, Artificial Sequence
  Oligonucleotide primer for the detection of SNP TSC0052546
acactaatacat

SEQ ID NO: 361278 - DNA, 12 bp, Artificial Sequence
  Oligonucleotide primer for the detection of SNP TSC0052546
attttataagta

SEQ ID NO: 361279 - DNA, 12 bp, Artificial Sequence
  Oligonucleotide primer for the detection of SNP TSC0052547
tagtgtgagttt

SEQ ID NO: 361280 - DNA, 12 bp, Artificial Sequence
  Oligonucleotide primer for the detection of SNP TSC0052547
aaagataaaata

SEQ ID NO: 361281 - DNA, 12 bp, Artificial Sequence
  Oligonucleotide primer for the detection of SNP TSC0052553
aaattctaaccc

SEQ ID NO: 361282 - DNA, 12 bp, Artificial Sequence
  Oligonucleotide primer for the detection of SNP TSC0052554
cataatactcac

SEQ ID NO: 361283 - DNA, 12 bp, Artificial Sequence
  Oligonucleotide primer for the detection of SNP TSC0052554
cgtaatactcac

SEQ ID NO: 361284 - DNA, 12 bp, Artificial Sequence
  Oligonucleotide primer for the detection of SNP TSC0052554
aatttttatgtg

SEQ ID NO: 361285 - DNA, 12 bp, Artificial Sequence
  Oligonucleotide primer for the detection of SNP TSC0052554
aatttttacgtg

SEQ ID NO: 361286 - DNA, 12 bp, Artificial Sequence
  Oligonucleotide primer for the detection of SNP TSC0052555
ctaaaaataact

SEQ ID NO: 361287 - DNA, 12 bp, Artificial Sequence
  Oligonucleotide primer for the detection of SNP TSC0052555
atttcttccaac

SEQ ID NO: 361288 - DNA, 12 bp, Artificial Sequence
  Oligonucleotide primer for the detection of SNP TSC0052555
ttagaagtaatt

SEQ ID NO: 361289 - DNA, 12 bp, Artificial Sequence
  Oligonucleotide primer for the detection of SNP TSC0052556
acctcttctctc

SEQ ID NO: 361290 - DNA, 12 bp, Artificial Sequence
  Oligonucleotide primer for the detection of SNP TSC0052556
tttggggtatta

SEQ ID NO: 361291 - DNA, 12 bp, Artificial Sequence
  Oligonucleotide primer for the detection of SNP TSC0052558
acataatctatt

SEQ ID NO: 361292 - DNA, 12 bp, Artificial Sequence
  Oligonucleotide primer for the detection of SNP TSC0052558
agtattaatagt

SEQ ID NO: 361293 - DNA, 12 bp, Artificial Sequence
  Oligonucleotide primer for the detection of SNP TSC0052558
aatattaacaac

SEQ ID NO: 361294 - DNA, 12 bp, Artificial Sequence
  Oligonukleotid-Primer
tatggtttattt

SEQ ID NO: 361295 - DNA, 12 bp, Artificial Sequence
  Oligonucleotide primer for the detection of SNP TSC0052558
tatggtttattc

SEQ ID NO: 361296 - DNA, 12 bp, Artificial Sequence
  Oligonucleotide primer for the detection of SNP TSC0052559
caatttcttatc

SEQ ID NO: 361297 - DNA, 12 bp, Artificial Sequence
  Oligonucleotide primer for the detection of SNP TSC0052559
attaaatcccta

SEQ ID NO: 361298 - DNA, 12 bp, Artificial Sequence
  Oligonukleotid-Primer
tgggtaatgtaa

SEQ ID NO: 361299 - DNA, 12 bp, Artificial Sequence
  Oligonucleotide primer for the detection of SNP TSC0052561
aaaatccaacat

SEQ ID NO: 361300 - DNA, 12 bp, Artificial Sequence
  Oligonucleotide primer for the detection of SNP TSC0052561
tgggaatgtaat

SEQ ID NO: 361301 - DNA, 12 bp, Artificial Sequence
  Oligonucleotide primer for the detection of SNP TSC0052564
tgaattggaaag

SEQ ID NO: 361302 - DNA, 12 bp, Artificial Sequence
  Oligonukleotid-Primer
tttatttaaagg

SEQ ID NO: 361303 - DNA, 12 bp, Artificial Sequence
  Oligonucleotide primer for the detection of SNP TSC0052565
ggatgtgatatt

SEQ ID NO: 361304 - DNA, 12 bp, Artificial Sequence
  Oligonucleotide primer for the detection of SNP TSC0052565
caaaatataata

SEQ ID NO: 361305 - DNA, 12 bp, Artificial Sequence
  Oligonucleotide primer for the detection of SNP TSC0052565
tgagagatgata

SEQ ID NO: 361306 - DNA, 12 bp, Artificial Sequence
  Oligonukleotid-Primer
atacaaccacca

SEQ ID NO: 361307 - DNA, 12 bp, Artificial Sequence
  Oligonucleotide primer for the detection of SNP TSC0052566
atacaaccaccg

SEQ ID NO: 361308 - DNA, 12 bp, Artificial Sequence
  Oligonucleotide primer for the detection of SNP TSC0052566
aatcctccttta

SEQ ID NO: 361309 - DNA, 12 bp, Artificial Sequence
  Oligonucleotide primer for the detection of SNP TSC0052566
gatatagttatt

SEQ ID NO: 361310 - DNA, 12 bp, Artificial Sequence
  Oligonucleotide primer for the detection of SNP TSC0052566
gatatagttatc

SEQ ID NO: 361311 - DNA, 12 bp, Artificial Sequence
  Oligonucleotide primer for the detection of SNP TSC0052568
caaataccttat

SEQ ID NO: 361312 - DNA, 12 bp, Artificial Sequence
  Oligonucleotide primer for the detection of SNP TSC0052568
ttggggtttttg

SEQ ID NO: 361313 - DNA, 12 bp, Artificial Sequence
  Oligonucleotide primer for the detection of SNP TSC0052572
aaaacgaaactc

SEQ ID NO: 361314 - DNA, 12 bp, Artificial Sequence
  Oligonukleotid-Primer
ttattttgagac

SEQ ID NO: 361315 - DNA, 12 bp, Artificial Sequence
  Oligonucleotide primer for the detection of SNP TSC0052572
agagcgagattt

SEQ ID NO: 361316 - DNA, 12 bp, Artificial Sequence
  Oligonucleotide primer for the detection of SNP TSC0052573
aatatatcaaaa

SEQ ID NO: 361317 - DNA, 12 bp, Artificial Sequence
  Oligonucleotide primer for the detection of SNP TSC0052573
attatttacaaa

SEQ ID NO: 361318 - DNA, 12 bp, Artificial Sequence
  Oligonucleotide primer for the detection of SNP TSC0052573
atatgttaaagt

SEQ ID NO: 361319 - DNA, 12 bp, Artificial Sequence
  Oligonucleotide primer for the detection of SNP TSC0052574
taaaaatagaat

SEQ ID NO: 361320 - DNA, 12 bp, Artificial Sequence
  Oligonucleotide primer for the detection of SNP TSC0052574
ttaaaaaaggga

SEQ ID NO: 361321 - DNA, 12 bp, Artificial Sequence
  Oligonucleotide primer for the detection of SNP TSC0052577
aatttattcttt

SEQ ID NO: 361322 - DNA, 12 bp, Artificial Sequence
  Oligonucleotide primer for the detection of SNP TSC0007331
gttgagaatata

SEQ ID NO: 361323 - DNA, 12 bp, Artificial Sequence
  Oligonucleotide primer for the detection of SNP TSC0007332
attctaaacaat

SEQ ID NO: 361324 - DNA, 12 bp, Artificial Sequence
  Oligonucleotide primer for the detection of SNP TSC0007332
tataaagtagaa

SEQ ID NO: 361325 - DNA, 12 bp, Artificial Sequence
  Oligonucleotide primer for the detection of SNP TSC0052582
accctaaattaa

SEQ ID NO: 361326 - DNA, 12 bp, Artificial Sequence
  Oligonucleotide primer for the detection of SNP TSC0052582
tatatattatgt

SEQ ID NO: 361327 - DNA, 12 bp, Artificial Sequence
  Oligonucleotide primer for the detection of SNP TSC0052582
tatacattatat

SEQ ID NO: 361328 - DNA, 12 bp, Artificial Sequence
  Oligonucleotide primer for the detection of SNP TSC0052582
attttgaattga

SEQ ID NO: 361329 - DNA, 12 bp, Artificial Sequence
  Oligonucleotide primer for the detection of SNP TSC0052583
attgtagtttaa

SEQ ID NO: 361330 - DNA, 12 bp, Artificial Sequence
  Oligonucleotide primer for the detection of SNP TSC0052584
ttattctattac

SEQ ID NO: 361331 - DNA, 12 bp, Artificial Sequence
  Oligonucleotide primer for the detection of SNP TSC0052584
atagttatttta

SEQ ID NO: 361332 - DNA, 12 bp, Artificial Sequence
  Oligonucleotide primer for the detection of SNP TSC0052585
taaatacacctt

SEQ ID NO: 361333 - DNA, 12 bp, Artificial Sequence
  Oligonucleotide primer for the detection of SNP TSC0052586
ataattttcatt

SEQ ID NO: 361334 - DNA, 12 bp, Artificial Sequence
  Oligonucleotide primer for the detection of SNP TSC0052586
ggtgtaaaattg

SEQ ID NO: 361335 - DNA, 12 bp, Artificial Sequence
  Oligonucleotide primer for the detection of SNP TSC0052592
ggttgcggtgag

SEQ ID NO: 361336 - DNA, 12 bp, Artificial Sequence
  Oligonucleotide primer for the detection of SNP TSC0052592
gattacaataaa

SEQ ID NO: 361337 - DNA, 12 bp, Artificial Sequence
  Oligonucleotide primer for the detection of SNP TSC0052592
gattacgataaa

SEQ ID NO: 361338 - DNA, 12 bp, Artificial Sequence
  Oligonucleotide primer for the detection of SNP TSC0052592
gtgatgtgattt

SEQ ID NO: 361339 - DNA, 12 bp, Artificial Sequence
  Oligonucleotide primer for the detection of SNP TSC0052592
gtgacgtgattt

SEQ ID NO: 361340 - DNA, 12 bp, Artificial Sequence
  Oligonucleotide primer for the detection of SNP TSC0052592
gtgatgcgattt

SEQ ID NO: 361341 - DNA, 12 bp, Artificial Sequence
  Oligonucleotide primer for the detection of SNP TSC0052592
gtgacgcgattt

SEQ ID NO: 361342 - DNA, 12 bp, Artificial Sequence
  Oligonukleotid-Primer
aaaaaatctaat

SEQ ID NO: 361343 - DNA, 12 bp, Artificial Sequence
  Oligonucleotide primer for the detection of SNP TSC0052598
taaatatacact

SEQ ID NO: 361344 - DNA, 12 bp, Artificial Sequence
  Oligonucleotide primer for the detection of SNP TSC0052598
ttgtgtttggta

SEQ ID NO: 361345 - DNA, 12 bp, Artificial Sequence
  Oligonucleotide primer for the detection of SNP TSC0052598
ttatacctaaca

SEQ ID NO: 361346 - DNA, 12 bp, Artificial Sequence
  Oligonucleotide primer for the detection of SNP TSC0052598
tgagtatgtatt

SEQ ID NO: 361347 - DNA, 12 bp, Artificial Sequence
  Oligonucleotide primer for the detection of SNP TSC0052599
acttccttttta

SEQ ID NO: 361348 - DNA, 12 bp, Artificial Sequence
  Oligonucleotide primer for the detection of SNP TSC0052599
ggatggagtttt

SEQ ID NO: 361349 - DNA, 12 bp, Artificial Sequence
  Oligonucleotide primer for the detection of SNP TSC0052600
ttgtggttgatt

SEQ ID NO: 361350 - DNA, 12 bp, Artificial Sequence
  Oligonukleotid-Primer
aacccataaaaa

SEQ ID NO: 361351 - DNA, 12 bp, Artificial Sequence
  Oligonucleotide primer for the detection of SNP TSC0052601
tttttaggtaga

SEQ ID NO: 361352 - DNA, 12 bp, Artificial Sequence
  Oligonucleotide primer for the detection of SNP TSC0052601
ggtttatgaaag

SEQ ID NO: 361353 - DNA, 12 bp, Artificial Sequence
  Oligonucleotide primer for the detection of SNP TSC0052602
aaacaaaaccac

SEQ ID NO: 361354 - DNA, 12 bp, Artificial Sequence
  Oligonucleotide primer for the detection of SNP TSC0052602
gttttttatggg

SEQ ID NO: 361355 - DNA, 12 bp, Artificial Sequence
  Oligonucleotide primer for the detection of SNP TSC0052602
acctttcataaa

SEQ ID NO: 361356 - DNA, 12 bp, Artificial Sequence
  Oligonucleotide primer for the detection of SNP TSC0052602
aagtaaagttat

SEQ ID NO: 361357 - DNA, 12 bp, Artificial Sequence
  Oligonucleotide primer for the detection of SNP TSC0052603
caaacaaaactt

SEQ ID NO: 361358 - DNA, 12 bp, Artificial Sequence
  Oligonucleotide primer for the detection of SNP TSC0052604
ctaaaaccattt

SEQ ID NO: 361359 - DNA, 12 bp, Artificial Sequence
  Oligonucleotide primer for the detection of SNP TSC0052605
catttataaatt

SEQ ID NO: 361360 - DNA, 12 bp, Artificial Sequence
  Oligonucleotide primer for the detection of SNP TSC0052605
atggttttagag

SEQ ID NO: 361361 - DNA, 12 bp, Artificial Sequence
  Oligonucleotide primer for the detection of SNP TSC0052607
cttttacatatt

SEQ ID NO: 361362 - DNA, 12 bp, Artificial Sequence
  Oligonukleotid-Primer
gaagatttatta

SEQ ID NO: 361363 - DNA, 12 bp, Artificial Sequence
  Oligonucleotide primer for the detection of SNP TSC0008844
atactcccataa

SEQ ID NO: 361364 - DNA, 12 bp, Artificial Sequence
  Oligonucleotide primer for the detection of SNP TSC0008844
tttttataatat

SEQ ID NO: 361365 - DNA, 12 bp, Artificial Sequence
  Oligonucleotide primer for the detection of SNP TSC0008844
ctcccacaacac

SEQ ID NO: 361366 - DNA, 12 bp, Artificial Sequence
  Oligonucleotide primer for the detection of SNP TSC0008844
gtatttttataa

SEQ ID NO: 361367 - DNA, 12 bp, Artificial Sequence
  Oligonucleotide primer for the detection of SNP TSC0052609
tacccaaattct

SEQ ID NO: 361368 - DNA, 12 bp, Artificial Sequence
  Oligonucleotide primer for the detection of SNP TSC0052609
cgtgttattgta

SEQ ID NO: 361369 - DNA, 12 bp, Artificial Sequence
  Oligonucleotide primer for the detection of SNP TSC0052610
aatctcaacact

SEQ ID NO: 361370 - DNA, 12 bp, Artificial Sequence
  Oligonukleotid-Primer
ttttcactcttc

SEQ ID NO: 361371 - DNA, 12 bp, Artificial Sequence
  Oligonucleotide primer for the detection of SNP TSC0010529
tctaaattttta

SEQ ID NO: 361372 - DNA, 12 bp, Artificial Sequence
  Oligonucleotide primer for the detection of SNP TSC0052611
tatacaatattt

SEQ ID NO: 361373 - DNA, 12 bp, Artificial Sequence
  Oligonucleotide primer for the detection of SNP TSC0052613
cctataatctca

SEQ ID NO: 361374 - DNA, 12 bp, Artificial Sequence
  Oligonucleotide primer for the detection of SNP TSC0052614
tatcaaattatt

SEQ ID NO: 361375 - DNA, 12 bp, Artificial Sequence
  Oligonucleotide primer for the detection of SNP TSC0052614
aggattttgtaa

SEQ ID NO: 361376 - DNA, 12 bp, Artificial Sequence
  Oligonucleotide primer for the detection of SNP TSC0052614
tgttagattatt

SEQ ID NO: 361377 - DNA, 12 bp, Artificial Sequence
  Oligonucleotide primer for the detection of SNP TSC0052615
caaaaccaactt

SEQ ID NO: 361378 - DNA, 12 bp, Artificial Sequence
  Oligonucleotide primer for the detection of SNP TSC0052616
attacaataaaa

SEQ ID NO: 361379 - DNA, 12 bp, Artificial Sequence
  Oligonucleotide primer for the detection of SNP TSC0052616
gttttattatac

SEQ ID NO: 361380 - DNA, 12 bp, Artificial Sequence
  Oligonucleotide primer for the detection of SNP TSC0052616
acctcaccatac

SEQ ID NO: 361381 - DNA, 12 bp, Artificial Sequence
  Oligonucleotide primer for the detection of SNP TSC0052616
tattgtaatgag

SEQ ID NO: 361382 - DNA, 12 bp, Artificial Sequence
  Oligonucleotide primer for the detection of SNP TSC0052618
atggattgtttg

SEQ ID NO: 361383 - DNA, 12 bp, Artificial Sequence
  Oligonucleotide primer for the detection of SNP TSC0052618
atggatcgtttg

SEQ ID NO: 361384 - DNA, 12 bp, Artificial Sequence
  Oligonucleotide primer for the detection of SNP TSC0052618
taaaccgcctaa

SEQ ID NO: 361385 - DNA, 12 bp, Artificial Sequence
  Oligonucleotide primer for the detection of SNP TSC0052618
ggttaaaattat

SEQ ID NO: 361386 - DNA, 12 bp, Artificial Sequence
  Oligonucleotide primer for the detection of SNP TSC0052619
ttccacacctac

SEQ ID NO: 361387 - DNA, 12 bp, Artificial Sequence
  Oligonucleotide primer for the detection of SNP TSC0052619
tgttataaaata

SEQ ID NO: 361388 - DNA, 12 bp, Artificial Sequence
  Oligonucleotide primer for the detection of SNP TSC0052619
cgttataaaata

SEQ ID NO: 361389 - DNA, 12 bp, Artificial Sequence
  Oligonucleotide primer for the detection of SNP TSC0052620
taacgacaaaaa

SEQ ID NO: 361390 - DNA, 12 bp, Artificial Sequence
  Oligonukleotid-Primer
taacgacgaaaa

SEQ ID NO: 361391 - DNA, 12 bp, Artificial Sequence
  Oligonucleotide primer for the detection of SNP TSC0052620
tggtagaaatat

SEQ ID NO: 361392 - DNA, 12 bp, Artificial Sequence
  Oligonucleotide primer for the detection of SNP TSC0052620
tgatggaagttt

SEQ ID NO: 361393 - DNA, 12 bp, Artificial Sequence
  Oligonucleotide primer for the detection of SNP TSC0052620
cgatggaagttt

SEQ ID NO: 361394 - DNA, 12 bp, Artificial Sequence
  Oligonucleotide primer for the detection of SNP TSC0052620
tgacggaagttt

SEQ ID NO: 361395 - DNA, 12 bp, Artificial Sequence
  Oligonucleotide primer for the detection of SNP TSC0052620
cgacggaagttt

SEQ ID NO: 361396 - DNA, 12 bp, Artificial Sequence
  Oligonucleotide primer for the detection of SNP TSC0052621
ttctcaatttct

SEQ ID NO: 361397 - DNA, 12 bp, Artificial Sequence
  Oligonucleotide primer for the detection of SNP TSC0052621
gaaatgattaag

SEQ ID NO: 361398 - DNA, 12 bp, Artificial Sequence
  Oligonucleotide primer for the detection of SNP TSC0052622
aatactatctat

SEQ ID NO: 361399 - DNA, 12 bp, Artificial Sequence
  Oligonucleotide primer for the detection of SNP TSC0052622
gaggataagata

SEQ ID NO: 361400 - DNA, 12 bp, Artificial Sequence
  Oligonucleotide primer for the detection of SNP TSC0052623
taacaaaaactc

SEQ ID NO: 361401 - DNA, 12 bp, Artificial Sequence
  Oligonucleotide primer for the detection of SNP TSC0052624
gtgtgtttgtgt

SEQ ID NO: 361402 - DNA, 12 bp, Artificial Sequence
  Oligonucleotide primer for the detection of SNP TSC0052625
caaaaaaacact

SEQ ID NO: 361403 - DNA, 12 bp, Artificial Sequence
  Oligonucleotide primer for the detection of SNP TSC0052625
agttttattgaa

SEQ ID NO: 361404 - DNA, 12 bp, Artificial Sequence
  Oligonucleotide primer for the detection of SNP TSC0052625
aaccctactaaa

SEQ ID NO: 361405 - DNA, 12 bp, Artificial Sequence
  Oligonucleotide primer for the detection of SNP TSC0052626
actctttcaaaa

SEQ ID NO: 361406 - DNA, 12 bp, Artificial Sequence
  Oligonucleotide primer for the detection of SNP TSC0052626
tagaggtgtttt

SEQ ID NO: 361407 - DNA, 12 bp, Artificial Sequence
  Oligonucleotide primer for the detection of SNP TSC0052627
attagataattg

SEQ ID NO: 361408 - DNA, 12 bp, Artificial Sequence
  Oligonucleotide primer for the detection of SNP TSC0052627
accaaacaatta

SEQ ID NO: 361409 - DNA, 12 bp, Artificial Sequence
  Oligonucleotide primer for the detection of SNP TSC0052627
tgttaaataagt

SEQ ID NO: 361410 - DNA, 12 bp, Artificial Sequence
  Oligonucleotide primer for the detection of SNP TSC0010489
catacataaaaa

SEQ ID NO: 361411 - DNA, 12 bp, Artificial Sequence
  Oligonucleotide primer for the detection of SNP TSC0010489
catacgtaaaaa

SEQ ID NO: 361412 - DNA, 12 bp, Artificial Sequence
  Oligonucleotide primer for the detection of SNP TSC0010489
aaacttctctcc

SEQ ID NO: 361413 - DNA, 12 bp, Artificial Sequence
  Oligonucleotide primer for the detection of SNP TSC0010489
tatatgtggaag

SEQ ID NO: 361414 - DNA, 12 bp, Artificial Sequence
  Oligonucleotide primer for the detection of SNP TSC0010489
tatacgtggaag

SEQ ID NO: 361415 - DNA, 12 bp, Artificial Sequence
  Oligonucleotide primer for the detection of SNP TSC0008078
taaaaaatctat

SEQ ID NO: 361416 - DNA, 12 bp, Artificial Sequence
  Oligonucleotide primer for the detection of SNP TSC0008078
attaagttggga

SEQ ID NO: 361417 - DNA, 12 bp, Artificial Sequence
  Oligonucleotide primer for the detection of SNP TSC0008078
accaaactaaaa

SEQ ID NO: 361418 - DNA, 12 bp, Artificial Sequence
  Oligonucleotide primer for the detection of SNP TSC0008078
tagaaggtttat

SEQ ID NO: 361419 - DNA, 12 bp, Artificial Sequence
  Oligonucleotide primer for the detection of SNP TSC0052628
cttaacccaact

SEQ ID NO: 361420 - DNA, 12 bp, Artificial Sequence
  Oligonucleotide primer for the detection of SNP TSC0052628
tggaaaaatgag

SEQ ID NO: 361421 - DNA, 12 bp, Artificial Sequence
  Oligonucleotide primer for the detection of SNP TSC0052629
taaatataccct

SEQ ID NO: 361422 - DNA, 12 bp, Artificial Sequence
  Oligonucleotide primer for the detection of SNP TSC0052629
ttatattaggaa

SEQ ID NO: 361423 - DNA, 12 bp, Artificial Sequence
  Oligonucleotide primer for the detection of SNP TSC0052630
agttgaaattgt

SEQ ID NO: 361424 - DNA, 12 bp, Artificial Sequence
  Oligonucleotide primer for the detection of SNP TSC0052630
actaaaactata

SEQ ID NO: 361425 - DNA, 12 bp, Artificial Sequence
  Oligonucleotide primer for the detection of SNP TSC0052630
gagttttgaata

SEQ ID NO: 361426 - DNA, 12 bp, Artificial Sequence
  Oligonucleotide primer for the detection of SNP TSC0052632
cctcccaaactc

SEQ ID NO: 361427 - DNA, 12 bp, Artificial Sequence
  Oligonucleotide primer for the detection of SNP TSC0052633
aactcataccaa

SEQ ID NO: 361428 - DNA, 12 bp, Artificial Sequence
  Oligonucleotide primer for the detection of SNP TSC0052633
gtgtgtgagagg

SEQ ID NO: 361429 - DNA, 12 bp, Artificial Sequence
  Oligonucleotide primer for the detection of SNP TSC0052633
agtttatgttag

SEQ ID NO: 361430 - DNA, 12 bp, Artificial Sequence
  Oligonucleotide primer for the detection of SNP TSC0052634
ttttactaaaat

SEQ ID NO: 361431 - DNA, 12 bp, Artificial Sequence
  Oligonucleotide primer for the detection of SNP TSC0052635
tatatctaactt

SEQ ID NO: 361432 - DNA, 12 bp, Artificial Sequence
  Oligonucleotide primer for the detection of SNP TSC0052635
atgttaagtgga

SEQ ID NO: 361433 - DNA, 12 bp, Artificial Sequence
  Oligonucleotide primer for the detection of SNP TSC0052637
gtagtattgagt

SEQ ID NO: 361434 - DNA, 12 bp, Artificial Sequence
  Oligonucleotide primer for the detection of SNP TSC0052637
caatattaaaca

SEQ ID NO: 361435 - DNA, 12 bp, Artificial Sequence
  Oligonucleotide primer for the detection of SNP TSC0052638
taaaataacata

SEQ ID NO: 361436 - DNA, 12 bp, Artificial Sequence
  Oligonucleotide primer for the detection of SNP TSC0052638
ggttgttaaaat

SEQ ID NO: 361437 - DNA, 12 bp, Artificial Sequence
  Oligonucleotide primer for the detection of SNP TSC0052638
ggttgttaaaac

SEQ ID NO: 361438 - DNA, 12 bp, Artificial Sequence
  Oligonucleotide primer for the detection of SNP TSC0052638
aattatcaaaac

SEQ ID NO: 361439 - DNA, 12 bp, Artificial Sequence
  Oligonucleotide primer for the detection of SNP TSC0052639
actttactcttt

SEQ ID NO: 361440 - DNA, 12 bp, Artificial Sequence
  Oligonucleotide primer for the detection of SNP TSC0052639
ggagtgattatg

SEQ ID NO: 361441 - DNA, 12 bp, Artificial Sequence
  Oligonucleotide primer for the detection of SNP TSC0052640
catttttcctat

SEQ ID NO: 361442 - DNA, 12 bp, Artificial Sequence
  Oligonucleotide primer for the detection of SNP TSC0052640
gattaataaaga

SEQ ID NO: 361443 - DNA, 12 bp, Artificial Sequence
  Oligonucleotide primer for the detection of SNP TSC0052641
ccaaacaaataa

SEQ ID NO: 361444 - DNA, 12 bp, Artificial Sequence
  Oligonucleotide primer for the detection of SNP TSC0052641
tatagaaagaat

SEQ ID NO: 361445 - DNA, 12 bp, Artificial Sequence
  Oligonucleotide primer for the detection of SNP TSC0052641
ttaagtaagtaa

SEQ ID NO: 361446 - DNA, 12 bp, Artificial Sequence
  Oligonucleotide primer for the detection of SNP TSC0052642
aaacacactttt

SEQ ID NO: 361447 - DNA, 12 bp, Artificial Sequence
  Oligonucleotide primer for the detection of SNP TSC0052643
acacctcatttt

SEQ ID NO: 361448 - DNA, 12 bp, Artificial Sequence
  Oligonucleotide primer for the detection of SNP TSC0052643
tgggaaagatag

SEQ ID NO: 361449 - DNA, 12 bp, Artificial Sequence
  Oligonucleotide primer for the detection of SNP TSC0052644
ttgttaggagtg

SEQ ID NO: 361450 - DNA, 12 bp, Artificial Sequence
  Oligonucleotide primer for the detection of SNP TSC0052645
ttagtagtgaat

SEQ ID NO: 361451 - DNA, 12 bp, Artificial Sequence
  Oligonucleotide primer for the detection of SNP TSC0052645
ctaacaataaat

SEQ ID NO: 361452 - DNA, 12 bp, Artificial Sequence
  Oligonucleotide primer for the detection of SNP TSC0052645
gaataaagtaat

SEQ ID NO: 361453 - DNA, 12 bp, Artificial Sequence
  Oligonucleotide primer for the detection of SNP TSC0008079
ttttaaaacttc

SEQ ID NO: 361454 - DNA, 12 bp, Artificial Sequence
  Oligonucleotide primer for the detection of SNP TSC0008079
attggtgtttaa

SEQ ID NO: 361455 - DNA, 12 bp, Artificial Sequence
  Oligonucleotide primer for the detection of SNP TSC0052646
  unsure (2..3, 5): unknown base
tnntnaaatgaa

SEQ ID NO: 361456 - DNA, 12 bp, Artificial Sequence
  Oligonucleotide primer for the detection of SNP TSC0052646
  unsure (1..2, 4): unknown base
nntnaaataaaa

SEQ ID NO: 361457 - DNA, 12 bp, Artificial Sequence
  Oligonucleotide primer for the detection of SNP TSC0052646
agataaaataag

SEQ ID NO: 361458 - DNA, 12 bp, Artificial Sequence
  Oligonucleotide primer for the detection of SNP TSC0005625
atttaactattt

SEQ ID NO: 361459 - DNA, 12 bp, Artificial Sequence
  Oligonucleotide primer for the detection of SNP TSC0005625
attaattgatag

SEQ ID NO: 361460 - DNA, 12 bp, Artificial Sequence
  Oligonucleotide primer for the detection of SNP TSC0005625
gtttggttattt

SEQ ID NO: 361461 - DNA, 12 bp, Artificial Sequence
  Oligonucleotide primer for the detection of SNP TSC0052647
ttaactaaatcc

SEQ ID NO: 361462 - DNA, 12 bp, Artificial Sequence
  Oligonucleotide primer for the detection of SNP TSC0052647
gtaaaaattgag

SEQ ID NO: 361463 - DNA, 12 bp, Artificial Sequence
  Oligonucleotide primer for the detection of SNP TSC0052647
ttagttgaattt

SEQ ID NO: 361464 - DNA, 12 bp, Artificial Sequence
  Oligonucleotide primer for the detection of SNP TSC0052648
cactctccaaac

SEQ ID NO: 361465 - DNA, 12 bp, Artificial Sequence
  Oligonucleotide primer for the detection of SNP TSC0052648
agagaggaaaat

SEQ ID NO: 361466 - DNA, 12 bp, Artificial Sequence
  Oligonucleotide primer for the detection of SNP TSC0052648
tattttttaaac

SEQ ID NO: 361467 - DNA, 12 bp, Artificial Sequence
  Oligonucleotide primer for the detection of SNP TSC0000370
ttttataccaat

SEQ ID NO: 361468 - DNA, 12 bp, Artificial Sequence
  Oligonucleotide primer for the detection of SNP TSC0052649
tttcattttcca

SEQ ID NO: 361469 - DNA, 12 bp, Artificial Sequence
  Oligonucleotide primer for the detection of SNP TSC0052649
gtgaagtaattt

SEQ ID NO: 361470 - DNA, 12 bp, Artificial Sequence
  Oligonucleotide primer for the detection of SNP TSC0052649
ataaaataactc

SEQ ID NO: 361471 - DNA, 12 bp, Artificial Sequence
  Oligonucleotide primer for the detection of SNP TSC0052650
ttccaaacaaat

SEQ ID NO: 361472 - DNA, 12 bp, Artificial Sequence
  Oligonucleotide primer for the detection of SNP TSC0052651
taaatctaacat

SEQ ID NO: 361473 - DNA, 12 bp, Artificial Sequence
  Oligonucleotide primer for the detection of SNP TSC0052651
attaaagattta

SEQ ID NO: 361474 - DNA, 12 bp, Artificial Sequence
  Oligonucleotide primer for the detection of SNP TSC0052651
taggtttaatat

SEQ ID NO: 361475 - DNA, 12 bp, Artificial Sequence
  Oligonucleotide primer for the detection of SNP TSC0052654
aaaactcatatc

SEQ ID NO: 361476 - DNA, 12 bp, Artificial Sequence
  Oligonucleotide primer for the detection of SNP TSC0052658
aaacaccaaacc

SEQ ID NO: 361477 - DNA, 12 bp, Artificial Sequence
  Oligonucleotide primer for the detection of SNP TSC0052658
agtttttgtgtg

SEQ ID NO: 361478 - DNA, 12 bp, Artificial Sequence
  Oligonucleotide primer for the detection of SNP TSC0052659
attccctataac

SEQ ID NO: 361479 - DNA, 12 bp, Artificial Sequence
  Oligonucleotide primer for the detection of SNP TSC0052659
tagtatgaatag

SEQ ID NO: 361480 - DNA, 12 bp, Artificial Sequence
  Oligonucleotide primer for the detection of SNP TSC0052660
ctcataaaatta

SEQ ID NO: 361481 - DNA, 12 bp, Artificial Sequence
  Oligonucleotide primer for the detection of SNP TSC0052660
aatggatattat

SEQ ID NO: 361482 - DNA, 12 bp, Artificial Sequence
  Oligonucleotide primer for the detection of SNP TSC0052660
tttataggattg

SEQ ID NO: 361483 - DNA, 12 bp, Artificial Sequence
  Oligonucleotide primer for the detection of SNP TSC0005491
tggtggggtatg

SEQ ID NO: 361484 - DNA, 12 bp, Artificial Sequence
  Oligonucleotide primer for the detection of SNP TSC0005491
tggtggggtacg

SEQ ID NO: 361485 - DNA, 12 bp, Artificial Sequence
  Oligonucleotide primer for the detection of SNP TSC0052662
tttgatttattg

SEQ ID NO: 361486 - DNA, 12 bp, Artificial Sequence
  Oligonucleotide primer for the detection of SNP TSC0052662
ttcgatttattg

SEQ ID NO: 361487 - DNA, 12 bp, Artificial Sequence
  Oligonucleotide primer for the detection of SNP TSC0001239
tccctttaacta

SEQ ID NO: 361488 - DNA, 12 bp, Artificial Sequence
  Oligonucleotide primer for the detection of SNP TSC0001239
gaagaaaataat

SEQ ID NO: 361489 - DNA, 12 bp, Artificial Sequence
  Oligonucleotide primer for the detection of SNP TSC0000779
attttatagtaa

SEQ ID NO: 361490 - DNA, 12 bp, Artificial Sequence
  Oligonucleotide primer for the detection of SNP TSC0052663
acactaactaca

SEQ ID NO: 361491 - DNA, 12 bp, Artificial Sequence
  Oligonucleotide primer for the detection of SNP TSC0052663
atattattaatt

SEQ ID NO: 361492 - DNA, 12 bp, Artificial Sequence
  Oligonucleotide primer for the detection of SNP TSC0052663
atattattaatc

SEQ ID NO: 361493 - DNA, 12 bp, Artificial Sequence
  Oligonucleotide primer for the detection of SNP TSC0052663
agtattaattgt

SEQ ID NO: 361494 - DNA, 12 bp, Artificial Sequence
  Oligonucleotide primer for the detection of SNP TSC0052664
atatagatgtaa

SEQ ID NO: 361495 - DNA, 12 bp, Artificial Sequence
  Oligonucleotide primer for the detection of SNP TSC0052665
tcttactttttt

SEQ ID NO: 361496 - DNA, 12 bp, Artificial Sequence
  Oligonucleotide primer for the detection of SNP TSC0052665
tacttctcccta

SEQ ID NO: 361497 - DNA, 12 bp, Artificial Sequence
  Oligonucleotide primer for the detection of SNP TSC0052666
ccattataatta

SEQ ID NO: 361498 - DNA, 12 bp, Artificial Sequence
  Oligonucleotide primer for the detection of SNP TSC0052666
ttaaggttttat

SEQ ID NO: 361499 - DNA, 12 bp, Artificial Sequence
  Oligonucleotide primer for the detection of SNP TSC0052667
tattgcgttttt

SEQ ID NO: 361500 - DNA, 12 bp, Artificial Sequence
  Oligonucleotide primer for the detection of SNP TSC0052667
ccactacacctc

SEQ ID NO: 361501 - DNA, 12 bp, Artificial Sequence
  Oligonucleotide primer for the detection of SNP TSC0052667
ccactacgcctc

SEQ ID NO: 361502 - DNA, 12 bp, Artificial Sequence
  Oligonucleotide primer for the detection of SNP TSC0052667
ttgtaagtgagg

SEQ ID NO: 361503 - DNA, 12 bp, Artificial Sequence
  Oligonucleotide primer for the detection of SNP TSC0052668
ctccaaacatac

SEQ ID NO: 361504 - DNA, 12 bp, Artificial Sequence
  Oligonucleotide primer for the detection of SNP TSC0052668
aaaatgtgtgtg

SEQ ID NO: 361505 - DNA, 12 bp, Artificial Sequence
  Oligonucleotide primer for the detection of SNP TSC0052671
caaaacccatat

SEQ ID NO: 361506 - DNA, 12 bp, Artificial Sequence
  Oligonucleotide primer for the detection of SNP TSC0052671
aaagtgtaaaaa

SEQ ID NO: 361507 - DNA, 12 bp, Artificial Sequence
  Oligonucleotide primer for the detection of SNP TSC0052671
tagggtttatat

SEQ ID NO: 361508 - DNA, 12 bp, Artificial Sequence
  Oligonucleotide primer for the detection of SNP TSC0052672
ctataccttcat

SEQ ID NO: 361509 - DNA, 12 bp, Artificial Sequence
  Oligonucleotide primer for the detection of SNP TSC0009004
ttctatatcttt

SEQ ID NO: 361510 - DNA, 12 bp, Artificial Sequence
  Oligonucleotide primer for the detection of SNP TSC0009004
tggtaagtggag

SEQ ID NO: 361511 - DNA, 12 bp, Artificial Sequence
  Oligonucleotide primer for the detection of SNP TSC0052677
ttaaaaattact

SEQ ID NO: 361512 - DNA, 12 bp, Artificial Sequence
  Oligonucleotide primer for the detection of SNP TSC0052677
attaaaatagta

SEQ ID NO: 361513 - DNA, 12 bp, Artificial Sequence
  Oligonucleotide primer for the detection of SNP TSC0052677
accaaaacaata

SEQ ID NO: 361514 - DNA, 12 bp, Artificial Sequence
  Oligonucleotide primer for the detection of SNP TSC0052678
ttttactataca

SEQ ID NO: 361515 - DNA, 12 bp, Artificial Sequence
  Oligonucleotide primer for the detection of SNP TSC0052678
aaatttatatgt

SEQ ID NO: 361516 - DNA, 12 bp, Artificial Sequence
  Oligonucleotide primer for the detection of SNP TSC0052678
aaatttatacgt

SEQ ID NO: 361517 - DNA, 12 bp, Artificial Sequence
  Oligonucleotide primer for the detection of SNP TSC0052678
aaatttatatgc

SEQ ID NO: 361518 - DNA, 12 bp, Artificial Sequence
  Oligonucleotide primer for the detection of SNP TSC0052678
aaatttatacgc

SEQ ID NO: 361519 - DNA, 12 bp, Artificial Sequence
  Oligonucleotide primer for the detection of SNP TSC0052678
aaatttatacac

SEQ ID NO: 361520 - DNA, 12 bp, Artificial Sequence
  Oligonucleotide primer for the detection of SNP TSC0052678
tttttgttatgt

SEQ ID NO: 361521 - DNA, 12 bp, Artificial Sequence
  Oligonucleotide primer for the detection of SNP TSC0052679
aaaaaattttct

SEQ ID NO: 361522 - DNA, 12 bp, Artificial Sequence
  Oligonucleotide primer for the detection of SNP TSC0052679
aaattatttata

SEQ ID NO: 361523 - DNA, 12 bp, Artificial Sequence
  Oligonucleotide primer for the detection of SNP TSC0052679
aggaaatttttt

SEQ ID NO: 361524 - DNA, 12 bp, Artificial Sequence
  Oligonucleotide primer for the detection of SNP TSC0052680
gagggagggagg

SEQ ID NO: 361525 - DNA, 12 bp, Artificial Sequence
  Oligonucleotide primer for the detection of SNP TSC0052681
agttattgttat

SEQ ID NO: 361526 - DNA, 12 bp, Artificial Sequence
  Oligonucleotide primer for the detection of SNP TSC0052681
taaccattacta

SEQ ID NO: 361527 - DNA, 12 bp, Artificial Sequence
  Oligonucleotide primer for the detection of SNP TSC0052681
tagttgaaagaa

SEQ ID NO: 361528 - DNA, 12 bp, Artificial Sequence
  Oligonucleotide primer for the detection of SNP TSC0000344
tatgaaaattgt

SEQ ID NO: 361529 - DNA, 12 bp, Artificial Sequence
  Oligonucleotide primer for the detection of SNP TSC0000344
tatgaaaatcgt

SEQ ID NO: 361530 - DNA, 12 bp, Artificial Sequence
  Oligonucleotide primer for the detection of SNP TSC0000344
taaaaaccacaa

SEQ ID NO: 361531 - DNA, 12 bp, Artificial Sequence
  Oligonucleotide primer for the detection of SNP TSC0000344
taaaaaccgcaa

SEQ ID NO: 361532 - DNA, 12 bp, Artificial Sequence
  Oligonucleotide primer for the detection of SNP TSC0000345
acaaacaataac

SEQ ID NO: 361533 - DNA, 12 bp, Artificial Sequence
  Oligonucleotide primer for the detection of SNP TSC0000345
tatagagagata

SEQ ID NO: 361534 - DNA, 12 bp, Artificial Sequence
  Oligonucleotide primer for the detection of SNP TSC0000346
ccttatcattac

SEQ ID NO: 361535 - DNA, 12 bp, Artificial Sequence
  Oligonucleotide primer for the detection of SNP TSC0000346
gttgttggggtt

SEQ ID NO: 361536 - DNA, 12 bp, Artificial Sequence
  Oligonucleotide primer for the detection of SNP TSC0000346
ctattaaaacca

SEQ ID NO: 361537 - DNA, 12 bp, Artificial Sequence
  Oligonucleotide primer for the detection of SNP TSC0052684
ccaaaaaataca

SEQ ID NO: 361538 - DNA, 12 bp, Artificial Sequence
  Oligonucleotide primer for the detection of SNP TSC0052684
tattgtttggtt

SEQ ID NO: 361539 - DNA, 12 bp, Artificial Sequence
  Oligonucleotide primer for the detection of SNP TSC0052684
atcattacctaa

SEQ ID NO: 361540 - DNA, 12 bp, Artificial Sequence
  Oligonucleotide primer for the detection of SNP TSC0052684
ttaaaagatata

SEQ ID NO: 361541 - DNA, 12 bp, Artificial Sequence
  Oligonucleotide primer for the detection of SNP TSC0009240
taattaatacta

SEQ ID NO: 361542 - DNA, 12 bp, Artificial Sequence
  Oligonucleotide primer for the detection of SNP TSC0009240
ataattaatatt

SEQ ID NO: 361543 - DNA, 12 bp, Artificial Sequence
  Oligonucleotide primer for the detection of SNP TSC0052685
ctaaactccaat

SEQ ID NO: 361544 - DNA, 12 bp, Artificial Sequence
  Oligonucleotide primer for the detection of SNP TSC0052685
ggttagagttgg

SEQ ID NO: 361545 - DNA, 12 bp, Artificial Sequence
  Oligonucleotide primer for the detection of SNP TSC0052686
actttacaaact

SEQ ID NO: 361546 - DNA, 12 bp, Artificial Sequence
  Oligonucleotide primer for the detection of SNP TSC0052686
ttaggagggaga

SEQ ID NO: 361547 - DNA, 12 bp, Artificial Sequence
  Oligonucleotide primer for the detection of SNP TSC0052687
tttacaaactat

SEQ ID NO: 361548 - DNA, 12 bp, Artificial Sequence
  Oligonucleotide primer for the detection of SNP TSC0052687
gttaggagggag

SEQ ID NO: 361549 - DNA, 12 bp, Artificial Sequence
  Oligonucleotide primer for the detection of SNP TSC0052689
actattatattt

SEQ ID NO: 361550 - DNA, 12 bp, Artificial Sequence
  Oligonucleotide primer for the detection of SNP TSC0052690
aaaaactttatt

SEQ ID NO: 361551 - DNA, 12 bp, Artificial Sequence
  Oligonucleotide primer for the detection of SNP TSC0052692
ataaaaccaaat

SEQ ID NO: 361552 - DNA, 12 bp, Artificial Sequence
  Oligonucleotide primer for the detection of SNP TSC0052693
cattctcaacaa

SEQ ID NO: 361553 - DNA, 12 bp, Artificial Sequence
  Oligonucleotide primer for the detection of SNP TSC0052693
gtatttgtgata

SEQ ID NO: 361554 - DNA, 12 bp, Artificial Sequence
  Oligonucleotide primer for the detection of SNP TSC0052693
gtatttgcgata

SEQ ID NO: 361555 - DNA, 12 bp, Artificial Sequence
  Oligonucleotide primer for the detection of SNP TSC0052693
cacttacaataa

SEQ ID NO: 361556 - DNA, 12 bp, Artificial Sequence
  Oligonucleotide primer for the detection of SNP TSC0052693
cacttacgataa

SEQ ID NO: 361557 - DNA, 12 bp, Artificial Sequence
  Oligonucleotide primer for the detection of SNP TSC0052694
ggtggtggtgta

SEQ ID NO: 361558 - DNA, 12 bp, Artificial Sequence
  Oligonucleotide primer for the detection of SNP TSC0052694
ggtggtggcgta

SEQ ID NO: 361559 - DNA, 12 bp, Artificial Sequence
  Oligonucleotide primer for the detection of SNP TSC0052694
aataataacaca

SEQ ID NO: 361560 - DNA, 12 bp, Artificial Sequence
  Oligonucleotide primer for the detection of SNP TSC0052694
aataataacgca

SEQ ID NO: 361561 - DNA, 12 bp, Artificial Sequence
  Oligonucleotide primer for the detection of SNP TSC0052694
agttagggttat

SEQ ID NO: 361562 - DNA, 12 bp, Artificial Sequence
  Oligonucleotide primer for the detection of SNP TSC0052696
aacctaacataa

SEQ ID NO: 361563 - DNA, 12 bp, Artificial Sequence
  Oligonucleotide primer for the detection of SNP TSC0052696
aaaggtgggtgt

SEQ ID NO: 361564 - DNA, 12 bp, Artificial Sequence
  Oligonucleotide primer for the detection of SNP TSC0052696
agtttggtatgg

SEQ ID NO: 361565 - DNA, 12 bp, Artificial Sequence
  Oligonucleotide primer for the detection of SNP TSC0052697
taacatattcat

SEQ ID NO: 361566 - DNA, 12 bp, Artificial Sequence
  Oligonucleotide primer for the detection of SNP TSC0052698
gtattgttaaga

SEQ ID NO: 361567 - DNA, 12 bp, Artificial Sequence
  Oligonucleotide primer for the detection of SNP TSC0005897
attctaacccta

SEQ ID NO: 361568 - DNA, 12 bp, Artificial Sequence
  Oligonucleotide primer for the detection of SNP TSC0005897
atatagtgagag

SEQ ID NO: 361569 - DNA, 12 bp, Artificial Sequence
  Oligonucleotide primer for the detection of SNP TSC0009037
tcaaatcatctc

SEQ ID NO: 361570 - DNA, 12 bp, Artificial Sequence
  Oligonucleotide primer for the detection of SNP TSC0009037
gtgggaggtata

SEQ ID NO: 361571 - DNA, 12 bp, Artificial Sequence
  Oligonucleotide primer for the detection of SNP TSC0052699
tattcatttcat

SEQ ID NO: 361572 - DNA, 12 bp, Artificial Sequence
  Oligonucleotide primer for the detection of SNP TSC0052700
ggaagagtagaa

SEQ ID NO: 361573 - DNA, 12 bp, Artificial Sequence
  Oligonucleotide primer for the detection of SNP TSC0052701
tataattttatt

SEQ ID NO: 361574 - DNA, 12 bp, Artificial Sequence
  Oligonucleotide primer for the detection of SNP TSC0052701
tataatctcatt

SEQ ID NO: 361575 - DNA, 12 bp, Artificial Sequence
  Oligonucleotide primer for the detection of SNP TSC0052702
tttaactttttc

SEQ ID NO: 361576 - DNA, 12 bp, Artificial Sequence
  Oligonucleotide primer for the detection of SNP TSC0052702
ttggttatatta

SEQ ID NO: 361577 - DNA, 12 bp, Artificial Sequence
  Oligonucleotide primer for the detection of SNP TSC0052703
aaaattcatcat

SEQ ID NO: 361578 - DNA, 12 bp, Artificial Sequence
  Oligonucleotide primer for the detection of SNP TSC0052703
atggtaggttta

SEQ ID NO: 361579 - DNA, 12 bp, Artificial Sequence
  Oligonucleotide primer for the detection of SNP TSC0052705
gaaggttgaggt

SEQ ID NO: 361580 - DNA, 12 bp, Artificial Sequence
  Oligonucleotide primer for the detection of SNP TSC0052705
gaaggtcgaggt

SEQ ID NO: 361581 - DNA, 12 bp, Artificial Sequence
  Oligonucleotide primer for the detection of SNP TSC0052708
aattcacaaaac

SEQ ID NO: 361582 - DNA, 12 bp, Artificial Sequence
  Oligonucleotide primer for the detection of SNP TSC0052708
tggttatttaga

SEQ ID NO: 361583 - DNA, 12 bp, Artificial Sequence
  Oligonucleotide primer for the detection of SNP TSC0052709
ttgaagagatat

SEQ ID NO: 361584 - DNA, 12 bp, Artificial Sequence
  Oligonucleotide primer for the detection of SNP TSC0052709
ttgaagagatac

SEQ ID NO: 361585 - DNA, 12 bp, Artificial Sequence
  Oligonucleotide primer for the detection of SNP TSC0052710
ttacttatacat

SEQ ID NO: 361586 - DNA, 12 bp, Artificial Sequence
  Oligonucleotide primer for the detection of SNP TSC0052710
atgtatgttaag

SEQ ID NO: 361587 - DNA, 12 bp, Artificial Sequence
  Oligonucleotide primer for the detection of SNP TSC0008735
aaacaaaccgaa

SEQ ID NO: 361588 - DNA, 12 bp, Artificial Sequence
  Oligonucleotide primer for the detection of SNP TSC0008735
gagtaggttggg

SEQ ID NO: 361589 - DNA, 12 bp, Artificial Sequence
  Oligonucleotide primer for the detection of SNP TSC0008735
gagtaggtcggg

SEQ ID NO: 361590 - DNA, 12 bp, Artificial Sequence
  Oligonucleotide primer for the detection of SNP TSC0008736
atataattttac

SEQ ID NO: 361591 - DNA, 12 bp, Artificial Sequence
  Oligonucleotide primer for the detection of SNP TSC0008736
atatttatatgt

SEQ ID NO: 361592 - DNA, 12 bp, Artificial Sequence
  Oligonucleotide primer for the detection of SNP TSC0008736
atatttacatac

SEQ ID NO: 361593 - DNA, 12 bp, Artificial Sequence
  Oligonucleotide primer for the detection of SNP TSC0052711
aaatcattcttc

SEQ ID NO: 361594 - DNA, 12 bp, Artificial Sequence
  Oligonucleotide primer for the detection of SNP TSC0052711
tatcataaaaat

SEQ ID NO: 361595 - DNA, 12 bp, Artificial Sequence
  Oligonucleotide primer for the detection of SNP TSC0052711
aagttatttttc

SEQ ID NO: 361596 - DNA, 12 bp, Artificial Sequence
  Oligonucleotide primer for the detection of SNP TSC0052716
ttagtttgtttg

SEQ ID NO: 361597 - DNA, 12 bp, Artificial Sequence
  Oligonucleotide primer for the detection of SNP TSC0052716
ctaatctattta

SEQ ID NO: 361598 - DNA, 12 bp, Artificial Sequence
  Oligonucleotide primer for the detection of SNP TSC0052716
agagtaaaaatt

SEQ ID NO: 361599 - DNA, 12 bp, Artificial Sequence
  Oligonucleotide primer for the detection of SNP TSC0004928
tctcacaaaact

SEQ ID NO: 361600 - DNA, 12 bp, Artificial Sequence
  Oligonucleotide primer for the detection of SNP TSC0004928
tctcgcaaaact

SEQ ID NO: 361601 - DNA, 12 bp, Artificial Sequence
  Oligonucleotide primer for the detection of SNP TSC0004928
ttaattagagta

SEQ ID NO: 361602 - DNA, 12 bp, Artificial Sequence
  Oligonucleotide primer for the detection of SNP TSC0052717
accactcaataa

SEQ ID NO: 361603 - DNA, 12 bp, Artificial Sequence
  Oligonucleotide primer for the detection of SNP TSC0052717
aaaaaaaggtgt

SEQ ID NO: 361604 - DNA, 12 bp, Artificial Sequence
  Oligonucleotide primer for the detection of SNP TSC0052718
taccatatctaa

SEQ ID NO: 361605 - DNA, 12 bp, Artificial Sequence
  Oligonucleotide primer for the detection of SNP TSC0052718
aatcatccctct

SEQ ID NO: 361606 - DNA, 12 bp, Artificial Sequence
  Oligonucleotide primer for the detection of SNP TSC0052718
tgttatatttgg

SEQ ID NO: 361607 - DNA, 12 bp, Artificial Sequence
  Oligonucleotide primer for the detection of SNP TSC0052719
atataagataaa

SEQ ID NO: 361608 - DNA, 12 bp, Artificial Sequence
  Oligonucleotide primer for the detection of SNP TSC0052720
taaaactattcc

SEQ ID NO: 361609 - DNA, 12 bp, Artificial Sequence
  Oligonucleotide primer for the detection of SNP TSC0052720
ttggggggcggg

SEQ ID NO: 361610 - DNA, 12 bp, Artificial Sequence
  Oligonucleotide primer for the detection of SNP TSC0052722
ttatacccaatc

SEQ ID NO: 361611 - DNA, 12 bp, Artificial Sequence
  Oligonucleotide primer for the detection of SNP TSC0052722
taattttaatta

SEQ ID NO: 361612 - DNA, 12 bp, Artificial Sequence
  Oligonucleotide primer for the detection of SNP TSC0052723
aacacatcaaat

SEQ ID NO: 361613 - DNA, 12 bp, Artificial Sequence
  Oligonucleotide primer for the detection of SNP TSC0052723
gtagtatttaaa

SEQ ID NO: 361614 - DNA, 12 bp, Artificial Sequence
  Oligonucleotide primer for the detection of SNP TSC0052724
taccaataactc

SEQ ID NO: 361615 - DNA, 12 bp, Artificial Sequence
  Oligonucleotide primer for the detection of SNP TSC0052724
taggattaaagg

SEQ ID NO: 361616 - DNA, 12 bp, Artificial Sequence
  Oligonucleotide primer for the detection of SNP TSC0052724
tgttagtggttt

SEQ ID NO: 361617 - DNA, 12 bp, Artificial Sequence
  Oligonucleotide primer for the detection of SNP TSC0052725
ctatctttactc

SEQ ID NO: 361618 - DNA, 12 bp, Artificial Sequence
  Oligonucleotide primer for the detection of SNP TSC0052725
gagtaatttaat

SEQ ID NO: 361619 - DNA, 12 bp, Artificial Sequence
  Oligonucleotide primer for the detection of SNP TSC0007701
ttactcccctaa

SEQ ID NO: 361620 - DNA, 12 bp, Artificial Sequence
  Oligonucleotide primer for the detection of SNP TSC0007701
acactttttaac

SEQ ID NO: 361621 - DNA, 12 bp, Artificial Sequence
  Oligonucleotide primer for the detection of SNP TSC0052728
taaatcaaaacc

SEQ ID NO: 361622 - DNA, 12 bp, Artificial Sequence
  Oligonucleotide primer for the detection of SNP TSC0052728
tgaattataaag

SEQ ID NO: 361623 - DNA, 12 bp, Artificial Sequence
  Oligonucleotide primer for the detection of SNP TSC0052729
ttaaattagttt

SEQ ID NO: 361624 - DNA, 12 bp, Artificial Sequence
  Oligonucleotide primer for the detection of SNP TSC0052729
taaaccaaccta

SEQ ID NO: 361625 - DNA, 12 bp, Artificial Sequence
  Oligonucleotide primer for the detection of SNP TSC0052730
gtattgtagttt

SEQ ID NO: 361626 - DNA, 12 bp, Artificial Sequence
  Oligonucleotide primer for the detection of SNP TSC0052730
acactacaacct

SEQ ID NO: 361627 - DNA, 12 bp, Artificial Sequence
  Oligonucleotide primer for the detection of SNP TSC0052731
ccaaattccaac

SEQ ID NO: 361628 - DNA, 12 bp, Artificial Sequence
  Oligonucleotide primer for the detection of SNP TSC0052731
tatataggagag

SEQ ID NO: 361629 - DNA, 12 bp, Artificial Sequence
  Oligonucleotide primer for the detection of SNP TSC0052732
aaaaaacacctc

SEQ ID NO: 361630 - DNA, 12 bp, Artificial Sequence
  Oligonucleotide primer for the detection of SNP TSC0052732
taatttttgttg

SEQ ID NO: 361631 - DNA, 12 bp, Artificial Sequence
  Oligonucleotide primer for the detection of SNP TSC0052734
tcccttaaaaaa

SEQ ID NO: 361632 - DNA, 12 bp, Artificial Sequence
  Oligonucleotide primer for the detection of SNP TSC0052734
gtgtgttttggg

SEQ ID NO: 361633 - DNA, 12 bp, Artificial Sequence
  Oligonucleotide primer for the detection of SNP TSC0052734
ttttttaagaga

SEQ ID NO: 361634 - DNA, 12 bp, Artificial Sequence
  Oligonucleotide primer for the detection of SNP TSC0052735
cacatataaata

SEQ ID NO: 361635 - DNA, 12 bp, Artificial Sequence
  Oligonucleotide primer for the detection of SNP TSC0052735
gtgatgtttata

SEQ ID NO: 361636 - DNA, 12 bp, Artificial Sequence
  Oligonucleotide primer for the detection of SNP TSC0052735
ataatatccaca

SEQ ID NO: 361637 - DNA, 12 bp, Artificial Sequence
  Oligonucleotide primer for the detection of SNP TSC0052735
ttatatgtagat

SEQ ID NO: 361638 - DNA, 12 bp, Artificial Sequence
  Oligonucleotide primer for the detection of SNP TSC0052736
ttaacaatttac

SEQ ID NO: 361639 - DNA, 12 bp, Artificial Sequence
  Oligonucleotide primer for the detection of SNP TSC0052740
ctcaatataatt

SEQ ID NO: 361640 - DNA, 12 bp, Artificial Sequence
  Oligonucleotide primer for the detection of SNP TSC0052740
ggtattgtttta

SEQ ID NO: 361641 - DNA, 12 bp, Artificial Sequence
  Oligonucleotide primer for the detection of SNP TSC0052741
aaaatagttaat

SEQ ID NO: 361642 - DNA, 12 bp, Artificial Sequence
  Oligonucleotide primer for the detection of SNP TSC0052741
tttattattatg

SEQ ID NO: 361643 - DNA, 12 bp, Artificial Sequence
  Oligonucleotide primer for the detection of SNP TSC0052742
acttccttatct

SEQ ID NO: 361644 - DNA, 12 bp, Artificial Sequence
  Oligonucleotide primer for the detection of SNP TSC0052742
atggtttatgga

SEQ ID NO: 361645 - DNA, 12 bp, Artificial Sequence
  Oligonucleotide primer for the detection of SNP TSC0052743
caacttaaaatt

SEQ ID NO: 361646 - DNA, 12 bp, Artificial Sequence
  Oligonucleotide primer for the detection of SNP TSC0052743
agaatgttttaa

SEQ ID NO: 361647 - DNA, 12 bp, Artificial Sequence
  Oligonucleotide primer for the detection of SNP TSC0052744
cttaaactctat

SEQ ID NO: 361648 - DNA, 12 bp, Artificial Sequence
  Oligonucleotide primer for the detection of SNP TSC0052744
aagtatttataa

SEQ ID NO: 361649 - DNA, 12 bp, Artificial Sequence
  Oligonucleotide primer for the detection of SNP TSC0052745
acaaaatccttt

SEQ ID NO: 361650 - DNA, 12 bp, Artificial Sequence
  Oligonucleotide primer for the detection of SNP TSC0052745
tggtttttatta

SEQ ID NO: 361651 - DNA, 12 bp, Artificial Sequence
  Oligonucleotide primer for the detection of SNP TSC0052748
ctcccaacctta

SEQ ID NO: 361652 - DNA, 12 bp, Artificial Sequence
  Oligonucleotide primer for the detection of SNP TSC0052748
aaagttgggagt

SEQ ID NO: 361653 - DNA, 12 bp, Artificial Sequence
  Oligonucleotide primer for the detection of SNP TSC0052749
tttatgaaaatt

SEQ ID NO: 361654 - DNA, 12 bp, Artificial Sequence
  Oligonucleotide primer for the detection of SNP TSC0052749
tttataaaaatt

SEQ ID NO: 361655 - DNA, 12 bp, Artificial Sequence
  Oligonucleotide primer for the detection of SNP TSC0052753
attcacatctat

SEQ ID NO: 361656 - DNA, 12 bp, Artificial Sequence
  Oligonucleotide primer for the detection of SNP TSC0052753
attcacgtctat

SEQ ID NO: 361657 - DNA, 12 bp, Artificial Sequence
  Oligonucleotide primer for the detection of SNP TSC0052753
atttaattagga

SEQ ID NO: 361658 - DNA, 12 bp, Artificial Sequence
  Oligonucleotide primer for the detection of SNP TSC0052754
tttagtggggtt

SEQ ID NO: 361659 - DNA, 12 bp, Artificial Sequence
  Oligonucleotide primer for the detection of SNP TSC0052754
tttagcggggtt

SEQ ID NO: 361660 - DNA, 12 bp, Artificial Sequence
  Oligonucleotide primer for the detection of SNP TSC0052754
acctaacaaaac

SEQ ID NO: 361661 - DNA, 12 bp, Artificial Sequence
  Oligonucleotide primer for the detection of SNP TSC0052754
acctaacgaaac

SEQ ID NO: 361662 - DNA, 12 bp, Artificial Sequence
  Oligonucleotide primer for the detection of SNP TSC0052754
aaatagtatttg

SEQ ID NO: 361663 - DNA, 12 bp, Artificial Sequence
  Oligonucleotide primer for the detection of SNP TSC0052756
ataaaccaacct

SEQ ID NO: 361664 - DNA, 12 bp, Artificial Sequence
  Oligonucleotide primer for the detection of SNP TSC0052756
tgttaagttaga

SEQ ID NO: 361665 - DNA, 12 bp, Artificial Sequence
  Oligonucleotide primer for the detection of SNP TSC0052756
cgttaagttaga

SEQ ID NO: 361666 - DNA, 12 bp, Artificial Sequence
  Oligonucleotide primer for the detection of SNP TSC0052756
cgctaaatcaaa

SEQ ID NO: 361667 - DNA, 12 bp, Artificial Sequence
  Oligonucleotide primer for the detection of SNP TSC0052756
atgggttagttt

SEQ ID NO: 361668 - DNA, 12 bp, Artificial Sequence
  Oligonucleotide primer for the detection of SNP TSC0052758
ttttaacttaat

SEQ ID NO: 361669 - DNA, 12 bp, Artificial Sequence
  Oligonucleotide primer for the detection of SNP TSC0052758
ttagttattaaa

SEQ ID NO: 361670 - DNA, 12 bp, Artificial Sequence
  Oligonucleotide primer for the detection of SNP TSC0052759
taaaacactctc

SEQ ID NO: 361671 - DNA, 12 bp, Artificial Sequence
  Oligonucleotide primer for the detection of SNP TSC0052759
ttcacacctaca

SEQ ID NO: 361672 - DNA, 12 bp, Artificial Sequence
  Oligonucleotide primer for the detection of SNP TSC0052760
aattcaataata

SEQ ID NO: 361673 - DNA, 12 bp, Artificial Sequence
  Oligonucleotide primer for the detection of SNP TSC0052760
atgaatataatt

SEQ ID NO: 361674 - DNA, 12 bp, Artificial Sequence
  Oligonucleotide primer for the detection of SNP TSC0052760
taaatataatta

SEQ ID NO: 361675 - DNA, 12 bp, Artificial Sequence
  Oligonucleotide primer for the detection of SNP TSC0052760
tagtttagtagt

SEQ ID NO: 361676 - DNA, 12 bp, Artificial Sequence
  Oligonucleotide primer for the detection of SNP TSC0052761
cttttatatacc

SEQ ID NO: 361677 - DNA, 12 bp, Artificial Sequence
  Oligonucleotide primer for the detection of SNP TSC0052761
aatttgataaag

SEQ ID NO: 361678 - DNA, 12 bp, Artificial Sequence
  Oligonucleotide primer for the detection of SNP TSC0052761
tctaataaaaaa

SEQ ID NO: 361679 - DNA, 12 bp, Artificial Sequence
  Oligonucleotide primer for the detection of SNP TSC0052761
tttttatgtatc

SEQ ID NO: 361680 - DNA, 12 bp, Artificial Sequence
  Oligonucleotide primer for the detection of SNP TSC0052767
atactcatataa

SEQ ID NO: 361681 - DNA, 12 bp, Artificial Sequence
  Oligonucleotide primer for the detection of SNP TSC0052769
atccaacatact

SEQ ID NO: 361682 - DNA, 12 bp, Artificial Sequence
  Oligonucleotide primer for the detection of SNP TSC0052769
atttgtggagta

SEQ ID NO: 361683 - DNA, 12 bp, Artificial Sequence
  Oligonucleotide primer for the detection of SNP TSC0052769
gtttaatatgtt

SEQ ID NO: 361684 - DNA, 12 bp, Artificial Sequence
  Oligonucleotide primer for the detection of SNP TSC0052770
taaaatcgaaac

SEQ ID NO: 361685 - DNA, 12 bp, Artificial Sequence
  Oligonucleotide primer for the detection of SNP TSC0052770
aaattagaaaag

SEQ ID NO: 361686 - DNA, 12 bp, Artificial Sequence
  Oligonucleotide primer for the detection of SNP TSC0052771
tttctttaatac

SEQ ID NO: 361687 - DNA, 12 bp, Artificial Sequence
  Oligonucleotide primer for the detection of SNP TSC0052771
gtgagataggga

SEQ ID NO: 361688 - DNA, 12 bp, Artificial Sequence
  Oligonucleotide primer for the detection of SNP TSC0052772
cttccacacacc

SEQ ID NO: 361689 - DNA, 12 bp, Artificial Sequence
  Oligonucleotide primer for the detection of SNP TSC0052773
aaaatatgtatt

SEQ ID NO: 361690 - DNA, 12 bp, Artificial Sequence
  Oligonucleotide primer for the detection of SNP TSC0052773
aaaatatatacc

SEQ ID NO: 361691 - DNA, 12 bp, Artificial Sequence
  Oligonucleotide primer for the detection of SNP TSC0052773
agaagttttgta

SEQ ID NO: 361692 - DNA, 12 bp, Artificial Sequence
  Oligonucleotide primer for the detection of SNP TSC0052775
atacatctttct

SEQ ID NO: 361693 - DNA, 12 bp, Artificial Sequence
  Oligonucleotide primer for the detection of SNP TSC0052777
tatttttgaatt

SEQ ID NO: 361694 - DNA, 12 bp, Artificial Sequence
  Oligonucleotide primer for the detection of SNP TSC0052777
attcttaaacta

SEQ ID NO: 361695 - DNA, 12 bp, Artificial Sequence
  Oligonucleotide primer for the detection of SNP TSC0052777
ttttatagaaat

SEQ ID NO: 361696 - DNA, 12 bp, Artificial Sequence
  Oligonucleotide primer for the detection of SNP TSC0052778
attaaaccttaa

SEQ ID NO: 361697 - DNA, 12 bp, Artificial Sequence
  Oligonucleotide primer for the detection of SNP TSC0052778
taagatgttttg

SEQ ID NO: 361698 - DNA, 12 bp, Artificial Sequence
  Oligonucleotide primer for the detection of SNP TSC0052780
ggtttgaggttt

SEQ ID NO: 361699 - DNA, 12 bp, Artificial Sequence
  Oligonucleotide primer for the detection of SNP TSC0052780
aacctaaaactt

SEQ ID NO: 361700 - DNA, 12 bp, Artificial Sequence
  Oligonucleotide primer for the detection of SNP TSC0052780
aattaagaaagg

SEQ ID NO: 361701 - DNA, 12 bp, Artificial Sequence
  Oligonucleotide primer for the detection of SNP TSC0052781
acaatatcactc

SEQ ID NO: 361702 - DNA, 12 bp, Artificial Sequence
  Oligonucleotide primer for the detection of SNP TSC0052781
atagggtttagg

SEQ ID NO: 361703 - DNA, 12 bp, Artificial Sequence
  Oligonucleotide primer for the detection of SNP TSC0052782
aatatatccata

SEQ ID NO: 361704 - DNA, 12 bp, Artificial Sequence
  Oligonucleotide primer for the detection of SNP TSC0052782
ttatatatttat

SEQ ID NO: 361705 - DNA, 12 bp, Artificial Sequence
  Oligonucleotide primer for the detection of SNP TSC0052782
cccacacattta

SEQ ID NO: 361706 - DNA, 12 bp, Artificial Sequence
  Oligonucleotide primer for the detection of SNP TSC0052782
gatgtgtttatg

SEQ ID NO: 361707 - DNA, 12 bp, Artificial Sequence
  Oligonucleotide primer for the detection of SNP TSC0052783
ttggggaagttg

SEQ ID NO: 361708 - DNA, 12 bp, Artificial Sequence
  Oligonucleotide primer for the detection of SNP TSC0052784
tagtagttagga

SEQ ID NO: 361709 - DNA, 12 bp, Artificial Sequence
  Oligonucleotide primer for the detection of SNP TSC0052784
caacaattaaaa

SEQ ID NO: 361710 - DNA, 12 bp, Artificial Sequence
  Oligonucleotide primer for the detection of SNP TSC0052784
gttagaatttag

SEQ ID NO: 361711 - DNA, 12 bp, Artificial Sequence
  Oligonucleotide primer for the detection of SNP TSC0052785
tttttggggagg

SEQ ID NO: 361712 - DNA, 12 bp, Artificial Sequence
  Oligonucleotide primer for the detection of SNP TSC0052785
cttctaaaaaaa

SEQ ID NO: 361713 - DNA, 12 bp, Artificial Sequence
  Oligonucleotide primer for the detection of SNP TSC0052785
ttagagaagatt

SEQ ID NO: 361714 - DNA, 12 bp, Artificial Sequence
  Oligonucleotide primer for the detection of SNP TSC0052786
cccctatttcca

SEQ ID NO: 361715 - DNA, 12 bp, Artificial Sequence
  Oligonukleotid-Primer
aggagatagaaa

SEQ ID NO: 361716 - DNA, 12 bp, Artificial Sequence
  Oligonucleotide primer for the detection of SNP TSC0052789
aatatggtttaa

SEQ ID NO: 361717 - DNA, 12 bp, Artificial Sequence
  Oligonucleotide primer for the detection of SNP TSC0052789
aacataatccaa

SEQ ID NO: 361718 - DNA, 12 bp, Artificial Sequence
  Oligonucleotide primer for the detection of SNP TSC0052789
tagagaaagttt

SEQ ID NO: 361719 - DNA, 12 bp, Artificial Sequence
  Oligonukleotid-Primer
tccaaacaacat

SEQ ID NO: 361720 - DNA, 12 bp, Artificial Sequence
  Oligonucleotide primer for the detection of SNP TSC0052790
tccaaacgacat

SEQ ID NO: 361721 - DNA, 12 bp, Artificial Sequence
  Oligonucleotide primer for the detection of SNP TSC0052790
tgtattaaaata

SEQ ID NO: 361722 - DNA, 12 bp, Artificial Sequence
  Oligonucleotide primer for the detection of SNP TSC0052791
ctaccaacacct

SEQ ID NO: 361723 - DNA, 12 bp, Artificial Sequence
  Oligonukleotid-Primer
tcacctatctac

SEQ ID NO: 361724 - DNA, 12 bp, Artificial Sequence
  Oligonucleotide primer for the detection of SNP TSC0052794
tgatgagtgagg

SEQ ID NO: 361725 - DNA, 12 bp, Artificial Sequence
  Oligonucleotide primer for the detection of SNP TSC0052794
cgatgagtgagg

SEQ ID NO: 361726 - DNA, 12 bp, Artificial Sequence
  Oligonucleotide primer for the detection of SNP TSC0052794
tgatgagcgagg

SEQ ID NO: 361727 - DNA, 12 bp, Artificial Sequence
  Oligonucleotide primer for the detection of SNP TSC0052794
cgatgagcgagg

SEQ ID NO: 361728 - DNA, 12 bp, Artificial Sequence
  Oligonucleotide primer for the detection of SNP TSC0052794
caataaacgaaa

SEQ ID NO: 361729 - DNA, 12 bp, Artificial Sequence
  Oligonucleotide primer for the detection of SNP TSC0052794
cgataaacgaaa

SEQ ID NO: 361730 - DNA, 12 bp, Artificial Sequence
  Oligonucleotide primer for the detection of SNP TSC0052795
aaaacctaccat

SEQ ID NO: 361731 - DNA, 12 bp, Artificial Sequence
  Oligonucleotide primer for the detection of SNP TSC0052795
tagggttgatag

SEQ ID NO: 361732 - DNA, 12 bp, Artificial Sequence
  Oligonucleotide primer for the detection of SNP TSC0052795
ggaatttgttat

SEQ ID NO: 361733 - DNA, 12 bp, Artificial Sequence
  Oligonucleotide primer for the detection of SNP TSC0052796
taaaacataact

SEQ ID NO: 361734 - DNA, 12 bp, Artificial Sequence
  Oligonucleotide primer for the detection of SNP TSC0052796
tattaaaccaat

SEQ ID NO: 361735 - DNA, 12 bp, Artificial Sequence
  Oligonucleotide primer for the detection of SNP TSC0052796
tagagtatagtt

SEQ ID NO: 361736 - DNA, 12 bp, Artificial Sequence
  Oligonucleotide primer for the detection of SNP TSC0052797
ttctttaatata

SEQ ID NO: 361737 - DNA, 12 bp, Artificial Sequence
  Oligonucleotide primer for the detection of SNP TSC0052797
atgttttggtat

SEQ ID NO: 361738 - DNA, 12 bp, Artificial Sequence
  Oligonucleotide primer for the detection of SNP TSC0052802
aaaattcaactt

SEQ ID NO: 361739 - DNA, 12 bp, Artificial Sequence
  Oligonucleotide primer for the detection of SNP TSC0052802
attttgagtata

SEQ ID NO: 361740 - DNA, 12 bp, Artificial Sequence
  Oligonucleotide primer for the detection of SNP TSC0052803
tcaaacaataca

SEQ ID NO: 361741 - DNA, 12 bp, Artificial Sequence
  Oligonucleotide primer for the detection of SNP TSC0052803
agatatatttta

SEQ ID NO: 361742 - DNA, 12 bp, Artificial Sequence
  Oligonucleotide primer for the detection of SNP TSC0052803
attaaatagtat

SEQ ID NO: 361743 - DNA, 12 bp, Artificial Sequence
  Oligonucleotide primer for the detection of SNP TSC0052804
attgttatgtat

SEQ ID NO: 361744 - DNA, 12 bp, Artificial Sequence
  Oligonucleotide primer for the detection of SNP TSC0052804
atcgttatgtat

SEQ ID NO: 361745 - DNA, 12 bp, Artificial Sequence
  Oligonucleotide primer for the detection of SNP TSC0052804
atcaccatatat

SEQ ID NO: 361746 - DNA, 12 bp, Artificial Sequence
  Oligonucleotide primer for the detection of SNP TSC0052804
atcgccatatat

SEQ ID NO: 361747 - DNA, 12 bp, Artificial Sequence
  Oligonucleotide primer for the detection of SNP TSC0052804
gtgaataagtta

SEQ ID NO: 361748 - DNA, 12 bp, Artificial Sequence
  Oligonucleotide primer for the detection of SNP TSC0052805
taccacataaac

SEQ ID NO: 361749 - DNA, 12 bp, Artificial Sequence
  Oligonucleotide primer for the detection of SNP TSC0052807
ttacattataat

SEQ ID NO: 361750 - DNA, 12 bp, Artificial Sequence
  Oligonucleotide primer for the detection of SNP TSC0052808
tatcattactca

SEQ ID NO: 361751 - DNA, 12 bp, Artificial Sequence
  Oligonucleotide primer for the detection of SNP TSC0052808
aaataaagtgtt

SEQ ID NO: 361752 - DNA, 12 bp, Artificial Sequence
  Oligonucleotide primer for the detection of SNP TSC0052808
aaataaaatatt

SEQ ID NO: 361753 - DNA, 12 bp, Artificial Sequence
  Oligonucleotide primer for the detection of SNP TSC0052808
tgttattgttta

SEQ ID NO: 361754 - DNA, 12 bp, Artificial Sequence
  Oligonucleotide primer for the detection of SNP TSC0052809
catctacaattt

SEQ ID NO: 361755 - DNA, 12 bp, Artificial Sequence
  Oligonucleotide primer for the detection of SNP TSC0052809
cgtctacaattt

SEQ ID NO: 361756 - DNA, 12 bp, Artificial Sequence
  Oligonucleotide primer for the detection of SNP TSC0052809
aaagagtttata

SEQ ID NO: 361757 - DNA, 12 bp, Artificial Sequence
  Oligonucleotide primer for the detection of SNP TSC0052811
aaccttcatata

SEQ ID NO: 361758 - DNA, 12 bp, Artificial Sequence
  Oligonucleotide primer for the detection of SNP TSC0052811
tttttttaagaa

SEQ ID NO: 361759 - DNA, 12 bp, Artificial Sequence
  Oligonucleotide primer for the detection of SNP TSC0052811
tccttccaaaaa

SEQ ID NO: 361760 - DNA, 12 bp, Artificial Sequence
  Oligonucleotide primer for the detection of SNP TSC0052812
ctaaaactcaat

SEQ ID NO: 361761 - DNA, 12 bp, Artificial Sequence
  Oligonucleotide primer for the detection of SNP TSC0052812
tatttatgataa

SEQ ID NO: 361762 - DNA, 12 bp, Artificial Sequence
  Oligonucleotide primer for the detection of SNP TSC0052816
atgaaataaatg

SEQ ID NO: 361763 - DNA, 12 bp, Artificial Sequence
  Oligonucleotide primer for the detection of SNP TSC0052816
agaaaaagatat

SEQ ID NO: 361764 - DNA, 12 bp, Artificial Sequence
  Oligonucleotide primer for the detection of SNP TSC0052824
aatgattggaat

SEQ ID NO: 361765 - DNA, 12 bp, Artificial Sequence
  Oligonucleotide primer for the detection of SNP TSC0052824
aatgattggaac

SEQ ID NO: 361766 - DNA, 12 bp, Artificial Sequence
  Oligonucleotide primer for the detection of SNP TSC0052825
ctcatctttact

SEQ ID NO: 361767 - DNA, 12 bp, Artificial Sequence
  Oligonucleotide primer for the detection of SNP TSC0052825
gaatagtgttta

SEQ ID NO: 361768 - DNA, 12 bp, Artificial Sequence
  Oligonucleotide primer for the detection of SNP TSC0052826
tttttttgggag

SEQ ID NO: 361769 - DNA, 12 bp, Artificial Sequence
  Oligonucleotide primer for the detection of SNP TSC0052826
ttttctaaaaaa

SEQ ID NO: 361770 - DNA, 12 bp, Artificial Sequence
  Oligonucleotide primer for the detection of SNP TSC0052826
ttaatagggaat

SEQ ID NO: 361771 - DNA, 12 bp, Artificial Sequence
  Oligonucleotide primer for the detection of SNP TSC0052829
caaaacatatat

SEQ ID NO: 361772 - DNA, 12 bp, Artificial Sequence
  Oligonucleotide primer for the detection of SNP TSC0052829
caaaacgtatat

SEQ ID NO: 361773 - DNA, 12 bp, Artificial Sequence
  Oligonucleotide primer for the detection of SNP TSC0052829
cgaaacatatat

SEQ ID NO: 361774 - DNA, 12 bp, Artificial Sequence
  Oligonucleotide primer for the detection of SNP TSC0052829
cgaaacgtatat

SEQ ID NO: 361775 - DNA, 12 bp, Artificial Sequence
  Oligonucleotide primer for the detection of SNP TSC0052829
aatacacacaca

SEQ ID NO: 361776 - DNA, 12 bp, Artificial Sequence
  Oligonucleotide primer for the detection of SNP TSC0052829
tgaggtgtgtgt

SEQ ID NO: 361777 - DNA, 12 bp, Artificial Sequence
  Oligonucleotide primer for the detection of SNP TSC0052829
cgaggtgtgtgt

SEQ ID NO: 361778 - DNA, 12 bp, Artificial Sequence
  Oligonucleotide primer for the detection of SNP TSC0052829
tgaggcgtgtgt

SEQ ID NO: 361779 - DNA, 12 bp, Artificial Sequence
  Oligonucleotide primer for the detection of SNP TSC0052829
cgaggcgtgtgt

SEQ ID NO: 361780 - DNA, 12 bp, Artificial Sequence
  Oligonucleotide primer for the detection of SNP TSC0052830
cctatctttaaa

SEQ ID NO: 361781 - DNA, 12 bp, Artificial Sequence
  Oligonucleotide primer for the detection of SNP TSC0052830
tctaccttttct

SEQ ID NO: 361782 - DNA, 12 bp, Artificial Sequence
  Oligonucleotide primer for the detection of SNP TSC0052831
acctccatatct

SEQ ID NO: 361783 - DNA, 12 bp, Artificial Sequence
  Oligonucleotide primer for the detection of SNP TSC0052831
ttgaggttttga

SEQ ID NO: 361784 - DNA, 12 bp, Artificial Sequence
  Oligonucleotide primer for the detection of SNP TSC0052832
tatgtatttaag

SEQ ID NO: 361785 - DNA, 12 bp, Artificial Sequence
  Oligonucleotide primer for the detection of SNP TSC0052833
agggtattttag

SEQ ID NO: 361786 - DNA, 12 bp, Artificial Sequence
  Oligonucleotide primer for the detection of SNP TSC0052834
aaattataatct

SEQ ID NO: 361787 - DNA, 12 bp, Artificial Sequence
  Oligonucleotide primer for the detection of SNP TSC0052834
caaccaaccccc

SEQ ID NO: 361788 - DNA, 12 bp, Artificial Sequence
  Oligonucleotide primer for the detection of SNP TSC0052834
aaattatggttt

SEQ ID NO: 361789 - DNA, 12 bp, Artificial Sequence
  Oligonucleotide primer for the detection of SNP TSC0052835
attcttacaaat

SEQ ID NO: 361790 - DNA, 12 bp, Artificial Sequence
  Oligonucleotide primer for the detection of SNP TSC0052835
attcttacgaat

SEQ ID NO: 361791 - DNA, 12 bp, Artificial Sequence
  Oligonucleotide primer for the detection of SNP TSC0052836
tactattcctta

SEQ ID NO: 361792 - DNA, 12 bp, Artificial Sequence
  Oligonucleotide primer for the detection of SNP TSC0052836
aaaaaatgaatg

SEQ ID NO: 361793 - DNA, 12 bp, Artificial Sequence
  Oligonucleotide primer for the detection of SNP TSC0052837
atccccatctca

SEQ ID NO: 361794 - DNA, 12 bp, Artificial Sequence
  Oligonucleotide primer for the detection of SNP TSC0052837
taggagttattt

SEQ ID NO: 361795 - DNA, 12 bp, Artificial Sequence
  Oligonucleotide primer for the detection of SNP TSC0052837
caaaaatcatct

SEQ ID NO: 361796 - DNA, 12 bp, Artificial Sequence
  Oligonucleotide primer for the detection of SNP TSC0052839
aatacttatttt

SEQ ID NO: 361797 - DNA, 12 bp, Artificial Sequence
  Oligonucleotide primer for the detection of SNP TSC0052839
gtttttagtaaa

SEQ ID NO: 361798 - DNA, 12 bp, Artificial Sequence
  Oligonucleotide primer for the detection of SNP TSC0052840
aattttcacaac

SEQ ID NO: 361799 - DNA, 12 bp, Artificial Sequence
  Oligonucleotide primer for the detection of SNP TSC0052841
aatccttttttc

SEQ ID NO: 361800 - DNA, 12 bp, Artificial Sequence
  Oligonucleotide primer for the detection of SNP TSC0052842
cacaatcactta

SEQ ID NO: 361801 - DNA, 12 bp, Artificial Sequence
  Oligonucleotide primer for the detection of SNP TSC0052842
taaagttatttt

SEQ ID NO: 361802 - DNA, 12 bp, Artificial Sequence
  Oligonucleotide primer for the detection of SNP TSC0052842
caaaatcatttt

SEQ ID NO: 361803 - DNA, 12 bp, Artificial Sequence
  Oligonucleotide primer for the detection of SNP TSC0052843
aaaaataactta

SEQ ID NO: 361804 - DNA, 12 bp, Artificial Sequence
  Oligonucleotide primer for the detection of SNP TSC0052843
gttgttatagat

SEQ ID NO: 361805 - DNA, 12 bp, Artificial Sequence
  Oligonucleotide primer for the detection of SNP TSC0052844
ttatgttagtta

SEQ ID NO: 361806 - DNA, 12 bp, Artificial Sequence
  Oligonucleotide primer for the detection of SNP TSC0052848
attttatggtta

SEQ ID NO: 361807 - DNA, 12 bp, Artificial Sequence
  Oligonucleotide primer for the detection of SNP TSC0052849
taatctaaataa

SEQ ID NO: 361808 - DNA, 12 bp, Artificial Sequence
  Oligonucleotide primer for the detection of SNP TSC0052849
tttagggtaatt

SEQ ID NO: 361809 - DNA, 12 bp, Artificial Sequence
  Oligonucleotide primer for the detection of SNP TSC0052849
ttaatttgaatg

SEQ ID NO: 361810 - DNA, 12 bp, Artificial Sequence
  Oligonucleotide primer for the detection of SNP TSC0052851
acctcaaatcct

SEQ ID NO: 361811 - DNA, 12 bp, Artificial Sequence
  Oligonucleotide primer for the detection of SNP TSC0052851
ggtatttggatg

SEQ ID NO: 361812 - DNA, 12 bp, Artificial Sequence
  Oligonucleotide primer for the detection of SNP TSC0052852
ccacaaaaaata

SEQ ID NO: 361813 - DNA, 12 bp, Artificial Sequence
  Oligonucleotide primer for the detection of SNP TSC0052852
cccccttaaaaa

SEQ ID NO: 361814 - DNA, 12 bp, Artificial Sequence
  Oligonucleotide primer for the detection of SNP TSC0052852
ttatagagagtg

SEQ ID NO: 361815 - DNA, 12 bp, Artificial Sequence
  Oligonucleotide primer for the detection of SNP TSC0052861
gtaatgatgagt

SEQ ID NO: 361816 - DNA, 12 bp, Artificial Sequence
  Oligonucleotide primer for the detection of SNP TSC0052863
tattaaaaacac

SEQ ID NO: 361817 - DNA, 12 bp, Artificial Sequence
  Oligonucleotide primer for the detection of SNP TSC0052863
tagagtatttga

SEQ ID NO: 361818 - DNA, 12 bp, Artificial Sequence
  Oligonucleotide primer for the detection of SNP TSC0052863
caaaatacttaa

SEQ ID NO: 361819 - DNA, 12 bp, Artificial Sequence
  Oligonucleotide primer for the detection of SNP TSC0052863
tattgaggatat

SEQ ID NO: 361820 - DNA, 12 bp, Artificial Sequence
  Oligonucleotide primer for the detection of SNP TSC0052868
aatcaaatttat

SEQ ID NO: 361821 - DNA, 12 bp, Artificial Sequence
  Oligonucleotide primer for the detection of SNP TSC0052868
ggttatgggtta

SEQ ID NO: 361822 - DNA, 12 bp, Artificial Sequence
  Oligonucleotide primer for the detection of SNP TSC0052868
ggttacgggtta

SEQ ID NO: 361823 - DNA, 12 bp, Artificial Sequence
  Oligonucleotide primer for the detection of SNP TSC0052869
taaacaataatt

SEQ ID NO: 361824 - DNA, 12 bp, Artificial Sequence
  Oligonucleotide primer for the detection of SNP TSC0052869
ttgtgtatagtg

SEQ ID NO: 361825 - DNA, 12 bp, Artificial Sequence
  Oligonucleotide primer for the detection of SNP TSC0052870
tctactataata

SEQ ID NO: 361826 - DNA, 12 bp, Artificial Sequence
  Oligonucleotide primer for the detection of SNP TSC0052870
tttgttatgatg

SEQ ID NO: 361827 - DNA, 12 bp, Artificial Sequence
  Oligonucleotide primer for the detection of SNP TSC0052871
attttaacactt

SEQ ID NO: 361828 - DNA, 12 bp, Artificial Sequence
  Oligonucleotide primer for the detection of SNP TSC0052871
ataatgatttta

SEQ ID NO: 361829 - DNA, 12 bp, Artificial Sequence
  Oligonucleotide primer for the detection of SNP TSC0052872
acacaacctaaa

SEQ ID NO: 361830 - DNA, 12 bp, Artificial Sequence
  Oligonucleotide primer for the detection of SNP TSC0052872
taggattgagtt

SEQ ID NO: 361831 - DNA, 12 bp, Artificial Sequence
  Oligonucleotide primer for the detection of SNP TSC0052872
gtatagtttgag

SEQ ID NO: 361832 - DNA, 12 bp, Artificial Sequence
  Oligonucleotide primer for the detection of SNP TSC0052873
atctactataat

SEQ ID NO: 361833 - DNA, 12 bp, Artificial Sequence
  Oligonucleotide primer for the detection of SNP TSC0052873
ttattgagtttt

SEQ ID NO: 361834 - DNA, 12 bp, Artificial Sequence
  Oligonucleotide primer for the detection of SNP TSC0052874
atgtgttttggg

SEQ ID NO: 361835 - DNA, 12 bp, Artificial Sequence
  Oligonucleotide primer for the detection of SNP TSC0052876
taaaattaaatt

SEQ ID NO: 361836 - DNA, 12 bp, Artificial Sequence
  Oligonucleotide primer for the detection of SNP TSC0052877
tacatttccaaa

SEQ ID NO: 361837 - DNA, 12 bp, Artificial Sequence
  Oligonucleotide primer for the detection of SNP TSC0052885
taaaccacaaat

SEQ ID NO: 361838 - DNA, 12 bp, Artificial Sequence
  Oligonucleotide primer for the detection of SNP TSC0052885
ataaatattgta

SEQ ID NO: 361839 - DNA, 12 bp, Artificial Sequence
  Oligonucleotide primer for the detection of SNP TSC0052885
ataaatatcgta

SEQ ID NO: 361840 - DNA, 12 bp, Artificial Sequence
  Oligonucleotide primer for the detection of SNP TSC0052887
tatttttcaaca

SEQ ID NO: 361841 - DNA, 12 bp, Artificial Sequence
  Oligonucleotide primer for the detection of SNP TSC0052887
tatttttcaacg

SEQ ID NO: 361842 - DNA, 12 bp, Artificial Sequence
  Oligonucleotide primer for the detection of SNP TSC0052887
atgagtttattt

SEQ ID NO: 361843 - DNA, 12 bp, Artificial Sequence
  Oligonucleotide primer for the detection of SNP TSC0052887
acgagtttattt

SEQ ID NO: 361844 - DNA, 12 bp, Artificial Sequence
  Oligonucleotide primer for the detection of SNP TSC0052887
acaaacctatct

SEQ ID NO: 361845 - DNA, 12 bp, Artificial Sequence
  Oligonucleotide primer for the detection of SNP TSC0052887
acgaacctatct

SEQ ID NO: 361846 - DNA, 12 bp, Artificial Sequence
  Oligonucleotide primer for the detection of SNP TSC0052887
tgttttttagcg

SEQ ID NO: 361847 - DNA, 12 bp, Artificial Sequence
  Oligonucleotide primer for the detection of SNP TSC0052888
aaaacctcacta

SEQ ID NO: 361848 - DNA, 12 bp, Artificial Sequence
  Oligonucleotide primer for the detection of SNP TSC0052888
ttttgtttgatt

SEQ ID NO: 361849 - DNA, 12 bp, Artificial Sequence
  Oligonucleotide primer for the detection of SNP TSC0052888
ccctacctaatt

SEQ ID NO: 361850 - DNA, 12 bp, Artificial Sequence
  Oligonucleotide primer for the detection of SNP TSC0052889
tctaactctaca

SEQ ID NO: 361851 - DNA, 12 bp, Artificial Sequence
  Oligonucleotide primer for the detection of SNP TSC0052889
taaccctcctct

SEQ ID NO: 361852 - DNA, 12 bp, Artificial Sequence
  Oligonucleotide primer for the detection of SNP TSC0052890
tgtaatttttta

SEQ ID NO: 361853 - DNA, 12 bp, Artificial Sequence
  Oligonucleotide primer for the detection of SNP TSC0052892
tacaactcttca

SEQ ID NO: 361854 - DNA, 12 bp, Artificial Sequence
  Oligonucleotide primer for the detection of SNP TSC0052892
gagattatttat

SEQ ID NO: 361855 - DNA, 12 bp, Artificial Sequence
  Oligonucleotide primer for the detection of SNP TSC0052892
aaaaattattca

SEQ ID NO: 361856 - DNA, 12 bp, Artificial Sequence
  Oligonucleotide primer for the detection of SNP TSC0052893
ttcctcttacaa

SEQ ID NO: 361857 - DNA, 12 bp, Artificial Sequence
  Oligonucleotide primer for the detection of SNP TSC0052893
gatgataagggg

SEQ ID NO: 361858 - DNA, 12 bp, Artificial Sequence
  Oligonucleotide primer for the detection of SNP TSC0052894
tctactatactt

SEQ ID NO: 361859 - DNA, 12 bp, Artificial Sequence
  Oligonucleotide primer for the detection of SNP TSC0052895
aaaaaaacattc

SEQ ID NO: 361860 - DNA, 12 bp, Artificial Sequence
  Oligonucleotide primer for the detection of SNP TSC0052895
aaaaaaacgttc

SEQ ID NO: 361861 - DNA, 12 bp, Artificial Sequence
  Oligonucleotide primer for the detection of SNP TSC0052899
tatagaaattaa

SEQ ID NO: 361862 - DNA, 12 bp, Artificial Sequence
  Oligonucleotide primer for the detection of SNP TSC0052905
cttcaaaaactt

SEQ ID NO: 361863 - DNA, 12 bp, Artificial Sequence
  Oligonucleotide primer for the detection of SNP TSC0052905
agttttttttgg

SEQ ID NO: 361864 - DNA, 12 bp, Artificial Sequence
  Oligonucleotide primer for the detection of SNP TSC0052905
agtttttttcgg

SEQ ID NO: 361865 - DNA, 12 bp, Artificial Sequence
  Oligonucleotide primer for the detection of SNP TSC0052906
aacataatttat

SEQ ID NO: 361866 - DNA, 12 bp, Artificial Sequence
  Oligonucleotide primer for the detection of SNP TSC0052906
gtatatgtaata

SEQ ID NO: 361867 - DNA, 12 bp, Artificial Sequence
  Oligonucleotide primer for the detection of SNP TSC0052908
ttatgtatattg

SEQ ID NO: 361868 - DNA, 12 bp, Artificial Sequence
  Oligonucleotide primer for the detection of SNP TSC0052909
atttaaagatgg

SEQ ID NO: 361869 - DNA, 12 bp, Artificial Sequence
  Oligonucleotide primer for the detection of SNP TSC0052909
gtgttttagaaa

SEQ ID NO: 361870 - DNA, 12 bp, Artificial Sequence
  Oligonucleotide primer for the detection of SNP TSC0052910
ataactaacact

SEQ ID NO: 361871 - DNA, 12 bp, Artificial Sequence
  Oligonucleotide primer for the detection of SNP TSC0052910
gaattgtaagta

SEQ ID NO: 361872 - DNA, 12 bp, Artificial Sequence
  Oligonucleotide primer for the detection of SNP TSC0052910
atggttgatatt

SEQ ID NO: 361873 - DNA, 12 bp, Artificial Sequence
  Oligonucleotide primer for the detection of SNP TSC0052911
aatcatcattat

SEQ ID NO: 361874 - DNA, 12 bp, Artificial Sequence
  Oligonucleotide primer for the detection of SNP TSC0052912
atacttctattt

SEQ ID NO: 361875 - DNA, 12 bp, Artificial Sequence
  Oligonucleotide primer for the detection of SNP TSC0052912
gagaggggaatg

SEQ ID NO: 361876 - DNA, 12 bp, Artificial Sequence
  Oligonucleotide primer for the detection of SNP TSC0052913
cattaattaatt

SEQ ID NO: 361877 - DNA, 12 bp, Artificial Sequence
  Oligonucleotide primer for the detection of SNP TSC0052913
ttaaaaaatgag

SEQ ID NO: 361878 - DNA, 12 bp, Artificial Sequence
  Oligonucleotide primer for the detection of SNP TSC0010883
ctaaaaaacttt

SEQ ID NO: 361879 - DNA, 12 bp, Artificial Sequence
  Oligonucleotide primer for the detection of SNP TSC0010883
tgggtattaata

SEQ ID NO: 361880 - DNA, 12 bp, Artificial Sequence
  Oligonucleotide primer for the detection of SNP TSC0052918
cttatccaactc

SEQ ID NO: 361881 - DNA, 12 bp, Artificial Sequence
  Oligonucleotide primer for the detection of SNP TSC0052918
tttttaaaggta

SEQ ID NO: 361882 - DNA, 12 bp, Artificial Sequence
  Oligonucleotide primer for the detection of SNP TSC0052919
tactctaataaa

SEQ ID NO: 361883 - DNA, 12 bp, Artificial Sequence
  Oligonucleotide primer for the detection of SNP TSC0052919
tctttcactatc

SEQ ID NO: 361884 - DNA, 12 bp, Artificial Sequence
  Oligonucleotide primer for the detection of SNP TSC0052919
tgttttggtaag

SEQ ID NO: 361885 - DNA, 12 bp, Artificial Sequence
  Oligonucleotide primer for the detection of SNP TSC0052929
atatttacctcc

SEQ ID NO: 361886 - DNA, 12 bp, Artificial Sequence
  Oligonucleotide primer for the detection of SNP TSC0052932
aaataattctaa

SEQ ID NO: 361887 - DNA, 12 bp, Artificial Sequence
  Oligonucleotide primer for the detection of SNP TSC0052934
taaagttattat

SEQ ID NO: 361888 - DNA, 12 bp, Artificial Sequence
  Oligonucleotide primer for the detection of SNP TSC0052934
aatgagatattt

SEQ ID NO: 361889 - DNA, 12 bp, Artificial Sequence
  Oligonucleotide primer for the detection of SNP TSC0052935
attttacaaatt

SEQ ID NO: 361890 - DNA, 12 bp, Artificial Sequence
  Oligonucleotide primer for the detection of SNP TSC0052936
cccctttcaact

SEQ ID NO: 361891 - DNA, 12 bp, Artificial Sequence
  Oligonucleotide primer for the detection of SNP TSC0052936
tatgattaagtg

SEQ ID NO: 361892 - DNA, 12 bp, Artificial Sequence
  Oligonucleotide primer for the detection of SNP TSC0052937
ttaataataatt

SEQ ID NO: 361893 - DNA, 12 bp, Artificial Sequence
  Oligonucleotide primer for the detection of SNP TSC0052937
atcaataacaat

SEQ ID NO: 361894 - DNA, 12 bp, Artificial Sequence
  Oligonucleotide primer for the detection of SNP TSC0052937
ttatagttgaaa

SEQ ID NO: 361895 - DNA, 12 bp, Artificial Sequence
  Oligonucleotide primer for the detection of SNP TSC0052938
tttggttataaa

SEQ ID NO: 361896 - DNA, 12 bp, Artificial Sequence
  Oligonucleotide primer for the detection of SNP TSC0052938
ttcggttataaa

SEQ ID NO: 361897 - DNA, 12 bp, Artificial Sequence
  Oligonucleotide primer for the detection of SNP TSC0052940
aattctttattc

SEQ ID NO: 361898 - DNA, 12 bp, Artificial Sequence
  Oligonucleotide primer for the detection of SNP TSC0052940
aggtttttggtg

SEQ ID NO: 361899 - DNA, 12 bp, Artificial Sequence
  Oligonucleotide primer for the detection of SNP TSC0052943
ctataataatat

SEQ ID NO: 361900 - DNA, 12 bp, Artificial Sequence
  Oligonucleotide primer for the detection of SNP TSC0052943
aaaggagtgaaa

SEQ ID NO: 361901 - DNA, 12 bp, Artificial Sequence
  Oligonucleotide primer for the detection of SNP TSC0052944
atataaaaatca

SEQ ID NO: 361902 - DNA, 12 bp, Artificial Sequence
  Oligonucleotide primer for the detection of SNP TSC0052944
ttggtattaatt

SEQ ID NO: 361903 - DNA, 12 bp, Artificial Sequence
  Oligonucleotide primer for the detection of SNP TSC0052944
tcggtattaatt

SEQ ID NO: 361904 - DNA, 12 bp, Artificial Sequence
  Oligonucleotide primer for the detection of SNP TSC0052944
ccaacattaatc

SEQ ID NO: 361905 - DNA, 12 bp, Artificial Sequence
  Oligonucleotide primer for the detection of SNP TSC0052944
ccgacattaatc

SEQ ID NO: 361906 - DNA, 12 bp, Artificial Sequence
  Oligonucleotide primer for the detection of SNP TSC0052944
ggtgtgggaatt

SEQ ID NO: 361907 - DNA, 12 bp, Artificial Sequence
  Oligonucleotide primer for the detection of SNP TSC0052945
tcaccttaaccc

SEQ ID NO: 361908 - DNA, 12 bp, Artificial Sequence
  Oligonucleotide primer for the detection of SNP TSC0052945
tgaaataatgta

SEQ ID NO: 361909 - DNA, 12 bp, Artificial Sequence
  Oligonucleotide primer for the detection of SNP TSC0052945
taaaacaatata

SEQ ID NO: 361910 - DNA, 12 bp, Artificial Sequence
  Oligonucleotide primer for the detection of SNP TSC0052946
atttaaaaacta

SEQ ID NO: 361911 - DNA, 12 bp, Artificial Sequence
  Oligonucleotide primer for the detection of SNP TSC0052946
tatttgaatatt

SEQ ID NO: 361912 - DNA, 12 bp, Artificial Sequence
  Oligonucleotide primer for the detection of SNP TSC0052947
taattcaaatca

SEQ ID NO: 361913 - DNA, 12 bp, Artificial Sequence
  Oligonucleotide primer for the detection of SNP TSC0052947
gaaaattaattt

SEQ ID NO: 361914 - DNA, 12 bp, Artificial Sequence
  Oligonucleotide primer for the detection of SNP TSC0052947
aaaaattaattc

SEQ ID NO: 361915 - DNA, 12 bp, Artificial Sequence
  Oligonucleotide primer for the detection of SNP TSC0052947
tgatttaggtta

SEQ ID NO: 361916 - DNA, 12 bp, Artificial Sequence
  Oligonucleotide primer for the detection of SNP TSC0052949
acatacctttta

SEQ ID NO: 361917 - DNA, 12 bp, Artificial Sequence
  Oligonucleotide primer for the detection of SNP TSC0052949
gatatgaattga

SEQ ID NO: 361918 - DNA, 12 bp, Artificial Sequence
  Oligonucleotide primer for the detection of SNP TSC0052949
gtatattttttg

SEQ ID NO: 361919 - DNA, 12 bp, Artificial Sequence
  Oligonucleotide primer for the detection of SNP TSC0052950
aaattcttattt

SEQ ID NO: 361920 - DNA, 12 bp, Artificial Sequence
  Oligonucleotide primer for the detection of SNP TSC0052950
aatagagaaaag

SEQ ID NO: 361921 - DNA, 12 bp, Artificial Sequence
  Oligonucleotide primer for the detection of SNP TSC0052951
catttttaccaa

SEQ ID NO: 361922 - DNA, 12 bp, Artificial Sequence
  Oligonucleotide primer for the detection of SNP TSC0052951
gtaataataaat

SEQ ID NO: 361923 - DNA, 12 bp, Artificial Sequence
  Oligonucleotide primer for the detection of SNP TSC0052952
taccccaaacac

SEQ ID NO: 361924 - DNA, 12 bp, Artificial Sequence
  Oligonucleotide primer for the detection of SNP TSC0052952
taccccaaacgc

SEQ ID NO: 361925 - DNA, 12 bp, Artificial Sequence
  Oligonucleotide primer for the detection of SNP TSC0052952
agttgtaattta

SEQ ID NO: 361926 - DNA, 12 bp, Artificial Sequence
  Oligonucleotide primer for the detection of SNP TSC0052953
ataatagaaata

SEQ ID NO: 361927 - DNA, 12 bp, Artificial Sequence
  Oligonucleotide primer for the detection of SNP TSC0052953
aaaatgagaaat

SEQ ID NO: 361928 - DNA, 12 bp, Artificial Sequence
  Oligonucleotide primer for the detection of SNP TSC0052955
cctaactaaaac

SEQ ID NO: 361929 - DNA, 12 bp, Artificial Sequence
  Oligonucleotide primer for the detection of SNP TSC0052955
gtgagttttagg

SEQ ID NO: 361930 - DNA, 12 bp, Artificial Sequence
  Oligonucleotide primer for the detection of SNP TSC0052956
tttttcattaaa

SEQ ID NO: 361931 - DNA, 12 bp, Artificial Sequence
  Oligonucleotide primer for the detection of SNP TSC0052956
ttataaaagttt

SEQ ID NO: 361932 - DNA, 12 bp, Artificial Sequence
  Oligonucleotide primer for the detection of SNP TSC0052956
ccacaaaaactc

SEQ ID NO: 361933 - DNA, 12 bp, Artificial Sequence
  Oligonucleotide primer for the detection of SNP TSC0052956
ttttttattgaa

SEQ ID NO: 361934 - DNA, 12 bp, Artificial Sequence
  Oligonucleotide primer for the detection of SNP TSC0007080
gattagattttt

SEQ ID NO: 361935 - DNA, 12 bp, Artificial Sequence
  Oligonucleotide primer for the detection of SNP TSC0007080
taaagaaaattt

SEQ ID NO: 361936 - DNA, 12 bp, Artificial Sequence
  Oligonucleotide primer for the detection of SNP TSC0052957
caacaacctcct

SEQ ID NO: 361937 - DNA, 12 bp, Artificial Sequence
  Oligonucleotide primer for the detection of SNP TSC0052957
caacgacctcct

SEQ ID NO: 361938 - DNA, 12 bp, Artificial Sequence
  Oligonucleotide primer for the detection of SNP TSC0052957
cgacaacctcct

SEQ ID NO: 361939 - DNA, 12 bp, Artificial Sequence
  Oligonucleotide primer for the detection of SNP TSC0052957
cgacgacctcct

SEQ ID NO: 361940 - DNA, 12 bp, Artificial Sequence
  Oligonucleotide primer for the detection of SNP TSC0052957
ttagtgatatta

SEQ ID NO: 361941 - DNA, 12 bp, Artificial Sequence
  Oligonucleotide primer for the detection of SNP TSC0052957
ttagcgatatta

SEQ ID NO: 361942 - DNA, 12 bp, Artificial Sequence
  Oligonucleotide primer for the detection of SNP TSC0052958
tacatttattta

SEQ ID NO: 361943 - DNA, 12 bp, Artificial Sequence
  Oligonucleotide primer for the detection of SNP TSC0052958
agttgattattg

SEQ ID NO: 361944 - DNA, 12 bp, Artificial Sequence
  Oligonukleotid-Primer
agtcgattattg

SEQ ID NO: 361945 - DNA, 12 bp, Artificial Sequence
  Oligonucleotide primer for the detection of SNP TSC0052958
aatcaatcacta

SEQ ID NO: 361946 - DNA, 12 bp, Artificial Sequence
  Oligonucleotide primer for the detection of SNP TSC0052958
aatcgatcacta

SEQ ID NO: 361947 - DNA, 12 bp, Artificial Sequence
  Oligonucleotide primer for the detection of SNP TSC0052959
tacccccacccc

SEQ ID NO: 361948 - DNA, 12 bp, Artificial Sequence
  Oligonucleotide primer for the detection of SNP TSC0052959
tagatagggtag

SEQ ID NO: 361949 - DNA, 12 bp, Artificial Sequence
  Oligonucleotide primer for the detection of SNP TSC0052960
tgtaattttgta

SEQ ID NO: 361950 - DNA, 12 bp, Artificial Sequence
  Oligonucleotide primer for the detection of SNP TSC0052961
tcaaattaacat

SEQ ID NO: 361951 - DNA, 12 bp, Artificial Sequence
  Oligonucleotide primer for the detection of SNP TSC0052961
tgttagttaaaa

SEQ ID NO: 361952 - DNA, 12 bp, Artificial Sequence
  Oligonukleotid-Primer
taaacataaaat

SEQ ID NO: 361953 - DNA, 12 bp, Artificial Sequence
  Oligonucleotide primer for the detection of SNP TSC0052962
aaggttagttta

SEQ ID NO: 361954 - DNA, 12 bp, Artificial Sequence
  Oligonucleotide primer for the detection of SNP TSC0052963
aattaacatttt

SEQ ID NO: 361955 - DNA, 12 bp, Artificial Sequence
  Oligonucleotide primer for the detection of SNP TSC0052963
ttttgttagtta

SEQ ID NO: 361956 - DNA, 12 bp, Artificial Sequence
  Oligonukleotid-Primer
atggttgtagta

SEQ ID NO: 361957 - DNA, 12 bp, Artificial Sequence
  Oligonucleotide primer for the detection of SNP TSC0052964
ataactacaaca

SEQ ID NO: 361958 - DNA, 12 bp, Artificial Sequence
  Oligonucleotide primer for the detection of SNP TSC0052964
ttaatggaaata

SEQ ID NO: 361959 - DNA, 12 bp, Artificial Sequence
  Oligonucleotide primer for the detection of SNP TSC0052969
tctatatttcat

SEQ ID NO: 361960 - DNA, 12 bp, Artificial Sequence
  Oligonucleotide primer for the detection of SNP TSC0052969
acaactatccaa

SEQ ID NO: 361961 - DNA, 12 bp, Artificial Sequence
  Oligonucleotide primer for the detection of SNP TSC0052969
tttgtgttttat

SEQ ID NO: 361962 - DNA, 12 bp, Artificial Sequence
  Oligonucleotide primer for the detection of SNP TSC0052970
aaaatcctcact

SEQ ID NO: 361963 - DNA, 12 bp, Artificial Sequence
  Oligonucleotide primer for the detection of SNP TSC0052970
aaaatcctcgct

SEQ ID NO: 361964 - DNA, 12 bp, Artificial Sequence
  Oligonucleotide primer for the detection of SNP TSC0052970
gttgttagggaa

SEQ ID NO: 361965 - DNA, 12 bp, Artificial Sequence
  Oligonucleotide primer for the detection of SNP TSC0052971
attttggaataa

SEQ ID NO: 361966 - DNA, 12 bp, Artificial Sequence
  Oligonucleotide primer for the detection of SNP TSC0052972
acaaaaactcca

SEQ ID NO: 361967 - DNA, 12 bp, Artificial Sequence
  Oligonucleotide primer for the detection of SNP TSC0052972
acgaaaactcca

SEQ ID NO: 361968 - DNA, 12 bp, Artificial Sequence
  Oligonucleotide primer for the detection of SNP TSC0052972
tttatagaaaat

SEQ ID NO: 361969 - DNA, 12 bp, Artificial Sequence
  Oligonucleotide primer for the detection of SNP TSC0052972
cctacaaaaaat

SEQ ID NO: 361970 - DNA, 12 bp, Artificial Sequence
  Oligonucleotide primer for the detection of SNP TSC0052972
gtgaggatttta

SEQ ID NO: 361971 - DNA, 12 bp, Artificial Sequence
  Oligonucleotide primer for the detection of SNP TSC0052972
gcgaggatttta

SEQ ID NO: 361972 - DNA, 12 bp, Artificial Sequence
  Oligonucleotide primer for the detection of SNP TSC0052973
taccacaccccc

SEQ ID NO: 361973 - DNA, 12 bp, Artificial Sequence
  Oligonucleotide primer for the detection of SNP TSC0052973
taccacgccccc

SEQ ID NO: 361974 - DNA, 12 bp, Artificial Sequence
  Oligonucleotide primer for the detection of SNP TSC0052973
taccgcaccccc

SEQ ID NO: 361975 - DNA, 12 bp, Artificial Sequence
  Oligonucleotide primer for the detection of SNP TSC0052973
taccgcgccccc

SEQ ID NO: 361976 - DNA, 12 bp, Artificial Sequence
  Oligonucleotide primer for the detection of SNP TSC0052973
gggtagggtggg

SEQ ID NO: 361977 - DNA, 12 bp, Artificial Sequence
  Oligonucleotide primer for the detection of SNP TSC0052974
ctttaaataaac

SEQ ID NO: 361978 - DNA, 12 bp, Artificial Sequence
  Oligonucleotide primer for the detection of SNP TSC0052974
tatattaaggtg

SEQ ID NO: 361979 - DNA, 12 bp, Artificial Sequence
  Oligonucleotide primer for the detection of SNP TSC0052975
ataacttaaact

SEQ ID NO: 361980 - DNA, 12 bp, Artificial Sequence
  Oligonucleotide primer for the detection of SNP TSC0052975
ttatgttgtgag

SEQ ID NO: 361981 - DNA, 12 bp, Artificial Sequence
  Oligonucleotide primer for the detection of SNP TSC0052975
ttacgttgtgag

SEQ ID NO: 361982 - DNA, 12 bp, Artificial Sequence
  Oligonucleotide primer for the detection of SNP TSC0052976
aacctaaacacc

SEQ ID NO: 361983 - DNA, 12 bp, Artificial Sequence
  Oligonucleotide primer for the detection of SNP TSC0052976
tggaaaggaatt

SEQ ID NO: 361984 - DNA, 12 bp, Artificial Sequence
  Oligonucleotide primer for the detection of SNP TSC0052976
atttgagtattt

SEQ ID NO: 361985 - DNA, 12 bp, Artificial Sequence
  Oligonucleotide primer for the detection of SNP TSC0001296
aaaaactaaata

SEQ ID NO: 361986 - DNA, 12 bp, Artificial Sequence
  Oligonucleotide primer for the detection of SNP TSC0001296
gattgttgattt

SEQ ID NO: 361987 - DNA, 12 bp, Artificial Sequence
  Oligonucleotide primer for the detection of SNP TSC0001296
aactattaattt

SEQ ID NO: 361988 - DNA, 12 bp, Artificial Sequence
  Oligonucleotide primer for the detection of SNP TSC0001296
gaagattaaata

SEQ ID NO: 361989 - DNA, 12 bp, Artificial Sequence
  Oligonucleotide primer for the detection of SNP TSC0052978
aattcacactta

SEQ ID NO: 361990 - DNA, 12 bp, Artificial Sequence
  Oligonucleotide primer for the detection of SNP TSC0052978
aattcacgctta

SEQ ID NO: 361991 - DNA, 12 bp, Artificial Sequence
  Oligonucleotide primer for the detection of SNP TSC0052978
gtattttattgt

SEQ ID NO: 361992 - DNA, 12 bp, Artificial Sequence
  Oligonucleotide primer for the detection of SNP TSC0052978
tatatttcatta

SEQ ID NO: 361993 - DNA, 12 bp, Artificial Sequence
  Oligonucleotide primer for the detection of SNP TSC0052978
aatttatgtttg

SEQ ID NO: 361994 - DNA, 12 bp, Artificial Sequence
  Oligonucleotide primer for the detection of SNP TSC0052978
aatttacgtttg

SEQ ID NO: 361995 - DNA, 12 bp, Artificial Sequence
  Oligonucleotide primer for the detection of SNP TSC0052980
tacttataaaat

SEQ ID NO: 361996 - DNA, 12 bp, Artificial Sequence
  Oligonucleotide primer for the detection of SNP TSC0052985
acaaaaacactt

SEQ ID NO: 361997 - DNA, 12 bp, Artificial Sequence
  Oligonucleotide primer for the detection of SNP TSC0052985
agataattttgg

SEQ ID NO: 361998 - DNA, 12 bp, Artificial Sequence
  Oligonucleotide primer for the detection of SNP TSC0009523
tttatataatca

SEQ ID NO: 361999 - DNA, 12 bp, Artificial Sequence
  Oligonucleotide primer for the detection of SNP TSC0009523
tgtgttgattgg

SEQ ID NO: 362000 - DNA, 12 bp, Artificial Sequence
  Oligonucleotide primer for the detection of SNP TSC0009523
tatactaattaa

SEQ ID NO: 362001 - DNA, 12 bp, Artificial Sequence
  Oligonucleotide primer for the detection of SNP TSC0009523
atatagttattt

SEQ ID NO: 362002 - DNA, 12 bp, Artificial Sequence
  Oligonucleotide primer for the detection of SNP TSC0052990
tgggattgttat

SEQ ID NO: 362003 - DNA, 12 bp, Artificial Sequence
  Oligonucleotide primer for the detection of SNP TSC0052990
cgggattgttat

SEQ ID NO: 362004 - DNA, 12 bp, Artificial Sequence
  Oligonucleotide primer for the detection of SNP TSC0052990
tgggatcgttat

SEQ ID NO: 362005 - DNA, 12 bp, Artificial Sequence
  Oligonucleotide primer for the detection of SNP TSC0052990
cgggatcgttat

SEQ ID NO: 362006 - DNA, 12 bp, Artificial Sequence
  Oligonucleotide primer for the detection of SNP TSC0052990
caaaatcatcac

SEQ ID NO: 362007 - DNA, 12 bp, Artificial Sequence
  Oligonucleotide primer for the detection of SNP TSC0052990
caaaatcgtcac

SEQ ID NO: 362008 - DNA, 12 bp, Artificial Sequence
  Oligonucleotide primer for the detection of SNP TSC0052990
cgaaatcatcac

SEQ ID NO: 362009 - DNA, 12 bp, Artificial Sequence
  Oligonucleotide primer for the detection of SNP TSC0052990
cgaaatcgtcac

SEQ ID NO: 362010 - DNA, 12 bp, Artificial Sequence
  Oligonucleotide primer for the detection of SNP TSC0052990
aaaagttaaagg

SEQ ID NO: 362011 - DNA, 12 bp, Artificial Sequence
  Oligonucleotide primer for the detection of SNP TSC0052991
gaattgagatta

SEQ ID NO: 362012 - DNA, 12 bp, Artificial Sequence
  Oligonucleotide primer for the detection of SNP TSC0052991
gaatcgagatta

SEQ ID NO: 362013 - DNA, 12 bp, Artificial Sequence
  Oligonucleotide primer for the detection of SNP TSC0052992
gcccaactaatt

SEQ ID NO: 362014 - DNA, 12 bp, Artificial Sequence
  Oligonucleotide primer for the detection of SNP TSC0052994
attttcaaaatt

SEQ ID NO: 362015 - DNA, 12 bp, Artificial Sequence
  Oligonucleotide primer for the detection of SNP TSC0000082
tgtgattgtgtg

SEQ ID NO: 362016 - DNA, 12 bp, Artificial Sequence
  Oligonucleotide primer for the detection of SNP TSC0000082
cgtgattgtgtg

SEQ ID NO: 362017 - DNA, 12 bp, Artificial Sequence
  Oligonucleotide primer for the detection of SNP TSC0000082
tgtgattgtgcg

SEQ ID NO: 362018 - DNA, 12 bp, Artificial Sequence
  Oligonucleotide primer for the detection of SNP TSC0000082
cgtgattgtgcg

SEQ ID NO: 362019 - DNA, 12 bp, Artificial Sequence
  Oligonucleotide primer for the detection of SNP TSC0052995
acaaaacatatt

SEQ ID NO: 362020 - DNA, 12 bp, Artificial Sequence
  Oligonucleotide primer for the detection of SNP TSC0052995
tattaaagagag

SEQ ID NO: 362021 - DNA, 12 bp, Artificial Sequence
  Oligonucleotide primer for the detection of SNP TSC0052996
ttttttatttcg

SEQ ID NO: 362022 - DNA, 12 bp, Artificial Sequence
  Oligonucleotide primer for the detection of SNP TSC0052997
acttaccttaat

SEQ ID NO: 362023 - DNA, 12 bp, Artificial Sequence
  Oligonucleotide primer for the detection of SNP TSC0052997
tgtttatatttg

SEQ ID NO: 362024 - DNA, 12 bp, Artificial Sequence
  Oligonucleotide primer for the detection of SNP TSC0052999
cacaaaaaactc

SEQ ID NO: 362025 - DNA, 12 bp, Artificial Sequence
  Oligonucleotide primer for the detection of SNP TSC0052999
ttagagaggttg

SEQ ID NO: 362026 - DNA, 12 bp, Artificial Sequence
  Oligonucleotide primer for the detection of SNP TSC0052999
ttagagaggtcg

SEQ ID NO: 362027 - DNA, 12 bp, Artificial Sequence
  Oligonucleotide primer for the detection of SNP TSC0052999
ccaaaaaaacca

SEQ ID NO: 362028 - DNA, 12 bp, Artificial Sequence
  Oligonucleotide primer for the detection of SNP TSC0052999
ccaaaaaaaccg

SEQ ID NO: 362029 - DNA, 12 bp, Artificial Sequence
  Oligonucleotide primer for the detection of SNP TSC0052999
ataaggggtttt

SEQ ID NO: 362030 - DNA, 12 bp, Artificial Sequence
  Oligonucleotide primer for the detection of SNP TSC0053000
aacatcaaaaac

SEQ ID NO: 362031 - DNA, 12 bp, Artificial Sequence
  Oligonucleotide primer for the detection of SNP TSC0053001
acactctttaaa

SEQ ID NO: 362032 - DNA, 12 bp, Artificial Sequence
  Oligonucleotide primer for the detection of SNP TSC0053001
tatggaaatttt

SEQ ID NO: 362033 - DNA, 12 bp, Artificial Sequence
  Oligonucleotide primer for the detection of SNP TSC0053001
tatggaaatttc

SEQ ID NO: 362034 - DNA, 12 bp, Artificial Sequence
  Oligonucleotide primer for the detection of SNP TSC0053001
cataaaaactcc

SEQ ID NO: 362035 - DNA, 12 bp, Artificial Sequence
  Oligonucleotide primer for the detection of SNP TSC0000565
catactataata

SEQ ID NO: 362036 - DNA, 12 bp, Artificial Sequence
  Oligonucleotide primer for the detection of SNP TSC0000565
tatgttatgatg

SEQ ID NO: 362037 - DNA, 12 bp, Artificial Sequence
  Oligonucleotide primer for the detection of SNP TSC0005598
ctaccactcact

SEQ ID NO: 362038 - DNA, 12 bp, Artificial Sequence
  Oligonucleotide primer for the detection of SNP TSC0005598
tagagttttgaa

SEQ ID NO: 362039 - DNA, 12 bp, Artificial Sequence
  Oligonucleotide primer for the detection of SNP TSC0053003
caatatctccta

SEQ ID NO: 362040 - DNA, 12 bp, Artificial Sequence
  Oligonucleotide primer for the detection of SNP TSC0005378
aacaaaacctac

SEQ ID NO: 362041 - DNA, 12 bp, Artificial Sequence
  Oligonucleotide primer for the detection of SNP TSC0005378
gtttaagaaaag

SEQ ID NO: 362042 - DNA, 12 bp, Artificial Sequence
  Oligonucleotide primer for the detection of SNP TSC0005379
tctcttacttac

SEQ ID NO: 362043 - DNA, 12 bp, Artificial Sequence
  Oligonucleotide primer for the detection of SNP TSC0005379
taaaaagtgtat

SEQ ID NO: 362044 - DNA, 12 bp, Artificial Sequence
  Oligonucleotide primer for the detection of SNP TSC0005380
attccaaaactt

SEQ ID NO: 362045 - DNA, 12 bp, Artificial Sequence
  Oligonucleotide primer for the detection of SNP TSC0005380
tttttttgaatg

SEQ ID NO: 362046 - DNA, 12 bp, Artificial Sequence
  Oligonucleotide primer for the detection of SNP TSC0005381
atgatagtgttt

SEQ ID NO: 362047 - DNA, 12 bp, Artificial Sequence
  Oligonucleotide primer for the detection of SNP TSC0005381
aatattgtgagg

SEQ ID NO: 362048 - DNA, 12 bp, Artificial Sequence
  Oligonucleotide primer for the detection of SNP TSC0053004
aacctcccaaac

SEQ ID NO: 362049 - DNA, 12 bp, Artificial Sequence
  Oligonucleotide primer for the detection of SNP TSC0053004
agttttttaaat

SEQ ID NO: 362050 - DNA, 12 bp, Artificial Sequence
  Oligonucleotide primer for the detection of SNP TSC0053005
ataccaccacgc

SEQ ID NO: 362051 - DNA, 12 bp, Artificial Sequence
  Oligonucleotide primer for the detection of SNP TSC0053005
tagaaattagtt

SEQ ID NO: 362052 - DNA, 12 bp, Artificial Sequence
  Oligonucleotide primer for the detection of SNP TSC0053005
gtattattatgt

SEQ ID NO: 362053 - DNA, 12 bp, Artificial Sequence
  Oligonucleotide primer for the detection of SNP TSC0053005
gtattattacgt

SEQ ID NO: 362054 - DNA, 12 bp, Artificial Sequence
  Oligonucleotide primer for the detection of SNP TSC0053005
gtattattatgc

SEQ ID NO: 362055 - DNA, 12 bp, Artificial Sequence
  Oligonucleotide primer for the detection of SNP TSC0053005
gtattattacgc

SEQ ID NO: 362056 - DNA, 12 bp, Artificial Sequence
  Oligonucleotide primer for the detection of SNP TSC0053007
cttctttaccta

SEQ ID NO: 362057 - DNA, 12 bp, Artificial Sequence
  Oligonucleotide primer for the detection of SNP TSC0053007
atttttgaataa

SEQ ID NO: 362058 - DNA, 12 bp, Artificial Sequence
  Oligonucleotide primer for the detection of SNP TSC0000390
cacaactctaca

SEQ ID NO: 362059 - DNA, 12 bp, Artificial Sequence
  Oligonucleotide primer for the detection of SNP TSC0000390
cacgactctaca

SEQ ID NO: 362060 - DNA, 12 bp, Artificial Sequence
  Oligonucleotide primer for the detection of SNP TSC0000390
tggatattgttt

SEQ ID NO: 362061 - DNA, 12 bp, Artificial Sequence
  Oligonucleotide primer for the detection of SNP TSC0000390
cggatattgttt

SEQ ID NO: 362062 - DNA, 12 bp, Artificial Sequence
  Oligonucleotide primer for the detection of SNP TSC0000390
caaatattatct

SEQ ID NO: 362063 - DNA, 12 bp, Artificial Sequence
  Oligonucleotide primer for the detection of SNP TSC0000390
cgaatattatct

SEQ ID NO: 362064 - DNA, 12 bp, Artificial Sequence
  Oligonucleotide primer for the detection of SNP TSC0000390
tatggttttata

SEQ ID NO: 362065 - DNA, 12 bp, Artificial Sequence
  Oligonucleotide primer for the detection of SNP TSC0000390
tacggttttata

SEQ ID NO: 362066 - DNA, 12 bp, Artificial Sequence
  Oligonucleotide primer for the detection of SNP TSC0000391
ccctaaaacata

SEQ ID NO: 362067 - DNA, 12 bp, Artificial Sequence
  Oligonucleotide primer for the detection of SNP TSC0000391
aaataagtattt

SEQ ID NO: 362068 - DNA, 12 bp, Artificial Sequence
  Oligonucleotide primer for the detection of SNP TSC0000391
ttttaaagtatg

SEQ ID NO: 362069 - DNA, 12 bp, Artificial Sequence
  Oligonucleotide primer for the detection of SNP TSC0053010
ctccaaaaaaaa

SEQ ID NO: 362070 - DNA, 12 bp, Artificial Sequence
  Oligonucleotide primer for the detection of SNP TSC0053010
ctacccctacta

SEQ ID NO: 362071 - DNA, 12 bp, Artificial Sequence
  Oligonucleotide primer for the detection of SNP TSC0053011
aatacaataaac

SEQ ID NO: 362072 - DNA, 12 bp, Artificial Sequence
  Oligonucleotide primer for the detection of SNP TSC0053011
gtagtagtaatt

SEQ ID NO: 362073 - DNA, 12 bp, Artificial Sequence
  Oligonucleotide primer for the detection of SNP TSC0053011
caacaataatca

SEQ ID NO: 362074 - DNA, 12 bp, Artificial Sequence
  Oligonucleotide primer for the detection of SNP TSC0053011
atgtagtgagtt

SEQ ID NO: 362075 - DNA, 12 bp, Artificial Sequence
  Oligonucleotide primer for the detection of SNP TSC0053012
aaaaaactaatt

SEQ ID NO: 362076 - DNA, 12 bp, Artificial Sequence
  Oligonucleotide primer for the detection of SNP TSC0053012
gtgtttggttta

SEQ ID NO: 362077 - DNA, 12 bp, Artificial Sequence
  Oligonucleotide primer for the detection of SNP TSC0053013
aatccccaaaat

SEQ ID NO: 362078 - DNA, 12 bp, Artificial Sequence
  Oligonucleotide primer for the detection of SNP TSC0053013
aatccccgaaat

SEQ ID NO: 362079 - DNA, 12 bp, Artificial Sequence
  Oligonucleotide primer for the detection of SNP TSC0053013
ttttttgaagga

SEQ ID NO: 362080 - DNA, 12 bp, Artificial Sequence
  Oligonucleotide primer for the detection of SNP TSC0004844
tccaaaataata

SEQ ID NO: 362081 - DNA, 12 bp, Artificial Sequence
  Oligonucleotide primer for the detection of SNP TSC0004844
ctcatattaaat

SEQ ID NO: 362082 - DNA, 12 bp, Artificial Sequence
  Oligonucleotide primer for the detection of SNP TSC0053014
attaaaatatac

SEQ ID NO: 362083 - DNA, 12 bp, Artificial Sequence
  Oligonucleotide primer for the detection of SNP TSC0053014
actaaacattta

SEQ ID NO: 362084 - DNA, 12 bp, Artificial Sequence
  Oligonucleotide primer for the detection of SNP TSC0053014
attaaggtgtgt

SEQ ID NO: 362085 - DNA, 12 bp, Artificial Sequence
  Oligonucleotide primer for the detection of SNP TSC0053015
taaacatttatc

SEQ ID NO: 362086 - DNA, 12 bp, Artificial Sequence
  Oligonucleotide primer for the detection of SNP TSC0053015
ttaaggtgtgta

SEQ ID NO: 362087 - DNA, 12 bp, Artificial Sequence
  Oligonucleotide primer for the detection of SNP TSC0053016
acttctcaatct

SEQ ID NO: 362088 - DNA, 12 bp, Artificial Sequence
  Oligonucleotide primer for the detection of SNP TSC0053016
tttttggatgta

SEQ ID NO: 362089 - DNA, 12 bp, Artificial Sequence
  Oligonucleotide primer for the detection of SNP TSC0053017
taaggaattgaa

SEQ ID NO: 362090 - DNA, 12 bp, Artificial Sequence
  Oligonucleotide primer for the detection of SNP TSC0053017
taaggaatcgaa

SEQ ID NO: 362091 - DNA, 12 bp, Artificial Sequence
  Oligonucleotide primer for the detection of SNP TSC0053017
aagtaaaaaaaa

SEQ ID NO: 362092 - DNA, 12 bp, Artificial Sequence
  Oligonucleotide primer for the detection of SNP TSC0053018
aactttctctct

SEQ ID NO: 362093 - DNA, 12 bp, Artificial Sequence
  Oligonucleotide primer for the detection of SNP TSC0053018
attttgaaggaa

SEQ ID NO: 362094 - DNA, 12 bp, Artificial Sequence
  Oligonucleotide primer for the detection of SNP TSC0053019
tttttttatacg

SEQ ID NO: 362095 - DNA, 12 bp, Artificial Sequence
  Oligonucleotide primer for the detection of SNP TSC0053020
tagtttttgagt

SEQ ID NO: 362096 - DNA, 12 bp, Artificial Sequence
  Oligonucleotide primer for the detection of SNP TSC0053020
taacttctaaat

SEQ ID NO: 362097 - DNA, 12 bp, Artificial Sequence
  Oligonucleotide primer for the detection of SNP TSC0053020
ggtatgtataaa

SEQ ID NO: 362098 - DNA, 12 bp, Artificial Sequence
  Oligonucleotide primer for the detection of SNP TSC0053021
acctctataaca

SEQ ID NO: 362099 - DNA, 12 bp, Artificial Sequence
  Oligonucleotide primer for the detection of SNP TSC0053021
aagaattggtag

SEQ ID NO: 362100 - DNA, 12 bp, Artificial Sequence
  Oligonucleotide primer for the detection of SNP TSC0053025
tctaaaaacaca

SEQ ID NO: 362101 - DNA, 12 bp, Artificial Sequence
  Oligonucleotide primer for the detection of SNP TSC0053025
taaggttattat

SEQ ID NO: 362102 - DNA, 12 bp, Artificial Sequence
  Oligonucleotide primer for the detection of SNP TSC0053025
caaaaccactac

SEQ ID NO: 362103 - DNA, 12 bp, Artificial Sequence
  Oligonucleotide primer for the detection of SNP TSC0053025
tttgagaatata

SEQ ID NO: 362104 - DNA, 12 bp, Artificial Sequence
  Oligonucleotide primer for the detection of SNP TSC0053026
tctcaaaaacct

SEQ ID NO: 362105 - DNA, 12 bp, Artificial Sequence
  Oligonucleotide primer for the detection of SNP TSC0053026
aagggaatggag

SEQ ID NO: 362106 - DNA, 12 bp, Artificial Sequence
  Oligonucleotide primer for the detection of SNP TSC0005390
aatcctttttcc

SEQ ID NO: 362107 - DNA, 12 bp, Artificial Sequence
  Oligonucleotide primer for the detection of SNP TSC0005390
tgagagattgag

SEQ ID NO: 362108 - DNA, 12 bp, Artificial Sequence
  Oligonucleotide primer for the detection of SNP TSC0005391
ttgataatgtta

SEQ ID NO: 362109 - DNA, 12 bp, Artificial Sequence
  Oligonucleotide primer for the detection of SNP TSC0053029
tcctcctcataa

SEQ ID NO: 362110 - DNA, 12 bp, Artificial Sequence
  Oligonucleotide primer for the detection of SNP TSC0053029
aggatagatatt

SEQ ID NO: 362111 - DNA, 12 bp, Artificial Sequence
  Oligonucleotide primer for the detection of SNP TSC0053029
aggatagatatc

SEQ ID NO: 362112 - DNA, 12 bp, Artificial Sequence
  Oligonucleotide primer for the detection of SNP TSC0053030
ccctctataact

SEQ ID NO: 362113 - DNA, 12 bp, Artificial Sequence
  Oligonucleotide primer for the detection of SNP TSC0053030
acccatttatat

SEQ ID NO: 362114 - DNA, 12 bp, Artificial Sequence
  Oligonucleotide primer for the detection of SNP TSC0053030
ttttttgtggtt

SEQ ID NO: 362115 - DNA, 12 bp, Artificial Sequence
  Oligonucleotide primer for the detection of SNP TSC0053031
ttatttcttaat

SEQ ID NO: 362116 - DNA, 12 bp, Artificial Sequence
  Oligonucleotide primer for the detection of SNP TSC0053031
aaaatttgaaag

SEQ ID NO: 362117 - DNA, 12 bp, Artificial Sequence
  Oligonucleotide primer for the detection of SNP TSC0053032
catattaactat

SEQ ID NO: 362118 - DNA, 12 bp, Artificial Sequence
  Oligonucleotide primer for the detection of SNP TSC0053032
aaagttgagagg

SEQ ID NO: 362119 - DNA, 12 bp, Artificial Sequence
  Oligonucleotide primer for the detection of SNP TSC0053034
atttaaacacct

SEQ ID NO: 362120 - DNA, 12 bp, Artificial Sequence
  Oligonucleotide primer for the detection of SNP TSC0053034
atttaaacgcct

SEQ ID NO: 362121 - DNA, 12 bp, Artificial Sequence
  Oligonucleotide primer for the detection of SNP TSC0053035
tccaactaatat

SEQ ID NO: 362122 - DNA, 12 bp, Artificial Sequence
  Oligonucleotide primer for the detection of SNP TSC0053035
tttaatgtagaa

SEQ ID NO: 362123 - DNA, 12 bp, Artificial Sequence
  Oligonucleotide primer for the detection of SNP TSC0053035
ctcaatacaaaa

SEQ ID NO: 362124 - DNA, 12 bp, Artificial Sequence
  Oligonucleotide primer for the detection of SNP TSC0053036
ctcttcactaaa

SEQ ID NO: 362125 - DNA, 12 bp, Artificial Sequence
  Oligonucleotide primer for the detection of SNP TSC0053036
ttgtggaaatgt

SEQ ID NO: 362126 - DNA, 12 bp, Artificial Sequence
  Oligonucleotide primer for the detection of SNP TSC0053036
tcgtggaaatgt

SEQ ID NO: 362127 - DNA, 12 bp, Artificial Sequence
  Oligonucleotide primer for the detection of SNP TSC0053036
ttgcggaaatgt

SEQ ID NO: 362128 - DNA, 12 bp, Artificial Sequence
  Oligonucleotide primer for the detection of SNP TSC0053036
ttgtggaaacgt

SEQ ID NO: 362129 - DNA, 12 bp, Artificial Sequence
  Oligonucleotide primer for the detection of SNP TSC0053036
tcgcggaaatgt

SEQ ID NO: 362130 - DNA, 12 bp, Artificial Sequence
  Oligonucleotide primer for the detection of SNP TSC0053036
tcgtggaaacgt

SEQ ID NO: 362131 - DNA, 12 bp, Artificial Sequence
  Oligonucleotide primer for the detection of SNP TSC0053036
ttgcggaaacgt

SEQ ID NO: 362132 - DNA, 12 bp, Artificial Sequence
  Oligonucleotide primer for the detection of SNP TSC0053036
tcgcggaaacgt

SEQ ID NO: 362133 - DNA, 12 bp, Artificial Sequence
  Oligonucleotide primer for the detection of SNP TSC0053036
tcacaaaaacat

SEQ ID NO: 362134 - DNA, 12 bp, Artificial Sequence
  Oligonucleotide primer for the detection of SNP TSC0053036
tcacaaaaacgt

SEQ ID NO: 362135 - DNA, 12 bp, Artificial Sequence
  Oligonucleotide primer for the detection of SNP TSC0053036
tcacgaaaacat

SEQ ID NO: 362136 - DNA, 12 bp, Artificial Sequence
  Oligonucleotide primer for the detection of SNP TSC0053036
tcgcaaaaacat

SEQ ID NO: 362137 - DNA, 12 bp, Artificial Sequence
  Oligonucleotide primer for the detection of SNP TSC0053036
tcacgaaaacgt

SEQ ID NO: 362138 - DNA, 12 bp, Artificial Sequence
  Oligonucleotide primer for the detection of SNP TSC0053036
tcgcaaaaacgt

SEQ ID NO: 362139 - DNA, 12 bp, Artificial Sequence
  Oligonucleotide primer for the detection of SNP TSC0053036
tcgcgaaaacat

SEQ ID NO: 362140 - DNA, 12 bp, Artificial Sequence
  Oligonucleotide primer for the detection of SNP TSC0053036
tcgcgaaaacgt

SEQ ID NO: 362141 - DNA, 12 bp, Artificial Sequence
  Oligonucleotide primer for the detection of SNP TSC0053036
gttttttattga

SEQ ID NO: 362142 - DNA, 12 bp, Artificial Sequence
  Oligonucleotide primer for the detection of SNP TSC0000196
ataactaacaaa

SEQ ID NO: 362143 - DNA, 12 bp, Artificial Sequence
  Oligonucleotide primer for the detection of SNP TSC0000196
gtaactaacaaa

SEQ ID NO: 362144 - DNA, 12 bp, Artificial Sequence
  Oligonucleotide primer for the detection of SNP TSC0000196
cttctaccatat

SEQ ID NO: 362145 - DNA, 12 bp, Artificial Sequence
  Oligonucleotide primer for the detection of SNP TSC0000196
gtaattagtaag

SEQ ID NO: 362146 - DNA, 12 bp, Artificial Sequence
  Oligonucleotide primer for the detection of SNP TSC0053037
actatatcccca

SEQ ID NO: 362147 - DNA, 12 bp, Artificial Sequence
  Oligonucleotide primer for the detection of SNP TSC0053037
gatgagatttgg

SEQ ID NO: 362148 - DNA, 12 bp, Artificial Sequence
  Oligonucleotide primer for the detection of SNP TSC0053037
gttgtgttttta

SEQ ID NO: 362149 - DNA, 12 bp, Artificial Sequence
  Oligonucleotide primer for the detection of SNP TSC0053038
caaacatttcaa

SEQ ID NO: 362150 - DNA, 12 bp, Artificial Sequence
  Oligonucleotide primer for the detection of SNP TSC0053038
tttttttgtaat

SEQ ID NO: 362151 - DNA, 12 bp, Artificial Sequence
  Oligonucleotide primer for the detection of SNP TSC0053038
tttctttataat

SEQ ID NO: 362152 - DNA, 12 bp, Artificial Sequence
  Oligonucleotide primer for the detection of SNP TSC0053039
acttttaaaaaa

SEQ ID NO: 362153 - DNA, 12 bp, Artificial Sequence
  Oligonucleotide primer for the detection of SNP TSC0053039
catataacttat

SEQ ID NO: 362154 - DNA, 12 bp, Artificial Sequence
  Oligonucleotide primer for the detection of SNP TSC0053039
tatttttggaga

SEQ ID NO: 362155 - DNA, 12 bp, Artificial Sequence
  Oligonucleotide primer for the detection of SNP TSC0053040
caatttctttta

SEQ ID NO: 362156 - DNA, 12 bp, Artificial Sequence
  Oligonucleotide primer for the detection of SNP TSC0053040
taaatataccat

SEQ ID NO: 362157 - DNA, 12 bp, Artificial Sequence
  Oligonucleotide primer for the detection of SNP TSC0053042
actatactttcc

SEQ ID NO: 362158 - DNA, 12 bp, Artificial Sequence
  Oligonucleotide primer for the detection of SNP TSC0053042
tttattagtaaa

SEQ ID NO: 362159 - DNA, 12 bp, Artificial Sequence
  Oligonucleotide primer for the detection of SNP TSC0053043
gttagagggaaa

SEQ ID NO: 362160 - DNA, 12 bp, Artificial Sequence
  Oligonucleotide primer for the detection of SNP TSC0053046
tttatatcccct

SEQ ID NO: 362161 - DNA, 12 bp, Artificial Sequence
  Oligonucleotide primer for the detection of SNP TSC0053046
tttaatttttgt

SEQ ID NO: 362162 - DNA, 12 bp, Artificial Sequence
  Oligonucleotide primer for the detection of SNP TSC0053046
ttccaaccctta

SEQ ID NO: 362163 - DNA, 12 bp, Artificial Sequence
  Oligonucleotide primer for the detection of SNP TSC0053047
aaatttagaagg

SEQ ID NO: 362164 - DNA, 12 bp, Artificial Sequence
  Oligonucleotide primer for the detection of SNP TSC0053047
ttgtgagggtta

SEQ ID NO: 362165 - DNA, 12 bp, Artificial Sequence
  Oligonucleotide primer for the detection of SNP TSC0000639
tatctacaaaaa

SEQ ID NO: 362166 - DNA, 12 bp, Artificial Sequence
  Oligonucleotide primer for the detection of SNP TSC0000639
tatctacgaaaa

SEQ ID NO: 362167 - DNA, 12 bp, Artificial Sequence
  Oligonucleotide primer for the detection of SNP TSC0000639
taagtttggaat

SEQ ID NO: 362168 - DNA, 12 bp, Artificial Sequence
  Oligonucleotide primer for the detection of SNP TSC0000639
caaacctaaaat

SEQ ID NO: 362169 - DNA, 12 bp, Artificial Sequence
  Oligonucleotide primer for the detection of SNP TSC0000639
tgtttgtggagg

SEQ ID NO: 362170 - DNA, 12 bp, Artificial Sequence
  Oligonucleotide primer for the detection of SNP TSC0000639
tgtttgcggagg

SEQ ID NO: 362171 - DNA, 12 bp, Artificial Sequence
  Oligonucleotide primer for the detection of SNP TSC0053048
agtttttaaggg

SEQ ID NO: 362172 - DNA, 12 bp, Artificial Sequence
  Oligonucleotide primer for the detection of SNP TSC0000691
aaaataaacact

SEQ ID NO: 362173 - DNA, 12 bp, Artificial Sequence
  Oligonucleotide primer for the detection of SNP TSC0000691
aatttacttaaa

SEQ ID NO: 362174 - DNA, 12 bp, Artificial Sequence
  Oligonucleotide primer for the detection of SNP TSC0000691
gaaatgagtatt

SEQ ID NO: 362175 - DNA, 12 bp, Artificial Sequence
  Oligonucleotide primer for the detection of SNP TSC0053049
ctacacttaaac

SEQ ID NO: 362176 - DNA, 12 bp, Artificial Sequence
  Oligonucleotide primer for the detection of SNP TSC0053049
ctacgcttaaac

SEQ ID NO: 362177 - DNA, 12 bp, Artificial Sequence
  Oligonucleotide primer for the detection of SNP TSC0053049
gattttatagta

SEQ ID NO: 362178 - DNA, 12 bp, Artificial Sequence
  Oligonucleotide primer for the detection of SNP TSC0004696
cttttattcttt

SEQ ID NO: 362179 - DNA, 12 bp, Artificial Sequence
  Oligonucleotide primer for the detection of SNP TSC0053050
ctccaaaaaaat

SEQ ID NO: 362180 - DNA, 12 bp, Artificial Sequence
  Oligonucleotide primer for the detection of SNP TSC0053051
taattatttcat

SEQ ID NO: 362181 - DNA, 12 bp, Artificial Sequence
  Oligonucleotide primer for the detection of SNP TSC0053052
caaaaatcaaat

SEQ ID NO: 362182 - DNA, 12 bp, Artificial Sequence
  Oligonukleotid-Primer
gattataatttg

SEQ ID NO: 362183 - DNA, 12 bp, Artificial Sequence
  Oligonucleotide primer for the detection of SNP TSC0053053
ctaaaatacctt

SEQ ID NO: 362184 - DNA, 12 bp, Artificial Sequence
  Oligonucleotide primer for the detection of SNP TSC0053053
gtgaaagagagg

SEQ ID NO: 362185 - DNA, 12 bp, Artificial Sequence
  Oligonucleotide primer for the detection of SNP TSC0053054
ataaactaaatc

SEQ ID NO: 362186 - DNA, 12 bp, Artificial Sequence
  Oligonukleotid-Primer
tttgatgtgttg

SEQ ID NO: 362187 - DNA, 12 bp, Artificial Sequence
  Oligonucleotide primer for the detection of SNP TSC0053060
atttttgaaggg

SEQ ID NO: 362188 - DNA, 12 bp, Artificial Sequence
  Oligonucleotide primer for the detection of SNP TSC0053061
aaaaatccattt

SEQ ID NO: 362189 - DNA, 12 bp, Artificial Sequence
  Oligonucleotide primer for the detection of SNP TSC0053061
gtttgtgtaaag

SEQ ID NO: 362190 - DNA, 12 bp, Artificial Sequence
  Oligonucleotide primer for the detection of SNP TSC0053065
aaaataactttt

SEQ ID NO: 362191 - DNA, 12 bp, Artificial Sequence
  Oligonucleotide primer for the detection of SNP TSC0053065
gtttaggttata

SEQ ID NO: 362192 - DNA, 12 bp, Artificial Sequence
  Oligonucleotide primer for the detection of SNP TSC0053071
aatgaattatta

SEQ ID NO: 362193 - DNA, 12 bp, Artificial Sequence
  Oligonucleotide primer for the detection of SNP TSC0053071
aataaatcatca

SEQ ID NO: 362194 - DNA, 12 bp, Artificial Sequence
  Oligonucleotide primer for the detection of SNP TSC0053071
tttggaatgaaa

SEQ ID NO: 362195 - DNA, 12 bp, Artificial Sequence
  Oligonucleotide primer for the detection of SNP TSC0053072
aatttctctctc

SEQ ID NO: 362196 - DNA, 12 bp, Artificial Sequence
  Oligonucleotide primer for the detection of SNP TSC0053072
aattatgaaatg

SEQ ID NO: 362197 - DNA, 12 bp, Artificial Sequence
  Oligonucleotide primer for the detection of SNP TSC0053073
ttatattagaaa

SEQ ID NO: 362198 - DNA, 12 bp, Artificial Sequence
  Oligonucleotide primer for the detection of SNP TSC0053076
tgaatatttata

SEQ ID NO: 362199 - DNA, 12 bp, Artificial Sequence
  Oligonucleotide primer for the detection of SNP TSC0053078
ttcttataaact

SEQ ID NO: 362200 - DNA, 12 bp, Artificial Sequence
  Oligonucleotide primer for the detection of SNP TSC0053078
gttattttaaat

SEQ ID NO: 362201 - DNA, 12 bp, Artificial Sequence
  Oligonucleotide primer for the detection of SNP TSC0053078
accactctaaac

SEQ ID NO: 362202 - DNA, 12 bp, Artificial Sequence
  Oligonucleotide primer for the detection of SNP TSC0053079
caaactacacca

SEQ ID NO: 362203 - DNA, 12 bp, Artificial Sequence
  Oligonucleotide primer for the detection of SNP TSC0053079
tagtatttttgc

SEQ ID NO: 362204 - DNA, 12 bp, Artificial Sequence
  Oligonucleotide primer for the detection of SNP TSC0053079
caacatccttac

SEQ ID NO: 362205 - DNA, 12 bp, Artificial Sequence
  Oligonucleotide primer for the detection of SNP TSC0053079
ttaaattgtatt

SEQ ID NO: 362206 - DNA, 12 bp, Artificial Sequence
  Oligonucleotide primer for the detection of SNP TSC0053080
aactaaacacat

SEQ ID NO: 362207 - DNA, 12 bp, Artificial Sequence
  Oligonucleotide primer for the detection of SNP TSC0053080
gattcgtgttta

SEQ ID NO: 362208 - DNA, 12 bp, Artificial Sequence
  Oligonucleotide primer for the detection of SNP TSC0053081
attatatttggg

SEQ ID NO: 362209 - DNA, 12 bp, Artificial Sequence
  Oligonucleotide primer for the detection of SNP TSC0053081
attatattcggg

SEQ ID NO: 362210 - DNA, 12 bp, Artificial Sequence
  Oligonucleotide primer for the detection of SNP TSC0053083
aaaaatacatcc

SEQ ID NO: 362211 - DNA, 12 bp, Artificial Sequence
  Oligonucleotide primer for the detection of SNP TSC0053083
tttgtaaagtta

SEQ ID NO: 362212 - DNA, 12 bp, Artificial Sequence
  Oligonucleotide primer for the detection of SNP TSC0053084
cctcaaataatc

SEQ ID NO: 362213 - DNA, 12 bp, Artificial Sequence
  Oligonucleotide primer for the detection of SNP TSC0053084
tgttgaggtagg

SEQ ID NO: 362214 - DNA, 12 bp, Artificial Sequence
  Oligonukleotid-Primer
cgttgaggtagg

SEQ ID NO: 362215 - DNA, 12 bp, Artificial Sequence
  Oligonucleotide primer for the detection of SNP TSC0053084
tgtcgaggtagg

SEQ ID NO: 362216 - DNA, 12 bp, Artificial Sequence
  Oligonucleotide primer for the detection of SNP TSC0053084
cgtcgaggtagg

SEQ ID NO: 362217 - DNA, 12 bp, Artificial Sequence
  Oligonucleotide primer for the detection of SNP TSC0053085
gtatatttgaga

SEQ ID NO: 362218 - DNA, 12 bp, Artificial Sequence
  Oligonukleotid-Primer
tcctccacatca

SEQ ID NO: 362219 - DNA, 12 bp, Artificial Sequence
  Oligonucleotide primer for the detection of SNP TSC0053086
tgatgttttagt

SEQ ID NO: 362220 - DNA, 12 bp, Artificial Sequence
  Oligonucleotide primer for the detection of SNP TSC0053086
tgacgttttagt

SEQ ID NO: 362221 - DNA, 12 bp, Artificial Sequence
  Oligonucleotide primer for the detection of SNP TSC0053086
tgatgttttagc

SEQ ID NO: 362222 - DNA, 12 bp, Artificial Sequence
  Oligonucleotide primer for the detection of SNP TSC0053086
tgacgttttagc

SEQ ID NO: 362223 - DNA, 12 bp, Artificial Sequence
  Oligonucleotide primer for the detection of SNP TSC0053086
ataacactccaa

SEQ ID NO: 362224 - DNA, 12 bp, Artificial Sequence
  Oligonucleotide primer for the detection of SNP TSC0053086
ataacgctccaa

SEQ ID NO: 362225 - DNA, 12 bp, Artificial Sequence
  Oligonucleotide primer for the detection of SNP TSC0053087
atacataactat

SEQ ID NO: 362226 - DNA, 12 bp, Artificial Sequence
  Oligonucleotide primer for the detection of SNP TSC0053087
taagtagttggg

SEQ ID NO: 362227 - DNA, 12 bp, Artificial Sequence
  Oligonucleotide primer for the detection of SNP TSC0053088
tcccaaaaattt

SEQ ID NO: 362228 - DNA, 12 bp, Artificial Sequence
  Oligonucleotide primer for the detection of SNP TSC0053088
gattgattgagt

SEQ ID NO: 362229 - DNA, 12 bp, Artificial Sequence
  Oligonucleotide primer for the detection of SNP TSC0053088
aaactaactaaa

SEQ ID NO: 362230 - DNA, 12 bp, Artificial Sequence
  Oligonucleotide primer for the detection of SNP TSC0053089
agtgtgtgttta

SEQ ID NO: 362231 - DNA, 12 bp, Artificial Sequence
  Oligonucleotide primer for the detection of SNP TSC0053090
ttttaatattga

SEQ ID NO: 362232 - DNA, 12 bp, Artificial Sequence
  Oligonucleotide primer for the detection of SNP TSC0053090
ttttaatatcga

SEQ ID NO: 362233 - DNA, 12 bp, Artificial Sequence
  Oligonucleotide primer for the detection of SNP TSC0053091
gttattaaaaaa

SEQ ID NO: 362234 - DNA, 12 bp, Artificial Sequence
  Oligonucleotide primer for the detection of SNP TSC0053091
aggattttttat

SEQ ID NO: 362235 - DNA, 12 bp, Artificial Sequence
  Oligonucleotide primer for the detection of SNP TSC0053091
aaaatttcctac

SEQ ID NO: 362236 - DNA, 12 bp, Artificial Sequence
  Oligonucleotide primer for the detection of SNP TSC0053091
gttgttgggaaa

SEQ ID NO: 362237 - DNA, 12 bp, Artificial Sequence
  Oligonucleotide primer for the detection of SNP TSC0053092
ttatcttctcca

SEQ ID NO: 362238 - DNA, 12 bp, Artificial Sequence
  Oligonucleotide primer for the detection of SNP TSC0053092
aggaatagataa

SEQ ID NO: 362239 - DNA, 12 bp, Artificial Sequence
  Oligonucleotide primer for the detection of SNP TSC0053093
tctcttcaaaat

SEQ ID NO: 362240 - DNA, 12 bp, Artificial Sequence
  Oligonucleotide primer for the detection of SNP TSC0053093
attatttagata

SEQ ID NO: 362241 - DNA, 12 bp, Artificial Sequence
  Oligonucleotide primer for the detection of SNP TSC0053094
tttttgtatgat

SEQ ID NO: 362242 - DNA, 12 bp, Artificial Sequence
  Oligonucleotide primer for the detection of SNP TSC0053094
cctttacataat

SEQ ID NO: 362243 - DNA, 12 bp, Artificial Sequence
  Oligonucleotide primer for the detection of SNP TSC0053094
taaatttaagat

SEQ ID NO: 362244 - DNA, 12 bp, Artificial Sequence
  Oligonucleotide primer for the detection of SNP TSC0053095
cattaatatttt

SEQ ID NO: 362245 - DNA, 12 bp, Artificial Sequence
  Oligonucleotide primer for the detection of SNP TSC0053095
aggatatattaa

SEQ ID NO: 362246 - DNA, 12 bp, Artificial Sequence
  Oligonucleotide primer for the detection of SNP TSC0053096
ccctaacctcac

SEQ ID NO: 362247 - DNA, 12 bp, Artificial Sequence
  Oligonucleotide primer for the detection of SNP TSC0053098
aaaattttaaac

SEQ ID NO: 362248 - DNA, 12 bp, Artificial Sequence
  Oligonucleotide primer for the detection of SNP TSC0053098
tagatggattta

SEQ ID NO: 362249 - DNA, 12 bp, Artificial Sequence
  Oligonucleotide primer for the detection of SNP TSC0053099
cccaatctatct

SEQ ID NO: 362250 - DNA, 12 bp, Artificial Sequence
  Oligonucleotide primer for the detection of SNP TSC0053099
aagagtgttgta

SEQ ID NO: 362251 - DNA, 12 bp, Artificial Sequence
  Oligonucleotide primer for the detection of SNP TSC0053100
caaatcaaacca

SEQ ID NO: 362252 - DNA, 12 bp, Artificial Sequence
  Oligonucleotide primer for the detection of SNP TSC0053100
tgattattatat

SEQ ID NO: 362253 - DNA, 12 bp, Artificial Sequence
  Oligonucleotide primer for the detection of SNP TSC0053100
taagttaaatta

SEQ ID NO: 362254 - DNA, 12 bp, Artificial Sequence
  Oligonucleotide primer for the detection of SNP TSC0053101
atattttcaata

SEQ ID NO: 362255 - DNA, 12 bp, Artificial Sequence
  Oligonucleotide primer for the detection of SNP TSC0053101
tggggatatgtg

SEQ ID NO: 362256 - DNA, 12 bp, Artificial Sequence
  Oligonucleotide primer for the detection of SNP TSC0053101
tggggatatgcg

SEQ ID NO: 362257 - DNA, 12 bp, Artificial Sequence
  Oligonucleotide primer for the detection of SNP TSC0053101
taaaaacataca

SEQ ID NO: 362258 - DNA, 12 bp, Artificial Sequence
  Oligonucleotide primer for the detection of SNP TSC0053101
taaaaacatacg

SEQ ID NO: 362259 - DNA, 12 bp, Artificial Sequence
  Oligonucleotide primer for the detection of SNP TSC0053102
atctaaattacc

SEQ ID NO: 362260 - DNA, 12 bp, Artificial Sequence
  Oligonucleotide primer for the detection of SNP TSC0053102
tagagataaaaa

SEQ ID NO: 362261 - DNA, 12 bp, Artificial Sequence
  Oligonucleotide primer for the detection of SNP TSC0053103
ttttttatattg

SEQ ID NO: 362262 - DNA, 12 bp, Artificial Sequence
  Oligonucleotide primer for the detection of SNP TSC0053104
ataaggatttta

SEQ ID NO: 362263 - DNA, 12 bp, Artificial Sequence
  Oligonucleotide primer for the detection of SNP TSC0053105
atctacctttac

SEQ ID NO: 362264 - DNA, 12 bp, Artificial Sequence
  Oligonucleotide primer for the detection of SNP TSC0053105
ttatagtttagg

SEQ ID NO: 362265 - DNA, 12 bp, Artificial Sequence
  Oligonucleotide primer for the detection of SNP TSC0053106
atatctcaattt

SEQ ID NO: 362266 - DNA, 12 bp, Artificial Sequence
  Oligonucleotide primer for the detection of SNP TSC0053106
ttgatagtttgg

SEQ ID NO: 362267 - DNA, 12 bp, Artificial Sequence
  Oligonucleotide primer for the detection of SNP TSC0053108
aatacaataaat

SEQ ID NO: 362268 - DNA, 12 bp, Artificial Sequence
  Oligonucleotide primer for the detection of SNP TSC0053108
gtgaataatgag

SEQ ID NO: 362269 - DNA, 12 bp, Artificial Sequence
  Oligonucleotide primer for the detection of SNP TSC0053114
aaaaaatcgctt

SEQ ID NO: 362270 - DNA, 12 bp, Artificial Sequence
  Oligonucleotide primer for the detection of SNP TSC0053115
ttaactatttta

SEQ ID NO: 362271 - DNA, 12 bp, Artificial Sequence
  Oligonucleotide primer for the detection of SNP TSC0053115
aaatatttgttt

SEQ ID NO: 362272 - DNA, 12 bp, Artificial Sequence
  Oligonucleotide primer for the detection of SNP TSC0053116
actaaatacata

SEQ ID NO: 362273 - DNA, 12 bp, Artificial Sequence
  Oligonucleotide primer for the detection of SNP TSC0053116
actaaatacgta

SEQ ID NO: 362274 - DNA, 12 bp, Artificial Sequence
  Oligonucleotide primer for the detection of SNP TSC0053116
tttatttcctac

SEQ ID NO: 362275 - DNA, 12 bp, Artificial Sequence
  Oligonucleotide primer for the detection of SNP TSC0053116
tgttaagtatgt

SEQ ID NO: 362276 - DNA, 12 bp, Artificial Sequence
  Oligonucleotide primer for the detection of SNP TSC0053116
tgttaagtacgt

SEQ ID NO: 362277 - DNA, 12 bp, Artificial Sequence
  Oligonucleotide primer for the detection of SNP TSC0053117
ttttttggttag

SEQ ID NO: 362278 - DNA, 12 bp, Artificial Sequence
  Oligonucleotide primer for the detection of SNP TSC0053118
ttcggtttatta

SEQ ID NO: 362279 - DNA, 12 bp, Artificial Sequence
  Oligonucleotide primer for the detection of SNP TSC0053119
ataatgataaaa

SEQ ID NO: 362280 - DNA, 12 bp, Artificial Sequence
  Oligonucleotide primer for the detection of SNP TSC0053120
aaaatctccttc

SEQ ID NO: 362281 - DNA, 12 bp, Artificial Sequence
  Oligonucleotide primer for the detection of SNP TSC0053120
tgagtaagtgaa

SEQ ID NO: 362282 - DNA, 12 bp, Artificial Sequence
  Oligonucleotide primer for the detection of SNP TSC0053129
ctcattaaactt

SEQ ID NO: 362283 - DNA, 12 bp, Artificial Sequence
  Oligonucleotide primer for the detection of SNP TSC0053129
ctcgttaaactt

SEQ ID NO: 362284 - DNA, 12 bp, Artificial Sequence
  Oligonucleotide primer for the detection of SNP TSC0053129
gattgtagatta

SEQ ID NO: 362285 - DNA, 12 bp, Artificial Sequence
  Oligonucleotide primer for the detection of SNP TSC0053129
tttgttgagttt

SEQ ID NO: 362286 - DNA, 12 bp, Artificial Sequence
  Oligonucleotide primer for the detection of SNP TSC0053129
ttcgttgagttt

SEQ ID NO: 362287 - DNA, 12 bp, Artificial Sequence
  Oligonucleotide primer for the detection of SNP TSC0053130
aatctactcctt

SEQ ID NO: 362288 - DNA, 12 bp, Artificial Sequence
  Oligonucleotide primer for the detection of SNP TSC0053130
ttaaataagtta

SEQ ID NO: 362289 - DNA, 12 bp, Artificial Sequence
  Oligonucleotide primer for the detection of SNP TSC0053130
ccaaacaaatta

SEQ ID NO: 362290 - DNA, 12 bp, Artificial Sequence
  Oligonucleotide primer for the detection of SNP TSC0053132
accaaatcccaa

SEQ ID NO: 362291 - DNA, 12 bp, Artificial Sequence
  Oligonucleotide primer for the detection of SNP TSC0053132
tttttgttagtt

SEQ ID NO: 362292 - DNA, 12 bp, Artificial Sequence
  Oligonucleotide primer for the detection of SNP TSC0053132
tttttattaact

SEQ ID NO: 362293 - DNA, 12 bp, Artificial Sequence
  Oligonucleotide primer for the detection of SNP TSC0053132
attaaattttaa

SEQ ID NO: 362294 - DNA, 12 bp, Artificial Sequence
  Oligonucleotide primer for the detection of SNP TSC0053135
aatatcaattaa

SEQ ID NO: 362295 - DNA, 12 bp, Artificial Sequence
  Oligonucleotide primer for the detection of SNP TSC0053135
aggttatgtgtt

SEQ ID NO: 362296 - DNA, 12 bp, Artificial Sequence
  Oligonucleotide primer for the detection of SNP TSC0053135
taaattatatac

SEQ ID NO: 362297 - DNA, 12 bp, Artificial Sequence
  Oligonucleotide primer for the detection of SNP TSC0053135
ggtattagttgg

SEQ ID NO: 362298 - DNA, 12 bp, Artificial Sequence
  Oligonucleotide primer for the detection of SNP TSC0053140
attcttaatatc

SEQ ID NO: 362299 - DNA, 12 bp, Artificial Sequence
  Oligonucleotide primer for the detection of SNP TSC0053140
atttaaagatga

SEQ ID NO: 362300 - DNA, 12 bp, Artificial Sequence
  Oligonucleotide primer for the detection of SNP TSC0053141
acaatcttatac

SEQ ID NO: 362301 - DNA, 12 bp, Artificial Sequence
  Oligonucleotide primer for the detection of SNP TSC0053141
agtattagtttt

SEQ ID NO: 362302 - DNA, 12 bp, Artificial Sequence
  Oligonucleotide primer for the detection of SNP TSC0053141
ataattttgtat

SEQ ID NO: 362303 - DNA, 12 bp, Artificial Sequence
  Oligonucleotide primer for the detection of SNP TSC0053144
agtattgtaatt

SEQ ID NO: 362304 - DNA, 12 bp, Artificial Sequence
  Oligonucleotide primer for the detection of SNP TSC0053144
ataatattacaa

SEQ ID NO: 362305 - DNA, 12 bp, Artificial Sequence
  Oligonucleotide primer for the detection of SNP TSC0053144
atgattaaaaag

SEQ ID NO: 362306 - DNA, 12 bp, Artificial Sequence
  Oligonucleotide primer for the detection of SNP TSC0053146
tctttaccatct

SEQ ID NO: 362307 - DNA, 12 bp, Artificial Sequence
  Oligonucleotide primer for the detection of SNP TSC0053146
ttaattaaaaga

SEQ ID NO: 362308 - DNA, 12 bp, Artificial Sequence
  Oligonucleotide primer for the detection of SNP TSC0053146
ccaattaaaaaa

SEQ ID NO: 362309 - DNA, 12 bp, Artificial Sequence
  Oligonucleotide primer for the detection of SNP TSC0053151
accccaactaat

SEQ ID NO: 362310 - DNA, 12 bp, Artificial Sequence
  Oligonucleotide primer for the detection of SNP TSC0053151
taatttgtagtt

SEQ ID NO: 362311 - DNA, 12 bp, Artificial Sequence
  Oligonucleotide primer for the detection of SNP TSC0053151
taacttataatt

SEQ ID NO: 362312 - DNA, 12 bp, Artificial Sequence
  Oligonucleotide primer for the detection of SNP TSC0053151
attttaattgat

SEQ ID NO: 362313 - DNA, 12 bp, Artificial Sequence
  Oligonucleotide primer for the detection of SNP TSC0053152
atatcaattaaa

SEQ ID NO: 362314 - DNA, 12 bp, Artificial Sequence
  Oligonucleotide primer for the detection of SNP TSC0053152
gaatattggtag

SEQ ID NO: 362315 - DNA, 12 bp, Artificial Sequence
  Oligonucleotide primer for the detection of SNP TSC0053152
gtgttaattgaa

SEQ ID NO: 362316 - DNA, 12 bp, Artificial Sequence
  Oligonucleotide primer for the detection of SNP TSC0053155
ataaggttatgg

SEQ ID NO: 362317 - DNA, 12 bp, Artificial Sequence
  Oligonucleotide primer for the detection of SNP TSC0053155
agaaagttatat

SEQ ID NO: 362318 - DNA, 12 bp, Artificial Sequence
  Oligonucleotide primer for the detection of SNP TSC0053156
caaattaacata

SEQ ID NO: 362319 - DNA, 12 bp, Artificial Sequence
  Oligonucleotide primer for the detection of SNP TSC0053156
caaattaacgta

SEQ ID NO: 362320 - DNA, 12 bp, Artificial Sequence
  Oligonucleotide primer for the detection of SNP TSC0053156
cgaattaacata

SEQ ID NO: 362321 - DNA, 12 bp, Artificial Sequence
  Oligonucleotide primer for the detection of SNP TSC0053156
cgaattaacgta

SEQ ID NO: 362322 - DNA, 12 bp, Artificial Sequence
  Oligonucleotide primer for the detection of SNP TSC0053156
ttgtaatttata

SEQ ID NO: 362323 - DNA, 12 bp, Artificial Sequence
  Oligonucleotide primer for the detection of SNP TSC0053156
aattagtgtgtt

SEQ ID NO: 362324 - DNA, 12 bp, Artificial Sequence
  Oligonucleotide primer for the detection of SNP TSC0053156
aattagcgtgtt

SEQ ID NO: 362325 - DNA, 12 bp, Artificial Sequence
  Oligonucleotide primer for the detection of SNP TSC0053157
tggaattgtata

SEQ ID NO: 362326 - DNA, 12 bp, Artificial Sequence
  Oligonucleotide primer for the detection of SNP TSC0053158
ctccaaatactt

SEQ ID NO: 362327 - DNA, 12 bp, Artificial Sequence
  Oligonucleotide primer for the detection of SNP TSC0053158
gatgtttatata

SEQ ID NO: 362328 - DNA, 12 bp, Artificial Sequence
  Oligonucleotide primer for the detection of SNP TSC0053159
ttgtagttaagt

SEQ ID NO: 362329 - DNA, 12 bp, Artificial Sequence
  Oligonucleotide primer for the detection of SNP TSC0053159
tttataattaaa

SEQ ID NO: 362330 - DNA, 12 bp, Artificial Sequence
  Oligonucleotide primer for the detection of SNP TSC0053159
aaagtaagttat

SEQ ID NO: 362331 - DNA, 12 bp, Artificial Sequence
  Oligonucleotide primer for the detection of SNP TSC0053160
atcatcccaaac

SEQ ID NO: 362332 - DNA, 12 bp, Artificial Sequence
  Oligonucleotide primer for the detection of SNP TSC0053160
aatgggtataga

SEQ ID NO: 362333 - DNA, 12 bp, Artificial Sequence
  Oligonucleotide primer for the detection of SNP TSC0053161
tgttattgaatt

SEQ ID NO: 362334 - DNA, 12 bp, Artificial Sequence
  Oligonucleotide primer for the detection of SNP TSC0053161
tgttattgaatc

SEQ ID NO: 362335 - DNA, 12 bp, Artificial Sequence
  Oligonucleotide primer for the detection of SNP TSC0053161
atttttaagtat

SEQ ID NO: 362336 - DNA, 12 bp, Artificial Sequence
  Oligonucleotide primer for the detection of SNP TSC0053164
ggaaattttttt

SEQ ID NO: 362337 - DNA, 12 bp, Artificial Sequence
  Oligonucleotide primer for the detection of SNP TSC0053164
aaaaatcttttt

SEQ ID NO: 362338 - DNA, 12 bp, Artificial Sequence
  Oligonucleotide primer for the detection of SNP TSC0053165
taaatccttaca

SEQ ID NO: 362339 - DNA, 12 bp, Artificial Sequence
  Oligonucleotide primer for the detection of SNP TSC0053165
atgatttattaa

SEQ ID NO: 362340 - DNA, 12 bp, Artificial Sequence
  Oligonucleotide primer for the detection of SNP TSC0053169
taatattcccaa

SEQ ID NO: 362341 - DNA, 12 bp, Artificial Sequence
  Oligonucleotide primer for the detection of SNP TSC0053169
agaagttaaatg

SEQ ID NO: 362342 - DNA, 12 bp, Artificial Sequence
  Oligonucleotide primer for the detection of SNP TSC0053169
tgatgtttttag

SEQ ID NO: 362343 - DNA, 12 bp, Artificial Sequence
  Oligonucleotide primer for the detection of SNP TSC0053175
attttaacatca

SEQ ID NO: 362344 - DNA, 12 bp, Artificial Sequence
  Oligonucleotide primer for the detection of SNP TSC0053175
gaagagtaggaa

SEQ ID NO: 362345 - DNA, 12 bp, Artificial Sequence
  Oligonucleotide primer for the detection of SNP TSC0053175
ttttaatattac

SEQ ID NO: 362346 - DNA, 12 bp, Artificial Sequence
  Oligonucleotide primer for the detection of SNP TSC0053176
ttagatatgttt

SEQ ID NO: 362347 - DNA, 12 bp, Artificial Sequence
  Oligonucleotide primer for the detection of SNP TSC0053176
ttaaacatattt

SEQ ID NO: 362348 - DNA, 12 bp, Artificial Sequence
  Oligonucleotide primer for the detection of SNP TSC0053176
aatttagagagg

SEQ ID NO: 362349 - DNA, 12 bp, Artificial Sequence
  Oligonucleotide primer for the detection of SNP TSC0053177
ctctctaaattc

SEQ ID NO: 362350 - DNA, 12 bp, Artificial Sequence
  Oligonucleotide primer for the detection of SNP TSC0053177
aattgaagataa

SEQ ID NO: 362351 - DNA, 12 bp, Artificial Sequence
  Oligonucleotide primer for the detection of SNP TSC0053178
actacccatatt

SEQ ID NO: 362352 - DNA, 12 bp, Artificial Sequence
  Oligonucleotide primer for the detection of SNP TSC0053178
gggtagatatta

SEQ ID NO: 362353 - DNA, 12 bp, Artificial Sequence
  Oligonucleotide primer for the detection of SNP TSC0053181
catctttctatt

SEQ ID NO: 362354 - DNA, 12 bp, Artificial Sequence
  Oligonucleotide primer for the detection of SNP TSC0053181
ttgagtttggta

SEQ ID NO: 362355 - DNA, 12 bp, Artificial Sequence
  Oligonucleotide primer for the detection of SNP TSC0053182
aggtttgttttt

SEQ ID NO: 362356 - DNA, 12 bp, Artificial Sequence
  Oligonucleotide primer for the detection of SNP TSC0053182
aaatctattcct

SEQ ID NO: 362357 - DNA, 12 bp, Artificial Sequence
  Oligonucleotide primer for the detection of SNP TSC0053184
cattcttcttct

SEQ ID NO: 362358 - DNA, 12 bp, Artificial Sequence
  Oligonucleotide primer for the detection of SNP TSC0053184
cgttcttcttct

SEQ ID NO: 362359 - DNA, 12 bp, Artificial Sequence
  Oligonucleotide primer for the detection of SNP TSC0053184
tagagaattgga

SEQ ID NO: 362360 - DNA, 12 bp, Artificial Sequence
  Oligonucleotide primer for the detection of SNP TSC0053185
ttatcttttaat

SEQ ID NO: 362361 - DNA, 12 bp, Artificial Sequence
  Oligonucleotide primer for the detection of SNP TSC0053185
ttgggtttttga

SEQ ID NO: 362362 - DNA, 12 bp, Artificial Sequence
  Oligonucleotide primer for the detection of SNP TSC0053185
tcgggtttttga

SEQ ID NO: 362363 - DNA, 12 bp, Artificial Sequence
  Oligonucleotide primer for the detection of SNP TSC0053186
ctcgaaaaactc

SEQ ID NO: 362364 - DNA, 12 bp, Artificial Sequence
  Oligonucleotide primer for the detection of SNP TSC0053186
ggaggaagggga

SEQ ID NO: 362365 - DNA, 12 bp, Artificial Sequence
  Oligonucleotide primer for the detection of SNP TSC0053186
ttcgaaggattt

SEQ ID NO: 362366 - DNA, 12 bp, Artificial Sequence
  Oligonucleotide primer for the detection of SNP TSC0053187
aaactataccat

SEQ ID NO: 362367 - DNA, 12 bp, Artificial Sequence
  Oligonukleotid-Primer
aaactataccgt

SEQ ID NO: 362368 - DNA, 12 bp, Artificial Sequence
  Oligonucleotide primer for the detection of SNP TSC0053187
atatagttttta

SEQ ID NO: 362369 - DNA, 12 bp, Artificial Sequence
  Oligonucleotide primer for the detection of SNP TSC0053187
acacaaccccca

SEQ ID NO: 362370 - DNA, 12 bp, Artificial Sequence
  Oligonucleotide primer for the detection of SNP TSC0053187
ggattgtgttgt

SEQ ID NO: 362371 - DNA, 12 bp, Artificial Sequence
  Oligonucleotide primer for the detection of SNP TSC0053187
ggattgtgtcgt

SEQ ID NO: 362372 - DNA, 12 bp, Artificial Sequence
  Oligonucleotide primer for the detection of SNP TSC0053188
atcatcctactc

SEQ ID NO: 362373 - DNA, 12 bp, Artificial Sequence
  Oligonucleotide primer for the detection of SNP TSC0053188
atggaaggatga

SEQ ID NO: 362374 - DNA, 12 bp, Artificial Sequence
  Oligonucleotide primer for the detection of SNP TSC0053189
tttcaaaaaacc

SEQ ID NO: 362375 - DNA, 12 bp, Artificial Sequence
  Oligonucleotide primer for the detection of SNP TSC0053190
aaatttcaaaat

SEQ ID NO: 362376 - DNA, 12 bp, Artificial Sequence
  Oligonucleotide primer for the detection of SNP TSC0053190
tatttaagtttg

SEQ ID NO: 362377 - DNA, 12 bp, Artificial Sequence
  Oligonucleotide primer for the detection of SNP TSC0053191
cttcattataca

SEQ ID NO: 362378 - DNA, 12 bp, Artificial Sequence
  Oligonucleotide primer for the detection of SNP TSC0053191
aaagttatatat

SEQ ID NO: 362379 - DNA, 12 bp, Artificial Sequence
  Oligonucleotide primer for the detection of SNP TSC0053191
attttattgtat

SEQ ID NO: 362380 - DNA, 12 bp, Artificial Sequence
  Oligonucleotide primer for the detection of SNP TSC0053193
attacctaaata

SEQ ID NO: 362381 - DNA, 12 bp, Artificial Sequence
  Oligonucleotide primer for the detection of SNP TSC0053194
attaacccttta

SEQ ID NO: 362382 - DNA, 12 bp, Artificial Sequence
  Oligonucleotide primer for the detection of SNP TSC0053194
aaaatgaaattt

SEQ ID NO: 362383 - DNA, 12 bp, Artificial Sequence
  Oligonucleotide primer for the detection of SNP TSC0053195
tctttactatcc

SEQ ID NO: 362384 - DNA, 12 bp, Artificial Sequence
  Oligonucleotide primer for the detection of SNP TSC0053195
attttaaaaagt

SEQ ID NO: 362385 - DNA, 12 bp, Artificial Sequence
  Oligonucleotide primer for the detection of SNP TSC0053196
tatttaaatgga

SEQ ID NO: 362386 - DNA, 12 bp, Artificial Sequence
  Oligonucleotide primer for the detection of SNP TSC0053197
tcaaactctaaa

SEQ ID NO: 362387 - DNA, 12 bp, Artificial Sequence
  Oligonucleotide primer for the detection of SNP TSC0053197
gagtatatttta

SEQ ID NO: 362388 - DNA, 12 bp, Artificial Sequence
  Oligonucleotide primer for the detection of SNP TSC0053197
aatatattttaa

SEQ ID NO: 362389 - DNA, 12 bp, Artificial Sequence
  Oligonucleotide primer for the detection of SNP TSC0053198
aaatcacaactt

SEQ ID NO: 362390 - DNA, 12 bp, Artificial Sequence
  Oligonucleotide primer for the detection of SNP TSC0053198
tagaggattagg

SEQ ID NO: 362391 - DNA, 12 bp, Artificial Sequence
  Oligonucleotide primer for the detection of SNP TSC0053202
caatactttcac

SEQ ID NO: 362392 - DNA, 12 bp, Artificial Sequence
  Oligonucleotide primer for the detection of SNP TSC0053202
tttaaattttat

SEQ ID NO: 362393 - DNA, 12 bp, Artificial Sequence
  Oligonucleotide primer for the detection of SNP TSC0053202
tttcaaatttca

SEQ ID NO: 362394 - DNA, 12 bp, Artificial Sequence
  Oligonucleotide primer for the detection of SNP TSC0053202
taatgtttttac

SEQ ID NO: 362395 - DNA, 12 bp, Artificial Sequence
  Oligonucleotide primer for the detection of SNP TSC0053203
taaaaaactttt

SEQ ID NO: 362396 - DNA, 12 bp, Artificial Sequence
  Oligonucleotide primer for the detection of SNP TSC0053203
tttgttgttggt

SEQ ID NO: 362397 - DNA, 12 bp, Artificial Sequence
  Oligonucleotide primer for the detection of SNP TSC0053203
ttcgttgttggt

SEQ ID NO: 362398 - DNA, 12 bp, Artificial Sequence
  Oligonucleotide primer for the detection of SNP TSC0053203
ttcactattaat

SEQ ID NO: 362399 - DNA, 12 bp, Artificial Sequence
  Oligonucleotide primer for the detection of SNP TSC0053203
ttcgctattaat

SEQ ID NO: 362400 - DNA, 12 bp, Artificial Sequence
  Oligonucleotide primer for the detection of SNP TSC0053204
acaatactttca

SEQ ID NO: 362401 - DNA, 12 bp, Artificial Sequence
  Oligonucleotide primer for the detection of SNP TSC0053204
tcaaatttcata

SEQ ID NO: 362402 - DNA, 12 bp, Artificial Sequence
  Oligonucleotide primer for the detection of SNP TSC0053205
acctcacctaaa

SEQ ID NO: 362403 - DNA, 12 bp, Artificial Sequence
  Oligonucleotide primer for the detection of SNP TSC0053205
acctcgcctaaa

SEQ ID NO: 362404 - DNA, 12 bp, Artificial Sequence
  Oligonucleotide primer for the detection of SNP TSC0053205
aaaatcaatcta

SEQ ID NO: 362405 - DNA, 12 bp, Artificial Sequence
  Oligonucleotide primer for the detection of SNP TSC0053205
attttgtttgga

SEQ ID NO: 362406 - DNA, 12 bp, Artificial Sequence
  Oligonucleotide primer for the detection of SNP TSC0053205
atttcgtttgga

SEQ ID NO: 362407 - DNA, 12 bp, Artificial Sequence
  Oligonucleotide primer for the detection of SNP TSC0053206
atctccttttta

SEQ ID NO: 362408 - DNA, 12 bp, Artificial Sequence
  Oligonucleotide primer for the detection of SNP TSC0053206
gatatatagatt

SEQ ID NO: 362409 - DNA, 12 bp, Artificial Sequence
  Oligonucleotide primer for the detection of SNP TSC0053207
tattgaataggg

SEQ ID NO: 362410 - DNA, 12 bp, Artificial Sequence
  Oligonucleotide primer for the detection of SNP TSC0053208
actacgaaatcc

SEQ ID NO: 362411 - DNA, 12 bp, Artificial Sequence
  Oligonucleotide primer for the detection of SNP TSC0053208
ccactctcccta

SEQ ID NO: 362412 - DNA, 12 bp, Artificial Sequence
  Oligonucleotide primer for the detection of SNP TSC0053208
attatgaaattt

SEQ ID NO: 362413 - DNA, 12 bp, Artificial Sequence
  Oligonucleotide primer for the detection of SNP TSC0053208
attacgaaattt

SEQ ID NO: 362414 - DNA, 12 bp, Artificial Sequence
  Oligonucleotide primer for the detection of SNP TSC0053209
atatcaatcact

SEQ ID NO: 362415 - DNA, 12 bp, Artificial Sequence
  Oligonucleotide primer for the detection of SNP TSC0053209
tttggggttaag

SEQ ID NO: 362416 - DNA, 12 bp, Artificial Sequence
  Oligonucleotide primer for the detection of SNP TSC0053210
atgaaaatatta

SEQ ID NO: 362417 - DNA, 12 bp, Artificial Sequence
  Oligonucleotide primer for the detection of SNP TSC0053212
agatttggttta

SEQ ID NO: 362418 - DNA, 12 bp, Artificial Sequence
  Oligonucleotide primer for the detection of SNP TSC0053213
atatctctattt

SEQ ID NO: 362419 - DNA, 12 bp, Artificial Sequence
  Oligonucleotide primer for the detection of SNP TSC0053213
tgaaatagttta

SEQ ID NO: 362420 - DNA, 12 bp, Artificial Sequence
  Oligonucleotide primer for the detection of SNP TSC0053214
taccttaactta

SEQ ID NO: 362421 - DNA, 12 bp, Artificial Sequence
  Oligonucleotide primer for the detection of SNP TSC0053215
tatatttcccta

SEQ ID NO: 362422 - DNA, 12 bp, Artificial Sequence
  Oligonucleotide primer for the detection of SNP TSC0053215
tatgtgtagaat

SEQ ID NO: 362423 - DNA, 12 bp, Artificial Sequence
  Oligonucleotide primer for the detection of SNP TSC0053215
catatacaaaat

SEQ ID NO: 362424 - DNA, 12 bp, Artificial Sequence
  Oligonucleotide primer for the detection of SNP TSC0053216
atatcctccccc

SEQ ID NO: 362425 - DNA, 12 bp, Artificial Sequence
  Oligonucleotide primer for the detection of SNP TSC0053216
tagaggagagga

SEQ ID NO: 362426 - DNA, 12 bp, Artificial Sequence
  Oligonucleotide primer for the detection of SNP TSC0053217
attttctaaaac

SEQ ID NO: 362427 - DNA, 12 bp, Artificial Sequence
  Oligonucleotide primer for the detection of SNP TSC0053217
ggaggtagggtg

SEQ ID NO: 362428 - DNA, 12 bp, Artificial Sequence
  Oligonucleotide primer for the detection of SNP TSC0053217
ggaggtagggcg

SEQ ID NO: 362429 - DNA, 12 bp, Artificial Sequence
  Oligonucleotide primer for the detection of SNP TSC0053217
gttttttgaaat

SEQ ID NO: 362430 - DNA, 12 bp, Artificial Sequence
  Oligonucleotide primer for the detection of SNP TSC0053218
aacctttctaac

SEQ ID NO: 362431 - DNA, 12 bp, Artificial Sequence
  Oligonucleotide primer for the detection of SNP TSC0053218
tgtaggagtaaa

SEQ ID NO: 362432 - DNA, 12 bp, Artificial Sequence
  Oligonucleotide primer for the detection of SNP TSC0053219
tacttttcttac

SEQ ID NO: 362433 - DNA, 12 bp, Artificial Sequence
  Oligonucleotide primer for the detection of SNP TSC0053221
taacactcatac

SEQ ID NO: 362434 - DNA, 12 bp, Artificial Sequence
  Oligonucleotide primer for the detection of SNP TSC0053222
aatactatcttc

SEQ ID NO: 362435 - DNA, 12 bp, Artificial Sequence
  Oligonucleotide primer for the detection of SNP TSC0053224
tccatttttatc

SEQ ID NO: 362436 - DNA, 12 bp, Artificial Sequence
  Oligonucleotide primer for the detection of SNP TSC0053226
aaaacaacctat

SEQ ID NO: 362437 - DNA, 12 bp, Artificial Sequence
  Oligonucleotide primer for the detection of SNP TSC0053226
ggttggtttgtt

SEQ ID NO: 362438 - DNA, 12 bp, Artificial Sequence
  Oligonucleotide primer for the detection of SNP TSC0053226
taactaatctat

SEQ ID NO: 362439 - DNA, 12 bp, Artificial Sequence
  Oligonucleotide primer for the detection of SNP TSC0053227
caaacatctttc

SEQ ID NO: 362440 - DNA, 12 bp, Artificial Sequence
  Oligonucleotide primer for the detection of SNP TSC0053227
ggaaatagttta

SEQ ID NO: 362441 - DNA, 12 bp, Artificial Sequence
  Oligonucleotide primer for the detection of SNP TSC0053230
aattataactac

SEQ ID NO: 362442 - DNA, 12 bp, Artificial Sequence
  Oligonucleotide primer for the detection of SNP TSC0053230
tgatatagtaga

SEQ ID NO: 362443 - DNA, 12 bp, Artificial Sequence
  Oligonucleotide primer for the detection of SNP TSC0053231
ctataacctcat

SEQ ID NO: 362444 - DNA, 12 bp, Artificial Sequence
  Oligonucleotide primer for the detection of SNP TSC0053231
ttttaggtggtg

SEQ ID NO: 362445 - DNA, 12 bp, Artificial Sequence
  Oligonucleotide primer for the detection of SNP TSC0053232
tactcactaact

SEQ ID NO: 362446 - DNA, 12 bp, Artificial Sequence
  Oligonucleotide primer for the detection of SNP TSC0053233
caaacttatctt

SEQ ID NO: 362447 - DNA, 12 bp, Artificial Sequence
  Oligonucleotide primer for the detection of SNP TSC0053233
tttatttaggtg

SEQ ID NO: 362448 - DNA, 12 bp, Artificial Sequence
  Oligonucleotide primer for the detection of SNP TSC0053234
ataattactaac

SEQ ID NO: 362449 - DNA, 12 bp, Artificial Sequence
  Oligonucleotide primer for the detection of SNP TSC0053235
tataaggtggtg

SEQ ID NO: 362450 - DNA, 12 bp, Artificial Sequence
  Oligonucleotide primer for the detection of SNP TSC0053235
tataaggcggtg

SEQ ID NO: 362451 - DNA, 12 bp, Artificial Sequence
  Oligonucleotide primer for the detection of SNP TSC0053236
ataactctcccc

SEQ ID NO: 362452 - DNA, 12 bp, Artificial Sequence
  Oligonucleotide primer for the detection of SNP TSC0053237
taataaataact

SEQ ID NO: 362453 - DNA, 12 bp, Artificial Sequence
  Oligonucleotide primer for the detection of SNP TSC0053238
ttctaatcaaac

SEQ ID NO: 362454 - DNA, 12 bp, Artificial Sequence
  Oligonucleotide primer for the detection of SNP TSC0053238
gagagtagataa

SEQ ID NO: 362455 - DNA, 12 bp, Artificial Sequence
  Oligonucleotide primer for the detection of SNP TSC0053238
gaaaacaaataa

SEQ ID NO: 362456 - DNA, 12 bp, Artificial Sequence
  Oligonucleotide primer for the detection of SNP TSC0053239
caatacatacac

SEQ ID NO: 362457 - DNA, 12 bp, Artificial Sequence
  Oligonucleotide primer for the detection of SNP TSC0053239
caatacgtacac

SEQ ID NO: 362458 - DNA, 12 bp, Artificial Sequence
  Oligonucleotide primer for the detection of SNP TSC0053239
tgagggtttatg

SEQ ID NO: 362459 - DNA, 12 bp, Artificial Sequence
  Oligonucleotide primer for the detection of SNP TSC0053239
taaaaatctata

SEQ ID NO: 362460 - DNA, 12 bp, Artificial Sequence
  Oligonucleotide primer for the detection of SNP TSC0053239
taatatgtgtat

SEQ ID NO: 362461 - DNA, 12 bp, Artificial Sequence
  Oligonucleotide primer for the detection of SNP TSC0053239
taatacgtgtat

SEQ ID NO: 362462 - DNA, 12 bp, Artificial Sequence
  Oligonucleotide primer for the detection of SNP TSC0053241
aaattctccaca

SEQ ID NO: 362463 - DNA, 12 bp, Artificial Sequence
  Oligonucleotide primer for the detection of SNP TSC0053241
agtgttgattag

SEQ ID NO: 362464 - DNA, 12 bp, Artificial Sequence
  Oligonucleotide primer for the detection of SNP TSC0053241
aatattaattaa

SEQ ID NO: 362465 - DNA, 12 bp, Artificial Sequence
  Oligonucleotide primer for the detection of SNP TSC0053241
ggttttttatat

SEQ ID NO: 362466 - DNA, 12 bp, Artificial Sequence
  Oligonucleotide primer for the detection of SNP TSC0053246
aattctctatac

SEQ ID NO: 362467 - DNA, 12 bp, Artificial Sequence
  Oligonucleotide primer for the detection of SNP TSC0053246
tttatttttagg

SEQ ID NO: 362468 - DNA, 12 bp, Artificial Sequence
  Oligonucleotide primer for the detection of SNP TSC0053247
taataacatttc

SEQ ID NO: 362469 - DNA, 12 bp, Artificial Sequence
  Oligonucleotide primer for the detection of SNP TSC0053247
taaaattaaaga

SEQ ID NO: 362470 - DNA, 12 bp, Artificial Sequence
  Oligonucleotide primer for the detection of SNP TSC0053248
aaactaaattct

SEQ ID NO: 362471 - DNA, 12 bp, Artificial Sequence
  Oligonucleotide primer for the detection of SNP TSC0053248
tattaagtagta

SEQ ID NO: 362472 - DNA, 12 bp, Artificial Sequence
  Oligonucleotide primer for the detection of SNP TSC0053251
ggtggggaaatt

SEQ ID NO: 362473 - DNA, 12 bp, Artificial Sequence
  Oligonucleotide primer for the detection of SNP TSC0053252
ggatgtggattt

SEQ ID NO: 362474 - DNA, 12 bp, Artificial Sequence
  Oligonucleotide primer for the detection of SNP TSC0053252
ggacgtggattt

SEQ ID NO: 362475 - DNA, 12 bp, Artificial Sequence
  Oligonucleotide primer for the detection of SNP TSC0053252
aaaacataaatc

SEQ ID NO: 362476 - DNA, 12 bp, Artificial Sequence
  Oligonucleotide primer for the detection of SNP TSC0053252
aaaacgtaaatc

SEQ ID NO: 362477 - DNA, 12 bp, Artificial Sequence
  Oligonucleotide primer for the detection of SNP TSC0053252
tgattgtatgag

SEQ ID NO: 362478 - DNA, 12 bp, Artificial Sequence
  Oligonucleotide primer for the detection of SNP TSC0053253
ttttagtagata

SEQ ID NO: 362479 - DNA, 12 bp, Artificial Sequence
  Oligonucleotide primer for the detection of SNP TSC0053254
ctacaaattttt

SEQ ID NO: 362480 - DNA, 12 bp, Artificial Sequence
  Oligonucleotide primer for the detection of SNP TSC0053255
tggtgttttttt

SEQ ID NO: 362481 - DNA, 12 bp, Artificial Sequence
  Oligonucleotide primer for the detection of SNP TSC0053255
ctaatacccttc

SEQ ID NO: 362482 - DNA, 12 bp, Artificial Sequence
  Oligonucleotide primer for the detection of SNP TSC0053255
ttaaggaggagg

SEQ ID NO: 362483 - DNA, 12 bp, Artificial Sequence
  Oligonucleotide primer for the detection of SNP TSC0053257
cttttcaaccca

SEQ ID NO: 362484 - DNA, 12 bp, Artificial Sequence
  Oligonucleotide primer for the detection of SNP TSC0053257
cttttcaacccg

SEQ ID NO: 362485 - DNA, 12 bp, Artificial Sequence
  Oligonucleotide primer for the detection of SNP TSC0053257
aggagaatagat

SEQ ID NO: 362486 - DNA, 12 bp, Artificial Sequence
  Oligonucleotide primer for the detection of SNP TSC0053258
tctcttccctca

SEQ ID NO: 362487 - DNA, 12 bp, Artificial Sequence
  Oligonucleotide primer for the detection of SNP TSC0053258
tctcttccctcg

SEQ ID NO: 362488 - DNA, 12 bp, Artificial Sequence
  Oligonucleotide primer for the detection of SNP TSC0053258
aaagatattatt

SEQ ID NO: 362489 - DNA, 12 bp, Artificial Sequence
  Oligonucleotide primer for the detection of SNP TSC0053258
ataaaaacacca

SEQ ID NO: 362490 - DNA, 12 bp, Artificial Sequence
  Oligonucleotide primer for the detection of SNP TSC0053259
attctaccttta

SEQ ID NO: 362491 - DNA, 12 bp, Artificial Sequence
  Oligonucleotide primer for the detection of SNP TSC0053259
ggtgggtgtttt

SEQ ID NO: 362492 - DNA, 12 bp, Artificial Sequence
  Oligonucleotide primer for the detection of SNP TSC0053259
aataaatatctc

SEQ ID NO: 362493 - DNA, 12 bp, Artificial Sequence
  Oligonucleotide primer for the detection of SNP TSC0053260
acacaaaaatca

SEQ ID NO: 362494 - DNA, 12 bp, Artificial Sequence
  Oligonucleotide primer for the detection of SNP TSC0053260
gttttatagttt

SEQ ID NO: 362495 - DNA, 12 bp, Artificial Sequence
  Oligonucleotide primer for the detection of SNP TSC0053260
acctcacaaccc

SEQ ID NO: 362496 - DNA, 12 bp, Artificial Sequence
  Oligonucleotide primer for the detection of SNP TSC0053260
atatagagatta

SEQ ID NO: 362497 - DNA, 12 bp, Artificial Sequence
  Oligonucleotide primer for the detection of SNP TSC0053261
caaaaataatac

SEQ ID NO: 362498 - DNA, 12 bp, Artificial Sequence
  Oligonucleotide primer for the detection of SNP TSC0053261
cgaaaataatac

SEQ ID NO: 362499 - DNA, 12 bp, Artificial Sequence
  Oligonucleotide primer for the detection of SNP TSC0053261
tggaaatggtgt

SEQ ID NO: 362500 - DNA, 12 bp, Artificial Sequence
  Oligonucleotide primer for the detection of SNP TSC0053261
cggaaatggtgt

SEQ ID NO: 362501 - DNA, 12 bp, Artificial Sequence
  Oligonucleotide primer for the detection of SNP TSC0053262
acctcctaaaat

SEQ ID NO: 362502 - DNA, 12 bp, Artificial Sequence
  Oligonucleotide primer for the detection of SNP TSC0053263
aatacaaattca

SEQ ID NO: 362503 - DNA, 12 bp, Artificial Sequence
  Oligonucleotide primer for the detection of SNP TSC0053263
gttaattgagaa

SEQ ID NO: 362504 - DNA, 12 bp, Artificial Sequence
  Oligonucleotide primer for the detection of SNP TSC0053263
aatatagattta

SEQ ID NO: 362505 - DNA, 12 bp, Artificial Sequence
  Oligonucleotide primer for the detection of SNP TSC0053264
ttctaaaacttc

SEQ ID NO: 362506 - DNA, 12 bp, Artificial Sequence
  Oligonucleotide primer for the detection of SNP TSC0006608
taaataccaata

SEQ ID NO: 362507 - DNA, 12 bp, Artificial Sequence
  Oligonucleotide primer for the detection of SNP TSC0006608
tttgattggttt

SEQ ID NO: 362508 - DNA, 12 bp, Artificial Sequence
  Oligonucleotide primer for the detection of SNP TSC0053265
aacttaacatta

SEQ ID NO: 362509 - DNA, 12 bp, Artificial Sequence
  Oligonucleotide primer for the detection of SNP TSC0053265
tagtttggtatt

SEQ ID NO: 362510 - DNA, 12 bp, Artificial Sequence
  Oligonucleotide primer for the detection of SNP TSC0053271
aacaatacccat

SEQ ID NO: 362511 - DNA, 12 bp, Artificial Sequence
  Oligonucleotide primer for the detection of SNP TSC0053271
aagtttttagtg

SEQ ID NO: 362512 - DNA, 12 bp, Artificial Sequence
  Oligonucleotide primer for the detection of SNP TSC0053272
aaataaaattca

SEQ ID NO: 362513 - DNA, 12 bp, Artificial Sequence
  Oligonucleotide primer for the detection of SNP TSC0053272
aaataaaattcg

SEQ ID NO: 362514 - DNA, 12 bp, Artificial Sequence
  Oligonucleotide primer for the detection of SNP TSC0053272
ttttttgtagtc

SEQ ID NO: 362515 - DNA, 12 bp, Artificial Sequence
  Oligonucleotide primer for the detection of SNP TSC0053272
aacttcctacaa

SEQ ID NO: 362516 - DNA, 12 bp, Artificial Sequence
  Oligonucleotide primer for the detection of SNP TSC0053273
taaacctcaaac

SEQ ID NO: 362517 - DNA, 12 bp, Artificial Sequence
  Oligonucleotide primer for the detection of SNP TSC0053273
ttcttaaattta

SEQ ID NO: 362518 - DNA, 12 bp, Artificial Sequence
  Oligonucleotide primer for the detection of SNP TSC0053273
tgaattttaaat

SEQ ID NO: 362519 - DNA, 12 bp, Artificial Sequence
  Oligonucleotide primer for the detection of SNP TSC0053274
taaattaaaaac

SEQ ID NO: 362520 - DNA, 12 bp, Artificial Sequence
  Oligonucleotide primer for the detection of SNP TSC0053274
gatgagtaggga

SEQ ID NO: 362521 - DNA, 12 bp, Artificial Sequence
  Oligonucleotide primer for the detection of SNP TSC0053275
acaaaaaccgaa

SEQ ID NO: 362522 - DNA, 12 bp, Artificial Sequence
  Oligonucleotide primer for the detection of SNP TSC0053275
gtgaggatggat

SEQ ID NO: 362523 - DNA, 12 bp, Artificial Sequence
  Oligonucleotide primer for the detection of SNP TSC0053275
aagtaagaattg

SEQ ID NO: 362524 - DNA, 12 bp, Artificial Sequence
  Oligonucleotide primer for the detection of SNP TSC0053275
aagtaagaatcg

SEQ ID NO: 362525 - DNA, 12 bp, Artificial Sequence
  Oligonucleotide primer for the detection of SNP TSC0053276
tatctttccttt

SEQ ID NO: 362526 - DNA, 12 bp, Artificial Sequence
  Oligonucleotide primer for the detection of SNP TSC0053276
gaatatattggg

SEQ ID NO: 362527 - DNA, 12 bp, Artificial Sequence
  Oligonucleotide primer for the detection of SNP TSC0053278
ataaactaatat

SEQ ID NO: 362528 - DNA, 12 bp, Artificial Sequence
  Oligonucleotide primer for the detection of SNP TSC0053278
tataggtgaaaa

SEQ ID NO: 362529 - DNA, 12 bp, Artificial Sequence
  Oligonucleotide primer for the detection of SNP TSC0053279
tcctccctaaaa

SEQ ID NO: 362530 - DNA, 12 bp, Artificial Sequence
  Oligonucleotide primer for the detection of SNP TSC0053279
tttacggtgttt

SEQ ID NO: 362531 - DNA, 12 bp, Artificial Sequence
  Oligonucleotide primer for the detection of SNP TSC0053279
tttacaatactt

SEQ ID NO: 362532 - DNA, 12 bp, Artificial Sequence
  Oligonucleotide primer for the detection of SNP TSC0053279
tttacgatactt

SEQ ID NO: 362533 - DNA, 12 bp, Artificial Sequence
  Oligonucleotide primer for the detection of SNP TSC0053280
ataactaaaaat

SEQ ID NO: 362534 - DNA, 12 bp, Artificial Sequence
  Oligonucleotide primer for the detection of SNP TSC0053280
taaaaagtgtta

SEQ ID NO: 362535 - DNA, 12 bp, Artificial Sequence
  Oligonucleotide primer for the detection of SNP TSC0053281
ccaatatcaatt

SEQ ID NO: 362536 - DNA, 12 bp, Artificial Sequence
  Oligonucleotide primer for the detection of SNP TSC0053281
tatatgagtagg

SEQ ID NO: 362537 - DNA, 12 bp, Artificial Sequence
  Oligonucleotide primer for the detection of SNP TSC0053281
tatacgagtagg

SEQ ID NO: 362538 - DNA, 12 bp, Artificial Sequence
  Oligonucleotide primer for the detection of SNP TSC0053284
ctaaatataacc

SEQ ID NO: 362539 - DNA, 12 bp, Artificial Sequence
  Oligonucleotide primer for the detection of SNP TSC0053284
gagatattagaa

SEQ ID NO: 362540 - DNA, 12 bp, Artificial Sequence
  Oligonucleotide primer for the detection of SNP TSC0053285
ttaagtttaagt

SEQ ID NO: 362541 - DNA, 12 bp, Artificial Sequence
  Oligonucleotide primer for the detection of SNP TSC0053285
ccaaatttaaat

SEQ ID NO: 362542 - DNA, 12 bp, Artificial Sequence
  Oligonucleotide primer for the detection of SNP TSC0053285
ggaaatttagga

SEQ ID NO: 362543 - DNA, 12 bp, Artificial Sequence
  Oligonucleotide primer for the detection of SNP TSC0053287
tcttaaccttaa

SEQ ID NO: 362544 - DNA, 12 bp, Artificial Sequence
  Oligonucleotide primer for the detection of SNP TSC0053287
tttgggaaaagt

SEQ ID NO: 362545 - DNA, 12 bp, Artificial Sequence
  Oligonucleotide primer for the detection of SNP TSC0053287
tttggttttaat

SEQ ID NO: 362546 - DNA, 12 bp, Artificial Sequence
  Oligonucleotide primer for the detection of SNP TSC0053288
acacttcattta

SEQ ID NO: 362547 - DNA, 12 bp, Artificial Sequence
  Oligonucleotide primer for the detection of SNP TSC0053288
acacttcgttta

SEQ ID NO: 362548 - DNA, 12 bp, Artificial Sequence
  Oligonucleotide primer for the detection of SNP TSC0053288
tgatataataaa

SEQ ID NO: 362549 - DNA, 12 bp, Artificial Sequence
  Oligonucleotide primer for the detection of SNP TSC0053288
taacataataaa

SEQ ID NO: 362550 - DNA, 12 bp, Artificial Sequence
  Oligonucleotide primer for the detection of SNP TSC0053289
ttataaatttac

SEQ ID NO: 362551 - DNA, 12 bp, Artificial Sequence
  Oligonucleotide primer for the detection of SNP TSC0053290
ctctcaaactat

SEQ ID NO: 362552 - DNA, 12 bp, Artificial Sequence
  Oligonucleotide primer for the detection of SNP TSC0053290
aaaaatatgata

SEQ ID NO: 362553 - DNA, 12 bp, Artificial Sequence
  Oligonucleotide primer for the detection of SNP TSC0053291
ataacactctat

SEQ ID NO: 362554 - DNA, 12 bp, Artificial Sequence
  Oligonucleotide primer for the detection of SNP TSC0053291
gttgaaataaga

SEQ ID NO: 362555 - DNA, 12 bp, Artificial Sequence
  Oligonucleotide primer for the detection of SNP TSC0053291
gtgatattttgt

SEQ ID NO: 362556 - DNA, 12 bp, Artificial Sequence
  Oligonucleotide primer for the detection of SNP TSC0005642
ccctatccctac

SEQ ID NO: 362557 - DNA, 12 bp, Artificial Sequence
  Oligonucleotide primer for the detection of SNP TSC0005642
atatggtaggtg

SEQ ID NO: 362558 - DNA, 12 bp, Artificial Sequence
  Oligonucleotide primer for the detection of SNP TSC0005642
atacggtaggtg

SEQ ID NO: 362559 - DNA, 12 bp, Artificial Sequence
  Oligonucleotide primer for the detection of SNP TSC0005502
atttgatttttc

SEQ ID NO: 362560 - DNA, 12 bp, Artificial Sequence
  Oligonucleotide primer for the detection of SNP TSC0005502
atctaactcccc

SEQ ID NO: 362561 - DNA, 12 bp, Artificial Sequence
  Oligonucleotide primer for the detection of SNP TSC0005502
tgtggggtgagg

SEQ ID NO: 362562 - DNA, 12 bp, Artificial Sequence
  Oligonucleotide primer for the detection of SNP TSC0005465
ctctaaattttc

SEQ ID NO: 362563 - DNA, 12 bp, Artificial Sequence
  Oligonucleotide primer for the detection of SNP TSC0005465
agtttgaagaat

SEQ ID NO: 362564 - DNA, 12 bp, Artificial Sequence
  Oligonucleotide primer for the detection of SNP TSC0005466
actatataaatt

SEQ ID NO: 362565 - DNA, 12 bp, Artificial Sequence
  Oligonucleotide primer for the detection of SNP TSC0005466
atgaggatttga

SEQ ID NO: 362566 - DNA, 12 bp, Artificial Sequence
  Oligonucleotide primer for the detection of SNP TSC0005467
aattataaacaa

SEQ ID NO: 362567 - DNA, 12 bp, Artificial Sequence
  Oligonucleotide primer for the detection of SNP TSC0005467
atagagtagaat

SEQ ID NO: 362568 - DNA, 12 bp, Artificial Sequence
  Oligonucleotide primer for the detection of SNP TSC0005467
gattataggtaa

SEQ ID NO: 362569 - DNA, 12 bp, Artificial Sequence
  Oligonucleotide primer for the detection of SNP TSC0053293
ttaggtgtagtg

SEQ ID NO: 362570 - DNA, 12 bp, Artificial Sequence
  Oligonucleotide primer for the detection of SNP TSC0053297
caaacctactac

SEQ ID NO: 362571 - DNA, 12 bp, Artificial Sequence
  Oligonucleotide primer for the detection of SNP TSC0053297
tacaacaccaca

SEQ ID NO: 362572 - DNA, 12 bp, Artificial Sequence
  Oligonucleotide primer for the detection of SNP TSC0053298
aattgtgatttt

SEQ ID NO: 362573 - DNA, 12 bp, Artificial Sequence
  Oligonucleotide primer for the detection of SNP TSC0053298
aactataactcc

SEQ ID NO: 362574 - DNA, 12 bp, Artificial Sequence
  Oligonucleotide primer for the detection of SNP TSC0053298
taaatgattatt

SEQ ID NO: 362575 - DNA, 12 bp, Artificial Sequence
  Oligonucleotide primer for the detection of SNP TSC0053299
accttattttac

SEQ ID NO: 362576 - DNA, 12 bp, Artificial Sequence
  Oligonucleotide primer for the detection of SNP TSC0053301
catctactctcc

SEQ ID NO: 362577 - DNA, 12 bp, Artificial Sequence
  Oligonucleotide primer for the detection of SNP TSC0053301
attgatatgagt

SEQ ID NO: 362578 - DNA, 12 bp, Artificial Sequence
  Oligonucleotide primer for the detection of SNP TSC0053301
ctaacataaaca

SEQ ID NO: 362579 - DNA, 12 bp, Artificial Sequence
  Oligonucleotide primer for the detection of SNP TSC0053302
catcaaccacaa

SEQ ID NO: 362580 - DNA, 12 bp, Artificial Sequence
  Oligonucleotide primer for the detection of SNP TSC0053302
gaagaatgtata

SEQ ID NO: 362581 - DNA, 12 bp, Artificial Sequence
  Oligonucleotide primer for the detection of SNP TSC0053303
actaattttttt

SEQ ID NO: 362582 - DNA, 12 bp, Artificial Sequence
  Oligonucleotide primer for the detection of SNP TSC0053304
aaaattaccatt

SEQ ID NO: 362583 - DNA, 12 bp, Artificial Sequence
  Oligonucleotide primer for the detection of SNP TSC0053304
aaaattaccgtt

SEQ ID NO: 362584 - DNA, 12 bp, Artificial Sequence
  Oligonucleotide primer for the detection of SNP TSC0053308
aaaggtagggtt

SEQ ID NO: 362585 - DNA, 12 bp, Artificial Sequence
  Oligonucleotide primer for the detection of SNP TSC0053308
gttaatatggta

SEQ ID NO: 362586 - DNA, 12 bp, Artificial Sequence
  Oligonucleotide primer for the detection of SNP TSC0053309
atcactatcttt

SEQ ID NO: 362587 - DNA, 12 bp, Artificial Sequence
  Oligonucleotide primer for the detection of SNP TSC0053309
tgaattagagtg

SEQ ID NO: 362588 - DNA, 12 bp, Artificial Sequence
  Oligonucleotide primer for the detection of SNP TSC0053310
actcattcattc

SEQ ID NO: 362589 - DNA, 12 bp, Artificial Sequence
  Oligonucleotide primer for the detection of SNP TSC0053310
tgaagggatgaa

SEQ ID NO: 362590 - DNA, 12 bp, Artificial Sequence
  Oligonucleotide primer for the detection of SNP TSC0053311
atggataagggg

SEQ ID NO: 362591 - DNA, 12 bp, Artificial Sequence
  Oligonucleotide primer for the detection of SNP TSC0053312
gtgattttgtat

SEQ ID NO: 362592 - DNA, 12 bp, Artificial Sequence
  Oligonucleotide primer for the detection of SNP TSC0053312
ataactctatac

SEQ ID NO: 362593 - DNA, 12 bp, Artificial Sequence
  Oligonucleotide primer for the detection of SNP TSC0053312
gttatttgtaga

SEQ ID NO: 362594 - DNA, 12 bp, Artificial Sequence
  Oligonucleotide primer for the detection of SNP TSC0053320
aagtttatagtt

SEQ ID NO: 362595 - DNA, 12 bp, Artificial Sequence
  Oligonucleotide primer for the detection of SNP TSC0053321
attctcaaaata

SEQ ID NO: 362596 - DNA, 12 bp, Artificial Sequence
  Oligonucleotide primer for the detection of SNP TSC0053321
attaaagaaatt

SEQ ID NO: 362597 - DNA, 12 bp, Artificial Sequence
  Oligonucleotide primer for the detection of SNP TSC0053323
ttttacaacaat

SEQ ID NO: 362598 - DNA, 12 bp, Artificial Sequence
  Oligonucleotide primer for the detection of SNP TSC0053323
aatggtttttaa

SEQ ID NO: 362599 - DNA, 12 bp, Artificial Sequence
  Oligonucleotide primer for the detection of SNP TSC0053324
attactaatcct

SEQ ID NO: 362600 - DNA, 12 bp, Artificial Sequence
  Oligonucleotide primer for the detection of SNP TSC0053325
tttttccctcct

SEQ ID NO: 362601 - DNA, 12 bp, Artificial Sequence
  Oligonucleotide primer for the detection of SNP TSC0053325
tagagaaaagaa

SEQ ID NO: 362602 - DNA, 12 bp, Artificial Sequence
  Oligonucleotide primer for the detection of SNP TSC0053326
taaattattatg

SEQ ID NO: 362603 - DNA, 12 bp, Artificial Sequence
  Oligonucleotide primer for the detection of SNP TSC0053327
aatttgtatatg

SEQ ID NO: 362604 - DNA, 12 bp, Artificial Sequence
  Oligonucleotide primer for the detection of SNP TSC0053328
aattattgagag

SEQ ID NO: 362605 - DNA, 12 bp, Artificial Sequence
  Oligonucleotide primer for the detection of SNP TSC0053329
atatccataaaa

SEQ ID NO: 362606 - DNA, 12 bp, Artificial Sequence
  Oligonucleotide primer for the detection of SNP TSC0053329
atatccgtaaaa

SEQ ID NO: 362607 - DNA, 12 bp, Artificial Sequence
  Oligonucleotide primer for the detection of SNP TSC0053329
tttgtgtttagt

SEQ ID NO: 362608 - DNA, 12 bp, Artificial Sequence
  Oligonucleotide primer for the detection of SNP TSC0053329
cttatactcaac

SEQ ID NO: 362609 - DNA, 12 bp, Artificial Sequence
  Oligonucleotide primer for the detection of SNP TSC0053329
atgtttgtgaga

SEQ ID NO: 362610 - DNA, 12 bp, Artificial Sequence
  Oligonucleotide primer for the detection of SNP TSC0053329
atgttcgtgaga

SEQ ID NO: 362611 - DNA, 12 bp, Artificial Sequence
  Oligonucleotide primer for the detection of SNP TSC0053330
caatcaatactt

SEQ ID NO: 362612 - DNA, 12 bp, Artificial Sequence
  Oligonucleotide primer for the detection of SNP TSC0053330
attaaggtaagg

SEQ ID NO: 362613 - DNA, 12 bp, Artificial Sequence
  Oligonucleotide primer for the detection of SNP TSC0053330
taattaatattt

SEQ ID NO: 362614 - DNA, 12 bp, Artificial Sequence
  Oligonucleotide primer for the detection of SNP TSC0053331
ttaaataaattc

SEQ ID NO: 362615 - DNA, 12 bp, Artificial Sequence
  Oligonucleotide primer for the detection of SNP TSC0053332
aaaattttgatg

SEQ ID NO: 362616 - DNA, 12 bp, Artificial Sequence
  Oligonucleotide primer for the detection of SNP TSC0053333
tttaatctaatc

SEQ ID NO: 362617 - DNA, 12 bp, Artificial Sequence
  Oligonucleotide primer for the detection of SNP TSC0053334
tgttttgaaatt

SEQ ID NO: 362618 - DNA, 12 bp, Artificial Sequence
  Oligonucleotide primer for the detection of SNP TSC0053334
actctaaaacca

SEQ ID NO: 362619 - DNA, 12 bp, Artificial Sequence
  Oligonucleotide primer for the detection of SNP TSC0053334
ggttgtggagag

SEQ ID NO: 362620 - DNA, 12 bp, Artificial Sequence
  Oligonucleotide primer for the detection of SNP TSC0008663
tacattatcaac

SEQ ID NO: 362621 - DNA, 12 bp, Artificial Sequence
  Oligonucleotide primer for the detection of SNP TSC0008663
gaattaaattaa

SEQ ID NO: 362622 - DNA, 12 bp, Artificial Sequence
  Oligonucleotide primer for the detection of SNP TSC0053337
ctttacaacatc

SEQ ID NO: 362623 - DNA, 12 bp, Artificial Sequence
  Oligonucleotide primer for the detection of SNP TSC0053337
ctataatattta

SEQ ID NO: 362624 - DNA, 12 bp, Artificial Sequence
  Oligonucleotide primer for the detection of SNP TSC0053337
ttttgtaatatt

SEQ ID NO: 362625 - DNA, 12 bp, Artificial Sequence
  Oligonucleotide primer for the detection of SNP TSC0053338
tctcataaattc

SEQ ID NO: 362626 - DNA, 12 bp, Artificial Sequence
  Oligonucleotide primer for the detection of SNP TSC0053338
gtagagattttt

SEQ ID NO: 362627 - DNA, 12 bp, Artificial Sequence
  Oligonucleotide primer for the detection of SNP TSC0053339
cttttacttttc

SEQ ID NO: 362628 - DNA, 12 bp, Artificial Sequence
  Oligonucleotide primer for the detection of SNP TSC0053339
gtttgttagata

SEQ ID NO: 362629 - DNA, 12 bp, Artificial Sequence
  Oligonucleotide primer for the detection of SNP TSC0053340
gtaggtagatga

SEQ ID NO: 362630 - DNA, 12 bp, Artificial Sequence
  Oligonucleotide primer for the detection of SNP TSC0053340
gtaggtagacga

SEQ ID NO: 362631 - DNA, 12 bp, Artificial Sequence
  Oligonucleotide primer for the detection of SNP TSC0053341
taactccgaaac

SEQ ID NO: 362632 - DNA, 12 bp, Artificial Sequence
  Oligonucleotide primer for the detection of SNP TSC0053341
ttgggtttttaa

SEQ ID NO: 362633 - DNA, 12 bp, Artificial Sequence
  Oligonucleotide primer for the detection of SNP TSC0053341
tcgggtttttaa

SEQ ID NO: 362634 - DNA, 12 bp, Artificial Sequence
  Oligonucleotide primer for the detection of SNP TSC0053342
attcaaaaatac

SEQ ID NO: 362635 - DNA, 12 bp, Artificial Sequence
  Oligonucleotide primer for the detection of SNP TSC0053342
aatgataagtaa

SEQ ID NO: 362636 - DNA, 12 bp, Artificial Sequence
  Oligonucleotide primer for the detection of SNP TSC0053343
ataacaaatcta

SEQ ID NO: 362637 - DNA, 12 bp, Artificial Sequence
  Oligonucleotide primer for the detection of SNP TSC0053343
aatttattatta

SEQ ID NO: 362638 - DNA, 12 bp, Artificial Sequence
  Oligonucleotide primer for the detection of SNP TSC0053343
aattcaccacta

SEQ ID NO: 362639 - DNA, 12 bp, Artificial Sequence
  Oligonucleotide primer for the detection of SNP TSC0053343
atgataggtttg

SEQ ID NO: 362640 - DNA, 12 bp, Artificial Sequence
  Oligonucleotide primer for the detection of SNP TSC0008134
ataggaagtagg

SEQ ID NO: 362641 - DNA, 12 bp, Artificial Sequence
  Oligonucleotide primer for the detection of SNP TSC0053345
ccctttaaccaa

SEQ ID NO: 362642 - DNA, 12 bp, Artificial Sequence
  Oligonucleotide primer for the detection of SNP TSC0053345
atgggggaaagg

SEQ ID NO: 362643 - DNA, 12 bp, Artificial Sequence
  Oligonucleotide primer for the detection of SNP TSC0053345
ttttttgattag

SEQ ID NO: 362644 - DNA, 12 bp, Artificial Sequence
  Oligonucleotide primer for the detection of SNP TSC0053346
tcaccatactat

SEQ ID NO: 362645 - DNA, 12 bp, Artificial Sequence
  Oligonucleotide primer for the detection of SNP TSC0053346
ttggggatttaa

SEQ ID NO: 362646 - DNA, 12 bp, Artificial Sequence
  Oligonucleotide primer for the detection of SNP TSC0053346
ttattatgttgt

SEQ ID NO: 362647 - DNA, 12 bp, Artificial Sequence
  Oligonucleotide primer for the detection of SNP TSC0053347
ttaaccaacact

SEQ ID NO: 362648 - DNA, 12 bp, Artificial Sequence
  Oligonucleotide primer for the detection of SNP TSC0053347
tttaaaatggta

SEQ ID NO: 362649 - DNA, 12 bp, Artificial Sequence
  Oligonucleotide primer for the detection of SNP TSC0053348
gttttattgtat

SEQ ID NO: 362650 - DNA, 12 bp, Artificial Sequence
  Oligonucleotide primer for the detection of SNP TSC0053348
atttcactatat

SEQ ID NO: 362651 - DNA, 12 bp, Artificial Sequence
  Oligonucleotide primer for the detection of SNP TSC0053350
ctaaacaatatc

SEQ ID NO: 362652 - DNA, 12 bp, Artificial Sequence
  Oligonucleotide primer for the detection of SNP TSC0053350
tgaattttgagg

SEQ ID NO: 362653 - DNA, 12 bp, Artificial Sequence
  Oligonucleotide primer for the detection of SNP TSC0053351
tcctcacctact

SEQ ID NO: 362654 - DNA, 12 bp, Artificial Sequence
  Oligonucleotide primer for the detection of SNP TSC0053351
tgtgggaggtga

SEQ ID NO: 362655 - DNA, 12 bp, Artificial Sequence
  Oligonucleotide primer for the detection of SNP TSC0053351
cgtgggaggtga

SEQ ID NO: 362656 - DNA, 12 bp, Artificial Sequence
  Oligonucleotide primer for the detection of SNP TSC0053351
tgcgggaggtga

SEQ ID NO: 362657 - DNA, 12 bp, Artificial Sequence
  Oligonucleotide primer for the detection of SNP TSC0053351
cgcgggaggtga

SEQ ID NO: 362658 - DNA, 12 bp, Artificial Sequence
  Oligonucleotide primer for the detection of SNP TSC0053352
aatgtatgttga

SEQ ID NO: 362659 - DNA, 12 bp, Artificial Sequence
  Oligonucleotide primer for the detection of SNP TSC0053352
aacgtatgttga

SEQ ID NO: 362660 - DNA, 12 bp, Artificial Sequence
  Oligonucleotide primer for the detection of SNP TSC0053353
tcctttaattca

SEQ ID NO: 362661 - DNA, 12 bp, Artificial Sequence
  Oligonucleotide primer for the detection of SNP TSC0053353
taaatatgattg

SEQ ID NO: 362662 - DNA, 12 bp, Artificial Sequence
  Oligonucleotide primer for the detection of SNP TSC0053354
tttcaaaacaat

SEQ ID NO: 362663 - DNA, 12 bp, Artificial Sequence
  Oligonucleotide primer for the detection of SNP TSC0053354
agaaaagagatg

SEQ ID NO: 362664 - DNA, 12 bp, Artificial Sequence
  Oligonucleotide primer for the detection of SNP TSC0053355
gaattgttattt

SEQ ID NO: 362665 - DNA, 12 bp, Artificial Sequence
  Oligonucleotide primer for the detection of SNP TSC0053355
tataaattacta

SEQ ID NO: 362666 - DNA, 12 bp, Artificial Sequence
  Oligonucleotide primer for the detection of SNP TSC0053362
tctttattacta

SEQ ID NO: 362667 - DNA, 12 bp, Artificial Sequence
  Oligonucleotide primer for the detection of SNP TSC0053362
ccaaattcataa

SEQ ID NO: 362668 - DNA, 12 bp, Artificial Sequence
  Oligonucleotide primer for the detection of SNP TSC0053363
aaaaaaccaact

SEQ ID NO: 362669 - DNA, 12 bp, Artificial Sequence
  Oligonucleotide primer for the detection of SNP TSC0053363
tgtttggttgtg

SEQ ID NO: 362670 - DNA, 12 bp, Artificial Sequence
  Oligonucleotide primer for the detection of SNP TSC0053365
tgtaatgttttt

SEQ ID NO: 362671 - DNA, 12 bp, Artificial Sequence
  Oligonucleotide primer for the detection of SNP TSC0053365
cgtaatgttttt

SEQ ID NO: 362672 - DNA, 12 bp, Artificial Sequence
  Oligonucleotide primer for the detection of SNP TSC0053365
tgtaacgttttt

SEQ ID NO: 362673 - DNA, 12 bp, Artificial Sequence
  Oligonucleotide primer for the detection of SNP TSC0053365
cgtaacgttttt

SEQ ID NO: 362674 - DNA, 12 bp, Artificial Sequence
  Oligonucleotide primer for the detection of SNP TSC0053365
cataacatcttt

SEQ ID NO: 362675 - DNA, 12 bp, Artificial Sequence
  Oligonucleotide primer for the detection of SNP TSC0053365
cataacgtcttt

SEQ ID NO: 362676 - DNA, 12 bp, Artificial Sequence
  Oligonukleotid-Primer
cgtaacatcttt

SEQ ID NO: 362677 - DNA, 12 bp, Artificial Sequence
  Oligonucleotide primer for the detection of SNP TSC0053365
cgtaacgtcttt

SEQ ID NO: 362678 - DNA, 12 bp, Artificial Sequence
  Oligonucleotide primer for the detection of SNP TSC0053365
gataatgtggta

SEQ ID NO: 362679 - DNA, 12 bp, Artificial Sequence
  Oligonucleotide primer for the detection of SNP TSC0053366
  unsure (7): unknown base
ccttatntaaaa

SEQ ID NO: 362680 - DNA, 12 bp, Artificial Sequence
  Oligonucleotide primer for the detection of SNP TSC0053366
ccatcacctcca

SEQ ID NO: 362681 - DNA, 12 bp, Artificial Sequence
  Oligonucleotide primer for the detection of SNP TSC0053366
  unsure (6): unknown base
tttatntagggt

SEQ ID NO: 362682 - DNA, 12 bp, Artificial Sequence
  Oligonucleotide primer for the detection of SNP TSC0053373
gaagagattata

SEQ ID NO: 362683 - DNA, 12 bp, Artificial Sequence
  Oligonucleotide primer for the detection of SNP TSC0053373
tgataaaatata

SEQ ID NO: 362684 - DNA, 12 bp, Artificial Sequence
  Oligonucleotide primer for the detection of SNP TSC0053375
taaaacattttc

SEQ ID NO: 362685 - DNA, 12 bp, Artificial Sequence
  Oligonucleotide primer for the detection of SNP TSC0053375
ttaattaatgaa

SEQ ID NO: 362686 - DNA, 12 bp, Artificial Sequence
  Oligonucleotide primer for the detection of SNP TSC0053378
ttccaccatccc

SEQ ID NO: 362687 - DNA, 12 bp, Artificial Sequence
  Oligonucleotide primer for the detection of SNP TSC0053378
gggtagagttgg

SEQ ID NO: 362688 - DNA, 12 bp, Artificial Sequence
  Oligonucleotide primer for the detection of SNP TSC0053379
caaacaataatt

SEQ ID NO: 362689 - DNA, 12 bp, Artificial Sequence
  Oligonucleotide primer for the detection of SNP TSC0053379
tattagattata

SEQ ID NO: 362690 - DNA, 12 bp, Artificial Sequence
  Oligonucleotide primer for the detection of SNP TSC0053384
agtatataggta

SEQ ID NO: 362691 - DNA, 12 bp, Artificial Sequence
  Oligonucleotide primer for the detection of SNP TSC0053385
ccacataaattt

SEQ ID NO: 362692 - DNA, 12 bp, Artificial Sequence
  Oligonucleotide primer for the detection of SNP TSC0053385
taagtagatttt

SEQ ID NO: 362693 - DNA, 12 bp, Artificial Sequence
  Oligonucleotide primer for the detection of SNP TSC0053386
aaaaatacttca

SEQ ID NO: 362694 - DNA, 12 bp, Artificial Sequence
  Oligonucleotide primer for the detection of SNP TSC0053386
taaggaattttt

SEQ ID NO: 362695 - DNA, 12 bp, Artificial Sequence
  Oligonucleotide primer for the detection of SNP TSC0053386
caaaaaacctct

SEQ ID NO: 362696 - DNA, 12 bp, Artificial Sequence
  Oligonucleotide primer for the detection of SNP TSC0053386
ggaagtgtttta

SEQ ID NO: 362697 - DNA, 12 bp, Artificial Sequence
  Oligonucleotide primer for the detection of SNP TSC0053387
aattcttaaaat

SEQ ID NO: 362698 - DNA, 12 bp, Artificial Sequence
  Oligonucleotide primer for the detection of SNP TSC0053387
aatgaatgtttg

SEQ ID NO: 362699 - DNA, 12 bp, Artificial Sequence
  Oligonucleotide primer for the detection of SNP TSC0053388
aattatcataac

SEQ ID NO: 362700 - DNA, 12 bp, Artificial Sequence
  Oligonucleotide primer for the detection of SNP TSC0053388
ggttgttatagt

SEQ ID NO: 362701 - DNA, 12 bp, Artificial Sequence
  Oligonucleotide primer for the detection of SNP TSC0053390
gataataatatg

SEQ ID NO: 362702 - DNA, 12 bp, Artificial Sequence
  Oligonucleotide primer for the detection of SNP TSC0053390
gataataatacg

SEQ ID NO: 362703 - DNA, 12 bp, Artificial Sequence
  Oligonucleotide primer for the detection of SNP TSC0053391
cccctaaccttc

SEQ ID NO: 362704 - DNA, 12 bp, Artificial Sequence
  Oligonucleotide primer for the detection of SNP TSC0053391
gtgttgttgtgg

SEQ ID NO: 362705 - DNA, 12 bp, Artificial Sequence
  Oligonucleotide primer for the detection of SNP TSC0053392
actaaataaata

SEQ ID NO: 362706 - DNA, 12 bp, Artificial Sequence
  Oligonucleotide primer for the detection of SNP TSC0053392
tatattggaggg

SEQ ID NO: 362707 - DNA, 12 bp, Artificial Sequence
  Oligonucleotide primer for the detection of SNP TSC0053392
cacactaaaaaa

SEQ ID NO: 362708 - DNA, 12 bp, Artificial Sequence
  Oligonucleotide primer for the detection of SNP TSC0053392
gttgagtgggtg

SEQ ID NO: 362709 - DNA, 12 bp, Artificial Sequence
  Oligonucleotide primer for the detection of SNP TSC0053393
aggaattttatg

SEQ ID NO: 362710 - DNA, 12 bp, Artificial Sequence
  Oligonucleotide primer for the detection of SNP TSC0053393
aaaactctataa

SEQ ID NO: 362711 - DNA, 12 bp, Artificial Sequence
  Oligonucleotide primer for the detection of SNP TSC0053393
aaaataattgtt

SEQ ID NO: 362712 - DNA, 12 bp, Artificial Sequence
  Oligonucleotide primer for the detection of SNP TSC0053394
tacaacatttac

SEQ ID NO: 362713 - DNA, 12 bp, Artificial Sequence
  Oligonucleotide primer for the detection of SNP TSC0053394
tacgacatttac

SEQ ID NO: 362714 - DNA, 12 bp, Artificial Sequence
  Oligonucleotide primer for the detection of SNP TSC0053394
aggatatagaag

SEQ ID NO: 362715 - DNA, 12 bp, Artificial Sequence
  Oligonucleotide primer for the detection of SNP TSC0053394
tacgatatttat

SEQ ID NO: 362716 - DNA, 12 bp, Artificial Sequence
  Oligonucleotide primer for the detection of SNP TSC0053395
taaatgttgtat

SEQ ID NO: 362717 - DNA, 12 bp, Artificial Sequence
  Oligonucleotide primer for the detection of SNP TSC0053395
taaatgtcgtat

SEQ ID NO: 362718 - DNA, 12 bp, Artificial Sequence
  Oligonucleotide primer for the detection of SNP TSC0053395
taaatatcatat

SEQ ID NO: 362719 - DNA, 12 bp, Artificial Sequence
  Oligonucleotide primer for the detection of SNP TSC0053395
taaatatcgtat

SEQ ID NO: 362720 - DNA, 12 bp, Artificial Sequence
  Oligonucleotide primer for the detection of SNP TSC0053395
atgtttaaaagg

SEQ ID NO: 362721 - DNA, 12 bp, Artificial Sequence
  Oligonucleotide primer for the detection of SNP TSC0053396
taaaattcaatt

SEQ ID NO: 362722 - DNA, 12 bp, Artificial Sequence
  Oligonucleotide primer for the detection of SNP TSC0053397
aggtgatgttga

SEQ ID NO: 362723 - DNA, 12 bp, Artificial Sequence
  Oligonucleotide primer for the detection of SNP TSC0053397
aggcgatgttga

SEQ ID NO: 362724 - DNA, 12 bp, Artificial Sequence
  Oligonucleotide primer for the detection of SNP TSC0053398
tacaataaaaaa

SEQ ID NO: 362725 - DNA, 12 bp, Artificial Sequence
  Oligonucleotide primer for the detection of SNP TSC0053398
cttaaattaact

SEQ ID NO: 362726 - DNA, 12 bp, Artificial Sequence
  Oligonucleotide primer for the detection of SNP TSC0053398
tgtagtgaagaa

SEQ ID NO: 362727 - DNA, 12 bp, Artificial Sequence
  Oligonucleotide primer for the detection of SNP TSC0053402
tttatctttaaa

SEQ ID NO: 362728 - DNA, 12 bp, Artificial Sequence
  Oligonucleotide primer for the detection of SNP TSC0053403
ccactaaaccta

SEQ ID NO: 362729 - DNA, 12 bp, Artificial Sequence
  Oligonucleotide primer for the detection of SNP TSC0053403
tttatagttagg

SEQ ID NO: 362730 - DNA, 12 bp, Artificial Sequence
  Oligonucleotide primer for the detection of SNP TSC0053404
caaccccttctt

SEQ ID NO: 362731 - DNA, 12 bp, Artificial Sequence
  Oligonucleotide primer for the detection of SNP TSC0053404
ttagagagttta

SEQ ID NO: 362732 - DNA, 12 bp, Artificial Sequence
  Oligonucleotide primer for the detection of SNP TSC0053405
aatataaccact

SEQ ID NO: 362733 - DNA, 12 bp, Artificial Sequence
  Oligonucleotide primer for the detection of SNP TSC0053405
tgatgaggttgg

SEQ ID NO: 362734 - DNA, 12 bp, Artificial Sequence
  Oligonucleotide primer for the detection of SNP TSC0053406
tataatttaact

SEQ ID NO: 362735 - DNA, 12 bp, Artificial Sequence
  Oligonucleotide primer for the detection of SNP TSC0053409
tagggttattgg

SEQ ID NO: 362736 - DNA, 12 bp, Artificial Sequence
  Oligonucleotide primer for the detection of SNP TSC0053409
taaaatcactaa

SEQ ID NO: 362737 - DNA, 12 bp, Artificial Sequence
  Oligonucleotide primer for the detection of SNP TSC0053409
aaaattaaattt

SEQ ID NO: 362738 - DNA, 12 bp, Artificial Sequence
  Oligonucleotide primer for the detection of SNP TSC0053410
tcttaatttaaa

SEQ ID NO: 362739 - DNA, 12 bp, Artificial Sequence
  Oligonucleotide primer for the detection of SNP TSC0053410
gtagttggtgtt

SEQ ID NO: 362740 - DNA, 12 bp, Artificial Sequence
  Oligonucleotide primer for the detection of SNP TSC0053410
acaattaatact

SEQ ID NO: 362741 - DNA, 12 bp, Artificial Sequence
  Oligonucleotide primer for the detection of SNP TSC0053412
attaatcacaac

SEQ ID NO: 362742 - DNA, 12 bp, Artificial Sequence
  Oligonucleotide primer for the detection of SNP TSC0053412
ttttttttggta

SEQ ID NO: 362743 - DNA, 12 bp, Artificial Sequence
  Oligonucleotide primer for the detection of SNP TSC0053412
ctttccctaaca

SEQ ID NO: 362744 - DNA, 12 bp, Artificial Sequence
  Oligonucleotide primer for the detection of SNP TSC0053412
attggttatagt

SEQ ID NO: 362745 - DNA, 12 bp, Artificial Sequence
  Oligonucleotide primer for the detection of SNP TSC0053413
tatcaaaaattt

SEQ ID NO: 362746 - DNA, 12 bp, Artificial Sequence
  Oligonucleotide primer for the detection of SNP TSC0053413
gattaggaagtg

SEQ ID NO: 362747 - DNA, 12 bp, Artificial Sequence
  Oligonucleotide primer for the detection of SNP TSC0053413
tattagaggttt

SEQ ID NO: 362748 - DNA, 12 bp, Artificial Sequence
  Oligonucleotide primer for the detection of SNP TSC0053415
aaacttctacac

SEQ ID NO: 362749 - DNA, 12 bp, Artificial Sequence
  Oligonucleotide primer for the detection of SNP TSC0053419
taaatcctaaaa

SEQ ID NO: 362750 - DNA, 12 bp, Artificial Sequence
  Oligonucleotide primer for the detection of SNP TSC0053419
tcttaaccaccc

SEQ ID NO: 362751 - DNA, 12 bp, Artificial Sequence
  Oligonucleotide primer for the detection of SNP TSC0053419
taaattttgggg

SEQ ID NO: 362752 - DNA, 12 bp, Artificial Sequence
  Oligonucleotide primer for the detection of SNP TSC0053422
aaaacacaaact

SEQ ID NO: 362753 - DNA, 12 bp, Artificial Sequence
  Oligonucleotide primer for the detection of SNP TSC0053422
tattttagaatt

SEQ ID NO: 362754 - DNA, 12 bp, Artificial Sequence
  Oligonucleotide primer for the detection of SNP TSC0053422
tttatctcaaaa

SEQ ID NO: 362755 - DNA, 12 bp, Artificial Sequence
  Oligonucleotide primer for the detection of SNP TSC0053422
agagtataaatt

SEQ ID NO: 362756 - DNA, 12 bp, Artificial Sequence
  Oligonucleotide primer for the detection of SNP TSC0053423
atattaaatcct

SEQ ID NO: 362757 - DNA, 12 bp, Artificial Sequence
  Oligonucleotide primer for the detection of SNP TSC0053425
tctaacttcaaa

SEQ ID NO: 362758 - DNA, 12 bp, Artificial Sequence
  Oligonucleotide primer for the detection of SNP TSC0053425
aagagatattgg

SEQ ID NO: 362759 - DNA, 12 bp, Artificial Sequence
  Oligonucleotide primer for the detection of SNP TSC0053426
aatcaatacccc

SEQ ID NO: 362760 - DNA, 12 bp, Artificial Sequence
  Oligonucleotide primer for the detection of SNP TSC0005280
taagtttaggaa

SEQ ID NO: 362761 - DNA, 12 bp, Artificial Sequence
  Oligonucleotide primer for the detection of SNP TSC0005280
taaacccaaaaa

SEQ ID NO: 362762 - DNA, 12 bp, Artificial Sequence
  Oligonucleotide primer for the detection of SNP TSC0005128
caccaactaaat

SEQ ID NO: 362763 - DNA, 12 bp, Artificial Sequence
  Oligonucleotide primer for the detection of SNP TSC0005128
gtatttttggta

SEQ ID NO: 362764 - DNA, 12 bp, Artificial Sequence
  Oligonucleotide primer for the detection of SNP TSC0053431
taatattaactc

SEQ ID NO: 362765 - DNA, 12 bp, Artificial Sequence
  Oligonucleotide primer for the detection of SNP TSC0053431
tttaaattaatg

SEQ ID NO: 362766 - DNA, 12 bp, Artificial Sequence
  Oligonucleotide primer for the detection of SNP TSC0053433
cttatcatctca

SEQ ID NO: 362767 - DNA, 12 bp, Artificial Sequence
  Oligonucleotide primer for the detection of SNP TSC0053433
tattgggaggtt

SEQ ID NO: 362768 - DNA, 12 bp, Artificial Sequence
  Oligonucleotide primer for the detection of SNP TSC0053437
aaccccaattca

SEQ ID NO: 362769 - DNA, 12 bp, Artificial Sequence
  Oligonucleotide primer for the detection of SNP TSC0053437
aacttcatctca

SEQ ID NO: 362770 - DNA, 12 bp, Artificial Sequence
  Oligonucleotide primer for the detection of SNP TSC0053439
tattcttcaact

SEQ ID NO: 362771 - DNA, 12 bp, Artificial Sequence
  Oligonucleotide primer for the detection of SNP TSC0053439
taaggtatatag

SEQ ID NO: 362772 - DNA, 12 bp, Artificial Sequence
  Oligonucleotide primer for the detection of SNP TSC0053440
cttccaaaaaac

SEQ ID NO: 362773 - DNA, 12 bp, Artificial Sequence
  Oligonucleotide primer for the detection of SNP TSC0053440
tataaagatttt

SEQ ID NO: 362774 - DNA, 12 bp, Artificial Sequence
  Oligonucleotide primer for the detection of SNP TSC0053440
ttcccataaaaa

SEQ ID NO: 362775 - DNA, 12 bp, Artificial Sequence
  Oligonucleotide primer for the detection of SNP TSC0053441
acataaccaaaa

SEQ ID NO: 362776 - DNA, 12 bp, Artificial Sequence
  Oligonucleotide primer for the detection of SNP TSC0053441
caaacctcttta

SEQ ID NO: 362777 - DNA, 12 bp, Artificial Sequence
  Oligonucleotide primer for the detection of SNP TSC0053441
tatagtataatt

SEQ ID NO: 362778 - DNA, 12 bp, Artificial Sequence
  Oligonucleotide primer for the detection of SNP TSC0053442
cccaacaattta

SEQ ID NO: 362779 - DNA, 12 bp, Artificial Sequence
  Oligonucleotide primer for the detection of SNP TSC0053443
ccatccacatcc

SEQ ID NO: 362780 - DNA, 12 bp, Artificial Sequence
  Oligonucleotide primer for the detection of SNP TSC0053443
tagaattttttc

SEQ ID NO: 362781 - DNA, 12 bp, Artificial Sequence
  Oligonucleotide primer for the detection of SNP TSC0053443
caaaacctctcc

SEQ ID NO: 362782 - DNA, 12 bp, Artificial Sequence
  Oligonucleotide primer for the detection of SNP TSC0053443
ttatttatattt

SEQ ID NO: 362783 - DNA, 12 bp, Artificial Sequence
  Oligonucleotide primer for the detection of SNP TSC0053443
ttatttatattc

SEQ ID NO: 362784 - DNA, 12 bp, Artificial Sequence
  Oligonucleotide primer for the detection of SNP TSC0053447
atttacaaaaaa

SEQ ID NO: 362785 - DNA, 12 bp, Artificial Sequence
  Oligonucleotide primer for the detection of SNP TSC0053447
ctccacatttaa

SEQ ID NO: 362786 - DNA, 12 bp, Artificial Sequence
  Oligonucleotide primer for the detection of SNP TSC0053448
acattaaatata

SEQ ID NO: 362787 - DNA, 12 bp, Artificial Sequence
  Oligonucleotide primer for the detection of SNP TSC0053448
aaataagtatgt

SEQ ID NO: 362788 - DNA, 12 bp, Artificial Sequence
  Oligonucleotide primer for the detection of SNP TSC0053448
tgtattgaatgt

SEQ ID NO: 362789 - DNA, 12 bp, Artificial Sequence
  Oligonucleotide primer for the detection of SNP TSC0053449
aacgcactacaa

SEQ ID NO: 362790 - DNA, 12 bp, Artificial Sequence
  Oligonucleotide primer for the detection of SNP TSC0053449
tgtttagatata

SEQ ID NO: 362791 - DNA, 12 bp, Artificial Sequence
  Oligonucleotide primer for the detection of SNP TSC0053449
tacttaaacaca

SEQ ID NO: 362792 - DNA, 12 bp, Artificial Sequence
  Oligonucleotide primer for the detection of SNP TSC0053449
ggtgtattgtaa

SEQ ID NO: 362793 - DNA, 12 bp, Artificial Sequence
  Oligonucleotide primer for the detection of SNP TSC0053449
ggcgtattgtaa

SEQ ID NO: 362794 - DNA, 12 bp, Artificial Sequence
  Oligonucleotide primer for the detection of SNP TSC0053451
acaacaaccaac

SEQ ID NO: 362795 - DNA, 12 bp, Artificial Sequence
  Oligonucleotide primer for the detection of SNP TSC0053451
acgacaaccaac

SEQ ID NO: 362796 - DNA, 12 bp, Artificial Sequence
  Oligonucleotide primer for the detection of SNP TSC0053451
ttggttagatta

SEQ ID NO: 362797 - DNA, 12 bp, Artificial Sequence
  Oligonucleotide primer for the detection of SNP TSC0053451
tcggttagatta

SEQ ID NO: 362798 - DNA, 12 bp, Artificial Sequence
  Oligonucleotide primer for the detection of SNP TSC0053452
acttaccaaatc

SEQ ID NO: 362799 - DNA, 12 bp, Artificial Sequence
  Oligonucleotide primer for the detection of SNP TSC0053452
gcttaccaaatc

SEQ ID NO: 362800 - DNA, 12 bp, Artificial Sequence
  Oligonucleotide primer for the detection of SNP TSC0053452
ttgggttatttg

SEQ ID NO: 362801 - DNA, 12 bp, Artificial Sequence
  Oligonucleotide primer for the detection of SNP TSC0053452
ctaaaccactta

SEQ ID NO: 362802 - DNA, 12 bp, Artificial Sequence
  Oligonucleotide primer for the detection of SNP TSC0053452
gtttgttaaatt

SEQ ID NO: 362803 - DNA, 12 bp, Artificial Sequence
  Oligonucleotide primer for the detection of SNP TSC0053453
aaaaaatctata

SEQ ID NO: 362804 - DNA, 12 bp, Artificial Sequence
  Oligonucleotide primer for the detection of SNP TSC0053453
gtagatgtattt

SEQ ID NO: 362805 - DNA, 12 bp, Artificial Sequence
  Oligonucleotide primer for the detection of SNP TSC0053453
acaaatacattc

SEQ ID NO: 362806 - DNA, 12 bp, Artificial Sequence
  Oligonucleotide primer for the detection of SNP TSC0053453
gagaggtttgta

SEQ ID NO: 362807 - DNA, 12 bp, Artificial Sequence
  Oligonucleotide primer for the detection of SNP TSC0053455
aaaattccataa

SEQ ID NO: 362808 - DNA, 12 bp, Artificial Sequence
  Oligonucleotide primer for the detection of SNP TSC0053455
aagattttatga

SEQ ID NO: 362809 - DNA, 12 bp, Artificial Sequence
  Oligonucleotide primer for the detection of SNP TSC0053460
aaacattttaac

SEQ ID NO: 362810 - DNA, 12 bp, Artificial Sequence
  Oligonucleotide primer for the detection of SNP TSC0053460
tgtggtttgggg

SEQ ID NO: 362811 - DNA, 12 bp, Artificial Sequence
  Oligonucleotide primer for the detection of SNP TSC0053460
tgcggtttgggg

SEQ ID NO: 362812 - DNA, 12 bp, Artificial Sequence
  Oligonucleotide primer for the detection of SNP TSC0053461
tccccaaatctc

SEQ ID NO: 362813 - DNA, 12 bp, Artificial Sequence
  Oligonucleotide primer for the detection of SNP TSC0053461
aaattgaaattt

SEQ ID NO: 362814 - DNA, 12 bp, Artificial Sequence
  Oligonucleotide primer for the detection of SNP TSC0053462
tattgtgtaaaa

SEQ ID NO: 362815 - DNA, 12 bp, Artificial Sequence
  Oligonucleotide primer for the detection of SNP TSC0053462
tattgcgtaaaa

SEQ ID NO: 362816 - DNA, 12 bp, Artificial Sequence
  Oligonucleotide primer for the detection of SNP TSC0053462
tactacataaaa

SEQ ID NO: 362817 - DNA, 12 bp, Artificial Sequence
  Oligonucleotide primer for the detection of SNP TSC0053462
tactacgtaaaa

SEQ ID NO: 362818 - DNA, 12 bp, Artificial Sequence
  Oligonucleotide primer for the detection of SNP TSC0053464
attatatatttt

SEQ ID NO: 362819 - DNA, 12 bp, Artificial Sequence
  Oligonucleotide primer for the detection of SNP TSC0053464
cacatactttaa

SEQ ID NO: 362820 - DNA, 12 bp, Artificial Sequence
  Oligonucleotide primer for the detection of SNP TSC0053464
taggagttttta

SEQ ID NO: 362821 - DNA, 12 bp, Artificial Sequence
  Oligonucleotide primer for the detection of SNP TSC0053465
aaaaactactct

SEQ ID NO: 362822 - DNA, 12 bp, Artificial Sequence
  Oligonucleotide primer for the detection of SNP TSC0053465
ttatattattta

SEQ ID NO: 362823 - DNA, 12 bp, Artificial Sequence
  Oligonucleotide primer for the detection of SNP TSC0053466
tcacctatctct

SEQ ID NO: 362824 - DNA, 12 bp, Artificial Sequence
  Oligonucleotide primer for the detection of SNP TSC0053466
gataattatagg

SEQ ID NO: 362825 - DNA, 12 bp, Artificial Sequence
  Oligonucleotide primer for the detection of SNP TSC0053469
taaactaattac

SEQ ID NO: 362826 - DNA, 12 bp, Artificial Sequence
  Oligonucleotide primer for the detection of SNP TSC0053469
gataatttttta

SEQ ID NO: 362827 - DNA, 12 bp, Artificial Sequence
  Oligonucleotide primer for the detection of SNP TSC0053470
ccttatttccac

SEQ ID NO: 362828 - DNA, 12 bp, Artificial Sequence
  Oligonucleotide primer for the detection of SNP TSC0053470
aagtagattgag

SEQ ID NO: 362829 - DNA, 12 bp, Artificial Sequence
  Oligonucleotide primer for the detection of SNP TSC0053471
aatataattata

SEQ ID NO: 362830 - DNA, 12 bp, Artificial Sequence
  Oligonucleotide primer for the detection of SNP TSC0053471
taattattatgt

SEQ ID NO: 362831 - DNA, 12 bp, Artificial Sequence
  Oligonucleotide primer for the detection of SNP TSC0053471
ataattactata

SEQ ID NO: 362832 - DNA, 12 bp, Artificial Sequence
  Oligonucleotide primer for the detection of SNP TSC0053471
aaatatgattat

SEQ ID NO: 362833 - DNA, 12 bp, Artificial Sequence
  Oligonucleotide primer for the detection of SNP TSC0053472
acaaacaaaaat

SEQ ID NO: 362834 - DNA, 12 bp, Artificial Sequence
  Oligonucleotide primer for the detection of SNP TSC0053472
ggggtttgttga

SEQ ID NO: 362835 - DNA, 12 bp, Artificial Sequence
  Oligonucleotide primer for the detection of SNP TSC0053472
ggggttcgttga

SEQ ID NO: 362836 - DNA, 12 bp, Artificial Sequence
  Oligonucleotide primer for the detection of SNP TSC0053473
ccttaattaaac

SEQ ID NO: 362837 - DNA, 12 bp, Artificial Sequence
  Oligonucleotide primer for the detection of SNP TSC0053473
tgttgtttgggt

SEQ ID NO: 362838 - DNA, 12 bp, Artificial Sequence
  Oligonucleotide primer for the detection of SNP TSC0053473
tactatttaaat

SEQ ID NO: 362839 - DNA, 12 bp, Artificial Sequence
  Oligonucleotide primer for the detection of SNP TSC0053473
ttttggttgaat

SEQ ID NO: 362840 - DNA, 12 bp, Artificial Sequence
  Oligonucleotide primer for the detection of SNP TSC0053479
taaaatacaaac

SEQ ID NO: 362841 - DNA, 12 bp, Artificial Sequence
  Oligonucleotide primer for the detection of SNP TSC0053479
tgtgggagttgg

SEQ ID NO: 362842 - DNA, 12 bp, Artificial Sequence
  Oligonucleotide primer for the detection of SNP TSC0053479
tataaaaattaa

SEQ ID NO: 362843 - DNA, 12 bp, Artificial Sequence
  Oligonucleotide primer for the detection of SNP TSC0053479
taaaatgtagat

SEQ ID NO: 362844 - DNA, 12 bp, Artificial Sequence
  Oligonucleotide primer for the detection of SNP TSC0053480
tcaccctcccaa

SEQ ID NO: 362845 - DNA, 12 bp, Artificial Sequence
  Oligonucleotide primer for the detection of SNP TSC0053480
taagtagaaatt

SEQ ID NO: 362846 - DNA, 12 bp, Artificial Sequence
  Oligonucleotide primer for the detection of SNP TSC0053484
catactattcca

SEQ ID NO: 362847 - DNA, 12 bp, Artificial Sequence
  Oligonucleotide primer for the detection of SNP TSC0053484
ggtattattttt

SEQ ID NO: 362848 - DNA, 12 bp, Artificial Sequence
  Oligonucleotide primer for the detection of SNP TSC0053484
atatcatcttta

SEQ ID NO: 362849 - DNA, 12 bp, Artificial Sequence
  Oligonucleotide primer for the detection of SNP TSC0053485
ttctaaataatc

SEQ ID NO: 362850 - DNA, 12 bp, Artificial Sequence
  Oligonucleotide primer for the detection of SNP TSC0053485
tatgatttttag

SEQ ID NO: 362851 - DNA, 12 bp, Artificial Sequence
  Oligonucleotide primer for the detection of SNP TSC0053486
ttattttagtga

SEQ ID NO: 362852 - DNA, 12 bp, Artificial Sequence
  Oligonucleotide primer for the detection of SNP TSC0005179
caataaatcaaa

SEQ ID NO: 362853 - DNA, 12 bp, Artificial Sequence
  Oligonucleotide primer for the detection of SNP TSC0005179
taatgagttagg

SEQ ID NO: 362854 - DNA, 12 bp, Artificial Sequence
  Oligonucleotide primer for the detection of SNP TSC0053490
aatacctaccat

SEQ ID NO: 362855 - DNA, 12 bp, Artificial Sequence
  Oligonucleotide primer for the detection of SNP TSC0053490
tattgtttagaa

SEQ ID NO: 362856 - DNA, 12 bp, Artificial Sequence
  Oligonucleotide primer for the detection of SNP TSC0053491
ctttacaataat

SEQ ID NO: 362857 - DNA, 12 bp, Artificial Sequence
  Oligonucleotide primer for the detection of SNP TSC0053491
atttaagaaggg

SEQ ID NO: 362858 - DNA, 12 bp, Artificial Sequence
  Oligonucleotide primer for the detection of SNP TSC0053492
ttaatactataa

SEQ ID NO: 362859 - DNA, 12 bp, Artificial Sequence
  Oligonucleotide primer for the detection of SNP TSC0053492
aaatgtttaggt

SEQ ID NO: 362860 - DNA, 12 bp, Artificial Sequence
  Oligonucleotide primer for the detection of SNP TSC0053492
aaatacccaaac

SEQ ID NO: 362861 - DNA, 12 bp, Artificial Sequence
  Oligonucleotide primer for the detection of SNP TSC0053492
ttgatattgtgg

SEQ ID NO: 362862 - DNA, 12 bp, Artificial Sequence
  Oligonucleotide primer for the detection of SNP TSC0053494
aaattaaattcc

SEQ ID NO: 362863 - DNA, 12 bp, Artificial Sequence
  Oligonucleotide primer for the detection of SNP TSC0053494
ttaagtttagaa

SEQ ID NO: 362864 - DNA, 12 bp, Artificial Sequence
  Oligonucleotide primer for the detection of SNP TSC0053495
ccaaaaatatac

SEQ ID NO: 362865 - DNA, 12 bp, Artificial Sequence
  Oligonucleotide primer for the detection of SNP TSC0053495
attgtgtttgaa

SEQ ID NO: 362866 - DNA, 12 bp, Artificial Sequence
  Oligonucleotide primer for the detection of SNP TSC0053498
aagaggttttag

SEQ ID NO: 362867 - DNA, 12 bp, Artificial Sequence
  Oligonucleotide primer for the detection of SNP TSC0053499
atccccctaacc

SEQ ID NO: 362868 - DNA, 12 bp, Artificial Sequence
  Oligonucleotide primer for the detection of SNP TSC0053499
tcaaaaaactca

SEQ ID NO: 362869 - DNA, 12 bp, Artificial Sequence
  Oligonucleotide primer for the detection of SNP TSC0053500
ataatcaaacct

SEQ ID NO: 362870 - DNA, 12 bp, Artificial Sequence
  Oligonucleotide primer for the detection of SNP TSC0053502
ttttagtaggta

SEQ ID NO: 362871 - DNA, 12 bp, Artificial Sequence
  Oligonucleotide primer for the detection of SNP TSC0053502
tcctaacaaaca

SEQ ID NO: 362872 - DNA, 12 bp, Artificial Sequence
  Oligonucleotide primer for the detection of SNP TSC0053503
ttctacttcttt

SEQ ID NO: 362873 - DNA, 12 bp, Artificial Sequence
  Oligonucleotide primer for the detection of SNP TSC0053505
atcaaaaataac

SEQ ID NO: 362874 - DNA, 12 bp, Artificial Sequence
  Oligonucleotide primer for the detection of SNP TSC0053505
atgtttttggtt

SEQ ID NO: 362875 - DNA, 12 bp, Artificial Sequence
  Oligonucleotide primer for the detection of SNP TSC0053505
atgtttttggtc

SEQ ID NO: 362876 - DNA, 12 bp, Artificial Sequence
  Oligonucleotide primer for the detection of SNP TSC0053505
catattcctaat

SEQ ID NO: 362877 - DNA, 12 bp, Artificial Sequence
  Oligonucleotide primer for the detection of SNP TSC0053505
gttaaaggtggt

SEQ ID NO: 362878 - DNA, 12 bp, Artificial Sequence
  Oligonucleotide primer for the detection of SNP TSC0053506
taaggattaaaa

SEQ ID NO: 362879 - DNA, 12 bp, Artificial Sequence
  Oligonucleotide primer for the detection of SNP TSC0053507
tgataatttatt

SEQ ID NO: 362880 - DNA, 12 bp, Artificial Sequence
  Oligonucleotide primer for the detection of SNP TSC0053507
ataataatccac

SEQ ID NO: 362881 - DNA, 12 bp, Artificial Sequence
  Oligonucleotide primer for the detection of SNP TSC0010043
cttcctcaaact

SEQ ID NO: 362882 - DNA, 12 bp, Artificial Sequence
  Oligonucleotide primer for the detection of SNP TSC0053508
attaactaactc

SEQ ID NO: 362883 - DNA, 12 bp, Artificial Sequence
  Oligonucleotide primer for the detection of SNP TSC0053509
acaaccctcacc

SEQ ID NO: 362884 - DNA, 12 bp, Artificial Sequence
  Oligonucleotide primer for the detection of SNP TSC0053509
ttgttagttttg

SEQ ID NO: 362885 - DNA, 12 bp, Artificial Sequence
  Oligonucleotide primer for the detection of SNP TSC0053509
caactctaaaaa

SEQ ID NO: 362886 - DNA, 12 bp, Artificial Sequence
  Oligonucleotide primer for the detection of SNP TSC0053509
gtagtttttatc

SEQ ID NO: 362887 - DNA, 12 bp, Artificial Sequence
  Oligonucleotide primer for the detection of SNP TSC0053510
taccttataata

SEQ ID NO: 362888 - DNA, 12 bp, Artificial Sequence
  Oligonucleotide primer for the detection of SNP TSC0053510
taaggaatatat

SEQ ID NO: 362889 - DNA, 12 bp, Artificial Sequence
  Oligonucleotide primer for the detection of SNP TSC0010236
aataatacctcc

SEQ ID NO: 362890 - DNA, 12 bp, Artificial Sequence
  Oligonucleotide primer for the detection of SNP TSC0010236
acaaccctacca

SEQ ID NO: 362891 - DNA, 12 bp, Artificial Sequence
  Oligonucleotide primer for the detection of SNP TSC0010236
aatggtattttt

SEQ ID NO: 362892 - DNA, 12 bp, Artificial Sequence
  Oligonucleotide primer for the detection of SNP TSC0010236
aatggtattttc

SEQ ID NO: 362893 - DNA, 12 bp, Artificial Sequence
  Oligonucleotide primer for the detection of SNP TSC0053513
taaggttgattt

SEQ ID NO: 362894 - DNA, 12 bp, Artificial Sequence
  Oligonucleotide primer for the detection of SNP TSC0053515
caaattttcaat

SEQ ID NO: 362895 - DNA, 12 bp, Artificial Sequence
  Oligonucleotide primer for the detection of SNP TSC0053515
aagattgtttta

SEQ ID NO: 362896 - DNA, 12 bp, Artificial Sequence
  Oligonucleotide primer for the detection of SNP TSC0053518
caataaaaataa

SEQ ID NO: 362897 - DNA, 12 bp, Artificial Sequence
  Oligonucleotide primer for the detection of SNP TSC0053518
taatggaggtgg

SEQ ID NO: 362898 - DNA, 12 bp, Artificial Sequence
  Oligonucleotide primer for the detection of SNP TSC0053521
caacctctaccc

SEQ ID NO: 362899 - DNA, 12 bp, Artificial Sequence
  Oligonucleotide primer for the detection of SNP TSC0053522
ctaacaacaaat

SEQ ID NO: 362900 - DNA, 12 bp, Artificial Sequence
  Oligonucleotide primer for the detection of SNP TSC0053522
ctaacgacaaat

SEQ ID NO: 362901 - DNA, 12 bp, Artificial Sequence
  Oligonucleotide primer for the detection of SNP TSC0053522
cttccaaatata

SEQ ID NO: 362902 - DNA, 12 bp, Artificial Sequence
  Oligonucleotide primer for the detection of SNP TSC0053522
ttgatggtaagt

SEQ ID NO: 362903 - DNA, 12 bp, Artificial Sequence
  Oligonucleotide primer for the detection of SNP TSC0053522
ttgacggtaagt

SEQ ID NO: 362904 - DNA, 12 bp, Artificial Sequence
  Oligonucleotide primer for the detection of SNP TSC0053525
ctacaacaaaat

SEQ ID NO: 362905 - DNA, 12 bp, Artificial Sequence
  Oligonucleotide primer for the detection of SNP TSC0053525
ctacaacgaaat

SEQ ID NO: 362906 - DNA, 12 bp, Artificial Sequence
  Oligonucleotide primer for the detection of SNP TSC0053525
ttttttttgata

SEQ ID NO: 362907 - DNA, 12 bp, Artificial Sequence
  Oligonucleotide primer for the detection of SNP TSC0053525
tttcctttaaca

SEQ ID NO: 362908 - DNA, 12 bp, Artificial Sequence
  Oligonucleotide primer for the detection of SNP TSC0053525
ttgtaatggagt

SEQ ID NO: 362909 - DNA, 12 bp, Artificial Sequence
  Oligonucleotide primer for the detection of SNP TSC0053525
ttgtaacggagt

SEQ ID NO: 362910 - DNA, 12 bp, Artificial Sequence
  Oligonucleotide primer for the detection of SNP TSC0053526
cataaatcctta

SEQ ID NO: 362911 - DNA, 12 bp, Artificial Sequence
  Oligonucleotide primer for the detection of SNP TSC0053526
actcacctaaca

SEQ ID NO: 362912 - DNA, 12 bp, Artificial Sequence
  Oligonucleotide primer for the detection of SNP TSC0010658
caattccatatc

SEQ ID NO: 362913 - DNA, 12 bp, Artificial Sequence
  Oligonucleotide primer for the detection of SNP TSC0010658
ttttggaattat

SEQ ID NO: 362914 - DNA, 12 bp, Artificial Sequence
  Oligonucleotide primer for the detection of SNP TSC0010658
ttttggaattac

SEQ ID NO: 362915 - DNA, 12 bp, Artificial Sequence
  Oligonucleotide primer for the detection of SNP TSC0010658
ctttaaaactac

SEQ ID NO: 362916 - DNA, 12 bp, Artificial Sequence
  Oligonucleotide primer for the detection of SNP TSC0010658
aattttatgttt

SEQ ID NO: 362917 - DNA, 12 bp, Artificial Sequence
  Oligonukleotid-Primer
aaatttataaat

SEQ ID NO: 362918 - DNA, 12 bp, Artificial Sequence
  Oligonucleotide primer for the detection of SNP TSC0053529
atagataaataa

SEQ ID NO: 362919 - DNA, 12 bp, Artificial Sequence
  Oligonucleotide primer for the detection of SNP TSC0053529
aggtttgtgggt

SEQ ID NO: 362920 - DNA, 12 bp, Artificial Sequence
  Oligonucleotide primer for the detection of SNP TSC0053531
aggttgaggtgg

SEQ ID NO: 362921 - DNA, 12 bp, Artificial Sequence
  Oligonucleotide primer for the detection of SNP TSC0053531
aggtcgaggtgg

SEQ ID NO: 362922 - DNA, 12 bp, Artificial Sequence
  Oligonucleotide primer for the detection of SNP TSC0053531
aggttgaggcgg

SEQ ID NO: 362923 - DNA, 12 bp, Artificial Sequence
  Oligonucleotide primer for the detection of SNP TSC0053531
aggtcgaggcgg

SEQ ID NO: 362924 - DNA, 12 bp, Artificial Sequence
  Oligonucleotide primer for the detection of SNP TSC0053532
taccccatccat

SEQ ID NO: 362925 - DNA, 12 bp, Artificial Sequence
  Oligonucleotide primer for the detection of SNP TSC0053532
tttgtggaaata

SEQ ID NO: 362926 - DNA, 12 bp, Artificial Sequence
  Oligonucleotide primer for the detection of SNP TSC0053533
atcacaactcat

SEQ ID NO: 362927 - DNA, 12 bp, Artificial Sequence
  Oligonucleotide primer for the detection of SNP TSC0053533
atcacgactcat

SEQ ID NO: 362928 - DNA, 12 bp, Artificial Sequence
  Oligonucleotide primer for the detection of SNP TSC0053533
ataaaatggtaa

SEQ ID NO: 362929 - DNA, 12 bp, Artificial Sequence
  Oligonucleotide primer for the detection of SNP TSC0053533
ataaaacggtaa

SEQ ID NO: 362930 - DNA, 12 bp, Artificial Sequence
  Oligonucleotide primer for the detection of SNP TSC0053534
tcttttaaacca

SEQ ID NO: 362931 - DNA, 12 bp, Artificial Sequence
  Oligonucleotide primer for the detection of SNP TSC0053534
tgatttttatat

SEQ ID NO: 362932 - DNA, 12 bp, Artificial Sequence
  Oligonucleotide primer for the detection of SNP TSC0053534
taacttccatat

SEQ ID NO: 362933 - DNA, 12 bp, Artificial Sequence
  Oligonucleotide primer for the detection of SNP TSC0053535
aactaccatatc

SEQ ID NO: 362934 - DNA, 12 bp, Artificial Sequence
  Oligonucleotide primer for the detection of SNP TSC0053535
ggagaaattagt

SEQ ID NO: 362935 - DNA, 12 bp, Artificial Sequence
  Oligonucleotide primer for the detection of SNP TSC0053539
aataaaaactta

SEQ ID NO: 362936 - DNA, 12 bp, Artificial Sequence
  Oligonucleotide primer for the detection of SNP TSC0053539
tttttctcaaac

SEQ ID NO: 362937 - DNA, 12 bp, Artificial Sequence
  Oligonucleotide primer for the detection of SNP TSC0053539
ggatggggattt

SEQ ID NO: 362938 - DNA, 12 bp, Artificial Sequence
  Oligonucleotide primer for the detection of SNP TSC0053540
aataaaatatta

SEQ ID NO: 362939 - DNA, 12 bp, Artificial Sequence
  Oligonucleotide primer for the detection of SNP TSC0053541
acaaaattcaac

SEQ ID NO: 362940 - DNA, 12 bp, Artificial Sequence
  Oligonucleotide primer for the detection of SNP TSC0053541
gataatttaata

SEQ ID NO: 362941 - DNA, 12 bp, Artificial Sequence
  Oligonucleotide primer for the detection of SNP TSC0053542
aaataatctaat

SEQ ID NO: 362942 - DNA, 12 bp, Artificial Sequence
  Oligonucleotide primer for the detection of SNP TSC0053542
aaaatttaataa

SEQ ID NO: 362943 - DNA, 12 bp, Artificial Sequence
  Oligonucleotide primer for the detection of SNP TSC0053544
taaacttttcat

SEQ ID NO: 362944 - DNA, 12 bp, Artificial Sequence
  Oligonucleotide primer for the detection of SNP TSC0053544
gtatggtatggg

SEQ ID NO: 362945 - DNA, 12 bp, Artificial Sequence
  Oligonucleotide primer for the detection of SNP TSC0053545
aaaatctcaaat

SEQ ID NO: 362946 - DNA, 12 bp, Artificial Sequence
  Oligonucleotide primer for the detection of SNP TSC0053545
aagttagattaa

SEQ ID NO: 362947 - DNA, 12 bp, Artificial Sequence
  Oligonucleotide primer for the detection of SNP TSC0053546
gggttgttttta

SEQ ID NO: 362948 - DNA, 12 bp, Artificial Sequence
  Oligonucleotide primer for the detection of SNP TSC0053546
aaattatttcca

SEQ ID NO: 362949 - DNA, 12 bp, Artificial Sequence
  Oligonucleotide primer for the detection of SNP TSC0053546
tatttaaagggt

SEQ ID NO: 362950 - DNA, 12 bp, Artificial Sequence
  Oligonucleotide primer for the detection of SNP TSC0053547
taccccttctat

SEQ ID NO: 362951 - DNA, 12 bp, Artificial Sequence
  Oligonucleotide primer for the detection of SNP TSC0053547
ccattcataata

SEQ ID NO: 362952 - DNA, 12 bp, Artificial Sequence
  Oligonucleotide primer for the detection of SNP TSC0053551
ttgaaagaaatt

SEQ ID NO: 362953 - DNA, 12 bp, Artificial Sequence
  Oligonucleotide primer for the detection of SNP TSC0053551
ttggggtaagat

SEQ ID NO: 362954 - DNA, 12 bp, Artificial Sequence
  Oligonucleotide primer for the detection of SNP TSC0053552
tgtttgtatatg

SEQ ID NO: 362955 - DNA, 12 bp, Artificial Sequence
  Oligonucleotide primer for the detection of SNP TSC0053554
acatatttcttt

SEQ ID NO: 362956 - DNA, 12 bp, Artificial Sequence
  Oligonucleotide primer for the detection of SNP TSC0053555
tataaagaaata

SEQ ID NO: 362957 - DNA, 12 bp, Artificial Sequence
  Oligonucleotide primer for the detection of SNP TSC0053559
ctttctcaacaa

SEQ ID NO: 362958 - DNA, 12 bp, Artificial Sequence
  Oligonucleotide primer for the detection of SNP TSC0053559
tagtagatatgt

SEQ ID NO: 362959 - DNA, 12 bp, Artificial Sequence
  Oligonucleotide primer for the detection of SNP TSC0053559
taataaacatac

SEQ ID NO: 362960 - DNA, 12 bp, Artificial Sequence
  Oligonucleotide primer for the detection of SNP TSC0053559
tttttttaataa

SEQ ID NO: 362961 - DNA, 12 bp, Artificial Sequence
  Oligonucleotide primer for the detection of SNP TSC0053560
attataatacac

SEQ ID NO: 362962 - DNA, 12 bp, Artificial Sequence
  Oligonucleotide primer for the detection of SNP TSC0053560
ttggtggttatg

SEQ ID NO: 362963 - DNA, 12 bp, Artificial Sequence
  Oligonucleotide primer for the detection of SNP TSC0000121
tggagtttgtag

SEQ ID NO: 362964 - DNA, 12 bp, Artificial Sequence
  Oligonucleotide primer for the detection of SNP TSC0053561
ttttctacattt

SEQ ID NO: 362965 - DNA, 12 bp, Artificial Sequence
  Oligonucleotide primer for the detection of SNP TSC0053562
tgtgttatttaa

SEQ ID NO: 362966 - DNA, 12 bp, Artificial Sequence
  Oligonucleotide primer for the detection of SNP TSC0053563
cccaacaataac

SEQ ID NO: 362967 - DNA, 12 bp, Artificial Sequence
  Oligonucleotide primer for the detection of SNP TSC0053563
gtatttttagtg

SEQ ID NO: 362968 - DNA, 12 bp, Artificial Sequence
  Oligonucleotide primer for the detection of SNP TSC0053563
acatttccaata

SEQ ID NO: 362969 - DNA, 12 bp, Artificial Sequence
  Oligonucleotide primer for the detection of SNP TSC0053563
tttagtagtgat

SEQ ID NO: 362970 - DNA, 12 bp, Artificial Sequence
  Oligonucleotide primer for the detection of SNP TSC0053563
tttagtagtgac

SEQ ID NO: 362971 - DNA, 12 bp, Artificial Sequence
  Oligonucleotide primer for the detection of SNP TSC0053565
tctcttccttcc

SEQ ID NO: 362972 - DNA, 12 bp, Artificial Sequence
  Oligonucleotide primer for the detection of SNP TSC0053565
ttgtttttgaga

SEQ ID NO: 362973 - DNA, 12 bp, Artificial Sequence
  Oligonucleotide primer for the detection of SNP TSC0053566
ttccttttttac

SEQ ID NO: 362974 - DNA, 12 bp, Artificial Sequence
  Oligonucleotide primer for the detection of SNP TSC0053569
tttctcattttc

SEQ ID NO: 362975 - DNA, 12 bp, Artificial Sequence
  Oligonucleotide primer for the detection of SNP TSC0053569
ttgtatagatgg

SEQ ID NO: 362976 - DNA, 12 bp, Artificial Sequence
  Oligonucleotide primer for the detection of SNP TSC0053570
aataccttttaa

SEQ ID NO: 362977 - DNA, 12 bp, Artificial Sequence
  Oligonukleotid-Primer
tataaacaatat

SEQ ID NO: 362978 - DNA, 12 bp, Artificial Sequence
  Oligonucleotide primer for the detection of SNP TSC0053573
ttagttgtgggt

SEQ ID NO: 362979 - DNA, 12 bp, Artificial Sequence
  Oligonucleotide primer for the detection of SNP TSC0053573
ttaactataaac

SEQ ID NO: 362980 - DNA, 12 bp, Artificial Sequence
  Oligonucleotide primer for the detection of SNP TSC0053573
tatagataatat

SEQ ID NO: 362981 - DNA, 12 bp, Artificial Sequence
  Oligonucleotide primer for the detection of SNP TSC0053575
accaccaaactt

SEQ ID NO: 362982 - DNA, 12 bp, Artificial Sequence
  Oligonucleotide primer for the detection of SNP TSC0053575
accaccgaactt

SEQ ID NO: 362983 - DNA, 12 bp, Artificial Sequence
  Oligonucleotide primer for the detection of SNP TSC0053575
accgccaaactt

SEQ ID NO: 362984 - DNA, 12 bp, Artificial Sequence
  Oligonucleotide primer for the detection of SNP TSC0053575
accgccgaactt

SEQ ID NO: 362985 - DNA, 12 bp, Artificial Sequence
  Oligonucleotide primer for the detection of SNP TSC0053575
gagtgtgaggaa

SEQ ID NO: 362986 - DNA, 12 bp, Artificial Sequence
  Oligonucleotide primer for the detection of SNP TSC0053575
gagcgtgaggaa

SEQ ID NO: 362987 - DNA, 12 bp, Artificial Sequence
  Oligonucleotide primer for the detection of SNP TSC0053576
ccaaaacaacaa

SEQ ID NO: 362988 - DNA, 12 bp, Artificial Sequence
  Oligonucleotide primer for the detection of SNP TSC0053576
cctacttccact

SEQ ID NO: 362989 - DNA, 12 bp, Artificial Sequence
  Oligonucleotide primer for the detection of SNP TSC0053576
attagagtagta

SEQ ID NO: 362990 - DNA, 12 bp, Artificial Sequence
  Oligonucleotide primer for the detection of SNP TSC0053577
acattaactttt

SEQ ID NO: 362991 - DNA, 12 bp, Artificial Sequence
  Oligonucleotide primer for the detection of SNP TSC0053577
tgaagaaagggg

SEQ ID NO: 362992 - DNA, 12 bp, Artificial Sequence
  Oligonucleotide primer for the detection of SNP TSC0053579
gtttttggggta

SEQ ID NO: 362993 - DNA, 12 bp, Artificial Sequence
  Oligonucleotide primer for the detection of SNP TSC0053580
tctcaatctaac

SEQ ID NO: 362994 - DNA, 12 bp, Artificial Sequence
  Oligonucleotide primer for the detection of SNP TSC0053580
atggagttttgg

SEQ ID NO: 362995 - DNA, 12 bp, Artificial Sequence
  Oligonucleotide primer for the detection of SNP TSC0053581
attattattgat

SEQ ID NO: 362996 - DNA, 12 bp, Artificial Sequence
  Oligonucleotide primer for the detection of SNP TSC0053581
attattattgac

SEQ ID NO: 362997 - DNA, 12 bp, Artificial Sequence
  Oligonucleotide primer for the detection of SNP TSC0053582
aaatacatcatc

SEQ ID NO: 362998 - DNA, 12 bp, Artificial Sequence
  Oligonucleotide primer for the detection of SNP TSC0053585
ttaaatacttaa

SEQ ID NO: 362999 - DNA, 12 bp, Artificial Sequence
  Oligonucleotide primer for the detection of SNP TSC0053585
tgttttttatgt

SEQ ID NO: 363000 - DNA, 12 bp, Artificial Sequence
  Oligonucleotide primer for the detection of SNP TSC0053585
atatcctccata

SEQ ID NO: 363001 - DNA, 12 bp, Artificial Sequence
  Oligonucleotide primer for the detection of SNP TSC0053585
tttggatgtttg

SEQ ID NO: 363002 - DNA, 12 bp, Artificial Sequence
  Oligonucleotide primer for the detection of SNP TSC0053586
aaacatctaaat

SEQ ID NO: 363003 - DNA, 12 bp, Artificial Sequence
  Oligonucleotide primer for the detection of SNP TSC0053586
gaaaggtataaa

SEQ ID NO: 363004 - DNA, 12 bp, Artificial Sequence
  Oligonucleotide primer for the detection of SNP TSC0053587
taacaaaactta

SEQ ID NO: 363005 - DNA, 12 bp, Artificial Sequence
  Oligonucleotide primer for the detection of SNP TSC0053587
ttcaatctaaca

SEQ ID NO: 363006 - DNA, 12 bp, Artificial Sequence
  Oligonucleotide primer for the detection of SNP TSC0053589
aaaaaacatctc

SEQ ID NO: 363007 - DNA, 12 bp, Artificial Sequence
  Oligonucleotide primer for the detection of SNP TSC0053589
aaaaaacgtctc

SEQ ID NO: 363008 - DNA, 12 bp, Artificial Sequence
  Oligonucleotide primer for the detection of SNP TSC0053589
attgatgagtag

SEQ ID NO: 363009 - DNA, 12 bp, Artificial Sequence
  Oligonucleotide primer for the detection of SNP TSC0053591
atatttctaacc

SEQ ID NO: 363010 - DNA, 12 bp, Artificial Sequence
  Oligonucleotide primer for the detection of SNP TSC0053591
ttttttgaagaa

SEQ ID NO: 363011 - DNA, 12 bp, Artificial Sequence
  Oligonucleotide primer for the detection of SNP TSC0053595
acaatttctatc

SEQ ID NO: 363012 - DNA, 12 bp, Artificial Sequence
  Oligonucleotide primer for the detection of SNP TSC0053595
atttaaaattaa

SEQ ID NO: 363013 - DNA, 12 bp, Artificial Sequence
  Oligonucleotide primer for the detection of SNP TSC0053595
acttaaaatcaa

SEQ ID NO: 363014 - DNA, 12 bp, Artificial Sequence
  Oligonucleotide primer for the detection of SNP TSC0053595
ataatttttatt

SEQ ID NO: 363015 - DNA, 12 bp, Artificial Sequence
  Oligonucleotide primer for the detection of SNP TSC0053600
aaaaacacctca

SEQ ID NO: 363016 - DNA, 12 bp, Artificial Sequence
  Oligonucleotide primer for the detection of SNP TSC0053600
gggttgttgttt

SEQ ID NO: 363017 - DNA, 12 bp, Artificial Sequence
  Oligonucleotide primer for the detection of SNP TSC0053600
aactactaccta

SEQ ID NO: 363018 - DNA, 12 bp, Artificial Sequence
  Oligonucleotide primer for the detection of SNP TSC0053600
agggagtatttt

SEQ ID NO: 363019 - DNA, 12 bp, Artificial Sequence
  Oligonucleotide primer for the detection of SNP TSC0053601
ccaaaatttctt

SEQ ID NO: 363020 - DNA, 12 bp, Artificial Sequence
  Oligonucleotide primer for the detection of SNP TSC0053601
agttttttttga

SEQ ID NO: 363021 - DNA, 12 bp, Artificial Sequence
  Oligonucleotide primer for the detection of SNP TSC0053602
atcaaatatctc

SEQ ID NO: 363022 - DNA, 12 bp, Artificial Sequence
  Oligonucleotide primer for the detection of SNP TSC0053602
acctttaaaata

SEQ ID NO: 363023 - DNA, 12 bp, Artificial Sequence
  Oligonucleotide primer for the detection of SNP TSC0053603
tatctatttcct

SEQ ID NO: 363024 - DNA, 12 bp, Artificial Sequence
  Oligonucleotide primer for the detection of SNP TSC0053603
taatatgtgtaa

SEQ ID NO: 363025 - DNA, 12 bp, Artificial Sequence
  Oligonucleotide primer for the detection of SNP TSC0053604
ttctaaatttaa

SEQ ID NO: 363026 - DNA, 12 bp, Artificial Sequence
  Oligonucleotide primer for the detection of SNP TSC0053604
ataaatttgttt

SEQ ID NO: 363027 - DNA, 12 bp, Artificial Sequence
  Oligonucleotide primer for the detection of SNP TSC0053604
acaaatctattc

SEQ ID NO: 363028 - DNA, 12 bp, Artificial Sequence
  Oligonucleotide primer for the detection of SNP TSC0053605
cctctctctctt

SEQ ID NO: 363029 - DNA, 12 bp, Artificial Sequence
  Oligonucleotide primer for the detection of SNP TSC0053606
cacctacttttt

SEQ ID NO: 363030 - DNA, 12 bp, Artificial Sequence
  Oligonucleotide primer for the detection of SNP TSC0053606
aaaaataggata

SEQ ID NO: 363031 - DNA, 12 bp, Artificial Sequence
  Oligonucleotide primer for the detection of SNP TSC0053607
ttctcttttacc

SEQ ID NO: 363032 - DNA, 12 bp, Artificial Sequence
  Oligonucleotide primer for the detection of SNP TSC0053607
gttaaagaaagt

SEQ ID NO: 363033 - DNA, 12 bp, Artificial Sequence
  Oligonucleotide primer for the detection of SNP TSC0053608
attggaatttag

SEQ ID NO: 363034 - DNA, 12 bp, Artificial Sequence
  Oligonucleotide primer for the detection of SNP TSC0053609
aaccttccaata

SEQ ID NO: 363035 - DNA, 12 bp, Artificial Sequence
  Oligonucleotide primer for the detection of SNP TSC0053609
gaccttccaata

SEQ ID NO: 363036 - DNA, 12 bp, Artificial Sequence
  Oligonucleotide primer for the detection of SNP TSC0053609
ggttttttaatg

SEQ ID NO: 363037 - DNA, 12 bp, Artificial Sequence
  Oligonucleotide primer for the detection of SNP TSC0008997
gggtgatggaag

SEQ ID NO: 363038 - DNA, 12 bp, Artificial Sequence
  Oligonucleotide primer for the detection of SNP TSC0008998
tttttttggggt

SEQ ID NO: 363039 - DNA, 12 bp, Artificial Sequence
  Oligonucleotide primer for the detection of SNP TSC0008998
attctcttaaaa

SEQ ID NO: 363040 - DNA, 12 bp, Artificial Sequence
  Oligonucleotide primer for the detection of SNP TSC0008998
tttaaaagtaag

SEQ ID NO: 363041 - DNA, 12 bp, Artificial Sequence
  Oligonucleotide primer for the detection of SNP TSC0053614
taatttattttg

SEQ ID NO: 363042 - DNA, 12 bp, Artificial Sequence
  Oligonucleotide primer for the detection of SNP TSC0053615
gtaaatgatata

SEQ ID NO: 363043 - DNA, 12 bp, Artificial Sequence
  Oligonucleotide primer for the detection of SNP TSC0053622
caaaaaacatca

SEQ ID NO: 363044 - DNA, 12 bp, Artificial Sequence
  Oligonucleotide primer for the detection of SNP TSC0053622
caaaaaacgtca

SEQ ID NO: 363045 - DNA, 12 bp, Artificial Sequence
  Oligonucleotide primer for the detection of SNP TSC0053622
gagtgattggtt

SEQ ID NO: 363046 - DNA, 12 bp, Artificial Sequence
  Oligonucleotide primer for the detection of SNP TSC0053622
aaataactaatt

SEQ ID NO: 363047 - DNA, 12 bp, Artificial Sequence
  Oligonucleotide primer for the detection of SNP TSC0053622
tagagaatgtta

SEQ ID NO: 363048 - DNA, 12 bp, Artificial Sequence
  Oligonucleotide primer for the detection of SNP TSC0053622
tagagaacgtta

SEQ ID NO: 363049 - DNA, 12 bp, Artificial Sequence
  Oligonucleotide primer for the detection of SNP TSC0053623
aactaattataa

SEQ ID NO: 363050 - DNA, 12 bp, Artificial Sequence
  Oligonucleotide primer for the detection of SNP TSC0053623
ttaatgttgata

SEQ ID NO: 363051 - DNA, 12 bp, Artificial Sequence
  Oligonucleotide primer for the detection of SNP TSC0053624
catctacaaatc

SEQ ID NO: 363052 - DNA, 12 bp, Artificial Sequence
  Oligonucleotide primer for the detection of SNP TSC0053624
gtgttatgtgta

SEQ ID NO: 363053 - DNA, 12 bp, Artificial Sequence
  Oligonucleotide primer for the detection of SNP TSC0053629
aaaatttttcac

SEQ ID NO: 363054 - DNA, 12 bp, Artificial Sequence
  Oligonucleotide primer for the detection of SNP TSC0053629
ttagtaattttt

SEQ ID NO: 363055 - DNA, 12 bp, Artificial Sequence
  Oligonucleotide primer for the detection of SNP TSC0053629
aaatttaacaac

SEQ ID NO: 363056 - DNA, 12 bp, Artificial Sequence
  Oligonucleotide primer for the detection of SNP TSC0053629
aaggttttttat

SEQ ID NO: 363057 - DNA, 12 bp, Artificial Sequence
  Oligonucleotide primer for the detection of SNP TSC0053629
aaggttttttac

SEQ ID NO: 363058 - DNA, 12 bp, Artificial Sequence
  Oligonucleotide primer for the detection of SNP TSC0053630
tataaacaaaaa

SEQ ID NO: 363059 - DNA, 12 bp, Artificial Sequence
  Oligonucleotide primer for the detection of SNP TSC0053630
ataggtaaaaat

SEQ ID NO: 363060 - DNA, 12 bp, Artificial Sequence
  Oligonucleotide primer for the detection of SNP TSC0053633
aacacctacatc

SEQ ID NO: 363061 - DNA, 12 bp, Artificial Sequence
  Oligonucleotide primer for the detection of SNP TSC0053633
aataattattaa

SEQ ID NO: 363062 - DNA, 12 bp, Artificial Sequence
  Oligonucleotide primer for the detection of SNP TSC0053634
atattagaatat

SEQ ID NO: 363063 - DNA, 12 bp, Artificial Sequence
  Oligonucleotide primer for the detection of SNP TSC0053634
cacaccaaaata

SEQ ID NO: 363064 - DNA, 12 bp, Artificial Sequence
  Oligonucleotide primer for the detection of SNP TSC0053634
tttgaaatattg

SEQ ID NO: 363065 - DNA, 12 bp, Artificial Sequence
  Oligonucleotide primer for the detection of SNP TSC0053636
tcacattcacac

SEQ ID NO: 363066 - DNA, 12 bp, Artificial Sequence
  Oligonucleotide primer for the detection of SNP TSC0053636
atggagagaggg

SEQ ID NO: 363067 - DNA, 12 bp, Artificial Sequence
  Oligonucleotide primer for the detection of SNP TSC0053637
acctaaaattcc

SEQ ID NO: 363068 - DNA, 12 bp, Artificial Sequence
  Oligonucleotide primer for the detection of SNP TSC0053637
aaaatttatcct

SEQ ID NO: 363069 - DNA, 12 bp, Artificial Sequence
  Oligonucleotide primer for the detection of SNP TSC0053637
atttgaggtttt

SEQ ID NO: 363070 - DNA, 12 bp, Artificial Sequence
  Oligonucleotide primer for the detection of SNP TSC0053638
aaacacactcat

SEQ ID NO: 363071 - DNA, 12 bp, Artificial Sequence
  Oligonucleotide primer for the detection of SNP TSC0053638
gaaagaaaagaa

SEQ ID NO: 363072 - DNA, 12 bp, Artificial Sequence
  Oligonucleotide primer for the detection of SNP TSC0053639
agaatgtttatt

SEQ ID NO: 363073 - DNA, 12 bp, Artificial Sequence
  Oligonucleotide primer for the detection of SNP TSC0053639
tggataagattt

SEQ ID NO: 363074 - DNA, 12 bp, Artificial Sequence
  Oligonucleotide primer for the detection of SNP TSC0053640
cacttaaacatc

SEQ ID NO: 363075 - DNA, 12 bp, Artificial Sequence
  Oligonucleotide primer for the detection of SNP TSC0053640
agtgatttatta

SEQ ID NO: 363076 - DNA, 12 bp, Artificial Sequence
  Oligonucleotide primer for the detection of SNP TSC0053641
tttaaatactac

SEQ ID NO: 363077 - DNA, 12 bp, Artificial Sequence
  Oligonucleotide primer for the detection of SNP TSC0053641
tattgtggttga

SEQ ID NO: 363078 - DNA, 12 bp, Artificial Sequence
  Oligonucleotide primer for the detection of SNP TSC0053642
attttattatct

SEQ ID NO: 363079 - DNA, 12 bp, Artificial Sequence
  Oligonucleotide primer for the detection of SNP TSC0053643
cctaaaaaattc

SEQ ID NO: 363080 - DNA, 12 bp, Artificial Sequence
  Oligonucleotide primer for the detection of SNP TSC0053643
gtgtgggatgga

SEQ ID NO: 363081 - DNA, 12 bp, Artificial Sequence
  Oligonucleotide primer for the detection of SNP TSC0053643
gcgtgggatgga

SEQ ID NO: 363082 - DNA, 12 bp, Artificial Sequence
  Oligonucleotide primer for the detection of SNP TSC0053644
attcaaaccctc

SEQ ID NO: 363083 - DNA, 12 bp, Artificial Sequence
  Oligonucleotide primer for the detection of SNP TSC0053644
tttagaatattg

SEQ ID NO: 363084 - DNA, 12 bp, Artificial Sequence
  Oligonucleotide primer for the detection of SNP TSC0053644
tttagaatatcg

SEQ ID NO: 363085 - DNA, 12 bp, Artificial Sequence
  Oligonucleotide primer for the detection of SNP TSC0053645
ctctaaaacttc

SEQ ID NO: 363086 - DNA, 12 bp, Artificial Sequence
  Oligonucleotide primer for the detection of SNP TSC0053645
tggatatggaga

SEQ ID NO: 363087 - DNA, 12 bp, Artificial Sequence
  Oligonucleotide primer for the detection of SNP TSC0053645
cggatatggaga

SEQ ID NO: 363088 - DNA, 12 bp, Artificial Sequence
  Oligonucleotide primer for the detection of SNP TSC0053647
aacaaaaataat

SEQ ID NO: 363089 - DNA, 12 bp, Artificial Sequence
  Oligonucleotide primer for the detection of SNP TSC0053647
taggaaagtttg

SEQ ID NO: 363090 - DNA, 12 bp, Artificial Sequence
  Oligonucleotide primer for the detection of SNP TSC0053647
taggaaagttcg

SEQ ID NO: 363091 - DNA, 12 bp, Artificial Sequence
  Oligonucleotide primer for the detection of SNP TSC0053648
ccctttaaacat

SEQ ID NO: 363092 - DNA, 12 bp, Artificial Sequence
  Oligonucleotide primer for the detection of SNP TSC0053649
tcaactaaaaac

SEQ ID NO: 363093 - DNA, 12 bp, Artificial Sequence
  Oligonucleotide primer for the detection of SNP TSC0053649
ttattaattgtg

SEQ ID NO: 363094 - DNA, 12 bp, Artificial Sequence
  Oligonucleotide primer for the detection of SNP TSC0053650
tataccaatcat

SEQ ID NO: 363095 - DNA, 12 bp, Artificial Sequence
  Oligonucleotide primer for the detection of SNP TSC0053651
acattcaactct

SEQ ID NO: 363096 - DNA, 12 bp, Artificial Sequence
  Oligonucleotide primer for the detection of SNP TSC0053651
aattaaaatgtg

SEQ ID NO: 363097 - DNA, 12 bp, Artificial Sequence
  Oligonucleotide primer for the detection of SNP TSC0053651
aattaaaatata

SEQ ID NO: 363098 - DNA, 12 bp, Artificial Sequence
  Oligonucleotide primer for the detection of SNP TSC0053651
gtatttagtttt

SEQ ID NO: 363099 - DNA, 12 bp, Artificial Sequence
  Oligonucleotide primer for the detection of SNP TSC0053652
aaactaccataa

SEQ ID NO: 363100 - DNA, 12 bp, Artificial Sequence
  Oligonucleotide primer for the detection of SNP TSC0053652
ttactcctatac

SEQ ID NO: 363101 - DNA, 12 bp, Artificial Sequence
  Oligonucleotide primer for the detection of SNP TSC0053652
aagttattatgg

SEQ ID NO: 363102 - DNA, 12 bp, Artificial Sequence
  Oligonucleotide primer for the detection of SNP TSC0053653
tctatactcttc

SEQ ID NO: 363103 - DNA, 12 bp, Artificial Sequence
  Oligonucleotide primer for the detection of SNP TSC0053653
atttgatagtta

SEQ ID NO: 363104 - DNA, 12 bp, Artificial Sequence
  Oligonucleotide primer for the detection of SNP TSC0053654
acctacactaaa

SEQ ID NO: 363105 - DNA, 12 bp, Artificial Sequence
  Oligonucleotide primer for the detection of SNP TSC0053654
attttaaatatt

SEQ ID NO: 363106 - DNA, 12 bp, Artificial Sequence
  Oligonucleotide primer for the detection of SNP TSC0053654
attttaaatatc

SEQ ID NO: 363107 - DNA, 12 bp, Artificial Sequence
  Oligonucleotide primer for the detection of SNP TSC0053654
catcccaaatat

SEQ ID NO: 363108 - DNA, 12 bp, Artificial Sequence
  Oligonucleotide primer for the detection of SNP TSC0053655
cacctccctcac

SEQ ID NO: 363109 - DNA, 12 bp, Artificial Sequence
  Oligonucleotide primer for the detection of SNP TSC0053655
tataatgtagta

SEQ ID NO: 363110 - DNA, 12 bp, Artificial Sequence
  Oligonucleotide primer for the detection of SNP TSC0053656
cactaaaattaa

SEQ ID NO: 363111 - DNA, 12 bp, Artificial Sequence
  Oligonucleotide primer for the detection of SNP TSC0053656
ttggagttaatt

SEQ ID NO: 363112 - DNA, 12 bp, Artificial Sequence
  Oligonucleotide primer for the detection of SNP TSC0053657
ctacacttcaat

SEQ ID NO: 363113 - DNA, 12 bp, Artificial Sequence
  Oligonucleotide primer for the detection of SNP TSC0053658
attgaagtgtag

SEQ ID NO: 363114 - DNA, 12 bp, Artificial Sequence
  Oligonucleotide primer for the detection of SNP TSC0053662
attatttagtaa

SEQ ID NO: 363115 - DNA, 12 bp, Artificial Sequence
  Oligonucleotide primer for the detection of SNP TSC0053663
gttttttgatgg

SEQ ID NO: 363116 - DNA, 12 bp, Artificial Sequence
  Oligonucleotide primer for the detection of SNP TSC0053664
cacacattataa

SEQ ID NO: 363117 - DNA, 12 bp, Artificial Sequence
  Oligonucleotide primer for the detection of SNP TSC0053664
cacacgttataa

SEQ ID NO: 363118 - DNA, 12 bp, Artificial Sequence
  Oligonucleotide primer for the detection of SNP TSC0053664
ccaatttcctca

SEQ ID NO: 363119 - DNA, 12 bp, Artificial Sequence
  Oligonucleotide primer for the detection of SNP TSC0053664
ttatacgttata

SEQ ID NO: 363120 - DNA, 12 bp, Artificial Sequence
  Oligonucleotide primer for the detection of SNP TSC0053665
tttataatcttt

SEQ ID NO: 363121 - DNA, 12 bp, Artificial Sequence
  Oligonucleotide primer for the detection of SNP TSC0053665
tatatgaaaaag

SEQ ID NO: 363122 - DNA, 12 bp, Artificial Sequence
  Oligonucleotide primer for the detection of SNP TSC0053667
aattaaactata

SEQ ID NO: 363123 - DNA, 12 bp, Artificial Sequence
  Oligonucleotide primer for the detection of SNP TSC0053667
ttagtatatagt

SEQ ID NO: 363124 - DNA, 12 bp, Artificial Sequence
  Oligonucleotide primer for the detection of SNP TSC0053667
ccaacatacaac

SEQ ID NO: 363125 - DNA, 12 bp, Artificial Sequence
  Oligonucleotide primer for the detection of SNP TSC0053667
agttagattatg

SEQ ID NO: 363126 - DNA, 12 bp, Artificial Sequence
  Oligonucleotide primer for the detection of SNP TSC0053673
acaaaaacactc

SEQ ID NO: 363127 - DNA, 12 bp, Artificial Sequence
  Oligonucleotide primer for the detection of SNP TSC0053673
acaaaaacgctc

SEQ ID NO: 363128 - DNA, 12 bp, Artificial Sequence
  Oligonucleotide primer for the detection of SNP TSC0053673
acgaaaacactc

SEQ ID NO: 363129 - DNA, 12 bp, Artificial Sequence
  Oligonucleotide primer for the detection of SNP TSC0053673
acgaaaacgctc

SEQ ID NO: 363130 - DNA, 12 bp, Artificial Sequence
  Oligonucleotide primer for the detection of SNP TSC0053673
agagttgggttt

SEQ ID NO: 363131 - DNA, 12 bp, Artificial Sequence
  Oligonucleotide primer for the detection of SNP TSC0053673
agagttgggttc

SEQ ID NO: 363132 - DNA, 12 bp, Artificial Sequence
  Oligonucleotide primer for the detection of SNP TSC0053673
gaaaactaaact

SEQ ID NO: 363133 - DNA, 12 bp, Artificial Sequence
  Oligonucleotide primer for the detection of SNP TSC0053673
atgaggatgttt

SEQ ID NO: 363134 - DNA, 12 bp, Artificial Sequence
  Oligonucleotide primer for the detection of SNP TSC0053673
acgaggatgttt

SEQ ID NO: 363135 - DNA, 12 bp, Artificial Sequence
  Oligonucleotide primer for the detection of SNP TSC0053673
atgaggacgttt

SEQ ID NO: 363136 - DNA, 12 bp, Artificial Sequence
  Oligonucleotide primer for the detection of SNP TSC0053673
acgaggacgttt

SEQ ID NO: 363137 - DNA, 12 bp, Artificial Sequence
  Oligonucleotide primer for the detection of SNP TSC0053681
ccatcaataaaa

SEQ ID NO: 363138 - DNA, 12 bp, Artificial Sequence
  Oligonucleotide primer for the detection of SNP TSC0053681
atttcattattt

SEQ ID NO: 363139 - DNA, 12 bp, Artificial Sequence
  Oligonucleotide primer for the detection of SNP TSC0053682
attattttctct

SEQ ID NO: 363140 - DNA, 12 bp, Artificial Sequence
  Oligonucleotide primer for the detection of SNP TSC0053682
atgttattatta

SEQ ID NO: 363141 - DNA, 12 bp, Artificial Sequence
  Oligonucleotide primer for the detection of SNP TSC0004910
ccccacaaaact

SEQ ID NO: 363142 - DNA, 12 bp, Artificial Sequence
  Oligonucleotide primer for the detection of SNP TSC0004910
ccccgcaaaact

SEQ ID NO: 363143 - DNA, 12 bp, Artificial Sequence
  Oligonucleotide primer for the detection of SNP TSC0004911
actaattaataa

SEQ ID NO: 363144 - DNA, 12 bp, Artificial Sequence
  Oligonucleotide primer for the detection of SNP TSC0004911
tatcatttccca

SEQ ID NO: 363145 - DNA, 12 bp, Artificial Sequence
  Oligonucleotide primer for the detection of SNP TSC0004911
attagttggtgg

SEQ ID NO: 363146 - DNA, 12 bp, Artificial Sequence
  Oligonucleotide primer for the detection of SNP TSC0004912
aaataacctctt

SEQ ID NO: 363147 - DNA, 12 bp, Artificial Sequence
  Oligonucleotide primer for the detection of SNP TSC0004912
aaatggtttttt

SEQ ID NO: 363148 - DNA, 12 bp, Artificial Sequence
  Oligonucleotide primer for the detection of SNP TSC0053691
tcattttcatct

SEQ ID NO: 363149 - DNA, 12 bp, Artificial Sequence
  Oligonucleotide primer for the detection of SNP TSC0053691
tcattttcgtct

SEQ ID NO: 363150 - DNA, 12 bp, Artificial Sequence
  Oligonucleotide primer for the detection of SNP TSC0053691
tcgttttcatct

SEQ ID NO: 363151 - DNA, 12 bp, Artificial Sequence
  Oligonucleotide primer for the detection of SNP TSC0053691
tcgttttcgtct

SEQ ID NO: 363152 - DNA, 12 bp, Artificial Sequence
  Oligonucleotide primer for the detection of SNP TSC0053691
tagtatttagga

SEQ ID NO: 363153 - DNA, 12 bp, Artificial Sequence
  Oligonucleotide primer for the detection of SNP TSC0053692
ttatcctcctca

SEQ ID NO: 363154 - DNA, 12 bp, Artificial Sequence
  Oligonucleotide primer for the detection of SNP TSC0053692
agttagagaagt

SEQ ID NO: 363155 - DNA, 12 bp, Artificial Sequence
  Oligonucleotide primer for the detection of SNP TSC0053693
ctcactcccatc

SEQ ID NO: 363156 - DNA, 12 bp, Artificial Sequence
  Oligonucleotide primer for the detection of SNP TSC0053693
ctcactcccgtc

SEQ ID NO: 363157 - DNA, 12 bp, Artificial Sequence
  Oligonucleotide primer for the detection of SNP TSC0053693
aaatgaagggag

SEQ ID NO: 363158 - DNA, 12 bp, Artificial Sequence
  Oligonucleotide primer for the detection of SNP TSC0053693
aaacgaagggag

SEQ ID NO: 363159 - DNA, 12 bp, Artificial Sequence
  Oligonucleotide primer for the detection of SNP TSC0053694
aaattttccctt

SEQ ID NO: 363160 - DNA, 12 bp, Artificial Sequence
  Oligonucleotide primer for the detection of SNP TSC0053695
ctataaaaacat

SEQ ID NO: 363161 - DNA, 12 bp, Artificial Sequence
  Oligonucleotide primer for the detection of SNP TSC0053696
acatcttaacta

SEQ ID NO: 363162 - DNA, 12 bp, Artificial Sequence
  Oligonucleotide primer for the detection of SNP TSC0053696
gtagtgagtgta

SEQ ID NO: 363163 - DNA, 12 bp, Artificial Sequence
  Oligonucleotide primer for the detection of SNP TSC0053696
agtattttaatt

SEQ ID NO: 363164 - DNA, 12 bp, Artificial Sequence
  Oligonucleotide primer for the detection of SNP TSC0053697
actttccctaca

SEQ ID NO: 363165 - DNA, 12 bp, Artificial Sequence
  Oligonucleotide primer for the detection of SNP TSC0053697
aaggatttggat

SEQ ID NO: 363166 - DNA, 12 bp, Artificial Sequence
  Oligonucleotide primer for the detection of SNP TSC0053697
gttttttttgta

SEQ ID NO: 363167 - DNA, 12 bp, Artificial Sequence
  Oligonucleotide primer for the detection of SNP TSC0053698
tattttaatata

SEQ ID NO: 363168 - DNA, 12 bp, Artificial Sequence
  Oligonucleotide primer for the detection of SNP TSC0053698
atatgatattat

SEQ ID NO: 363169 - DNA, 12 bp, Artificial Sequence
  Oligonucleotide primer for the detection of SNP TSC0053699
tactattataat

SEQ ID NO: 363170 - DNA, 12 bp, Artificial Sequence
  Oligonucleotide primer for the detection of SNP TSC0053699
gttgtataagta

SEQ ID NO: 363171 - DNA, 12 bp, Artificial Sequence
  Oligonucleotide primer for the detection of SNP TSC0053700
cctactctttta

SEQ ID NO: 363172 - DNA, 12 bp, Artificial Sequence
  Oligonucleotide primer for the detection of SNP TSC0053700
tgaatttataat

SEQ ID NO: 363173 - DNA, 12 bp, Artificial Sequence
  Oligonucleotide primer for the detection of SNP TSC0053701
tttttgagtaaa

SEQ ID NO: 363174 - DNA, 12 bp, Artificial Sequence
  Oligonucleotide primer for the detection of SNP TSC0053702
tgttgttatagt

SEQ ID NO: 363175 - DNA, 12 bp, Artificial Sequence
  Oligonucleotide primer for the detection of SNP TSC0053702
ttattactataa

SEQ ID NO: 363176 - DNA, 12 bp, Artificial Sequence
  Oligonucleotide primer for the detection of SNP TSC0053702
gtaagagggagt

SEQ ID NO: 363177 - DNA, 12 bp, Artificial Sequence
  Oligonucleotide primer for the detection of SNP TSC0053704
taaaatacctct

SEQ ID NO: 363178 - DNA, 12 bp, Artificial Sequence
  Oligonucleotide primer for the detection of SNP TSC0053704
tattgggttata

SEQ ID NO: 363179 - DNA, 12 bp, Artificial Sequence
  Oligonucleotide primer for the detection of SNP TSC0053707
cttctttccctt

SEQ ID NO: 363180 - DNA, 12 bp, Artificial Sequence
  Oligonucleotide primer for the detection of SNP TSC0053707
tatttcgtttat

SEQ ID NO: 363181 - DNA, 12 bp, Artificial Sequence
  Oligonucleotide primer for the detection of SNP TSC0053707
cattccatttac

SEQ ID NO: 363182 - DNA, 12 bp, Artificial Sequence
  Oligonukleotid-Primer
cattccgtttac

SEQ ID NO: 363183 - DNA, 12 bp, Artificial Sequence
  Oligonucleotide primer for the detection of SNP TSC0053708
ttcccaaaaaac

SEQ ID NO: 363184 - DNA, 12 bp, Artificial Sequence
  Oligonucleotide primer for the detection of SNP TSC0053709
taaaatcacaac

SEQ ID NO: 363185 - DNA, 12 bp, Artificial Sequence
  Oligonucleotide primer for the detection of SNP TSC0053709
aaggttgtagtg

SEQ ID NO: 363186 - DNA, 12 bp, Artificial Sequence
  Oligonucleotide primer for the detection of SNP TSC0053710
tatccatctaca

SEQ ID NO: 363187 - DNA, 12 bp, Artificial Sequence
  Oligonucleotide primer for the detection of SNP TSC0053710
tatgtaagaagt

SEQ ID NO: 363188 - DNA, 12 bp, Artificial Sequence
  Oligonucleotide primer for the detection of SNP TSC0053711
ttttcccatatc

SEQ ID NO: 363189 - DNA, 12 bp, Artificial Sequence
  Oligonucleotide primer for the detection of SNP TSC0053711
tttggaaattaa

SEQ ID NO: 363190 - DNA, 12 bp, Artificial Sequence
  Oligonucleotide primer for the detection of SNP TSC0053712
tctctttcttat

SEQ ID NO: 363191 - DNA, 12 bp, Artificial Sequence
  Oligonucleotide primer for the detection of SNP TSC0053712
tgaggataggga

SEQ ID NO: 363192 - DNA, 12 bp, Artificial Sequence
  Oligonucleotide primer for the detection of SNP TSC0053713
atttgaatattt

SEQ ID NO: 363193 - DNA, 12 bp, Artificial Sequence
  Oligonucleotide primer for the detection of SNP TSC0053713
atctaaatattc

SEQ ID NO: 363194 - DNA, 12 bp, Artificial Sequence
  Oligonukleotid-Primer
ggaggtaagata

SEQ ID NO: 363195 - DNA, 12 bp, Artificial Sequence
  Oligonucleotide primer for the detection of SNP TSC0053714
ctataataaaaa

SEQ ID NO: 363196 - DNA, 12 bp, Artificial Sequence
  Oligonucleotide primer for the detection of SNP TSC0053714
gttttaagtgat

SEQ ID NO: 363197 - DNA, 12 bp, Artificial Sequence
  Oligonucleotide primer for the detection of SNP TSC0053716
atttaacaacat

SEQ ID NO: 363198 - DNA, 12 bp, Artificial Sequence
  Oligonukleotid-Primer
tatttagtgagt

SEQ ID NO: 363199 - DNA, 12 bp, Artificial Sequence
  Oligonucleotide primer for the detection of SNP TSC0053716
catctaataaat

SEQ ID NO: 363200 - DNA, 12 bp, Artificial Sequence
  Oligonucleotide primer for the detection of SNP TSC0053716
gtttagtagtat

SEQ ID NO: 363201 - DNA, 12 bp, Artificial Sequence
  Oligonucleotide primer for the detection of SNP TSC0053717
catctcaaaaaa

SEQ ID NO: 363202 - DNA, 12 bp, Artificial Sequence
  Oligonukleotid-Primer
atactcaaaacc

SEQ ID NO: 363203 - DNA, 12 bp, Artificial Sequence
  Oligonucleotide primer for the detection of SNP TSC0009099
acatacacacac

SEQ ID NO: 363204 - DNA, 12 bp, Artificial Sequence
  Oligonucleotide primer for the detection of SNP TSC0009099
acatacacacgc

SEQ ID NO: 363205 - DNA, 12 bp, Artificial Sequence
  Oligonucleotide primer for the detection of SNP TSC0009099
acatacacgcac

SEQ ID NO: 363206 - DNA, 12 bp, Artificial Sequence
  Oligonucleotide primer for the detection of SNP TSC0009099
acatacgcacac

SEQ ID NO: 363207 - DNA, 12 bp, Artificial Sequence
  Oligonucleotide primer for the detection of SNP TSC0009099
acatacacgcgc

SEQ ID NO: 363208 - DNA, 12 bp, Artificial Sequence
  Oligonucleotide primer for the detection of SNP TSC0009099
acatacgcacgc

SEQ ID NO: 363209 - DNA, 12 bp, Artificial Sequence
  Oligonucleotide primer for the detection of SNP TSC0009099
acatacgcgcac

SEQ ID NO: 363210 - DNA, 12 bp, Artificial Sequence
  Oligonucleotide primer for the detection of SNP TSC0009099
acatacgcgcgc

SEQ ID NO: 363211 - DNA, 12 bp, Artificial Sequence
  Oligonucleotide primer for the detection of SNP TSC0009099
tacatacatata

SEQ ID NO: 363212 - DNA, 12 bp, Artificial Sequence
  Oligonucleotide primer for the detection of SNP TSC0009099
tacatacgtata

SEQ ID NO: 363213 - DNA, 12 bp, Artificial Sequence
  Oligonucleotide primer for the detection of SNP TSC0009099
tacgtacatata

SEQ ID NO: 363214 - DNA, 12 bp, Artificial Sequence
  Oligonucleotide primer for the detection of SNP TSC0009099
tacgtacgtata

SEQ ID NO: 363215 - DNA, 12 bp, Artificial Sequence
  Oligonucleotide primer for the detection of SNP TSC0009099
gtatgcgtgtgt

SEQ ID NO: 363216 - DNA, 12 bp, Artificial Sequence
  Oligonucleotide primer for the detection of SNP TSC0009099
gtatgtgcgtgt

SEQ ID NO: 363217 - DNA, 12 bp, Artificial Sequence
  Oligonucleotide primer for the detection of SNP TSC0009099
gtatgtgtgcgt

SEQ ID NO: 363218 - DNA, 12 bp, Artificial Sequence
  Oligonucleotide primer for the detection of SNP TSC0009099
gtatgcgcgtgt

SEQ ID NO: 363219 - DNA, 12 bp, Artificial Sequence
  Oligonucleotide primer for the detection of SNP TSC0009099
gtatgcgtgcgt

SEQ ID NO: 363220 - DNA, 12 bp, Artificial Sequence
  Oligonucleotide primer for the detection of SNP TSC0009099
gtatgtgcgcgt

SEQ ID NO: 363221 - DNA, 12 bp, Artificial Sequence
  Oligonucleotide primer for the detection of SNP TSC0009099
gtatgcgcgcgt

SEQ ID NO: 363222 - DNA, 12 bp, Artificial Sequence
  Oligonucleotide primer for the detection of SNP TSC0053719
tttacatacata

SEQ ID NO: 363223 - DNA, 12 bp, Artificial Sequence
  Oligonucleotide primer for the detection of SNP TSC0053719
tttacgtacata

SEQ ID NO: 363224 - DNA, 12 bp, Artificial Sequence
  Oligonucleotide primer for the detection of SNP TSC0053719
gtgtgtatgcgt

SEQ ID NO: 363225 - DNA, 12 bp, Artificial Sequence
  Oligonucleotide primer for the detection of SNP TSC0053719
gtgtgtatgtgc

SEQ ID NO: 363226 - DNA, 12 bp, Artificial Sequence
  Oligonucleotide primer for the detection of SNP TSC0053719
gtgtgtatgcgc

SEQ ID NO: 363227 - DNA, 12 bp, Artificial Sequence
  Oligonucleotide primer for the detection of SNP TSC0053719
atatacatacac

SEQ ID NO: 363228 - DNA, 12 bp, Artificial Sequence
  Oligonucleotide primer for the detection of SNP TSC0053719
atatacatacgc

SEQ ID NO: 363229 - DNA, 12 bp, Artificial Sequence
  Oligonucleotide primer for the detection of SNP TSC0053719
gtatacatacac

SEQ ID NO: 363230 - DNA, 12 bp, Artificial Sequence
  Oligonucleotide primer for the detection of SNP TSC0053719
gtatacatacgc

SEQ ID NO: 363231 - DNA, 12 bp, Artificial Sequence
  Oligonucleotide primer for the detection of SNP TSC0053719
tttatgtgtatg

SEQ ID NO: 363232 - DNA, 12 bp, Artificial Sequence
  Oligonucleotide primer for the detection of SNP TSC0053719
tttacgtgtatg

SEQ ID NO: 363233 - DNA, 12 bp, Artificial Sequence
  Oligonucleotide primer for the detection of SNP TSC0053722
tatatatgtaaa

SEQ ID NO: 363234 - DNA, 12 bp, Artificial Sequence
  Oligonucleotide primer for the detection of SNP TSC0053722
gaaaatttgaaa

SEQ ID NO: 363235 - DNA, 12 bp, Artificial Sequence
  Oligonucleotide primer for the detection of SNP TSC0053724
attaatttgggt

SEQ ID NO: 363236 - DNA, 12 bp, Artificial Sequence
  Oligonucleotide primer for the detection of SNP TSC0053724
taagaaattgat

SEQ ID NO: 363237 - DNA, 12 bp, Artificial Sequence
  Oligonucleotide primer for the detection of SNP TSC0053725
ataaaataacta

SEQ ID NO: 363238 - DNA, 12 bp, Artificial Sequence
  Oligonucleotide primer for the detection of SNP TSC0053725
aatagaatggtt

SEQ ID NO: 363239 - DNA, 12 bp, Artificial Sequence
  Oligonucleotide primer for the detection of SNP TSC0053726
aataaaatacga

SEQ ID NO: 363240 - DNA, 12 bp, Artificial Sequence
  Oligonucleotide primer for the detection of SNP TSC0053726
ataccctcacat

SEQ ID NO: 363241 - DNA, 12 bp, Artificial Sequence
  Oligonucleotide primer for the detection of SNP TSC0053726
aataaaatatgg

SEQ ID NO: 363242 - DNA, 12 bp, Artificial Sequence
  Oligonucleotide primer for the detection of SNP TSC0053726
aataaaatacgg

SEQ ID NO: 363243 - DNA, 12 bp, Artificial Sequence
  Oligonucleotide primer for the detection of SNP TSC0053727
ttatataatttc

SEQ ID NO: 363244 - DNA, 12 bp, Artificial Sequence
  Oligonucleotide primer for the detection of SNP TSC0053727
attttggtagga

SEQ ID NO: 363245 - DNA, 12 bp, Artificial Sequence
  Oligonucleotide primer for the detection of SNP TSC0053728
caaatttctctt

SEQ ID NO: 363246 - DNA, 12 bp, Artificial Sequence
  Oligonucleotide primer for the detection of SNP TSC0053728
tttttgttaaga

SEQ ID NO: 363247 - DNA, 12 bp, Artificial Sequence
  Oligonucleotide primer for the detection of SNP TSC0053731
atatcctatata

SEQ ID NO: 363248 - DNA, 12 bp, Artificial Sequence
  Oligonucleotide primer for the detection of SNP TSC0053731
aacacatctacc

SEQ ID NO: 363249 - DNA, 12 bp, Artificial Sequence
  Oligonucleotide primer for the detection of SNP TSC0053731
ggtattttgtat

SEQ ID NO: 363250 - DNA, 12 bp, Artificial Sequence
  Oligonucleotide primer for the detection of SNP TSC0053732
tttatccacatt

SEQ ID NO: 363251 - DNA, 12 bp, Artificial Sequence
  Oligonucleotide primer for the detection of SNP TSC0053732
aagtaggttttg

SEQ ID NO: 363252 - DNA, 12 bp, Artificial Sequence
  Oligonucleotide primer for the detection of SNP TSC0053732
aagtaggtttcg

SEQ ID NO: 363253 - DNA, 12 bp, Artificial Sequence
  Oligonucleotide primer for the detection of SNP TSC0053735
tcctaaataacc

SEQ ID NO: 363254 - DNA, 12 bp, Artificial Sequence
  Oligonucleotide primer for the detection of SNP TSC0053735
tttaaagtgtta

SEQ ID NO: 363255 - DNA, 12 bp, Artificial Sequence
  Oligonucleotide primer for the detection of SNP TSC0004845
tatttgtgagta

SEQ ID NO: 363256 - DNA, 12 bp, Artificial Sequence
  Oligonucleotide primer for the detection of SNP TSC0004845
tattcgtgagta

SEQ ID NO: 363257 - DNA, 12 bp, Artificial Sequence
  Oligonucleotide primer for the detection of SNP TSC0004845
cacccataaaca

SEQ ID NO: 363258 - DNA, 12 bp, Artificial Sequence
  Oligonucleotide primer for the detection of SNP TSC0004845
cacccgtaaaca

SEQ ID NO: 363259 - DNA, 12 bp, Artificial Sequence
  Oligonucleotide primer for the detection of SNP TSC0004845
agagtaagaaga

SEQ ID NO: 363260 - DNA, 12 bp, Artificial Sequence
  Oligonucleotide primer for the detection of SNP TSC0005740
ttgattgtgtta

SEQ ID NO: 363261 - DNA, 12 bp, Artificial Sequence
  Oligonucleotide primer for the detection of SNP TSC0005740
ttaattatacca

SEQ ID NO: 363262 - DNA, 12 bp, Artificial Sequence
  Oligonucleotide primer for the detection of SNP TSC0005741
ttcaaccccctt

SEQ ID NO: 363263 - DNA, 12 bp, Artificial Sequence
  Oligonucleotide primer for the detection of SNP TSC0053737
acatttccccta

SEQ ID NO: 363264 - DNA, 12 bp, Artificial Sequence
  Oligonucleotide primer for the detection of SNP TSC0053739
tcacaattaact

SEQ ID NO: 363265 - DNA, 12 bp, Artificial Sequence
  Oligonucleotide primer for the detection of SNP TSC0053739
tcttttcattca

SEQ ID NO: 363266 - DNA, 12 bp, Artificial Sequence
  Oligonucleotide primer for the detection of SNP TSC0053739
ttatagttggtt

SEQ ID NO: 363267 - DNA, 12 bp, Artificial Sequence
  Oligonucleotide primer for the detection of SNP TSC0053740
gaattgaagttt

SEQ ID NO: 363268 - DNA, 12 bp, Artificial Sequence
  Oligonucleotide primer for the detection of SNP TSC0053741
agttggaataat

SEQ ID NO: 363269 - DNA, 12 bp, Artificial Sequence
  Oligonucleotide primer for the detection of SNP TSC0053741
agtcggaataat

SEQ ID NO: 363270 - DNA, 12 bp, Artificial Sequence
  Oligonucleotide primer for the detection of SNP TSC0053741
aaccaaaataac

SEQ ID NO: 363271 - DNA, 12 bp, Artificial Sequence
  Oligonucleotide primer for the detection of SNP TSC0053741
aaccgaaataac

SEQ ID NO: 363272 - DNA, 12 bp, Artificial Sequence
  Oligonucleotide primer for the detection of SNP TSC0053741
gtagatattaag

SEQ ID NO: 363273 - DNA, 12 bp, Artificial Sequence
  Oligonucleotide primer for the detection of SNP TSC0053744
ttaatcaaaaaa

SEQ ID NO: 363274 - DNA, 12 bp, Artificial Sequence
  Oligonucleotide primer for the detection of SNP TSC0053744
gtatatttttgt

SEQ ID NO: 363275 - DNA, 12 bp, Artificial Sequence
  Oligonucleotide primer for the detection of SNP TSC0053744
tatatattttta

SEQ ID NO: 363276 - DNA, 12 bp, Artificial Sequence
  Oligonucleotide primer for the detection of SNP TSC0053744
ttagttaagaaa

SEQ ID NO: 363277 - DNA, 12 bp, Artificial Sequence
  Oligonucleotide primer for the detection of SNP TSC0053749
aactcaatatat

SEQ ID NO: 363278 - DNA, 12 bp, Artificial Sequence
  Oligonucleotide primer for the detection of SNP TSC0053749
ttgtattgtaaa

SEQ ID NO: 363279 - DNA, 12 bp, Artificial Sequence
  Oligonukleotid-Primer
ctacattataaa

SEQ ID NO: 363280 - DNA, 12 bp, Artificial Sequence
  Oligonucleotide primer for the detection of SNP TSC0053749
aatttagtgtgt

SEQ ID NO: 363281 - DNA, 12 bp, Artificial Sequence
  Oligonucleotide primer for the detection of SNP TSC0053750
ctaataataact

SEQ ID NO: 363282 - DNA, 12 bp, Artificial Sequence
  Oligonucleotide primer for the detection of SNP TSC0053750
agaagattgtag

SEQ ID NO: 363283 - DNA, 12 bp, Artificial Sequence
  Oligonukleotid-Primer
caactattatca

SEQ ID NO: 363284 - DNA, 12 bp, Artificial Sequence
  Oligonucleotide primer for the detection of SNP TSC0053751
gtttgagtgaat

SEQ ID NO: 363285 - DNA, 12 bp, Artificial Sequence
  Oligonucleotide primer for the detection of SNP TSC0053751
acctaaataaac

SEQ ID NO: 363286 - DNA, 12 bp, Artificial Sequence
  Oligonucleotide primer for the detection of SNP TSC0053751
ttagttgttatt

SEQ ID NO: 363287 - DNA, 12 bp, Artificial Sequence
  Oligonucleotide primer for the detection of SNP TSC0053752
acaataaccata

SEQ ID NO: 363288 - DNA, 12 bp, Artificial Sequence
  Oligonucleotide primer for the detection of SNP TSC0053752
ataatagttatg

SEQ ID NO: 363289 - DNA, 12 bp, Artificial Sequence
  Oligonucleotide primer for the detection of SNP TSC0008785
cttattttttta

SEQ ID NO: 363290 - DNA, 12 bp, Artificial Sequence
  Oligonucleotide primer for the detection of SNP TSC0008785
taaaagtattaa

SEQ ID NO: 363291 - DNA, 12 bp, Artificial Sequence
  Oligonucleotide primer for the detection of SNP TSC0053754
aagttaattttt

SEQ ID NO: 363292 - DNA, 12 bp, Artificial Sequence
  Oligonucleotide primer for the detection of SNP TSC0053754
aaatcaaccttt

SEQ ID NO: 363293 - DNA, 12 bp, Artificial Sequence
  Oligonucleotide primer for the detection of SNP TSC0053755
gggttttattgt

SEQ ID NO: 363294 - DNA, 12 bp, Artificial Sequence
  Oligonucleotide primer for the detection of SNP TSC0053755
aaaccttactat

SEQ ID NO: 363295 - DNA, 12 bp, Artificial Sequence
  Oligonucleotide primer for the detection of SNP TSC0053756
caatattacctc

SEQ ID NO: 363296 - DNA, 12 bp, Artificial Sequence
  Oligonucleotide primer for the detection of SNP TSC0053756
tggtgtattgtt

SEQ ID NO: 363297 - DNA, 12 bp, Artificial Sequence
  Oligonucleotide primer for the detection of SNP TSC0053756
tagtgttgtttt

SEQ ID NO: 363298 - DNA, 12 bp, Artificial Sequence
  Oligonucleotide primer for the detection of SNP TSC0053757
aataaatataca

SEQ ID NO: 363299 - DNA, 12 bp, Artificial Sequence
  Oligonucleotide primer for the detection of SNP TSC0053757
ttttatatctaa

SEQ ID NO: 363300 - DNA, 12 bp, Artificial Sequence
  Oligonucleotide primer for the detection of SNP TSC0053758
aatatatctaca

SEQ ID NO: 363301 - DNA, 12 bp, Artificial Sequence
  Oligonucleotide primer for the detection of SNP TSC0053758
gaaaaattaagt

SEQ ID NO: 363302 - DNA, 12 bp, Artificial Sequence
  Oligonucleotide primer for the detection of SNP TSC0053758
taatgtgtttgt

SEQ ID NO: 363303 - DNA, 12 bp, Artificial Sequence
  Oligonucleotide primer for the detection of SNP TSC0053760
ttccttaaactt

SEQ ID NO: 363304 - DNA, 12 bp, Artificial Sequence
  Oligonucleotide primer for the detection of SNP TSC0053760
ggaattgtttag

SEQ ID NO: 363305 - DNA, 12 bp, Artificial Sequence
  Oligonucleotide primer for the detection of SNP TSC0053761
atatcatatatc

SEQ ID NO: 363306 - DNA, 12 bp, Artificial Sequence
  Oligonucleotide primer for the detection of SNP TSC0053761
tttaaaaggaag

SEQ ID NO: 363307 - DNA, 12 bp, Artificial Sequence
  Oligonucleotide primer for the detection of SNP TSC0053762
cccatcccccac

SEQ ID NO: 363308 - DNA, 12 bp, Artificial Sequence
  Oligonucleotide primer for the detection of SNP TSC0053762
gttgtttggtgg

SEQ ID NO: 363309 - DNA, 12 bp, Artificial Sequence
  Oligonucleotide primer for the detection of SNP TSC0053763
caacataaactt

SEQ ID NO: 363310 - DNA, 12 bp, Artificial Sequence
  Oligonucleotide primer for the detection of SNP TSC0053766
actaaaccaaac

SEQ ID NO: 363311 - DNA, 12 bp, Artificial Sequence
  Oligonucleotide primer for the detection of SNP TSC0053766
ttagttagttta

SEQ ID NO: 363312 - DNA, 12 bp, Artificial Sequence
  Oligonucleotide primer for the detection of SNP TSC0053767
atttcaatctta

SEQ ID NO: 363313 - DNA, 12 bp, Artificial Sequence
  Oligonucleotide primer for the detection of SNP TSC0053767
taactttttata

SEQ ID NO: 363314 - DNA, 12 bp, Artificial Sequence
  Oligonucleotide primer for the detection of SNP TSC0053768
aggtataaattt

SEQ ID NO: 363315 - DNA, 12 bp, Artificial Sequence
  Oligonucleotide primer for the detection of SNP TSC0053768
aaatgaagtttt

SEQ ID NO: 363316 - DNA, 12 bp, Artificial Sequence
  Oligonucleotide primer for the detection of SNP TSC0053770
cctaactttaat

SEQ ID NO: 363317 - DNA, 12 bp, Artificial Sequence
  Oligonucleotide primer for the detection of SNP TSC0053770
tcttatttaata

SEQ ID NO: 363318 - DNA, 12 bp, Artificial Sequence
  Oligonucleotide primer for the detection of SNP TSC0053771
tttaaattcatt

SEQ ID NO: 363319 - DNA, 12 bp, Artificial Sequence
  Oligonukleotid-Primer
tgttattggttc

SEQ ID NO: 363320 - DNA, 12 bp, Artificial Sequence
  Oligonucleotide primer for the detection of SNP TSC0053772
attattaatcca

SEQ ID NO: 363321 - DNA, 12 bp, Artificial Sequence
  Oligonucleotide primer for the detection of SNP TSC0053772
attattaatccg

SEQ ID NO: 363322 - DNA, 12 bp, Artificial Sequence
  Oligonucleotide primer for the detection of SNP TSC0053772
tataaattttga

SEQ ID NO: 363323 - DNA, 12 bp, Artificial Sequence
  Oligonucleotide primer for the detection of SNP TSC0053773
taatctcattta

SEQ ID NO: 363324 - DNA, 12 bp, Artificial Sequence
  Oligonucleotide primer for the detection of SNP TSC0053774
caaaaacaacat

SEQ ID NO: 363325 - DNA, 12 bp, Artificial Sequence
  Oligonucleotide primer for the detection of SNP TSC0053774
atgagttataga

SEQ ID NO: 363326 - DNA, 12 bp, Artificial Sequence
  Oligonucleotide primer for the detection of SNP TSC0053776
ttatttaaatgt

SEQ ID NO: 363327 - DNA, 12 bp, Artificial Sequence
  Oligonukleotid-Primer
atttaaatacaa

SEQ ID NO: 363328 - DNA, 12 bp, Artificial Sequence
  Oligonucleotide primer for the detection of SNP TSC0053776
atgattaaaata

SEQ ID NO: 363329 - DNA, 12 bp, Artificial Sequence
  Oligonucleotide primer for the detection of SNP TSC0053777
atatacctcccc

SEQ ID NO: 363330 - DNA, 12 bp, Artificial Sequence
  Oligonucleotide primer for the detection of SNP TSC0053777
gagggagggaag

SEQ ID NO: 363331 - DNA, 12 bp, Artificial Sequence
  Oligonukleotid-Primer
cactcaccatcc

SEQ ID NO: 363332 - DNA, 12 bp, Artificial Sequence
  Oligonucleotide primer for the detection of SNP TSC0053778
cactcgccatcc

SEQ ID NO: 363333 - DNA, 12 bp, Artificial Sequence
  Oligonucleotide primer for the detection of SNP TSC0053778
tggttggagtaa

SEQ ID NO: 363334 - DNA, 12 bp, Artificial Sequence
  Oligonucleotide primer for the detection of SNP TSC0053779
gaattagaatag

SEQ ID NO: 363335 - DNA, 12 bp, Artificial Sequence
  Oligonucleotide primer for the detection of SNP TSC0053779
attaaagaaaat

SEQ ID NO: 363336 - DNA, 12 bp, Artificial Sequence
  Oligonucleotide primer for the detection of SNP TSC0053780
tctcttatacat

SEQ ID NO: 363337 - DNA, 12 bp, Artificial Sequence
  Oligonucleotide primer for the detection of SNP TSC0053780
ttagaaaagaaa

SEQ ID NO: 363338 - DNA, 12 bp, Artificial Sequence
  Oligonucleotide primer for the detection of SNP TSC0053781
tcccaaacctat

SEQ ID NO: 363339 - DNA, 12 bp, Artificial Sequence
  Oligonucleotide primer for the detection of SNP TSC0053781
ttaaaatttatg

SEQ ID NO: 363340 - DNA, 12 bp, Artificial Sequence
  Oligonucleotide primer for the detection of SNP TSC0053785
tatcattttaat

SEQ ID NO: 363341 - DNA, 12 bp, Artificial Sequence
  Oligonucleotide primer for the detection of SNP TSC0053785
taattttttgta

SEQ ID NO: 363342 - DNA, 12 bp, Artificial Sequence
  Oligonucleotide primer for the detection of SNP TSC0053786
gataaaaacata

SEQ ID NO: 363343 - DNA, 12 bp, Artificial Sequence
  Oligonukleotid-Primer
tcttcccaatct

SEQ ID NO: 363344 - DNA, 12 bp, Artificial Sequence
  Oligonucleotide primer for the detection of SNP TSC0053787
cctcctaaactc

SEQ ID NO: 363345 - DNA, 12 bp, Artificial Sequence
  Oligonucleotide primer for the detection of SNP TSC0053787
gggaagattatt

SEQ ID NO: 363346 - DNA, 12 bp, Artificial Sequence
  Oligonucleotide primer for the detection of SNP TSC0053787
gggaagattatc

SEQ ID NO: 363347 - DNA, 12 bp, Artificial Sequence
  Oligonukleotid-Primer
caaacataacca

SEQ ID NO: 363348 - DNA, 12 bp, Artificial Sequence
  Oligonucleotide primer for the detection of SNP TSC0053794
tccaccttattc

SEQ ID NO: 363349 - DNA, 12 bp, Artificial Sequence
  Oligonucleotide primer for the detection of SNP TSC0053794
taggtatggtta

SEQ ID NO: 363350 - DNA, 12 bp, Artificial Sequence
  Oligonucleotide primer for the detection of SNP TSC0053795
ttaggagatgaa

SEQ ID NO: 363351 - DNA, 12 bp, Artificial Sequence
  Oligonucleotide primer for the detection of SNP TSC0053796
tgtaatatagat

SEQ ID NO: 363352 - DNA, 12 bp, Artificial Sequence
  Oligonucleotide primer for the detection of SNP TSC0053796
tacaacataaat

SEQ ID NO: 363353 - DNA, 12 bp, Artificial Sequence
  Oligonucleotide primer for the detection of SNP TSC0053797
aaataagatttg

SEQ ID NO: 363354 - DNA, 12 bp, Artificial Sequence
  Oligonucleotide primer for the detection of SNP TSC0053798
actttacccact

SEQ ID NO: 363355 - DNA, 12 bp, Artificial Sequence
  Oligonucleotide primer for the detection of SNP TSC0053798
ggttgttattgg

SEQ ID NO: 363356 - DNA, 12 bp, Artificial Sequence
  Oligonucleotide primer for the detection of SNP TSC0053799
cgtttttacaaa

SEQ ID NO: 363357 - DNA, 12 bp, Artificial Sequence
  Oligonucleotide primer for the detection of SNP TSC0053799
ctattaactaac

SEQ ID NO: 363358 - DNA, 12 bp, Artificial Sequence
  Oligonucleotide primer for the detection of SNP TSC0053799
tgtttttgtaaa

SEQ ID NO: 363359 - DNA, 12 bp, Artificial Sequence
  Oligonukleotid-Primer
cgtttttgtaaa

SEQ ID NO: 363360 - DNA, 12 bp, Artificial Sequence
  Oligonucleotide primer for the detection of SNP TSC0053802
cataaaaatttt

SEQ ID NO: 363361 - DNA, 12 bp, Artificial Sequence
  Oligonucleotide primer for the detection of SNP TSC0053804
tttcacaatatt

SEQ ID NO: 363362 - DNA, 12 bp, Artificial Sequence
  Oligonucleotide primer for the detection of SNP TSC0053804
ttttatagtgtt

SEQ ID NO: 363363 - DNA, 12 bp, Artificial Sequence
  Oligonucleotide primer for the detection of SNP TSC0053805
acccataaaaac

SEQ ID NO: 363364 - DNA, 12 bp, Artificial Sequence
  Oligonucleotide primer for the detection of SNP TSC0053805
gcccataaaaac

SEQ ID NO: 363365 - DNA, 12 bp, Artificial Sequence
  Oligonucleotide primer for the detection of SNP TSC0053805
agttagaaatgg

SEQ ID NO: 363366 - DNA, 12 bp, Artificial Sequence
  Oligonucleotide primer for the detection of SNP TSC0053805
gtttataggagt

SEQ ID NO: 363367 - DNA, 12 bp, Artificial Sequence
  Oligonucleotide primer for the detection of SNP TSC0053807
tctaaatctcta

SEQ ID NO: 363368 - DNA, 12 bp, Artificial Sequence
  Oligonucleotide primer for the detection of SNP TSC0053807
atagttaatggg

SEQ ID NO: 363369 - DNA, 12 bp, Artificial Sequence
  Oligonucleotide primer for the detection of SNP TSC0053807
ttgagtttttat

SEQ ID NO: 363370 - DNA, 12 bp, Artificial Sequence
  Oligonucleotide primer for the detection of SNP TSC0053808
tcaaacaaatac

SEQ ID NO: 363371 - DNA, 12 bp, Artificial Sequence
  Oligonukleotid-Primer
tcgaacaaatac

SEQ ID NO: 363372 - DNA, 12 bp, Artificial Sequence
  Oligonucleotide primer for the detection of SNP TSC0053808
atctctttccta

SEQ ID NO: 363373 - DNA, 12 bp, Artificial Sequence
  Oligonucleotide primer for the detection of SNP TSC0053808
gagtagatattt

SEQ ID NO: 363374 - DNA, 12 bp, Artificial Sequence
  Oligonucleotide primer for the detection of SNP TSC0053809
aggaagaaagaa

SEQ ID NO: 363375 - DNA, 12 bp, Artificial Sequence
  Oligonucleotide primer for the detection of SNP TSC0053809
taggaaagagat

SEQ ID NO: 363376 - DNA, 12 bp, Artificial Sequence
  Oligonucleotide primer for the detection of SNP TSC0053810
tatttatactat

SEQ ID NO: 363377 - DNA, 12 bp, Artificial Sequence
  Oligonucleotide primer for the detection of SNP TSC0053810
tattgatgatgg

SEQ ID NO: 363378 - DNA, 12 bp, Artificial Sequence
  Oligonucleotide primer for the detection of SNP TSC0053811
tctcatttaaaa

SEQ ID NO: 363379 - DNA, 12 bp, Artificial Sequence
  Oligonucleotide primer for the detection of SNP TSC0053811
atttaatctctc

SEQ ID NO: 363380 - DNA, 12 bp, Artificial Sequence
  Oligonucleotide primer for the detection of SNP TSC0053811
ttttatttgaaa

SEQ ID NO: 363381 - DNA, 12 bp, Artificial Sequence
  Oligonucleotide primer for the detection of SNP TSC0053815
cttctaacccta

SEQ ID NO: 363382 - DNA, 12 bp, Artificial Sequence
  Oligonucleotide primer for the detection of SNP TSC0053815
tgtaagtttttt

SEQ ID NO: 363383 - DNA, 12 bp, Artificial Sequence
  Oligonucleotide primer for the detection of SNP TSC0053815
cgtaagtttttt

SEQ ID NO: 363384 - DNA, 12 bp, Artificial Sequence
  Oligonucleotide primer for the detection of SNP TSC0053815
cacaaatccttt

SEQ ID NO: 363385 - DNA, 12 bp, Artificial Sequence
  Oligonucleotide primer for the detection of SNP TSC0053815
cgcaaatccttt

SEQ ID NO: 363386 - DNA, 12 bp, Artificial Sequence
  Oligonucleotide primer for the detection of SNP TSC0053816
aacttacacata

SEQ ID NO: 363387 - DNA, 12 bp, Artificial Sequence
  Oligonucleotide primer for the detection of SNP TSC0053816
aacttacgcata

SEQ ID NO: 363388 - DNA, 12 bp, Artificial Sequence
  Oligonucleotide primer for the detection of SNP TSC0053816
ttgtttgggata

SEQ ID NO: 363389 - DNA, 12 bp, Artificial Sequence
  Oligonucleotide primer for the detection of SNP TSC0053816
gatttgtgtata

SEQ ID NO: 363390 - DNA, 12 bp, Artificial Sequence
  Oligonucleotide primer for the detection of SNP TSC0053816
gatttgcgtata

SEQ ID NO: 363391 - DNA, 12 bp, Artificial Sequence
  Oligonucleotide primer for the detection of SNP TSC0053817
tatcaacttaaa

SEQ ID NO: 363392 - DNA, 12 bp, Artificial Sequence
  Oligonucleotide primer for the detection of SNP TSC0053817
tatcgacttaaa

SEQ ID NO: 363393 - DNA, 12 bp, Artificial Sequence
  Oligonucleotide primer for the detection of SNP TSC0053817
ggtagtgaaggg

SEQ ID NO: 363394 - DNA, 12 bp, Artificial Sequence
  Oligonucleotide primer for the detection of SNP TSC0053817
tgttgatttaga

SEQ ID NO: 363395 - DNA, 12 bp, Artificial Sequence
  Oligonucleotide primer for the detection of SNP TSC0053817
tgtcgatttaga

SEQ ID NO: 363396 - DNA, 12 bp, Artificial Sequence
  Oligonucleotide primer for the detection of SNP TSC0053821
tccccataaata

SEQ ID NO: 363397 - DNA, 12 bp, Artificial Sequence
  Oligonucleotide primer for the detection of SNP TSC0053821
aaaggagaatat

SEQ ID NO: 363398 - DNA, 12 bp, Artificial Sequence
  Oligonucleotide primer for the detection of SNP TSC0053822
tttctttttctc

SEQ ID NO: 363399 - DNA, 12 bp, Artificial Sequence
  Oligonucleotide primer for the detection of SNP TSC0053822
ttaattagttta

SEQ ID NO: 363400 - DNA, 12 bp, Artificial Sequence
  Oligonucleotide primer for the detection of SNP TSC0053824
actataataaaa

SEQ ID NO: 363401 - DNA, 12 bp, Artificial Sequence
  Oligonucleotide primer for the detection of SNP TSC0053824
gagttagaagaa

SEQ ID NO: 363402 - DNA, 12 bp, Artificial Sequence
  Oligonucleotide primer for the detection of SNP TSC0053825
aaaataggattt

SEQ ID NO: 363403 - DNA, 12 bp, Artificial Sequence
  Oligonucleotide primer for the detection of SNP TSC0053825
atttaagtggtt

SEQ ID NO: 363404 - DNA, 12 bp, Artificial Sequence
  Oligonucleotide primer for the detection of SNP TSC0053826
tgataaattttg

SEQ ID NO: 363405 - DNA, 12 bp, Artificial Sequence
  Oligonucleotide primer for the detection of SNP TSC0053827
ttctccaaattt

SEQ ID NO: 363406 - DNA, 12 bp, Artificial Sequence
  Oligonucleotide primer for the detection of SNP TSC0053828
cataatattatt

SEQ ID NO: 363407 - DNA, 12 bp, Artificial Sequence
  Oligonucleotide primer for the detection of SNP TSC0053828
tgtgttagtatg

SEQ ID NO: 363408 - DNA, 12 bp, Artificial Sequence
  Oligonucleotide primer for the detection of SNP TSC0053831
aataccactcat

SEQ ID NO: 363409 - DNA, 12 bp, Artificial Sequence
  Oligonucleotide primer for the detection of SNP TSC0053831
aaattaagtaaa

SEQ ID NO: 363410 - DNA, 12 bp, Artificial Sequence
  Oligonucleotide primer for the detection of SNP TSC0053832
tcgaaaaaccaa

SEQ ID NO: 363411 - DNA, 12 bp, Artificial Sequence
  Oligonucleotide primer for the detection of SNP TSC0053832
atatataatttt

SEQ ID NO: 363412 - DNA, 12 bp, Artificial Sequence
  Oligonucleotide primer for the detection of SNP TSC0053832
tatacaatttta

SEQ ID NO: 363413 - DNA, 12 bp, Artificial Sequence
  Oligonucleotide primer for the detection of SNP TSC0053832
tgaaaagttaat

SEQ ID NO: 363414 - DNA, 12 bp, Artificial Sequence
  Oligonucleotide primer for the detection of SNP TSC0053832
cgaaaagttaat

SEQ ID NO: 363415 - DNA, 12 bp, Artificial Sequence
  Oligonucleotide primer for the detection of SNP TSC0053833
tcaactaccaac

SEQ ID NO: 363416 - DNA, 12 bp, Artificial Sequence
  Oligonucleotide primer for the detection of SNP TSC0053833
tttatattttag

SEQ ID NO: 363417 - DNA, 12 bp, Artificial Sequence
  Oligonucleotide primer for the detection of SNP TSC0053833
tttacattccaa

SEQ ID NO: 363418 - DNA, 12 bp, Artificial Sequence
  Oligonucleotide primer for the detection of SNP TSC0053833
ttagttgttagt

SEQ ID NO: 363419 - DNA, 12 bp, Artificial Sequence
  Oligonucleotide primer for the detection of SNP TSC0053835
aaaattttttta

SEQ ID NO: 363420 - DNA, 12 bp, Artificial Sequence
  Oligonucleotide primer for the detection of SNP TSC0053836
caaataatatct

SEQ ID NO: 363421 - DNA, 12 bp, Artificial Sequence
  Oligonucleotide primer for the detection of SNP TSC0053836
gataaaaataaa

SEQ ID NO: 363422 - DNA, 12 bp, Artificial Sequence
  Oligonucleotide primer for the detection of SNP TSC0053837
cacatcaaaaat

SEQ ID NO: 363423 - DNA, 12 bp, Artificial Sequence
  Oligonucleotide primer for the detection of SNP TSC0053837
cgcatcaaaaat

SEQ ID NO: 363424 - DNA, 12 bp, Artificial Sequence
  Oligonucleotide primer for the detection of SNP TSC0053838
attttaacatat

SEQ ID NO: 363425 - DNA, 12 bp, Artificial Sequence
  Oligonucleotide primer for the detection of SNP TSC0053838
ttttgtttgatg

SEQ ID NO: 363426 - DNA, 12 bp, Artificial Sequence
  Oligonucleotide primer for the detection of SNP TSC0053839
accctaaaacat

SEQ ID NO: 363427 - DNA, 12 bp, Artificial Sequence
  Oligonucleotide primer for the detection of SNP TSC0053839
tagggttatgta

SEQ ID NO: 363428 - DNA, 12 bp, Artificial Sequence
  Oligonucleotide primer for the detection of SNP TSC0053844
attctcccaaac

SEQ ID NO: 363429 - DNA, 12 bp, Artificial Sequence
  Oligonucleotide primer for the detection of SNP TSC0053844
atatgttagaat

SEQ ID NO: 363430 - DNA, 12 bp, Artificial Sequence
  Oligonucleotide primer for the detection of SNP TSC0053844
atacgttagaat

SEQ ID NO: 363431 - DNA, 12 bp, Artificial Sequence
  Oligonucleotide primer for the detection of SNP TSC0053844
catacattaaaa

SEQ ID NO: 363432 - DNA, 12 bp, Artificial Sequence
  Oligonucleotide primer for the detection of SNP TSC0053844
catacgttaaaa

SEQ ID NO: 363433 - DNA, 12 bp, Artificial Sequence
  Oligonucleotide primer for the detection of SNP TSC0053844
atttttttaggc

SEQ ID NO: 363434 - DNA, 12 bp, Artificial Sequence
  Oligonucleotide primer for the detection of SNP TSC0053851
atttccaaaacc

SEQ ID NO: 363435 - DNA, 12 bp, Artificial Sequence
  Oligonucleotide primer for the detection of SNP TSC0053851
tagtgggattag

SEQ ID NO: 363436 - DNA, 12 bp, Artificial Sequence
  Oligonucleotide primer for the detection of SNP TSC0053852
tatattctttta

SEQ ID NO: 363437 - DNA, 12 bp, Artificial Sequence
  Oligonucleotide primer for the detection of SNP TSC0053852
ttgtaattaatt

SEQ ID NO: 363438 - DNA, 12 bp, Artificial Sequence
  Oligonucleotide primer for the detection of SNP TSC0053852
tataactaacta

SEQ ID NO: 363439 - DNA, 12 bp, Artificial Sequence
  Oligonucleotide primer for the detection of SNP TSC0053853
ataattacaaat

SEQ ID NO: 363440 - DNA, 12 bp, Artificial Sequence
  Oligonucleotide primer for the detection of SNP TSC0053854
ggataattaaat

SEQ ID NO: 363441 - DNA, 12 bp, Artificial Sequence
  Oligonucleotide primer for the detection of SNP TSC0053854
aaataatcaaac

SEQ ID NO: 363442 - DNA, 12 bp, Artificial Sequence
  Oligonucleotide primer for the detection of SNP TSC0053854
tttgtagttttg

SEQ ID NO: 363443 - DNA, 12 bp, Artificial Sequence
  Oligonucleotide primer for the detection of SNP TSC0053855
aaccaaacactt

SEQ ID NO: 363444 - DNA, 12 bp, Artificial Sequence
  Oligonucleotide primer for the detection of SNP TSC0053855
tatagtgtaaaa

SEQ ID NO: 363445 - DNA, 12 bp, Artificial Sequence
  Oligonucleotide primer for the detection of SNP TSC0053857
tctaatctaaca

SEQ ID NO: 363446 - DNA, 12 bp, Artificial Sequence
  Oligonucleotide primer for the detection of SNP TSC0053857
atatttgatttt

SEQ ID NO: 363447 - DNA, 12 bp, Artificial Sequence
  Oligonucleotide primer for the detection of SNP TSC0053857
atattcgatttt

SEQ ID NO: 363448 - DNA, 12 bp, Artificial Sequence
  Oligonucleotide primer for the detection of SNP TSC0053857
atatccgatttt

SEQ ID NO: 363449 - DNA, 12 bp, Artificial Sequence
  Oligonucleotide primer for the detection of SNP TSC0053857
tttggtttagta

SEQ ID NO: 363450 - DNA, 12 bp, Artificial Sequence
  Oligonucleotide primer for the detection of SNP TSC0053858
ccataattctct

SEQ ID NO: 363451 - DNA, 12 bp, Artificial Sequence
  Oligonucleotide primer for the detection of SNP TSC0053858
gaattatgaaaa

SEQ ID NO: 363452 - DNA, 12 bp, Artificial Sequence
  Oligonucleotide primer for the detection of SNP TSC0053858
ttatgatttttt

SEQ ID NO: 363453 - DNA, 12 bp, Artificial Sequence
  Oligonucleotide primer for the detection of SNP TSC0053859
aacccttacata

SEQ ID NO: 363454 - DNA, 12 bp, Artificial Sequence
  Oligonucleotide primer for the detection of SNP TSC0053859
acatctctacta

SEQ ID NO: 363455 - DNA, 12 bp, Artificial Sequence
  Oligonucleotide primer for the detection of SNP TSC0053859
tttttatatgtt

SEQ ID NO: 363456 - DNA, 12 bp, Artificial Sequence
  Oligonucleotide primer for the detection of SNP TSC0053861
atctaaacaact

SEQ ID NO: 363457 - DNA, 12 bp, Artificial Sequence
  Oligonucleotide primer for the detection of SNP TSC0053861
tttttgaaaagg

SEQ ID NO: 363458 - DNA, 12 bp, Artificial Sequence
  Oligonucleotide primer for the detection of SNP TSC0053862
ccaaatattcac

SEQ ID NO: 363459 - DNA, 12 bp, Artificial Sequence
  Oligonucleotide primer for the detection of SNP TSC0053863
taggttgtaatt

SEQ ID NO: 363460 - DNA, 12 bp, Artificial Sequence
  Oligonucleotide primer for the detection of SNP TSC0053863
aatgtagtgata

SEQ ID NO: 363461 - DNA, 12 bp, Artificial Sequence
  Oligonucleotide primer for the detection of SNP TSC0053864
tacttcctaaaa

SEQ ID NO: 363462 - DNA, 12 bp, Artificial Sequence
  Oligonucleotide primer for the detection of SNP TSC0053864
gggataatatta

SEQ ID NO: 363463 - DNA, 12 bp, Artificial Sequence
  Oligonucleotide primer for the detection of SNP TSC0053864
aaacaataccaa

SEQ ID NO: 363464 - DNA, 12 bp, Artificial Sequence
  Oligonucleotide primer for the detection of SNP TSC0053864
tgttttttggag

SEQ ID NO: 363465 - DNA, 12 bp, Artificial Sequence
  Oligonucleotide primer for the detection of SNP TSC0053865
tatccccaatca

SEQ ID NO: 363466 - DNA, 12 bp, Artificial Sequence
  Oligonucleotide primer for the detection of SNP TSC0053865
aagtatttggaa

SEQ ID NO: 363467 - DNA, 12 bp, Artificial Sequence
  Oligonucleotide primer for the detection of SNP TSC0053866
ccaaatcaattt

SEQ ID NO: 363468 - DNA, 12 bp, Artificial Sequence
  Oligonucleotide primer for the detection of SNP TSC0053866
ttatatagagaa

SEQ ID NO: 363469 - DNA, 12 bp, Artificial Sequence
  Oligonucleotide primer for the detection of SNP TSC0053866
tacacaaaaaaa

SEQ ID NO: 363470 - DNA, 12 bp, Artificial Sequence
  Oligonucleotide primer for the detection of SNP TSC0053867
taaaatttcacc

SEQ ID NO: 363471 - DNA, 12 bp, Artificial Sequence
  Oligonucleotide primer for the detection of SNP TSC0053873
tccctcctctta

SEQ ID NO: 363472 - DNA, 12 bp, Artificial Sequence
  Oligonucleotide primer for the detection of SNP TSC0053874
ctaataattcaa

SEQ ID NO: 363473 - DNA, 12 bp, Artificial Sequence
  Oligonucleotide primer for the detection of SNP TSC0053874
aagtagtgaatt

SEQ ID NO: 363474 - DNA, 12 bp, Artificial Sequence
  Oligonucleotide primer for the detection of SNP TSC0053874
ttaatgatttag

SEQ ID NO: 363475 - DNA, 12 bp, Artificial Sequence
  Oligonucleotide primer for the detection of SNP TSC0053875
attcccacctcc

SEQ ID NO: 363476 - DNA, 12 bp, Artificial Sequence
  Oligonucleotide primer for the detection of SNP TSC0053875
gtgaagatgtag

SEQ ID NO: 363477 - DNA, 12 bp, Artificial Sequence
  Oligonucleotide primer for the detection of SNP TSC0053876
tttttaaagatg

SEQ ID NO: 363478 - DNA, 12 bp, Artificial Sequence
  Oligonucleotide primer for the detection of SNP TSC0053878
attccacaaatt

SEQ ID NO: 363479 - DNA, 12 bp, Artificial Sequence
  Oligonucleotide primer for the detection of SNP TSC0053878
taagtgggaagg

SEQ ID NO: 363480 - DNA, 12 bp, Artificial Sequence
  Oligonucleotide primer for the detection of SNP TSC0053879
tccaacttttcc

SEQ ID NO: 363481 - DNA, 12 bp, Artificial Sequence
  Oligonucleotide primer for the detection of SNP TSC0053879
gtgtaaagggga

SEQ ID NO: 363482 - DNA, 12 bp, Artificial Sequence
  Oligonucleotide primer for the detection of SNP TSC0053880
taattaaaaaac

SEQ ID NO: 363483 - DNA, 12 bp, Artificial Sequence
  Oligonucleotide primer for the detection of SNP TSC0053880
ttaaagtttaag

SEQ ID NO: 363484 - DNA, 12 bp, Artificial Sequence
  Oligonucleotide primer for the detection of SNP TSC0053880
ttaaaactcaaa

SEQ ID NO: 363485 - DNA, 12 bp, Artificial Sequence
  Oligonucleotide primer for the detection of SNP TSC0053880
tgattgaagagt

SEQ ID NO: 363486 - DNA, 12 bp, Artificial Sequence
  Oligonucleotide primer for the detection of SNP TSC0053880
tgattgaagagc

SEQ ID NO: 363487 - DNA, 12 bp, Artificial Sequence
  Oligonucleotide primer for the detection of SNP TSC0053884
ctaaaataacaa

SEQ ID NO: 363488 - DNA, 12 bp, Artificial Sequence
  Oligonucleotide primer for the detection of SNP TSC0053884
acaccctatatc

SEQ ID NO: 363489 - DNA, 12 bp, Artificial Sequence
  Oligonucleotide primer for the detection of SNP TSC0053884
ttggagtggtag

SEQ ID NO: 363490 - DNA, 12 bp, Artificial Sequence
  Oligonucleotide primer for the detection of SNP TSC0053885
tattaacaaaat

SEQ ID NO: 363491 - DNA, 12 bp, Artificial Sequence
  Oligonucleotide primer for the detection of SNP TSC0053885
gattatggttta

SEQ ID NO: 363492 - DNA, 12 bp, Artificial Sequence
  Oligonucleotide primer for the detection of SNP TSC0053885
gattacggttta

SEQ ID NO: 363493 - DNA, 12 bp, Artificial Sequence
  Oligonucleotide primer for the detection of SNP TSC0053887
ttataataactt

SEQ ID NO: 363494 - DNA, 12 bp, Artificial Sequence
  Oligonucleotide primer for the detection of SNP TSC0053887
aatacaacccta

SEQ ID NO: 363495 - DNA, 12 bp, Artificial Sequence
  Oligonucleotide primer for the detection of SNP TSC0053887
ttgtagtgattt

SEQ ID NO: 363496 - DNA, 12 bp, Artificial Sequence
  Oligonucleotide primer for the detection of SNP TSC0053888
cttacccactat

SEQ ID NO: 363497 - DNA, 12 bp, Artificial Sequence
  Oligonucleotide primer for the detection of SNP TSC0053888
agagaaatatta

SEQ ID NO: 363498 - DNA, 12 bp, Artificial Sequence
  Oligonucleotide primer for the detection of SNP TSC0053889
attaatcacaca

SEQ ID NO: 363499 - DNA, 12 bp, Artificial Sequence
  Oligonucleotide primer for the detection of SNP TSC0053889
tttagaggtatt

SEQ ID NO: 363500 - DNA, 12 bp, Artificial Sequence
  Oligonucleotide primer for the detection of SNP TSC0053889
cccaaaaacacc

SEQ ID NO: 363501 - DNA, 12 bp, Artificial Sequence
  Oligonucleotide primer for the detection of SNP TSC0053889
attgattatata

SEQ ID NO: 363502 - DNA, 12 bp, Artificial Sequence
  Oligonucleotide primer for the detection of SNP TSC0053890
accaactccctc

SEQ ID NO: 363503 - DNA, 12 bp, Artificial Sequence
  Oligonucleotide primer for the detection of SNP TSC0053890
ttgatttgatta

SEQ ID NO: 363504 - DNA, 12 bp, Artificial Sequence
  Oligonucleotide primer for the detection of SNP TSC0053891
aaacattcatcc

SEQ ID NO: 363505 - DNA, 12 bp, Artificial Sequence
  Oligonucleotide primer for the detection of SNP TSC0053891
ggtagtttggtt

SEQ ID NO: 363506 - DNA, 12 bp, Artificial Sequence
  Oligonucleotide primer for the detection of SNP TSC0053891
aggtatttattt

SEQ ID NO: 363507 - DNA, 12 bp, Artificial Sequence
  Oligonucleotide primer for the detection of SNP TSC0053892
ccattcattcaa

SEQ ID NO: 363508 - DNA, 12 bp, Artificial Sequence
  Oligonucleotide primer for the detection of SNP TSC0053894
attatacttacc

SEQ ID NO: 363509 - DNA, 12 bp, Artificial Sequence
  Oligonucleotide primer for the detection of SNP TSC0053894
ttgataatgaat

SEQ ID NO: 363510 - DNA, 12 bp, Artificial Sequence
  Oligonucleotide primer for the detection of SNP TSC0053894
attatatttatt

SEQ ID NO: 363511 - DNA, 12 bp, Artificial Sequence
  Oligonucleotide primer for the detection of SNP TSC0053895
tcatttctacct

SEQ ID NO: 363512 - DNA, 12 bp, Artificial Sequence
  Oligonucleotide primer for the detection of SNP TSC0053895
atttcaaccttt

SEQ ID NO: 363513 - DNA, 12 bp, Artificial Sequence
  Oligonucleotide primer for the detection of SNP TSC0053897
accattacaaat

SEQ ID NO: 363514 - DNA, 12 bp, Artificial Sequence
  Oligonucleotide primer for the detection of SNP TSC0053897
ttgttggtgttg

SEQ ID NO: 363515 - DNA, 12 bp, Artificial Sequence
  Oligonucleotide primer for the detection of SNP TSC0053897
tcgttggtgttg

SEQ ID NO: 363516 - DNA, 12 bp, Artificial Sequence
  Oligonucleotide primer for the detection of SNP TSC0053899
tttccctctccc

SEQ ID NO: 363517 - DNA, 12 bp, Artificial Sequence
  Oligonucleotide primer for the detection of SNP TSC0053900
tattttttgaat

SEQ ID NO: 363518 - DNA, 12 bp, Artificial Sequence
  Oligonucleotide primer for the detection of SNP TSC0053900
catttcctaaat

SEQ ID NO: 363519 - DNA, 12 bp, Artificial Sequence
  Oligonucleotide primer for the detection of SNP TSC0053902
tactcatcaatt

SEQ ID NO: 363520 - DNA, 12 bp, Artificial Sequence
  Oligonucleotide primer for the detection of SNP TSC0053902
aggaggagtaga

SEQ ID NO: 363521 - DNA, 12 bp, Artificial Sequence
  Oligonucleotide primer for the detection of SNP TSC0053903
ttctaaaactcc

SEQ ID NO: 363522 - DNA, 12 bp, Artificial Sequence
  Oligonucleotide primer for the detection of SNP TSC0053903
aatgtgtggagg

SEQ ID NO: 363523 - DNA, 12 bp, Artificial Sequence
  Oligonucleotide primer for the detection of SNP TSC0053905
ttcaaaccacaa

SEQ ID NO: 363524 - DNA, 12 bp, Artificial Sequence
  Oligonucleotide primer for the detection of SNP TSC0053905
tgtaggtatgat

SEQ ID NO: 363525 - DNA, 12 bp, Artificial Sequence
  Oligonucleotide primer for the detection of SNP TSC0053905
ggtttagattat

SEQ ID NO: 363526 - DNA, 12 bp, Artificial Sequence
  Oligonucleotide primer for the detection of SNP TSC0053909
tatatatctatc

SEQ ID NO: 363527 - DNA, 12 bp, Artificial Sequence
  Oligonucleotide primer for the detection of SNP TSC0053909
atttgaatatag

SEQ ID NO: 363528 - DNA, 12 bp, Artificial Sequence
  Oligonucleotide primer for the detection of SNP TSC0053910
ctataacctccc

SEQ ID NO: 363529 - DNA, 12 bp, Artificial Sequence
  Oligonucleotide primer for the detection of SNP TSC0053910
tagtaatggtag

SEQ ID NO: 363530 - DNA, 12 bp, Artificial Sequence
  Oligonucleotide primer for the detection of SNP TSC0053912
ggttgtgggaaa

SEQ ID NO: 363531 - DNA, 12 bp, Artificial Sequence
  Oligonucleotide primer for the detection of SNP TSC0053912
agagggtatggt

SEQ ID NO: 363532 - DNA, 12 bp, Artificial Sequence
  Oligonucleotide primer for the detection of SNP TSC0053918
ttaccaacacca

SEQ ID NO: 363533 - DNA, 12 bp, Artificial Sequence
  Oligonucleotide primer for the detection of SNP TSC0053918
ttaccaacgcca

SEQ ID NO: 363534 - DNA, 12 bp, Artificial Sequence
  Oligonucleotide primer for the detection of SNP TSC0053918
ttagttgtaata

SEQ ID NO: 363535 - DNA, 12 bp, Artificial Sequence
  Oligonucleotide primer for the detection of SNP TSC0053918
ttaattacaaca

SEQ ID NO: 363536 - DNA, 12 bp, Artificial Sequence
  Oligonucleotide primer for the detection of SNP TSC0053918
attattagtgtt

SEQ ID NO: 363537 - DNA, 12 bp, Artificial Sequence
  Oligonucleotide primer for the detection of SNP TSC0053918
attattagcgtt

SEQ ID NO: 363538 - DNA, 12 bp, Artificial Sequence
  Oligonucleotide primer for the detection of SNP TSC0053919
attaaattaact

SEQ ID NO: 363539 - DNA, 12 bp, Artificial Sequence
  Oligonucleotide primer for the detection of SNP TSC0053925
ataaccttccca

SEQ ID NO: 363540 - DNA, 12 bp, Artificial Sequence
  Oligonucleotide primer for the detection of SNP TSC0053925
accattccccta

SEQ ID NO: 363541 - DNA, 12 bp, Artificial Sequence
  Oligonucleotide primer for the detection of SNP TSC0053931
attaaaaaacta

SEQ ID NO: 363542 - DNA, 12 bp, Artificial Sequence
  Oligonucleotide primer for the detection of SNP TSC0053931
attaaagggttg

SEQ ID NO: 363543 - DNA, 12 bp, Artificial Sequence
  Oligonucleotide primer for the detection of SNP TSC0053933
aaactatatatt

SEQ ID NO: 363544 - DNA, 12 bp, Artificial Sequence
  Oligonucleotide primer for the detection of SNP TSC0053933
taatattaggta

SEQ ID NO: 363545 - DNA, 12 bp, Artificial Sequence
  Oligonucleotide primer for the detection of SNP TSC0053934
ttcaaataccca

SEQ ID NO: 363546 - DNA, 12 bp, Artificial Sequence
  Oligonucleotide primer for the detection of SNP TSC0053934
aatttgagtttt

SEQ ID NO: 363547 - DNA, 12 bp, Artificial Sequence
  Oligonucleotide primer for the detection of SNP TSC0053934
aatttaaatttt

SEQ ID NO: 363548 - DNA, 12 bp, Artificial Sequence
  Oligonucleotide primer for the detection of SNP TSC0053935
tacattattttc

SEQ ID NO: 363549 - DNA, 12 bp, Artificial Sequence
  Oligonucleotide primer for the detection of SNP TSC0053935
tattaaatatga

SEQ ID NO: 363550 - DNA, 12 bp, Artificial Sequence
  Oligonucleotide primer for the detection of SNP TSC0053936
tttattcacaat

SEQ ID NO: 363551 - DNA, 12 bp, Artificial Sequence
  Oligonucleotide primer for the detection of SNP TSC0053936
aagtgagtttta

SEQ ID NO: 363552 - DNA, 12 bp, Artificial Sequence
  Oligonukleotid-Primer
aagcgagtttta

SEQ ID NO: 363553 - DNA, 12 bp, Artificial Sequence
  Oligonucleotide primer for the detection of SNP TSC0053936
aaacaaatctca

SEQ ID NO: 363554 - DNA, 12 bp, Artificial Sequence
  Oligonucleotide primer for the detection of SNP TSC0053936
aaacgaatctca

SEQ ID NO: 363555 - DNA, 12 bp, Artificial Sequence
  Oligonucleotide primer for the detection of SNP TSC0053936
tttatttataat

SEQ ID NO: 363556 - DNA, 12 bp, Artificial Sequence
  Oligonucleotide primer for the detection of SNP TSC0053937
ttcatttttaat

SEQ ID NO: 363557 - DNA, 12 bp, Artificial Sequence
  Oligonucleotide primer for the detection of SNP TSC0053937
ctctaaatcata

SEQ ID NO: 363558 - DNA, 12 bp, Artificial Sequence
  Oligonucleotide primer for the detection of SNP TSC0053939
ttctacataacc

SEQ ID NO: 363559 - DNA, 12 bp, Artificial Sequence
  Oligonucleotide primer for the detection of SNP TSC0053939
ataagaatgggg

SEQ ID NO: 363560 - DNA, 12 bp, Artificial Sequence
  Oligonucleotide primer for the detection of SNP TSC0053940
caacatataata

SEQ ID NO: 363561 - DNA, 12 bp, Artificial Sequence
  Oligonucleotide primer for the detection of SNP TSC0053940
ttttattgagat

SEQ ID NO: 363562 - DNA, 12 bp, Artificial Sequence
  Oligonucleotide primer for the detection of SNP TSC0053940
ttccattaaaat

SEQ ID NO: 363563 - DNA, 12 bp, Artificial Sequence
  Oligonucleotide primer for the detection of SNP TSC0053940
taatatgtaata

SEQ ID NO: 363564 - DNA, 12 bp, Artificial Sequence
  Oligonukleotid-Primer
ctcctttaaact

SEQ ID NO: 363565 - DNA, 12 bp, Artificial Sequence
  Oligonucleotide primer for the detection of SNP TSC0053943
cgtatttattta

SEQ ID NO: 363566 - DNA, 12 bp, Artificial Sequence
  Oligonucleotide primer for the detection of SNP TSC0053944
atactattccca

SEQ ID NO: 363567 - DNA, 12 bp, Artificial Sequence
  Oligonucleotide primer for the detection of SNP TSC0053944
gttagttttgtt

SEQ ID NO: 363568 - DNA, 12 bp, Artificial Sequence
  Oligonucleotide primer for the detection of SNP TSC0053944
gttagttttgtc

SEQ ID NO: 363569 - DNA, 12 bp, Artificial Sequence
  Oligonucleotide primer for the detection of SNP TSC0053944
accaattttatc

SEQ ID NO: 363570 - DNA, 12 bp, Artificial Sequence
  Oligonucleotide primer for the detection of SNP TSC0053944
agtattattttt

SEQ ID NO: 363571 - DNA, 12 bp, Artificial Sequence
  Oligonucleotide primer for the detection of SNP TSC0006944
ttttaatttgtg

SEQ ID NO: 363572 - DNA, 12 bp, Artificial Sequence
  Oligonucleotide primer for the detection of SNP TSC0053947
tacaaaaactca

SEQ ID NO: 363573 - DNA, 12 bp, Artificial Sequence
  Oligonucleotide primer for the detection of SNP TSC0053947
tataagaattta

SEQ ID NO: 363574 - DNA, 12 bp, Artificial Sequence
  Oligonucleotide primer for the detection of SNP TSC0053948
atttaatcattt

SEQ ID NO: 363575 - DNA, 12 bp, Artificial Sequence
  Oligonucleotide primer for the detection of SNP TSC0053948
taggagagggaa

SEQ ID NO: 363576 - DNA, 12 bp, Artificial Sequence
  Oligonucleotide primer for the detection of SNP TSC0053949
aataaccttact

SEQ ID NO: 363577 - DNA, 12 bp, Artificial Sequence
  Oligonucleotide primer for the detection of SNP TSC0053951
tggaattaatat

SEQ ID NO: 363578 - DNA, 12 bp, Artificial Sequence
  Oligonucleotide primer for the detection of SNP TSC0053951
gttgagagtttt

SEQ ID NO: 363579 - DNA, 12 bp, Artificial Sequence
  Oligonucleotide primer for the detection of SNP TSC0053953
aactcaaacaca

SEQ ID NO: 363580 - DNA, 12 bp, Artificial Sequence
  Oligonucleotide primer for the detection of SNP TSC0053953
aactaaattaat

SEQ ID NO: 363581 - DNA, 12 bp, Artificial Sequence
  Oligonucleotide primer for the detection of SNP TSC0053953
agtttaaatata

SEQ ID NO: 363582 - DNA, 12 bp, Artificial Sequence
  Oligonucleotide primer for the detection of SNP TSC0053954
ttaacttatcaa

SEQ ID NO: 363583 - DNA, 12 bp, Artificial Sequence
  Oligonucleotide primer for the detection of SNP TSC0053954
gaaaattatagt

SEQ ID NO: 363584 - DNA, 12 bp, Artificial Sequence
  Oligonucleotide primer for the detection of SNP TSC0053954
taaaaattataa

SEQ ID NO: 363585 - DNA, 12 bp, Artificial Sequence
  Oligonucleotide primer for the detection of SNP TSC0053955
caatattttctt

SEQ ID NO: 363586 - DNA, 12 bp, Artificial Sequence
  Oligonucleotide primer for the detection of SNP TSC0053955
gatagaaaatta

SEQ ID NO: 363587 - DNA, 12 bp, Artificial Sequence
  Oligonucleotide primer for the detection of SNP TSC0053956
actcctaaacat

SEQ ID NO: 363588 - DNA, 12 bp, Artificial Sequence
  Oligonucleotide primer for the detection of SNP TSC0053956
ataggattaaaa

SEQ ID NO: 363589 - DNA, 12 bp, Artificial Sequence
  Oligonucleotide primer for the detection of SNP TSC0053956
atttttaaatat

SEQ ID NO: 363590 - DNA, 12 bp, Artificial Sequence
  Oligonucleotide primer for the detection of SNP TSC0053957
taccccaaataa

SEQ ID NO: 363591 - DNA, 12 bp, Artificial Sequence
  Oligonucleotide primer for the detection of SNP TSC0053957
gttgtttgatat

SEQ ID NO: 363592 - DNA, 12 bp, Artificial Sequence
  Oligonucleotide primer for the detection of SNP TSC0053957
actacctaacac

SEQ ID NO: 363593 - DNA, 12 bp, Artificial Sequence
  Oligonucleotide primer for the detection of SNP TSC0053957
tgttttaggtgg

SEQ ID NO: 363594 - DNA, 12 bp, Artificial Sequence
  Oligonucleotide primer for the detection of SNP TSC0053958
aaaaaccccaca

SEQ ID NO: 363595 - DNA, 12 bp, Artificial Sequence
  Oligonucleotide primer for the detection of SNP TSC0053958
gggtgtgaaagg

SEQ ID NO: 363596 - DNA, 12 bp, Artificial Sequence
  Oligonucleotide primer for the detection of SNP TSC0053958
gggcgtgaaagg

SEQ ID NO: 363597 - DNA, 12 bp, Artificial Sequence
  Oligonucleotide primer for the detection of SNP TSC0053959
ttattaaaagat

SEQ ID NO: 363598 - DNA, 12 bp, Artificial Sequence
  Oligonucleotide primer for the detection of SNP TSC0053959
atttaaaatgta

SEQ ID NO: 363599 - DNA, 12 bp, Artificial Sequence
  Oligonucleotide primer for the detection of SNP TSC0053960
aaaaataaattt

SEQ ID NO: 363600 - DNA, 12 bp, Artificial Sequence
  Oligonucleotide primer for the detection of SNP TSC0053961
atttttgttgta

SEQ ID NO: 363601 - DNA, 12 bp, Artificial Sequence
  Oligonucleotide primer for the detection of SNP TSC0053962
attttcgttttt

SEQ ID NO: 363602 - DNA, 12 bp, Artificial Sequence
  Oligonucleotide primer for the detection of SNP TSC0053962
acctccgcctcc

SEQ ID NO: 363603 - DNA, 12 bp, Artificial Sequence
  Oligonucleotide primer for the detection of SNP TSC0053962
aatgatttgaaa

SEQ ID NO: 363604 - DNA, 12 bp, Artificial Sequence
  Oligonucleotide primer for the detection of SNP TSC0053963
ggttgaatgaat

SEQ ID NO: 363605 - DNA, 12 bp, Artificial Sequence
  Oligonucleotide primer for the detection of SNP TSC0053963
taattaaataaa

SEQ ID NO: 363606 - DNA, 12 bp, Artificial Sequence
  Oligonucleotide primer for the detection of SNP TSC0053963
aataatagtagg

SEQ ID NO: 363607 - DNA, 12 bp, Artificial Sequence
  Oligonucleotide primer for the detection of SNP TSC0053964
aaaaaaaagtat

SEQ ID NO: 363608 - DNA, 12 bp, Artificial Sequence
  Oligonucleotide primer for the detection of SNP TSC0053964
taaatatgggag

SEQ ID NO: 363609 - DNA, 12 bp, Artificial Sequence
  Oligonucleotide primer for the detection of SNP TSC0053965
aaatttccttta

SEQ ID NO: 363610 - DNA, 12 bp, Artificial Sequence
  Oligonucleotide primer for the detection of SNP TSC0053965
gtattgggggga

SEQ ID NO: 363611 - DNA, 12 bp, Artificial Sequence
  Oligonucleotide primer for the detection of SNP TSC0007033
tcaaaactacta

SEQ ID NO: 363612 - DNA, 12 bp, Artificial Sequence
  Oligonucleotide primer for the detection of SNP TSC0007033
cattactacaac

SEQ ID NO: 363613 - DNA, 12 bp, Artificial Sequence
  Oligonucleotide primer for the detection of SNP TSC0053969
aatagtattttt

SEQ ID NO: 363614 - DNA, 12 bp, Artificial Sequence
  Oligonucleotide primer for the detection of SNP TSC0053969
aataacactttt

SEQ ID NO: 363615 - DNA, 12 bp, Artificial Sequence
  Oligonucleotide primer for the detection of SNP TSC0053970
aatacaaaaata

SEQ ID NO: 363616 - DNA, 12 bp, Artificial Sequence
  Oligonucleotide primer for the detection of SNP TSC0053970
taaactttcaaa

SEQ ID NO: 363617 - DNA, 12 bp, Artificial Sequence
  Oligonucleotide primer for the detection of SNP TSC0053970
tggtgtaaagat

SEQ ID NO: 363618 - DNA, 12 bp, Artificial Sequence
  Oligonucleotide primer for the detection of SNP TSC0053971
ttttcataatac

SEQ ID NO: 363619 - DNA, 12 bp, Artificial Sequence
  Oligonucleotide primer for the detection of SNP TSC0053971
attaagaaatag

SEQ ID NO: 363620 - DNA, 12 bp, Artificial Sequence
  Oligonucleotide primer for the detection of SNP TSC0053971
ttttatgatatt

SEQ ID NO: 363621 - DNA, 12 bp, Artificial Sequence
  Oligonucleotide primer for the detection of SNP TSC0053972
tgggttttagtg

SEQ ID NO: 363622 - DNA, 12 bp, Artificial Sequence
  Oligonucleotide primer for the detection of SNP TSC0053973
atctaaccataa

SEQ ID NO: 363623 - DNA, 12 bp, Artificial Sequence
  Oligonucleotide primer for the detection of SNP TSC0053973
taatattaattt

SEQ ID NO: 363624 - DNA, 12 bp, Artificial Sequence
  Oligonucleotide primer for the detection of SNP TSC0053973
tttcaatattaa

SEQ ID NO: 363625 - DNA, 12 bp, Artificial Sequence
  Oligonucleotide primer for the detection of SNP TSC0053977
cataattcttat

SEQ ID NO: 363626 - DNA, 12 bp, Artificial Sequence
  Oligonucleotide primer for the detection of SNP TSC0053978
caatcctttcca

SEQ ID NO: 363627 - DNA, 12 bp, Artificial Sequence
  Oligonucleotide primer for the detection of SNP TSC0053978
gtattgtttaaa

SEQ ID NO: 363628 - DNA, 12 bp, Artificial Sequence
  Oligonucleotide primer for the detection of SNP TSC0053979
acctacctaaaa

SEQ ID NO: 363629 - DNA, 12 bp, Artificial Sequence
  Oligonucleotide primer for the detection of SNP TSC0053979
ggattgtatatg

SEQ ID NO: 363630 - DNA, 12 bp, Artificial Sequence
  Oligonucleotide primer for the detection of SNP TSC0053979
gtttatttgaaa

SEQ ID NO: 363631 - DNA, 12 bp, Artificial Sequence
  Oligonucleotide primer for the detection of SNP TSC0053980
caacatatatca

SEQ ID NO: 363632 - DNA, 12 bp, Artificial Sequence
  Oligonucleotide primer for the detection of SNP TSC0053980
caacgtatatca

SEQ ID NO: 363633 - DNA, 12 bp, Artificial Sequence
  Oligonucleotide primer for the detection of SNP TSC0053980
cgacatatatca

SEQ ID NO: 363634 - DNA, 12 bp, Artificial Sequence
  Oligonucleotide primer for the detection of SNP TSC0053980
cgacgtatatca

SEQ ID NO: 363635 - DNA, 12 bp, Artificial Sequence
  Oligonucleotide primer for the detection of SNP TSC0053980
aaagtttttatt

SEQ ID NO: 363636 - DNA, 12 bp, Artificial Sequence
  Oligonucleotide primer for the detection of SNP TSC0053980
aaaacttccacc

SEQ ID NO: 363637 - DNA, 12 bp, Artificial Sequence
  Oligonucleotide primer for the detection of SNP TSC0053980
tgatgtgtgtta

SEQ ID NO: 363638 - DNA, 12 bp, Artificial Sequence
  Oligonucleotide primer for the detection of SNP TSC0053980
cgatgtgtgtta

SEQ ID NO: 363639 - DNA, 12 bp, Artificial Sequence
  Oligonucleotide primer for the detection of SNP TSC0053980
tgacgtgtgtta

SEQ ID NO: 363640 - DNA, 12 bp, Artificial Sequence
  Oligonucleotide primer for the detection of SNP TSC0053980
cgacgtgtgtta

SEQ ID NO: 363641 - DNA, 12 bp, Artificial Sequence
  Oligonucleotide primer for the detection of SNP TSC0007515
agtttgttttag

SEQ ID NO: 363642 - DNA, 12 bp, Artificial Sequence
  Oligonucleotide primer for the detection of SNP TSC0007516
tttaaaccattc

SEQ ID NO: 363643 - DNA, 12 bp, Artificial Sequence
  Oligonucleotide primer for the detection of SNP TSC0007516
agtttgttgggg

SEQ ID NO: 363644 - DNA, 12 bp, Artificial Sequence
  Oligonucleotide primer for the detection of SNP TSC0053983
taaataaataac

SEQ ID NO: 363645 - DNA, 12 bp, Artificial Sequence
  Oligonucleotide primer for the detection of SNP TSC0053983
tagtggggagag

SEQ ID NO: 363646 - DNA, 12 bp, Artificial Sequence
  Oligonucleotide primer for the detection of SNP TSC0053984
ccacaacacctc

SEQ ID NO: 363647 - DNA, 12 bp, Artificial Sequence
  Oligonucleotide primer for the detection of SNP TSC0053984
ccacgacacctc

SEQ ID NO: 363648 - DNA, 12 bp, Artificial Sequence
  Oligonucleotide primer for the detection of SNP TSC0053984
ggaggtatagag

SEQ ID NO: 363649 - DNA, 12 bp, Artificial Sequence
  Oligonucleotide primer for the detection of SNP TSC0006406
aaaaaatcaata

SEQ ID NO: 363650 - DNA, 12 bp, Artificial Sequence
  Oligonucleotide primer for the detection of SNP TSC0006406
tgttatggttat

SEQ ID NO: 363651 - DNA, 12 bp, Artificial Sequence
  Oligonucleotide primer for the detection of SNP TSC0006406
tgttatggttac

SEQ ID NO: 363652 - DNA, 12 bp, Artificial Sequence
  Oligonucleotide primer for the detection of SNP TSC0006406
ttatcataatta

SEQ ID NO: 363653 - DNA, 12 bp, Artificial Sequence
  Oligonucleotide primer for the detection of SNP TSC0006406
aagaaagttagt

SEQ ID NO: 363654 - DNA, 12 bp, Artificial Sequence
  Oligonucleotide primer for the detection of SNP TSC0053988
taacttaatcct

SEQ ID NO: 363655 - DNA, 12 bp, Artificial Sequence
  Oligonucleotide primer for the detection of SNP TSC0053988
agtagttattgg

SEQ ID NO: 363656 - DNA, 12 bp, Artificial Sequence
  Oligonucleotide primer for the detection of SNP TSC0053989
tttacttaatat

SEQ ID NO: 363657 - DNA, 12 bp, Artificial Sequence
  Oligonucleotide primer for the detection of SNP TSC0053990
acaaattcaata

SEQ ID NO: 363658 - DNA, 12 bp, Artificial Sequence
  Oligonucleotide primer for the detection of SNP TSC0053990
tttgatagaaat

SEQ ID NO: 363659 - DNA, 12 bp, Artificial Sequence
  Oligonucleotide primer for the detection of SNP TSC0053990
tagatttagtat

SEQ ID NO: 363660 - DNA, 12 bp, Artificial Sequence
  Oligonucleotide primer for the detection of SNP TSC0053990
tagatttagtac

SEQ ID NO: 363661 - DNA, 12 bp, Artificial Sequence
  Oligonucleotide primer for the detection of SNP TSC0053991
ttatacttctca

SEQ ID NO: 363662 - DNA, 12 bp, Artificial Sequence
  Oligonucleotide primer for the detection of SNP TSC0053991
ttatacttctcg

SEQ ID NO: 363663 - DNA, 12 bp, Artificial Sequence
  Oligonucleotide primer for the detection of SNP TSC0053991
ttattgtagaag

SEQ ID NO: 363664 - DNA, 12 bp, Artificial Sequence
  Oligonucleotide primer for the detection of SNP TSC0053992
acaactcctaca

SEQ ID NO: 363665 - DNA, 12 bp, Artificial Sequence
  Oligonucleotide primer for the detection of SNP TSC0053992
gcaactcctaca

SEQ ID NO: 363666 - DNA, 12 bp, Artificial Sequence
  Oligonucleotide primer for the detection of SNP TSC0053992
ttggagtaggag

SEQ ID NO: 363667 - DNA, 12 bp, Artificial Sequence
  Oligonucleotide primer for the detection of SNP TSC0053992
tgtagtttttgt

SEQ ID NO: 363668 - DNA, 12 bp, Artificial Sequence
  Oligonucleotide primer for the detection of SNP TSC0053992
cgtagtttttgt

SEQ ID NO: 363669 - DNA, 12 bp, Artificial Sequence
  Oligonucleotide primer for the detection of SNP TSC0053993
ctacttccttac

SEQ ID NO: 363670 - DNA, 12 bp, Artificial Sequence
  Oligonucleotide primer for the detection of SNP TSC0053994
tttctcctaact

SEQ ID NO: 363671 - DNA, 12 bp, Artificial Sequence
  Oligonucleotide primer for the detection of SNP TSC0053994
ttaaacgttaag

SEQ ID NO: 363672 - DNA, 12 bp, Artificial Sequence
  Oligonucleotide primer for the detection of SNP TSC0053997
caataaatacaa

SEQ ID NO: 363673 - DNA, 12 bp, Artificial Sequence
  Oligonucleotide primer for the detection of SNP TSC0053997
caataaatacga

SEQ ID NO: 363674 - DNA, 12 bp, Artificial Sequence
  Oligonucleotide primer for the detection of SNP TSC0053997
gtaagttgttgt

SEQ ID NO: 363675 - DNA, 12 bp, Artificial Sequence
  Oligonucleotide primer for the detection of SNP TSC0053997
gtaagttgtcgt

SEQ ID NO: 363676 - DNA, 12 bp, Artificial Sequence
  Oligonucleotide primer for the detection of SNP TSC0053997
ataaattatcac

SEQ ID NO: 363677 - DNA, 12 bp, Artificial Sequence
  Oligonucleotide primer for the detection of SNP TSC0053997
ataaattatcgc

SEQ ID NO: 363678 - DNA, 12 bp, Artificial Sequence
  Oligonucleotide primer for the detection of SNP TSC0053997
gtaaattatcac

SEQ ID NO: 363679 - DNA, 12 bp, Artificial Sequence
  Oligonucleotide primer for the detection of SNP TSC0053997
gtaaattatcgc

SEQ ID NO: 363680 - DNA, 12 bp, Artificial Sequence
  Oligonucleotide primer for the detection of SNP TSC0053997
taatgaatatga

SEQ ID NO: 363681 - DNA, 12 bp, Artificial Sequence
  Oligonucleotide primer for the detection of SNP TSC0053997
taatgaatacga

SEQ ID NO: 363682 - DNA, 12 bp, Artificial Sequence
  Oligonucleotide primer for the detection of SNP TSC0053999
actacaaacaac

SEQ ID NO: 363683 - DNA, 12 bp, Artificial Sequence
  Oligonucleotide primer for the detection of SNP TSC0053999
aggtaatgattt

SEQ ID NO: 363684 - DNA, 12 bp, Artificial Sequence
  Oligonucleotide primer for the detection of SNP TSC0053999
ttgtaaataatt

SEQ ID NO: 363685 - DNA, 12 bp, Artificial Sequence
  Oligonucleotide primer for the detection of SNP TSC0054000
aaaaaatttatc

SEQ ID NO: 363686 - DNA, 12 bp, Artificial Sequence
  Oligonucleotide primer for the detection of SNP TSC0054000
taggattattga

SEQ ID NO: 363687 - DNA, 12 bp, Artificial Sequence
  Oligonucleotide primer for the detection of SNP TSC0054000
taggattatcga

SEQ ID NO: 363688 - DNA, 12 bp, Artificial Sequence
  Oligonucleotide primer for the detection of SNP TSC0054001
ttcaattcaaac

SEQ ID NO: 363689 - DNA, 12 bp, Artificial Sequence
  Oligonukleotid-Primer
gggtttatttgg

SEQ ID NO: 363690 - DNA, 12 bp, Artificial Sequence
  Oligonucleotide primer for the detection of SNP TSC0054002
aagtttttttgg

SEQ ID NO: 363691 - DNA, 12 bp, Artificial Sequence
  Oligonucleotide primer for the detection of SNP TSC0054003
actttttatact

SEQ ID NO: 363692 - DNA, 12 bp, Artificial Sequence
  Oligonucleotide primer for the detection of SNP TSC0054003
ataagaattttg

SEQ ID NO: 363693 - DNA, 12 bp, Artificial Sequence
  Oligonucleotide primer for the detection of SNP TSC0054004
tttcaaactttt

SEQ ID NO: 363694 - DNA, 12 bp, Artificial Sequence
  Oligonucleotide primer for the detection of SNP TSC0054004
atcctaaacaaa

SEQ ID NO: 363695 - DNA, 12 bp, Artificial Sequence
  Oligonucleotide primer for the detection of SNP TSC0054007
aaaattttttat

SEQ ID NO: 363696 - DNA, 12 bp, Artificial Sequence
  Oligonucleotide primer for the detection of SNP TSC0054007
aaaaacttctca

SEQ ID NO: 363697 - DNA, 12 bp, Artificial Sequence
  Oligonukleotid-Primer
tttaaaatagta

SEQ ID NO: 363698 - DNA, 12 bp, Artificial Sequence
  Oligonucleotide primer for the detection of SNP TSC0054008
ttcaatttccta

SEQ ID NO: 363699 - DNA, 12 bp, Artificial Sequence
  Oligonucleotide primer for the detection of SNP TSC0054010
atatactatata

SEQ ID NO: 363700 - DNA, 12 bp, Artificial Sequence
  Oligonucleotide primer for the detection of SNP TSC0054010
ttaggttatttt

SEQ ID NO: 363701 - DNA, 12 bp, Artificial Sequence
  Oligonucleotide primer for the detection of SNP TSC0054010
cccaaactattc

SEQ ID NO: 363702 - DNA, 12 bp, Artificial Sequence
  Oligonucleotide primer for the detection of SNP TSC0054010
gtatattgtgtg

SEQ ID NO: 363703 - DNA, 12 bp, Artificial Sequence
  Oligonucleotide primer for the detection of SNP TSC0054011
aaaattattaaa

SEQ ID NO: 363704 - DNA, 12 bp, Artificial Sequence
  Oligonucleotide primer for the detection of SNP TSC0054011
atttgtttagtt

SEQ ID NO: 363705 - DNA, 12 bp, Artificial Sequence
  Oligonukleotid-Primer
atttgtttagtc

SEQ ID NO: 363706 - DNA, 12 bp, Artificial Sequence
  Oligonucleotide primer for the detection of SNP TSC0054011
aaaattattaga

SEQ ID NO: 363707 - DNA, 12 bp, Artificial Sequence
  Oligonucleotide primer for the detection of SNP TSC0054012
actaaacaaaat

SEQ ID NO: 363708 - DNA, 12 bp, Artificial Sequence
  Oligonucleotide primer for the detection of SNP TSC0054012
tttttgtgagtg

SEQ ID NO: 363709 - DNA, 12 bp, Artificial Sequence
  Oligonukleotid-Primer
aaaaattaatcc

SEQ ID NO: 363710 - DNA, 12 bp, Artificial Sequence
  Oligonucleotide primer for the detection of SNP TSC0054013
ttaaaattttaa

SEQ ID NO: 363711 - DNA, 12 bp, Artificial Sequence
  Oligonucleotide primer for the detection of SNP TSC0054015
aatcccctaata

SEQ ID NO: 363712 - DNA, 12 bp, Artificial Sequence
  Oligonucleotide primer for the detection of SNP TSC0054015
gtgtttgtttag

SEQ ID NO: 363713 - DNA, 12 bp, Artificial Sequence
  Oligonucleotide primer for the detection of SNP TSC0054015
atatctatccaa

SEQ ID NO: 363714 - DNA, 12 bp, Artificial Sequence
  Oligonucleotide primer for the detection of SNP TSC0054015
gttttttgatgt

SEQ ID NO: 363715 - DNA, 12 bp, Artificial Sequence
  Oligonucleotide primer for the detection of SNP TSC0054017
cttattaaccat

SEQ ID NO: 363716 - DNA, 12 bp, Artificial Sequence
  Oligonucleotide primer for the detection of SNP TSC0054017
taaagatatata

SEQ ID NO: 363717 - DNA, 12 bp, Artificial Sequence
  Oligonucleotide primer for the detection of SNP TSC0054017
taaaaatataca

SEQ ID NO: 363718 - DNA, 12 bp, Artificial Sequence
  Oligonucleotide primer for the detection of SNP TSC0054017
tttattggttat

SEQ ID NO: 363719 - DNA, 12 bp, Artificial Sequence
  Oligonucleotide primer for the detection of SNP TSC0054018
ccaaatttaatc

SEQ ID NO: 363720 - DNA, 12 bp, Artificial Sequence
  Oligonucleotide primer for the detection of SNP TSC0054021
taatcaaaccct

SEQ ID NO: 363721 - DNA, 12 bp, Artificial Sequence
  Oligonucleotide primer for the detection of SNP TSC0054021
tataatttggaa

SEQ ID NO: 363722 - DNA, 12 bp, Artificial Sequence
  Oligonucleotide primer for the detection of SNP TSC0054021
ataatctaaaaa

SEQ ID NO: 363723 - DNA, 12 bp, Artificial Sequence
  Oligonucleotide primer for the detection of SNP TSC0054021
tggttaggtttt

SEQ ID NO: 363724 - DNA, 12 bp, Artificial Sequence
  Oligonucleotide primer for the detection of SNP TSC0008220
tcaaaatattta

SEQ ID NO: 363725 - DNA, 12 bp, Artificial Sequence
  Oligonucleotide primer for the detection of SNP TSC0008220
cttttataataa

SEQ ID NO: 363726 - DNA, 12 bp, Artificial Sequence
  Oligonucleotide primer for the detection of SNP TSC0008220
aaaatatttgtt

SEQ ID NO: 363727 - DNA, 12 bp, Artificial Sequence
  Oligonucleotide primer for the detection of SNP TSC0054024
ttataggtgtaa

SEQ ID NO: 363728 - DNA, 12 bp, Artificial Sequence
  Oligonucleotide primer for the detection of SNP TSC0054027
tattaccttaat

SEQ ID NO: 363729 - DNA, 12 bp, Artificial Sequence
  Oligonucleotide primer for the detection of SNP TSC0054027
taatactattta

SEQ ID NO: 363730 - DNA, 12 bp, Artificial Sequence
  Oligonucleotide primer for the detection of SNP TSC0054027
tgttattttaat

SEQ ID NO: 363731 - DNA, 12 bp, Artificial Sequence
  Oligonucleotide primer for the detection of SNP TSC0054033
tccttcacaata

SEQ ID NO: 363732 - DNA, 12 bp, Artificial Sequence
  Oligonucleotide primer for the detection of SNP TSC0054033
ttttttataatg

SEQ ID NO: 363733 - DNA, 12 bp, Artificial Sequence
  Oligonucleotide primer for the detection of SNP TSC0054034
atcacaaaacac

SEQ ID NO: 363734 - DNA, 12 bp, Artificial Sequence
  Oligonucleotide primer for the detection of SNP TSC0054034
aggaaagaaaag

SEQ ID NO: 363735 - DNA, 12 bp, Artificial Sequence
  Oligonucleotide primer for the detection of SNP TSC0008669
ttataaaaccat

SEQ ID NO: 363736 - DNA, 12 bp, Artificial Sequence
  Oligonucleotide primer for the detection of SNP TSC0008669
ttaaaaatctta

SEQ ID NO: 363737 - DNA, 12 bp, Artificial Sequence
  Oligonucleotide primer for the detection of SNP TSC0008669
ttataaagttat

SEQ ID NO: 363738 - DNA, 12 bp, Artificial Sequence
  Oligonucleotide primer for the detection of SNP TSC0054035
tctaactcaccc

SEQ ID NO: 363739 - DNA, 12 bp, Artificial Sequence
  Oligonucleotide primer for the detection of SNP TSC0054036
atcttataaaca

SEQ ID NO: 363740 - DNA, 12 bp, Artificial Sequence
  Oligonucleotide primer for the detection of SNP TSC0054036
tcgtttttttgg

SEQ ID NO: 363741 - DNA, 12 bp, Artificial Sequence
  Oligonucleotide primer for the detection of SNP TSC0054036
ccacccctctaa

SEQ ID NO: 363742 - DNA, 12 bp, Artificial Sequence
  Oligonucleotide primer for the detection of SNP TSC0054036
ccgcccctctaa

SEQ ID NO: 363743 - DNA, 12 bp, Artificial Sequence
  Oligonucleotide primer for the detection of SNP TSC0054036
aattttatgggt

SEQ ID NO: 363744 - DNA, 12 bp, Artificial Sequence
  Oligonucleotide primer for the detection of SNP TSC0054037
tcccccaccaac

SEQ ID NO: 363745 - DNA, 12 bp, Artificial Sequence
  Oligonucleotide primer for the detection of SNP TSC0054037
ttttataatttg

SEQ ID NO: 363746 - DNA, 12 bp, Artificial Sequence
  Oligonucleotide primer for the detection of SNP TSC0054037
ttttataactta

SEQ ID NO: 363747 - DNA, 12 bp, Artificial Sequence
  Oligonucleotide primer for the detection of SNP TSC0054038
agaggttaaata

SEQ ID NO: 363748 - DNA, 12 bp, Artificial Sequence
  Oligonucleotide primer for the detection of SNP TSC0054039
gaggttggtgtg

SEQ ID NO: 363749 - DNA, 12 bp, Artificial Sequence
  Oligonucleotide primer for the detection of SNP TSC0054039
taagatattttc

SEQ ID NO: 363750 - DNA, 12 bp, Artificial Sequence
  Oligonucleotide primer for the detection of SNP TSC0000133
atataattaata

SEQ ID NO: 363751 - DNA, 12 bp, Artificial Sequence
  Oligonucleotide primer for the detection of SNP TSC0054041
aattttaaattt

SEQ ID NO: 363752 - DNA, 12 bp, Artificial Sequence
  Oligonucleotide primer for the detection of SNP TSC0054041
atgttatataaa

SEQ ID NO: 363753 - DNA, 12 bp, Artificial Sequence
  Oligonucleotide primer for the detection of SNP TSC0054041
atattacacaaa

SEQ ID NO: 363754 - DNA, 12 bp, Artificial Sequence
  Oligonucleotide primer for the detection of SNP TSC0054041
aattttaggttt

SEQ ID NO: 363755 - DNA, 12 bp, Artificial Sequence
  Oligonucleotide primer for the detection of SNP TSC0054042
ttttaaaatcct

SEQ ID NO: 363756 - DNA, 12 bp, Artificial Sequence
  Oligonucleotide primer for the detection of SNP TSC0054042
tttggatatgtt

SEQ ID NO: 363757 - DNA, 12 bp, Artificial Sequence
  Oligonucleotide primer for the detection of SNP TSC0054044
tccacttcctat

SEQ ID NO: 363758 - DNA, 12 bp, Artificial Sequence
  Oligonucleotide primer for the detection of SNP TSC0054044
ttatttataatt

SEQ ID NO: 363759 - DNA, 12 bp, Artificial Sequence
  Oligonucleotide primer for the detection of SNP TSC0054045
tacctaaccaaa

SEQ ID NO: 363760 - DNA, 12 bp, Artificial Sequence
  Oligonucleotide primer for the detection of SNP TSC0054045
ctaaaacacctc

SEQ ID NO: 363761 - DNA, 12 bp, Artificial Sequence
  Oligonucleotide primer for the detection of SNP TSC0054045
tatttggttaag

SEQ ID NO: 363762 - DNA, 12 bp, Artificial Sequence
  Oligonucleotide primer for the detection of SNP TSC0006147
tgggatattata

SEQ ID NO: 363763 - DNA, 12 bp, Artificial Sequence
  Oligonucleotide primer for the detection of SNP TSC0006147
cgggatattata

SEQ ID NO: 363764 - DNA, 12 bp, Artificial Sequence
  Oligonucleotide primer for the detection of SNP TSC0006147
caaaatactaca

SEQ ID NO: 363765 - DNA, 12 bp, Artificial Sequence
  Oligonucleotide primer for the detection of SNP TSC0006147
cgaaatactaca

SEQ ID NO: 363766 - DNA, 12 bp, Artificial Sequence
  Oligonucleotide primer for the detection of SNP TSC0006147
gtgatttgtagg

SEQ ID NO: 363767 - DNA, 12 bp, Artificial Sequence
  Oligonucleotide primer for the detection of SNP TSC0054046
tagtttaatttt

SEQ ID NO: 363768 - DNA, 12 bp, Artificial Sequence
  Oligonucleotide primer for the detection of SNP TSC0054046
tagtttaatttc

SEQ ID NO: 363769 - DNA, 12 bp, Artificial Sequence
  Oligonucleotide primer for the detection of SNP TSC0054046
caatccaacccc

SEQ ID NO: 363770 - DNA, 12 bp, Artificial Sequence
  Oligonucleotide primer for the detection of SNP TSC0054046
gaggaggttaag

SEQ ID NO: 363771 - DNA, 12 bp, Artificial Sequence
  Oligonucleotide primer for the detection of SNP TSC0054047
atatctactaat

SEQ ID NO: 363772 - DNA, 12 bp, Artificial Sequence
  Oligonucleotide primer for the detection of SNP TSC0054047
  unsure (5): unknown base
tgggntgaagaa

SEQ ID NO: 363773 - DNA, 12 bp, Artificial Sequence
  Oligonucleotide primer for the detection of SNP TSC0054048
aaaccatctaaa

SEQ ID NO: 363774 - DNA, 12 bp, Artificial Sequence
  Oligonucleotide primer for the detection of SNP TSC0054048
attgagaatagt

SEQ ID NO: 363775 - DNA, 12 bp, Artificial Sequence
  Oligonucleotide primer for the detection of SNP TSC0054048
attgagaatagc

SEQ ID NO: 363776 - DNA, 12 bp, Artificial Sequence
  Oligonucleotide primer for the detection of SNP TSC0054049
acacttctcaac

SEQ ID NO: 363777 - DNA, 12 bp, Artificial Sequence
  Oligonucleotide primer for the detection of SNP TSC0005568
aaacctaataac

SEQ ID NO: 363778 - DNA, 12 bp, Artificial Sequence
  Oligonucleotide primer for the detection of SNP TSC0005569
aggtatttaagg

SEQ ID NO: 363779 - DNA, 12 bp, Artificial Sequence
  Oligonucleotide primer for the detection of SNP TSC0054057
ctttttcctctt

SEQ ID NO: 363780 - DNA, 12 bp, Artificial Sequence
  Oligonucleotide primer for the detection of SNP TSC0054057
ccttttatcaaa

SEQ ID NO: 363781 - DNA, 12 bp, Artificial Sequence
  Oligonucleotide primer for the detection of SNP TSC0054058
aacttttaccca

SEQ ID NO: 363782 - DNA, 12 bp, Artificial Sequence
  Oligonucleotide primer for the detection of SNP TSC0054058
tatggatgttaa

SEQ ID NO: 363783 - DNA, 12 bp, Artificial Sequence
  Oligonucleotide primer for the detection of SNP TSC0054058
cataaataccaa

SEQ ID NO: 363784 - DNA, 12 bp, Artificial Sequence
  Oligonucleotide primer for the detection of SNP TSC0054064
accaaattaata

SEQ ID NO: 363785 - DNA, 12 bp, Artificial Sequence
  Oligonucleotide primer for the detection of SNP TSC0054064
accgaattaata

SEQ ID NO: 363786 - DNA, 12 bp, Artificial Sequence
  Oligonucleotide primer for the detection of SNP TSC0054064
atttcgtaaatt

SEQ ID NO: 363787 - DNA, 12 bp, Artificial Sequence
  Oligonucleotide primer for the detection of SNP TSC0054064
attttgtaaatc

SEQ ID NO: 363788 - DNA, 12 bp, Artificial Sequence
  Oligonucleotide primer for the detection of SNP TSC0054064
atttcgtaaatc

SEQ ID NO: 363789 - DNA, 12 bp, Artificial Sequence
  Oligonucleotide primer for the detection of SNP TSC0054064
attccacaaatc

SEQ ID NO: 363790 - DNA, 12 bp, Artificial Sequence
  Oligonucleotide primer for the detection of SNP TSC0054064
attccgcaaatc

SEQ ID NO: 363791 - DNA, 12 bp, Artificial Sequence
  Oligonucleotide primer for the detection of SNP TSC0054064
gattgaattgat

SEQ ID NO: 363792 - DNA, 12 bp, Artificial Sequence
  Oligonucleotide primer for the detection of SNP TSC0054064
gatcgaattgat

SEQ ID NO: 363793 - DNA, 12 bp, Artificial Sequence
  Oligonucleotide primer for the detection of SNP TSC0054065
ctcatcttactt

SEQ ID NO: 363794 - DNA, 12 bp, Artificial Sequence
  Oligonucleotide primer for the detection of SNP TSC0054065
atttagaattaa

SEQ ID NO: 363795 - DNA, 12 bp, Artificial Sequence
  Oligonucleotide primer for the detection of SNP TSC0054066
ataaaaacatcc

SEQ ID NO: 363796 - DNA, 12 bp, Artificial Sequence
  Oligonucleotide primer for the detection of SNP TSC0054066
ttttgatttaga

SEQ ID NO: 363797 - DNA, 12 bp, Artificial Sequence
  Oligonucleotide primer for the detection of SNP TSC0054067
ttccactcttaa

SEQ ID NO: 363798 - DNA, 12 bp, Artificial Sequence
  Oligonucleotide primer for the detection of SNP TSC0008993
ctacaataaact

SEQ ID NO: 363799 - DNA, 12 bp, Artificial Sequence
  Oligonucleotide primer for the detection of SNP TSC0008993
agttttttgaga

SEQ ID NO: 363800 - DNA, 12 bp, Artificial Sequence
  Oligonucleotide primer for the detection of SNP TSC0008993
agtttttcgaga

SEQ ID NO: 363801 - DNA, 12 bp, Artificial Sequence
  Oligonucleotide primer for the detection of SNP TSC0054069
taaataaactcc

SEQ ID NO: 363802 - DNA, 12 bp, Artificial Sequence
  Oligonucleotide primer for the detection of SNP TSC0054069
ttgttgttgttg

SEQ ID NO: 363803 - DNA, 12 bp, Artificial Sequence
  Oligonucleotide primer for the detection of SNP TSC0054070
ttcaataaatca

SEQ ID NO: 363804 - DNA, 12 bp, Artificial Sequence
  Oligonucleotide primer for the detection of SNP TSC0054070
tataaaaatgat

SEQ ID NO: 363805 - DNA, 12 bp, Artificial Sequence
  Oligonucleotide primer for the detection of SNP TSC0054070
tataaaaacgat

SEQ ID NO: 363806 - DNA, 12 bp, Artificial Sequence
  Oligonucleotide primer for the detection of SNP TSC0054070
ataaaaacgata

SEQ ID NO: 363807 - DNA, 12 bp, Artificial Sequence
  Oligonucleotide primer for the detection of SNP TSC0054070
ttaatgagttat

SEQ ID NO: 363808 - DNA, 12 bp, Artificial Sequence
  Oligonucleotide primer for the detection of SNP TSC0054070
ttaatgagttac

SEQ ID NO: 363809 - DNA, 12 bp, Artificial Sequence
  Oligonucleotide primer for the detection of SNP TSC0054072
atggagttttat

SEQ ID NO: 363810 - DNA, 12 bp, Artificial Sequence
  Oligonucleotide primer for the detection of SNP TSC0054072
atggagttttac

SEQ ID NO: 363811 - DNA, 12 bp, Artificial Sequence
  Oligonucleotide primer for the detection of SNP TSC0054073
aatattacttta

SEQ ID NO: 363812 - DNA, 12 bp, Artificial Sequence
  Oligonucleotide primer for the detection of SNP TSC0054073
atagagtatatt

SEQ ID NO: 363813 - DNA, 12 bp, Artificial Sequence
  Oligonucleotide primer for the detection of SNP TSC0054073
atagagtatatc

SEQ ID NO: 363814 - DNA, 12 bp, Artificial Sequence
  Oligonucleotide primer for the detection of SNP TSC0054073
acaaaatatatc

SEQ ID NO: 363815 - DNA, 12 bp, Artificial Sequence
  Oligonucleotide primer for the detection of SNP TSC0054073
tgatgttgtttt

SEQ ID NO: 363816 - DNA, 12 bp, Artificial Sequence
  Oligonucleotide primer for the detection of SNP TSC0054074
caatattattaa

SEQ ID NO: 363817 - DNA, 12 bp, Artificial Sequence
  Oligonucleotide primer for the detection of SNP TSC0054074
atcttttccatc

SEQ ID NO: 363818 - DNA, 12 bp, Artificial Sequence
  Oligonucleotide primer for the detection of SNP TSC0054074
tagtgttgttag

SEQ ID NO: 363819 - DNA, 12 bp, Artificial Sequence
  Oligonucleotide primer for the detection of SNP TSC0054075
taaccaactacc

SEQ ID NO: 363820 - DNA, 12 bp, Artificial Sequence
  Oligonucleotide primer for the detection of SNP TSC0054075
atggttattata

SEQ ID NO: 363821 - DNA, 12 bp, Artificial Sequence
  Oligonucleotide primer for the detection of SNP TSC0054075
acggttattata

SEQ ID NO: 363822 - DNA, 12 bp, Artificial Sequence
  Oligonucleotide primer for the detection of SNP TSC0054076
acattttctttt

SEQ ID NO: 363823 - DNA, 12 bp, Artificial Sequence
  Oligonucleotide primer for the detection of SNP TSC0054076
gcattttctttt

SEQ ID NO: 363824 - DNA, 12 bp, Artificial Sequence
  Oligonucleotide primer for the detection of SNP TSC0054078
ttcaacccatac

SEQ ID NO: 363825 - DNA, 12 bp, Artificial Sequence
  Oligonucleotide primer for the detection of SNP TSC0054078
tgaaattttata

SEQ ID NO: 363826 - DNA, 12 bp, Artificial Sequence
  Oligonucleotide primer for the detection of SNP TSC0054079
acctctaacata

SEQ ID NO: 363827 - DNA, 12 bp, Artificial Sequence
  Oligonucleotide primer for the detection of SNP TSC0054079
tttatataattt

SEQ ID NO: 363828 - DNA, 12 bp, Artificial Sequence
  Oligonucleotide primer for the detection of SNP TSC0054079
ctacacaatcca

SEQ ID NO: 363829 - DNA, 12 bp, Artificial Sequence
  Oligonucleotide primer for the detection of SNP TSC0054081
aattaaatccca

SEQ ID NO: 363830 - DNA, 12 bp, Artificial Sequence
  Oligonucleotide primer for the detection of SNP TSC0054081
aaatcaatctct

SEQ ID NO: 363831 - DNA, 12 bp, Artificial Sequence
  Oligonucleotide primer for the detection of SNP TSC0054081
aattagatttta

SEQ ID NO: 363832 - DNA, 12 bp, Artificial Sequence
  Oligonucleotide primer for the detection of SNP TSC0054084
ctttccataaat

SEQ ID NO: 363833 - DNA, 12 bp, Artificial Sequence
  Oligonucleotide primer for the detection of SNP TSC0054084
atttatggtata

SEQ ID NO: 363834 - DNA, 12 bp, Artificial Sequence
  Oligonucleotide primer for the detection of SNP TSC0054085
atatatttccaa

SEQ ID NO: 363835 - DNA, 12 bp, Artificial Sequence
  Oligonucleotide primer for the detection of SNP TSC0054085
gagaattaagat

SEQ ID NO: 363836 - DNA, 12 bp, Artificial Sequence
  Oligonucleotide primer for the detection of SNP TSC0054085
atatgtttttag

SEQ ID NO: 363837 - DNA, 12 bp, Artificial Sequence
  Oligonucleotide primer for the detection of SNP TSC0054086
cattttcaacat

SEQ ID NO: 363838 - DNA, 12 bp, Artificial Sequence
  Oligonucleotide primer for the detection of SNP TSC0054086
cattttcaacgt

SEQ ID NO: 363839 - DNA, 12 bp, Artificial Sequence
  Oligonucleotide primer for the detection of SNP TSC0054086
cgttttcaacat

SEQ ID NO: 363840 - DNA, 12 bp, Artificial Sequence
  Oligonucleotide primer for the detection of SNP TSC0054086
cgttttcaacgt

SEQ ID NO: 363841 - DNA, 12 bp, Artificial Sequence
  Oligonucleotide primer for the detection of SNP TSC0054087
taacttccttat

SEQ ID NO: 363842 - DNA, 12 bp, Artificial Sequence
  Oligonucleotide primer for the detection of SNP TSC0054087
gtattttaatga

SEQ ID NO: 363843 - DNA, 12 bp, Artificial Sequence
  Oligonucleotide primer for the detection of SNP TSC0054088
ccaatatttata

SEQ ID NO: 363844 - DNA, 12 bp, Artificial Sequence
  Oligonucleotide primer for the detection of SNP TSC0054088
atatatacacat

SEQ ID NO: 363845 - DNA, 12 bp, Artificial Sequence
  Oligonucleotide primer for the detection of SNP TSC0054088
ttagtatttgtg

SEQ ID NO: 363846 - DNA, 12 bp, Artificial Sequence
  Oligonucleotide primer for the detection of SNP TSC0054089
tttcttccttat

SEQ ID NO: 363847 - DNA, 12 bp, Artificial Sequence
  Oligonucleotide primer for the detection of SNP TSC0054089
ttggatatttta

SEQ ID NO: 363848 - DNA, 12 bp, Artificial Sequence
  Oligonucleotide primer for the detection of SNP TSC0054091
aatacataattt

SEQ ID NO: 363849 - DNA, 12 bp, Artificial Sequence
  Oligonucleotide primer for the detection of SNP TSC0054091
atgtttggggtg

SEQ ID NO: 363850 - DNA, 12 bp, Artificial Sequence
  Oligonucleotide primer for the detection of SNP TSC0054091
acgtttggggtg

SEQ ID NO: 363851 - DNA, 12 bp, Artificial Sequence
  Oligonucleotide primer for the detection of SNP TSC0054092
caaaacactcaa

SEQ ID NO: 363852 - DNA, 12 bp, Artificial Sequence
  Oligonucleotide primer for the detection of SNP TSC0054092
ttggatgatagt

SEQ ID NO: 363853 - DNA, 12 bp, Artificial Sequence
  Oligonucleotide primer for the detection of SNP TSC0054095
acgtaaaaatat

SEQ ID NO: 363854 - DNA, 12 bp, Artificial Sequence
  Oligonucleotide primer for the detection of SNP TSC0054095
tgattttttggg

SEQ ID NO: 363855 - DNA, 12 bp, Artificial Sequence
  Oligonucleotide primer for the detection of SNP TSC0054096
tattttactctt

SEQ ID NO: 363856 - DNA, 12 bp, Artificial Sequence
  Oligonucleotide primer for the detection of SNP TSC0054096
agttggattaaa

SEQ ID NO: 363857 - DNA, 12 bp, Artificial Sequence
  Oligonucleotide primer for the detection of SNP TSC0054097
atatccccaccc

SEQ ID NO: 363858 - DNA, 12 bp, Artificial Sequence
  Oligonucleotide primer for the detection of SNP TSC0054097
gtttagggcggg

SEQ ID NO: 363859 - DNA, 12 bp, Artificial Sequence
  Oligonucleotide primer for the detection of SNP TSC0054097
atccaaaacaaa

SEQ ID NO: 363860 - DNA, 12 bp, Artificial Sequence
  Oligonucleotide primer for the detection of SNP TSC0054097
atccaaaacgaa

SEQ ID NO: 363861 - DNA, 12 bp, Artificial Sequence
  Oligonucleotide primer for the detection of SNP TSC0054097
gtgtttttattt

SEQ ID NO: 363862 - DNA, 12 bp, Artificial Sequence
  Oligonucleotide primer for the detection of SNP TSC0054098
caccaccccacc

SEQ ID NO: 363863 - DNA, 12 bp, Artificial Sequence
  Oligonucleotide primer for the detection of SNP TSC0054098
caccaccccgcc

SEQ ID NO: 363864 - DNA, 12 bp, Artificial Sequence
  Oligonucleotide primer for the detection of SNP TSC0054098
agattagtggtg

SEQ ID NO: 363865 - DNA, 12 bp, Artificial Sequence
  Oligonucleotide primer for the detection of SNP TSC0054099
ttccctcatcaa

SEQ ID NO: 363866 - DNA, 12 bp, Artificial Sequence
  Oligonukleotid-Primer
aattttaggtaa

SEQ ID NO: 363867 - DNA, 12 bp, Artificial Sequence
  Oligonucleotide primer for the detection of SNP TSC0054099
acctcaaacaaa

SEQ ID NO: 363868 - DNA, 12 bp, Artificial Sequence
  Oligonucleotide primer for the detection of SNP TSC0054100
aataaaaacttt

SEQ ID NO: 363869 - DNA, 12 bp, Artificial Sequence
  Oligonucleotide primer for the detection of SNP TSC0054100
gtaaaagatttg

SEQ ID NO: 363870 - DNA, 12 bp, Artificial Sequence
  Oligonukleotid-Primer
tgggtagttatg

SEQ ID NO: 363871 - DNA, 12 bp, Artificial Sequence
  Oligonucleotide primer for the detection of SNP TSC0054101
aaacaaccataa

SEQ ID NO: 363872 - DNA, 12 bp, Artificial Sequence
  Oligonucleotide primer for the detection of SNP TSC0054101
agaaattgtttt

SEQ ID NO: 363873 - DNA, 12 bp, Artificial Sequence
  Oligonucleotide primer for the detection of SNP TSC0054102
taaattacatac

SEQ ID NO: 363874 - DNA, 12 bp, Artificial Sequence
  Oligonucleotide primer for the detection of SNP TSC0054102
ataatagaatta

SEQ ID NO: 363875 - DNA, 12 bp, Artificial Sequence
  Oligonucleotide primer for the detection of SNP TSC0054102
ataataaaatca

SEQ ID NO: 363876 - DNA, 12 bp, Artificial Sequence
  Oligonucleotide primer for the detection of SNP TSC0054102
taaattgtatgt

SEQ ID NO: 363877 - DNA, 12 bp, Artificial Sequence
  Oligonucleotide primer for the detection of SNP TSC0054103
atatttctacct

SEQ ID NO: 363878 - DNA, 12 bp, Artificial Sequence
  Oligonucleotide primer for the detection of SNP TSC0054103
attgtatattaa

SEQ ID NO: 363879 - DNA, 12 bp, Artificial Sequence
  Oligonucleotide primer for the detection of SNP TSC0054104
acaatcaaaatt

SEQ ID NO: 363880 - DNA, 12 bp, Artificial Sequence
  Oligonucleotide primer for the detection of SNP TSC0054104
agagtagtagag

SEQ ID NO: 363881 - DNA, 12 bp, Artificial Sequence
  Oligonucleotide primer for the detection of SNP TSC0054104
gtagttagagtt

SEQ ID NO: 363882 - DNA, 12 bp, Artificial Sequence
  Oligonucleotide primer for the detection of SNP TSC0054105
ttattgaagtat

SEQ ID NO: 363883 - DNA, 12 bp, Artificial Sequence
  Oligonucleotide primer for the detection of SNP TSC0054105
ttattgaagtac

SEQ ID NO: 363884 - DNA, 12 bp, Artificial Sequence
  Oligonucleotide primer for the detection of SNP TSC0054105
tagttaggggag

SEQ ID NO: 363885 - DNA, 12 bp, Artificial Sequence
  Oligonucleotide primer for the detection of SNP TSC0054106
tcttattcttaa

SEQ ID NO: 363886 - DNA, 12 bp, Artificial Sequence
  Oligonucleotide primer for the detection of SNP TSC0054106
gaattgagtttt

SEQ ID NO: 363887 - DNA, 12 bp, Artificial Sequence
  Oligonucleotide primer for the detection of SNP TSC0054107
gaataagaatgg

SEQ ID NO: 363888 - DNA, 12 bp, Artificial Sequence
  Oligonucleotide primer for the detection of SNP TSC0054108
aaactaatttat

SEQ ID NO: 363889 - DNA, 12 bp, Artificial Sequence
  Oligonucleotide primer for the detection of SNP TSC0054111
atttactaaatc

SEQ ID NO: 363890 - DNA, 12 bp, Artificial Sequence
  Oligonucleotide primer for the detection of SNP TSC0054111
ttttatttaatg

SEQ ID NO: 363891 - DNA, 12 bp, Artificial Sequence
  Oligonucleotide primer for the detection of SNP TSC0054114
ccttatctaaca

SEQ ID NO: 363892 - DNA, 12 bp, Artificial Sequence
  Oligonucleotide primer for the detection of SNP TSC0054114
tttattgaatat

SEQ ID NO: 363893 - DNA, 12 bp, Artificial Sequence
  Oligonucleotide primer for the detection of SNP TSC0054115
tgaggatgtttg

SEQ ID NO: 363894 - DNA, 12 bp, Artificial Sequence
  Oligonukleotid-Primer
cgaggatgtttg

SEQ ID NO: 363895 - DNA, 12 bp, Artificial Sequence
  Oligonucleotide primer for the detection of SNP TSC0054115
tgaggacgtttg

SEQ ID NO: 363896 - DNA, 12 bp, Artificial Sequence
  Oligonucleotide primer for the detection of SNP TSC0054115
cgaggacgtttg

SEQ ID NO: 363897 - DNA, 12 bp, Artificial Sequence
  Oligonucleotide primer for the detection of SNP TSC0054115
caaaaacattta

SEQ ID NO: 363898 - DNA, 12 bp, Artificial Sequence
  Oligonucleotide primer for the detection of SNP TSC0054115
caaaaacgttta

SEQ ID NO: 363899 - DNA, 12 bp, Artificial Sequence
  Oligonucleotide primer for the detection of SNP TSC0054115
cgaaaacattta

SEQ ID NO: 363900 - DNA, 12 bp, Artificial Sequence
  Oligonucleotide primer for the detection of SNP TSC0054115
cgaaaacgttta

SEQ ID NO: 363901 - DNA, 12 bp, Artificial Sequence
  Oligonucleotide primer for the detection of SNP TSC0054115
agagtttttatt

SEQ ID NO: 363902 - DNA, 12 bp, Artificial Sequence
  Oligonucleotide primer for the detection of SNP TSC0054120
attattaaccct

SEQ ID NO: 363903 - DNA, 12 bp, Artificial Sequence
  Oligonucleotide primer for the detection of SNP TSC0054120
ttaaagtataat

SEQ ID NO: 363904 - DNA, 12 bp, Artificial Sequence
  Oligonucleotide primer for the detection of SNP TSC0054120
ttaaaatacaac

SEQ ID NO: 363905 - DNA, 12 bp, Artificial Sequence
  Oligonucleotide primer for the detection of SNP TSC0054121
taataataaatt

SEQ ID NO: 363906 - DNA, 12 bp, Artificial Sequence
  Oligonucleotide primer for the detection of SNP TSC0054121
tatgataagata

SEQ ID NO: 363907 - DNA, 12 bp, Artificial Sequence
  Oligonucleotide primer for the detection of SNP TSC0054123
tctaattccaca

SEQ ID NO: 363908 - DNA, 12 bp, Artificial Sequence
  Oligonucleotide primer for the detection of SNP TSC0054123
taaaggatgtat

SEQ ID NO: 363909 - DNA, 12 bp, Artificial Sequence
  Oligonucleotide primer for the detection of SNP TSC0054124
ccaaccttaaat

SEQ ID NO: 363910 - DNA, 12 bp, Artificial Sequence
  Oligonucleotide primer for the detection of SNP TSC0054126
tgggattttgta

SEQ ID NO: 363911 - DNA, 12 bp, Artificial Sequence
  Oligonucleotide primer for the detection of SNP TSC0054126
cgggattttgta

SEQ ID NO: 363912 - DNA, 12 bp, Artificial Sequence
  Oligonucleotide primer for the detection of SNP TSC0054127
aatcatatcatc

SEQ ID NO: 363913 - DNA, 12 bp, Artificial Sequence
  Oligonucleotide primer for the detection of SNP TSC0054127
aatcgtatcatc

SEQ ID NO: 363914 - DNA, 12 bp, Artificial Sequence
  Oligonucleotide primer for the detection of SNP TSC0054127
gtttagttttaa

SEQ ID NO: 363915 - DNA, 12 bp, Artificial Sequence
  Oligonucleotide primer for the detection of SNP TSC0054128
atctataacaaa

SEQ ID NO: 363916 - DNA, 12 bp, Artificial Sequence
  Oligonucleotide primer for the detection of SNP TSC0054129
ttttctccccct

SEQ ID NO: 363917 - DNA, 12 bp, Artificial Sequence
  Oligonucleotide primer for the detection of SNP TSC0054129
aaaggttgttgg

SEQ ID NO: 363918 - DNA, 12 bp, Artificial Sequence
  Oligonucleotide primer for the detection of SNP TSC0054129
aaaggtcgttgg

SEQ ID NO: 363919 - DNA, 12 bp, Artificial Sequence
  Oligonucleotide primer for the detection of SNP TSC0054130
ctctcatcataa

SEQ ID NO: 363920 - DNA, 12 bp, Artificial Sequence
  Oligonucleotide primer for the detection of SNP TSC0054130
ctctcatcgtaa

SEQ ID NO: 363921 - DNA, 12 bp, Artificial Sequence
  Oligonucleotide primer for the detection of SNP TSC0054130
ctctcgtcataa

SEQ ID NO: 363922 - DNA, 12 bp, Artificial Sequence
  Oligonucleotide primer for the detection of SNP TSC0054130
ctctcgtcgtaa

SEQ ID NO: 363923 - DNA, 12 bp, Artificial Sequence
  Oligonucleotide primer for the detection of SNP TSC0054130
tagattagttgt

SEQ ID NO: 363924 - DNA, 12 bp, Artificial Sequence
  Oligonucleotide primer for the detection of SNP TSC0054130
ttttcgttgtaa

SEQ ID NO: 363925 - DNA, 12 bp, Artificial Sequence
  Oligonucleotide primer for the detection of SNP TSC0054130
tttttgtcgtaa

SEQ ID NO: 363926 - DNA, 12 bp, Artificial Sequence
  Oligonucleotide primer for the detection of SNP TSC0054130
ttttcgtcgtaa

SEQ ID NO: 363927 - DNA, 12 bp, Artificial Sequence
  Oligonucleotide primer for the detection of SNP TSC0054131
taataaaaccat

SEQ ID NO: 363928 - DNA, 12 bp, Artificial Sequence
  Oligonucleotide primer for the detection of SNP TSC0054131
gtggtagttgga

SEQ ID NO: 363929 - DNA, 12 bp, Artificial Sequence
  Oligonucleotide primer for the detection of SNP TSC0054131
gcggtagttgga

SEQ ID NO: 363930 - DNA, 12 bp, Artificial Sequence
  Oligonucleotide primer for the detection of SNP TSC0054132
ttccctaacaaa

SEQ ID NO: 363931 - DNA, 12 bp, Artificial Sequence
  Oligonucleotide primer for the detection of SNP TSC0054132
aggttaggaggt

SEQ ID NO: 363932 - DNA, 12 bp, Artificial Sequence
  Oligonucleotide primer for the detection of SNP TSC0054132
aaaccaaaaaat

SEQ ID NO: 363933 - DNA, 12 bp, Artificial Sequence
  Oligonucleotide primer for the detection of SNP TSC0054133
  unsure (3): unknown base
tangaggttgag

SEQ ID NO: 363934 - DNA, 12 bp, Artificial Sequence
  Oligonucleotide primer for the detection of SNP TSC0054134
taccaaattcaa

SEQ ID NO: 363935 - DNA, 12 bp, Artificial Sequence
  Oligonucleotide primer for the detection of SNP TSC0054134
taaaataatgat

SEQ ID NO: 363936 - DNA, 12 bp, Artificial Sequence
  Oligonucleotide primer for the detection of SNP TSC0054134
ccaaaataataa

SEQ ID NO: 363937 - DNA, 12 bp, Artificial Sequence
  Oligonucleotide primer for the detection of SNP TSC0054134
ttattaaattta

SEQ ID NO: 363938 - DNA, 12 bp, Artificial Sequence
  Oligonucleotide primer for the detection of SNP TSC0054135
tgggagatttaa

SEQ ID NO: 363939 - DNA, 12 bp, Artificial Sequence
  Oligonucleotide primer for the detection of SNP TSC0054136
aaaacaaccctc

SEQ ID NO: 363940 - DNA, 12 bp, Artificial Sequence
  Oligonucleotide primer for the detection of SNP TSC0054137
tactatacctac

SEQ ID NO: 363941 - DNA, 12 bp, Artificial Sequence
  Oligonucleotide primer for the detection of SNP TSC0054137
tttagtaaaaag

SEQ ID NO: 363942 - DNA, 12 bp, Artificial Sequence
  Oligonucleotide primer for the detection of SNP TSC0054137
tgttgtatttgt

SEQ ID NO: 363943 - DNA, 12 bp, Artificial Sequence
  Oligonucleotide primer for the detection of SNP TSC0054138
tataactacacc

SEQ ID NO: 363944 - DNA, 12 bp, Artificial Sequence
  Oligonucleotide primer for the detection of SNP TSC0054138
atttagagtata

SEQ ID NO: 363945 - DNA, 12 bp, Artificial Sequence
  Oligonucleotide primer for the detection of SNP TSC0054139
acctttatacta

SEQ ID NO: 363946 - DNA, 12 bp, Artificial Sequence
  Oligonucleotide primer for the detection of SNP TSC0054140
gattaaagtaga

SEQ ID NO: 363947 - DNA, 12 bp, Artificial Sequence
  Oligonucleotide primer for the detection of SNP TSC0054140
ttgaatttgggt

SEQ ID NO: 363948 - DNA, 12 bp, Artificial Sequence
  Oligonucleotide primer for the detection of SNP TSC0054141
taaattaaatct

SEQ ID NO: 363949 - DNA, 12 bp, Artificial Sequence
  Oligonucleotide primer for the detection of SNP TSC0054141
ttagttttagta

SEQ ID NO: 363950 - DNA, 12 bp, Artificial Sequence
  Oligonucleotide primer for the detection of SNP TSC0054142
cactattctttc

SEQ ID NO: 363951 - DNA, 12 bp, Artificial Sequence
  Oligonucleotide primer for the detection of SNP TSC0054142
cgctattctttc

SEQ ID NO: 363952 - DNA, 12 bp, Artificial Sequence
  Oligonucleotide primer for the detection of SNP TSC0054142
agttataggata

SEQ ID NO: 363953 - DNA, 12 bp, Artificial Sequence
  Oligonucleotide primer for the detection of SNP TSC0054143
tactctccctcc

SEQ ID NO: 363954 - DNA, 12 bp, Artificial Sequence
  Oligonucleotide primer for the detection of SNP TSC0054144
atttgtaaggta

SEQ ID NO: 363955 - DNA, 12 bp, Artificial Sequence
  Oligonucleotide primer for the detection of SNP TSC0054145
cctaatattcat

SEQ ID NO: 363956 - DNA, 12 bp, Artificial Sequence
  Oligonucleotide primer for the detection of SNP TSC0054145
gattatagaaag

SEQ ID NO: 363957 - DNA, 12 bp, Artificial Sequence
  Oligonucleotide primer for the detection of SNP TSC0054147
taattattatct

SEQ ID NO: 363958 - DNA, 12 bp, Artificial Sequence
  Oligonucleotide primer for the detection of SNP TSC0054147
aaatttaaaaga

SEQ ID NO: 363959 - DNA, 12 bp, Artificial Sequence
  Oligonucleotide primer for the detection of SNP TSC0054147
tgattgttgttt

SEQ ID NO: 363960 - DNA, 12 bp, Artificial Sequence
  Oligonucleotide primer for the detection of SNP TSC0054148
tattaaactttt

SEQ ID NO: 363961 - DNA, 12 bp, Artificial Sequence
  Oligonucleotide primer for the detection of SNP TSC0054148
atttaataataa

SEQ ID NO: 363962 - DNA, 12 bp, Artificial Sequence
  Oligonucleotide primer for the detection of SNP TSC0054149
aaacttttaaat

SEQ ID NO: 363963 - DNA, 12 bp, Artificial Sequence
  Oligonucleotide primer for the detection of SNP TSC0054150
taaacttttaat

SEQ ID NO: 363964 - DNA, 12 bp, Artificial Sequence
  Oligonucleotide primer for the detection of SNP TSC0054150
agtgtgttttag

SEQ ID NO: 363965 - DNA, 12 bp, Artificial Sequence
  Oligonucleotide primer for the detection of SNP TSC0054151
atataatttatt

SEQ ID NO: 363966 - DNA, 12 bp, Artificial Sequence
  Oligonucleotide primer for the detection of SNP TSC0054151
atacaatttact

SEQ ID NO: 363967 - DNA, 12 bp, Artificial Sequence
  Oligonucleotide primer for the detection of SNP TSC0054151
tttaagagagtg

SEQ ID NO: 363968 - DNA, 12 bp, Artificial Sequence
  Oligonucleotide primer for the detection of SNP TSC0054152
acaaaaactcaa

SEQ ID NO: 363969 - DNA, 12 bp, Artificial Sequence
  Oligonucleotide primer for the detection of SNP TSC0054152
ggaagttatgta

SEQ ID NO: 363970 - DNA, 12 bp, Artificial Sequence
  Oligonucleotide primer for the detection of SNP TSC0054158
cattcaccttaa

SEQ ID NO: 363971 - DNA, 12 bp, Artificial Sequence
  Oligonucleotide primer for the detection of SNP TSC0054158
tgtggagaaaat

SEQ ID NO: 363972 - DNA, 12 bp, Artificial Sequence
  Oligonucleotide primer for the detection of SNP TSC0054159
actaatataaac

SEQ ID NO: 363973 - DNA, 12 bp, Artificial Sequence
  Oligonucleotide primer for the detection of SNP TSC0054159
tattgtgttgtg

SEQ ID NO: 363974 - DNA, 12 bp, Artificial Sequence
  Oligonucleotide primer for the detection of SNP TSC0054159
tattgtgtcgtg

SEQ ID NO: 363975 - DNA, 12 bp, Artificial Sequence
  Oligonucleotide primer for the detection of SNP TSC0054160
tgttagaaaata

SEQ ID NO: 363976 - DNA, 12 bp, Artificial Sequence
  Oligonucleotide primer for the detection of SNP TSC0054165
attagagaatta

SEQ ID NO: 363977 - DNA, 12 bp, Artificial Sequence
  Oligonucleotide primer for the detection of SNP TSC0054166
tatttaatacac

SEQ ID NO: 363978 - DNA, 12 bp, Artificial Sequence
  Oligonucleotide primer for the detection of SNP TSC0054166
attgtaatatga

SEQ ID NO: 363979 - DNA, 12 bp, Artificial Sequence
  Oligonucleotide primer for the detection of SNP TSC0054167
attcttacccaa

SEQ ID NO: 363980 - DNA, 12 bp, Artificial Sequence
  Oligonucleotide primer for the detection of SNP TSC0054167
aagataggtaat

SEQ ID NO: 363981 - DNA, 12 bp, Artificial Sequence
  Oligonucleotide primer for the detection of SNP TSC0054168
ctaacccacaaa

SEQ ID NO: 363982 - DNA, 12 bp, Artificial Sequence
  Oligonucleotide primer for the detection of SNP TSC0054168
atatccatataa

SEQ ID NO: 363983 - DNA, 12 bp, Artificial Sequence
  Oligonucleotide primer for the detection of SNP TSC0054168
ttgatttataaa

SEQ ID NO: 363984 - DNA, 12 bp, Artificial Sequence
  Oligonucleotide primer for the detection of SNP TSC0054169
aatcacacataa

SEQ ID NO: 363985 - DNA, 12 bp, Artificial Sequence
  Oligonucleotide primer for the detection of SNP TSC0054170
accattttaata

SEQ ID NO: 363986 - DNA, 12 bp, Artificial Sequence
  Oligonucleotide primer for the detection of SNP TSC0054170
gtagatgagaat

SEQ ID NO: 363987 - DNA, 12 bp, Artificial Sequence
  Oligonucleotide primer for the detection of SNP TSC0054176
atatttacacta

SEQ ID NO: 363988 - DNA, 12 bp, Artificial Sequence
  Oligonucleotide primer for the detection of SNP TSC0054176
aggttatgtatt

SEQ ID NO: 363989 - DNA, 12 bp, Artificial Sequence
  Oligonucleotide primer for the detection of SNP TSC0054176
aactatatatca

SEQ ID NO: 363990 - DNA, 12 bp, Artificial Sequence
  Oligonucleotide primer for the detection of SNP TSC0054176
tgtttgtattgt

SEQ ID NO: 363991 - DNA, 12 bp, Artificial Sequence
  Oligonucleotide primer for the detection of SNP TSC0054177
ccaatactttca

SEQ ID NO: 363992 - DNA, 12 bp, Artificial Sequence
  Oligonucleotide primer for the detection of SNP TSC0054177
taaattaaatat

SEQ ID NO: 363993 - DNA, 12 bp, Artificial Sequence
  Oligonucleotide primer for the detection of SNP TSC0054178
ccaaaaccctac

SEQ ID NO: 363994 - DNA, 12 bp, Artificial Sequence
  Oligonucleotide primer for the detection of SNP TSC0054178
gttgtatagaaa

SEQ ID NO: 363995 - DNA, 12 bp, Artificial Sequence
  Oligonucleotide primer for the detection of SNP TSC0054179
agaggtgaggtt

SEQ ID NO: 363996 - DNA, 12 bp, Artificial Sequence
  Oligonucleotide primer for the detection of SNP TSC0054179
gtagaggttttt

SEQ ID NO: 363997 - DNA, 12 bp, Artificial Sequence
  Oligonucleotide primer for the detection of SNP TSC0054180
actacaaacact

SEQ ID NO: 363998 - DNA, 12 bp, Artificial Sequence
  Oligonucleotide primer for the detection of SNP TSC0054180
tatgggttggtg

SEQ ID NO: 363999 - DNA, 12 bp, Artificial Sequence
  Oligonucleotide primer for the detection of SNP TSC0054180
tatgggttggcg

SEQ ID NO: 364000 - DNA, 12 bp, Artificial Sequence
  Oligonucleotide primer for the detection of SNP TSC0054187
ttaaatgaataa

SEQ ID NO: 364001 - DNA, 12 bp, Artificial Sequence
  Oligonucleotide primer for the detection of SNP TSC0054190
acacaaaaattc

SEQ ID NO: 364002 - DNA, 12 bp, Artificial Sequence
  Oligonucleotide primer for the detection of SNP TSC0054196
aattaatacccc

SEQ ID NO: 364003 - DNA, 12 bp, Artificial Sequence
  Oligonucleotide primer for the detection of SNP TSC0054196
ttatttgttgaa

SEQ ID NO: 364004 - DNA, 12 bp, Artificial Sequence
  Oligonucleotide primer for the detection of SNP TSC0054196
ttacctattaaa

SEQ ID NO: 364005 - DNA, 12 bp, Artificial Sequence
  Oligonucleotide primer for the detection of SNP TSC0054196
gattggtatttt

SEQ ID NO: 364006 - DNA, 12 bp, Artificial Sequence
  Oligonucleotide primer for the detection of SNP TSC0054200
aataactaaatc

SEQ ID NO: 364007 - DNA, 12 bp, Artificial Sequence
  Oligonucleotide primer for the detection of SNP TSC0054201
tctaaaatcaac

SEQ ID NO: 364008 - DNA, 12 bp, Artificial Sequence
  Oligonucleotide primer for the detection of SNP TSC0054201
ggatggagtatg

SEQ ID NO: 364009 - DNA, 12 bp, Artificial Sequence
  Oligonucleotide primer for the detection of SNP TSC0054202
tcaactctatcc

SEQ ID NO: 364010 - DNA, 12 bp, Artificial Sequence
  Oligonucleotide primer for the detection of SNP TSC0054202
tatgttgttgta

SEQ ID NO: 364011 - DNA, 12 bp, Artificial Sequence
  Oligonucleotide primer for the detection of SNP TSC0054203
tttaaaaaccct

SEQ ID NO: 364012 - DNA, 12 bp, Artificial Sequence
  Oligonucleotide primer for the detection of SNP TSC0054204
aacatatctaac

SEQ ID NO: 364013 - DNA, 12 bp, Artificial Sequence
  Oligonucleotide primer for the detection of SNP TSC0054205
attatttatgta

SEQ ID NO: 364014 - DNA, 12 bp, Artificial Sequence
  Oligonucleotide primer for the detection of SNP TSC0054206
tataatttatac

SEQ ID NO: 364015 - DNA, 12 bp, Artificial Sequence
  Oligonucleotide primer for the detection of SNP TSC0054206
gttgttatttaa

SEQ ID NO: 364016 - DNA, 12 bp, Artificial Sequence
  Oligonucleotide primer for the detection of SNP TSC0054207
aacaacataaat

SEQ ID NO: 364017 - DNA, 12 bp, Artificial Sequence
  Oligonucleotide primer for the detection of SNP TSC0054207
aatggtttttag

SEQ ID NO: 364018 - DNA, 12 bp, Artificial Sequence
  Oligonucleotide primer for the detection of SNP TSC0054209
aaaggggtgtga

SEQ ID NO: 364019 - DNA, 12 bp, Artificial Sequence
  Oligonucleotide primer for the detection of SNP TSC0054210
cattttattacc

SEQ ID NO: 364020 - DNA, 12 bp, Artificial Sequence
  Oligonucleotide primer for the detection of SNP TSC0054210
aatttctctata

SEQ ID NO: 364021 - DNA, 12 bp, Artificial Sequence
  Oligonucleotide primer for the detection of SNP TSC0054210
tattttattatc

SEQ ID NO: 364022 - DNA, 12 bp, Artificial Sequence
  Oligonucleotide primer for the detection of SNP TSC0054215
tttaaaatccta

SEQ ID NO: 364023 - DNA, 12 bp, Artificial Sequence
  Oligonucleotide primer for the detection of SNP TSC0054215
tggagaattaat

SEQ ID NO: 364024 - DNA, 12 bp, Artificial Sequence
  Oligonucleotide primer for the detection of SNP TSC0054216
actttcattccc

SEQ ID NO: 364025 - DNA, 12 bp, Artificial Sequence
  Oligonucleotide primer for the detection of SNP TSC0054216
aaaaattattgt

SEQ ID NO: 364026 - DNA, 12 bp, Artificial Sequence
  Oligonucleotide primer for the detection of SNP TSC0054216
aaaaatcactat

SEQ ID NO: 364027 - DNA, 12 bp, Artificial Sequence
  Oligonucleotide primer for the detection of SNP TSC0054218
ataacatacctt

SEQ ID NO: 364028 - DNA, 12 bp, Artificial Sequence
  Oligonucleotide primer for the detection of SNP TSC0054218
tgatgggtgatg

SEQ ID NO: 364029 - DNA, 12 bp, Artificial Sequence
  Oligonucleotide primer for the detection of SNP TSC0054219
atatctaacaaa

SEQ ID NO: 364030 - DNA, 12 bp, Artificial Sequence
  Oligonucleotide primer for the detection of SNP TSC0054219
tatgtataattt

SEQ ID NO: 364031 - DNA, 12 bp, Artificial Sequence
  Oligonucleotide primer for the detection of SNP TSC0054219
tacgtataattt

SEQ ID NO: 364032 - DNA, 12 bp, Artificial Sequence
  Oligonucleotide primer for the detection of SNP TSC0054219
tacatataatct

SEQ ID NO: 364033 - DNA, 12 bp, Artificial Sequence
  Oligonucleotide primer for the detection of SNP TSC0054219
tacgtataatct

SEQ ID NO: 364034 - DNA, 12 bp, Artificial Sequence
  Oligonucleotide primer for the detection of SNP TSC0054219
gtgtttggtaaa

SEQ ID NO: 364035 - DNA, 12 bp, Artificial Sequence
  Oligonucleotide primer for the detection of SNP TSC0054220
tcaaaataccat

SEQ ID NO: 364036 - DNA, 12 bp, Artificial Sequence
  Oligonucleotide primer for the detection of SNP TSC0054220
tcgaaataccat

SEQ ID NO: 364037 - DNA, 12 bp, Artificial Sequence
  Oligonucleotide primer for the detection of SNP TSC0054220
ttcactattcaa

SEQ ID NO: 364038 - DNA, 12 bp, Artificial Sequence
  Oligonucleotide primer for the detection of SNP TSC0054220
ttgaaatgttat

SEQ ID NO: 364039 - DNA, 12 bp, Artificial Sequence
  Oligonucleotide primer for the detection of SNP TSC0054220
tcgaaatgttat

SEQ ID NO: 364040 - DNA, 12 bp, Artificial Sequence
  Oligonucleotide primer for the detection of SNP TSC0054221
gttttaaaagag

SEQ ID NO: 364041 - DNA, 12 bp, Artificial Sequence
  Oligonucleotide primer for the detection of SNP TSC0054227
catcctaactaa

SEQ ID NO: 364042 - DNA, 12 bp, Artificial Sequence
  Oligonucleotide primer for the detection of SNP TSC0054227
tattttggttaa

SEQ ID NO: 364043 - DNA, 12 bp, Artificial Sequence
  Oligonucleotide primer for the detection of SNP TSC0054228
gttttgtaggag

SEQ ID NO: 364044 - DNA, 12 bp, Artificial Sequence
  Oligonucleotide primer for the detection of SNP TSC0054229
tacccacctccc

SEQ ID NO: 364045 - DNA, 12 bp, Artificial Sequence
  Oligonucleotide primer for the detection of SNP TSC0054229
ggtatagttaat

SEQ ID NO: 364046 - DNA, 12 bp, Artificial Sequence
  Oligonucleotide primer for the detection of SNP TSC0054229
acacaaccaata

SEQ ID NO: 364047 - DNA, 12 bp, Artificial Sequence
  Oligonucleotide primer for the detection of SNP TSC0054230
tttatttaaatc

SEQ ID NO: 364048 - DNA, 12 bp, Artificial Sequence
  Oligonucleotide primer for the detection of SNP TSC0054230
aattttaattgg

SEQ ID NO: 364049 - DNA, 12 bp, Artificial Sequence
  Oligonucleotide primer for the detection of SNP TSC0054235
ttataaatatga

SEQ ID NO: 364050 - DNA, 12 bp, Artificial Sequence
  Oligonucleotide primer for the detection of SNP TSC0054236
tatttctaatac

SEQ ID NO: 364051 - DNA, 12 bp, Artificial Sequence
  Oligonucleotide primer for the detection of SNP TSC0054236
ataataagaaaa

SEQ ID NO: 364052 - DNA, 12 bp, Artificial Sequence
  Oligonucleotide primer for the detection of SNP TSC0054238
taaaaaactaca

SEQ ID NO: 364053 - DNA, 12 bp, Artificial Sequence
  Oligonucleotide primer for the detection of SNP TSC0054238
ttattaaacatt

SEQ ID NO: 364054 - DNA, 12 bp, Artificial Sequence
  Oligonucleotide primer for the detection of SNP TSC0054238
tgaaaaattgta

SEQ ID NO: 364055 - DNA, 12 bp, Artificial Sequence
  Oligonucleotide primer for the detection of SNP TSC0054239
gtaaataagtta

SEQ ID NO: 364056 - DNA, 12 bp, Artificial Sequence
  Oligonucleotide primer for the detection of SNP TSC0054240
attaaatattac

SEQ ID NO: 364057 - DNA, 12 bp, Artificial Sequence
  Oligonucleotide primer for the detection of SNP TSC0054240
attaaacattac

SEQ ID NO: 364058 - DNA, 12 bp, Artificial Sequence
  Oligonucleotide primer for the detection of SNP TSC0054240
tttgaaaaattg

SEQ ID NO: 364059 - DNA, 12 bp, Artificial Sequence
  Oligonucleotide primer for the detection of SNP TSC0054241
aaataacttata

SEQ ID NO: 364060 - DNA, 12 bp, Artificial Sequence
  Oligonucleotide primer for the detection of SNP TSC0054241
caccaattacat

SEQ ID NO: 364061 - DNA, 12 bp, Artificial Sequence
  Oligonucleotide primer for the detection of SNP TSC0054241
aagtaatttgta

SEQ ID NO: 364062 - DNA, 12 bp, Artificial Sequence
  Oligonucleotide primer for the detection of SNP TSC0054244
ctatcaatatca

SEQ ID NO: 364063 - DNA, 12 bp, Artificial Sequence
  Oligonucleotide primer for the detection of SNP TSC0054249
ttcacttcacct

SEQ ID NO: 364064 - DNA, 12 bp, Artificial Sequence
  Oligonucleotide primer for the detection of SNP TSC0054249
tagatattatta

SEQ ID NO: 364065 - DNA, 12 bp, Artificial Sequence
  Oligonucleotide primer for the detection of SNP TSC0054250
gtgttattaatg

SEQ ID NO: 364066 - DNA, 12 bp, Artificial Sequence
  Oligonucleotide primer for the detection of SNP TSC0054250
atactaccaata

SEQ ID NO: 364067 - DNA, 12 bp, Artificial Sequence
  Oligonucleotide primer for the detection of SNP TSC0054251
aaccactaatat

SEQ ID NO: 364068 - DNA, 12 bp, Artificial Sequence
  Oligonucleotide primer for the detection of SNP TSC0054251
ataaaatagagt

SEQ ID NO: 364069 - DNA, 12 bp, Artificial Sequence
  Oligonucleotide primer for the detection of SNP TSC0054251
aattattgatat

SEQ ID NO: 364070 - DNA, 12 bp, Artificial Sequence
  Oligonucleotide primer for the detection of SNP TSC0006654
tctatatcttta

SEQ ID NO: 364071 - DNA, 12 bp, Artificial Sequence
  Oligonucleotide primer for the detection of SNP TSC0006654
caaataatctca

SEQ ID NO: 364072 - DNA, 12 bp, Artificial Sequence
  Oligonucleotide primer for the detection of SNP TSC0054252
aaatactttatc

SEQ ID NO: 364073 - DNA, 12 bp, Artificial Sequence
  Oligonucleotide primer for the detection of SNP TSC0054252
ttgttagaggta

SEQ ID NO: 364074 - DNA, 12 bp, Artificial Sequence
  Oligonucleotide primer for the detection of SNP TSC0054253
tatccatacctc

SEQ ID NO: 364075 - DNA, 12 bp, Artificial Sequence
  Oligonucleotide primer for the detection of SNP TSC0054253
agttgtagtttg

SEQ ID NO: 364076 - DNA, 12 bp, Artificial Sequence
  Oligonucleotide primer for the detection of SNP TSC0054254
gttttgtaggat

SEQ ID NO: 364077 - DNA, 12 bp, Artificial Sequence
  Oligonucleotide primer for the detection of SNP TSC0054254
ttctacaaaata

SEQ ID NO: 364078 - DNA, 12 bp, Artificial Sequence
  Oligonucleotide primer for the detection of SNP TSC0054255
tcccatatacat

SEQ ID NO: 364079 - DNA, 12 bp, Artificial Sequence
  Oligonucleotide primer for the detection of SNP TSC0054256
ttaaatttactc

SEQ ID NO: 364080 - DNA, 12 bp, Artificial Sequence
  Oligonucleotide primer for the detection of SNP TSC0054256
aaatagttgttt

SEQ ID NO: 364081 - DNA, 12 bp, Artificial Sequence
  Oligonucleotide primer for the detection of SNP TSC0054256
ttaagtttattt

SEQ ID NO: 364082 - DNA, 12 bp, Artificial Sequence
  Oligonucleotide primer for the detection of SNP TSC0054256
ttaagtttattc

SEQ ID NO: 364083 - DNA, 12 bp, Artificial Sequence
  Oligonucleotide primer for the detection of SNP TSC0054257
aactcatttata

SEQ ID NO: 364084 - DNA, 12 bp, Artificial Sequence
  Oligonucleotide primer for the detection of SNP TSC0054257
ataaaaaaggat

SEQ ID NO: 364085 - DNA, 12 bp, Artificial Sequence
  Oligonucleotide primer for the detection of SNP TSC0054257
gtttatttatat

SEQ ID NO: 364086 - DNA, 12 bp, Artificial Sequence
  Oligonucleotide primer for the detection of SNP TSC0054257
gtttatttatac

SEQ ID NO: 364087 - DNA, 12 bp, Artificial Sequence
  Oligonucleotide primer for the detection of SNP TSC0006573
aaactccaaaac

SEQ ID NO: 364088 - DNA, 12 bp, Artificial Sequence
  Oligonucleotide primer for the detection of SNP TSC0006573
gattgatatagg

SEQ ID NO: 364089 - DNA, 12 bp, Artificial Sequence
  Oligonucleotide primer for the detection of SNP TSC0006574
ccttcaccacca

SEQ ID NO: 364090 - DNA, 12 bp, Artificial Sequence
  Oligonucleotide primer for the detection of SNP TSC0006574
gtaatttatagg

SEQ ID NO: 364091 - DNA, 12 bp, Artificial Sequence
  Oligonucleotide primer for the detection of SNP TSC0054260
tgaattaaggtt

SEQ ID NO: 364092 - DNA, 12 bp, Artificial Sequence
  Oligonucleotide primer for the detection of SNP TSC0054260
tgaattaaggtc

SEQ ID NO: 364093 - DNA, 12 bp, Artificial Sequence
  Oligonucleotide primer for the detection of SNP TSC0054260
aaattaaaacca

SEQ ID NO: 364094 - DNA, 12 bp, Artificial Sequence
  Oligonucleotide primer for the detection of SNP TSC0054260
aaattaaaaccg

SEQ ID NO: 364095 - DNA, 12 bp, Artificial Sequence
  Oligonucleotide primer for the detection of SNP TSC0054260
agattatgagag

SEQ ID NO: 364096 - DNA, 12 bp, Artificial Sequence
  Oligonucleotide primer for the detection of SNP TSC0054264
cacttcccatac

SEQ ID NO: 364097 - DNA, 12 bp, Artificial Sequence
  Oligonucleotide primer for the detection of SNP TSC0054264
aaatgtttatgg

SEQ ID NO: 364098 - DNA, 12 bp, Artificial Sequence
  Oligonucleotide primer for the detection of SNP TSC0054264
aaatattcataa

SEQ ID NO: 364099 - DNA, 12 bp, Artificial Sequence
  Oligonucleotide primer for the detection of SNP TSC0054266
tcattcccctac

SEQ ID NO: 364100 - DNA, 12 bp, Artificial Sequence
  Oligonucleotide primer for the detection of SNP TSC0054266
attggggtgggg

SEQ ID NO: 364101 - DNA, 12 bp, Artificial Sequence
  Oligonucleotide primer for the detection of SNP TSC0054267
taaataacccac

SEQ ID NO: 364102 - DNA, 12 bp, Artificial Sequence
  Oligonucleotide primer for the detection of SNP TSC0054267
gttgtgatttag

SEQ ID NO: 364103 - DNA, 12 bp, Artificial Sequence
  Oligonucleotide primer for the detection of SNP TSC0054267
gtcgtgatttag

SEQ ID NO: 364104 - DNA, 12 bp, Artificial Sequence
  Oligonucleotide primer for the detection of SNP TSC0054267
atcataacctaa

SEQ ID NO: 364105 - DNA, 12 bp, Artificial Sequence
  Oligonucleotide primer for the detection of SNP TSC0054267
atcgtaacctaa

SEQ ID NO: 364106 - DNA, 12 bp, Artificial Sequence
  Oligonucleotide primer for the detection of SNP TSC0054267
tggatgatttat

SEQ ID NO: 364107 - DNA, 12 bp, Artificial Sequence
  Oligonucleotide primer for the detection of SNP TSC0006525
ccatacttaccc

SEQ ID NO: 364108 - DNA, 12 bp, Artificial Sequence
  Oligonucleotide primer for the detection of SNP TSC0006525
tgttgggagtta

SEQ ID NO: 364109 - DNA, 12 bp, Artificial Sequence
  Oligonucleotide primer for the detection of SNP TSC0008786
ttttatcttctt

SEQ ID NO: 364110 - DNA, 12 bp, Artificial Sequence
  Oligonucleotide primer for the detection of SNP TSC0054274
aaataattatcc

SEQ ID NO: 364111 - DNA, 12 bp, Artificial Sequence
  Oligonucleotide primer for the detection of SNP TSC0054274
agaaatttaata

SEQ ID NO: 364112 - DNA, 12 bp, Artificial Sequence
  Oligonucleotide primer for the detection of SNP TSC0054276
caccattaacca

SEQ ID NO: 364113 - DNA, 12 bp, Artificial Sequence
  Oligonucleotide primer for the detection of SNP TSC0054276
caccgttaacca

SEQ ID NO: 364114 - DNA, 12 bp, Artificial Sequence
  Oligonucleotide primer for the detection of SNP TSC0054276
agataatatttt

SEQ ID NO: 364115 - DNA, 12 bp, Artificial Sequence
  Oligonucleotide primer for the detection of SNP TSC0054276
  unsure (1): unknown base
naaataacattc

SEQ ID NO: 364116 - DNA, 12 bp, Artificial Sequence
  Oligonucleotide primer for the detection of SNP TSC0054276
ttattgttagtt

SEQ ID NO: 364117 - DNA, 12 bp, Artificial Sequence
  Oligonucleotide primer for the detection of SNP TSC0054276
ttatcgttagtt

SEQ ID NO: 364118 - DNA, 12 bp, Artificial Sequence
  Oligonucleotide primer for the detection of SNP TSC0054277
acataatacata

SEQ ID NO: 364119 - DNA, 12 bp, Artificial Sequence
  Oligonucleotide primer for the detection of SNP TSC0054277
ttggttattttt

SEQ ID NO: 364120 - DNA, 12 bp, Artificial Sequence
  Oligonucleotide primer for the detection of SNP TSC0054277
ctaactacttct

SEQ ID NO: 364121 - DNA, 12 bp, Artificial Sequence
  Oligonucleotide primer for the detection of SNP TSC0054278
aacaaacaaacc

SEQ ID NO: 364122 - DNA, 12 bp, Artificial Sequence
  Oligonucleotide primer for the detection of SNP TSC0054278
aattttttatag

SEQ ID NO: 364123 - DNA, 12 bp, Artificial Sequence
  Oligonukleotid-Primer
aacttcccacaa

SEQ ID NO: 364124 - DNA, 12 bp, Artificial Sequence
  Oligonucleotide primer for the detection of SNP TSC0054278
ggtaaataagtt

SEQ ID NO: 364125 - DNA, 12 bp, Artificial Sequence
  Oligonucleotide primer for the detection of SNP TSC0054279
gttttaagagtt

SEQ ID NO: 364126 - DNA, 12 bp, Artificial Sequence
  Oligonucleotide primer for the detection of SNP TSC0054279
aacctcaaaaac

SEQ ID NO: 364127 - DNA, 12 bp, Artificial Sequence
  Oligonucleotide primer for the detection of SNP TSC0054279
ggtatgggggtt

SEQ ID NO: 364128 - DNA, 12 bp, Artificial Sequence
  Oligonucleotide primer for the detection of SNP TSC0054280
caaccatcctca

SEQ ID NO: 364129 - DNA, 12 bp, Artificial Sequence
  Oligonucleotide primer for the detection of SNP TSC0054280
aagattaaagag

SEQ ID NO: 364130 - DNA, 12 bp, Artificial Sequence
  Oligonucleotide primer for the detection of SNP TSC0006347
tttaagaattaa

SEQ ID NO: 364131 - DNA, 12 bp, Artificial Sequence
  Oligonukleotid-Primer
cacaacaaaatc

SEQ ID NO: 364132 - DNA, 12 bp, Artificial Sequence
  Oligonucleotide primer for the detection of SNP TSC0054285
tttgattgttaa

SEQ ID NO: 364133 - DNA, 12 bp, Artificial Sequence
  Oligonucleotide primer for the detection of SNP TSC0054288
ctactccacaat

SEQ ID NO: 364134 - DNA, 12 bp, Artificial Sequence
  Oligonucleotide primer for the detection of SNP TSC0054288
agtagaaggata

SEQ ID NO: 364135 - DNA, 12 bp, Artificial Sequence
  Oligonukleotid-Primer
ttgttttataat

SEQ ID NO: 364136 - DNA, 12 bp, Artificial Sequence
  Oligonucleotide primer for the detection of SNP TSC0054289
taaaagatgttt

SEQ ID NO: 364137 - DNA, 12 bp, Artificial Sequence
  Oligonucleotide primer for the detection of SNP TSC0054291
gaataactaaat

SEQ ID NO: 364138 - DNA, 12 bp, Artificial Sequence
  Oligonucleotide primer for the detection of SNP TSC0054291
taaatggtatta

SEQ ID NO: 364139 - DNA, 12 bp, Artificial Sequence
  Oligonukleotid-Primer
taaataacacca

SEQ ID NO: 364140 - DNA, 12 bp, Artificial Sequence
  Oligonucleotide primer for the detection of SNP TSC0054291
gaataattgggt

SEQ ID NO: 364141 - DNA, 12 bp, Artificial Sequence
  Oligonucleotide primer for the detection of SNP TSC0054292
tattaggtttat

SEQ ID NO: 364142 - DNA, 12 bp, Artificial Sequence
  Oligonucleotide primer for the detection of SNP TSC0054292
tattaggtttac

SEQ ID NO: 364143 - DNA, 12 bp, Artificial Sequence
  Oligonucleotide primer for the detection of SNP TSC0054292
gtaggagaaagg

SEQ ID NO: 364144 - DNA, 12 bp, Artificial Sequence
  Oligonucleotide primer for the detection of SNP TSC0054294
ataactttttca

SEQ ID NO: 364145 - DNA, 12 bp, Artificial Sequence
  Oligonucleotide primer for the detection of SNP TSC0054294
ttgagatttttg

SEQ ID NO: 364146 - DNA, 12 bp, Artificial Sequence
  Oligonucleotide primer for the detection of SNP TSC0054294
taaaacccttaa

SEQ ID NO: 364147 - DNA, 12 bp, Artificial Sequence
  Oligonukleotid-Primer
actttttcattt

SEQ ID NO: 364148 - DNA, 12 bp, Artificial Sequence
  Oligonucleotide primer for the detection of SNP TSC0054300
taaaaatttctt

SEQ ID NO: 364149 - DNA, 12 bp, Artificial Sequence
  Oligonucleotide primer for the detection of SNP TSC0054300
gggaaatagtta

SEQ ID NO: 364150 - DNA, 12 bp, Artificial Sequence
  Oligonucleotide primer for the detection of SNP TSC0054303
ttgtgaagagga

SEQ ID NO: 364151 - DNA, 12 bp, Artificial Sequence
  Oligonucleotide primer for the detection of SNP TSC0054304
aattgtttgaga

SEQ ID NO: 364152 - DNA, 12 bp, Artificial Sequence
  Oligonucleotide primer for the detection of SNP TSC0007683
attatacacttt

SEQ ID NO: 364153 - DNA, 12 bp, Artificial Sequence
  Oligonucleotide primer for the detection of SNP TSC0054305
aatacattcttc

SEQ ID NO: 364154 - DNA, 12 bp, Artificial Sequence
  Oligonucleotide primer for the detection of SNP TSC0054305
atgtaattggta

SEQ ID NO: 364155 - DNA, 12 bp, Artificial Sequence
  Oligonucleotide primer for the detection of SNP TSC0054306
aaatttcctcaa

SEQ ID NO: 364156 - DNA, 12 bp, Artificial Sequence
  Oligonucleotide primer for the detection of SNP TSC0054306
tttaaaatagtt

SEQ ID NO: 364157 - DNA, 12 bp, Artificial Sequence
  Oligonucleotide primer for the detection of SNP TSC0054306
agtttttttaat

SEQ ID NO: 364158 - DNA, 12 bp, Artificial Sequence
  Oligonucleotide primer for the detection of SNP TSC0054307
tattttaaatac

SEQ ID NO: 364159 - DNA, 12 bp, Artificial Sequence
  Oligonucleotide primer for the detection of SNP TSC0054307
ttttagagagag

SEQ ID NO: 364160 - DNA, 12 bp, Artificial Sequence
  Oligonucleotide primer for the detection of SNP TSC0054308
aaaacaaactct

SEQ ID NO: 364161 - DNA, 12 bp, Artificial Sequence
  Oligonucleotide primer for the detection of SNP TSC0054308
taatggtattta

SEQ ID NO: 364162 - DNA, 12 bp, Artificial Sequence
  Oligonucleotide primer for the detection of SNP TSC0054308
aaaataagtttt

SEQ ID NO: 364163 - DNA, 12 bp, Artificial Sequence
  Oligonucleotide primer for the detection of SNP TSC0054311
tcactctcaata

SEQ ID NO: 364164 - DNA, 12 bp, Artificial Sequence
  Oligonucleotide primer for the detection of SNP TSC0054311
tgaatataggta

SEQ ID NO: 364165 - DNA, 12 bp, Artificial Sequence
  Oligonucleotide primer for the detection of SNP TSC0054311
tatttttagtgc

SEQ ID NO: 364166 - DNA, 12 bp, Artificial Sequence
  Oligonucleotide primer for the detection of SNP TSC0054312
ttcccaaatttt

SEQ ID NO: 364167 - DNA, 12 bp, Artificial Sequence
  Oligonukleotid-Primer
gtattattttga

SEQ ID NO: 364168 - DNA, 12 bp, Artificial Sequence
  Oligonucleotide primer for the detection of SNP TSC0054313
actaaaatactt

SEQ ID NO: 364169 - DNA, 12 bp, Artificial Sequence
  Oligonucleotide primer for the detection of SNP TSC0054313
tagtgattttaa

SEQ ID NO: 364170 - DNA, 12 bp, Artificial Sequence
  Oligonucleotide primer for the detection of SNP TSC0054313
caataactttaa

SEQ ID NO: 364171 - DNA, 12 bp, Artificial Sequence
  Oligonucleotide primer for the detection of SNP TSC0054313
gttggggtattt

SEQ ID NO: 364172 - DNA, 12 bp, Artificial Sequence
  Oligonucleotide primer for the detection of SNP TSC0054314
tccacaacaacc

SEQ ID NO: 364173 - DNA, 12 bp, Artificial Sequence
  Oligonucleotide primer for the detection of SNP TSC0054314
tccacgacaacc

SEQ ID NO: 364174 - DNA, 12 bp, Artificial Sequence
  Oligonucleotide primer for the detection of SNP TSC0054315
ctactctaccct

SEQ ID NO: 364175 - DNA, 12 bp, Artificial Sequence
  Oligonucleotide primer for the detection of SNP TSC0054315
gtgaggggaatt

SEQ ID NO: 364176 - DNA, 12 bp, Artificial Sequence
  Oligonucleotide primer for the detection of SNP TSC0054319
tatatgattgag

SEQ ID NO: 364177 - DNA, 12 bp, Artificial Sequence
  Oligonucleotide primer for the detection of SNP TSC0054320
caaatattcctt

SEQ ID NO: 364178 - DNA, 12 bp, Artificial Sequence
  Oligonucleotide primer for the detection of SNP TSC0054320
aaaataggaaga

SEQ ID NO: 364179 - DNA, 12 bp, Artificial Sequence
  Oligonucleotide primer for the detection of SNP TSC0054321
ttttttaattcg

SEQ ID NO: 364180 - DNA, 12 bp, Artificial Sequence
  Oligonucleotide primer for the detection of SNP TSC0054322
aaggttggtttt

SEQ ID NO: 364181 - DNA, 12 bp, Artificial Sequence
  Oligonucleotide primer for the detection of SNP TSC0054322
aaggtcggtttt

SEQ ID NO: 364182 - DNA, 12 bp, Artificial Sequence
  Oligonucleotide primer for the detection of SNP TSC0054322
ccaaaatcaacc

SEQ ID NO: 364183 - DNA, 12 bp, Artificial Sequence
  Oligonukleotid-Primer
ccaaaatcgacc

SEQ ID NO: 364184 - DNA, 12 bp, Artificial Sequence
  Oligonucleotide primer for the detection of SNP TSC0054322
agatgtataagg

SEQ ID NO: 364185 - DNA, 12 bp, Artificial Sequence
  Oligonucleotide primer for the detection of SNP TSC0054323
tataaaacatcc

SEQ ID NO: 364186 - DNA, 12 bp, Artificial Sequence
  Oligonucleotide primer for the detection of SNP TSC0054324
cttattcataaa

SEQ ID NO: 364187 - DNA, 12 bp, Artificial Sequence
  Oligonukleotid-Primer
gtgttattatga

SEQ ID NO: 364188 - DNA, 12 bp, Artificial Sequence
  Oligonucleotide primer for the detection of SNP TSC0054324
gcgttattatga

SEQ ID NO: 364189 - DNA, 12 bp, Artificial Sequence
  Oligonucleotide primer for the detection of SNP TSC0054324
acatcattataa

SEQ ID NO: 364190 - DNA, 12 bp, Artificial Sequence
  Oligonucleotide primer for the detection of SNP TSC0054324
acgtcattataa

SEQ ID NO: 364191 - DNA, 12 bp, Artificial Sequence
  Oligonucleotide primer for the detection of SNP TSC0054324
tttatttatgaa

SEQ ID NO: 364192 - DNA, 12 bp, Artificial Sequence
  Oligonucleotide primer for the detection of SNP TSC0054328
ctcatcaataaa

SEQ ID NO: 364193 - DNA, 12 bp, Artificial Sequence
  Oligonucleotide primer for the detection of SNP TSC0054328
ataatttagtaa

SEQ ID NO: 364194 - DNA, 12 bp, Artificial Sequence
  Oligonucleotide primer for the detection of SNP TSC0054328
ataatccaacaa

SEQ ID NO: 364195 - DNA, 12 bp, Artificial Sequence
  Oligonucleotide primer for the detection of SNP TSC0054329
gttatgatttta

SEQ ID NO: 364196 - DNA, 12 bp, Artificial Sequence
  Oligonucleotide primer for the detection of SNP TSC0010962
acaaaaaaatcc

SEQ ID NO: 364197 - DNA, 12 bp, Artificial Sequence
  Oligonucleotide primer for the detection of SNP TSC0010962
taaggtatagaa

SEQ ID NO: 364198 - DNA, 12 bp, Artificial Sequence
  Oligonucleotide primer for the detection of SNP TSC0054331
taaatttgtata

SEQ ID NO: 364199 - DNA, 12 bp, Artificial Sequence
  Oligonucleotide primer for the detection of SNP TSC0054331
caaatttataca

SEQ ID NO: 364200 - DNA, 12 bp, Artificial Sequence
  Oligonucleotide primer for the detection of SNP TSC0054331
gagtagtagtgt

SEQ ID NO: 364201 - DNA, 12 bp, Artificial Sequence
  Oligonucleotide primer for the detection of SNP TSC0054335
caaaaatccatc

SEQ ID NO: 364202 - DNA, 12 bp, Artificial Sequence
  Oligonucleotide primer for the detection of SNP TSC0054335
ttaatgaataaa

SEQ ID NO: 364203 - DNA, 12 bp, Artificial Sequence
  Oligonucleotide primer for the detection of SNP TSC0054335
ttaacgaataaa

SEQ ID NO: 364204 - DNA, 12 bp, Artificial Sequence
  Oligonucleotide primer for the detection of SNP TSC0054342
tattttagaggt

SEQ ID NO: 364205 - DNA, 12 bp, Artificial Sequence
  Oligonucleotide primer for the detection of SNP TSC0054342
ctatcccaaaaa

SEQ ID NO: 364206 - DNA, 12 bp, Artificial Sequence
  Oligonucleotide primer for the detection of SNP TSC0054342
aaatggaaaata

SEQ ID NO: 364207 - DNA, 12 bp, Artificial Sequence
  Oligonucleotide primer for the detection of SNP TSC0054343
caccccctcacc

SEQ ID NO: 364208 - DNA, 12 bp, Artificial Sequence
  Oligonucleotide primer for the detection of SNP TSC0054343
atgaatttggtg

SEQ ID NO: 364209 - DNA, 12 bp, Artificial Sequence
  Oligonucleotide primer for the detection of SNP TSC0054345
aaaatcaactaa

SEQ ID NO: 364210 - DNA, 12 bp, Artificial Sequence
  Oligonucleotide primer for the detection of SNP TSC0054345
cctaccaccaaa

SEQ ID NO: 364211 - DNA, 12 bp, Artificial Sequence
  Oligonucleotide primer for the detection of SNP TSC0054346
  unsure (5): unknown base
ccctntaaacat

SEQ ID NO: 364212 - DNA, 12 bp, Artificial Sequence
  Oligonucleotide primer for the detection of SNP TSC0054346
actccaccaaca

SEQ ID NO: 364213 - DNA, 12 bp, Artificial Sequence
  Oligonucleotide primer for the detection of SNP TSC0054346
  unsure (4): unknown base
tttntgggtatt

SEQ ID NO: 364214 - DNA, 12 bp, Artificial Sequence
  Oligonucleotide primer for the detection of SNP TSC0054346
  unsure (4): unknown base
tttntgggtatc

SEQ ID NO: 364215 - DNA, 12 bp, Artificial Sequence
  Oligonucleotide primer for the detection of SNP TSC0010722
atacacacaccc

SEQ ID NO: 364216 - DNA, 12 bp, Artificial Sequence
  Oligonucleotide primer for the detection of SNP TSC0010722
atttgattttta

SEQ ID NO: 364217 - DNA, 12 bp, Artificial Sequence
  Oligonucleotide primer for the detection of SNP TSC0054350
cacttcaaaaaa

SEQ ID NO: 364218 - DNA, 12 bp, Artificial Sequence
  Oligonucleotide primer for the detection of SNP TSC0054350
cacttcgaaaaa

SEQ ID NO: 364219 - DNA, 12 bp, Artificial Sequence
  Oligonucleotide primer for the detection of SNP TSC0054350
cttcccacctca

SEQ ID NO: 364220 - DNA, 12 bp, Artificial Sequence
  Oligonucleotide primer for the detection of SNP TSC0054350
agtatttcggga

SEQ ID NO: 364221 - DNA, 12 bp, Artificial Sequence
  Oligonucleotide primer for the detection of SNP TSC0006648
aatcgcataaaa

SEQ ID NO: 364222 - DNA, 12 bp, Artificial Sequence
  Oligonucleotide primer for the detection of SNP TSC0006648
ttttctcaataa

SEQ ID NO: 364223 - DNA, 12 bp, Artificial Sequence
  Oligonucleotide primer for the detection of SNP TSC0006648
aattgtatggaa

SEQ ID NO: 364224 - DNA, 12 bp, Artificial Sequence
  Oligonucleotide primer for the detection of SNP TSC0006648
aatcgtatggaa

SEQ ID NO: 364225 - DNA, 12 bp, Artificial Sequence
  Oligonucleotide primer for the detection of SNP TSC0005990
aaatattttcca

SEQ ID NO: 364226 - DNA, 12 bp, Artificial Sequence
  Oligonucleotide primer for the detection of SNP TSC0005990
cccttttcctcc

SEQ ID NO: 364227 - DNA, 12 bp, Artificial Sequence
  Oligonucleotide primer for the detection of SNP TSC0054356
taataataaaat

SEQ ID NO: 364228 - DNA, 12 bp, Artificial Sequence
  Oligonucleotide primer for the detection of SNP TSC0054356
tattttattaga

SEQ ID NO: 364229 - DNA, 12 bp, Artificial Sequence
  Oligonucleotide primer for the detection of SNP TSC0054357
atctccactcac

SEQ ID NO: 364230 - DNA, 12 bp, Artificial Sequence
  Oligonucleotide primer for the detection of SNP TSC0054357
atctccactcgc

SEQ ID NO: 364231 - DNA, 12 bp, Artificial Sequence
  Oligonucleotide primer for the detection of SNP TSC0054357
atctccgctcac

SEQ ID NO: 364232 - DNA, 12 bp, Artificial Sequence
  Oligonucleotide primer for the detection of SNP TSC0054357
atctccgctcgc

SEQ ID NO: 364233 - DNA, 12 bp, Artificial Sequence
  Oligonucleotide primer for the detection of SNP TSC0054357
aggtagaatttg

SEQ ID NO: 364234 - DNA, 12 bp, Artificial Sequence
  Oligonucleotide primer for the detection of SNP TSC0054357
atttttgtttgt

SEQ ID NO: 364235 - DNA, 12 bp, Artificial Sequence
  Oligonucleotide primer for the detection of SNP TSC0054357
attttcgtttgt

SEQ ID NO: 364236 - DNA, 12 bp, Artificial Sequence
  Oligonucleotide primer for the detection of SNP TSC0054357
atttttgttcgt

SEQ ID NO: 364237 - DNA, 12 bp, Artificial Sequence
  Oligonucleotide primer for the detection of SNP TSC0054357
attttcgttcgt

SEQ ID NO: 364238 - DNA, 12 bp, Artificial Sequence
  Oligonucleotide primer for the detection of SNP TSC0054361
caaaatactaac

SEQ ID NO: 364239 - DNA, 12 bp, Artificial Sequence
  Oligonucleotide primer for the detection of SNP TSC0054362
tagttgagattg

SEQ ID NO: 364240 - DNA, 12 bp, Artificial Sequence
  Oligonucleotide primer for the detection of SNP TSC0054362
taactaaaatta

SEQ ID NO: 364241 - DNA, 12 bp, Artificial Sequence
  Oligonucleotide primer for the detection of SNP TSC0054363
ttaaattataat

SEQ ID NO: 364242 - DNA, 12 bp, Artificial Sequence
  Oligonucleotide primer for the detection of SNP TSC0054363
agggattatgag

SEQ ID NO: 364243 - DNA, 12 bp, Artificial Sequence
  Oligonucleotide primer for the detection of SNP TSC0005300
acaatccctcca

SEQ ID NO: 364244 - DNA, 12 bp, Artificial Sequence
  Oligonucleotide primer for the detection of SNP TSC0005300
ttagtgattttt

SEQ ID NO: 364245 - DNA, 12 bp, Artificial Sequence
  Oligonucleotide primer for the detection of SNP TSC0005300
tcaataaccctt

SEQ ID NO: 364246 - DNA, 12 bp, Artificial Sequence
  Oligonucleotide primer for the detection of SNP TSC0054366
ttaaccaattca

SEQ ID NO: 364247 - DNA, 12 bp, Artificial Sequence
  Oligonucleotide primer for the detection of SNP TSC0054366
ttttgttagtag

SEQ ID NO: 364248 - DNA, 12 bp, Artificial Sequence
  Oligonucleotide primer for the detection of SNP TSC0054366
ttagttaattta

SEQ ID NO: 364249 - DNA, 12 bp, Artificial Sequence
  Oligonucleotide primer for the detection of SNP TSC0054367
caccacatctca

SEQ ID NO: 364250 - DNA, 12 bp, Artificial Sequence
  Oligonucleotide primer for the detection of SNP TSC0054367
atgttttgaaat

SEQ ID NO: 364251 - DNA, 12 bp, Artificial Sequence
  Oligonucleotide primer for the detection of SNP TSC0054368
atttcataaact

SEQ ID NO: 364252 - DNA, 12 bp, Artificial Sequence
  Oligonucleotide primer for the detection of SNP TSC0054368
ttggtaatgtta

SEQ ID NO: 364253 - DNA, 12 bp, Artificial Sequence
  Oligonucleotide primer for the detection of SNP TSC0054369
caaatcaaactt

SEQ ID NO: 364254 - DNA, 12 bp, Artificial Sequence
  Oligonucleotide primer for the detection of SNP TSC0054370
agttggaaatgt

SEQ ID NO: 364255 - DNA, 12 bp, Artificial Sequence
  Oligonucleotide primer for the detection of SNP TSC0054370
ggtgggtgattt

SEQ ID NO: 364256 - DNA, 12 bp, Artificial Sequence
  Oligonucleotide primer for the detection of SNP TSC0054370
ggcgggtgattt

SEQ ID NO: 364257 - DNA, 12 bp, Artificial Sequence
  Oligonucleotide primer for the detection of SNP TSC0054372
atttttctcaca

SEQ ID NO: 364258 - DNA, 12 bp, Artificial Sequence
  Oligonucleotide primer for the detection of SNP TSC0054372
taggaattgtat

SEQ ID NO: 364259 - DNA, 12 bp, Artificial Sequence
  Oligonucleotide primer for the detection of SNP TSC0054373
acactatattaa

SEQ ID NO: 364260 - DNA, 12 bp, Artificial Sequence
  Oligonucleotide primer for the detection of SNP TSC0054373
atttaatgagat

SEQ ID NO: 364261 - DNA, 12 bp, Artificial Sequence
  Oligonucleotide primer for the detection of SNP TSC0054373
acttaataaaat

SEQ ID NO: 364262 - DNA, 12 bp, Artificial Sequence
  Oligonucleotide primer for the detection of SNP TSC0054373
atattgtgttgg

SEQ ID NO: 364263 - DNA, 12 bp, Artificial Sequence
  Oligonucleotide primer for the detection of SNP TSC0005484
cacatcaccacc

SEQ ID NO: 364264 - DNA, 12 bp, Artificial Sequence
  Oligonucleotide primer for the detection of SNP TSC0005484
cacatcaccgcc

SEQ ID NO: 364265 - DNA, 12 bp, Artificial Sequence
  Oligonucleotide primer for the detection of SNP TSC0005484
tatattattgtt

SEQ ID NO: 364266 - DNA, 12 bp, Artificial Sequence
  Oligonucleotide primer for the detection of SNP TSC0005484
tatattatcgtt

SEQ ID NO: 364267 - DNA, 12 bp, Artificial Sequence
  Oligonucleotide primer for the detection of SNP TSC0054374
acaaacccacaa

SEQ ID NO: 364268 - DNA, 12 bp, Artificial Sequence
  Oligonucleotide primer for the detection of SNP TSC0054374
tttcctcctacc

SEQ ID NO: 364269 - DNA, 12 bp, Artificial Sequence
  Oligonucleotide primer for the detection of SNP TSC0054374
gtagatttatag

SEQ ID NO: 364270 - DNA, 12 bp, Artificial Sequence
  Oligonucleotide primer for the detection of SNP TSC0054375
aacatcatatat

SEQ ID NO: 364271 - DNA, 12 bp, Artificial Sequence
  Oligonucleotide primer for the detection of SNP TSC0054375
tttaggatttag

SEQ ID NO: 364272 - DNA, 12 bp, Artificial Sequence
  Oligonucleotide primer for the detection of SNP TSC0054376
tacttactctca

SEQ ID NO: 364273 - DNA, 12 bp, Artificial Sequence
  Oligonucleotide primer for the detection of SNP TSC0054376
  unsure (5): unknown base
agttnttatttt

SEQ ID NO: 364274 - DNA, 12 bp, Artificial Sequence
  Oligonucleotide primer for the detection of SNP TSC0054376
  unsure (7): unknown base
acaactnttatc

SEQ ID NO: 364275 - DNA, 12 bp, Artificial Sequence
  Oligonucleotide primer for the detection of SNP TSC0054377
tgtgtaaaagat

SEQ ID NO: 364276 - DNA, 12 bp, Artificial Sequence
  Oligonucleotide primer for the detection of SNP TSC0054377
ttgttgaaaata

SEQ ID NO: 364277 - DNA, 12 bp, Artificial Sequence
  Oligonucleotide primer for the detection of SNP TSC0054378
aatttctttttc

SEQ ID NO: 364278 - DNA, 12 bp, Artificial Sequence
  Oligonucleotide primer for the detection of SNP TSC0054378
tagaggtggtag

SEQ ID NO: 364279 - DNA, 12 bp, Artificial Sequence
  Oligonucleotide primer for the detection of SNP TSC0054379
acacgaaaaatt

SEQ ID NO: 364280 - DNA, 12 bp, Artificial Sequence
  Oligonucleotide primer for the detection of SNP TSC0054380
cacctcgacctc

SEQ ID NO: 364281 - DNA, 12 bp, Artificial Sequence
  Oligonucleotide primer for the detection of SNP TSC0054381
acaaaaacgtaa

SEQ ID NO: 364282 - DNA, 12 bp, Artificial Sequence
  Oligonucleotide primer for the detection of SNP TSC0054381
tggatttatagt

SEQ ID NO: 364283 - DNA, 12 bp, Artificial Sequence
  Oligonucleotide primer for the detection of SNP TSC0054381
aaattcacaata

SEQ ID NO: 364284 - DNA, 12 bp, Artificial Sequence
  Oligonucleotide primer for the detection of SNP TSC0054381
ggggtgtgattt

SEQ ID NO: 364285 - DNA, 12 bp, Artificial Sequence
  Oligonucleotide primer for the detection of SNP TSC0054381
ggggcgtgattt

SEQ ID NO: 364286 - DNA, 12 bp, Artificial Sequence
  Oligonucleotide primer for the detection of SNP TSC0054383
tctcaaactaac

SEQ ID NO: 364287 - DNA, 12 bp, Artificial Sequence
  Oligonucleotide primer for the detection of SNP TSC0054383
agagtgtaaaat

SEQ ID NO: 364288 - DNA, 12 bp, Artificial Sequence
  Oligonucleotide primer for the detection of SNP TSC0054384
aaagatttgttg

SEQ ID NO: 364289 - DNA, 12 bp, Artificial Sequence
  Oligonucleotide primer for the detection of SNP TSC0054385
aaggtgtttttg

SEQ ID NO: 364290 - DNA, 12 bp, Artificial Sequence
  Oligonucleotide primer for the detection of SNP TSC0054385
atgggataagtt

SEQ ID NO: 364291 - DNA, 12 bp, Artificial Sequence
  Oligonucleotide primer for the detection of SNP TSC0054386
cttctttcttaa

SEQ ID NO: 364292 - DNA, 12 bp, Artificial Sequence
  Oligonucleotide primer for the detection of SNP TSC0054386
gtttagttagga

SEQ ID NO: 364293 - DNA, 12 bp, Artificial Sequence
  Oligonucleotide primer for the detection of SNP TSC0054386
attcaaccaaaa

SEQ ID NO: 364294 - DNA, 12 bp, Artificial Sequence
  Oligonucleotide primer for the detection of SNP TSC0054387
tataattcatca

SEQ ID NO: 364295 - DNA, 12 bp, Artificial Sequence
  Oligonucleotide primer for the detection of SNP TSC0054387
atatttgtatta

SEQ ID NO: 364296 - DNA, 12 bp, Artificial Sequence
  Oligonucleotide primer for the detection of SNP TSC0054387
acatttacatca

SEQ ID NO: 364297 - DNA, 12 bp, Artificial Sequence
  Oligonucleotide primer for the detection of SNP TSC0054387
atgtggtttatt

SEQ ID NO: 364298 - DNA, 12 bp, Artificial Sequence
  Oligonucleotide primer for the detection of SNP TSC0054388
ctacaaatcatc

SEQ ID NO: 364299 - DNA, 12 bp, Artificial Sequence
  Oligonucleotide primer for the detection of SNP TSC0054389
tgaaaatggttg

SEQ ID NO: 364300 - DNA, 12 bp, Artificial Sequence
  Oligonucleotide primer for the detection of SNP TSC0054389
tgaaaatggtcg

SEQ ID NO: 364301 - DNA, 12 bp, Artificial Sequence
  Oligonucleotide primer for the detection of SNP TSC0054389
aaaaataatcga

SEQ ID NO: 364302 - DNA, 12 bp, Artificial Sequence
  Oligonucleotide primer for the detection of SNP TSC0054389
aggaatagtttg

SEQ ID NO: 364303 - DNA, 12 bp, Artificial Sequence
  Oligonucleotide primer for the detection of SNP TSC0054390
ctcccttaaaaa

SEQ ID NO: 364304 - DNA, 12 bp, Artificial Sequence
  Oligonucleotide primer for the detection of SNP TSC0054390
cccttaacatcc

SEQ ID NO: 364305 - DNA, 12 bp, Artificial Sequence
  Oligonucleotide primer for the detection of SNP TSC0054390
tgtttttttgag

SEQ ID NO: 364306 - DNA, 12 bp, Artificial Sequence
  Oligonucleotide primer for the detection of SNP TSC0054391
aataactactac

SEQ ID NO: 364307 - DNA, 12 bp, Artificial Sequence
  Oligonucleotide primer for the detection of SNP TSC0054391
aaacaaccctta

SEQ ID NO: 364308 - DNA, 12 bp, Artificial Sequence
  Oligonucleotide primer for the detection of SNP TSC0054391
agtagttgttgt

SEQ ID NO: 364309 - DNA, 12 bp, Artificial Sequence
  Oligonucleotide primer for the detection of SNP TSC0054392
caacccttatcc

SEQ ID NO: 364310 - DNA, 12 bp, Artificial Sequence
  Oligonucleotide primer for the detection of SNP TSC0054392
gtagttgttgta

SEQ ID NO: 364311 - DNA, 12 bp, Artificial Sequence
  Oligonucleotide primer for the detection of SNP TSC0054393
tataaacaacta

SEQ ID NO: 364312 - DNA, 12 bp, Artificial Sequence
  Oligonucleotide primer for the detection of SNP TSC0054393
attgtttaatat

SEQ ID NO: 364313 - DNA, 12 bp, Artificial Sequence
  Oligonucleotide primer for the detection of SNP TSC0054393
actatctaacac

SEQ ID NO: 364314 - DNA, 12 bp, Artificial Sequence
  Oligonucleotide primer for the detection of SNP TSC0054393
tgtaagtagttg

SEQ ID NO: 364315 - DNA, 12 bp, Artificial Sequence
  Oligonucleotide primer for the detection of SNP TSC0054394
cttattatatct

SEQ ID NO: 364316 - DNA, 12 bp, Artificial Sequence
  Oligonucleotide primer for the detection of SNP TSC0054394
ggttagattgta

SEQ ID NO: 364317 - DNA, 12 bp, Artificial Sequence
  Oligonucleotide primer for the detection of SNP TSC0054395
ctaaaacataca

SEQ ID NO: 364318 - DNA, 12 bp, Artificial Sequence
  Oligonucleotide primer for the detection of SNP TSC0054395
ggtgatggtatg

SEQ ID NO: 364319 - DNA, 12 bp, Artificial Sequence
  Oligonucleotide primer for the detection of SNP TSC0054396
attgaaattata

SEQ ID NO: 364320 - DNA, 12 bp, Artificial Sequence
  Oligonucleotide primer for the detection of SNP TSC0054398
aaaaactccaca

SEQ ID NO: 364321 - DNA, 12 bp, Artificial Sequence
  Oligonucleotide primer for the detection of SNP TSC0054398
aaaaactccacg

SEQ ID NO: 364322 - DNA, 12 bp, Artificial Sequence
  Oligonucleotide primer for the detection of SNP TSC0054398
gttagatgtaat

SEQ ID NO: 364323 - DNA, 12 bp, Artificial Sequence
  Oligonucleotide primer for the detection of SNP TSC0054398
gggaattttatg

SEQ ID NO: 364324 - DNA, 12 bp, Artificial Sequence
  Oligonucleotide primer for the detection of SNP TSC0054398
gggaattttacg

SEQ ID NO: 364325 - DNA, 12 bp, Artificial Sequence
  Oligonucleotide primer for the detection of SNP TSC0054399
aaacctatattc

SEQ ID NO: 364326 - DNA, 12 bp, Artificial Sequence
  Oligonucleotide primer for the detection of SNP TSC0054399
tcctccccatct

SEQ ID NO: 364327 - DNA, 12 bp, Artificial Sequence
  Oligonucleotide primer for the detection of SNP TSC0054399
gaatttgtgttt

SEQ ID NO: 364328 - DNA, 12 bp, Artificial Sequence
  Oligonucleotide primer for the detection of SNP TSC0054400
taactatacctc

SEQ ID NO: 364329 - DNA, 12 bp, Artificial Sequence
  Oligonucleotide primer for the detection of SNP TSC0054400
aagggagatata

SEQ ID NO: 364330 - DNA, 12 bp, Artificial Sequence
  Oligonucleotide primer for the detection of SNP TSC0054401
ctaaatctttat

SEQ ID NO: 364331 - DNA, 12 bp, Artificial Sequence
  Oligonucleotide primer for the detection of SNP TSC0054401
aaagtaaaatta

SEQ ID NO: 364332 - DNA, 12 bp, Artificial Sequence
  Oligonucleotide primer for the detection of SNP TSC0054402
acatcatcattt

SEQ ID NO: 364333 - DNA, 12 bp, Artificial Sequence
  Oligonucleotide primer for the detection of SNP TSC0054402
agtgtgtgtgaa

SEQ ID NO: 364334 - DNA, 12 bp, Artificial Sequence
  Oligonucleotide primer for the detection of SNP TSC0054402
agcgtgtgtgaa

SEQ ID NO: 364335 - DNA, 12 bp, Artificial Sequence
  Oligonucleotide primer for the detection of SNP TSC0054403
taaattacaatc

SEQ ID NO: 364336 - DNA, 12 bp, Artificial Sequence
  Oligonukleotid-Primer
aggagtaagtag

SEQ ID NO: 364337 - DNA, 12 bp, Artificial Sequence
  Oligonucleotide primer for the detection of SNP TSC0054404
ccataaaaattc

SEQ ID NO: 364338 - DNA, 12 bp, Artificial Sequence
  Oligonucleotide primer for the detection of SNP TSC0054404
attttaacctta

SEQ ID NO: 364339 - DNA, 12 bp, Artificial Sequence
  Oligonucleotide primer for the detection of SNP TSC0054404
ttataggagttt

SEQ ID NO: 364340 - DNA, 12 bp, Artificial Sequence
  Oligonucleotide primer for the detection of SNP TSC0054406
cctaacaaaaaa

SEQ ID NO: 364341 - DNA, 12 bp, Artificial Sequence
  Oligonucleotide primer for the detection of SNP TSC0054406
tttgttatatag

SEQ ID NO: 364342 - DNA, 12 bp, Artificial Sequence
  Oligonucleotide primer for the detection of SNP TSC0054406
cctaccacacaa

SEQ ID NO: 364343 - DNA, 12 bp, Artificial Sequence
  Oligonucleotide primer for the detection of SNP TSC0054406
ttttgataagaa

SEQ ID NO: 364344 - DNA, 12 bp, Artificial Sequence
  Oligonukleotid-Primer
acaaaactatac

SEQ ID NO: 364345 - DNA, 12 bp, Artificial Sequence
  Oligonucleotide primer for the detection of SNP TSC0054407
tagtttaagtag

SEQ ID NO: 364346 - DNA, 12 bp, Artificial Sequence
  Oligonucleotide primer for the detection of SNP TSC0006420
ctactaaaaacc

SEQ ID NO: 364347 - DNA, 12 bp, Artificial Sequence
  Oligonucleotide primer for the detection of SNP TSC0006420
atttttaatgta

SEQ ID NO: 364348 - DNA, 12 bp, Artificial Sequence
  Oligonucleotide primer for the detection of SNP TSC0006420
atttttaacgta

SEQ ID NO: 364349 - DNA, 12 bp, Artificial Sequence
  Oligonucleotide primer for the detection of SNP TSC0008323
gttgagataaaa

SEQ ID NO: 364350 - DNA, 12 bp, Artificial Sequence
  Oligonucleotide primer for the detection of SNP TSC0054410
gttataggttag

SEQ ID NO: 364351 - DNA, 12 bp, Artificial Sequence
  Oligonucleotide primer for the detection of SNP TSC0054411
attcctaaataa

SEQ ID NO: 364352 - DNA, 12 bp, Artificial Sequence
  Oligonukleotid-Primer
tttttggaattt

SEQ ID NO: 364353 - DNA, 12 bp, Artificial Sequence
  Oligonucleotide primer for the detection of SNP TSC0054411
ttcctaaaatct

SEQ ID NO: 364354 - DNA, 12 bp, Artificial Sequence
  Oligonucleotide primer for the detection of SNP TSC0054412
ccaaaccattaa

SEQ ID NO: 364355 - DNA, 12 bp, Artificial Sequence
  Oligonucleotide primer for the detection of SNP TSC0054412
gataaagtagtt

SEQ ID NO: 364356 - DNA, 12 bp, Artificial Sequence
  Oligonucleotide primer for the detection of SNP TSC0054412
aataaaacaacc

SEQ ID NO: 364357 - DNA, 12 bp, Artificial Sequence
  Oligonucleotide primer for the detection of SNP TSC0054412
ttagattattgg

SEQ ID NO: 364358 - DNA, 12 bp, Artificial Sequence
  Oligonucleotide primer for the detection of SNP TSC0010846
tataacacccat

SEQ ID NO: 364359 - DNA, 12 bp, Artificial Sequence
  Oligonucleotide primer for the detection of SNP TSC0010846
ttattttgagtt

SEQ ID NO: 364360 - DNA, 12 bp, Artificial Sequence
  Oligonucleotide primer for the detection of SNP TSC0054413
aaaaacttcttt

SEQ ID NO: 364361 - DNA, 12 bp, Artificial Sequence
  Oligonucleotide primer for the detection of SNP TSC0054413
aagttgaaaaag

SEQ ID NO: 364362 - DNA, 12 bp, Artificial Sequence
  Oligonucleotide primer for the detection of SNP TSC0054414
taattcaaatcc

SEQ ID NO: 364363 - DNA, 12 bp, Artificial Sequence
  Oligonucleotide primer for the detection of SNP TSC0054414
cacccaaatata

SEQ ID NO: 364364 - DNA, 12 bp, Artificial Sequence
  Oligonucleotide primer for the detection of SNP TSC0054416
cattttaatcat

SEQ ID NO: 364365 - DNA, 12 bp, Artificial Sequence
  Oligonucleotide primer for the detection of SNP TSC0054416
gatttgtggtta

SEQ ID NO: 364366 - DNA, 12 bp, Artificial Sequence
  Oligonucleotide primer for the detection of SNP TSC0054416
aatttataacca

SEQ ID NO: 364367 - DNA, 12 bp, Artificial Sequence
  Oligonucleotide primer for the detection of SNP TSC0054417
taacccaatatt

SEQ ID NO: 364368 - DNA, 12 bp, Artificial Sequence
  Oligonucleotide primer for the detection of SNP TSC0054417
atatttaaagta

SEQ ID NO: 364369 - DNA, 12 bp, Artificial Sequence
  Oligonucleotide primer for the detection of SNP TSC0054417
atatccaaaaca

SEQ ID NO: 364370 - DNA, 12 bp, Artificial Sequence
  Oligonucleotide primer for the detection of SNP TSC0054417
taatttaatatt

SEQ ID NO: 364371 - DNA, 12 bp, Artificial Sequence
  Oligonucleotide primer for the detection of SNP TSC0054418
aaccaatataaa

SEQ ID NO: 364372 - DNA, 12 bp, Artificial Sequence
  Oligonucleotide primer for the detection of SNP TSC0054418
aaataaaacccc

SEQ ID NO: 364373 - DNA, 12 bp, Artificial Sequence
  Oligonucleotide primer for the detection of SNP TSC0054418
agttaatgtggg

SEQ ID NO: 364374 - DNA, 12 bp, Artificial Sequence
  Oligonucleotide primer for the detection of SNP TSC0054423
tatatttactac

SEQ ID NO: 364375 - DNA, 12 bp, Artificial Sequence
  Oligonucleotide primer for the detection of SNP TSC0054423
tgaggaaataag

SEQ ID NO: 364376 - DNA, 12 bp, Artificial Sequence
  Oligonucleotide primer for the detection of SNP TSC0054423
tgtgtttgttat

SEQ ID NO: 364377 - DNA, 12 bp, Artificial Sequence
  Oligonucleotide primer for the detection of SNP TSC0054424
actaactacaac

SEQ ID NO: 364378 - DNA, 12 bp, Artificial Sequence
  Oligonucleotide primer for the detection of SNP TSC0054424
ttcgggaggtag

SEQ ID NO: 364379 - DNA, 12 bp, Artificial Sequence
  Oligonucleotide primer for the detection of SNP TSC0054424
gttaattgtaat

SEQ ID NO: 364380 - DNA, 12 bp, Artificial Sequence
  Oligonucleotide primer for the detection of SNP TSC0054425
atacccattccc

SEQ ID NO: 364381 - DNA, 12 bp, Artificial Sequence
  Oligonucleotide primer for the detection of SNP TSC0054425
taatataaacac

SEQ ID NO: 364382 - DNA, 12 bp, Artificial Sequence
  Oligonucleotide primer for the detection of SNP TSC0054426
aaatttacaaac

SEQ ID NO: 364383 - DNA, 12 bp, Artificial Sequence
  Oligonucleotide primer for the detection of SNP TSC0054426
atattaggatta

SEQ ID NO: 364384 - DNA, 12 bp, Artificial Sequence
  Oligonucleotide primer for the detection of SNP TSC0054427
tttggaggtagg

SEQ ID NO: 364385 - DNA, 12 bp, Artificial Sequence
  Oligonucleotide primer for the detection of SNP TSC0054431
caattattcaaa

SEQ ID NO: 364386 - DNA, 12 bp, Artificial Sequence
  Oligonucleotide primer for the detection of SNP TSC0054431
agatttttatat

SEQ ID NO: 364387 - DNA, 12 bp, Artificial Sequence
  Oligonucleotide primer for the detection of SNP TSC0054431
aaatttttatac

SEQ ID NO: 364388 - DNA, 12 bp, Artificial Sequence
  Oligonucleotide primer for the detection of SNP TSC0054431
aattaattattt

SEQ ID NO: 364389 - DNA, 12 bp, Artificial Sequence
  Oligonucleotide primer for the detection of SNP TSC0054432
atcataataaat

SEQ ID NO: 364390 - DNA, 12 bp, Artificial Sequence
  Oligonucleotide primer for the detection of SNP TSC0054432
attatgatggat

SEQ ID NO: 364391 - DNA, 12 bp, Artificial Sequence
  Oligonucleotide primer for the detection of SNP TSC0054433
aaaatattacaa

SEQ ID NO: 364392 - DNA, 12 bp, Artificial Sequence
  Oligonucleotide primer for the detection of SNP TSC0054433
taagagtttaaa

SEQ ID NO: 364393 - DNA, 12 bp, Artificial Sequence
  Oligonucleotide primer for the detection of SNP TSC0054433
taaaaatctaaa

SEQ ID NO: 364394 - DNA, 12 bp, Artificial Sequence
  Oligonucleotide primer for the detection of SNP TSC0054434
aatattttgttt

SEQ ID NO: 364395 - DNA, 12 bp, Artificial Sequence
  Oligonucleotide primer for the detection of SNP TSC0054434
taaaattaataa

SEQ ID NO: 364396 - DNA, 12 bp, Artificial Sequence
  Oligonucleotide primer for the detection of SNP TSC0054435
gttttatgatat

SEQ ID NO: 364397 - DNA, 12 bp, Artificial Sequence
  Oligonucleotide primer for the detection of SNP TSC0054435
tcccataacaca

SEQ ID NO: 364398 - DNA, 12 bp, Artificial Sequence
  Oligonucleotide primer for the detection of SNP TSC0054435
atatattaatag

SEQ ID NO: 364399 - DNA, 12 bp, Artificial Sequence
  Oligonucleotide primer for the detection of SNP TSC0054436
aataaataactc

SEQ ID NO: 364400 - DNA, 12 bp, Artificial Sequence
  Oligonucleotide primer for the detection of SNP TSC0054436
gatatgtggtaa

SEQ ID NO: 364401 - DNA, 12 bp, Artificial Sequence
  Oligonucleotide primer for the detection of SNP TSC0054443
taccaattcttc

SEQ ID NO: 364402 - DNA, 12 bp, Artificial Sequence
  Oligonucleotide primer for the detection of SNP TSC0054443
gtatattggaag

SEQ ID NO: 364403 - DNA, 12 bp, Artificial Sequence
  Oligonucleotide primer for the detection of SNP TSC0054443
gtatatcggaag

SEQ ID NO: 364404 - DNA, 12 bp, Artificial Sequence
  Oligonucleotide primer for the detection of SNP TSC0054444
acaccttaaaac

SEQ ID NO: 364405 - DNA, 12 bp, Artificial Sequence
  Oligonucleotide primer for the detection of SNP TSC0054444
aactaatttcta

SEQ ID NO: 364406 - DNA, 12 bp, Artificial Sequence
  Oligonucleotide primer for the detection of SNP TSC0054444
atattttgaagt

SEQ ID NO: 364407 - DNA, 12 bp, Artificial Sequence
  Oligonucleotide primer for the detection of SNP TSC0054445
aaccctaaacat

SEQ ID NO: 364408 - DNA, 12 bp, Artificial Sequence
  Oligonucleotide primer for the detection of SNP TSC0054445
aaggattttttg

SEQ ID NO: 364409 - DNA, 12 bp, Artificial Sequence
  Oligonucleotide primer for the detection of SNP TSC0054446
taaacataaatc

SEQ ID NO: 364410 - DNA, 12 bp, Artificial Sequence
  Oligonucleotide primer for the detection of SNP TSC0054446
gagaaaaatttt

SEQ ID NO: 364411 - DNA, 12 bp, Artificial Sequence
  Oligonucleotide primer for the detection of SNP TSC0054446
tggatataaatt

SEQ ID NO: 364412 - DNA, 12 bp, Artificial Sequence
  Oligonucleotide primer for the detection of SNP TSC0054446
tggatataaatc

SEQ ID NO: 364413 - DNA, 12 bp, Artificial Sequence
  Oligonucleotide primer for the detection of SNP TSC0054447
atatttaaggga

SEQ ID NO: 364414 - DNA, 12 bp, Artificial Sequence
  Oligonucleotide primer for the detection of SNP TSC0054449
aataatctataa

SEQ ID NO: 364415 - DNA, 12 bp, Artificial Sequence
  Oligonucleotide primer for the detection of SNP TSC0054449
tttaaaaattat

SEQ ID NO: 364416 - DNA, 12 bp, Artificial Sequence
  Oligonucleotide primer for the detection of SNP TSC0054449
tttaaaaactat

SEQ ID NO: 364417 - DNA, 12 bp, Artificial Sequence
  Oligonucleotide primer for the detection of SNP TSC0054449
aatagtttgtga

SEQ ID NO: 364418 - DNA, 12 bp, Artificial Sequence
  Oligonucleotide primer for the detection of SNP TSC0054451
atatttactttt

SEQ ID NO: 364419 - DNA, 12 bp, Artificial Sequence
  Oligonucleotide primer for the detection of SNP TSC0054452
tctcctataaat

SEQ ID NO: 364420 - DNA, 12 bp, Artificial Sequence
  Oligonucleotide primer for the detection of SNP TSC0054452
tgttaatagaag

SEQ ID NO: 364421 - DNA, 12 bp, Artificial Sequence
  Oligonucleotide primer for the detection of SNP TSC0054452
cgttaatagaag

SEQ ID NO: 364422 - DNA, 12 bp, Artificial Sequence
  Oligonucleotide primer for the detection of SNP TSC0054453
acgtatatatat

SEQ ID NO: 364423 - DNA, 12 bp, Artificial Sequence
  Oligonucleotide primer for the detection of SNP TSC0054453
atattgaatata

SEQ ID NO: 364424 - DNA, 12 bp, Artificial Sequence
  Oligonucleotide primer for the detection of SNP TSC0054454
acacaaaacttc

SEQ ID NO: 364425 - DNA, 12 bp, Artificial Sequence
  Oligonucleotide primer for the detection of SNP TSC0054455
taatctcatatt

SEQ ID NO: 364426 - DNA, 12 bp, Artificial Sequence
  Oligonucleotide primer for the detection of SNP TSC0054455
gataaattatga

SEQ ID NO: 364427 - DNA, 12 bp, Artificial Sequence
  Oligonucleotide primer for the detection of SNP TSC0054458
aaaacaaaacct

SEQ ID NO: 364428 - DNA, 12 bp, Artificial Sequence
  Oligonucleotide primer for the detection of SNP TSC0054458
tgaatgaagtag

SEQ ID NO: 364429 - DNA, 12 bp, Artificial Sequence
  Oligonucleotide primer for the detection of SNP TSC0054459
cacctaatctaa

SEQ ID NO: 364430 - DNA, 12 bp, Artificial Sequence
  Oligonucleotide primer for the detection of SNP TSC0054459
ttaggatattag

SEQ ID NO: 364431 - DNA, 12 bp, Artificial Sequence
  Oligonucleotide primer for the detection of SNP TSC0054459
atttggtttagt

SEQ ID NO: 364432 - DNA, 12 bp, Artificial Sequence
  Oligonucleotide primer for the detection of SNP TSC0054461
ttaactcaactc

SEQ ID NO: 364433 - DNA, 12 bp, Artificial Sequence
  Oligonucleotide primer for the detection of SNP TSC0054461
ttgtggtttgaa

SEQ ID NO: 364434 - DNA, 12 bp, Artificial Sequence
  Oligonucleotide primer for the detection of SNP TSC0054464
tacatataattc

SEQ ID NO: 364435 - DNA, 12 bp, Artificial Sequence
  Oligonucleotide primer for the detection of SNP TSC0054464
aaaaccctacct

SEQ ID NO: 364436 - DNA, 12 bp, Artificial Sequence
  Oligonucleotide primer for the detection of SNP TSC0054464
tatatgtaattt

SEQ ID NO: 364437 - DNA, 12 bp, Artificial Sequence
  Oligonucleotide primer for the detection of SNP TSC0054465
ttaacataacat

SEQ ID NO: 364438 - DNA, 12 bp, Artificial Sequence
  Oligonucleotide primer for the detection of SNP TSC0054465
ttaacgtaacat

SEQ ID NO: 364439 - DNA, 12 bp, Artificial Sequence
  Oligonucleotide primer for the detection of SNP TSC0054469
gggattttaatt

SEQ ID NO: 364440 - DNA, 12 bp, Artificial Sequence
  Oligonucleotide primer for the detection of SNP TSC0054469
aattccaactaa

SEQ ID NO: 364441 - DNA, 12 bp, Artificial Sequence
  Oligonucleotide primer for the detection of SNP TSC0054469
gggaaaattagt

SEQ ID NO: 364442 - DNA, 12 bp, Artificial Sequence
  Oligonucleotide primer for the detection of SNP TSC0054470
acattaaataaa

SEQ ID NO: 364443 - DNA, 12 bp, Artificial Sequence
  Oligonucleotide primer for the detection of SNP TSC0054470
atcttctaaata

SEQ ID NO: 364444 - DNA, 12 bp, Artificial Sequence
  Oligonucleotide primer for the detection of SNP TSC0054470
ggtattgggtgg

SEQ ID NO: 364445 - DNA, 12 bp, Artificial Sequence
  Oligonucleotide primer for the detection of SNP TSC0054472
ttcaactcttcc

SEQ ID NO: 364446 - DNA, 12 bp, Artificial Sequence
  Oligonucleotide primer for the detection of SNP TSC0054473
ttcatttcaaca

SEQ ID NO: 364447 - DNA, 12 bp, Artificial Sequence
  Oligonucleotide primer for the detection of SNP TSC0054473
ttaaatatatat

SEQ ID NO: 364448 - DNA, 12 bp, Artificial Sequence
  Oligonucleotide primer for the detection of SNP TSC0054473
ttaaacacatat

SEQ ID NO: 364449 - DNA, 12 bp, Artificial Sequence
  Oligonucleotide primer for the detection of SNP TSC0054475
ctcattacaaaa

SEQ ID NO: 364450 - DNA, 12 bp, Artificial Sequence
  Oligonucleotide primer for the detection of SNP TSC0054475
ctcattacgaaa

SEQ ID NO: 364451 - DNA, 12 bp, Artificial Sequence
  Oligonucleotide primer for the detection of SNP TSC0054475
gtttaaataaat

SEQ ID NO: 364452 - DNA, 12 bp, Artificial Sequence
  Oligonucleotide primer for the detection of SNP TSC0054475
attcaaacaaat

SEQ ID NO: 364453 - DNA, 12 bp, Artificial Sequence
  Oligonucleotide primer for the detection of SNP TSC0054475
gtgatttattat

SEQ ID NO: 364454 - DNA, 12 bp, Artificial Sequence
  Oligonucleotide primer for the detection of SNP TSC0054475
gtgatttattac

SEQ ID NO: 364455 - DNA, 12 bp, Artificial Sequence
  Oligonucleotide primer for the detection of SNP TSC0054477
caacaaatctac

SEQ ID NO: 364456 - DNA, 12 bp, Artificial Sequence
  Oligonucleotide primer for the detection of SNP TSC0054477
gtttttgttaga

SEQ ID NO: 364457 - DNA, 12 bp, Artificial Sequence
  Oligonucleotide primer for the detection of SNP TSC0054477
gttttcgttaga

SEQ ID NO: 364458 - DNA, 12 bp, Artificial Sequence
  Oligonucleotide primer for the detection of SNP TSC0054478
aaatccattaat

SEQ ID NO: 364459 - DNA, 12 bp, Artificial Sequence
  Oligonucleotide primer for the detection of SNP TSC0054478
aaatccgttaat

SEQ ID NO: 364460 - DNA, 12 bp, Artificial Sequence
  Oligonucleotide primer for the detection of SNP TSC0054478
aaatttgttagt

SEQ ID NO: 364461 - DNA, 12 bp, Artificial Sequence
  Oligonucleotide primer for the detection of SNP TSC0054478
aaattcgttagt

SEQ ID NO: 364462 - DNA, 12 bp, Artificial Sequence
  Oligonucleotide primer for the detection of SNP TSC0054479
ctttttaaaact

SEQ ID NO: 364463 - DNA, 12 bp, Artificial Sequence
  Oligonucleotide primer for the detection of SNP TSC0054479
tgttggtttaaa

SEQ ID NO: 364464 - DNA, 12 bp, Artificial Sequence
  Oligonucleotide primer for the detection of SNP TSC0054480
ttctttattatt

SEQ ID NO: 364465 - DNA, 12 bp, Artificial Sequence
  Oligonucleotide primer for the detection of SNP TSC0054480
gtatagttatta

SEQ ID NO: 364466 - DNA, 12 bp, Artificial Sequence
  Oligonucleotide primer for the detection of SNP TSC0054486
ataaactcataa

SEQ ID NO: 364467 - DNA, 12 bp, Artificial Sequence
  Oligonucleotide primer for the detection of SNP TSC0054486
ttatcgagtttt

SEQ ID NO: 364468 - DNA, 12 bp, Artificial Sequence
  Oligonucleotide primer for the detection of SNP TSC0054486
tcatcaaattct

SEQ ID NO: 364469 - DNA, 12 bp, Artificial Sequence
  Oligonucleotide primer for the detection of SNP TSC0054486
tcatcgaattct

SEQ ID NO: 364470 - DNA, 12 bp, Artificial Sequence
  Oligonucleotide primer for the detection of SNP TSC0054486
atgggtttatga

SEQ ID NO: 364471 - DNA, 12 bp, Artificial Sequence
  Oligonucleotide primer for the detection of SNP TSC0054488
ttacaacaaaaa

SEQ ID NO: 364472 - DNA, 12 bp, Artificial Sequence
  Oligonucleotide primer for the detection of SNP TSC0054488
ttacaacgaaaa

SEQ ID NO: 364473 - DNA, 12 bp, Artificial Sequence
  Oligonucleotide primer for the detection of SNP TSC0054488
ttacgacaaaaa

SEQ ID NO: 364474 - DNA, 12 bp, Artificial Sequence
  Oligonucleotide primer for the detection of SNP TSC0054488
ttacgacgaaaa

SEQ ID NO: 364475 - DNA, 12 bp, Artificial Sequence
  Oligonucleotide primer for the detection of SNP TSC0054488
ctactccctatt

SEQ ID NO: 364476 - DNA, 12 bp, Artificial Sequence
  Oligonucleotide primer for the detection of SNP TSC0054488
ttacgatgaagg

SEQ ID NO: 364477 - DNA, 12 bp, Artificial Sequence
  Oligonucleotide primer for the detection of SNP TSC0054488
ttatgacgaagg

SEQ ID NO: 364478 - DNA, 12 bp, Artificial Sequence
  Oligonucleotide primer for the detection of SNP TSC0054488
ttacgacgaagg

SEQ ID NO: 364479 - DNA, 12 bp, Artificial Sequence
  Oligonucleotide primer for the detection of SNP TSC0054489
aacccaaatttt

SEQ ID NO: 364480 - DNA, 12 bp, Artificial Sequence
  Oligonucleotide primer for the detection of SNP TSC0054489
aaataatgaaat

SEQ ID NO: 364481 - DNA, 12 bp, Artificial Sequence
  Oligonucleotide primer for the detection of SNP TSC0054492
atataacaacat

SEQ ID NO: 364482 - DNA, 12 bp, Artificial Sequence
  Oligonucleotide primer for the detection of SNP TSC0054492
gtagaagatagg

SEQ ID NO: 364483 - DNA, 12 bp, Artificial Sequence
  Oligonucleotide primer for the detection of SNP TSC0054493
acaattttaccc

SEQ ID NO: 364484 - DNA, 12 bp, Artificial Sequence
  Oligonucleotide primer for the detection of SNP TSC0054494
ggtgtttatttg

SEQ ID NO: 364485 - DNA, 12 bp, Artificial Sequence
  Oligonucleotide primer for the detection of SNP TSC0054498
ataacacacaac

SEQ ID NO: 364486 - DNA, 12 bp, Artificial Sequence
  Oligonucleotide primer for the detection of SNP TSC0054498
aactacctctca

SEQ ID NO: 364487 - DNA, 12 bp, Artificial Sequence
  Oligonucleotide primer for the detection of SNP TSC0054498
gtggtatataat

SEQ ID NO: 364488 - DNA, 12 bp, Artificial Sequence
  Oligonucleotide primer for the detection of SNP TSC0054498
gtggtatataac

SEQ ID NO: 364489 - DNA, 12 bp, Artificial Sequence
  Oligonucleotide primer for the detection of SNP TSC0054500
acaataacaatc

SEQ ID NO: 364490 - DNA, 12 bp, Artificial Sequence
  Oligonucleotide primer for the detection of SNP TSC0054500
tatgtaaaatta

SEQ ID NO: 364491 - DNA, 12 bp, Artificial Sequence
  Oligonucleotide primer for the detection of SNP TSC0054504
gaagaatgaaaa

SEQ ID NO: 364492 - DNA, 12 bp, Artificial Sequence
  Oligonucleotide primer for the detection of SNP TSC0054504
agagagaataat

SEQ ID NO: 364493 - DNA, 12 bp, Artificial Sequence
  Oligonucleotide primer for the detection of SNP TSC0054505
atttatatgtat

SEQ ID NO: 364494 - DNA, 12 bp, Artificial Sequence
  Oligonucleotide primer for the detection of SNP TSC0054505
atctatatacat

SEQ ID NO: 364495 - DNA, 12 bp, Artificial Sequence
  Oligonucleotide primer for the detection of SNP TSC0054505
agaagaaagtga

SEQ ID NO: 364496 - DNA, 12 bp, Artificial Sequence
  Oligonucleotide primer for the detection of SNP TSC0054506
atacaaaataat

SEQ ID NO: 364497 - DNA, 12 bp, Artificial Sequence
  Oligonukleotid-Primer
tgggggtagtaa

SEQ ID NO: 364498 - DNA, 12 bp, Artificial Sequence
  Oligonucleotide primer for the detection of SNP TSC0054514
atactataaaca

SEQ ID NO: 364499 - DNA, 12 bp, Artificial Sequence
  Oligonucleotide primer for the detection of SNP TSC0054514
agaatttaattt

SEQ ID NO: 364500 - DNA, 12 bp, Artificial Sequence
  Oligonucleotide primer for the detection of SNP TSC0054514
atattgtaggta

SEQ ID NO: 364501 - DNA, 12 bp, Artificial Sequence
  Oligonukleotid-Primer
taacattttttc

SEQ ID NO: 364502 - DNA, 12 bp, Artificial Sequence
  Oligonucleotide primer for the detection of SNP TSC0054517
tgagtagttaag

SEQ ID NO: 364503 - DNA, 12 bp, Artificial Sequence
  Oligonucleotide primer for the detection of SNP TSC0054520
actactattatt

SEQ ID NO: 364504 - DNA, 12 bp, Artificial Sequence
  Oligonucleotide primer for the detection of SNP TSC0054520
ttagtaatagta

SEQ ID NO: 364505 - DNA, 12 bp, Artificial Sequence
  Oligonukleotid-Primer
ataaatacttta

SEQ ID NO: 364506 - DNA, 12 bp, Artificial Sequence
  Oligonucleotide primer for the detection of SNP TSC0054524
agtttaaatgtg

SEQ ID NO: 364507 - DNA, 12 bp, Artificial Sequence
  Oligonucleotide primer for the detection of SNP TSC0054524
aattcaaatata

SEQ ID NO: 364508 - DNA, 12 bp, Artificial Sequence
  Oligonucleotide primer for the detection of SNP TSC0054524
tggatattttat

SEQ ID NO: 364509 - DNA, 12 bp, Artificial Sequence
  Oligonucleotide primer for the detection of SNP TSC0054525
aaatatcttttt

SEQ ID NO: 364510 - DNA, 12 bp, Artificial Sequence
  Oligonucleotide primer for the detection of SNP TSC0054525
gtaagtttagag

SEQ ID NO: 364511 - DNA, 12 bp, Artificial Sequence
  Oligonucleotide primer for the detection of SNP TSC0054527
ataaaacttcaa

SEQ ID NO: 364512 - DNA, 12 bp, Artificial Sequence
  Oligonucleotide primer for the detection of SNP TSC0054529
gtaaaaaatatt

SEQ ID NO: 364513 - DNA, 12 bp, Artificial Sequence
  Oligonukleotid-Primer
attgtagtttag

SEQ ID NO: 364514 - DNA, 12 bp, Artificial Sequence
  Oligonucleotide primer for the detection of SNP TSC0054531
atttttgtgttt

SEQ ID NO: 364515 - DNA, 12 bp, Artificial Sequence
  Oligonucleotide primer for the detection of SNP TSC0054532
caatataaaaat

SEQ ID NO: 364516 - DNA, 12 bp, Artificial Sequence
  Oligonucleotide primer for the detection of SNP TSC0054532
tgtgattggatg

SEQ ID NO: 364517 - DNA, 12 bp, Artificial Sequence
  Oligonucleotide primer for the detection of SNP TSC0054533
gaggaaaatggt

SEQ ID NO: 364518 - DNA, 12 bp, Artificial Sequence
  Oligonucleotide primer for the detection of SNP TSC0054533
tttaaaaatagg

SEQ ID NO: 364519 - DNA, 12 bp, Artificial Sequence
  Oligonucleotide primer for the detection of SNP TSC0054538
ttacaccaacaa

SEQ ID NO: 364520 - DNA, 12 bp, Artificial Sequence
  Oligonucleotide primer for the detection of SNP TSC0054538
taaacctctcac

SEQ ID NO: 364521 - DNA, 12 bp, Artificial Sequence
  Oligonukleotid-Primer
ttgtattagtaa

SEQ ID NO: 364522 - DNA, 12 bp, Artificial Sequence
  Oligonucleotide primer for the detection of SNP TSC0054543
caccccaaatat

SEQ ID NO: 364523 - DNA, 12 bp, Artificial Sequence
  Oligonucleotide primer for the detection of SNP TSC0054543
aataacccctaa

SEQ ID NO: 364524 - DNA, 12 bp, Artificial Sequence
  Oligonucleotide primer for the detection of SNP TSC0054545
atatccacactt

SEQ ID NO: 364525 - DNA, 12 bp, Artificial Sequence
  Oligonucleotide primer for the detection of SNP TSC0054545
ggaatttagtta

SEQ ID NO: 364526 - DNA, 12 bp, Artificial Sequence
  Oligonucleotide primer for the detection of SNP TSC0054546
tgtagagtataa

SEQ ID NO: 364527 - DNA, 12 bp, Artificial Sequence
  Oligonucleotide primer for the detection of SNP TSC0054547
taaccaattata

SEQ ID NO: 364528 - DNA, 12 bp, Artificial Sequence
  Oligonucleotide primer for the detection of SNP TSC0054547
tggttaattgtg

SEQ ID NO: 364529 - DNA, 12 bp, Artificial Sequence
  Oligonucleotide primer for the detection of SNP TSC0054548
tcacataaataa

SEQ ID NO: 364530 - DNA, 12 bp, Artificial Sequence
  Oligonucleotide primer for the detection of SNP TSC0054549
atttcccaaatt

SEQ ID NO: 364531 - DNA, 12 bp, Artificial Sequence
  Oligonucleotide primer for the detection of SNP TSC0054549
ttttttagattc

SEQ ID NO: 364532 - DNA, 12 bp, Artificial Sequence
  Oligonucleotide primer for the detection of SNP TSC0054553
acaaaattcctt

SEQ ID NO: 364533 - DNA, 12 bp, Artificial Sequence
  Oligonucleotide primer for the detection of SNP TSC0054553
aatttttgtaaa

SEQ ID NO: 364534 - DNA, 12 bp, Artificial Sequence
  Oligonucleotide primer for the detection of SNP TSC0054554
aatcaaacactt

SEQ ID NO: 364535 - DNA, 12 bp, Artificial Sequence
  Oligonucleotide primer for the detection of SNP TSC0054554
tgatattaaggg

SEQ ID NO: 364536 - DNA, 12 bp, Artificial Sequence
  Oligonucleotide primer for the detection of SNP TSC0054555
ttaattaatgtg

SEQ ID NO: 364537 - DNA, 12 bp, Artificial Sequence
  Oligonucleotide primer for the detection of SNP TSC0054557
ttccaatttatt

SEQ ID NO: 364538 - DNA, 12 bp, Artificial Sequence
  Oligonucleotide primer for the detection of SNP TSC0054557
acacaaaatata

SEQ ID NO: 364539 - DNA, 12 bp, Artificial Sequence
  Oligonucleotide primer for the detection of SNP TSC0054558
agagattttttt

SEQ ID NO: 364540 - DNA, 12 bp, Artificial Sequence
  Oligonucleotide primer for the detection of SNP TSC0054558
aaatagttaaaa

SEQ ID NO: 364541 - DNA, 12 bp, Artificial Sequence
  Oligonucleotide primer for the detection of SNP TSC0054559
ttgatggtagaa

SEQ ID NO: 364542 - DNA, 12 bp, Artificial Sequence
  Oligonucleotide primer for the detection of SNP TSC0054559
ctaataacaaaa

SEQ ID NO: 364543 - DNA, 12 bp, Artificial Sequence
  Oligonucleotide primer for the detection of SNP TSC0054559
ggtgaaaaaaat

SEQ ID NO: 364544 - DNA, 12 bp, Artificial Sequence
  Oligonucleotide primer for the detection of SNP TSC0054560
tcttaatctaaa

SEQ ID NO: 364545 - DNA, 12 bp, Artificial Sequence
  Oligonucleotide primer for the detection of SNP TSC0054560
tatttgattagt

SEQ ID NO: 364546 - DNA, 12 bp, Artificial Sequence
  Oligonucleotide primer for the detection of SNP TSC0054560
acatttaaccaa

SEQ ID NO: 364547 - DNA, 12 bp, Artificial Sequence
  Oligonucleotide primer for the detection of SNP TSC0054560
gcatttaaccaa

SEQ ID NO: 364548 - DNA, 12 bp, Artificial Sequence
  Oligonucleotide primer for the detection of SNP TSC0054560
ttttgatttgga

SEQ ID NO: 364549 - DNA, 12 bp, Artificial Sequence
  Oligonucleotide primer for the detection of SNP TSC0054561
attagttggggt

SEQ ID NO: 364550 - DNA, 12 bp, Artificial Sequence
  Oligonucleotide primer for the detection of SNP TSC0054561
attagttggggc

SEQ ID NO: 364551 - DNA, 12 bp, Artificial Sequence
  Oligonucleotide primer for the detection of SNP TSC0054561
atcaactaaaac

SEQ ID NO: 364552 - DNA, 12 bp, Artificial Sequence
  Oligonucleotide primer for the detection of SNP TSC0054561
tatgagaaattt

SEQ ID NO: 364553 - DNA, 12 bp, Artificial Sequence
  Oligonukleotid-Primer
ataatctctcta

SEQ ID NO: 364554 - DNA, 12 bp, Artificial Sequence
  Oligonucleotide primer for the detection of SNP TSC0005504
ttagtgagttat

SEQ ID NO: 364555 - DNA, 12 bp, Artificial Sequence
  Oligonucleotide primer for the detection of SNP TSC0005504
ttaataaattat

SEQ ID NO: 364556 - DNA, 12 bp, Artificial Sequence
  Oligonucleotide primer for the detection of SNP TSC0054563
agatgagatttg

SEQ ID NO: 364557 - DNA, 12 bp, Artificial Sequence
  Oligonukleotid-Primer
aaagttaaggta

SEQ ID NO: 364558 - DNA, 12 bp, Artificial Sequence
  Oligonucleotide primer for the detection of SNP TSC0054569
attagggtaatt

SEQ ID NO: 364559 - DNA, 12 bp, Artificial Sequence
  Oligonucleotide primer for the detection of SNP TSC0054569
ttgaggtgataa

SEQ ID NO: 364560 - DNA, 12 bp, Artificial Sequence
  Oligonucleotide primer for the detection of SNP TSC0054570
ataattccattc

SEQ ID NO: 364561 - DNA, 12 bp, Artificial Sequence
  Oligonucleotide primer for the detection of SNP TSC0054572
aatactctaaaa

SEQ ID NO: 364562 - DNA, 12 bp, Artificial Sequence
  Oligonucleotide primer for the detection of SNP TSC0054577
agaaatgattag

SEQ ID NO: 364563 - DNA, 12 bp, Artificial Sequence
  Oligonucleotide primer for the detection of SNP TSC0054578
atactacaattt

SEQ ID NO: 364564 - DNA, 12 bp, Artificial Sequence
  Oligonucleotide primer for the detection of SNP TSC0054578
aagtaatattga

SEQ ID NO: 364565 - DNA, 12 bp, Artificial Sequence
  Oligonucleotide primer for the detection of SNP TSC0054578
aagtaatatcga

SEQ ID NO: 364566 - DNA, 12 bp, Artificial Sequence
  Oligonucleotide primer for the detection of SNP TSC0054579
actacaattcaa

SEQ ID NO: 364567 - DNA, 12 bp, Artificial Sequence
  Oligonucleotide primer for the detection of SNP TSC0054579
cccaaatctcat

SEQ ID NO: 364568 - DNA, 12 bp, Artificial Sequence
  Oligonucleotide primer for the detection of SNP TSC0054579
attataatttaa

SEQ ID NO: 364569 - DNA, 12 bp, Artificial Sequence
  Oligonucleotide primer for the detection of SNP TSC0054581
aatccttctata

SEQ ID NO: 364570 - DNA, 12 bp, Artificial Sequence
  Oligonucleotide primer for the detection of SNP TSC0054581
gaagggggaatt

SEQ ID NO: 364571 - DNA, 12 bp, Artificial Sequence
  Oligonucleotide primer for the detection of SNP TSC0054585
acacgtaccacc

SEQ ID NO: 364572 - DNA, 12 bp, Artificial Sequence
  Oligonucleotide primer for the detection of SNP TSC0054585
attagttgagtg

SEQ ID NO: 364573 - DNA, 12 bp, Artificial Sequence
  Oligonukleotid-Primer
attaactaaata

SEQ ID NO: 364574 - DNA, 12 bp, Artificial Sequence
  Oligonucleotide primer for the detection of SNP TSC0054585
gtatgtgttatc

SEQ ID NO: 364575 - DNA, 12 bp, Artificial Sequence
  Oligonucleotide primer for the detection of SNP TSC0054585
gtacgtgttatc

SEQ ID NO: 364576 - DNA, 12 bp, Artificial Sequence
  Oligonucleotide primer for the detection of SNP TSC0054586
atttatttaata

SEQ ID NO: 364577 - DNA, 12 bp, Artificial Sequence
  Oligonukleotid-Primer
actacaatattc

SEQ ID NO: 364578 - DNA, 12 bp, Artificial Sequence
  Oligonucleotide primer for the detection of SNP TSC0054587
attctaccttaa

SEQ ID NO: 364579 - DNA, 12 bp, Artificial Sequence
  Oligonucleotide primer for the detection of SNP TSC0054587
ttataatgtttt

SEQ ID NO: 364580 - DNA, 12 bp, Artificial Sequence
  Oligonucleotide primer for the detection of SNP TSC0054588
atataatgatta

SEQ ID NO: 364581 - DNA, 12 bp, Artificial Sequence
  Oligonukleotid-Primer
aaaatttaatat

SEQ ID NO: 364582 - DNA, 12 bp, Artificial Sequence
  Oligonucleotide primer for the detection of SNP TSC0054589
cataataattaa

SEQ ID NO: 364583 - DNA, 12 bp, Artificial Sequence
  Oligonucleotide primer for the detection of SNP TSC0054589
aaaatttaatgt

SEQ ID NO: 364584 - DNA, 12 bp, Artificial Sequence
  Oligonucleotide primer for the detection of SNP TSC0054590
taaatttttaat

SEQ ID NO: 364585 - DNA, 12 bp, Artificial Sequence
  Oligonukleotid-Primer
acctactccacc

SEQ ID NO: 364586 - DNA, 12 bp, Artificial Sequence
  Oligonucleotide primer for the detection of SNP TSC0054591
ggggtaatatga

SEQ ID NO: 364587 - DNA, 12 bp, Artificial Sequence
  Oligonucleotide primer for the detection of SNP TSC0054592
attcatattacc

SEQ ID NO: 364588 - DNA, 12 bp, Artificial Sequence
  Oligonucleotide primer for the detection of SNP TSC0054592
aataatgttgag

SEQ ID NO: 364589 - DNA, 12 bp, Artificial Sequence
  Oligonucleotide primer for the detection of SNP TSC0054596
caaaaatcaaac

SEQ ID NO: 364590 - DNA, 12 bp, Artificial Sequence
  Oligonucleotide primer for the detection of SNP TSC0054596
ttggattgggag

SEQ ID NO: 364591 - DNA, 12 bp, Artificial Sequence
  Oligonucleotide primer for the detection of SNP TSC0054596
taggaattagat

SEQ ID NO: 364592 - DNA, 12 bp, Artificial Sequence
  Oligonucleotide primer for the detection of SNP TSC0054600
gggagttttaga

SEQ ID NO: 364593 - DNA, 12 bp, Artificial Sequence
  Oligonukleotid-Primer
gaattttttaag

SEQ ID NO: 364594 - DNA, 12 bp, Artificial Sequence
  Oligonucleotide primer for the detection of SNP TSC0054601
acatcttttatt

SEQ ID NO: 364595 - DNA, 12 bp, Artificial Sequence
  Oligonucleotide primer for the detection of SNP TSC0054602
catcatattttc

SEQ ID NO: 364596 - DNA, 12 bp, Artificial Sequence
  Oligonucleotide primer for the detection of SNP TSC0054602
atataattatag

SEQ ID NO: 364597 - DNA, 12 bp, Artificial Sequence
  Oligonucleotide primer for the detection of SNP TSC0054603
cccaacttcatc

SEQ ID NO: 364598 - DNA, 12 bp, Artificial Sequence
  Oligonucleotide primer for the detection of SNP TSC0054603
cccaacttcgtc

SEQ ID NO: 364599 - DNA, 12 bp, Artificial Sequence
  Oligonucleotide primer for the detection of SNP TSC0054603
tttattaaagtt

SEQ ID NO: 364600 - DNA, 12 bp, Artificial Sequence
  Oligonucleotide primer for the detection of SNP TSC0054603
tttattaaagtc

SEQ ID NO: 364601 - DNA, 12 bp, Artificial Sequence
  Oligonucleotide primer for the detection of SNP TSC0054603
ttagtttcgttt

SEQ ID NO: 364602 - DNA, 12 bp, Artificial Sequence
  Oligonucleotide primer for the detection of SNP TSC0007151
atattttatatt

SEQ ID NO: 364603 - DNA, 12 bp, Artificial Sequence
  Oligonucleotide primer for the detection of SNP TSC0007151
acatcttacacc

SEQ ID NO: 364604 - DNA, 12 bp, Artificial Sequence
  Oligonucleotide primer for the detection of SNP TSC0007151
tgagagtaattg

SEQ ID NO: 364605 - DNA, 12 bp, Artificial Sequence
  Oligonucleotide primer for the detection of SNP TSC0007154
ctcttccttact

SEQ ID NO: 364606 - DNA, 12 bp, Artificial Sequence
  Oligonucleotide primer for the detection of SNP TSC0007154
tgtattgttgag

SEQ ID NO: 364607 - DNA, 12 bp, Artificial Sequence
  Oligonucleotide primer for the detection of SNP TSC0054610
tactccaaaaaa

SEQ ID NO: 364608 - DNA, 12 bp, Artificial Sequence
  Oligonucleotide primer for the detection of SNP TSC0054610
cctcctacttta

SEQ ID NO: 364609 - DNA, 12 bp, Artificial Sequence
  Oligonucleotide primer for the detection of SNP TSC0054610
gtgttttaagaa

SEQ ID NO: 364610 - DNA, 12 bp, Artificial Sequence
  Oligonucleotide primer for the detection of SNP TSC0054612
taaatctctatc

SEQ ID NO: 364611 - DNA, 12 bp, Artificial Sequence
  Oligonucleotide primer for the detection of SNP TSC0054613
aaactctttatc

SEQ ID NO: 364612 - DNA, 12 bp, Artificial Sequence
  Oligonucleotide primer for the detection of SNP TSC0054613
aaattccattta

SEQ ID NO: 364613 - DNA, 12 bp, Artificial Sequence
  Oligonukleotid-Primer
ttctttatctct

SEQ ID NO: 364614 - DNA, 12 bp, Artificial Sequence
  Oligonucleotide primer for the detection of SNP TSC0004811
attccatattaa

SEQ ID NO: 364615 - DNA, 12 bp, Artificial Sequence
  Oligonucleotide primer for the detection of SNP TSC0004811
ggtgatattttt

SEQ ID NO: 364616 - DNA, 12 bp, Artificial Sequence
  Oligonucleotide primer for the detection of SNP TSC0004811
aaataatactcc

SEQ ID NO: 364617 - DNA, 12 bp, Artificial Sequence
  Oligonucleotide primer for the detection of SNP TSC0004811
attttatgttag

SEQ ID NO: 364618 - DNA, 12 bp, Artificial Sequence
  Oligonucleotide primer for the detection of SNP TSC0006470
aaattaactacc

SEQ ID NO: 364619 - DNA, 12 bp, Artificial Sequence
  Oligonucleotide primer for the detection of SNP TSC0054616
ccaaaactaaaa

SEQ ID NO: 364620 - DNA, 12 bp, Artificial Sequence
  Oligonucleotide primer for the detection of SNP TSC0054616
tttatttctaat

SEQ ID NO: 364621 - DNA, 12 bp, Artificial Sequence
  Oligonucleotide primer for the detection of SNP TSC0054616
ttaggattagaa

SEQ ID NO: 364622 - DNA, 12 bp, Artificial Sequence
  Oligonucleotide primer for the detection of SNP TSC0054619
aatcccaaaact

SEQ ID NO: 364623 - DNA, 12 bp, Artificial Sequence
  Oligonucleotide primer for the detection of SNP TSC0054619
aatcccgaaact

SEQ ID NO: 364624 - DNA, 12 bp, Artificial Sequence
  Oligonucleotide primer for the detection of SNP TSC0054619
ttgttgttttgt

SEQ ID NO: 364625 - DNA, 12 bp, Artificial Sequence
  Oligonucleotide primer for the detection of SNP TSC0054619
tactactctata

SEQ ID NO: 364626 - DNA, 12 bp, Artificial Sequence
  Oligonucleotide primer for the detection of SNP TSC0054619
agttttgaggtt

SEQ ID NO: 364627 - DNA, 12 bp, Artificial Sequence
  Oligonucleotide primer for the detection of SNP TSC0054619
agtttcgaggtt

SEQ ID NO: 364628 - DNA, 12 bp, Artificial Sequence
  Oligonucleotide primer for the detection of SNP TSC0054621
tactactacctc

SEQ ID NO: 364629 - DNA, 12 bp, Artificial Sequence
  Oligonucleotide primer for the detection of SNP TSC0054621
atgattatttag

SEQ ID NO: 364630 - DNA, 12 bp, Artificial Sequence
  Oligonucleotide primer for the detection of SNP TSC0054621
acgattatttag

SEQ ID NO: 364631 - DNA, 12 bp, Artificial Sequence
  Oligonucleotide primer for the detection of SNP TSC0054624
aattgttatagg

SEQ ID NO: 364632 - DNA, 12 bp, Artificial Sequence
  Oligonucleotide primer for the detection of SNP TSC0005622
cataccacactt

SEQ ID NO: 364633 - DNA, 12 bp, Artificial Sequence
  Oligonucleotide primer for the detection of SNP TSC0005622
gaagaaaatgaa

SEQ ID NO: 364634 - DNA, 12 bp, Artificial Sequence
  Oligonucleotide primer for the detection of SNP TSC0007775
acacaatactac

SEQ ID NO: 364635 - DNA, 12 bp, Artificial Sequence
  Oligonucleotide primer for the detection of SNP TSC0007775
gtttattagggg

SEQ ID NO: 364636 - DNA, 12 bp, Artificial Sequence
  Oligonucleotide primer for the detection of SNP TSC0054628
tccctccccaat

SEQ ID NO: 364637 - DNA, 12 bp, Artificial Sequence
  Oligonucleotide primer for the detection of SNP TSC0054628
actacctctttt

SEQ ID NO: 364638 - DNA, 12 bp, Artificial Sequence
  Oligonucleotide primer for the detection of SNP TSC0054629
ttagtagagttg

SEQ ID NO: 364639 - DNA, 12 bp, Artificial Sequence
  Oligonucleotide primer for the detection of SNP TSC0054630
tacctaaaccat

SEQ ID NO: 364640 - DNA, 12 bp, Artificial Sequence
  Oligonucleotide primer for the detection of SNP TSC0054630
aggatttttagg

SEQ ID NO: 364641 - DNA, 12 bp, Artificial Sequence
  Oligonucleotide primer for the detection of SNP TSC0054631
tttcctcaatac

SEQ ID NO: 364642 - DNA, 12 bp, Artificial Sequence
  Oligonucleotide primer for the detection of SNP TSC0054631
tgttaagtatta

SEQ ID NO: 364643 - DNA, 12 bp, Artificial Sequence
  Oligonucleotide primer for the detection of SNP TSC0054632
atctcactctta

SEQ ID NO: 364644 - DNA, 12 bp, Artificial Sequence
  Oligonucleotide primer for the detection of SNP TSC0054633
cttatatttttc

SEQ ID NO: 364645 - DNA, 12 bp, Artificial Sequence
  Oligonucleotide primer for the detection of SNP TSC0054633
gttgtattagtg

SEQ ID NO: 364646 - DNA, 12 bp, Artificial Sequence
  Oligonucleotide primer for the detection of SNP TSC0010325
cactaactcaac

SEQ ID NO: 364647 - DNA, 12 bp, Artificial Sequence
  Oligonucleotide primer for the detection of SNP TSC0010325
agtaatttaaag

SEQ ID NO: 364648 - DNA, 12 bp, Artificial Sequence
  Oligonucleotide primer for the detection of SNP TSC0054634
ccccataaaaat

SEQ ID NO: 364649 - DNA, 12 bp, Artificial Sequence
  Oligonucleotide primer for the detection of SNP TSC0054634
ccccgtaaaaat

SEQ ID NO: 364650 - DNA, 12 bp, Artificial Sequence
  Oligonucleotide primer for the detection of SNP TSC0054636
ttatactaatac

SEQ ID NO: 364651 - DNA, 12 bp, Artificial Sequence
  Oligonucleotide primer for the detection of SNP TSC0054636
ttatattaatgt

SEQ ID NO: 364652 - DNA, 12 bp, Artificial Sequence
  Oligonucleotide primer for the detection of SNP TSC0054637
gatggtagaaat

SEQ ID NO: 364653 - DNA, 12 bp, Artificial Sequence
  Oligonukleotid-Primer
tggagtttgagt

SEQ ID NO: 364654 - DNA, 12 bp, Artificial Sequence
  Oligonucleotide primer for the detection of SNP TSC0054640
tatccccttacc

SEQ ID NO: 364655 - DNA, 12 bp, Artificial Sequence
  Oligonucleotide primer for the detection of SNP TSC0054640
tttagttttaag

SEQ ID NO: 364656 - DNA, 12 bp, Artificial Sequence
  Oligonucleotide primer for the detection of SNP TSC0054640
ctcaaccccaaa

SEQ ID NO: 364657 - DNA, 12 bp, Artificial Sequence
  Oligonukleotid-Primer
tacaattaacac

SEQ ID NO: 364658 - DNA, 12 bp, Artificial Sequence
  Oligonucleotide primer for the detection of SNP TSC0054641
tgtagttggtat

SEQ ID NO: 364659 - DNA, 12 bp, Artificial Sequence
  Oligonucleotide primer for the detection of SNP TSC0054642
aattttatttac

SEQ ID NO: 364660 - DNA, 12 bp, Artificial Sequence
  Oligonucleotide primer for the detection of SNP TSC0054642
gggaggtgggag

SEQ ID NO: 364661 - DNA, 12 bp, Artificial Sequence
  Oligonukleotid-Primer
tttctattactt

SEQ ID NO: 364662 - DNA, 12 bp, Artificial Sequence
  Oligonucleotide primer for the detection of SNP TSC0054643
taaattgagtgg

SEQ ID NO: 364663 - DNA, 12 bp, Artificial Sequence
  Oligonucleotide primer for the detection of SNP TSC0054643
caaactaaataa

SEQ ID NO: 364664 - DNA, 12 bp, Artificial Sequence
  Oligonucleotide primer for the detection of SNP TSC0054645
aattttaccctt

SEQ ID NO: 364665 - DNA, 12 bp, Artificial Sequence
  Oligonucleotide primer for the detection of SNP TSC0054645
gataaatttttg

SEQ ID NO: 364666 - DNA, 12 bp, Artificial Sequence
  Oligonucleotide primer for the detection of SNP TSC0054646
tttattattaac

SEQ ID NO: 364667 - DNA, 12 bp, Artificial Sequence
  Oligonucleotide primer for the detection of SNP TSC0054646
tggaaagaatgg

SEQ ID NO: 364668 - DNA, 12 bp, Artificial Sequence
  Oligonucleotide primer for the detection of SNP TSC0054647
aaatatctcctt

SEQ ID NO: 364669 - DNA, 12 bp, Artificial Sequence
  Oligonucleotide primer for the detection of SNP TSC0054647
taaaatttaata

SEQ ID NO: 364670 - DNA, 12 bp, Artificial Sequence
  Oligonucleotide primer for the detection of SNP TSC0054648
ccactcacacaa

SEQ ID NO: 364671 - DNA, 12 bp, Artificial Sequence
  Oligonucleotide primer for the detection of SNP TSC0054648
ggatgaggtagt

SEQ ID NO: 364672 - DNA, 12 bp, Artificial Sequence
  Oligonucleotide primer for the detection of SNP TSC0054648
tgttatttatat

SEQ ID NO: 364673 - DNA, 12 bp, Artificial Sequence
  Oligonucleotide primer for the detection of SNP TSC0054649
attcaaactaat

SEQ ID NO: 364674 - DNA, 12 bp, Artificial Sequence
  Oligonucleotide primer for the detection of SNP TSC0054649
agttaggtatta

SEQ ID NO: 364675 - DNA, 12 bp, Artificial Sequence
  Oligonucleotide primer for the detection of SNP TSC0054650
acaaataaatac

SEQ ID NO: 364676 - DNA, 12 bp, Artificial Sequence
  Oligonucleotide primer for the detection of SNP TSC0054650
agagttgggaga

SEQ ID NO: 364677 - DNA, 12 bp, Artificial Sequence
  Oligonucleotide primer for the detection of SNP TSC0054650
gtaagtaggtgt

SEQ ID NO: 364678 - DNA, 12 bp, Artificial Sequence
  Oligonucleotide primer for the detection of SNP TSC0054651
aattcttcatta

SEQ ID NO: 364679 - DNA, 12 bp, Artificial Sequence
  Oligonucleotide primer for the detection of SNP TSC0054651
gagagaaagaat

SEQ ID NO: 364680 - DNA, 12 bp, Artificial Sequence
  Oligonucleotide primer for the detection of SNP TSC0054652
tcaaaaaaattc

SEQ ID NO: 364681 - DNA, 12 bp, Artificial Sequence
  Oligonucleotide primer for the detection of SNP TSC0054652
attggggaagag

SEQ ID NO: 364682 - DNA, 12 bp, Artificial Sequence
  Oligonucleotide primer for the detection of SNP TSC0054652
atcggggaagag

SEQ ID NO: 364683 - DNA, 12 bp, Artificial Sequence
  Oligonucleotide primer for the detection of SNP TSC0054653
ctaccctaaaat

SEQ ID NO: 364684 - DNA, 12 bp, Artificial Sequence
  Oligonucleotide primer for the detection of SNP TSC0054653
aaattagtttaa

SEQ ID NO: 364685 - DNA, 12 bp, Artificial Sequence
  Oligonucleotide primer for the detection of SNP TSC0054654
cctcataacctc

SEQ ID NO: 364686 - DNA, 12 bp, Artificial Sequence
  Oligonucleotide primer for the detection of SNP TSC0054654
tttgatttatta

SEQ ID NO: 364687 - DNA, 12 bp, Artificial Sequence
  Oligonucleotide primer for the detection of SNP TSC0054655
ctactcaaaaac

SEQ ID NO: 364688 - DNA, 12 bp, Artificial Sequence
  Oligonucleotide primer for the detection of SNP TSC0054655
aactatccttta

SEQ ID NO: 364689 - DNA, 12 bp, Artificial Sequence
  Oligonucleotide primer for the detection of SNP TSC0054655
ttgtttagaagt

SEQ ID NO: 364690 - DNA, 12 bp, Artificial Sequence
  Oligonucleotide primer for the detection of SNP TSC0054656
tctctctccctt

SEQ ID NO: 364691 - DNA, 12 bp, Artificial Sequence
  Oligonucleotide primer for the detection of SNP TSC0054656
atagttttaagg

SEQ ID NO: 364692 - DNA, 12 bp, Artificial Sequence
  Oligonucleotide primer for the detection of SNP TSC0054660
tatttaaattaa

SEQ ID NO: 364693 - DNA, 12 bp, Artificial Sequence
  Oligonucleotide primer for the detection of SNP TSC0054660
taaaatagaaaa

SEQ ID NO: 364694 - DNA, 12 bp, Artificial Sequence
  Oligonucleotide primer for the detection of SNP TSC0054660
atttaagttagt

SEQ ID NO: 364695 - DNA, 12 bp, Artificial Sequence
  Oligonucleotide primer for the detection of SNP TSC0054660
atttaagttagc

SEQ ID NO: 364696 - DNA, 12 bp, Artificial Sequence
  Oligonucleotide primer for the detection of SNP TSC0054661
ccatacatattt

SEQ ID NO: 364697 - DNA, 12 bp, Artificial Sequence
  Oligonucleotide primer for the detection of SNP TSC0054661
ccatacgtattt

SEQ ID NO: 364698 - DNA, 12 bp, Artificial Sequence
  Oligonucleotide primer for the detection of SNP TSC0054661
ttgtagattgag

SEQ ID NO: 364699 - DNA, 12 bp, Artificial Sequence
  Oligonucleotide primer for the detection of SNP TSC0054661
ctacaaactaaa

SEQ ID NO: 364700 - DNA, 12 bp, Artificial Sequence
  Oligonucleotide primer for the detection of SNP TSC0054661
ttatgcgtattt

SEQ ID NO: 364701 - DNA, 12 bp, Artificial Sequence
  Oligonucleotide primer for the detection of SNP TSC0054662
ccttttttattt

SEQ ID NO: 364702 - DNA, 12 bp, Artificial Sequence
  Oligonucleotide primer for the detection of SNP TSC0054663
caaatatttctc

SEQ ID NO: 364703 - DNA, 12 bp, Artificial Sequence
  Oligonucleotide primer for the detection of SNP TSC0054663
cgaatatttctc

SEQ ID NO: 364704 - DNA, 12 bp, Artificial Sequence
  Oligonucleotide primer for the detection of SNP TSC0054663
ttcgttttattt

SEQ ID NO: 364705 - DNA, 12 bp, Artificial Sequence
  Oligonucleotide primer for the detection of SNP TSC0054663
cattccacctaa

SEQ ID NO: 364706 - DNA, 12 bp, Artificial Sequence
  Oligonucleotide primer for the detection of SNP TSC0054663
cgttccacctaa

SEQ ID NO: 364707 - DNA, 12 bp, Artificial Sequence
  Oligonucleotide primer for the detection of SNP TSC0054663
tggatgtttttt

SEQ ID NO: 364708 - DNA, 12 bp, Artificial Sequence
  Oligonucleotide primer for the detection of SNP TSC0054663
cggatgtttttt

SEQ ID NO: 364709 - DNA, 12 bp, Artificial Sequence
  Oligonucleotide primer for the detection of SNP TSC0054663
tggatgtttttc

SEQ ID NO: 364710 - DNA, 12 bp, Artificial Sequence
  Oligonucleotide primer for the detection of SNP TSC0054663
cggatgtttttc

SEQ ID NO: 364711 - DNA, 12 bp, Artificial Sequence
  Oligonucleotide primer for the detection of SNP TSC0054665
tgtttttaggta

SEQ ID NO: 364712 - DNA, 12 bp, Artificial Sequence
  Oligonucleotide primer for the detection of SNP TSC0054666
cctcctactata

SEQ ID NO: 364713 - DNA, 12 bp, Artificial Sequence
  Oligonucleotide primer for the detection of SNP TSC0054666
gtaaatatttag

SEQ ID NO: 364714 - DNA, 12 bp, Artificial Sequence
  Oligonucleotide primer for the detection of SNP TSC0054666
caaacattcaaa

SEQ ID NO: 364715 - DNA, 12 bp, Artificial Sequence
  Oligonucleotide primer for the detection of SNP TSC0054667
atataattcttt

SEQ ID NO: 364716 - DNA, 12 bp, Artificial Sequence
  Oligonucleotide primer for the detection of SNP TSC0054667
aagaggagtaaa

SEQ ID NO: 364717 - DNA, 12 bp, Artificial Sequence
  Oligonucleotide primer for the detection of SNP TSC0054668
ctcctcttacat

SEQ ID NO: 364718 - DNA, 12 bp, Artificial Sequence
  Oligonucleotide primer for the detection of SNP TSC0054668
ctcctcttacgt

SEQ ID NO: 364719 - DNA, 12 bp, Artificial Sequence
  Oligonucleotide primer for the detection of SNP TSC0054668
ttttttgaattg

SEQ ID NO: 364720 - DNA, 12 bp, Artificial Sequence
  Oligonucleotide primer for the detection of SNP TSC0054669
taacaactctca

SEQ ID NO: 364721 - DNA, 12 bp, Artificial Sequence
  Oligonucleotide primer for the detection of SNP TSC0054670
caaataaatcat

SEQ ID NO: 364722 - DNA, 12 bp, Artificial Sequence
  Oligonucleotide primer for the detection of SNP TSC0054671
attgagtaagta

SEQ ID NO: 364723 - DNA, 12 bp, Artificial Sequence
  Oligonucleotide primer for the detection of SNP TSC0054673
tatatatacaaa

SEQ ID NO: 364724 - DNA, 12 bp, Artificial Sequence
  Oligonucleotide primer for the detection of SNP TSC0054673
atatgtgtgtgt

SEQ ID NO: 364725 - DNA, 12 bp, Artificial Sequence
  Oligonucleotide primer for the detection of SNP TSC0054676
tggtagattgtg

SEQ ID NO: 364726 - DNA, 12 bp, Artificial Sequence
  Oligonucleotide primer for the detection of SNP TSC0054677
ctttcctaattc

SEQ ID NO: 364727 - DNA, 12 bp, Artificial Sequence
  Oligonucleotide primer for the detection of SNP TSC0054677
ttatttgtaagt

SEQ ID NO: 364728 - DNA, 12 bp, Artificial Sequence
  Oligonucleotide primer for the detection of SNP TSC0054677
catctacaaaca

SEQ ID NO: 364729 - DNA, 12 bp, Artificial Sequence
  Oligonucleotide primer for the detection of SNP TSC0054678
atagtgagttga

SEQ ID NO: 364730 - DNA, 12 bp, Artificial Sequence
  Oligonucleotide primer for the detection of SNP TSC0054680
acaaatactaca

SEQ ID NO: 364731 - DNA, 12 bp, Artificial Sequence
  Oligonucleotide primer for the detection of SNP TSC0054680
taggaatgaggt

SEQ ID NO: 364732 - DNA, 12 bp, Artificial Sequence
  Oligonucleotide primer for the detection of SNP TSC0054681
tgaaagtatttg

SEQ ID NO: 364733 - DNA, 12 bp, Artificial Sequence
  Oligonucleotide primer for the detection of SNP TSC0054681
taaaaacactta

SEQ ID NO: 364734 - DNA, 12 bp, Artificial Sequence
  Oligonucleotide primer for the detection of SNP TSC0054686
aaccatcttaaa

SEQ ID NO: 364735 - DNA, 12 bp, Artificial Sequence
  Oligonucleotide primer for the detection of SNP TSC0054686
ggttaaaaaaaa

SEQ ID NO: 364736 - DNA, 12 bp, Artificial Sequence
  Oligonucleotide primer for the detection of SNP TSC0054687
cccatataaaca

SEQ ID NO: 364737 - DNA, 12 bp, Artificial Sequence
  Oligonucleotide primer for the detection of SNP TSC0054687
gtagtaaggtgt

SEQ ID NO: 364738 - DNA, 12 bp, Artificial Sequence
  Oligonucleotide primer for the detection of SNP TSC0054687
acaacaaaatac

SEQ ID NO: 364739 - DNA, 12 bp, Artificial Sequence
  Oligonucleotide primer for the detection of SNP TSC0054687
tttatgtaggta

SEQ ID NO: 364740 - DNA, 12 bp, Artificial Sequence
  Oligonucleotide primer for the detection of SNP TSC0054688
tgggtgtttgtt

SEQ ID NO: 364741 - DNA, 12 bp, Artificial Sequence
  Oligonucleotide primer for the detection of SNP TSC0054688
tgggcgtttgtt

SEQ ID NO: 364742 - DNA, 12 bp, Artificial Sequence
  Oligonucleotide primer for the detection of SNP TSC0054688
aataaacatcta

SEQ ID NO: 364743 - DNA, 12 bp, Artificial Sequence
  Oligonucleotide primer for the detection of SNP TSC0054688
aataaacgtcta

SEQ ID NO: 364744 - DNA, 12 bp, Artificial Sequence
  Oligonucleotide primer for the detection of SNP TSC0054688
gagtgtaagtgt

SEQ ID NO: 364745 - DNA, 12 bp, Artificial Sequence
  Oligonucleotide primer for the detection of SNP TSC0054691
actatttttttt

SEQ ID NO: 364746 - DNA, 12 bp, Artificial Sequence
  Oligonucleotide primer for the detection of SNP TSC0054693
acaaaataccaa

SEQ ID NO: 364747 - DNA, 12 bp, Artificial Sequence
  Oligonucleotide primer for the detection of SNP TSC0054693
catttaaaccca

SEQ ID NO: 364748 - DNA, 12 bp, Artificial Sequence
  Oligonucleotide primer for the detection of SNP TSC0054693
ggtaaggtgtta

SEQ ID NO: 364749 - DNA, 12 bp, Artificial Sequence
  Oligonucleotide primer for the detection of SNP TSC0054695
aaataattaacc

SEQ ID NO: 364750 - DNA, 12 bp, Artificial Sequence
  Oligonucleotide primer for the detection of SNP TSC0054696
atgttttggtta

SEQ ID NO: 364751 - DNA, 12 bp, Artificial Sequence
  Oligonucleotide primer for the detection of SNP TSC0054696
atattttaatca

SEQ ID NO: 364752 - DNA, 12 bp, Artificial Sequence
  Oligonucleotide primer for the detection of SNP TSC0054696
tgattaagatag

SEQ ID NO: 364753 - DNA, 12 bp, Artificial Sequence
  Oligonucleotide primer for the detection of SNP TSC0054697
aatataaaaccc

SEQ ID NO: 364754 - DNA, 12 bp, Artificial Sequence
  Oligonucleotide primer for the detection of SNP TSC0054697
tgttagtatata

SEQ ID NO: 364755 - DNA, 12 bp, Artificial Sequence
  Oligonucleotide primer for the detection of SNP TSC0054698
agttagttattt

SEQ ID NO: 364756 - DNA, 12 bp, Artificial Sequence
  Oligonucleotide primer for the detection of SNP TSC0054698
taaaattaatta

SEQ ID NO: 364757 - DNA, 12 bp, Artificial Sequence
  Oligonucleotide primer for the detection of SNP TSC0054698
aaaatggttaat

SEQ ID NO: 364758 - DNA, 12 bp, Artificial Sequence
  Oligonucleotide primer for the detection of SNP TSC0054699
accaccaccacc

SEQ ID NO: 364759 - DNA, 12 bp, Artificial Sequence
  Oligonucleotide primer for the detection of SNP TSC0054700
ccttaatataac

SEQ ID NO: 364760 - DNA, 12 bp, Artificial Sequence
  Oligonucleotide primer for the detection of SNP TSC0054700
ttttgttaattg

SEQ ID NO: 364761 - DNA, 12 bp, Artificial Sequence
  Oligonucleotide primer for the detection of SNP TSC0054700
ccttactaatta

SEQ ID NO: 364762 - DNA, 12 bp, Artificial Sequence
  Oligonucleotide primer for the detection of SNP TSC0054704
tatattagatgg

SEQ ID NO: 364763 - DNA, 12 bp, Artificial Sequence
  Oligonucleotide primer for the detection of SNP TSC0054704
ataagagtaaaa

SEQ ID NO: 364764 - DNA, 12 bp, Artificial Sequence
  Oligonucleotide primer for the detection of SNP TSC0054705
tgtttggttaat

SEQ ID NO: 364765 - DNA, 12 bp, Artificial Sequence
  Oligonucleotide primer for the detection of SNP TSC0054705
cgtttggttaat

SEQ ID NO: 364766 - DNA, 12 bp, Artificial Sequence
  Oligonucleotide primer for the detection of SNP TSC0054705
cacctaactaat

SEQ ID NO: 364767 - DNA, 12 bp, Artificial Sequence
  Oligonucleotide primer for the detection of SNP TSC0054705
cgcctaactaat

SEQ ID NO: 364768 - DNA, 12 bp, Artificial Sequence
  Oligonucleotide primer for the detection of SNP TSC0054707
caaacataatac

SEQ ID NO: 364769 - DNA, 12 bp, Artificial Sequence
  Oligonucleotide primer for the detection of SNP TSC0054707
ggtttttgtgta

SEQ ID NO: 364770 - DNA, 12 bp, Artificial Sequence
  Oligonucleotide primer for the detection of SNP TSC0054707
ggttttcgtgta

SEQ ID NO: 364771 - DNA, 12 bp, Artificial Sequence
  Oligonucleotide primer for the detection of SNP TSC0054709
aggagaattgta

SEQ ID NO: 364772 - DNA, 12 bp, Artificial Sequence
  Oligonucleotide primer for the detection of SNP TSC0054710
taaacacttatt

SEQ ID NO: 364773 - DNA, 12 bp, Artificial Sequence
  Oligonucleotide primer for the detection of SNP TSC0054712
atttatagattt

SEQ ID NO: 364774 - DNA, 12 bp, Artificial Sequence
  Oligonucleotide primer for the detection of SNP TSC0054712
aactcacaaatc

SEQ ID NO: 364775 - DNA, 12 bp, Artificial Sequence
  Oligonucleotide primer for the detection of SNP TSC0054713
ttacaattttaa

SEQ ID NO: 364776 - DNA, 12 bp, Artificial Sequence
  Oligonucleotide primer for the detection of SNP TSC0054713
tgtttatgaatt

SEQ ID NO: 364777 - DNA, 12 bp, Artificial Sequence
  Oligonucleotide primer for the detection of SNP TSC0054713
atccataaacca

SEQ ID NO: 364778 - DNA, 12 bp, Artificial Sequence
  Oligonucleotide primer for the detection of SNP TSC0054714
aaaactcaaacc

SEQ ID NO: 364779 - DNA, 12 bp, Artificial Sequence
  Oligonucleotide primer for the detection of SNP TSC0054714
ttttttaaaaag

SEQ ID NO: 364780 - DNA, 12 bp, Artificial Sequence
  Oligonucleotide primer for the detection of SNP TSC0054714
aaagtttagatt

SEQ ID NO: 364781 - DNA, 12 bp, Artificial Sequence
  Oligonucleotide primer for the detection of SNP TSC0054722
cgcaaaaccaaa

SEQ ID NO: 364782 - DNA, 12 bp, Artificial Sequence
  Oligonucleotide primer for the detection of SNP TSC0054722
tactaataacac

SEQ ID NO: 364783 - DNA, 12 bp, Artificial Sequence
  Oligonucleotide primer for the detection of SNP TSC0054722
tgtagggttagg

SEQ ID NO: 364784 - DNA, 12 bp, Artificial Sequence
  Oligonucleotide primer for the detection of SNP TSC0054722
cgtagggttagg

SEQ ID NO: 364785 - DNA, 12 bp, Artificial Sequence
  Oligonucleotide primer for the detection of SNP TSC0054723
aacacatatcta

SEQ ID NO: 364786 - DNA, 12 bp, Artificial Sequence
  Oligonucleotide primer for the detection of SNP TSC0054723
tcttcctttttt

SEQ ID NO: 364787 - DNA, 12 bp, Artificial Sequence
  Oligonucleotide primer for the detection of SNP TSC0054724
atatataaatgg

SEQ ID NO: 364788 - DNA, 12 bp, Artificial Sequence
  Oligonucleotide primer for the detection of SNP TSC0054728
taactctttcaa

SEQ ID NO: 364789 - DNA, 12 bp, Artificial Sequence
  Oligonucleotide primer for the detection of SNP TSC0054728
caccttttaatt

SEQ ID NO: 364790 - DNA, 12 bp, Artificial Sequence
  Oligonucleotide primer for the detection of SNP TSC0054730
tctactaccata

SEQ ID NO: 364791 - DNA, 12 bp, Artificial Sequence
  Oligonucleotide primer for the detection of SNP TSC0054730
aaggtatgtttt

SEQ ID NO: 364792 - DNA, 12 bp, Artificial Sequence
  Oligonucleotide primer for the detection of SNP TSC0054730
aaggtacgtttt

SEQ ID NO: 364793 - DNA, 12 bp, Artificial Sequence
  Oligonucleotide primer for the detection of SNP TSC0054730
aaaacacatctt

SEQ ID NO: 364794 - DNA, 12 bp, Artificial Sequence
  Oligonucleotide primer for the detection of SNP TSC0054730
aaaacacgtctt

SEQ ID NO: 364795 - DNA, 12 bp, Artificial Sequence
  Oligonucleotide primer for the detection of SNP TSC0054730
gtttgttgttat

SEQ ID NO: 364796 - DNA, 12 bp, Artificial Sequence
  Oligonucleotide primer for the detection of SNP TSC0054731
acaaccacctac

SEQ ID NO: 364797 - DNA, 12 bp, Artificial Sequence
  Oligonucleotide primer for the detection of SNP TSC0054731
atttataatgat

SEQ ID NO: 364798 - DNA, 12 bp, Artificial Sequence
  Oligonucleotide primer for the detection of SNP TSC0054731
tctataataaca

SEQ ID NO: 364799 - DNA, 12 bp, Artificial Sequence
  Oligonucleotide primer for the detection of SNP TSC0054732
ctcacacccttt

SEQ ID NO: 364800 - DNA, 12 bp, Artificial Sequence
  Oligonucleotide primer for the detection of SNP TSC0054732
ctcacgcccttt

SEQ ID NO: 364801 - DNA, 12 bp, Artificial Sequence
  Oligonucleotide primer for the detection of SNP TSC0054732
gggaggtaggga

SEQ ID NO: 364802 - DNA, 12 bp, Artificial Sequence
  Oligonucleotide primer for the detection of SNP TSC0054733
cacctttttaac

SEQ ID NO: 364803 - DNA, 12 bp, Artificial Sequence
  Oligonucleotide primer for the detection of SNP TSC0054733
taagtggtataa

SEQ ID NO: 364804 - DNA, 12 bp, Artificial Sequence
  Oligonucleotide primer for the detection of SNP TSC0054733
caaataacataa

SEQ ID NO: 364805 - DNA, 12 bp, Artificial Sequence
  Oligonucleotide primer for the detection of SNP TSC0054734
taaaataacaat

SEQ ID NO: 364806 - DNA, 12 bp, Artificial Sequence
  Oligonucleotide primer for the detection of SNP TSC0054734
tttgtgatgaaa

SEQ ID NO: 364807 - DNA, 12 bp, Artificial Sequence
  Oligonucleotide primer for the detection of SNP TSC0054734
cctataataaaa

SEQ ID NO: 364808 - DNA, 12 bp, Artificial Sequence
  Oligonucleotide primer for the detection of SNP TSC0054734
taggatagtaat

SEQ ID NO: 364809 - DNA, 12 bp, Artificial Sequence
  Oligonucleotide primer for the detection of SNP TSC0054735
tatacacacccc

SEQ ID NO: 364810 - DNA, 12 bp, Artificial Sequence
  Oligonucleotide primer for the detection of SNP TSC0054735
tagtatatatag

SEQ ID NO: 364811 - DNA, 12 bp, Artificial Sequence
  Oligonucleotide primer for the detection of SNP TSC0054736
ttaatttattca

SEQ ID NO: 364812 - DNA, 12 bp, Artificial Sequence
  Oligonucleotide primer for the detection of SNP TSC0054736
tctctctcatat

SEQ ID NO: 364813 - DNA, 12 bp, Artificial Sequence
  Oligonucleotide primer for the detection of SNP TSC0054740
caatttacaatt

SEQ ID NO: 364814 - DNA, 12 bp, Artificial Sequence
  Oligonucleotide primer for the detection of SNP TSC0054740
atgttatattta

SEQ ID NO: 364815 - DNA, 12 bp, Artificial Sequence
  Oligonucleotide primer for the detection of SNP TSC0054741
aaagttttataa

SEQ ID NO: 364816 - DNA, 12 bp, Artificial Sequence
  Oligonucleotide primer for the detection of SNP TSC0054743
attctccaaaac

SEQ ID NO: 364817 - DNA, 12 bp, Artificial Sequence
  Oligonucleotide primer for the detection of SNP TSC0054744
ttttaaagagta

SEQ ID NO: 364818 - DNA, 12 bp, Artificial Sequence
  Oligonucleotide primer for the detection of SNP TSC0054745
aataatccattt

SEQ ID NO: 364819 - DNA, 12 bp, Artificial Sequence
  Oligonucleotide primer for the detection of SNP TSC0054745
tattatggagga

SEQ ID NO: 364820 - DNA, 12 bp, Artificial Sequence
  Oligonucleotide primer for the detection of SNP TSC0054746
cttcaaaaaaat

SEQ ID NO: 364821 - DNA, 12 bp, Artificial Sequence
  Oligonucleotide primer for the detection of SNP TSC0054746
atttttggttgg

SEQ ID NO: 364822 - DNA, 12 bp, Artificial Sequence
  Oligonucleotide primer for the detection of SNP TSC0054747
acatctctaaac

SEQ ID NO: 364823 - DNA, 12 bp, Artificial Sequence
  Oligonucleotide primer for the detection of SNP TSC0054747
gtttttatagtt

SEQ ID NO: 364824 - DNA, 12 bp, Artificial Sequence
  Oligonucleotide primer for the detection of SNP TSC0054747
taccctcataac

SEQ ID NO: 364825 - DNA, 12 bp, Artificial Sequence
  Oligonucleotide primer for the detection of SNP TSC0054747
tatttttgagtt

SEQ ID NO: 364826 - DNA, 12 bp, Artificial Sequence
  Oligonucleotide primer for the detection of SNP TSC0054748
aacaaaataatc

SEQ ID NO: 364827 - DNA, 12 bp, Artificial Sequence
  Oligonucleotide primer for the detection of SNP TSC0054748
gtatttaaaggt

SEQ ID NO: 364828 - DNA, 12 bp, Artificial Sequence
  Oligonucleotide primer for the detection of SNP TSC0054748
agaatagttttt

SEQ ID NO: 364829 - DNA, 12 bp, Artificial Sequence
  Oligonucleotide primer for the detection of SNP TSC0054750
aaattaactttc

SEQ ID NO: 364830 - DNA, 12 bp, Artificial Sequence
  Oligonucleotide primer for the detection of SNP TSC0054750
ttatatgtggaa

SEQ ID NO: 364831 - DNA, 12 bp, Artificial Sequence
  Oligonucleotide primer for the detection of SNP TSC0054750
ttatatgcggaa

SEQ ID NO: 364832 - DNA, 12 bp, Artificial Sequence
  Oligonucleotide primer for the detection of SNP TSC0054753
ttttaatcacct

SEQ ID NO: 364833 - DNA, 12 bp, Artificial Sequence
  Oligonucleotide primer for the detection of SNP TSC0054753
atgaagtttaaa

SEQ ID NO: 364834 - DNA, 12 bp, Artificial Sequence
  Oligonucleotide primer for the detection of SNP TSC0054754
ttcatcctaaat

SEQ ID NO: 364835 - DNA, 12 bp, Artificial Sequence
  Oligonucleotide primer for the detection of SNP TSC0054754
atagtaatagta

SEQ ID NO: 364836 - DNA, 12 bp, Artificial Sequence
  Oligonucleotide primer for the detection of SNP TSC0054755
tttaaatctttc

SEQ ID NO: 364837 - DNA, 12 bp, Artificial Sequence
  Oligonucleotide primer for the detection of SNP TSC0054755
aggatgaaattt

SEQ ID NO: 364838 - DNA, 12 bp, Artificial Sequence
  Oligonucleotide primer for the detection of SNP TSC0054756
acttaaaaatat

SEQ ID NO: 364839 - DNA, 12 bp, Artificial Sequence
  Oligonucleotide primer for the detection of SNP TSC0054756
attgaaagaaaa

SEQ ID NO: 364840 - DNA, 12 bp, Artificial Sequence
  Oligonucleotide primer for the detection of SNP TSC0054757
agtgttaggtag

SEQ ID NO: 364841 - DNA, 12 bp, Artificial Sequence
  Oligonucleotide primer for the detection of SNP TSC0054758
aacaaaataatt

SEQ ID NO: 364842 - DNA, 12 bp, Artificial Sequence
  Oligonucleotide primer for the detection of SNP TSC0054758
aaaaaaaatgtt

SEQ ID NO: 364843 - DNA, 12 bp, Artificial Sequence
  Oligonucleotide primer for the detection of SNP TSC0054758
aatagagtaatt

SEQ ID NO: 364844 - DNA, 12 bp, Artificial Sequence
  Oligonucleotide primer for the detection of SNP TSC0054760
tttttattttcc

SEQ ID NO: 364845 - DNA, 12 bp, Artificial Sequence
  Oligonucleotide primer for the detection of SNP TSC0054763
attaactttatt

SEQ ID NO: 364846 - DNA, 12 bp, Artificial Sequence
  Oligonucleotide primer for the detection of SNP TSC0054763
agattaagaata

SEQ ID NO: 364847 - DNA, 12 bp, Artificial Sequence
  Oligonucleotide primer for the detection of SNP TSC0054765
cttcctcccaaa

SEQ ID NO: 364848 - DNA, 12 bp, Artificial Sequence
  Oligonucleotide primer for the detection of SNP TSC0054765
attagatagtga

SEQ ID NO: 364849 - DNA, 12 bp, Artificial Sequence
  Oligonucleotide primer for the detection of SNP TSC0054765
tttttttaagtc

SEQ ID NO: 364850 - DNA, 12 bp, Artificial Sequence
  Oligonucleotide primer for the detection of SNP TSC0054766
ttagtattagtt

SEQ ID NO: 364851 - DNA, 12 bp, Artificial Sequence
  Oligonucleotide primer for the detection of SNP TSC0054766
ccaacactaacc

SEQ ID NO: 364852 - DNA, 12 bp, Artificial Sequence
  Oligonucleotide primer for the detection of SNP TSC0054766
taggatatagta

SEQ ID NO: 364853 - DNA, 12 bp, Artificial Sequence
  Oligonucleotide primer for the detection of SNP TSC0054767
aacttttattta

SEQ ID NO: 364854 - DNA, 12 bp, Artificial Sequence
  Oligonucleotide primer for the detection of SNP TSC0054767
ataatttaattt

SEQ ID NO: 364855 - DNA, 12 bp, Artificial Sequence
  Oligonucleotide primer for the detection of SNP TSC0054768
aacactataatt

SEQ ID NO: 364856 - DNA, 12 bp, Artificial Sequence
  Oligonucleotide primer for the detection of SNP TSC0054768
ataattaatttt

SEQ ID NO: 364857 - DNA, 12 bp, Artificial Sequence
  Oligonucleotide primer for the detection of SNP TSC0054768
aaaataactaac

SEQ ID NO: 364858 - DNA, 12 bp, Artificial Sequence
  Oligonucleotide primer for the detection of SNP TSC0054768
gatattataatt

SEQ ID NO: 364859 - DNA, 12 bp, Artificial Sequence
  Oligonucleotide primer for the detection of SNP TSC0054769
atttgtagggtg

SEQ ID NO: 364860 - DNA, 12 bp, Artificial Sequence
  Oligonucleotide primer for the detection of SNP TSC0054770
aacaattacaaa

SEQ ID NO: 364861 - DNA, 12 bp, Artificial Sequence
  Oligonucleotide primer for the detection of SNP TSC0054770
ttttataaggaa

SEQ ID NO: 364862 - DNA, 12 bp, Artificial Sequence
  Oligonucleotide primer for the detection of SNP TSC0054770
agtaattataag

SEQ ID NO: 364863 - DNA, 12 bp, Artificial Sequence
  Oligonucleotide primer for the detection of SNP TSC0054771
aaaaattaactt

SEQ ID NO: 364864 - DNA, 12 bp, Artificial Sequence
  Oligonucleotide primer for the detection of SNP TSC0054771
atatttgttgtt

SEQ ID NO: 364865 - DNA, 12 bp, Artificial Sequence
  Oligonucleotide primer for the detection of SNP TSC0054772
attaacttacaa

SEQ ID NO: 364866 - DNA, 12 bp, Artificial Sequence
  Oligonucleotide primer for the detection of SNP TSC0054772
tgtaaatatttg

SEQ ID NO: 364867 - DNA, 12 bp, Artificial Sequence
  Oligonucleotide primer for the detection of SNP TSC0054773
tataacaatact

SEQ ID NO: 364868 - DNA, 12 bp, Artificial Sequence
  Oligonucleotide primer for the detection of SNP TSC0054773
aaactatttact

SEQ ID NO: 364869 - DNA, 12 bp, Artificial Sequence
  Oligonucleotide primer for the detection of SNP TSC0054774
caaatattccta

SEQ ID NO: 364870 - DNA, 12 bp, Artificial Sequence
  Oligonucleotide primer for the detection of SNP TSC0054774
tgagttagtggt

SEQ ID NO: 364871 - DNA, 12 bp, Artificial Sequence
  Oligonucleotide primer for the detection of SNP TSC0054774
cgagttagtggt

SEQ ID NO: 364872 - DNA, 12 bp, Artificial Sequence
  Oligonucleotide primer for the detection of SNP TSC0054774
caaactaataac

SEQ ID NO: 364873 - DNA, 12 bp, Artificial Sequence
  Oligonucleotide primer for the detection of SNP TSC0054774
cgaactaataac

SEQ ID NO: 364874 - DNA, 12 bp, Artificial Sequence
  Oligonucleotide primer for the detection of SNP TSC0054778
atctaataattc

SEQ ID NO: 364875 - DNA, 12 bp, Artificial Sequence
  Oligonucleotide primer for the detection of SNP TSC0054781
tgttaggtattg

SEQ ID NO: 364876 - DNA, 12 bp, Artificial Sequence
  Oligonucleotide primer for the detection of SNP TSC0054781
tactaaacacta

SEQ ID NO: 364877 - DNA, 12 bp, Artificial Sequence
  Oligonucleotide primer for the detection of SNP TSC0054782
atttagtggtta

SEQ ID NO: 364878 - DNA, 12 bp, Artificial Sequence
  Oligonucleotide primer for the detection of SNP TSC0054783
atttgtaatttt

SEQ ID NO: 364879 - DNA, 12 bp, Artificial Sequence
  Oligonucleotide primer for the detection of SNP TSC0054783
cctataattcca

SEQ ID NO: 364880 - DNA, 12 bp, Artificial Sequence
  Oligonucleotide primer for the detection of SNP TSC0054784
ttaatttatata

SEQ ID NO: 364881 - DNA, 12 bp, Artificial Sequence
  Oligonucleotide primer for the detection of SNP TSC0054784
attattaaatat

SEQ ID NO: 364882 - DNA, 12 bp, Artificial Sequence
  Oligonucleotide primer for the detection of SNP TSC0054784
atcactaaacat

SEQ ID NO: 364883 - DNA, 12 bp, Artificial Sequence
  Oligonucleotide primer for the detection of SNP TSC0054784
ttggtttgtgta

SEQ ID NO: 364884 - DNA, 12 bp, Artificial Sequence
  Oligonucleotide primer for the detection of SNP TSC0054785
ataattataaat

SEQ ID NO: 364885 - DNA, 12 bp, Artificial Sequence
  Oligonucleotide primer for the detection of SNP TSC0054785
gaggttttaaga

SEQ ID NO: 364886 - DNA, 12 bp, Artificial Sequence
  Oligonucleotide primer for the detection of SNP TSC0054786
tttattctcaca

SEQ ID NO: 364887 - DNA, 12 bp, Artificial Sequence
  Oligonucleotide primer for the detection of SNP TSC0054786
tttattctcacg

SEQ ID NO: 364888 - DNA, 12 bp, Artificial Sequence
  Oligonucleotide primer for the detection of SNP TSC0054786
ttcttcataaca

SEQ ID NO: 364889 - DNA, 12 bp, Artificial Sequence
  Oligonucleotide primer for the detection of SNP TSC0054786
gtttgtttttac

SEQ ID NO: 364890 - DNA, 12 bp, Artificial Sequence
  Oligonucleotide primer for the detection of SNP TSC0054787
ctataaaacaat

SEQ ID NO: 364891 - DNA, 12 bp, Artificial Sequence
  Oligonucleotide primer for the detection of SNP TSC0054787
ttatggtggaag

SEQ ID NO: 364892 - DNA, 12 bp, Artificial Sequence
  Oligonucleotide primer for the detection of SNP TSC0054788
taactaacacaa

SEQ ID NO: 364893 - DNA, 12 bp, Artificial Sequence
  Oligonucleotide primer for the detection of SNP TSC0054788
taactaacacga

SEQ ID NO: 364894 - DNA, 12 bp, Artificial Sequence
  Oligonukleotid-Primer
gagttagggttt

SEQ ID NO: 364895 - DNA, 12 bp, Artificial Sequence
  Oligonucleotide primer for the detection of SNP TSC0054789
tttcattttacc

SEQ ID NO: 364896 - DNA, 12 bp, Artificial Sequence
  Oligonucleotide primer for the detection of SNP TSC0054789
ggtttagtaggg

SEQ ID NO: 364897 - DNA, 12 bp, Artificial Sequence
  Oligonucleotide primer for the detection of SNP TSC0054794
aaatataaaact

SEQ ID NO: 364898 - DNA, 12 bp, Artificial Sequence
  Oligonukleotid-Primer
aagtgtttaagt

SEQ ID NO: 364899 - DNA, 12 bp, Artificial Sequence
  Oligonucleotide primer for the detection of SNP TSC0054794
agatgtgggatt

SEQ ID NO: 364900 - DNA, 12 bp, Artificial Sequence
  Oligonucleotide primer for the detection of SNP TSC0009423
ataaacatttct

SEQ ID NO: 364901 - DNA, 12 bp, Artificial Sequence
  Oligonucleotide primer for the detection of SNP TSC0009423
ataaacgtttct

SEQ ID NO: 364902 - DNA, 12 bp, Artificial Sequence
  Oligonukleotid-Primer
attgattgtgag

SEQ ID NO: 364903 - DNA, 12 bp, Artificial Sequence
  Oligonucleotide primer for the detection of SNP TSC0009423
attgatcgtgag

SEQ ID NO: 364904 - DNA, 12 bp, Artificial Sequence
  Oligonucleotide primer for the detection of SNP TSC0009423
attaatcataaa

SEQ ID NO: 364905 - DNA, 12 bp, Artificial Sequence
  Oligonucleotide primer for the detection of SNP TSC0009423
attaatcgtaaa

SEQ ID NO: 364906 - DNA, 12 bp, Artificial Sequence
  Oligonucleotide primer for the detection of SNP TSC0009423
atgaatgttttt

SEQ ID NO: 364907 - DNA, 12 bp, Artificial Sequence
  Oligonucleotide primer for the detection of SNP TSC0009423
atgaacgttttt

SEQ ID NO: 364908 - DNA, 12 bp, Artificial Sequence
  Oligonucleotide primer for the detection of SNP TSC0054799
aaaccaattcac

SEQ ID NO: 364909 - DNA, 12 bp, Artificial Sequence
  Oligonucleotide primer for the detection of SNP TSC0054799
ttttaggttttg

SEQ ID NO: 364910 - DNA, 12 bp, Artificial Sequence
  Oligonucleotide primer for the detection of SNP TSC0054799
aagttaatttat

SEQ ID NO: 364911 - DNA, 12 bp, Artificial Sequence
  Oligonucleotide primer for the detection of SNP TSC0054801
caacatataaac

SEQ ID NO: 364912 - DNA, 12 bp, Artificial Sequence
  Oligonucleotide primer for the detection of SNP TSC0054801
caacgtataaac

SEQ ID NO: 364913 - DNA, 12 bp, Artificial Sequence
  Oligonucleotide primer for the detection of SNP TSC0054801
attatattttaa

SEQ ID NO: 364914 - DNA, 12 bp, Artificial Sequence
  Oligonucleotide primer for the detection of SNP TSC0054802
taaatacaataa

SEQ ID NO: 364915 - DNA, 12 bp, Artificial Sequence
  Oligonucleotide primer for the detection of SNP TSC0054802
taaaaggatatt

SEQ ID NO: 364916 - DNA, 12 bp, Artificial Sequence
  Oligonucleotide primer for the detection of SNP TSC0054802
taaaaaaacact

SEQ ID NO: 364917 - DNA, 12 bp, Artificial Sequence
  Oligonucleotide primer for the detection of SNP TSC0054802
taagtgtaataa

SEQ ID NO: 364918 - DNA, 12 bp, Artificial Sequence
  Oligonucleotide primer for the detection of SNP TSC0054806
tccaaactaatt

SEQ ID NO: 364919 - DNA, 12 bp, Artificial Sequence
  Oligonucleotide primer for the detection of SNP TSC0054806
gtatggtagata

SEQ ID NO: 364920 - DNA, 12 bp, Artificial Sequence
  Oligonucleotide primer for the detection of SNP TSC0054806
atataacaaata

SEQ ID NO: 364921 - DNA, 12 bp, Artificial Sequence
  Oligonucleotide primer for the detection of SNP TSC0054807
aatatactacct

SEQ ID NO: 364922 - DNA, 12 bp, Artificial Sequence
  Oligonucleotide primer for the detection of SNP TSC0054807
ttttttgtgatg

SEQ ID NO: 364923 - DNA, 12 bp, Artificial Sequence
  Oligonucleotide primer for the detection of SNP TSC0054807
tttttcgtgatg

SEQ ID NO: 364924 - DNA, 12 bp, Artificial Sequence
  Oligonucleotide primer for the detection of SNP TSC0054807
ttttttgtgacg

SEQ ID NO: 364925 - DNA, 12 bp, Artificial Sequence
  Oligonucleotide primer for the detection of SNP TSC0054807
tttttcgtgacg

SEQ ID NO: 364926 - DNA, 12 bp, Artificial Sequence
  Oligonucleotide primer for the detection of SNP TSC0054808
ctcattcttttt

SEQ ID NO: 364927 - DNA, 12 bp, Artificial Sequence
  Oligonucleotide primer for the detection of SNP TSC0054808
taagaataaaga

SEQ ID NO: 364928 - DNA, 12 bp, Artificial Sequence
  Oligonucleotide primer for the detection of SNP TSC0054811
ttgaattatgta

SEQ ID NO: 364929 - DNA, 12 bp, Artificial Sequence
  Oligonucleotide primer for the detection of SNP TSC0054812
taaatactaaac

SEQ ID NO: 364930 - DNA, 12 bp, Artificial Sequence
  Oligonucleotide primer for the detection of SNP TSC0054812
atttataattgg

SEQ ID NO: 364931 - DNA, 12 bp, Artificial Sequence
  Oligonucleotide primer for the detection of SNP TSC0054813
ttatattttcaa

SEQ ID NO: 364932 - DNA, 12 bp, Artificial Sequence
  Oligonucleotide primer for the detection of SNP TSC0054814
atttagattttt

SEQ ID NO: 364933 - DNA, 12 bp, Artificial Sequence
  Oligonucleotide primer for the detection of SNP TSC0054814
attcaaaccccc

SEQ ID NO: 364934 - DNA, 12 bp, Artificial Sequence
  Oligonucleotide primer for the detection of SNP TSC0054814
agatttagtttt

SEQ ID NO: 364935 - DNA, 12 bp, Artificial Sequence
  Oligonucleotide primer for the detection of SNP TSC0054815
gtattaattata

SEQ ID NO: 364936 - DNA, 12 bp, Artificial Sequence
  Oligonucleotide primer for the detection of SNP TSC0054817
tacttaaattaa

SEQ ID NO: 364937 - DNA, 12 bp, Artificial Sequence
  Oligonucleotide primer for the detection of SNP TSC0054817
ttaatttaagta

SEQ ID NO: 364938 - DNA, 12 bp, Artificial Sequence
  Oligonucleotide primer for the detection of SNP TSC0054817
tcaacttaaata

SEQ ID NO: 364939 - DNA, 12 bp, Artificial Sequence
  Oligonucleotide primer for the detection of SNP TSC0054817
tatttaagttgg

SEQ ID NO: 364940 - DNA, 12 bp, Artificial Sequence
  Oligonucleotide primer for the detection of SNP TSC0054818
caaacgataaac

SEQ ID NO: 364941 - DNA, 12 bp, Artificial Sequence
  Oligonucleotide primer for the detection of SNP TSC0054818
gtgtatatatga

SEQ ID NO: 364942 - DNA, 12 bp, Artificial Sequence
  Oligonucleotide primer for the detection of SNP TSC0054819
ataaccccacta

SEQ ID NO: 364943 - DNA, 12 bp, Artificial Sequence
  Oligonucleotide primer for the detection of SNP TSC0054819
gagtattgtgag

SEQ ID NO: 364944 - DNA, 12 bp, Artificial Sequence
  Oligonucleotide primer for the detection of SNP TSC0054819
atggttttatta

SEQ ID NO: 364945 - DNA, 12 bp, Artificial Sequence
  Oligonucleotide primer for the detection of SNP TSC0005474
ctctttaaaatt

SEQ ID NO: 364946 - DNA, 12 bp, Artificial Sequence
  Oligonucleotide primer for the detection of SNP TSC0005474
tggaataatttg

SEQ ID NO: 364947 - DNA, 12 bp, Artificial Sequence
  Oligonucleotide primer for the detection of SNP TSC0005474
taaaataaccta

SEQ ID NO: 364948 - DNA, 12 bp, Artificial Sequence
  Oligonucleotide primer for the detection of SNP TSC0005475
acaatatcataa

SEQ ID NO: 364949 - DNA, 12 bp, Artificial Sequence
  Oligonucleotide primer for the detection of SNP TSC0005476
atttcttaataa

SEQ ID NO: 364950 - DNA, 12 bp, Artificial Sequence
  Oligonucleotide primer for the detection of SNP TSC0005476
gggagaagttat

SEQ ID NO: 364951 - DNA, 12 bp, Artificial Sequence
  Oligonucleotide primer for the detection of SNP TSC0009036
tttttaatttga

SEQ ID NO: 364952 - DNA, 12 bp, Artificial Sequence
  Oligonucleotide primer for the detection of SNP TSC0054825
ccaaatatttat

SEQ ID NO: 364953 - DNA, 12 bp, Artificial Sequence
  Oligonucleotide primer for the detection of SNP TSC0054825
gtaatagatgtt

SEQ ID NO: 364954 - DNA, 12 bp, Artificial Sequence
  Oligonucleotide primer for the detection of SNP TSC0054825
ttaaatgtttat

SEQ ID NO: 364955 - DNA, 12 bp, Artificial Sequence
  Oligonucleotide primer for the detection of SNP TSC0054826
cttacattcttt

SEQ ID NO: 364956 - DNA, 12 bp, Artificial Sequence
  Oligonucleotide primer for the detection of SNP TSC0054829
ttagttgtaaaa

SEQ ID NO: 364957 - DNA, 12 bp, Artificial Sequence
  Oligonucleotide primer for the detection of SNP TSC0054834
ttagggtttaag

SEQ ID NO: 364958 - DNA, 12 bp, Artificial Sequence
  Oligonucleotide primer for the detection of SNP TSC0054835
ccacatcttcac

SEQ ID NO: 364959 - DNA, 12 bp, Artificial Sequence
  Oligonucleotide primer for the detection of SNP TSC0054835
gggtttgtggtt

SEQ ID NO: 364960 - DNA, 12 bp, Artificial Sequence
  Oligonucleotide primer for the detection of SNP TSC0054836
aaccctatctca

SEQ ID NO: 364961 - DNA, 12 bp, Artificial Sequence
  Oligonucleotide primer for the detection of SNP TSC0054837
aataattaaata

SEQ ID NO: 364962 - DNA, 12 bp, Artificial Sequence
  Oligonucleotide primer for the detection of SNP TSC0054837
aatgaattattt

SEQ ID NO: 364963 - DNA, 12 bp, Artificial Sequence
  Oligonucleotide primer for the detection of SNP TSC0054837
aataaattactt

SEQ ID NO: 364964 - DNA, 12 bp, Artificial Sequence
  Oligonucleotide primer for the detection of SNP TSC0054837
agatggttggat

SEQ ID NO: 364965 - DNA, 12 bp, Artificial Sequence
  Oligonucleotide primer for the detection of SNP TSC0054838
tattaaggttgg

SEQ ID NO: 364966 - DNA, 12 bp, Artificial Sequence
  Oligonucleotide primer for the detection of SNP TSC0054839
atatctttacaa

SEQ ID NO: 364967 - DNA, 12 bp, Artificial Sequence
  Oligonucleotide primer for the detection of SNP TSC0054839
gtttaatattga

SEQ ID NO: 364968 - DNA, 12 bp, Artificial Sequence
  Oligonucleotide primer for the detection of SNP TSC0054839
acttaacactaa

SEQ ID NO: 364969 - DNA, 12 bp, Artificial Sequence
  Oligonucleotide primer for the detection of SNP TSC0054839
gtgtttttataa

SEQ ID NO: 364970 - DNA, 12 bp, Artificial Sequence
  Oligonucleotide primer for the detection of SNP TSC0054841
tttacaaaacaa

SEQ ID NO: 364971 - DNA, 12 bp, Artificial Sequence
  Oligonucleotide primer for the detection of SNP TSC0054841
gatgttaagaat

SEQ ID NO: 364972 - DNA, 12 bp, Artificial Sequence
  Oligonucleotide primer for the detection of SNP TSC0054841
tttataaagtaa

SEQ ID NO: 364973 - DNA, 12 bp, Artificial Sequence
  Oligonucleotide primer for the detection of SNP TSC0054842
acataaacatat

SEQ ID NO: 364974 - DNA, 12 bp, Artificial Sequence
  Oligonucleotide primer for the detection of SNP TSC0054842
acgtaaacatat

SEQ ID NO: 364975 - DNA, 12 bp, Artificial Sequence
  Oligonucleotide primer for the detection of SNP TSC0054842
ttaggaaatata

SEQ ID NO: 364976 - DNA, 12 bp, Artificial Sequence
  Oligonucleotide primer for the detection of SNP TSC0054842
atgtgagtatgt

SEQ ID NO: 364977 - DNA, 12 bp, Artificial Sequence
  Oligonucleotide primer for the detection of SNP TSC0054842
acgtgagtatgt

SEQ ID NO: 364978 - DNA, 12 bp, Artificial Sequence
  Oligonucleotide primer for the detection of SNP TSC0054843
ctttcttaatcc

SEQ ID NO: 364979 - DNA, 12 bp, Artificial Sequence
  Oligonucleotide primer for the detection of SNP TSC0054847
gttgtaatttta

SEQ ID NO: 364980 - DNA, 12 bp, Artificial Sequence
  Oligonucleotide primer for the detection of SNP TSC0054848
ccccatccccta

SEQ ID NO: 364981 - DNA, 12 bp, Artificial Sequence
  Oligonucleotide primer for the detection of SNP TSC0054848
tgagtgggaggt

SEQ ID NO: 364982 - DNA, 12 bp, Artificial Sequence
  Oligonucleotide primer for the detection of SNP TSC0054848
tgagcgggaggt

SEQ ID NO: 364983 - DNA, 12 bp, Artificial Sequence
  Oligonucleotide primer for the detection of SNP TSC0054848
ataaacgaaaaa

SEQ ID NO: 364984 - DNA, 12 bp, Artificial Sequence
  Oligonucleotide primer for the detection of SNP TSC0054850
cattataatttt

SEQ ID NO: 364985 - DNA, 12 bp, Artificial Sequence
  Oligonucleotide primer for the detection of SNP TSC0054850
aagtgatggtag

SEQ ID NO: 364986 - DNA, 12 bp, Artificial Sequence
  Oligonucleotide primer for the detection of SNP TSC0054850
aagtgacggtag

SEQ ID NO: 364987 - DNA, 12 bp, Artificial Sequence
  Oligonucleotide primer for the detection of SNP TSC0054851
ataaaactattt

SEQ ID NO: 364988 - DNA, 12 bp, Artificial Sequence
  Oligonucleotide primer for the detection of SNP TSC0054852
atatctaaattt

SEQ ID NO: 364989 - DNA, 12 bp, Artificial Sequence
  Oligonucleotide primer for the detection of SNP TSC0054852
atattttggata

SEQ ID NO: 364990 - DNA, 12 bp, Artificial Sequence
  Oligonucleotide primer for the detection of SNP TSC0054855
atgtgtattatt

SEQ ID NO: 364991 - DNA, 12 bp, Artificial Sequence
  Oligonucleotide primer for the detection of SNP TSC0054855
acgtgtattatt

SEQ ID NO: 364992 - DNA, 12 bp, Artificial Sequence
  Oligonucleotide primer for the detection of SNP TSC0054855
acgtacaccacc

SEQ ID NO: 364993 - DNA, 12 bp, Artificial Sequence
  Oligonucleotide primer for the detection of SNP TSC0007478
aataagattgta

SEQ ID NO: 364994 - DNA, 12 bp, Artificial Sequence
  Oligonucleotide primer for the detection of SNP TSC0005221
cctatattccta

SEQ ID NO: 364995 - DNA, 12 bp, Artificial Sequence
  Oligonucleotide primer for the detection of SNP TSC0005221
ctccaaaaactt

SEQ ID NO: 364996 - DNA, 12 bp, Artificial Sequence
  Oligonucleotide primer for the detection of SNP TSC0054860
ctctcaatctct

SEQ ID NO: 364997 - DNA, 12 bp, Artificial Sequence
  Oligonucleotide primer for the detection of SNP TSC0054860
ttagttttgaaa

SEQ ID NO: 364998 - DNA, 12 bp, Artificial Sequence
  Oligonucleotide primer for the detection of SNP TSC0007576
cctctcctattt

SEQ ID NO: 364999 - DNA, 12 bp, Artificial Sequence
  Oligonucleotide primer for the detection of SNP TSC0007577
acaatatccact

SEQ ID NO: 365000 - DNA, 12 bp, Artificial Sequence
  Oligonucleotide primer for the detection of SNP TSC0007577
gcaatatccact

SEQ ID NO: 365001 - DNA, 12 bp, Artificial Sequence
  Oligonucleotide primer for the detection of SNP TSC0054862
aaattaaactct

SEQ ID NO: 365002 - DNA, 12 bp, Artificial Sequence
  Oligonucleotide primer for the detection of SNP TSC0054862
aggttaaatttt

SEQ ID NO: 365003 - DNA, 12 bp, Artificial Sequence
  Oligonucleotide primer for the detection of SNP TSC0054863
ctctaaaatcct

SEQ ID NO: 365004 - DNA, 12 bp, Artificial Sequence
  Oligonucleotide primer for the detection of SNP TSC0054863
tgtagttaagaa

SEQ ID NO: 365005 - DNA, 12 bp, Artificial Sequence
  Oligonucleotide primer for the detection of SNP TSC0054864
aaaaatttttca

SEQ ID NO: 365006 - DNA, 12 bp, Artificial Sequence
  Oligonucleotide primer for the detection of SNP TSC0054864
aatgatatgttt

SEQ ID NO: 365007 - DNA, 12 bp, Artificial Sequence
  Oligonucleotide primer for the detection of SNP TSC0054864
ataatatactta

SEQ ID NO: 365008 - DNA, 12 bp, Artificial Sequence
  Oligonucleotide primer for the detection of SNP TSC0054867
ggatatataagg

SEQ ID NO: 365009 - DNA, 12 bp, Artificial Sequence
  Oligonucleotide primer for the detection of SNP TSC0054867
aaacatacaaaa

SEQ ID NO: 365010 - DNA, 12 bp, Artificial Sequence
  Oligonucleotide primer for the detection of SNP TSC0054867
agatgggttgtt

SEQ ID NO: 365011 - DNA, 12 bp, Artificial Sequence
  Oligonucleotide primer for the detection of SNP TSC0054868
ctaaattcaaaa

SEQ ID NO: 365012 - DNA, 12 bp, Artificial Sequence
  Oligonucleotide primer for the detection of SNP TSC0054873
ctctaaataaat

SEQ ID NO: 365013 - DNA, 12 bp, Artificial Sequence
  Oligonucleotide primer for the detection of SNP TSC0054873
ttttagtttaaa

SEQ ID NO: 365014 - DNA, 12 bp, Artificial Sequence
  Oligonucleotide primer for the detection of SNP TSC0054874
ttttgtgtattt

SEQ ID NO: 365015 - DNA, 12 bp, Artificial Sequence
  Oligonucleotide primer for the detection of SNP TSC0054874
cttttatatatc

SEQ ID NO: 365016 - DNA, 12 bp, Artificial Sequence
  Oligonucleotide primer for the detection of SNP TSC0054874
ggttgggaggag

SEQ ID NO: 365017 - DNA, 12 bp, Artificial Sequence
  Oligonucleotide primer for the detection of SNP TSC0054875
acaatttcacat

SEQ ID NO: 365018 - DNA, 12 bp, Artificial Sequence
  Oligonucleotide primer for the detection of SNP TSC0054875
acgatttcacat

SEQ ID NO: 365019 - DNA, 12 bp, Artificial Sequence
  Oligonucleotide primer for the detection of SNP TSC0054875
taaaatgaaagt

SEQ ID NO: 365020 - DNA, 12 bp, Artificial Sequence
  Oligonucleotide primer for the detection of SNP TSC0054875
taaaacgaaagt

SEQ ID NO: 365021 - DNA, 12 bp, Artificial Sequence
  Oligonucleotide primer for the detection of SNP TSC0054875
tgattttatatt

SEQ ID NO: 365022 - DNA, 12 bp, Artificial Sequence
  Oligonucleotide primer for the detection of SNP TSC0054875
cgattttatatt

SEQ ID NO: 365023 - DNA, 12 bp, Artificial Sequence
  Oligonucleotide primer for the detection of SNP TSC0054876
tctacaaaatta

SEQ ID NO: 365024 - DNA, 12 bp, Artificial Sequence
  Oligonucleotide primer for the detection of SNP TSC0054876
tttttaggtagt

SEQ ID NO: 365025 - DNA, 12 bp, Artificial Sequence
  Oligonucleotide primer for the detection of SNP TSC0054876
tttttaggtagc

SEQ ID NO: 365026 - DNA, 12 bp, Artificial Sequence
  Oligonucleotide primer for the detection of SNP TSC0054876
tctccaaataac

SEQ ID NO: 365027 - DNA, 12 bp, Artificial Sequence
  Oligonucleotide primer for the detection of SNP TSC0054876
ttatagaattat

SEQ ID NO: 365028 - DNA, 12 bp, Artificial Sequence
  Oligonucleotide primer for the detection of SNP TSC0054877
aacaaacactaa

SEQ ID NO: 365029 - DNA, 12 bp, Artificial Sequence
  Oligonucleotide primer for the detection of SNP TSC0054877
taatctatacca

SEQ ID NO: 365030 - DNA, 12 bp, Artificial Sequence
  Oligonucleotide primer for the detection of SNP TSC0054877
ataatagatatt

SEQ ID NO: 365031 - DNA, 12 bp, Artificial Sequence
  Oligonucleotide primer for the detection of SNP TSC0054878
caattcaactat

SEQ ID NO: 365032 - DNA, 12 bp, Artificial Sequence
  Oligonucleotide primer for the detection of SNP TSC0054878
tagattttataa

SEQ ID NO: 365033 - DNA, 12 bp, Artificial Sequence
  Oligonucleotide primer for the detection of SNP TSC0054878
taaactttataa

SEQ ID NO: 365034 - DNA, 12 bp, Artificial Sequence
  Oligonucleotide primer for the detection of SNP TSC0054878
tagtttagttat

SEQ ID NO: 365035 - DNA, 12 bp, Artificial Sequence
  Oligonucleotide primer for the detection of SNP TSC0054880
aatattttccaa

SEQ ID NO: 365036 - DNA, 12 bp, Artificial Sequence
  Oligonucleotide primer for the detection of SNP TSC0054880
taagagaagtat

SEQ ID NO: 365037 - DNA, 12 bp, Artificial Sequence
  Oligonucleotide primer for the detection of SNP TSC0054881
ttccctttaaat

SEQ ID NO: 365038 - DNA, 12 bp, Artificial Sequence
  Oligonucleotide primer for the detection of SNP TSC0054881
gggattagaagg

SEQ ID NO: 365039 - DNA, 12 bp, Artificial Sequence
  Oligonucleotide primer for the detection of SNP TSC0054882
aaaatggaatag

SEQ ID NO: 365040 - DNA, 12 bp, Artificial Sequence
  Oligonucleotide primer for the detection of SNP TSC0054884
acataatactat

SEQ ID NO: 365041 - DNA, 12 bp, Artificial Sequence
  Oligonucleotide primer for the detection of SNP TSC0054884
atccccaaacaa

SEQ ID NO: 365042 - DNA, 12 bp, Artificial Sequence
  Oligonucleotide primer for the detection of SNP TSC0054884
atatggtattat

SEQ ID NO: 365043 - DNA, 12 bp, Artificial Sequence
  Oligonucleotide primer for the detection of SNP TSC0054885
gtgtgatatatt

SEQ ID NO: 365044 - DNA, 12 bp, Artificial Sequence
  Oligonucleotide primer for the detection of SNP TSC0054885
taatataatata

SEQ ID NO: 365045 - DNA, 12 bp, Artificial Sequence
  Oligonucleotide primer for the detection of SNP TSC0054885
taagaaaaagtt

SEQ ID NO: 365046 - DNA, 12 bp, Artificial Sequence
  Oligonucleotide primer for the detection of SNP TSC0054886
tatctctacata

SEQ ID NO: 365047 - DNA, 12 bp, Artificial Sequence
  Oligonucleotide primer for the detection of SNP TSC0054886
tgtgtgtgtatt

SEQ ID NO: 365048 - DNA, 12 bp, Artificial Sequence
  Oligonucleotide primer for the detection of SNP TSC0054886
atatatacatta

SEQ ID NO: 365049 - DNA, 12 bp, Artificial Sequence
  Oligonucleotide primer for the detection of SNP TSC0054887
caaaaaaacctt

SEQ ID NO: 365050 - DNA, 12 bp, Artificial Sequence
  Oligonucleotide primer for the detection of SNP TSC0054887
cgaaaaaacctt

SEQ ID NO: 365051 - DNA, 12 bp, Artificial Sequence
  Oligonucleotide primer for the detection of SNP TSC0054887
ttatgtgattaa

SEQ ID NO: 365052 - DNA, 12 bp, Artificial Sequence
  Oligonucleotide primer for the detection of SNP TSC0054888
tttaaaaatatc

SEQ ID NO: 365053 - DNA, 12 bp, Artificial Sequence
  Oligonucleotide primer for the detection of SNP TSC0054889
tgtttgtgtgaa

SEQ ID NO: 365054 - DNA, 12 bp, Artificial Sequence
  Oligonucleotide primer for the detection of SNP TSC0054890
tttttaaccatt

SEQ ID NO: 365055 - DNA, 12 bp, Artificial Sequence
  Oligonucleotide primer for the detection of SNP TSC0054890
attggataataa

SEQ ID NO: 365056 - DNA, 12 bp, Artificial Sequence
  Oligonucleotide primer for the detection of SNP TSC0054890
actaaacaataa

SEQ ID NO: 365057 - DNA, 12 bp, Artificial Sequence
  Oligonucleotide primer for the detection of SNP TSC0054891
ttaaccattata

SEQ ID NO: 365058 - DNA, 12 bp, Artificial Sequence
  Oligonucleotide primer for the detection of SNP TSC0054891
aattggataata

SEQ ID NO: 365059 - DNA, 12 bp, Artificial Sequence
  Oligonucleotide primer for the detection of SNP TSC0054891
aactaaacaata

SEQ ID NO: 365060 - DNA, 12 bp, Artificial Sequence
  Oligonucleotide primer for the detection of SNP TSC0054891
ttggttattatg

SEQ ID NO: 365061 - DNA, 12 bp, Artificial Sequence
  Oligonucleotide primer for the detection of SNP TSC0054894
tatggattaata

SEQ ID NO: 365062 - DNA, 12 bp, Artificial Sequence
  Oligonucleotide primer for the detection of SNP TSC0054896
ctcaataatatt

SEQ ID NO: 365063 - DNA, 12 bp, Artificial Sequence
  Oligonucleotide primer for the detection of SNP TSC0054896
agtgtttaagtt

SEQ ID NO: 365064 - DNA, 12 bp, Artificial Sequence
  Oligonucleotide primer for the detection of SNP TSC0054896
aatacccaaacc

SEQ ID NO: 365065 - DNA, 12 bp, Artificial Sequence
  Oligonucleotide primer for the detection of SNP TSC0007801
caatactaatac

SEQ ID NO: 365066 - DNA, 12 bp, Artificial Sequence
  Oligonucleotide primer for the detection of SNP TSC0007801
cgatactaatac

SEQ ID NO: 365067 - DNA, 12 bp, Artificial Sequence
  Oligonukleotid-Primer
gtgagaaattag

SEQ ID NO: 365068 - DNA, 12 bp, Artificial Sequence
  Oligonucleotide primer for the detection of SNP TSC0007801
tgatgttggtgt

SEQ ID NO: 365069 - DNA, 12 bp, Artificial Sequence
  Oligonucleotide primer for the detection of SNP TSC0007801
cgatgttggtgt

SEQ ID NO: 365070 - DNA, 12 bp, Artificial Sequence
  Oligonucleotide primer for the detection of SNP TSC0054900
tctataacatta

SEQ ID NO: 365071 - DNA, 12 bp, Artificial Sequence
  Oligonucleotide primer for the detection of SNP TSC0054900
tggattgtatat

SEQ ID NO: 365072 - DNA, 12 bp, Artificial Sequence
  Oligonucleotide primer for the detection of SNP TSC0054900
aaattacatata

SEQ ID NO: 365073 - DNA, 12 bp, Artificial Sequence
  Oligonucleotide primer for the detection of SNP TSC0054900
tagtattgtttt

SEQ ID NO: 365074 - DNA, 12 bp, Artificial Sequence
  Oligonucleotide primer for the detection of SNP TSC0054901
caactttctaca

SEQ ID NO: 365075 - DNA, 12 bp, Artificial Sequence
  Oligonucleotide primer for the detection of SNP TSC0054901
tgatattaaggt

SEQ ID NO: 365076 - DNA, 12 bp, Artificial Sequence
  Oligonucleotide primer for the detection of SNP TSC0054901
tgatattaaggc

SEQ ID NO: 365077 - DNA, 12 bp, Artificial Sequence
  Oligonucleotide primer for the detection of SNP TSC0054901
taatatcaaaac

SEQ ID NO: 365078 - DNA, 12 bp, Artificial Sequence
  Oligonucleotide primer for the detection of SNP TSC0054903
gagaatttatat

SEQ ID NO: 365079 - DNA, 12 bp, Artificial Sequence
  Oligonucleotide primer for the detection of SNP TSC0054903
aaagaaaaaata

SEQ ID NO: 365080 - DNA, 12 bp, Artificial Sequence
  Oligonucleotide primer for the detection of SNP TSC0054904
ttcttataactc

SEQ ID NO: 365081 - DNA, 12 bp, Artificial Sequence
  Oligonucleotide primer for the detection of SNP TSC0054904
gatatagaatta

SEQ ID NO: 365082 - DNA, 12 bp, Artificial Sequence
  Oligonucleotide primer for the detection of SNP TSC0054906
ggagatgagggt

SEQ ID NO: 365083 - DNA, 12 bp, Artificial Sequence
  Oligonucleotide primer for the detection of SNP TSC0054906
ggagacgagggt

SEQ ID NO: 365084 - DNA, 12 bp, Artificial Sequence
  Oligonucleotide primer for the detection of SNP TSC0054906
ttgtatagtggg

SEQ ID NO: 365085 - DNA, 12 bp, Artificial Sequence
  Oligonucleotide primer for the detection of SNP TSC0054907
ccaaaatccatc

SEQ ID NO: 365086 - DNA, 12 bp, Artificial Sequence
  Oligonucleotide primer for the detection of SNP TSC0054907
gggtttgggttg

SEQ ID NO: 365087 - DNA, 12 bp, Artificial Sequence
  Oligonucleotide primer for the detection of SNP TSC0054907
aacctaaattaa

SEQ ID NO: 365088 - DNA, 12 bp, Artificial Sequence
  Oligonucleotide primer for the detection of SNP TSC0054908
ttacaaaactat

SEQ ID NO: 365089 - DNA, 12 bp, Artificial Sequence
  Oligonucleotide primer for the detection of SNP TSC0054909
ttaacctcaaca

SEQ ID NO: 365090 - DNA, 12 bp, Artificial Sequence
  Oligonucleotide primer for the detection of SNP TSC0054909
attttaaatagt

SEQ ID NO: 365091 - DNA, 12 bp, Artificial Sequence
  Oligonucleotide primer for the detection of SNP TSC0054910
taataacttccc

SEQ ID NO: 365092 - DNA, 12 bp, Artificial Sequence
  Oligonucleotide primer for the detection of SNP TSC0054911
tagttaggtatg

SEQ ID NO: 365093 - DNA, 12 bp, Artificial Sequence
  Oligonucleotide primer for the detection of SNP TSC0054912
taatattctttc

SEQ ID NO: 365094 - DNA, 12 bp, Artificial Sequence
  Oligonucleotide primer for the detection of SNP TSC0054912
tataggatgatg

SEQ ID NO: 365095 - DNA, 12 bp, Artificial Sequence
  Oligonucleotide primer for the detection of SNP TSC0054913
caaaccaccata

SEQ ID NO: 365096 - DNA, 12 bp, Artificial Sequence
  Oligonucleotide primer for the detection of SNP TSC0054913
aggtatatatgt

SEQ ID NO: 365097 - DNA, 12 bp, Artificial Sequence
  Oligonucleotide primer for the detection of SNP TSC0054913
aggtatatacgt

SEQ ID NO: 365098 - DNA, 12 bp, Artificial Sequence
  Oligonucleotide primer for the detection of SNP TSC0054913
aatatacacata

SEQ ID NO: 365099 - DNA, 12 bp, Artificial Sequence
  Oligonucleotide primer for the detection of SNP TSC0054913
aatatacacgta

SEQ ID NO: 365100 - DNA, 12 bp, Artificial Sequence
  Oligonucleotide primer for the detection of SNP TSC0054914
tagtggttttta

SEQ ID NO: 365101 - DNA, 12 bp, Artificial Sequence
  Oligonucleotide primer for the detection of SNP TSC0054915
cggttggatttt

SEQ ID NO: 365102 - DNA, 12 bp, Artificial Sequence
  Oligonucleotide primer for the detection of SNP TSC0054915
caattaaatttt

SEQ ID NO: 365103 - DNA, 12 bp, Artificial Sequence
  Oligonucleotide primer for the detection of SNP TSC0054915
cgattaaatttt

SEQ ID NO: 365104 - DNA, 12 bp, Artificial Sequence
  Oligonucleotide primer for the detection of SNP TSC0054915
tgtttaaaaaaa

SEQ ID NO: 365105 - DNA, 12 bp, Artificial Sequence
  Oligonucleotide primer for the detection of SNP TSC0054916
ttacacccttcc

SEQ ID NO: 365106 - DNA, 12 bp, Artificial Sequence
  Oligonucleotide primer for the detection of SNP TSC0054916
atttttagtaag

SEQ ID NO: 365107 - DNA, 12 bp, Artificial Sequence
  Oligonucleotide primer for the detection of SNP TSC0054916
acctccaacaaa

SEQ ID NO: 365108 - DNA, 12 bp, Artificial Sequence
  Oligonucleotide primer for the detection of SNP TSC0054917
acacaaaataat

SEQ ID NO: 365109 - DNA, 12 bp, Artificial Sequence
  Oligonucleotide primer for the detection of SNP TSC0054917
gtataaaataat

SEQ ID NO: 365110 - DNA, 12 bp, Artificial Sequence
  Oligonucleotide primer for the detection of SNP TSC0054920
gggtttgtatta

SEQ ID NO: 365111 - DNA, 12 bp, Artificial Sequence
  Oligonucleotide primer for the detection of SNP TSC0054921
aaaggttaggag

SEQ ID NO: 365112 - DNA, 12 bp, Artificial Sequence
  Oligonucleotide primer for the detection of SNP TSC0054922
attttttaaagg

SEQ ID NO: 365113 - DNA, 12 bp, Artificial Sequence
  Oligonucleotide primer for the detection of SNP TSC0054922
attttccaaaaa

SEQ ID NO: 365114 - DNA, 12 bp, Artificial Sequence
  Oligonucleotide primer for the detection of SNP TSC0054922
agtgttatttat

SEQ ID NO: 365115 - DNA, 12 bp, Artificial Sequence
  Oligonucleotide primer for the detection of SNP TSC0054924
acttaaaattcc

SEQ ID NO: 365116 - DNA, 12 bp, Artificial Sequence
  Oligonucleotide primer for the detection of SNP TSC0054924
ggtagttttttg

SEQ ID NO: 365117 - DNA, 12 bp, Artificial Sequence
  Oligonucleotide primer for the detection of SNP TSC0054925
tctaaaccattt

SEQ ID NO: 365118 - DNA, 12 bp, Artificial Sequence
  Oligonucleotide primer for the detection of SNP TSC0054925
gttttttaataa

SEQ ID NO: 365119 - DNA, 12 bp, Artificial Sequence
  Oligonucleotide primer for the detection of SNP TSC0054926
aaatcataaatt

SEQ ID NO: 365120 - DNA, 12 bp, Artificial Sequence
  Oligonucleotide primer for the detection of SNP TSC0054926
tatattttgaaa

SEQ ID NO: 365121 - DNA, 12 bp, Artificial Sequence
  Oligonucleotide primer for the detection of SNP TSC0054927
taataatattct

SEQ ID NO: 365122 - DNA, 12 bp, Artificial Sequence
  Oligonucleotide primer for the detection of SNP TSC0054927
tttttcttttta

SEQ ID NO: 365123 - DNA, 12 bp, Artificial Sequence
  Oligonucleotide primer for the detection of SNP TSC0054927
taatgatgtttt

SEQ ID NO: 365124 - DNA, 12 bp, Artificial Sequence
  Oligonucleotide primer for the detection of SNP TSC0054928
ctaaactcactt

SEQ ID NO: 365125 - DNA, 12 bp, Artificial Sequence
  Oligonucleotide primer for the detection of SNP TSC0054928
gtggattagaag

SEQ ID NO: 365126 - DNA, 12 bp, Artificial Sequence
  Oligonucleotide primer for the detection of SNP TSC0054930
ttaaagagtagg

SEQ ID NO: 365127 - DNA, 12 bp, Artificial Sequence
  Oligonucleotide primer for the detection of SNP TSC0054932
gtattagggtta

SEQ ID NO: 365128 - DNA, 12 bp, Artificial Sequence
  Oligonucleotide primer for the detection of SNP TSC0054933
ataaagggatta

SEQ ID NO: 365129 - DNA, 12 bp, Artificial Sequence
  Oligonucleotide primer for the detection of SNP TSC0054934
aattaaattatt

SEQ ID NO: 365130 - DNA, 12 bp, Artificial Sequence
  Oligonucleotide primer for the detection of SNP TSC0054934
aactaaattact

SEQ ID NO: 365131 - DNA, 12 bp, Artificial Sequence
  Oligonukleotid-Primer
aattacatatac

SEQ ID NO: 365132 - DNA, 12 bp, Artificial Sequence
  Oligonucleotide primer for the detection of SNP TSC0054935
aattacgtatac

SEQ ID NO: 365133 - DNA, 12 bp, Artificial Sequence
  Oligonucleotide primer for the detection of SNP TSC0054935
gattatgtatgt

SEQ ID NO: 365134 - DNA, 12 bp, Artificial Sequence
  Oligonucleotide primer for the detection of SNP TSC0054935
gattacgtatgt

SEQ ID NO: 365135 - DNA, 12 bp, Artificial Sequence
  Oligonucleotide primer for the detection of SNP TSC0054938
atcaaaataccc

SEQ ID NO: 365136 - DNA, 12 bp, Artificial Sequence
  Oligonucleotide primer for the detection of SNP TSC0054939
ttttggtcgttt

SEQ ID NO: 365137 - DNA, 12 bp, Artificial Sequence
  Oligonucleotide primer for the detection of SNP TSC0054939
ccctaatcactc

SEQ ID NO: 365138 - DNA, 12 bp, Artificial Sequence
  Oligonucleotide primer for the detection of SNP TSC0054939
ccctaatcgctc

SEQ ID NO: 365139 - DNA, 12 bp, Artificial Sequence
  Oligonucleotide primer for the detection of SNP TSC0054939
gtgggagatgga

SEQ ID NO: 365140 - DNA, 12 bp, Artificial Sequence
  Oligonucleotide primer for the detection of SNP TSC0054940
gtataaaaattt

SEQ ID NO: 365141 - DNA, 12 bp, Artificial Sequence
  Oligonucleotide primer for the detection of SNP TSC0054940
taactatctata

SEQ ID NO: 365142 - DNA, 12 bp, Artificial Sequence
  Oligonucleotide primer for the detection of SNP TSC0054940
gtgtgggagttt

SEQ ID NO: 365143 - DNA, 12 bp, Artificial Sequence
  Oligonucleotide primer for the detection of SNP TSC0009496
ctataaaattcc

SEQ ID NO: 365144 - DNA, 12 bp, Artificial Sequence
  Oligonucleotide primer for the detection of SNP TSC0009496
ttcccttctaaa

SEQ ID NO: 365145 - DNA, 12 bp, Artificial Sequence
  Oligonucleotide primer for the detection of SNP TSC0054942
gtttatagagtt

SEQ ID NO: 365146 - DNA, 12 bp, Artificial Sequence
  Oligonucleotide primer for the detection of SNP TSC0054942
tctacaaaacta

SEQ ID NO: 365147 - DNA, 12 bp, Artificial Sequence
  Oligonucleotide primer for the detection of SNP TSC0054942
gaaatattgtaa

SEQ ID NO: 365148 - DNA, 12 bp, Artificial Sequence
  Oligonucleotide primer for the detection of SNP TSC0054944
attatcctatat

SEQ ID NO: 365149 - DNA, 12 bp, Artificial Sequence
  Oligonucleotide primer for the detection of SNP TSC0054945
taatccttccca

SEQ ID NO: 365150 - DNA, 12 bp, Artificial Sequence
  Oligonucleotide primer for the detection of SNP TSC0054945
gttgattggtgt

SEQ ID NO: 365151 - DNA, 12 bp, Artificial Sequence
  Oligonucleotide primer for the detection of SNP TSC0054945
actaactaatac

SEQ ID NO: 365152 - DNA, 12 bp, Artificial Sequence
  Oligonucleotide primer for the detection of SNP TSC0054946
aaaaacctcact

SEQ ID NO: 365153 - DNA, 12 bp, Artificial Sequence
  Oligonucleotide primer for the detection of SNP TSC0054946
aaattgagtttt

SEQ ID NO: 365154 - DNA, 12 bp, Artificial Sequence
  Oligonucleotide primer for the detection of SNP TSC0054947
taccttaattac

SEQ ID NO: 365155 - DNA, 12 bp, Artificial Sequence
  Oligonucleotide primer for the detection of SNP TSC0054948
aatttttgttag

SEQ ID NO: 365156 - DNA, 12 bp, Artificial Sequence
  Oligonucleotide primer for the detection of SNP TSC0054948
aacctttatcaa

SEQ ID NO: 365157 - DNA, 12 bp, Artificial Sequence
  Oligonucleotide primer for the detection of SNP TSC0054948
gttgataaaggt

SEQ ID NO: 365158 - DNA, 12 bp, Artificial Sequence
  Oligonucleotide primer for the detection of SNP TSC0054949
acacacacgtac

SEQ ID NO: 365159 - DNA, 12 bp, Artificial Sequence
  Oligonucleotide primer for the detection of SNP TSC0054949
acacgcacatac

SEQ ID NO: 365160 - DNA, 12 bp, Artificial Sequence
  Oligonucleotide primer for the detection of SNP TSC0054949
acacgcacgtac

SEQ ID NO: 365161 - DNA, 12 bp, Artificial Sequence
  Oligonucleotide primer for the detection of SNP TSC0054949
atatgtatgtgt

SEQ ID NO: 365162 - DNA, 12 bp, Artificial Sequence
  Oligonucleotide primer for the detection of SNP TSC0054949
atacgtatgtgt

SEQ ID NO: 365163 - DNA, 12 bp, Artificial Sequence
  Oligonucleotide primer for the detection of SNP TSC0054949
atatgtacgtgt

SEQ ID NO: 365164 - DNA, 12 bp, Artificial Sequence
  Oligonucleotide primer for the detection of SNP TSC0054949
atatgtatgtgc

SEQ ID NO: 365165 - DNA, 12 bp, Artificial Sequence
  Oligonucleotide primer for the detection of SNP TSC0054949
atacgtacgtgt

SEQ ID NO: 365166 - DNA, 12 bp, Artificial Sequence
  Oligonucleotide primer for the detection of SNP TSC0054949
atacgtatgtgc

SEQ ID NO: 365167 - DNA, 12 bp, Artificial Sequence
  Oligonucleotide primer for the detection of SNP TSC0054949
atatgtacgtgc

SEQ ID NO: 365168 - DNA, 12 bp, Artificial Sequence
  Oligonucleotide primer for the detection of SNP TSC0054949
atacgtacgtgc

SEQ ID NO: 365169 - DNA, 12 bp, Artificial Sequence
  Oligonucleotide primer for the detection of SNP TSC0054950
aactctaaatct

SEQ ID NO: 365170 - DNA, 12 bp, Artificial Sequence
  Oligonucleotide primer for the detection of SNP TSC0054950
tttaggaataaa

SEQ ID NO: 365171 - DNA, 12 bp, Artificial Sequence
  Oligonucleotide primer for the detection of SNP TSC0054952
tatttacattat

SEQ ID NO: 365172 - DNA, 12 bp, Artificial Sequence
  Oligonucleotide primer for the detection of SNP TSC0054952
gatataagtgtg

SEQ ID NO: 365173 - DNA, 12 bp, Artificial Sequence
  Oligonucleotide primer for the detection of SNP TSC0054952
gatataagcgtg

SEQ ID NO: 365174 - DNA, 12 bp, Artificial Sequence
  Oligonucleotide primer for the detection of SNP TSC0054953
ctactctatcca

SEQ ID NO: 365175 - DNA, 12 bp, Artificial Sequence
  Oligonucleotide primer for the detection of SNP TSC0054953
aaagtaggttat

SEQ ID NO: 365176 - DNA, 12 bp, Artificial Sequence
  Oligonucleotide primer for the detection of SNP TSC0054953
aaaataaatcat

SEQ ID NO: 365177 - DNA, 12 bp, Artificial Sequence
  Oligonucleotide primer for the detection of SNP TSC0054954
aaaggtaatatt

SEQ ID NO: 365178 - DNA, 12 bp, Artificial Sequence
  Oligonucleotide primer for the detection of SNP TSC0054954
aaaacaatatca

SEQ ID NO: 365179 - DNA, 12 bp, Artificial Sequence
  Oligonucleotide primer for the detection of SNP TSC0054955
acatttctctct

SEQ ID NO: 365180 - DNA, 12 bp, Artificial Sequence
  Oligonucleotide primer for the detection of SNP TSC0054955
taatgggattgt

SEQ ID NO: 365181 - DNA, 12 bp, Artificial Sequence
  Oligonucleotide primer for the detection of SNP TSC0054955
tcaataaaacta

SEQ ID NO: 365182 - DNA, 12 bp, Artificial Sequence
  Oligonucleotide primer for the detection of SNP TSC0054956
aacctaaatcac

SEQ ID NO: 365183 - DNA, 12 bp, Artificial Sequence
  Oligonucleotide primer for the detection of SNP TSC0054956
gtaggttggatg

SEQ ID NO: 365184 - DNA, 12 bp, Artificial Sequence
  Oligonucleotide primer for the detection of SNP TSC0054956
gtaggtcggatg

SEQ ID NO: 365185 - DNA, 12 bp, Artificial Sequence
  Oligonucleotide primer for the detection of SNP TSC0054956
gtaggttggacg

SEQ ID NO: 365186 - DNA, 12 bp, Artificial Sequence
  Oligonucleotide primer for the detection of SNP TSC0054956
gtaggtcggacg

SEQ ID NO: 365187 - DNA, 12 bp, Artificial Sequence
  Oligonucleotide primer for the detection of SNP TSC0054956
acaaaccaaacg

SEQ ID NO: 365188 - DNA, 12 bp, Artificial Sequence
  Oligonucleotide primer for the detection of SNP TSC0054956
acaaaccgaaca

SEQ ID NO: 365189 - DNA, 12 bp, Artificial Sequence
  Oligonucleotide primer for the detection of SNP TSC0054956
acaaaccgaacg

SEQ ID NO: 365190 - DNA, 12 bp, Artificial Sequence
  Oligonucleotide primer for the detection of SNP TSC0054956
ggtttgagttat

SEQ ID NO: 365191 - DNA, 12 bp, Artificial Sequence
  Oligonucleotide primer for the detection of SNP TSC0054957
aactcctaaact

SEQ ID NO: 365192 - DNA, 12 bp, Artificial Sequence
  Oligonucleotide primer for the detection of SNP TSC0054958
taatgttaggta

SEQ ID NO: 365193 - DNA, 12 bp, Artificial Sequence
  Oligonucleotide primer for the detection of SNP TSC0054965
cttattaaaact

SEQ ID NO: 365194 - DNA, 12 bp, Artificial Sequence
  Oligonucleotide primer for the detection of SNP TSC0054965
tatgaaaattta

SEQ ID NO: 365195 - DNA, 12 bp, Artificial Sequence
  Oligonucleotide primer for the detection of SNP TSC0054966
aatatcatataa

SEQ ID NO: 365196 - DNA, 12 bp, Artificial Sequence
  Oligonucleotide primer for the detection of SNP TSC0054966
aagttttaagtt

SEQ ID NO: 365197 - DNA, 12 bp, Artificial Sequence
  Oligonucleotide primer for the detection of SNP TSC0054966
aaactttaaatt

SEQ ID NO: 365198 - DNA, 12 bp, Artificial Sequence
  Oligonucleotide primer for the detection of SNP TSC0054966
aatgttatatga

SEQ ID NO: 365199 - DNA, 12 bp, Artificial Sequence
  Oligonucleotide primer for the detection of SNP TSC0054967
aacttctacaaa

SEQ ID NO: 365200 - DNA, 12 bp, Artificial Sequence
  Oligonucleotide primer for the detection of SNP TSC0054967
caaactttttaa

SEQ ID NO: 365201 - DNA, 12 bp, Artificial Sequence
  Oligonucleotide primer for the detection of SNP TSC0054967
ggtttttatagg

SEQ ID NO: 365202 - DNA, 12 bp, Artificial Sequence
  Oligonucleotide primer for the detection of SNP TSC0005056
cttacctaacac

SEQ ID NO: 365203 - DNA, 12 bp, Artificial Sequence
  Oligonucleotide primer for the detection of SNP TSC0005056
attaagtgttta

SEQ ID NO: 365204 - DNA, 12 bp, Artificial Sequence
  Oligonucleotide primer for the detection of SNP TSC0054968
tttaaataacac

SEQ ID NO: 365205 - DNA, 12 bp, Artificial Sequence
  Oligonucleotide primer for the detection of SNP TSC0054968
aaaatttgtata

SEQ ID NO: 365206 - DNA, 12 bp, Artificial Sequence
  Oligonucleotide primer for the detection of SNP TSC0054969
ccataaatacct

SEQ ID NO: 365207 - DNA, 12 bp, Artificial Sequence
  Oligonucleotide primer for the detection of SNP TSC0054969
tgtagaatttta

SEQ ID NO: 365208 - DNA, 12 bp, Artificial Sequence
  Oligonucleotide primer for the detection of SNP TSC0054970
cctataaccaat

SEQ ID NO: 365209 - DNA, 12 bp, Artificial Sequence
  Oligonucleotide primer for the detection of SNP TSC0054970
gtgtagagttga

SEQ ID NO: 365210 - DNA, 12 bp, Artificial Sequence
  Oligonucleotide primer for the detection of SNP TSC0054971
ttctctactctt

SEQ ID NO: 365211 - DNA, 12 bp, Artificial Sequence
  Oligonucleotide primer for the detection of SNP TSC0054971
atataatatagg

SEQ ID NO: 365212 - DNA, 12 bp, Artificial Sequence
  Oligonucleotide primer for the detection of SNP TSC0054975
atccttctaatt

SEQ ID NO: 365213 - DNA, 12 bp, Artificial Sequence
  Oligonucleotide primer for the detection of SNP TSC0054975
tattaattgaag

SEQ ID NO: 365214 - DNA, 12 bp, Artificial Sequence
  Oligonucleotide primer for the detection of SNP TSC0054977
atataataatac

SEQ ID NO: 365215 - DNA, 12 bp, Artificial Sequence
  Oligonucleotide primer for the detection of SNP TSC0054977
ggattataggag

SEQ ID NO: 365216 - DNA, 12 bp, Artificial Sequence
  Oligonucleotide primer for the detection of SNP TSC0054977
gtgtggtgatgt

SEQ ID NO: 365217 - DNA, 12 bp, Artificial Sequence
  Oligonucleotide primer for the detection of SNP TSC0054977
gtgtggtgatgc

SEQ ID NO: 365218 - DNA, 12 bp, Artificial Sequence
  Oligonucleotide primer for the detection of SNP TSC0054978
cacaaaaacatt

SEQ ID NO: 365219 - DNA, 12 bp, Artificial Sequence
  Oligonucleotide primer for the detection of SNP TSC0054978
tattagtatgta

SEQ ID NO: 365220 - DNA, 12 bp, Artificial Sequence
  Oligonucleotide primer for the detection of SNP TSC0054979
accaaatcacaa

SEQ ID NO: 365221 - DNA, 12 bp, Artificial Sequence
  Oligonucleotide primer for the detection of SNP TSC0054979
aaaatggagatt

SEQ ID NO: 365222 - DNA, 12 bp, Artificial Sequence
  Oligonucleotide primer for the detection of SNP TSC0054979
gttaagttatag

SEQ ID NO: 365223 - DNA, 12 bp, Artificial Sequence
  Oligonucleotide primer for the detection of SNP TSC0054980
acttatccaaaa

SEQ ID NO: 365224 - DNA, 12 bp, Artificial Sequence
  Oligonucleotide primer for the detection of SNP TSC0054980
gagtggggtatt

SEQ ID NO: 365225 - DNA, 12 bp, Artificial Sequence
  Oligonucleotide primer for the detection of SNP TSC0054980
gagtggggtatc

SEQ ID NO: 365226 - DNA, 12 bp, Artificial Sequence
  Oligonucleotide primer for the detection of SNP TSC0054981
taacctttacta

SEQ ID NO: 365227 - DNA, 12 bp, Artificial Sequence
  Oligonucleotide primer for the detection of SNP TSC0054981
taatagaaatat

SEQ ID NO: 365228 - DNA, 12 bp, Artificial Sequence
  Oligonucleotide primer for the detection of SNP TSC0054982
ttttttcggtag

SEQ ID NO: 365229 - DNA, 12 bp, Artificial Sequence
  Oligonucleotide primer for the detection of SNP TSC0054986
gcaaaaacaaac

SEQ ID NO: 365230 - DNA, 12 bp, Artificial Sequence
  Oligonucleotide primer for the detection of SNP TSC0054986
tttaattaatga

SEQ ID NO: 365231 - DNA, 12 bp, Artificial Sequence
  Oligonucleotide primer for the detection of SNP TSC0054990
tataatctctac

SEQ ID NO: 365232 - DNA, 12 bp, Artificial Sequence
  Oligonucleotide primer for the detection of SNP TSC0054990
ttttaaaatagt

SEQ ID NO: 365233 - DNA, 12 bp, Artificial Sequence
  Oligonucleotide primer for the detection of SNP TSC0054990
actccaaaataa

SEQ ID NO: 365234 - DNA, 12 bp, Artificial Sequence
  Oligonucleotide primer for the detection of SNP TSC0054990
tgtgatttttat

SEQ ID NO: 365235 - DNA, 12 bp, Artificial Sequence
  Oligonucleotide primer for the detection of SNP TSC0054990
tgtgatttttac

SEQ ID NO: 365236 - DNA, 12 bp, Artificial Sequence
  Oligonucleotide primer for the detection of SNP TSC0054991
taacttattatt

SEQ ID NO: 365237 - DNA, 12 bp, Artificial Sequence
  Oligonucleotide primer for the detection of SNP TSC0054991
ttgtatttgata

SEQ ID NO: 365238 - DNA, 12 bp, Artificial Sequence
  Oligonucleotide primer for the detection of SNP TSC0054992
aaggttaggatt

SEQ ID NO: 365239 - DNA, 12 bp, Artificial Sequence
  Oligonucleotide primer for the detection of SNP TSC0054992
attagtgaagtt

SEQ ID NO: 365240 - DNA, 12 bp, Artificial Sequence
  Oligonucleotide primer for the detection of SNP TSC0054992
attagtgaagtc

SEQ ID NO: 365241 - DNA, 12 bp, Artificial Sequence
  Oligonucleotide primer for the detection of SNP TSC0054993
ctatacccaacc

SEQ ID NO: 365242 - DNA, 12 bp, Artificial Sequence
  Oligonucleotide primer for the detection of SNP TSC0054993
caatattcctca

SEQ ID NO: 365243 - DNA, 12 bp, Artificial Sequence
  Oligonucleotide primer for the detection of SNP TSC0054993
tgtgtttagttt

SEQ ID NO: 365244 - DNA, 12 bp, Artificial Sequence
  Oligonucleotide primer for the detection of SNP TSC0054996
caacaaacaata

SEQ ID NO: 365245 - DNA, 12 bp, Artificial Sequence
  Oligonucleotide primer for the detection of SNP TSC0054996
ttcatatatata

SEQ ID NO: 365246 - DNA, 12 bp, Artificial Sequence
  Oligonucleotide primer for the detection of SNP TSC0054996
tagtaaataata

SEQ ID NO: 365247 - DNA, 12 bp, Artificial Sequence
  Oligonucleotide primer for the detection of SNP TSC0054997
tttgtgggtatt

SEQ ID NO: 365248 - DNA, 12 bp, Artificial Sequence
  Oligonucleotide primer for the detection of SNP TSC0054997
ttataaacatca

SEQ ID NO: 365249 - DNA, 12 bp, Artificial Sequence
  Oligonucleotide primer for the detection of SNP TSC0054997
aaatttggaaag

SEQ ID NO: 365250 - DNA, 12 bp, Artificial Sequence
  Oligonucleotide primer for the detection of SNP TSC0055001
aaggaattatag

SEQ ID NO: 365251 - DNA, 12 bp, Artificial Sequence
  Oligonucleotide primer for the detection of SNP TSC0055001
tggtatttttat

SEQ ID NO: 365252 - DNA, 12 bp, Artificial Sequence
  Oligonucleotide primer for the detection of SNP TSC0055002
tcttctacaccc

SEQ ID NO: 365253 - DNA, 12 bp, Artificial Sequence
  Oligonucleotide primer for the detection of SNP TSC0055002
taggttagtagg

SEQ ID NO: 365254 - DNA, 12 bp, Artificial Sequence
  Oligonucleotide primer for the detection of SNP TSC0055003
ttacatctataa

SEQ ID NO: 365255 - DNA, 12 bp, Artificial Sequence
  Oligonucleotide primer for the detection of SNP TSC0055003
agttggggatat

SEQ ID NO: 365256 - DNA, 12 bp, Artificial Sequence
  Oligonucleotide primer for the detection of SNP TSC0055004
agagtagggtaa

SEQ ID NO: 365257 - DNA, 12 bp, Artificial Sequence
  Oligonucleotide primer for the detection of SNP TSC0055005
aaaataacttta

SEQ ID NO: 365258 - DNA, 12 bp, Artificial Sequence
  Oligonucleotide primer for the detection of SNP TSC0055005
aatagttttgtt

SEQ ID NO: 365259 - DNA, 12 bp, Artificial Sequence
  Oligonucleotide primer for the detection of SNP TSC0055006
aagaaaaaaaat

SEQ ID NO: 365260 - DNA, 12 bp, Artificial Sequence
  Oligonucleotide primer for the detection of SNP TSC0055006
taagttaatttt

SEQ ID NO: 365261 - DNA, 12 bp, Artificial Sequence
  Oligonucleotide primer for the detection of SNP TSC0000472
tcaaaaacttct

SEQ ID NO: 365262 - DNA, 12 bp, Artificial Sequence
  Oligonucleotide primer for the detection of SNP TSC0000472
taataagtgttg

SEQ ID NO: 365263 - DNA, 12 bp, Artificial Sequence
  Oligonucleotide primer for the detection of SNP TSC0000472
ttaaaggttttt

SEQ ID NO: 365264 - DNA, 12 bp, Artificial Sequence
  Oligonucleotide primer for the detection of SNP TSC0055008
ataaatccaaaa

SEQ ID NO: 365265 - DNA, 12 bp, Artificial Sequence
  Oligonucleotide primer for the detection of SNP TSC0055008
taacttaaatct

SEQ ID NO: 365266 - DNA, 12 bp, Artificial Sequence
  Oligonucleotide primer for the detection of SNP TSC0055012
ttatggattata

SEQ ID NO: 365267 - DNA, 12 bp, Artificial Sequence
  Oligonucleotide primer for the detection of SNP TSC0008432
ttttagagtgtt

SEQ ID NO: 365268 - DNA, 12 bp, Artificial Sequence
  Oligonucleotide primer for the detection of SNP TSC0008432
catcctaaaata

SEQ ID NO: 365269 - DNA, 12 bp, Artificial Sequence
  Oligonucleotide primer for the detection of SNP TSC0008432
tgtgggtaggag

SEQ ID NO: 365270 - DNA, 12 bp, Artificial Sequence
  Oligonucleotide primer for the detection of SNP TSC0055018
aatatatccaat

SEQ ID NO: 365271 - DNA, 12 bp, Artificial Sequence
  Oligonucleotide primer for the detection of SNP TSC0055019
acaaaaaacata

SEQ ID NO: 365272 - DNA, 12 bp, Artificial Sequence
  Oligonucleotide primer for the detection of SNP TSC0055019
ttatataagtat

SEQ ID NO: 365273 - DNA, 12 bp, Artificial Sequence
  Oligonucleotide primer for the detection of SNP TSC0055020
agaatgaagttt

SEQ ID NO: 365274 - DNA, 12 bp, Artificial Sequence
  Oligonucleotide primer for the detection of SNP TSC0055020
aaatttaataat

SEQ ID NO: 365275 - DNA, 12 bp, Artificial Sequence
  Oligonucleotide primer for the detection of SNP TSC0055021
tccctccaaccc

SEQ ID NO: 365276 - DNA, 12 bp, Artificial Sequence
  Oligonucleotide primer for the detection of SNP TSC0055021
agtggattggga

SEQ ID NO: 365277 - DNA, 12 bp, Artificial Sequence
  Oligonucleotide primer for the detection of SNP TSC0055021
agcggattggga

SEQ ID NO: 365278 - DNA, 12 bp, Artificial Sequence
  Oligonucleotide primer for the detection of SNP TSC0055022
cacttatttata

SEQ ID NO: 365279 - DNA, 12 bp, Artificial Sequence
  Oligonucleotide primer for the detection of SNP TSC0055022
atattaaagatt

SEQ ID NO: 365280 - DNA, 12 bp, Artificial Sequence
  Oligonucleotide primer for the detection of SNP TSC0055023
aataatttattt

SEQ ID NO: 365281 - DNA, 12 bp, Artificial Sequence
  Oligonucleotide primer for the detection of SNP TSC0055024
tatactactcat

SEQ ID NO: 365282 - DNA, 12 bp, Artificial Sequence
  Oligonucleotide primer for the detection of SNP TSC0055024
tttagtttgata

SEQ ID NO: 365283 - DNA, 12 bp, Artificial Sequence
  Oligonucleotide primer for the detection of SNP TSC0055025
tacaattataat

SEQ ID NO: 365284 - DNA, 12 bp, Artificial Sequence
  Oligonucleotide primer for the detection of SNP TSC0055025
ttcttcataaaa

SEQ ID NO: 365285 - DNA, 12 bp, Artificial Sequence
  Oligonucleotide primer for the detection of SNP TSC0006261
accatttcttta

SEQ ID NO: 365286 - DNA, 12 bp, Artificial Sequence
  Oligonucleotide primer for the detection of SNP TSC0006261
gaagtttttaag

SEQ ID NO: 365287 - DNA, 12 bp, Artificial Sequence
  Oligonucleotide primer for the detection of SNP TSC0055026
ataatctctatt

SEQ ID NO: 365288 - DNA, 12 bp, Artificial Sequence
  Oligonucleotide primer for the detection of SNP TSC0055026
aatttaatttta

SEQ ID NO: 365289 - DNA, 12 bp, Artificial Sequence
  Oligonucleotide primer for the detection of SNP TSC0055030
actaaactacta

SEQ ID NO: 365290 - DNA, 12 bp, Artificial Sequence
  Oligonucleotide primer for the detection of SNP TSC0055030
gggagttttttt

SEQ ID NO: 365291 - DNA, 12 bp, Artificial Sequence
  Oligonucleotide primer for the detection of SNP TSC0055031
acttcccccatc

SEQ ID NO: 365292 - DNA, 12 bp, Artificial Sequence
  Oligonucleotide primer for the detection of SNP TSC0055031
tatagtttattg

SEQ ID NO: 365293 - DNA, 12 bp, Artificial Sequence
  Oligonucleotide primer for the detection of SNP TSC0055031
cacaactcatta

SEQ ID NO: 365294 - DNA, 12 bp, Artificial Sequence
  Oligonucleotide primer for the detection of SNP TSC0055032
ttaacctttctc

SEQ ID NO: 365295 - DNA, 12 bp, Artificial Sequence
  Oligonucleotide primer for the detection of SNP TSC0055032
ggtatgttgaaa

SEQ ID NO: 365296 - DNA, 12 bp, Artificial Sequence
  Oligonucleotide primer for the detection of SNP TSC0055032
ggtatgtcgaaa

SEQ ID NO: 365297 - DNA, 12 bp, Artificial Sequence
  Oligonucleotide primer for the detection of SNP TSC0010378
actatattaaac

SEQ ID NO: 365298 - DNA, 12 bp, Artificial Sequence
  Oligonucleotide primer for the detection of SNP TSC0010378
agtttttaagtg

SEQ ID NO: 365299 - DNA, 12 bp, Artificial Sequence
  Oligonucleotide primer for the detection of SNP TSC0010378
aattcctaaata

SEQ ID NO: 365300 - DNA, 12 bp, Artificial Sequence
  Oligonukleotid-Primer
gttgtattagat

SEQ ID NO: 365301 - DNA, 12 bp, Artificial Sequence
  Oligonucleotide primer for the detection of SNP TSC0055033
tcttctaaatac

SEQ ID NO: 365302 - DNA, 12 bp, Artificial Sequence
  Oligonucleotide primer for the detection of SNP TSC0055033
ttctctcaaaaa

SEQ ID NO: 365303 - DNA, 12 bp, Artificial Sequence
  Oligonucleotide primer for the detection of SNP TSC0009497
catacataattt

SEQ ID NO: 365304 - DNA, 12 bp, Artificial Sequence
  Oligonukleotid-Primer
aacttttttttt

SEQ ID NO: 365305 - DNA, 12 bp, Artificial Sequence
  Oligonucleotide primer for the detection of SNP TSC0055034
aaaacctcttcc

SEQ ID NO: 365306 - DNA, 12 bp, Artificial Sequence
  Oligonucleotide primer for the detection of SNP TSC0055034
aagtgaatttaa

SEQ ID NO: 365307 - DNA, 12 bp, Artificial Sequence
  Oligonucleotide primer for the detection of SNP TSC0055034
aagcgaatttaa

SEQ ID NO: 365308 - DNA, 12 bp, Artificial Sequence
  Oligonukleotid-Primer
ttaaacacaata

SEQ ID NO: 365309 - DNA, 12 bp, Artificial Sequence
  Oligonucleotide primer for the detection of SNP TSC0004700
ttatttttaaga

SEQ ID NO: 365310 - DNA, 12 bp, Artificial Sequence
  Oligonucleotide primer for the detection of SNP TSC0055038
tcctctttataa

SEQ ID NO: 365311 - DNA, 12 bp, Artificial Sequence
  Oligonucleotide primer for the detection of SNP TSC0055038
aggaaaagagga

SEQ ID NO: 365312 - DNA, 12 bp, Artificial Sequence
  Oligonukleotid-Primer
acccataatttc

SEQ ID NO: 365313 - DNA, 12 bp, Artificial Sequence
  Oligonucleotide primer for the detection of SNP TSC0055039
ataaatttgtag

SEQ ID NO: 365314 - DNA, 12 bp, Artificial Sequence
  Oligonucleotide primer for the detection of SNP TSC0055040
caacccacaacc

SEQ ID NO: 365315 - DNA, 12 bp, Artificial Sequence
  Oligonucleotide primer for the detection of SNP TSC0055040
atgggttaagta

SEQ ID NO: 365316 - DNA, 12 bp, Artificial Sequence
  Oligonukleotid-Primer
gtttggttaaat

SEQ ID NO: 365317 - DNA, 12 bp, Artificial Sequence
  Oligonucleotide primer for the detection of SNP TSC0055041
acctaaccaaat

SEQ ID NO: 365318 - DNA, 12 bp, Artificial Sequence
  Oligonucleotide primer for the detection of SNP TSC0055041
ttaaaatagttt

SEQ ID NO: 365319 - DNA, 12 bp, Artificial Sequence
  Oligonucleotide primer for the detection of SNP TSC0055042
cccaaaacctac

SEQ ID NO: 365320 - DNA, 12 bp, Artificial Sequence
  Oligonucleotide primer for the detection of SNP TSC0055042
aggtgggtttaa

SEQ ID NO: 365321 - DNA, 12 bp, Artificial Sequence
  Oligonucleotide primer for the detection of SNP TSC0055043
tactatcaccac

SEQ ID NO: 365322 - DNA, 12 bp, Artificial Sequence
  Oligonucleotide primer for the detection of SNP TSC0055043
cgtttgttgtta

SEQ ID NO: 365323 - DNA, 12 bp, Artificial Sequence
  Oligonucleotide primer for the detection of SNP TSC0006340
ttcctactttaa

SEQ ID NO: 365324 - DNA, 12 bp, Artificial Sequence
  Oligonucleotide primer for the detection of SNP TSC0006340
tggttaatatta

SEQ ID NO: 365325 - DNA, 12 bp, Artificial Sequence
  Oligonucleotide primer for the detection of SNP TSC0055044
cttaaacatatc

SEQ ID NO: 365326 - DNA, 12 bp, Artificial Sequence
  Oligonucleotide primer for the detection of SNP TSC0055044
cttaaacgtatc

SEQ ID NO: 365327 - DNA, 12 bp, Artificial Sequence
  Oligonucleotide primer for the detection of SNP TSC0055044
tgttgtaaataa

SEQ ID NO: 365328 - DNA, 12 bp, Artificial Sequence
  Oligonucleotide primer for the detection of SNP TSC0055045
gtaggaattttt

SEQ ID NO: 365329 - DNA, 12 bp, Artificial Sequence
  Oligonucleotide primer for the detection of SNP TSC0055048
aactacaaacgt

SEQ ID NO: 365330 - DNA, 12 bp, Artificial Sequence
  Oligonucleotide primer for the detection of SNP TSC0055048
aattataggtgt

SEQ ID NO: 365331 - DNA, 12 bp, Artificial Sequence
  Oligonucleotide primer for the detection of SNP TSC0055048
aattataggcgt

SEQ ID NO: 365332 - DNA, 12 bp, Artificial Sequence
  Oligonucleotide primer for the detection of SNP TSC0055049
taaaccatttct

SEQ ID NO: 365333 - DNA, 12 bp, Artificial Sequence
  Oligonucleotide primer for the detection of SNP TSC0055052
tcacccacattt

SEQ ID NO: 365334 - DNA, 12 bp, Artificial Sequence
  Oligonucleotide primer for the detection of SNP TSC0055052
tcacccacgttt

SEQ ID NO: 365335 - DNA, 12 bp, Artificial Sequence
  Oligonucleotide primer for the detection of SNP TSC0055052
tttggggttgta

SEQ ID NO: 365336 - DNA, 12 bp, Artificial Sequence
  Oligonucleotide primer for the detection of SNP TSC0055052
tttggggtcgta

SEQ ID NO: 365337 - DNA, 12 bp, Artificial Sequence
  Oligonucleotide primer for the detection of SNP TSC0055053
caatctctcatt

SEQ ID NO: 365338 - DNA, 12 bp, Artificial Sequence
  Oligonucleotide primer for the detection of SNP TSC0055054
aaaaatcaccac

SEQ ID NO: 365339 - DNA, 12 bp, Artificial Sequence
  Oligonucleotide primer for the detection of SNP TSC0055054
atataaggtgaa

SEQ ID NO: 365340 - DNA, 12 bp, Artificial Sequence
  Oligonukleotid-Primer
aaaactattatt

SEQ ID NO: 365341 - DNA, 12 bp, Artificial Sequence
  Oligonucleotide primer for the detection of SNP TSC0055062
accttatctctt

SEQ ID NO: 365342 - DNA, 12 bp, Artificial Sequence
  Oligonucleotide primer for the detection of SNP TSC0055062
ggtataggtaga

SEQ ID NO: 365343 - DNA, 12 bp, Artificial Sequence
  Oligonucleotide primer for the detection of SNP TSC0055063
ccaattttatcc

SEQ ID NO: 365344 - DNA, 12 bp, Artificial Sequence
  Oligonukleotid-Primer
tgtgtagtaaag

SEQ ID NO: 365345 - DNA, 12 bp, Artificial Sequence
  Oligonucleotide primer for the detection of SNP TSC0055063
tatacaataaaa

SEQ ID NO: 365346 - DNA, 12 bp, Artificial Sequence
  Oligonucleotide primer for the detection of SNP TSC0055064
tttatacttttt

SEQ ID NO: 365347 - DNA, 12 bp, Artificial Sequence
  Oligonucleotide primer for the detection of SNP TSC0055064
acactcattttt

SEQ ID NO: 365348 - DNA, 12 bp, Artificial Sequence
  Oligonukleotid-Primer
tctaaaatactt

SEQ ID NO: 365349 - DNA, 12 bp, Artificial Sequence
  Oligonucleotide primer for the detection of SNP TSC0055065
tataataaaaga

SEQ ID NO: 365350 - DNA, 12 bp, Artificial Sequence
  Oligonucleotide primer for the detection of SNP TSC0055066
ttttaggtgatg

SEQ ID NO: 365351 - DNA, 12 bp, Artificial Sequence
  Oligonucleotide primer for the detection of SNP TSC0055066
ccttaaataata

SEQ ID NO: 365352 - DNA, 12 bp, Artificial Sequence
  Oligonukleotid-Primer
aaacctcccata

SEQ ID NO: 365353 - DNA, 12 bp, Artificial Sequence
  Oligonucleotide primer for the detection of SNP TSC0055067
ttgaggataaat

SEQ ID NO: 365354 - DNA, 12 bp, Artificial Sequence
  Oligonucleotide primer for the detection of SNP TSC0055070
tacactatccat

SEQ ID NO: 365355 - DNA, 12 bp, Artificial Sequence
  Oligonucleotide primer for the detection of SNP TSC0055071
aatacaatcatc

SEQ ID NO: 365356 - DNA, 12 bp, Artificial Sequence
  Oligonukleotid-Primer
aatacgatcatc

SEQ ID NO: 365357 - DNA, 12 bp, Artificial Sequence
  Oligonucleotide primer for the detection of SNP TSC0055071
gagttagttggg

SEQ ID NO: 365358 - DNA, 12 bp, Artificial Sequence
  Oligonucleotide primer for the detection of SNP TSC0055071
gagttagtcggg

SEQ ID NO: 365359 - DNA, 12 bp, Artificial Sequence
  Oligonucleotide primer for the detection of SNP TSC0055071
aaactaaccgaa

SEQ ID NO: 365360 - DNA, 12 bp, Artificial Sequence
  Oligonucleotide primer for the detection of SNP TSC0055071
gatatggttatt

SEQ ID NO: 365361 - DNA, 12 bp, Artificial Sequence
  Oligonucleotide primer for the detection of SNP TSC0055071
gatacggttatt

SEQ ID NO: 365362 - DNA, 12 bp, Artificial Sequence
  Oligonucleotide primer for the detection of SNP TSC0055071
gatatggttatc

SEQ ID NO: 365363 - DNA, 12 bp, Artificial Sequence
  Oligonucleotide primer for the detection of SNP TSC0055071
gatacggttatc

SEQ ID NO: 365364 - DNA, 12 bp, Artificial Sequence
  Oligonucleotide primer for the detection of SNP TSC0055072
ttaaaatacgat

SEQ ID NO: 365365 - DNA, 12 bp, Artificial Sequence
  Oligonucleotide primer for the detection of SNP TSC0055072
ttgggtgtttga

SEQ ID NO: 365366 - DNA, 12 bp, Artificial Sequence
  Oligonucleotide primer for the detection of SNP TSC0055072
tcgggtgtttga

SEQ ID NO: 365367 - DNA, 12 bp, Artificial Sequence
  Oligonucleotide primer for the detection of SNP TSC0055072
ttgggcgtttga

SEQ ID NO: 365368 - DNA, 12 bp, Artificial Sequence
  Oligonucleotide primer for the detection of SNP TSC0055072
ttgggtgttcga

SEQ ID NO: 365369 - DNA, 12 bp, Artificial Sequence
  Oligonucleotide primer for the detection of SNP TSC0055072
tcgggcgtttga

SEQ ID NO: 365370 - DNA, 12 bp, Artificial Sequence
  Oligonucleotide primer for the detection of SNP TSC0055072
tcgggtgttcga

SEQ ID NO: 365371 - DNA, 12 bp, Artificial Sequence
  Oligonucleotide primer for the detection of SNP TSC0055072
ttgggcgttcga

SEQ ID NO: 365372 - DNA, 12 bp, Artificial Sequence
  Oligonucleotide primer for the detection of SNP TSC0055072
tcgggcgttcga

SEQ ID NO: 365373 - DNA, 12 bp, Artificial Sequence
  Oligonucleotide primer for the detection of SNP TSC0008358
ctcccaatatta

SEQ ID NO: 365374 - DNA, 12 bp, Artificial Sequence
  Oligonucleotide primer for the detection of SNP TSC0008358
ttagaggttaga

SEQ ID NO: 365375 - DNA, 12 bp, Artificial Sequence
  Oligonucleotide primer for the detection of SNP TSC0055075
tcttacctttct

SEQ ID NO: 365376 - DNA, 12 bp, Artificial Sequence
  Oligonucleotide primer for the detection of SNP TSC0055075
gtttttaatgaa

SEQ ID NO: 365377 - DNA, 12 bp, Artificial Sequence
  Oligonucleotide primer for the detection of SNP TSC0055076
tccttttctttc

SEQ ID NO: 365378 - DNA, 12 bp, Artificial Sequence
  Oligonucleotide primer for the detection of SNP TSC0055076
gagaaagaaatg

SEQ ID NO: 365379 - DNA, 12 bp, Artificial Sequence
  Oligonucleotide primer for the detection of SNP TSC0055077
acataaacacct

SEQ ID NO: 365380 - DNA, 12 bp, Artificial Sequence
  Oligonucleotide primer for the detection of SNP TSC0055077
tgtaggggtggg

SEQ ID NO: 365381 - DNA, 12 bp, Artificial Sequence
  Oligonucleotide primer for the detection of SNP TSC0055078
gaggagtgaggg

SEQ ID NO: 365382 - DNA, 12 bp, Artificial Sequence
  Oligonucleotide primer for the detection of SNP TSC0055080
ggttaaggtaag

SEQ ID NO: 365383 - DNA, 12 bp, Artificial Sequence
  Oligonucleotide primer for the detection of SNP TSC0055081
ccttctacaact

SEQ ID NO: 365384 - DNA, 12 bp, Artificial Sequence
  Oligonucleotide primer for the detection of SNP TSC0055082
tttcccatacta

SEQ ID NO: 365385 - DNA, 12 bp, Artificial Sequence
  Oligonucleotide primer for the detection of SNP TSC0055082
cacttaactttc

SEQ ID NO: 365386 - DNA, 12 bp, Artificial Sequence
  Oligonucleotide primer for the detection of SNP TSC0055083
actacttaaaaa

SEQ ID NO: 365387 - DNA, 12 bp, Artificial Sequence
  Oligonucleotide primer for the detection of SNP TSC0055084
aatacaactccc

SEQ ID NO: 365388 - DNA, 12 bp, Artificial Sequence
  Oligonucleotide primer for the detection of SNP TSC0055084
ttggaaggatag

SEQ ID NO: 365389 - DNA, 12 bp, Artificial Sequence
  Oligonucleotide primer for the detection of SNP TSC0055085
atttatacaata

SEQ ID NO: 365390 - DNA, 12 bp, Artificial Sequence
  Oligonucleotide primer for the detection of SNP TSC0055085
cttatctaatat

SEQ ID NO: 365391 - DNA, 12 bp, Artificial Sequence
  Oligonucleotide primer for the detection of SNP TSC0055086
aaatggaggata

SEQ ID NO: 365392 - DNA, 12 bp, Artificial Sequence
  Oligonucleotide primer for the detection of SNP TSC0055086
ttgtatgtgtgt

SEQ ID NO: 365393 - DNA, 12 bp, Artificial Sequence
  Oligonucleotide primer for the detection of SNP TSC0055090
ttaatcacataa

SEQ ID NO: 365394 - DNA, 12 bp, Artificial Sequence
  Oligonucleotide primer for the detection of SNP TSC0055090
aatttaaatgtt

SEQ ID NO: 365395 - DNA, 12 bp, Artificial Sequence
  Oligonucleotide primer for the detection of SNP TSC0055090
aacccaaatacc

SEQ ID NO: 365396 - DNA, 12 bp, Artificial Sequence
  Oligonucleotide primer for the detection of SNP TSC0055090
ttaattatatgg

SEQ ID NO: 365397 - DNA, 12 bp, Artificial Sequence
  Oligonucleotide primer for the detection of SNP TSC0055093
tttccactatat

SEQ ID NO: 365398 - DNA, 12 bp, Artificial Sequence
  Oligonucleotide primer for the detection of SNP TSC0055093
atgataatgtag

SEQ ID NO: 365399 - DNA, 12 bp, Artificial Sequence
  Oligonucleotide primer for the detection of SNP TSC0055093
ataacaatacaa

SEQ ID NO: 365400 - DNA, 12 bp, Artificial Sequence
  Oligonucleotide primer for the detection of SNP TSC0006069
atttaaggtgag

SEQ ID NO: 365401 - DNA, 12 bp, Artificial Sequence
  Oligonucleotide primer for the detection of SNP TSC0055096
cattaatattta

SEQ ID NO: 365402 - DNA, 12 bp, Artificial Sequence
  Oligonucleotide primer for the detection of SNP TSC0055096
ttattgatattt

SEQ ID NO: 365403 - DNA, 12 bp, Artificial Sequence
  Oligonucleotide primer for the detection of SNP TSC0055099
tccacaatttta

SEQ ID NO: 365404 - DNA, 12 bp, Artificial Sequence
  Oligonucleotide primer for the detection of SNP TSC0055099
ccatctaataac

SEQ ID NO: 365405 - DNA, 12 bp, Artificial Sequence
  Oligonucleotide primer for the detection of SNP TSC0055100
ttaggttatata

SEQ ID NO: 365406 - DNA, 12 bp, Artificial Sequence
  Oligonucleotide primer for the detection of SNP TSC0055102
acaattaaacac

SEQ ID NO: 365407 - DNA, 12 bp, Artificial Sequence
  Oligonucleotide primer for the detection of SNP TSC0055102
ttatttttacta

SEQ ID NO: 365408 - DNA, 12 bp, Artificial Sequence
  Oligonucleotide primer for the detection of SNP TSC0055104
taccttttcata

SEQ ID NO: 365409 - DNA, 12 bp, Artificial Sequence
  Oligonucleotide primer for the detection of SNP TSC0055104
gggaatagaagt

SEQ ID NO: 365410 - DNA, 12 bp, Artificial Sequence
  Oligonucleotide primer for the detection of SNP TSC0055108
gcgttttaagta

SEQ ID NO: 365411 - DNA, 12 bp, Artificial Sequence
  Oligonucleotide primer for the detection of SNP TSC0055110
ttgtgaagaaat

SEQ ID NO: 365412 - DNA, 12 bp, Artificial Sequence
  Oligonucleotide primer for the detection of SNP TSC0055111
atatcaataaaa

SEQ ID NO: 365413 - DNA, 12 bp, Artificial Sequence
  Oligonucleotide primer for the detection of SNP TSC0055111
atgagagtggtt

SEQ ID NO: 365414 - DNA, 12 bp, Artificial Sequence
  Oligonucleotide primer for the detection of SNP TSC0055111
gtattagtaaga

SEQ ID NO: 365415 - DNA, 12 bp, Artificial Sequence
  Oligonucleotide primer for the detection of SNP TSC0055112
taataatgatgg

SEQ ID NO: 365416 - DNA, 12 bp, Artificial Sequence
  Oligonukleotid-Primer
tatattaagtta

SEQ ID NO: 365417 - DNA, 12 bp, Artificial Sequence
  Oligonucleotide primer for the detection of SNP TSC0055114
tgagaataattt

SEQ ID NO: 365418 - DNA, 12 bp, Artificial Sequence
  Oligonucleotide primer for the detection of SNP TSC0055116
gtgttgatggtt

SEQ ID NO: 365419 - DNA, 12 bp, Artificial Sequence
  Oligonucleotide primer for the detection of SNP TSC0055116
aatattaataac

SEQ ID NO: 365420 - DNA, 12 bp, Artificial Sequence
  Oligonucleotide primer for the detection of SNP TSC0055116
aattaaagtttt

SEQ ID NO: 365421 - DNA, 12 bp, Artificial Sequence
  Oligonucleotide primer for the detection of SNP TSC0055119
aatctaccattt

SEQ ID NO: 365422 - DNA, 12 bp, Artificial Sequence
  Oligonucleotide primer for the detection of SNP TSC0055119
attggtagggga

SEQ ID NO: 365423 - DNA, 12 bp, Artificial Sequence
  Oligonucleotide primer for the detection of SNP TSC0055119
atcggtagggga

SEQ ID NO: 365424 - DNA, 12 bp, Artificial Sequence
  Oligonucleotide primer for the detection of SNP TSC0055119
accaacaaaaaa

SEQ ID NO: 365425 - DNA, 12 bp, Artificial Sequence
  Oligonucleotide primer for the detection of SNP TSC0055119
accgacaaaaaa

SEQ ID NO: 365426 - DNA, 12 bp, Artificial Sequence
  Oligonucleotide primer for the detection of SNP TSC0055119
aatttgttattt

SEQ ID NO: 365427 - DNA, 12 bp, Artificial Sequence
  Oligonucleotide primer for the detection of SNP TSC0055120
atttcttataac

SEQ ID NO: 365428 - DNA, 12 bp, Artificial Sequence
  Oligonucleotide primer for the detection of SNP TSC0055120
agtattgaatta

SEQ ID NO: 365429 - DNA, 12 bp, Artificial Sequence
  Oligonucleotide primer for the detection of SNP TSC0055120
agtatcgaatta

SEQ ID NO: 365430 - DNA, 12 bp, Artificial Sequence
  Oligonucleotide primer for the detection of SNP TSC0055121
taacatattcct

SEQ ID NO: 365431 - DNA, 12 bp, Artificial Sequence
  Oligonucleotide primer for the detection of SNP TSC0055122
tttcacaccttt

SEQ ID NO: 365432 - DNA, 12 bp, Artificial Sequence
  Oligonucleotide primer for the detection of SNP TSC0055122
ataaaagttaga

SEQ ID NO: 365433 - DNA, 12 bp, Artificial Sequence
  Oligonucleotide primer for the detection of SNP TSC0055123
ctacctcctaaa

SEQ ID NO: 365434 - DNA, 12 bp, Artificial Sequence
  Oligonucleotide primer for the detection of SNP TSC0055123
aagagaattatt

SEQ ID NO: 365435 - DNA, 12 bp, Artificial Sequence
  Oligonucleotide primer for the detection of SNP TSC0055124
aaaaaaataacc

SEQ ID NO: 365436 - DNA, 12 bp, Artificial Sequence
  Oligonucleotide primer for the detection of SNP TSC0055124
agttttgatttg

SEQ ID NO: 365437 - DNA, 12 bp, Artificial Sequence
  Oligonucleotide primer for the detection of SNP TSC0055125
ccttatttatat

SEQ ID NO: 365438 - DNA, 12 bp, Artificial Sequence
  Oligonucleotide primer for the detection of SNP TSC0055125
attttttactca

SEQ ID NO: 365439 - DNA, 12 bp, Artificial Sequence
  Oligonucleotide primer for the detection of SNP TSC0055126
aaaatattctca

SEQ ID NO: 365440 - DNA, 12 bp, Artificial Sequence
  Oligonucleotide primer for the detection of SNP TSC0055126
tattgagaatat

SEQ ID NO: 365441 - DNA, 12 bp, Artificial Sequence
  Oligonucleotide primer for the detection of SNP TSC0055126
agaatattttta

SEQ ID NO: 365442 - DNA, 12 bp, Artificial Sequence
  Oligonucleotide primer for the detection of SNP TSC0055127
gtgttagagttg

SEQ ID NO: 365443 - DNA, 12 bp, Artificial Sequence
  Oligonucleotide primer for the detection of SNP TSC0055127
gtgttagagtcg

SEQ ID NO: 365444 - DNA, 12 bp, Artificial Sequence
  Oligonucleotide primer for the detection of SNP TSC0055127
atcaaaatcgaa

SEQ ID NO: 365445 - DNA, 12 bp, Artificial Sequence
  Oligonucleotide primer for the detection of SNP TSC0055128
acaaaaaatatt

SEQ ID NO: 365446 - DNA, 12 bp, Artificial Sequence
  Oligonucleotide primer for the detection of SNP TSC0055128
gttaaagttttg

SEQ ID NO: 365447 - DNA, 12 bp, Artificial Sequence
  Oligonucleotide primer for the detection of SNP TSC0055129
tccacactttaa

SEQ ID NO: 365448 - DNA, 12 bp, Artificial Sequence
  Oligonucleotide primer for the detection of SNP TSC0055129
agttagatttat

SEQ ID NO: 365449 - DNA, 12 bp, Artificial Sequence
  Oligonucleotide primer for the detection of SNP TSC0055129
accaaattcata

SEQ ID NO: 365450 - DNA, 12 bp, Artificial Sequence
  Oligonucleotide primer for the detection of SNP TSC0055129
tatattttgatt

SEQ ID NO: 365451 - DNA, 12 bp, Artificial Sequence
  Oligonucleotide primer for the detection of SNP TSC0055131
cccctcaaccaa

SEQ ID NO: 365452 - DNA, 12 bp, Artificial Sequence
  Oligonucleotide primer for the detection of SNP TSC0055131
cccctcgaccaa

SEQ ID NO: 365453 - DNA, 12 bp, Artificial Sequence
  Oligonucleotide primer for the detection of SNP TSC0055131
gggaaattgtga

SEQ ID NO: 365454 - DNA, 12 bp, Artificial Sequence
  Oligonucleotide primer for the detection of SNP TSC0055131
tttttcggttaa

SEQ ID NO: 365455 - DNA, 12 bp, Artificial Sequence
  Oligonucleotide primer for the detection of SNP TSC0055132
ctattacaaaat

SEQ ID NO: 365456 - DNA, 12 bp, Artificial Sequence
  Oligonucleotide primer for the detection of SNP TSC0055132
ctattacgaaat

SEQ ID NO: 365457 - DNA, 12 bp, Artificial Sequence
  Oligonucleotide primer for the detection of SNP TSC0055132
cgaatttttggg

SEQ ID NO: 365458 - DNA, 12 bp, Artificial Sequence
  Oligonucleotide primer for the detection of SNP TSC0055135
acaaaccaaaac

SEQ ID NO: 365459 - DNA, 12 bp, Artificial Sequence
  Oligonucleotide primer for the detection of SNP TSC0055138
gatttatgtaaa

SEQ ID NO: 365460 - DNA, 12 bp, Artificial Sequence
  Oligonucleotide primer for the detection of SNP TSC0055139
cataattataat

SEQ ID NO: 365461 - DNA, 12 bp, Artificial Sequence
  Oligonucleotide primer for the detection of SNP TSC0055139
tttttagatata

SEQ ID NO: 365462 - DNA, 12 bp, Artificial Sequence
  Oligonucleotide primer for the detection of SNP TSC0055140
aaccattaaatt

SEQ ID NO: 365463 - DNA, 12 bp, Artificial Sequence
  Oligonucleotide primer for the detection of SNP TSC0055140
aaccgttaaatt

SEQ ID NO: 365464 - DNA, 12 bp, Artificial Sequence
  Oligonucleotide primer for the detection of SNP TSC0055140
ttaaatttaatg

SEQ ID NO: 365465 - DNA, 12 bp, Artificial Sequence
  Oligonucleotide primer for the detection of SNP TSC0055141
accttccaccat

SEQ ID NO: 365466 - DNA, 12 bp, Artificial Sequence
  Oligonucleotide primer for the detection of SNP TSC0055145
taaaacccaata

SEQ ID NO: 365467 - DNA, 12 bp, Artificial Sequence
  Oligonucleotide primer for the detection of SNP TSC0055145
taaaacccgata

SEQ ID NO: 365468 - DNA, 12 bp, Artificial Sequence
  Oligonucleotide primer for the detection of SNP TSC0055145
atttaaataatt

SEQ ID NO: 365469 - DNA, 12 bp, Artificial Sequence
  Oligonucleotide primer for the detection of SNP TSC0055145
taacccaaacaa

SEQ ID NO: 365470 - DNA, 12 bp, Artificial Sequence
  Oligonucleotide primer for the detection of SNP TSC0055145
ggagtttggtgt

SEQ ID NO: 365471 - DNA, 12 bp, Artificial Sequence
  Oligonucleotide primer for the detection of SNP TSC0055145
ggagttcggtgt

SEQ ID NO: 365472 - DNA, 12 bp, Artificial Sequence
  Oligonucleotide primer for the detection of SNP TSC0055147
tctcactacaat

SEQ ID NO: 365473 - DNA, 12 bp, Artificial Sequence
  Oligonucleotide primer for the detection of SNP TSC0055147
tgagattggatt

SEQ ID NO: 365474 - DNA, 12 bp, Artificial Sequence
  Oligonucleotide primer for the detection of SNP TSC0055149
taccttaacctc

SEQ ID NO: 365475 - DNA, 12 bp, Artificial Sequence
  Oligonucleotide primer for the detection of SNP TSC0055149
ctcaacactcta

SEQ ID NO: 365476 - DNA, 12 bp, Artificial Sequence
  Oligonucleotide primer for the detection of SNP TSC0055149
tgttttggtttc

SEQ ID NO: 365477 - DNA, 12 bp, Artificial Sequence
  Oligonucleotide primer for the detection of SNP TSC0055150
tttttctaattc

SEQ ID NO: 365478 - DNA, 12 bp, Artificial Sequence
  Oligonucleotide primer for the detection of SNP TSC0055150
tttgtatttaga

SEQ ID NO: 365479 - DNA, 12 bp, Artificial Sequence
  Oligonucleotide primer for the detection of SNP TSC0055155
tttctaccccta

SEQ ID NO: 365480 - DNA, 12 bp, Artificial Sequence
  Oligonucleotide primer for the detection of SNP TSC0055155
ttagtgatgagt

SEQ ID NO: 365481 - DNA, 12 bp, Artificial Sequence
  Oligonucleotide primer for the detection of SNP TSC0055159
taaagagggttt

SEQ ID NO: 365482 - DNA, 12 bp, Artificial Sequence
  Oligonucleotide primer for the detection of SNP TSC0055159
ctaaaaaaaatc

SEQ ID NO: 365483 - DNA, 12 bp, Artificial Sequence
  Oligonucleotide primer for the detection of SNP TSC0055159
tggggggtaagg

SEQ ID NO: 365484 - DNA, 12 bp, Artificial Sequence
  Oligonucleotide primer for the detection of SNP TSC0055160
actatacccaac

SEQ ID NO: 365485 - DNA, 12 bp, Artificial Sequence
  Oligonucleotide primer for the detection of SNP TSC0055160
aataaatgttta

SEQ ID NO: 365486 - DNA, 12 bp, Artificial Sequence
  Oligonucleotide primer for the detection of SNP TSC0055161
aaaattacaata

SEQ ID NO: 365487 - DNA, 12 bp, Artificial Sequence
  Oligonucleotide primer for the detection of SNP TSC0055161
gttggggttttt

SEQ ID NO: 365488 - DNA, 12 bp, Artificial Sequence
  Oligonucleotide primer for the detection of SNP TSC0055161
ggagttgtaatg

SEQ ID NO: 365489 - DNA, 12 bp, Artificial Sequence
  Oligonucleotide primer for the detection of SNP TSC0055162
ctcctccttcct

SEQ ID NO: 365490 - DNA, 12 bp, Artificial Sequence
  Oligonucleotide primer for the detection of SNP TSC0055162
ttggagtgtagg

SEQ ID NO: 365491 - DNA, 12 bp, Artificial Sequence
  Oligonucleotide primer for the detection of SNP TSC0055163
cctccttcctcc

SEQ ID NO: 365492 - DNA, 12 bp, Artificial Sequence
  Oligonucleotide primer for the detection of SNP TSC0055163
aactaaaataca

SEQ ID NO: 365493 - DNA, 12 bp, Artificial Sequence
  Oligonucleotide primer for the detection of SNP TSC0055166
aataaaaaccaa

SEQ ID NO: 365494 - DNA, 12 bp, Artificial Sequence
  Oligonucleotide primer for the detection of SNP TSC0055166
aataaaaaccga

SEQ ID NO: 365495 - DNA, 12 bp, Artificial Sequence
  Oligonucleotide primer for the detection of SNP TSC0055166
taggtattagat

SEQ ID NO: 365496 - DNA, 12 bp, Artificial Sequence
  Oligonucleotide primer for the detection of SNP TSC0055166
taggtattagac

SEQ ID NO: 365497 - DNA, 12 bp, Artificial Sequence
  Oligonucleotide primer for the detection of SNP TSC0055166
caaacattaaac

SEQ ID NO: 365498 - DNA, 12 bp, Artificial Sequence
  Oligonucleotide primer for the detection of SNP TSC0055166
tagtgagaattg

SEQ ID NO: 365499 - DNA, 12 bp, Artificial Sequence
  Oligonucleotide primer for the detection of SNP TSC0055166
tagtgagaatcg

SEQ ID NO: 365500 - DNA, 12 bp, Artificial Sequence
  Oligonucleotide primer for the detection of SNP TSC0055170
tacaaacaacta

SEQ ID NO: 365501 - DNA, 12 bp, Artificial Sequence
  Oligonucleotide primer for the detection of SNP TSC0055170
gaagggtgggat

SEQ ID NO: 365502 - DNA, 12 bp, Artificial Sequence
  Oligonucleotide primer for the detection of SNP TSC0055170
tgtagataattg

SEQ ID NO: 365503 - DNA, 12 bp, Artificial Sequence
  Oligonucleotide primer for the detection of SNP TSC0055171
tctttccttcct

SEQ ID NO: 365504 - DNA, 12 bp, Artificial Sequence
  Oligonucleotide primer for the detection of SNP TSC0055171
gatggagggagg

SEQ ID NO: 365505 - DNA, 12 bp, Artificial Sequence
  Oligonucleotide primer for the detection of SNP TSC0055172
cacaaattaacc

SEQ ID NO: 365506 - DNA, 12 bp, Artificial Sequence
  Oligonucleotide primer for the detection of SNP TSC0055172
agttcgttatta

SEQ ID NO: 365507 - DNA, 12 bp, Artificial Sequence
  Oligonucleotide primer for the detection of SNP TSC0055172
aacccaccacca

SEQ ID NO: 365508 - DNA, 12 bp, Artificial Sequence
  Oligonucleotide primer for the detection of SNP TSC0055172
aacccgccacca

SEQ ID NO: 365509 - DNA, 12 bp, Artificial Sequence
  Oligonucleotide primer for the detection of SNP TSC0055172
tataaattagtc

SEQ ID NO: 365510 - DNA, 12 bp, Artificial Sequence
  Oligonucleotide primer for the detection of SNP TSC0055173
caaaatcaatac

SEQ ID NO: 365511 - DNA, 12 bp, Artificial Sequence
  Oligonucleotide primer for the detection of SNP TSC0055173
cgaaatcaatac

SEQ ID NO: 365512 - DNA, 12 bp, Artificial Sequence
  Oligonucleotide primer for the detection of SNP TSC0055173
gatgggttagtt

SEQ ID NO: 365513 - DNA, 12 bp, Artificial Sequence
  Oligonucleotide primer for the detection of SNP TSC0055173
aaataaaccaac

SEQ ID NO: 365514 - DNA, 12 bp, Artificial Sequence
  Oligonucleotide primer for the detection of SNP TSC0055173
tggggttagtat

SEQ ID NO: 365515 - DNA, 12 bp, Artificial Sequence
  Oligonucleotide primer for the detection of SNP TSC0055173
cggggttagtat

SEQ ID NO: 365516 - DNA, 12 bp, Artificial Sequence
  Oligonucleotide primer for the detection of SNP TSC0055173
tggggttagtac

SEQ ID NO: 365517 - DNA, 12 bp, Artificial Sequence
  Oligonucleotide primer for the detection of SNP TSC0055173
cggggttagtac

SEQ ID NO: 365518 - DNA, 12 bp, Artificial Sequence
  Oligonucleotide primer for the detection of SNP TSC0055179
tatcttccctct

SEQ ID NO: 365519 - DNA, 12 bp, Artificial Sequence
  Oligonucleotide primer for the detection of SNP TSC0055179
atagtaattatt

SEQ ID NO: 365520 - DNA, 12 bp, Artificial Sequence
  Oligonucleotide primer for the detection of SNP TSC0055180
ataaaaaatctc

SEQ ID NO: 365521 - DNA, 12 bp, Artificial Sequence
  Oligonucleotide primer for the detection of SNP TSC0055180
tagttaatgtta

SEQ ID NO: 365522 - DNA, 12 bp, Artificial Sequence
  Oligonucleotide primer for the detection of SNP TSC0055180
taaccaatatca

SEQ ID NO: 365523 - DNA, 12 bp, Artificial Sequence
  Oligonucleotide primer for the detection of SNP TSC0055183
gttgattttgtg

SEQ ID NO: 365524 - DNA, 12 bp, Artificial Sequence
  Oligonucleotide primer for the detection of SNP TSC0055183
actaactctata

SEQ ID NO: 365525 - DNA, 12 bp, Artificial Sequence
  Oligonucleotide primer for the detection of SNP TSC0055183
atgtaggaaaga

SEQ ID NO: 365526 - DNA, 12 bp, Artificial Sequence
  Oligonucleotide primer for the detection of SNP TSC0055184
tctaaacaaaat

SEQ ID NO: 365527 - DNA, 12 bp, Artificial Sequence
  Oligonucleotide primer for the detection of SNP TSC0055185
atacatactact

SEQ ID NO: 365528 - DNA, 12 bp, Artificial Sequence
  Oligonucleotide primer for the detection of SNP TSC0055185
tttagtatagtg

SEQ ID NO: 365529 - DNA, 12 bp, Artificial Sequence
  Oligonucleotide primer for the detection of SNP TSC0055186
catattcttacc

SEQ ID NO: 365530 - DNA, 12 bp, Artificial Sequence
  Oligonucleotide primer for the detection of SNP TSC0055186
taaaggaattta

SEQ ID NO: 365531 - DNA, 12 bp, Artificial Sequence
  Oligonucleotide primer for the detection of SNP TSC0055187
taatgttttgta

SEQ ID NO: 365532 - DNA, 12 bp, Artificial Sequence
  Oligonucleotide primer for the detection of SNP TSC0055187
taatattttata

SEQ ID NO: 365533 - DNA, 12 bp, Artificial Sequence
  Oligonucleotide primer for the detection of SNP TSC0055187
taagatatttgt

SEQ ID NO: 365534 - DNA, 12 bp, Artificial Sequence
  Oligonucleotide primer for the detection of SNP TSC0055189
tttctttttcac

SEQ ID NO: 365535 - DNA, 12 bp, Artificial Sequence
  Oligonucleotide primer for the detection of SNP TSC0055191
atcttttaaatt

SEQ ID NO: 365536 - DNA, 12 bp, Artificial Sequence
  Oligonucleotide primer for the detection of SNP TSC0055191
atgttgttatta

SEQ ID NO: 365537 - DNA, 12 bp, Artificial Sequence
  Oligonucleotide primer for the detection of SNP TSC0055191
atattaccatca

SEQ ID NO: 365538 - DNA, 12 bp, Artificial Sequence
  Oligonucleotide primer for the detection of SNP TSC0009808
tataacttctat

SEQ ID NO: 365539 - DNA, 12 bp, Artificial Sequence
  Oligonucleotide primer for the detection of SNP TSC0009809
ataaatttcaac

SEQ ID NO: 365540 - DNA, 12 bp, Artificial Sequence
  Oligonucleotide primer for the detection of SNP TSC0009809
tatgggaggaaa

SEQ ID NO: 365541 - DNA, 12 bp, Artificial Sequence
  Oligonucleotide primer for the detection of SNP TSC0055194
cttataatccca

SEQ ID NO: 365542 - DNA, 12 bp, Artificial Sequence
  Oligonucleotide primer for the detection of SNP TSC0055195
tcattatttacc

SEQ ID NO: 365543 - DNA, 12 bp, Artificial Sequence
  Oligonucleotide primer for the detection of SNP TSC0055196
tgagtgattatt

SEQ ID NO: 365544 - DNA, 12 bp, Artificial Sequence
  Oligonucleotide primer for the detection of SNP TSC0055196
tctaaataatta

SEQ ID NO: 365545 - DNA, 12 bp, Artificial Sequence
  Oligonucleotide primer for the detection of SNP TSC0055196
ttattagtaaat

SEQ ID NO: 365546 - DNA, 12 bp, Artificial Sequence
  Oligonucleotide primer for the detection of SNP TSC0004870
ctttactattct

SEQ ID NO: 365547 - DNA, 12 bp, Artificial Sequence
  Oligonucleotide primer for the detection of SNP TSC0055197
ttattccacttc

SEQ ID NO: 365548 - DNA, 12 bp, Artificial Sequence
  Oligonucleotide primer for the detection of SNP TSC0055197
aatagagttgat

SEQ ID NO: 365549 - DNA, 12 bp, Artificial Sequence
  Oligonucleotide primer for the detection of SNP TSC0055198
ttatttaattgt

SEQ ID NO: 365550 - DNA, 12 bp, Artificial Sequence
  Oligonucleotide primer for the detection of SNP TSC0055198
ttatccaactac

SEQ ID NO: 365551 - DNA, 12 bp, Artificial Sequence
  Oligonucleotide primer for the detection of SNP TSC0055198
ttttatgaaaat

SEQ ID NO: 365552 - DNA, 12 bp, Artificial Sequence
  Oligonucleotide primer for the detection of SNP TSC0055201
attcactaacac

SEQ ID NO: 365553 - DNA, 12 bp, Artificial Sequence
  Oligonucleotide primer for the detection of SNP TSC0055201
ataaattttggg

SEQ ID NO: 365554 - DNA, 12 bp, Artificial Sequence
  Oligonucleotide primer for the detection of SNP TSC0055202
caaatataccat

SEQ ID NO: 365555 - DNA, 12 bp, Artificial Sequence
  Oligonucleotide primer for the detection of SNP TSC0055202
tttgtaaggata

SEQ ID NO: 365556 - DNA, 12 bp, Artificial Sequence
  Oligonucleotide primer for the detection of SNP TSC0055205
ccaacacccatt

SEQ ID NO: 365557 - DNA, 12 bp, Artificial Sequence
  Oligonucleotide primer for the detection of SNP TSC0055205
ttagtatttatt

SEQ ID NO: 365558 - DNA, 12 bp, Artificial Sequence
  Oligonucleotide primer for the detection of SNP TSC0055206
ctatccataaac

SEQ ID NO: 365559 - DNA, 12 bp, Artificial Sequence
  Oligonucleotide primer for the detection of SNP TSC0055206
ctatccgtaaac

SEQ ID NO: 365560 - DNA, 12 bp, Artificial Sequence
  Oligonucleotide primer for the detection of SNP TSC0055206
aaggagtgattt

SEQ ID NO: 365561 - DNA, 12 bp, Artificial Sequence
  Oligonucleotide primer for the detection of SNP TSC0055206
tgtttgtgaatt

SEQ ID NO: 365562 - DNA, 12 bp, Artificial Sequence
  Oligonucleotide primer for the detection of SNP TSC0055206
tgttcgtgaatt

SEQ ID NO: 365563 - DNA, 12 bp, Artificial Sequence
  Oligonucleotide primer for the detection of SNP TSC0055207
tactactataat

SEQ ID NO: 365564 - DNA, 12 bp, Artificial Sequence
  Oligonucleotide primer for the detection of SNP TSC0055207
aagagggaaaaa

SEQ ID NO: 365565 - DNA, 12 bp, Artificial Sequence
  Oligonucleotide primer for the detection of SNP TSC0055208
gagaaaatgtaa

SEQ ID NO: 365566 - DNA, 12 bp, Artificial Sequence
  Oligonucleotide primer for the detection of SNP TSC0055210
cacaataaaact

SEQ ID NO: 365567 - DNA, 12 bp, Artificial Sequence
  Oligonucleotide primer for the detection of SNP TSC0055210
attgggatgtag

SEQ ID NO: 365568 - DNA, 12 bp, Artificial Sequence
  Oligonucleotide primer for the detection of SNP TSC0055210
attaaaatacaa

SEQ ID NO: 365569 - DNA, 12 bp, Artificial Sequence
  Oligonucleotide primer for the detection of SNP TSC0055210
tatagtggaatt

SEQ ID NO: 365570 - DNA, 12 bp, Artificial Sequence
  Oligonucleotide primer for the detection of SNP TSC0055211
ttatgtgttaat

SEQ ID NO: 365571 - DNA, 12 bp, Artificial Sequence
  Oligonucleotide primer for the detection of SNP TSC0055211
ttatatactaat

SEQ ID NO: 365572 - DNA, 12 bp, Artificial Sequence
  Oligonucleotide primer for the detection of SNP TSC0055211
ttgagaggggtt

SEQ ID NO: 365573 - DNA, 12 bp, Artificial Sequence
  Oligonucleotide primer for the detection of SNP TSC0055212
caaccataaata

SEQ ID NO: 365574 - DNA, 12 bp, Artificial Sequence
  Oligonucleotide primer for the detection of SNP TSC0055212
caaccgtaaata

SEQ ID NO: 365575 - DNA, 12 bp, Artificial Sequence
  Oligonucleotide primer for the detection of SNP TSC0055212
gttttttttaaa

SEQ ID NO: 365576 - DNA, 12 bp, Artificial Sequence
  Oligonucleotide primer for the detection of SNP TSC0055213
acataataattc

SEQ ID NO: 365577 - DNA, 12 bp, Artificial Sequence
  Oligonucleotide primer for the detection of SNP TSC0055213
acgtaataattc

SEQ ID NO: 365578 - DNA, 12 bp, Artificial Sequence
  Oligonucleotide primer for the detection of SNP TSC0055215
taaatccatatt

SEQ ID NO: 365579 - DNA, 12 bp, Artificial Sequence
  Oligonucleotide primer for the detection of SNP TSC0055216
aaaccattacac

SEQ ID NO: 365580 - DNA, 12 bp, Artificial Sequence
  Oligonucleotide primer for the detection of SNP TSC0055216
agttttttgatg

SEQ ID NO: 365581 - DNA, 12 bp, Artificial Sequence
  Oligonucleotide primer for the detection of SNP TSC0055216
agttttttgacg

SEQ ID NO: 365582 - DNA, 12 bp, Artificial Sequence
  Oligonucleotide primer for the detection of SNP TSC0055217
atattttgagaa

SEQ ID NO: 365583 - DNA, 12 bp, Artificial Sequence
  Oligonucleotide primer for the detection of SNP TSC0055217
acactctaaaaa

SEQ ID NO: 365584 - DNA, 12 bp, Artificial Sequence
  Oligonucleotide primer for the detection of SNP TSC0055218
tatccttacaaa

SEQ ID NO: 365585 - DNA, 12 bp, Artificial Sequence
  Oligonucleotide primer for the detection of SNP TSC0055218
ttattttaggag

SEQ ID NO: 365586 - DNA, 12 bp, Artificial Sequence
  Oligonucleotide primer for the detection of SNP TSC0055219
atatatatcacc

SEQ ID NO: 365587 - DNA, 12 bp, Artificial Sequence
  Oligonucleotide primer for the detection of SNP TSC0055219
taatatttgaaa

SEQ ID NO: 365588 - DNA, 12 bp, Artificial Sequence
  Oligonucleotide primer for the detection of SNP TSC0055220
ttttatataatg

SEQ ID NO: 365589 - DNA, 12 bp, Artificial Sequence
  Oligonucleotide primer for the detection of SNP TSC0055221
aatttaaggatt

SEQ ID NO: 365590 - DNA, 12 bp, Artificial Sequence
  Oligonucleotide primer for the detection of SNP TSC0055221
taacttaaaaat

SEQ ID NO: 365591 - DNA, 12 bp, Artificial Sequence
  Oligonucleotide primer for the detection of SNP TSC0055221
gaggatgttaaa

SEQ ID NO: 365592 - DNA, 12 bp, Artificial Sequence
  Oligonucleotide primer for the detection of SNP TSC0055222
cttaacgaaaac

SEQ ID NO: 365593 - DNA, 12 bp, Artificial Sequence
  Oligonucleotide primer for the detection of SNP TSC0055222
ttaatttcaaaa

SEQ ID NO: 365594 - DNA, 12 bp, Artificial Sequence
  Oligonucleotide primer for the detection of SNP TSC0055222
tttaatggaggt

SEQ ID NO: 365595 - DNA, 12 bp, Artificial Sequence
  Oligonucleotide primer for the detection of SNP TSC0055222
tttaacggaggt

SEQ ID NO: 365596 - DNA, 12 bp, Artificial Sequence
  Oligonucleotide primer for the detection of SNP TSC0055226
ttctacctaaat

SEQ ID NO: 365597 - DNA, 12 bp, Artificial Sequence
  Oligonucleotide primer for the detection of SNP TSC0055226
gtgtaagagtaa

SEQ ID NO: 365598 - DNA, 12 bp, Artificial Sequence
  Oligonucleotide primer for the detection of SNP TSC0005023
ttaaccacaatc

SEQ ID NO: 365599 - DNA, 12 bp, Artificial Sequence
  Oligonucleotide primer for the detection of SNP TSC0005023
ttaattggataa

SEQ ID NO: 365600 - DNA, 12 bp, Artificial Sequence
  Oligonucleotide primer for the detection of SNP TSC0005024
gtttttattata

SEQ ID NO: 365601 - DNA, 12 bp, Artificial Sequence
  Oligonucleotide primer for the detection of SNP TSC0055228
aactccaaacct

SEQ ID NO: 365602 - DNA, 12 bp, Artificial Sequence
  Oligonucleotide primer for the detection of SNP TSC0055228
aactccgaacct

SEQ ID NO: 365603 - DNA, 12 bp, Artificial Sequence
  Oligonucleotide primer for the detection of SNP TSC0055228
gtgtgtggataa

SEQ ID NO: 365604 - DNA, 12 bp, Artificial Sequence
  Oligonucleotide primer for the detection of SNP TSC0055229
agatttaataag

SEQ ID NO: 365605 - DNA, 12 bp, Artificial Sequence
  Oligonucleotide primer for the detection of SNP TSC0055230
aaataaaagata

SEQ ID NO: 365606 - DNA, 12 bp, Artificial Sequence
  Oligonucleotide primer for the detection of SNP TSC0055231
ctaataaaaacc

SEQ ID NO: 365607 - DNA, 12 bp, Artificial Sequence
  Oligonucleotide primer for the detection of SNP TSC0055231
taagtgttttta

SEQ ID NO: 365608 - DNA, 12 bp, Artificial Sequence
  Oligonucleotide primer for the detection of SNP TSC0055232
ataaggtaatta

SEQ ID NO: 365609 - DNA, 12 bp, Artificial Sequence
  Oligonucleotide primer for the detection of SNP TSC0055233
aataataaaaca

SEQ ID NO: 365610 - DNA, 12 bp, Artificial Sequence
  Oligonucleotide primer for the detection of SNP TSC0055233
gatatataattt

SEQ ID NO: 365611 - DNA, 12 bp, Artificial Sequence
  Oligonucleotide primer for the detection of SNP TSC0055233
aatacacaattt

SEQ ID NO: 365612 - DNA, 12 bp, Artificial Sequence
  Oligonucleotide primer for the detection of SNP TSC0055233
gataataaaata

SEQ ID NO: 365613 - DNA, 12 bp, Artificial Sequence
  Oligonucleotide primer for the detection of SNP TSC0055235
aactatcaccta

SEQ ID NO: 365614 - DNA, 12 bp, Artificial Sequence
  Oligonucleotide primer for the detection of SNP TSC0055235
aggttgttattt

SEQ ID NO: 365615 - DNA, 12 bp, Artificial Sequence
  Oligonucleotide primer for the detection of SNP TSC0055236
tttctttccata

SEQ ID NO: 365616 - DNA, 12 bp, Artificial Sequence
  Oligonucleotide primer for the detection of SNP TSC0055236
ttaggtgatagt

SEQ ID NO: 365617 - DNA, 12 bp, Artificial Sequence
  Oligonucleotide primer for the detection of SNP TSC0055237
atacaaccacta

SEQ ID NO: 365618 - DNA, 12 bp, Artificial Sequence
  Oligonucleotide primer for the detection of SNP TSC0055237
acataatttaaa

SEQ ID NO: 365619 - DNA, 12 bp, Artificial Sequence
  Oligonucleotide primer for the detection of SNP TSC0055237
acgtaatttaaa

SEQ ID NO: 365620 - DNA, 12 bp, Artificial Sequence
  Oligonucleotide primer for the detection of SNP TSC0055237
aatgtagttatt

SEQ ID NO: 365621 - DNA, 12 bp, Artificial Sequence
  Oligonucleotide primer for the detection of SNP TSC0055238
caactaacctca

SEQ ID NO: 365622 - DNA, 12 bp, Artificial Sequence
  Oligonucleotide primer for the detection of SNP TSC0055238
aaagatagtttt

SEQ ID NO: 365623 - DNA, 12 bp, Artificial Sequence
  Oligonucleotide primer for the detection of SNP TSC0055238
atagttagtttt

SEQ ID NO: 365624 - DNA, 12 bp, Artificial Sequence
  Oligonucleotide primer for the detection of SNP TSC0055239
tcttctttatta

SEQ ID NO: 365625 - DNA, 12 bp, Artificial Sequence
  Oligonucleotide primer for the detection of SNP TSC0055239
attttataccta

SEQ ID NO: 365626 - DNA, 12 bp, Artificial Sequence
  Oligonucleotide primer for the detection of SNP TSC0055240
ttcattccaact

SEQ ID NO: 365627 - DNA, 12 bp, Artificial Sequence
  Oligonucleotide primer for the detection of SNP TSC0055240
tttttattgata

SEQ ID NO: 365628 - DNA, 12 bp, Artificial Sequence
  Oligonucleotide primer for the detection of SNP TSC0055241
gagatttttttc

SEQ ID NO: 365629 - DNA, 12 bp, Artificial Sequence
  Oligonucleotide primer for the detection of SNP TSC0055241
taaaaaaacttt

SEQ ID NO: 365630 - DNA, 12 bp, Artificial Sequence
  Oligonucleotide primer for the detection of SNP TSC0055241
ggattggaattt

SEQ ID NO: 365631 - DNA, 12 bp, Artificial Sequence
  Oligonucleotide primer for the detection of SNP TSC0055242
aattttttatga

SEQ ID NO: 365632 - DNA, 12 bp, Artificial Sequence
  Oligonucleotide primer for the detection of SNP TSC0055246
aaacatcttaac

SEQ ID NO: 365633 - DNA, 12 bp, Artificial Sequence
  Oligonucleotide primer for the detection of SNP TSC0055246
ttgtttgtgtga

SEQ ID NO: 365634 - DNA, 12 bp, Artificial Sequence
  Oligonucleotide primer for the detection of SNP TSC0055247
aattacctcaat

SEQ ID NO: 365635 - DNA, 12 bp, Artificial Sequence
  Oligonucleotide primer for the detection of SNP TSC0055247
ttttatttaaag

SEQ ID NO: 365636 - DNA, 12 bp, Artificial Sequence
  Oligonucleotide primer for the detection of SNP TSC0055248
aaaaaaaccctt

SEQ ID NO: 365637 - DNA, 12 bp, Artificial Sequence
  Oligonucleotide primer for the detection of SNP TSC0055248
ttgatggtttta

SEQ ID NO: 365638 - DNA, 12 bp, Artificial Sequence
  Oligonucleotide primer for the detection of SNP TSC0055249
taaattccccaa

SEQ ID NO: 365639 - DNA, 12 bp, Artificial Sequence
  Oligonucleotide primer for the detection of SNP TSC0055249
cgtttattttgg

SEQ ID NO: 365640 - DNA, 12 bp, Artificial Sequence
  Oligonucleotide primer for the detection of SNP TSC0055249
cacccactctaa

SEQ ID NO: 365641 - DNA, 12 bp, Artificial Sequence
  Oligonucleotide primer for the detection of SNP TSC0055249
cgcccactctaa

SEQ ID NO: 365642 - DNA, 12 bp, Artificial Sequence
  Oligonucleotide primer for the detection of SNP TSC0055250
tctcccctttaa

SEQ ID NO: 365643 - DNA, 12 bp, Artificial Sequence
  Oligonucleotide primer for the detection of SNP TSC0055250
ttattattttag

SEQ ID NO: 365644 - DNA, 12 bp, Artificial Sequence
  Oligonucleotide primer for the detection of SNP TSC0055251
caaactcaacta

SEQ ID NO: 365645 - DNA, 12 bp, Artificial Sequence
  Oligonucleotide primer for the detection of SNP TSC0055251
cgaactcaacta

SEQ ID NO: 365646 - DNA, 12 bp, Artificial Sequence
  Oligonucleotide primer for the detection of SNP TSC0055251
aaccattccaac

SEQ ID NO: 365647 - DNA, 12 bp, Artificial Sequence
  Oligonucleotide primer for the detection of SNP TSC0055251
tgagtttagttg

SEQ ID NO: 365648 - DNA, 12 bp, Artificial Sequence
  Oligonucleotide primer for the detection of SNP TSC0055251
cgagtttagttg

SEQ ID NO: 365649 - DNA, 12 bp, Artificial Sequence
  Oligonukleotid-Primer
aatataacccct

SEQ ID NO: 365650 - DNA, 12 bp, Artificial Sequence
  Oligonucleotide primer for the detection of SNP TSC0055252
tgtatgggttga

SEQ ID NO: 365651 - DNA, 12 bp, Artificial Sequence
  Oligonucleotide primer for the detection of SNP TSC0055252
tgtacgggttga

SEQ ID NO: 365652 - DNA, 12 bp, Artificial Sequence
  Oligonucleotide primer for the detection of SNP TSC0055252
tacacaaactaa

SEQ ID NO: 365653 - DNA, 12 bp, Artificial Sequence
  Oligonucleotide primer for the detection of SNP TSC0055252
tacacgaactaa

SEQ ID NO: 365654 - DNA, 12 bp, Artificial Sequence
  Oligonucleotide primer for the detection of SNP TSC0055252
aatgtggttttt

SEQ ID NO: 365655 - DNA, 12 bp, Artificial Sequence
  Oligonucleotide primer for the detection of SNP TSC0055253
acatttttaaat

SEQ ID NO: 365656 - DNA, 12 bp, Artificial Sequence
  Oligonucleotide primer for the detection of SNP TSC0055254
tgttggtatatg

SEQ ID NO: 365657 - DNA, 12 bp, Artificial Sequence
  Oligonucleotide primer for the detection of SNP TSC0055255
ttcaccataact

SEQ ID NO: 365658 - DNA, 12 bp, Artificial Sequence
  Oligonucleotide primer for the detection of SNP TSC0055255
agattttaggaa

SEQ ID NO: 365659 - DNA, 12 bp, Artificial Sequence
  Oligonucleotide primer for the detection of SNP TSC0005389
caaaaacccatt

SEQ ID NO: 365660 - DNA, 12 bp, Artificial Sequence
  Oligonucleotide primer for the detection of SNP TSC0005389
ggatatgtggag

SEQ ID NO: 365661 - DNA, 12 bp, Artificial Sequence
  Oligonucleotide primer for the detection of SNP TSC0055256
aatttctttctc

SEQ ID NO: 365662 - DNA, 12 bp, Artificial Sequence
  Oligonucleotide primer for the detection of SNP TSC0055257
aaatcattttat

SEQ ID NO: 365663 - DNA, 12 bp, Artificial Sequence
  Oligonucleotide primer for the detection of SNP TSC0055257
attttgttatag

SEQ ID NO: 365664 - DNA, 12 bp, Artificial Sequence
  Oligonucleotide primer for the detection of SNP TSC0055257
attctattacaa

SEQ ID NO: 365665 - DNA, 12 bp, Artificial Sequence
  Oligonucleotide primer for the detection of SNP TSC0055257
aggttattttgt

SEQ ID NO: 365666 - DNA, 12 bp, Artificial Sequence
  Oligonucleotide primer for the detection of SNP TSC0055259
tatattacccac

SEQ ID NO: 365667 - DNA, 12 bp, Artificial Sequence
  Oligonucleotide primer for the detection of SNP TSC0055259
ttgagtgttggt

SEQ ID NO: 365668 - DNA, 12 bp, Artificial Sequence
  Oligonucleotide primer for the detection of SNP TSC0055259
ctaaatactaat

SEQ ID NO: 365669 - DNA, 12 bp, Artificial Sequence
  Oligonucleotide primer for the detection of SNP TSC0055259
tgtgttgtttat

SEQ ID NO: 365670 - DNA, 12 bp, Artificial Sequence
  Oligonucleotide primer for the detection of SNP TSC0055260
aatcaacaaact

SEQ ID NO: 365671 - DNA, 12 bp, Artificial Sequence
  Oligonucleotide primer for the detection of SNP TSC0055260
aagttatggatg

SEQ ID NO: 365672 - DNA, 12 bp, Artificial Sequence
  Oligonucleotide primer for the detection of SNP TSC0055260
agttagtaggtt

SEQ ID NO: 365673 - DNA, 12 bp, Artificial Sequence
  Oligonucleotide primer for the detection of SNP TSC0055261
cacctaacctca

SEQ ID NO: 365674 - DNA, 12 bp, Artificial Sequence
  Oligonucleotide primer for the detection of SNP TSC0055261
agagggtttggg

SEQ ID NO: 365675 - DNA, 12 bp, Artificial Sequence
  Oligonucleotide primer for the detection of SNP TSC0055262
gttaataattag

SEQ ID NO: 365676 - DNA, 12 bp, Artificial Sequence
  Oligonucleotide primer for the detection of SNP TSC0055262
accaataattaa

SEQ ID NO: 365677 - DNA, 12 bp, Artificial Sequence
  Oligonucleotide primer for the detection of SNP TSC0055262
tttagagttagt

SEQ ID NO: 365678 - DNA, 12 bp, Artificial Sequence
  Oligonucleotide primer for the detection of SNP TSC0055268
catatacacaca

SEQ ID NO: 365679 - DNA, 12 bp, Artificial Sequence
  Oligonucleotide primer for the detection of SNP TSC0055268
gtacgtgtgtgt

SEQ ID NO: 365680 - DNA, 12 bp, Artificial Sequence
  Oligonucleotide primer for the detection of SNP TSC0055268
gtatgtgtgtgc

SEQ ID NO: 365681 - DNA, 12 bp, Artificial Sequence
  Oligonucleotide primer for the detection of SNP TSC0055268
gtacgcgtgtgt

SEQ ID NO: 365682 - DNA, 12 bp, Artificial Sequence
  Oligonucleotide primer for the detection of SNP TSC0055268
gtacgtgtgtgc

SEQ ID NO: 365683 - DNA, 12 bp, Artificial Sequence
  Oligonucleotide primer for the detection of SNP TSC0055268
gtatgcgtgtgc

SEQ ID NO: 365684 - DNA, 12 bp, Artificial Sequence
  Oligonucleotide primer for the detection of SNP TSC0055268
gtacgcgtgtgc

SEQ ID NO: 365685 - DNA, 12 bp, Artificial Sequence
  Oligonucleotide primer for the detection of SNP TSC0055268
acacacatatac

SEQ ID NO: 365686 - DNA, 12 bp, Artificial Sequence
  Oligonucleotide primer for the detection of SNP TSC0055268
acacacgtatac

SEQ ID NO: 365687 - DNA, 12 bp, Artificial Sequence
  Oligonucleotide primer for the detection of SNP TSC0055268
acacgcatatac

SEQ ID NO: 365688 - DNA, 12 bp, Artificial Sequence
  Oligonucleotide primer for the detection of SNP TSC0055268
acacgcgtatac

SEQ ID NO: 365689 - DNA, 12 bp, Artificial Sequence
  Oligonucleotide primer for the detection of SNP TSC0055270
ggttaatagaat

SEQ ID NO: 365690 - DNA, 12 bp, Artificial Sequence
  Oligonucleotide primer for the detection of SNP TSC0055270
aatcaataaaat

SEQ ID NO: 365691 - DNA, 12 bp, Artificial Sequence
  Oligonucleotide primer for the detection of SNP TSC0055271
gtatgatatttt

SEQ ID NO: 365692 - DNA, 12 bp, Artificial Sequence
  Oligonucleotide primer for the detection of SNP TSC0055273
aagattttgttt

SEQ ID NO: 365693 - DNA, 12 bp, Artificial Sequence
  Oligonucleotide primer for the detection of SNP TSC0055273
caaaactctatc

SEQ ID NO: 365694 - DNA, 12 bp, Artificial Sequence
  Oligonucleotide primer for the detection of SNP TSC0055275
ttatccaccact

SEQ ID NO: 365695 - DNA, 12 bp, Artificial Sequence
  Oligonucleotide primer for the detection of SNP TSC0055275
ttattgagttta

SEQ ID NO: 365696 - DNA, 12 bp, Artificial Sequence
  Oligonucleotide primer for the detection of SNP TSC0055282
aacctaaaaact

SEQ ID NO: 365697 - DNA, 12 bp, Artificial Sequence
  Oligonucleotide primer for the detection of SNP TSC0055282
attttaaaagaa

SEQ ID NO: 365698 - DNA, 12 bp, Artificial Sequence
  Oligonucleotide primer for the detection of SNP TSC0055286
taacatatctat

SEQ ID NO: 365699 - DNA, 12 bp, Artificial Sequence
  Oligonucleotide primer for the detection of SNP TSC0055286
aattatttgaag

SEQ ID NO: 365700 - DNA, 12 bp, Artificial Sequence
  Oligonucleotide primer for the detection of SNP TSC0055287
ccttacccaaaa

SEQ ID NO: 365701 - DNA, 12 bp, Artificial Sequence
  Oligonucleotide primer for the detection of SNP TSC0055287
ttttgggtttag

SEQ ID NO: 365702 - DNA, 12 bp, Artificial Sequence
  Oligonucleotide primer for the detection of SNP TSC0055287
ctctaaacccaa

SEQ ID NO: 365703 - DNA, 12 bp, Artificial Sequence
  Oligonucleotide primer for the detection of SNP TSC0055288
tgggaagagtaa

SEQ ID NO: 365704 - DNA, 12 bp, Artificial Sequence
  Oligonucleotide primer for the detection of SNP TSC0055288
aaagtttgatgt

SEQ ID NO: 365705 - DNA, 12 bp, Artificial Sequence
  Oligonucleotide primer for the detection of SNP TSC0055290
tagatattttaa

SEQ ID NO: 365706 - DNA, 12 bp, Artificial Sequence
  Oligonucleotide primer for the detection of SNP TSC0055291
agatatttgtaa

SEQ ID NO: 365707 - DNA, 12 bp, Artificial Sequence
  Oligonucleotide primer for the detection of SNP TSC0055292
caccaccataaa

SEQ ID NO: 365708 - DNA, 12 bp, Artificial Sequence
  Oligonucleotide primer for the detection of SNP TSC0055292
caccgccataaa

SEQ ID NO: 365709 - DNA, 12 bp, Artificial Sequence
  Oligonucleotide primer for the detection of SNP TSC0055292
tatattgagttg

SEQ ID NO: 365710 - DNA, 12 bp, Artificial Sequence
  Oligonucleotide primer for the detection of SNP TSC0055292
atattaaattaa

SEQ ID NO: 365711 - DNA, 12 bp, Artificial Sequence
  Oligonucleotide primer for the detection of SNP TSC0055292
tatcgttatgaa

SEQ ID NO: 365712 - DNA, 12 bp, Artificial Sequence
  Oligonucleotide primer for the detection of SNP TSC0055293
cacttaaactca

SEQ ID NO: 365713 - DNA, 12 bp, Artificial Sequence
  Oligonucleotide primer for the detection of SNP TSC0055295
attacatatttt

SEQ ID NO: 365714 - DNA, 12 bp, Artificial Sequence
  Oligonucleotide primer for the detection of SNP TSC0055295
acattcttatcc

SEQ ID NO: 365715 - DNA, 12 bp, Artificial Sequence
  Oligonucleotide primer for the detection of SNP TSC0055296
aataacacataa

SEQ ID NO: 365716 - DNA, 12 bp, Artificial Sequence
  Oligonucleotide primer for the detection of SNP TSC0055296
aataacgcataa

SEQ ID NO: 365717 - DNA, 12 bp, Artificial Sequence
  Oligonucleotide primer for the detection of SNP TSC0055296
cacactacttca

SEQ ID NO: 365718 - DNA, 12 bp, Artificial Sequence
  Oligonucleotide primer for the detection of SNP TSC0055296
atggtgtatggt

SEQ ID NO: 365719 - DNA, 12 bp, Artificial Sequence
  Oligonucleotide primer for the detection of SNP TSC0055296
atggcgtatggt

SEQ ID NO: 365720 - DNA, 12 bp, Artificial Sequence
  Oligonucleotide primer for the detection of SNP TSC0005220
tcctaaacaact

SEQ ID NO: 365721 - DNA, 12 bp, Artificial Sequence
  Oligonucleotide primer for the detection of SNP TSC0005559
aatccccaaata

SEQ ID NO: 365722 - DNA, 12 bp, Artificial Sequence
  Oligonucleotide primer for the detection of SNP TSC0005559
ctttcttcccat

SEQ ID NO: 365723 - DNA, 12 bp, Artificial Sequence
  Oligonucleotide primer for the detection of SNP TSC0005559
aatttttaagtg

SEQ ID NO: 365724 - DNA, 12 bp, Artificial Sequence
  Oligonucleotide primer for the detection of SNP TSC0055297
aacacaaatatc

SEQ ID NO: 365725 - DNA, 12 bp, Artificial Sequence
  Oligonucleotide primer for the detection of SNP TSC0055297
aggaagttgtag

SEQ ID NO: 365726 - DNA, 12 bp, Artificial Sequence
  Oligonucleotide primer for the detection of SNP TSC0055297
aaaaaattacaa

SEQ ID NO: 365727 - DNA, 12 bp, Artificial Sequence
  Oligonucleotide primer for the detection of SNP TSC0055297
agtataggtgtt

SEQ ID NO: 365728 - DNA, 12 bp, Artificial Sequence
  Oligonucleotide primer for the detection of SNP TSC0055298
aaatcatacaaa

SEQ ID NO: 365729 - DNA, 12 bp, Artificial Sequence
  Oligonucleotide primer for the detection of SNP TSC0055298
ttttttgtgtgt

SEQ ID NO: 365730 - DNA, 12 bp, Artificial Sequence
  Oligonucleotide primer for the detection of SNP TSC0055298
tctcctatatat

SEQ ID NO: 365731 - DNA, 12 bp, Artificial Sequence
  Oligonucleotide primer for the detection of SNP TSC0055298
agattatatagg

SEQ ID NO: 365732 - DNA, 12 bp, Artificial Sequence
  Oligonucleotide primer for the detection of SNP TSC0055300
taatataaatct

SEQ ID NO: 365733 - DNA, 12 bp, Artificial Sequence
  Oligonucleotide primer for the detection of SNP TSC0055300
aaagaaaaaaag

SEQ ID NO: 365734 - DNA, 12 bp, Artificial Sequence
  Oligonucleotide primer for the detection of SNP TSC0055307
taaaataataca

SEQ ID NO: 365735 - DNA, 12 bp, Artificial Sequence
  Oligonucleotide primer for the detection of SNP TSC0055307
tatttgagaaag

SEQ ID NO: 365736 - DNA, 12 bp, Artificial Sequence
  Oligonucleotide primer for the detection of SNP TSC0055307
gaaatagtatat

SEQ ID NO: 365737 - DNA, 12 bp, Artificial Sequence
  Oligonucleotide primer for the detection of SNP TSC0055308
tctaaacacttt

SEQ ID NO: 365738 - DNA, 12 bp, Artificial Sequence
  Oligonucleotide primer for the detection of SNP TSC0055308
agaatttagatg

SEQ ID NO: 365739 - DNA, 12 bp, Artificial Sequence
  Oligonucleotide primer for the detection of SNP TSC0055308
aaaacctaaata

SEQ ID NO: 365740 - DNA, 12 bp, Artificial Sequence
  Oligonucleotide primer for the detection of SNP TSC0055309
ataacctccata

SEQ ID NO: 365741 - DNA, 12 bp, Artificial Sequence
  Oligonucleotide primer for the detection of SNP TSC0055309
ccttcctatccc

SEQ ID NO: 365742 - DNA, 12 bp, Artificial Sequence
  Oligonucleotide primer for the detection of SNP TSC0055310
aaaataacatat

SEQ ID NO: 365743 - DNA, 12 bp, Artificial Sequence
  Oligonucleotide primer for the detection of SNP TSC0055310
tttttcaacaaa

SEQ ID NO: 365744 - DNA, 12 bp, Artificial Sequence
  Oligonucleotide primer for the detection of SNP TSC0055311
cataaaccaccg

SEQ ID NO: 365745 - DNA, 12 bp, Artificial Sequence
  Oligonucleotide primer for the detection of SNP TSC0055311
cgtaaaccaccg

SEQ ID NO: 365746 - DNA, 12 bp, Artificial Sequence
  Oligonucleotide primer for the detection of SNP TSC0055311
agaaggttgggt

SEQ ID NO: 365747 - DNA, 12 bp, Artificial Sequence
  Oligonucleotide primer for the detection of SNP TSC0055312
taacctaacaca

SEQ ID NO: 365748 - DNA, 12 bp, Artificial Sequence
  Oligonucleotide primer for the detection of SNP TSC0055312
taacctaacgca

SEQ ID NO: 365749 - DNA, 12 bp, Artificial Sequence
  Oligonucleotide primer for the detection of SNP TSC0055312
tttttgatatta

SEQ ID NO: 365750 - DNA, 12 bp, Artificial Sequence
  Oligonucleotide primer for the detection of SNP TSC0055313
tttaataacctt

SEQ ID NO: 365751 - DNA, 12 bp, Artificial Sequence
  Oligonucleotide primer for the detection of SNP TSC0055314
aggtgaaattaa

SEQ ID NO: 365752 - DNA, 12 bp, Artificial Sequence
  Oligonucleotide primer for the detection of SNP TSC0055315
atatgttattat

SEQ ID NO: 365753 - DNA, 12 bp, Artificial Sequence
  Oligonucleotide primer for the detection of SNP TSC0055316
aaataatatcca

SEQ ID NO: 365754 - DNA, 12 bp, Artificial Sequence
  Oligonucleotide primer for the detection of SNP TSC0055316
gtgattttagtt

SEQ ID NO: 365755 - DNA, 12 bp, Artificial Sequence
  Oligonucleotide primer for the detection of SNP TSC0055316
gcgattttagtt

SEQ ID NO: 365756 - DNA, 12 bp, Artificial Sequence
  Oligonucleotide primer for the detection of SNP TSC0055316
gtgattttagtc

SEQ ID NO: 365757 - DNA, 12 bp, Artificial Sequence
  Oligonucleotide primer for the detection of SNP TSC0055316
gcgattttagtc

SEQ ID NO: 365758 - DNA, 12 bp, Artificial Sequence
  Oligonucleotide primer for the detection of SNP TSC0055316
ttacaacctcaa

SEQ ID NO: 365759 - DNA, 12 bp, Artificial Sequence
  Oligonucleotide primer for the detection of SNP TSC0055316
ttacgacctcaa

SEQ ID NO: 365760 - DNA, 12 bp, Artificial Sequence
  Oligonucleotide primer for the detection of SNP TSC0055316
agatgatgttta

SEQ ID NO: 365761 - DNA, 12 bp, Artificial Sequence
  Oligonucleotide primer for the detection of SNP TSC0055317
ttttggatatta

SEQ ID NO: 365762 - DNA, 12 bp, Artificial Sequence
  Oligonucleotide primer for the detection of SNP TSC0055318
agtttttagttg

SEQ ID NO: 365763 - DNA, 12 bp, Artificial Sequence
  Oligonucleotide primer for the detection of SNP TSC0055318
aaccttcaatta

SEQ ID NO: 365764 - DNA, 12 bp, Artificial Sequence
  Oligonucleotide primer for the detection of SNP TSC0055318
aaggttgaggtt

SEQ ID NO: 365765 - DNA, 12 bp, Artificial Sequence
  Oligonucleotide primer for the detection of SNP TSC0055318
aaggttgaggtc

SEQ ID NO: 365766 - DNA, 12 bp, Artificial Sequence
  Oligonucleotide primer for the detection of SNP TSC0055321
ccaaaaatttac

SEQ ID NO: 365767 - DNA, 12 bp, Artificial Sequence
  Oligonucleotide primer for the detection of SNP TSC0055321
gagtttattgta

SEQ ID NO: 365768 - DNA, 12 bp, Artificial Sequence
  Oligonucleotide primer for the detection of SNP TSC0055322
acaataaacttt

SEQ ID NO: 365769 - DNA, 12 bp, Artificial Sequence
  Oligonucleotide primer for the detection of SNP TSC0055322
attttgggttga

SEQ ID NO: 365770 - DNA, 12 bp, Artificial Sequence
  Oligonucleotide primer for the detection of SNP TSC0055323
aaacacccttac

SEQ ID NO: 365771 - DNA, 12 bp, Artificial Sequence
  Oligonucleotide primer for the detection of SNP TSC0055323
aatgtggtttta

SEQ ID NO: 365772 - DNA, 12 bp, Artificial Sequence
  Oligonucleotide primer for the detection of SNP TSC0055323
aacgtggtttta

SEQ ID NO: 365773 - DNA, 12 bp, Artificial Sequence
  Oligonucleotide primer for the detection of SNP TSC0055324
tttgtataggga

SEQ ID NO: 365774 - DNA, 12 bp, Artificial Sequence
  Oligonucleotide primer for the detection of SNP TSC0055324
cctatacaaaaa

SEQ ID NO: 365775 - DNA, 12 bp, Artificial Sequence
  Oligonucleotide primer for the detection of SNP TSC0055325
cctctactacaa

SEQ ID NO: 365776 - DNA, 12 bp, Artificial Sequence
  Oligonucleotide primer for the detection of SNP TSC0055325
tagtgtaagatt

SEQ ID NO: 365777 - DNA, 12 bp, Artificial Sequence
  Oligonucleotide primer for the detection of SNP TSC0055326
taaaattaattg

SEQ ID NO: 365778 - DNA, 12 bp, Artificial Sequence
  Oligonucleotide primer for the detection of SNP TSC0055326
taagataatggt

SEQ ID NO: 365779 - DNA, 12 bp, Artificial Sequence
  Oligonucleotide primer for the detection of SNP TSC0055326
taagataatggc

SEQ ID NO: 365780 - DNA, 12 bp, Artificial Sequence
  Oligonucleotide primer for the detection of SNP TSC0055335
aaaattatgaaa

SEQ ID NO: 365781 - DNA, 12 bp, Artificial Sequence
  Oligonucleotide primer for the detection of SNP TSC0055337
aatttctctctt

SEQ ID NO: 365782 - DNA, 12 bp, Artificial Sequence
  Oligonucleotide primer for the detection of SNP TSC0055338
tactcaaatttt

SEQ ID NO: 365783 - DNA, 12 bp, Artificial Sequence
  Oligonucleotide primer for the detection of SNP TSC0055339
tttcaataaaat

SEQ ID NO: 365784 - DNA, 12 bp, Artificial Sequence
  Oligonucleotide primer for the detection of SNP TSC0055341
caaaaacccttc

SEQ ID NO: 365785 - DNA, 12 bp, Artificial Sequence
  Oligonucleotide primer for the detection of SNP TSC0055342
gagataaaaaat

SEQ ID NO: 365786 - DNA, 12 bp, Artificial Sequence
  Oligonucleotide primer for the detection of SNP TSC0055347
acccttcaaaaa

SEQ ID NO: 365787 - DNA, 12 bp, Artificial Sequence
  Oligonucleotide primer for the detection of SNP TSC0055347
taagtagtaaat

SEQ ID NO: 365788 - DNA, 12 bp, Artificial Sequence
  Oligonucleotide primer for the detection of SNP TSC0055347
gttttttagaag

SEQ ID NO: 365789 - DNA, 12 bp, Artificial Sequence
  Oligonucleotide primer for the detection of SNP TSC0055353
tacattttcaac

SEQ ID NO: 365790 - DNA, 12 bp, Artificial Sequence
  Oligonucleotide primer for the detection of SNP TSC0055353
ggaagtttttta

SEQ ID NO: 365791 - DNA, 12 bp, Artificial Sequence
  Oligonucleotide primer for the detection of SNP TSC0055354
aatatgtgtgaa

SEQ ID NO: 365792 - DNA, 12 bp, Artificial Sequence
  Oligonucleotide primer for the detection of SNP TSC0055354
aatacgtgtgaa

SEQ ID NO: 365793 - DNA, 12 bp, Artificial Sequence
  Oligonucleotide primer for the detection of SNP TSC0055355
ttacctaaaatc

SEQ ID NO: 365794 - DNA, 12 bp, Artificial Sequence
  Oligonucleotide primer for the detection of SNP TSC0055355
tattgataattg

SEQ ID NO: 365795 - DNA, 12 bp, Artificial Sequence
  Oligonucleotide primer for the detection of SNP TSC0055355
tattaataatta

SEQ ID NO: 365796 - DNA, 12 bp, Artificial Sequence
  Oligonucleotide primer for the detection of SNP TSC0004817
tttgatttttga

SEQ ID NO: 365797 - DNA, 12 bp, Artificial Sequence
  Oligonucleotide primer for the detection of SNP TSC0055357
ataaaacattct

SEQ ID NO: 365798 - DNA, 12 bp, Artificial Sequence
  Oligonucleotide primer for the detection of SNP TSC0055358
tagaatggtgag

SEQ ID NO: 365799 - DNA, 12 bp, Artificial Sequence
  Oligonucleotide primer for the detection of SNP TSC0055359
aaaacatactcc

SEQ ID NO: 365800 - DNA, 12 bp, Artificial Sequence
  Oligonucleotide primer for the detection of SNP TSC0055359
ggattttattag

SEQ ID NO: 365801 - DNA, 12 bp, Artificial Sequence
  Oligonucleotide primer for the detection of SNP TSC0055360
gttatgttatga

SEQ ID NO: 365802 - DNA, 12 bp, Artificial Sequence
  Oligonucleotide primer for the detection of SNP TSC0055361
aactttaatacc

SEQ ID NO: 365803 - DNA, 12 bp, Artificial Sequence
  Oligonucleotide primer for the detection of SNP TSC0055361
gatttagtagga

SEQ ID NO: 365804 - DNA, 12 bp, Artificial Sequence
  Oligonucleotide primer for the detection of SNP TSC0055362
atccacaaaacc

SEQ ID NO: 365805 - DNA, 12 bp, Artificial Sequence
  Oligonucleotide primer for the detection of SNP TSC0055362
ttggattagagt

SEQ ID NO: 365806 - DNA, 12 bp, Artificial Sequence
  Oligonucleotide primer for the detection of SNP TSC0055362
tcggattagagt

SEQ ID NO: 365807 - DNA, 12 bp, Artificial Sequence
  Oligonucleotide primer for the detection of SNP TSC0055362
tcaaatcaaaac

SEQ ID NO: 365808 - DNA, 12 bp, Artificial Sequence
  Oligonucleotide primer for the detection of SNP TSC0055362
tcgaatcaaaac

SEQ ID NO: 365809 - DNA, 12 bp, Artificial Sequence
  Oligonucleotide primer for the detection of SNP TSC0055362
gtttatagggtt

SEQ ID NO: 365810 - DNA, 12 bp, Artificial Sequence
  Oligonucleotide primer for the detection of SNP TSC0055363
tctattaacata

SEQ ID NO: 365811 - DNA, 12 bp, Artificial Sequence
  Oligonucleotide primer for the detection of SNP TSC0055363
ttaatattaata

SEQ ID NO: 365812 - DNA, 12 bp, Artificial Sequence
  Oligonucleotide primer for the detection of SNP TSC0055363
ttaatattaaca

SEQ ID NO: 365813 - DNA, 12 bp, Artificial Sequence
  Oligonucleotide primer for the detection of SNP TSC0007260
tttcttatctaa

SEQ ID NO: 365814 - DNA, 12 bp, Artificial Sequence
  Oligonucleotide primer for the detection of SNP TSC0007260
ttttagtaaagt

SEQ ID NO: 365815 - DNA, 12 bp, Artificial Sequence
  Oligonucleotide primer for the detection of SNP TSC0007260
acctcaacaaaa

SEQ ID NO: 365816 - DNA, 12 bp, Artificial Sequence
  Oligonucleotide primer for the detection of SNP TSC0007261
tttcctctctat

SEQ ID NO: 365817 - DNA, 12 bp, Artificial Sequence
  Oligonucleotide primer for the detection of SNP TSC0007261
agttaatttgaa

SEQ ID NO: 365818 - DNA, 12 bp, Artificial Sequence
  Oligonucleotide primer for the detection of SNP TSC0055366
ctaacttaaaca

SEQ ID NO: 365819 - DNA, 12 bp, Artificial Sequence
  Oligonucleotide primer for the detection of SNP TSC0055366
atacatttcctt

SEQ ID NO: 365820 - DNA, 12 bp, Artificial Sequence
  Oligonucleotide primer for the detection of SNP TSC0055367
gtttaagttagt

SEQ ID NO: 365821 - DNA, 12 bp, Artificial Sequence
  Oligonucleotide primer for the detection of SNP TSC0055367
tatccaaactaa

SEQ ID NO: 365822 - DNA, 12 bp, Artificial Sequence
  Oligonucleotide primer for the detection of SNP TSC0055367
agaaaataattt

SEQ ID NO: 365823 - DNA, 12 bp, Artificial Sequence
  Oligonucleotide primer for the detection of SNP TSC0055368
atattttaaggg

SEQ ID NO: 365824 - DNA, 12 bp, Artificial Sequence
  Oligonucleotide primer for the detection of SNP TSC0055375
cttaatatcctc

SEQ ID NO: 365825 - DNA, 12 bp, Artificial Sequence
  Oligonucleotide primer for the detection of SNP TSC0055375
taggatagggaa

SEQ ID NO: 365826 - DNA, 12 bp, Artificial Sequence
  Oligonucleotide primer for the detection of SNP TSC0055376
aatgttaaagta

SEQ ID NO: 365827 - DNA, 12 bp, Artificial Sequence
  Oligonucleotide primer for the detection of SNP TSC0055376
aatactaaaaca

SEQ ID NO: 365828 - DNA, 12 bp, Artificial Sequence
  Oligonucleotide primer for the detection of SNP TSC0055376
tttggaataggc

SEQ ID NO: 365829 - DNA, 12 bp, Artificial Sequence
  Oligonucleotide primer for the detection of SNP TSC0055378
tatttcttaaaa

SEQ ID NO: 365830 - DNA, 12 bp, Artificial Sequence
  Oligonucleotide primer for the detection of SNP TSC0055378
atgtagttttag

SEQ ID NO: 365831 - DNA, 12 bp, Artificial Sequence
  Oligonucleotide primer for the detection of SNP TSC0055378
acgtagttttag

SEQ ID NO: 365832 - DNA, 12 bp, Artificial Sequence
  Oligonucleotide primer for the detection of SNP TSC0055378
acaattttaaaa

SEQ ID NO: 365833 - DNA, 12 bp, Artificial Sequence
  Oligonucleotide primer for the detection of SNP TSC0055378
gcaattttaaaa

SEQ ID NO: 365834 - DNA, 12 bp, Artificial Sequence
  Oligonucleotide primer for the detection of SNP TSC0055379
attcataactcc

SEQ ID NO: 365835 - DNA, 12 bp, Artificial Sequence
  Oligonucleotide primer for the detection of SNP TSC0055379
gtgataagaata

SEQ ID NO: 365836 - DNA, 12 bp, Artificial Sequence
  Oligonucleotide primer for the detection of SNP TSC0055385
ctaacgtactat

SEQ ID NO: 365837 - DNA, 12 bp, Artificial Sequence
  Oligonucleotide primer for the detection of SNP TSC0055385
ttgaattttttg

SEQ ID NO: 365838 - DNA, 12 bp, Artificial Sequence
  Oligonucleotide primer for the detection of SNP TSC0055385
tcgaattttttg

SEQ ID NO: 365839 - DNA, 12 bp, Artificial Sequence
  Oligonucleotide primer for the detection of SNP TSC0055386
ataccttttaaa

SEQ ID NO: 365840 - DNA, 12 bp, Artificial Sequence
  Oligonucleotide primer for the detection of SNP TSC0055386
agtgttttattt

SEQ ID NO: 365841 - DNA, 12 bp, Artificial Sequence
  Oligonucleotide primer for the detection of SNP TSC0055386
atatcttatcta

SEQ ID NO: 365842 - DNA, 12 bp, Artificial Sequence
  Oligonucleotide primer for the detection of SNP TSC0055387
ttctacaccttc

SEQ ID NO: 365843 - DNA, 12 bp, Artificial Sequence
  Oligonucleotide primer for the detection of SNP TSC0055387
gagaatagtaaa

SEQ ID NO: 365844 - DNA, 12 bp, Artificial Sequence
  Oligonucleotide primer for the detection of SNP TSC0055388
atatttaaattc

SEQ ID NO: 365845 - DNA, 12 bp, Artificial Sequence
  Oligonucleotide primer for the detection of SNP TSC0055388
atttttatttgg

SEQ ID NO: 365846 - DNA, 12 bp, Artificial Sequence
  Oligonucleotide primer for the detection of SNP TSC0055389
aatataaggaat

SEQ ID NO: 365847 - DNA, 12 bp, Artificial Sequence
  Oligonucleotide primer for the detection of SNP TSC0055389
aagggtaaattt

SEQ ID NO: 365848 - DNA, 12 bp, Artificial Sequence
  Oligonucleotide primer for the detection of SNP TSC0055390
tctaatttatta

SEQ ID NO: 365849 - DNA, 12 bp, Artificial Sequence
  Oligonucleotide primer for the detection of SNP TSC0055390
atagtaaaagaa

SEQ ID NO: 365850 - DNA, 12 bp, Artificial Sequence
  Oligonucleotide primer for the detection of SNP TSC0055390
ttggtttgttat

SEQ ID NO: 365851 - DNA, 12 bp, Artificial Sequence
  Oligonucleotide primer for the detection of SNP TSC0055391
tcttcaaacaat

SEQ ID NO: 365852 - DNA, 12 bp, Artificial Sequence
  Oligonucleotide primer for the detection of SNP TSC0055391
atgagtatttaa

SEQ ID NO: 365853 - DNA, 12 bp, Artificial Sequence
  Oligonucleotide primer for the detection of SNP TSC0055392
ttctatatattt

SEQ ID NO: 365854 - DNA, 12 bp, Artificial Sequence
  Oligonucleotide primer for the detection of SNP TSC0055392
taataatggaaa

SEQ ID NO: 365855 - DNA, 12 bp, Artificial Sequence
  Oligonucleotide primer for the detection of SNP TSC0055393
gttggatgtagt

SEQ ID NO: 365856 - DNA, 12 bp, Artificial Sequence
  Oligonucleotide primer for the detection of SNP TSC0055393
attaaatacaat

SEQ ID NO: 365857 - DNA, 12 bp, Artificial Sequence
  Oligonucleotide primer for the detection of SNP TSC0055396
attgggagggag

SEQ ID NO: 365858 - DNA, 12 bp, Artificial Sequence
  Oligonucleotide primer for the detection of SNP TSC0055396
ggtgatgttgtt

SEQ ID NO: 365859 - DNA, 12 bp, Artificial Sequence
  Oligonucleotide primer for the detection of SNP TSC0055397
atcccaccctaa

SEQ ID NO: 365860 - DNA, 12 bp, Artificial Sequence
  Oligonucleotide primer for the detection of SNP TSC0055397
ataaaattgttt

SEQ ID NO: 365861 - DNA, 12 bp, Artificial Sequence
  Oligonucleotide primer for the detection of SNP TSC0055397
aataaaactatc

SEQ ID NO: 365862 - DNA, 12 bp, Artificial Sequence
  Oligonucleotide primer for the detection of SNP TSC0055407
caccataaaatt

SEQ ID NO: 365863 - DNA, 12 bp, Artificial Sequence
  Oligonucleotide primer for the detection of SNP TSC0055407
gaatatttttaa

SEQ ID NO: 365864 - DNA, 12 bp, Artificial Sequence
  Oligonucleotide primer for the detection of SNP TSC0055408
tttgagtgtgtg

SEQ ID NO: 365865 - DNA, 12 bp, Artificial Sequence
  Oligonucleotide primer for the detection of SNP TSC0006409
catcaaaaccac

SEQ ID NO: 365866 - DNA, 12 bp, Artificial Sequence
  Oligonucleotide primer for the detection of SNP TSC0006409
gagtttttgaga

SEQ ID NO: 365867 - DNA, 12 bp, Artificial Sequence
  Oligonucleotide primer for the detection of SNP TSC0006410
taactacactac

SEQ ID NO: 365868 - DNA, 12 bp, Artificial Sequence
  Oligonucleotide primer for the detection of SNP TSC0006410
taactacgctac

SEQ ID NO: 365869 - DNA, 12 bp, Artificial Sequence
  Oligonucleotide primer for the detection of SNP TSC0006410
tgggatgtagtg

SEQ ID NO: 365870 - DNA, 12 bp, Artificial Sequence
  Oligonucleotide primer for the detection of SNP TSC0006410
taattgtgttgt

SEQ ID NO: 365871 - DNA, 12 bp, Artificial Sequence
  Oligonucleotide primer for the detection of SNP TSC0006410
taattgcgttgt

SEQ ID NO: 365872 - DNA, 12 bp, Artificial Sequence
  Oligonucleotide primer for the detection of SNP TSC0006410
taattgtgttgc

SEQ ID NO: 365873 - DNA, 12 bp, Artificial Sequence
  Oligonucleotide primer for the detection of SNP TSC0006410
taattgcgttgc

SEQ ID NO: 365874 - DNA, 12 bp, Artificial Sequence
  Oligonucleotide primer for the detection of SNP TSC0055412
tttatggtggta

SEQ ID NO: 365875 - DNA, 12 bp, Artificial Sequence
  Oligonucleotide primer for the detection of SNP TSC0055414
ggtaaaatattt

SEQ ID NO: 365876 - DNA, 12 bp, Artificial Sequence
  Oligonucleotide primer for the detection of SNP TSC0055414
aacaaaatactc

SEQ ID NO: 365877 - DNA, 12 bp, Artificial Sequence
  Oligonucleotide primer for the detection of SNP TSC0055414
atagggaataag

SEQ ID NO: 365878 - DNA, 12 bp, Artificial Sequence
  Oligonucleotide primer for the detection of SNP TSC0055416
ttttaggttgta

SEQ ID NO: 365879 - DNA, 12 bp, Artificial Sequence
  Oligonucleotide primer for the detection of SNP TSC0055416
ttctaaattata

SEQ ID NO: 365880 - DNA, 12 bp, Artificial Sequence
  Oligonucleotide primer for the detection of SNP TSC0055416
ttgaagtaggtt

SEQ ID NO: 365881 - DNA, 12 bp, Artificial Sequence
  Oligonucleotide primer for the detection of SNP TSC0055417
ctaaactttttc

SEQ ID NO: 365882 - DNA, 12 bp, Artificial Sequence
  Oligonucleotide primer for the detection of SNP TSC0055417
tattataatcta

SEQ ID NO: 365883 - DNA, 12 bp, Artificial Sequence
  Oligonucleotide primer for the detection of SNP TSC0055421
attatttattac

SEQ ID NO: 365884 - DNA, 12 bp, Artificial Sequence
  Oligonucleotide primer for the detection of SNP TSC0055421
aagagtattaag

SEQ ID NO: 365885 - DNA, 12 bp, Artificial Sequence
  Oligonucleotide primer for the detection of SNP TSC0055422
tcacaacactac

SEQ ID NO: 365886 - DNA, 12 bp, Artificial Sequence
  Oligonucleotide primer for the detection of SNP TSC0055422
tcacgacactac

SEQ ID NO: 365887 - DNA, 12 bp, Artificial Sequence
  Oligonucleotide primer for the detection of SNP TSC0055422
tcgcaacactac

SEQ ID NO: 365888 - DNA, 12 bp, Artificial Sequence
  Oligonucleotide primer for the detection of SNP TSC0055422
tcgcgacactac

SEQ ID NO: 365889 - DNA, 12 bp, Artificial Sequence
  Oligonucleotide primer for the detection of SNP TSC0055424
aattcaatcaat

SEQ ID NO: 365890 - DNA, 12 bp, Artificial Sequence
  Oligonucleotide primer for the detection of SNP TSC0055424
atttttaatcca

SEQ ID NO: 365891 - DNA, 12 bp, Artificial Sequence
  Oligonucleotide primer for the detection of SNP TSC0055424
atttaattaatc

SEQ ID NO: 365892 - DNA, 12 bp, Artificial Sequence
  Oligonucleotide primer for the detection of SNP TSC0055425
ttaaataattgt

SEQ ID NO: 365893 - DNA, 12 bp, Artificial Sequence
  Oligonucleotide primer for the detection of SNP TSC0055425
aaaaaaggagta

SEQ ID NO: 365894 - DNA, 12 bp, Artificial Sequence
  Oligonucleotide primer for the detection of SNP TSC0055428
ctacaacttcaa

SEQ ID NO: 365895 - DNA, 12 bp, Artificial Sequence
  Oligonucleotide primer for the detection of SNP TSC0055428
aatattctttta

SEQ ID NO: 365896 - DNA, 12 bp, Artificial Sequence
  Oligonucleotide primer for the detection of SNP TSC0055428
tataattttaac

SEQ ID NO: 365897 - DNA, 12 bp, Artificial Sequence
  Oligonucleotide primer for the detection of SNP TSC0055429
tcactccaaaaa

SEQ ID NO: 365898 - DNA, 12 bp, Artificial Sequence
  Oligonucleotide primer for the detection of SNP TSC0055429
tcactccgaaaa

SEQ ID NO: 365899 - DNA, 12 bp, Artificial Sequence
  Oligonucleotide primer for the detection of SNP TSC0055429
atggtagtagtt

SEQ ID NO: 365900 - DNA, 12 bp, Artificial Sequence
  Oligonucleotide primer for the detection of SNP TSC0055429
ataacaataact

SEQ ID NO: 365901 - DNA, 12 bp, Artificial Sequence
  Oligonucleotide primer for the detection of SNP TSC0055429
ttatttcgaaag

SEQ ID NO: 365902 - DNA, 12 bp, Artificial Sequence
  Oligonucleotide primer for the detection of SNP TSC0055431
agttatttttta

SEQ ID NO: 365903 - DNA, 12 bp, Artificial Sequence
  Oligonucleotide primer for the detection of SNP TSC0055432
cactaaatcttt

SEQ ID NO: 365904 - DNA, 12 bp, Artificial Sequence
  Oligonucleotide primer for the detection of SNP TSC0055432
gatatttgtgta

SEQ ID NO: 365905 - DNA, 12 bp, Artificial Sequence
  Oligonucleotide primer for the detection of SNP TSC0055433
aatataagggtg

SEQ ID NO: 365906 - DNA, 12 bp, Artificial Sequence
  Oligonucleotide primer for the detection of SNP TSC0055434
ttctaaaatatc

SEQ ID NO: 365907 - DNA, 12 bp, Artificial Sequence
  Oligonucleotide primer for the detection of SNP TSC0055435
aacaaacaatat

SEQ ID NO: 365908 - DNA, 12 bp, Artificial Sequence
  Oligonucleotide primer for the detection of SNP TSC0055436
tcacaactccca

SEQ ID NO: 365909 - DNA, 12 bp, Artificial Sequence
  Oligonucleotide primer for the detection of SNP TSC0055436
tgagcgtttttt

SEQ ID NO: 365910 - DNA, 12 bp, Artificial Sequence
  Oligonucleotide primer for the detection of SNP TSC0055436
taaacacctctc

SEQ ID NO: 365911 - DNA, 12 bp, Artificial Sequence
  Oligonucleotide primer for the detection of SNP TSC0055436
taaacgcctctc

SEQ ID NO: 365912 - DNA, 12 bp, Artificial Sequence
  Oligonucleotide primer for the detection of SNP TSC0055437
ctaccaaccacc

SEQ ID NO: 365913 - DNA, 12 bp, Artificial Sequence
  Oligonucleotide primer for the detection of SNP TSC0055437
gaggggtaatta

SEQ ID NO: 365914 - DNA, 12 bp, Artificial Sequence
  Oligonucleotide primer for the detection of SNP TSC0055438
ctcacttactca

SEQ ID NO: 365915 - DNA, 12 bp, Artificial Sequence
  Oligonucleotide primer for the detection of SNP TSC0055438
gtgggatgaaag

SEQ ID NO: 365916 - DNA, 12 bp, Artificial Sequence
  Oligonucleotide primer for the detection of SNP TSC0055439
tcataaaaacgt

SEQ ID NO: 365917 - DNA, 12 bp, Artificial Sequence
  Oligonucleotide primer for the detection of SNP TSC0055439
gtttataagagg

SEQ ID NO: 365918 - DNA, 12 bp, Artificial Sequence
  Oligonucleotide primer for the detection of SNP TSC0009921
ctcaaaatttat

SEQ ID NO: 365919 - DNA, 12 bp, Artificial Sequence
  Oligonucleotide primer for the detection of SNP TSC0009921
cctccaccaacc

SEQ ID NO: 365920 - DNA, 12 bp, Artificial Sequence
  Oligonucleotide primer for the detection of SNP TSC0055443
ttctattccctt

SEQ ID NO: 365921 - DNA, 12 bp, Artificial Sequence
  Oligonucleotide primer for the detection of SNP TSC0055443
gaatgggttaag

SEQ ID NO: 365922 - DNA, 12 bp, Artificial Sequence
  Oligonucleotide primer for the detection of SNP TSC0055444
attatgttattg

SEQ ID NO: 365923 - DNA, 12 bp, Artificial Sequence
  Oligonucleotide primer for the detection of SNP TSC0055445
tttagtttgggt

SEQ ID NO: 365924 - DNA, 12 bp, Artificial Sequence
  Oligonucleotide primer for the detection of SNP TSC0055445
tccaacctaaat

SEQ ID NO: 365925 - DNA, 12 bp, Artificial Sequence
  Oligonucleotide primer for the detection of SNP TSC0055446
atttctaacttt

SEQ ID NO: 365926 - DNA, 12 bp, Artificial Sequence
  Oligonucleotide primer for the detection of SNP TSC0055446
gtattttataaa

SEQ ID NO: 365927 - DNA, 12 bp, Artificial Sequence
  Oligonucleotide primer for the detection of SNP TSC0055447
tttttaaagtaa

SEQ ID NO: 365928 - DNA, 12 bp, Artificial Sequence
  Oligonucleotide primer for the detection of SNP TSC0055447
ctttcaaaataa

SEQ ID NO: 365929 - DNA, 12 bp, Artificial Sequence
  Oligonucleotide primer for the detection of SNP TSC0055447
atatattagtgt

SEQ ID NO: 365930 - DNA, 12 bp, Artificial Sequence
  Oligonucleotide primer for the detection of SNP TSC0055448
tagatttggtat

SEQ ID NO: 365931 - DNA, 12 bp, Artificial Sequence
  Oligonucleotide primer for the detection of SNP TSC0055449
attgattatttt

SEQ ID NO: 365932 - DNA, 12 bp, Artificial Sequence
  Oligonucleotide primer for the detection of SNP TSC0055449
attaactattct

SEQ ID NO: 365933 - DNA, 12 bp, Artificial Sequence
  Oligonucleotide primer for the detection of SNP TSC0055449
agataatttagt

SEQ ID NO: 365934 - DNA, 12 bp, Artificial Sequence
  Oligonucleotide primer for the detection of SNP TSC0055452
tcatttattcat

SEQ ID NO: 365935 - DNA, 12 bp, Artificial Sequence
  Oligonucleotide primer for the detection of SNP TSC0055452
tagtgatttgag

SEQ ID NO: 365936 - DNA, 12 bp, Artificial Sequence
  Oligonucleotide primer for the detection of SNP TSC0004949
tttaggttacgg

SEQ ID NO: 365937 - DNA, 12 bp, Artificial Sequence
  Oligonucleotide primer for the detection of SNP TSC0004950
ggtttcgaattt

SEQ ID NO: 365938 - DNA, 12 bp, Artificial Sequence
  Oligonucleotide primer for the detection of SNP TSC0004950
ggtttcgaattc

SEQ ID NO: 365939 - DNA, 12 bp, Artificial Sequence
  Oligonucleotide primer for the detection of SNP TSC0055454
tataatctatac

SEQ ID NO: 365940 - DNA, 12 bp, Artificial Sequence
  Oligonucleotide primer for the detection of SNP TSC0055454
ttgttaaatgta

SEQ ID NO: 365941 - DNA, 12 bp, Artificial Sequence
  Oligonucleotide primer for the detection of SNP TSC0055454
ctaccaaataca

SEQ ID NO: 365942 - DNA, 12 bp, Artificial Sequence
  Oligonucleotide primer for the detection of SNP TSC0055454
tgtaatttgtgt

SEQ ID NO: 365943 - DNA, 12 bp, Artificial Sequence
  Oligonucleotide primer for the detection of SNP TSC0055454
tgtaatttgtgc

SEQ ID NO: 365944 - DNA, 12 bp, Artificial Sequence
  Oligonucleotide primer for the detection of SNP TSC0055456
cccataactaac

SEQ ID NO: 365945 - DNA, 12 bp, Artificial Sequence
  Oligonucleotide primer for the detection of SNP TSC0055456
attgtataggag

SEQ ID NO: 365946 - DNA, 12 bp, Artificial Sequence
  Oligonucleotide primer for the detection of SNP TSC0055456
atcgtataggag

SEQ ID NO: 365947 - DNA, 12 bp, Artificial Sequence
  Oligonucleotide primer for the detection of SNP TSC0055456
atcgcacaaaaa

SEQ ID NO: 365948 - DNA, 12 bp, Artificial Sequence
  Oligonucleotide primer for the detection of SNP TSC0055456
tttatggttgac

SEQ ID NO: 365949 - DNA, 12 bp, Artificial Sequence
  Oligonucleotide primer for the detection of SNP TSC0055457
tgtaatttgggg

SEQ ID NO: 365950 - DNA, 12 bp, Artificial Sequence
  Oligonucleotide primer for the detection of SNP TSC0055458
taaattatagtt

SEQ ID NO: 365951 - DNA, 12 bp, Artificial Sequence
  Oligonucleotide primer for the detection of SNP TSC0055458
taaattatagtc

SEQ ID NO: 365952 - DNA, 12 bp, Artificial Sequence
  Oligonucleotide primer for the detection of SNP TSC0055458
caaatcataacc

SEQ ID NO: 365953 - DNA, 12 bp, Artificial Sequence
  Oligonucleotide primer for the detection of SNP TSC0055458
atgtatgtgatg

SEQ ID NO: 365954 - DNA, 12 bp, Artificial Sequence
  Oligonucleotide primer for the detection of SNP TSC0055459
ctaaaatcacac

SEQ ID NO: 365955 - DNA, 12 bp, Artificial Sequence
  Oligonucleotide primer for the detection of SNP TSC0055460
ctcttatattca

SEQ ID NO: 365956 - DNA, 12 bp, Artificial Sequence
  Oligonucleotide primer for the detection of SNP TSC0055460
ctcttatattcg

SEQ ID NO: 365957 - DNA, 12 bp, Artificial Sequence
  Oligonucleotide primer for the detection of SNP TSC0055460
ttgtggtagatg

SEQ ID NO: 365958 - DNA, 12 bp, Artificial Sequence
  Oligonucleotide primer for the detection of SNP TSC0055460
ttgcggtagatg

SEQ ID NO: 365959 - DNA, 12 bp, Artificial Sequence
  Oligonucleotide primer for the detection of SNP TSC0055460
ctacgataaata

SEQ ID NO: 365960 - DNA, 12 bp, Artificial Sequence
  Oligonucleotide primer for the detection of SNP TSC0055460
tttttgtgtttg

SEQ ID NO: 365961 - DNA, 12 bp, Artificial Sequence
  Oligonucleotide primer for the detection of SNP TSC0055460
tttttgtgttcg

SEQ ID NO: 365962 - DNA, 12 bp, Artificial Sequence
  Oligonukleotid-Primer
tatattcaacat

SEQ ID NO: 365963 - DNA, 12 bp, Artificial Sequence
  Oligonucleotide primer for the detection of SNP TSC0055461
tatattcgacat

SEQ ID NO: 365964 - DNA, 12 bp, Artificial Sequence
  Oligonucleotide primer for the detection of SNP TSC0055461
ttcgttgtggta

SEQ ID NO: 365965 - DNA, 12 bp, Artificial Sequence
  Oligonucleotide primer for the detection of SNP TSC0055461
tttgttgcggta

SEQ ID NO: 365966 - DNA, 12 bp, Artificial Sequence
  Oligonucleotide primer for the detection of SNP TSC0055461
ttcgttgcggta

SEQ ID NO: 365967 - DNA, 12 bp, Artificial Sequence
  Oligonucleotide primer for the detection of SNP TSC0055462
taaaaattacta

SEQ ID NO: 365968 - DNA, 12 bp, Artificial Sequence
  Oligonucleotide primer for the detection of SNP TSC0055462
ttataagattat

SEQ ID NO: 365969 - DNA, 12 bp, Artificial Sequence
  Oligonucleotide primer for the detection of SNP TSC0055462
ttacaaaatcat

SEQ ID NO: 365970 - DNA, 12 bp, Artificial Sequence
  Oligonucleotide primer for the detection of SNP TSC0055462
taagagttgtta

SEQ ID NO: 365971 - DNA, 12 bp, Artificial Sequence
  Oligonucleotide primer for the detection of SNP TSC0055464
atatactataaa

SEQ ID NO: 365972 - DNA, 12 bp, Artificial Sequence
  Oligonucleotide primer for the detection of SNP TSC0055464
aataattaagat

SEQ ID NO: 365973 - DNA, 12 bp, Artificial Sequence
  Oligonucleotide primer for the detection of SNP TSC0055464
gtatgttataaa

SEQ ID NO: 365974 - DNA, 12 bp, Artificial Sequence
  Oligonucleotide primer for the detection of SNP TSC0055465
ctaacctccaaa

SEQ ID NO: 365975 - DNA, 12 bp, Artificial Sequence
  Oligonucleotide primer for the detection of SNP TSC0055465
gttttttcgtag

SEQ ID NO: 365976 - DNA, 12 bp, Artificial Sequence
  Oligonucleotide primer for the detection of SNP TSC0055465
atcctttcacaa

SEQ ID NO: 365977 - DNA, 12 bp, Artificial Sequence
  Oligonucleotide primer for the detection of SNP TSC0055465
atcctttcgcaa

SEQ ID NO: 365978 - DNA, 12 bp, Artificial Sequence
  Oligonucleotide primer for the detection of SNP TSC0055465
ttggtttttaga

SEQ ID NO: 365979 - DNA, 12 bp, Artificial Sequence
  Oligonucleotide primer for the detection of SNP TSC0055466
caataattaatt

SEQ ID NO: 365980 - DNA, 12 bp, Artificial Sequence
  Oligonucleotide primer for the detection of SNP TSC0055466
agtaataatata

SEQ ID NO: 365981 - DNA, 12 bp, Artificial Sequence
  Oligonucleotide primer for the detection of SNP TSC0055468
ataaaattgatt

SEQ ID NO: 365982 - DNA, 12 bp, Artificial Sequence
  Oligonucleotide primer for the detection of SNP TSC0055468
tagattgaataa

SEQ ID NO: 365983 - DNA, 12 bp, Artificial Sequence
  Oligonucleotide primer for the detection of SNP TSC0055469
aatcttcataac

SEQ ID NO: 365984 - DNA, 12 bp, Artificial Sequence
  Oligonucleotide primer for the detection of SNP TSC0055469
aatcttcgtaac

SEQ ID NO: 365985 - DNA, 12 bp, Artificial Sequence
  Oligonucleotide primer for the detection of SNP TSC0055469
tacttttcccta

SEQ ID NO: 365986 - DNA, 12 bp, Artificial Sequence
  Oligonucleotide primer for the detection of SNP TSC0055469
aatttttgtagt

SEQ ID NO: 365987 - DNA, 12 bp, Artificial Sequence
  Oligonucleotide primer for the detection of SNP TSC0055469
aattttcgtagt

SEQ ID NO: 365988 - DNA, 12 bp, Artificial Sequence
  Oligonucleotide primer for the detection of SNP TSC0055471
aactttctatac

SEQ ID NO: 365989 - DNA, 12 bp, Artificial Sequence
  Oligonucleotide primer for the detection of SNP TSC0055471
ttataacctaaa

SEQ ID NO: 365990 - DNA, 12 bp, Artificial Sequence
  Oligonucleotide primer for the detection of SNP TSC0055476
catctctctatt

SEQ ID NO: 365991 - DNA, 12 bp, Artificial Sequence
  Oligonucleotide primer for the detection of SNP TSC0055476
aggtgttgggaa

SEQ ID NO: 365992 - DNA, 12 bp, Artificial Sequence
  Oligonucleotide primer for the detection of SNP TSC0055479
cataattcctaa

SEQ ID NO: 365993 - DNA, 12 bp, Artificial Sequence
  Oligonucleotide primer for the detection of SNP TSC0055479
cgtaattcctaa

SEQ ID NO: 365994 - DNA, 12 bp, Artificial Sequence
  Oligonucleotide primer for the detection of SNP TSC0055479
atttaaacattt

SEQ ID NO: 365995 - DNA, 12 bp, Artificial Sequence
  Oligonucleotide primer for the detection of SNP TSC0055479
tgtggtttttaa

SEQ ID NO: 365996 - DNA, 12 bp, Artificial Sequence
  Oligonucleotide primer for the detection of SNP TSC0055479
cgtggtttttaa

SEQ ID NO: 365997 - DNA, 12 bp, Artificial Sequence
  Oligonucleotide primer for the detection of SNP TSC0055481
caacatccttaa

SEQ ID NO: 365998 - DNA, 12 bp, Artificial Sequence
  Oligonucleotide primer for the detection of SNP TSC0055481
caacgtccttaa

SEQ ID NO: 365999 - DNA, 12 bp, Artificial Sequence
  Oligonucleotide primer for the detection of SNP TSC0055481
ctccttaaaaaa

SEQ ID NO: 366000 - DNA, 12 bp, Artificial Sequence
  Oligonucleotide primer for the detection of SNP TSC0055481
agtaacgttttt

SEQ ID NO: 366001 - DNA, 12 bp, Artificial Sequence
  Oligonucleotide primer for the detection of SNP TSC0055483
aagtttgtgtta

SEQ ID NO: 366002 - DNA, 12 bp, Artificial Sequence
  Oligonucleotide primer for the detection of SNP TSC0055483
aagttcgtgtta

SEQ ID NO: 366003 - DNA, 12 bp, Artificial Sequence
  Oligonucleotide primer for the detection of SNP TSC0009518
acctaaaacata

SEQ ID NO: 366004 - DNA, 12 bp, Artificial Sequence
  Oligonucleotide primer for the detection of SNP TSC0009518
acattaaaatca

SEQ ID NO: 366005 - DNA, 12 bp, Artificial Sequence
  Oligonucleotide primer for the detection of SNP TSC0009518
gatttaagatat

SEQ ID NO: 366006 - DNA, 12 bp, Artificial Sequence
  Oligonucleotide primer for the detection of SNP TSC0055485
atttctacccat

SEQ ID NO: 366007 - DNA, 12 bp, Artificial Sequence
  Oligonucleotide primer for the detection of SNP TSC0055485
tgataagttggg

SEQ ID NO: 366008 - DNA, 12 bp, Artificial Sequence
  Oligonucleotide primer for the detection of SNP TSC0010430
aaacacatattt

SEQ ID NO: 366009 - DNA, 12 bp, Artificial Sequence
  Oligonucleotide primer for the detection of SNP TSC0055486
attctaattacc

SEQ ID NO: 366010 - DNA, 12 bp, Artificial Sequence
  Oligonucleotide primer for the detection of SNP TSC0055486
aatgattaaatt

SEQ ID NO: 366011 - DNA, 12 bp, Artificial Sequence
  Oligonucleotide primer for the detection of SNP TSC0055486
ataatcaaatca

SEQ ID NO: 366012 - DNA, 12 bp, Artificial Sequence
  Oligonucleotide primer for the detection of SNP TSC0055486
attttaattatt

SEQ ID NO: 366013 - DNA, 12 bp, Artificial Sequence
  Oligonucleotide primer for the detection of SNP TSC0055487
ttcattaatact

SEQ ID NO: 366014 - DNA, 12 bp, Artificial Sequence
  Oligonucleotide primer for the detection of SNP TSC0055487
atatttcattca

SEQ ID NO: 366015 - DNA, 12 bp, Artificial Sequence
  Oligonucleotide primer for the detection of SNP TSC0055487
tttattaatatt

SEQ ID NO: 366016 - DNA, 12 bp, Artificial Sequence
  Oligonucleotide primer for the detection of SNP TSC0055489
tattcattaact

SEQ ID NO: 366017 - DNA, 12 bp, Artificial Sequence
  Oligonucleotide primer for the detection of SNP TSC0055490
attaatatacca

SEQ ID NO: 366018 - DNA, 12 bp, Artificial Sequence
  Oligonucleotide primer for the detection of SNP TSC0055490
atcttttatata

SEQ ID NO: 366019 - DNA, 12 bp, Artificial Sequence
  Oligonucleotide primer for the detection of SNP TSC0055490
gttaatgtatta

SEQ ID NO: 366020 - DNA, 12 bp, Artificial Sequence
  Oligonucleotide primer for the detection of SNP TSC0055491
aatataacattc

SEQ ID NO: 366021 - DNA, 12 bp, Artificial Sequence
  Oligonucleotide primer for the detection of SNP TSC0055492
aaattacataca

SEQ ID NO: 366022 - DNA, 12 bp, Artificial Sequence
  Oligonucleotide primer for the detection of SNP TSC0055492
aaattacgtaca

SEQ ID NO: 366023 - DNA, 12 bp, Artificial Sequence
  Oligonucleotide primer for the detection of SNP TSC0055492
ttaatttactaa

SEQ ID NO: 366024 - DNA, 12 bp, Artificial Sequence
  Oligonucleotide primer for the detection of SNP TSC0055492
gagttatgtata

SEQ ID NO: 366025 - DNA, 12 bp, Artificial Sequence
  Oligonucleotide primer for the detection of SNP TSC0055492
gagttacgtata

SEQ ID NO: 366026 - DNA, 12 bp, Artificial Sequence
  Oligonucleotide primer for the detection of SNP TSC0055493
aacacttatctc

SEQ ID NO: 366027 - DNA, 12 bp, Artificial Sequence
  Oligonucleotide primer for the detection of SNP TSC0055493
ttgggtttgagg

SEQ ID NO: 366028 - DNA, 12 bp, Artificial Sequence
  Oligonucleotide primer for the detection of SNP TSC0055496
ataaaaatccca

SEQ ID NO: 366029 - DNA, 12 bp, Artificial Sequence
  Oligonucleotide primer for the detection of SNP TSC0055496
tgttgatgattt

SEQ ID NO: 366030 - DNA, 12 bp, Artificial Sequence
  Oligonucleotide primer for the detection of SNP TSC0055496
actaataaccta

SEQ ID NO: 366031 - DNA, 12 bp, Artificial Sequence
  Oligonucleotide primer for the detection of SNP TSC0055497
cacatttacctc

SEQ ID NO: 366032 - DNA, 12 bp, Artificial Sequence
  Oligonucleotide primer for the detection of SNP TSC0055497
tttatattagtg

SEQ ID NO: 366033 - DNA, 12 bp, Artificial Sequence
  Oligonucleotide primer for the detection of SNP TSC0055497
tctacaccaata

SEQ ID NO: 366034 - DNA, 12 bp, Artificial Sequence
  Oligonucleotide primer for the detection of SNP TSC0055498
tactcaaacccc

SEQ ID NO: 366035 - DNA, 12 bp, Artificial Sequence
  Oligonucleotide primer for the detection of SNP TSC0055498
ttgtttgtataa

SEQ ID NO: 366036 - DNA, 12 bp, Artificial Sequence
  Oligonucleotide primer for the detection of SNP TSC0055498
ttatttatataa

SEQ ID NO: 366037 - DNA, 12 bp, Artificial Sequence
  Oligonucleotide primer for the detection of SNP TSC0055499
aattttttgttt

SEQ ID NO: 366038 - DNA, 12 bp, Artificial Sequence
  Oligonucleotide primer for the detection of SNP TSC0055499
aaactccctatc

SEQ ID NO: 366039 - DNA, 12 bp, Artificial Sequence
  Oligonucleotide primer for the detection of SNP TSC0055499
ggatagtagtag

SEQ ID NO: 366040 - DNA, 12 bp, Artificial Sequence
  Oligonucleotide primer for the detection of SNP TSC0055500
cattcaatttaa

SEQ ID NO: 366041 - DNA, 12 bp, Artificial Sequence
  Oligonucleotide primer for the detection of SNP TSC0055500
ttgaagttataa

SEQ ID NO: 366042 - DNA, 12 bp, Artificial Sequence
  Oligonucleotide primer for the detection of SNP TSC0055501
ccccacataaaa

SEQ ID NO: 366043 - DNA, 12 bp, Artificial Sequence
  Oligonucleotide primer for the detection of SNP TSC0055501
ggaatttaatat

SEQ ID NO: 366044 - DNA, 12 bp, Artificial Sequence
  Oligonucleotide primer for the detection of SNP TSC0055502
ctcaaattacat

SEQ ID NO: 366045 - DNA, 12 bp, Artificial Sequence
  Oligonucleotide primer for the detection of SNP TSC0055502
atgggtaaagtg

SEQ ID NO: 366046 - DNA, 12 bp, Artificial Sequence
  Oligonucleotide primer for the detection of SNP TSC0055502
atgggtaaagcg

SEQ ID NO: 366047 - DNA, 12 bp, Artificial Sequence
  Oligonucleotide primer for the detection of SNP TSC0055502
ataaacaaaacg

SEQ ID NO: 366048 - DNA, 12 bp, Artificial Sequence
  Oligonucleotide primer for the detection of SNP TSC0007319
ggaatgtagtgg

SEQ ID NO: 366049 - DNA, 12 bp, Artificial Sequence
  Oligonucleotide primer for the detection of SNP TSC0055503
gttgtttttaaa

SEQ ID NO: 366050 - DNA, 12 bp, Artificial Sequence
  Oligonucleotide primer for the detection of SNP TSC0055504
ctcatatttaat

SEQ ID NO: 366051 - DNA, 12 bp, Artificial Sequence
  Oligonucleotide primer for the detection of SNP TSC0005989
aaatccattaaa

SEQ ID NO: 366052 - DNA, 12 bp, Artificial Sequence
  Oligonucleotide primer for the detection of SNP TSC0005989
aatttgtttgat

SEQ ID NO: 366053 - DNA, 12 bp, Artificial Sequence
  Oligonucleotide primer for the detection of SNP TSC0005989
aatctacttaat

SEQ ID NO: 366054 - DNA, 12 bp, Artificial Sequence
  Oligonucleotide primer for the detection of SNP TSC0005989
tttattagattt

SEQ ID NO: 366055 - DNA, 12 bp, Artificial Sequence
  Oligonucleotide primer for the detection of SNP TSC0055505
atactaaaaatt

SEQ ID NO: 366056 - DNA, 12 bp, Artificial Sequence
  Oligonucleotide primer for the detection of SNP TSC0055505
gatagaattaga

SEQ ID NO: 366057 - DNA, 12 bp, Artificial Sequence
  Oligonucleotide primer for the detection of SNP TSC0055506
atcctaacccta

SEQ ID NO: 366058 - DNA, 12 bp, Artificial Sequence
  Oligonucleotide primer for the detection of SNP TSC0055506
tgggtggtggaa

SEQ ID NO: 366059 - DNA, 12 bp, Artificial Sequence
  Oligonucleotide primer for the detection of SNP TSC0055513
aaattatttttg

SEQ ID NO: 366060 - DNA, 12 bp, Artificial Sequence
  Oligonucleotide primer for the detection of SNP TSC0055515
aatagtttttat

SEQ ID NO: 366061 - DNA, 12 bp, Artificial Sequence
  Oligonucleotide primer for the detection of SNP TSC0055517
ttgaggtaattt

SEQ ID NO: 366062 - DNA, 12 bp, Artificial Sequence
  Oligonucleotide primer for the detection of SNP TSC0055517
aataaggatgag

SEQ ID NO: 366063 - DNA, 12 bp, Artificial Sequence
  Oligonucleotide primer for the detection of SNP TSC0055518
ataattcccaca

SEQ ID NO: 366064 - DNA, 12 bp, Artificial Sequence
  Oligonucleotide primer for the detection of SNP TSC0055518
ataattcccacg

SEQ ID NO: 366065 - DNA, 12 bp, Artificial Sequence
  Oligonucleotide primer for the detection of SNP TSC0055518
taattcccacac

SEQ ID NO: 366066 - DNA, 12 bp, Artificial Sequence
  Oligonucleotide primer for the detection of SNP TSC0055518
gtaatttttatg

SEQ ID NO: 366067 - DNA, 12 bp, Artificial Sequence
  Oligonucleotide primer for the detection of SNP TSC0055518
gtaatttttacg

SEQ ID NO: 366068 - DNA, 12 bp, Artificial Sequence
  Oligonucleotide primer for the detection of SNP TSC0055519
catttaaaatct

SEQ ID NO: 366069 - DNA, 12 bp, Artificial Sequence
  Oligonucleotide primer for the detection of SNP TSC0055519
ggttggtttcga

SEQ ID NO: 366070 - DNA, 12 bp, Artificial Sequence
  Oligonucleotide primer for the detection of SNP TSC0055520
atttgggaggtg

SEQ ID NO: 366071 - DNA, 12 bp, Artificial Sequence
  Oligonucleotide primer for the detection of SNP TSC0055520
attcgggaggtg

SEQ ID NO: 366072 - DNA, 12 bp, Artificial Sequence
  Oligonucleotide primer for the detection of SNP TSC0055520
atttgggaggcg

SEQ ID NO: 366073 - DNA, 12 bp, Artificial Sequence
  Oligonucleotide primer for the detection of SNP TSC0055520
attcgggaggcg

SEQ ID NO: 366074 - DNA, 12 bp, Artificial Sequence
  Oligonucleotide primer for the detection of SNP TSC0055521
atttaactttaa

SEQ ID NO: 366075 - DNA, 12 bp, Artificial Sequence
  Oligonucleotide primer for the detection of SNP TSC0055521
gtggggttattg

SEQ ID NO: 366076 - DNA, 12 bp, Artificial Sequence
  Oligonucleotide primer for the detection of SNP TSC0055521
gtggggttatcg

SEQ ID NO: 366077 - DNA, 12 bp, Artificial Sequence
  Oligonucleotide primer for the detection of SNP TSC0055521
taaaaccaccaa

SEQ ID NO: 366078 - DNA, 12 bp, Artificial Sequence
  Oligonucleotide primer for the detection of SNP TSC0055521
taaaaccaccga

SEQ ID NO: 366079 - DNA, 12 bp, Artificial Sequence
  Oligonucleotide primer for the detection of SNP TSC0055521
tggtttggtttt

SEQ ID NO: 366080 - DNA, 12 bp, Artificial Sequence
  Oligonucleotide primer for the detection of SNP TSC0008113
aaaattattatt

SEQ ID NO: 366081 - DNA, 12 bp, Artificial Sequence
  Oligonucleotide primer for the detection of SNP TSC0008113
aaaattattatc

SEQ ID NO: 366082 - DNA, 12 bp, Artificial Sequence
  Oligonucleotide primer for the detection of SNP TSC0008113
aaaattatcacc

SEQ ID NO: 366083 - DNA, 12 bp, Artificial Sequence
  Oligonucleotide primer for the detection of SNP TSC0008114
tctctcttacac

SEQ ID NO: 366084 - DNA, 12 bp, Artificial Sequence
  Oligonucleotide primer for the detection of SNP TSC0008114
taggatgaattt

SEQ ID NO: 366085 - DNA, 12 bp, Artificial Sequence
  Oligonucleotide primer for the detection of SNP TSC0004765
tatataacccta

SEQ ID NO: 366086 - DNA, 12 bp, Artificial Sequence
  Oligonucleotide primer for the detection of SNP TSC0055531
aacctcaaaact

SEQ ID NO: 366087 - DNA, 12 bp, Artificial Sequence
  Oligonucleotide primer for the detection of SNP TSC0055531
gacctcaaaact

SEQ ID NO: 366088 - DNA, 12 bp, Artificial Sequence
  Oligonucleotide primer for the detection of SNP TSC0010641
catacttataat

SEQ ID NO: 366089 - DNA, 12 bp, Artificial Sequence
  Oligonucleotide primer for the detection of SNP TSC0010641
ttgagtaatagg

SEQ ID NO: 366090 - DNA, 12 bp, Artificial Sequence
  Oligonucleotide primer for the detection of SNP TSC0055533
cattcccaaaaa

SEQ ID NO: 366091 - DNA, 12 bp, Artificial Sequence
  Oligonucleotide primer for the detection of SNP TSC0055533
cattcccgaaaa

SEQ ID NO: 366092 - DNA, 12 bp, Artificial Sequence
  Oligonucleotide primer for the detection of SNP TSC0055533
ttatgatttggt

SEQ ID NO: 366093 - DNA, 12 bp, Artificial Sequence
  Oligonucleotide primer for the detection of SNP TSC0055533
ctataatttaat

SEQ ID NO: 366094 - DNA, 12 bp, Artificial Sequence
  Oligonucleotide primer for the detection of SNP TSC0055533
tatttttgaaga

SEQ ID NO: 366095 - DNA, 12 bp, Artificial Sequence
  Oligonucleotide primer for the detection of SNP TSC0055533
tattttcgaaga

SEQ ID NO: 366096 - DNA, 12 bp, Artificial Sequence
  Oligonucleotide primer for the detection of SNP TSC0055534
aaaattttaagt

SEQ ID NO: 366097 - DNA, 12 bp, Artificial Sequence
  Oligonucleotide primer for the detection of SNP TSC0055534
aaaatttcaaac

SEQ ID NO: 366098 - DNA, 12 bp, Artificial Sequence
  Oligonucleotide primer for the detection of SNP TSC0055534
tttaaggagggt

SEQ ID NO: 366099 - DNA, 12 bp, Artificial Sequence
  Oligonucleotide primer for the detection of SNP TSC0005372
acacataaatat

SEQ ID NO: 366100 - DNA, 12 bp, Artificial Sequence
  Oligonucleotide primer for the detection of SNP TSC0055542
aaattcaaaatc

SEQ ID NO: 366101 - DNA, 12 bp, Artificial Sequence
  Oligonucleotide primer for the detection of SNP TSC0055542
ctactaactcct

SEQ ID NO: 366102 - DNA, 12 bp, Artificial Sequence
  Oligonucleotide primer for the detection of SNP TSC0055542
aagtttaagatt

SEQ ID NO: 366103 - DNA, 12 bp, Artificial Sequence
  Oligonucleotide primer for the detection of SNP TSC0055543
ctaaaaactact

SEQ ID NO: 366104 - DNA, 12 bp, Artificial Sequence
  Oligonucleotide primer for the detection of SNP TSC0055543
tttggattttga

SEQ ID NO: 366105 - DNA, 12 bp, Artificial Sequence
  Oligonucleotide primer for the detection of SNP TSC0010825
taacttccacta

SEQ ID NO: 366106 - DNA, 12 bp, Artificial Sequence
  Oligonucleotide primer for the detection of SNP TSC0010825
tggaagtagttt

SEQ ID NO: 366107 - DNA, 12 bp, Artificial Sequence
  Oligonucleotide primer for the detection of SNP TSC0009902
attcgggttttt

SEQ ID NO: 366108 - DNA, 12 bp, Artificial Sequence
  Oligonucleotide primer for the detection of SNP TSC0009902
attcgaatccct

SEQ ID NO: 366109 - DNA, 12 bp, Artificial Sequence
  Oligonucleotide primer for the detection of SNP TSC0009902
aattttgtagtg

SEQ ID NO: 366110 - DNA, 12 bp, Artificial Sequence
  Oligonucleotide primer for the detection of SNP TSC0055545
tagaggaatatt

SEQ ID NO: 366111 - DNA, 12 bp, Artificial Sequence
  Oligonucleotide primer for the detection of SNP TSC0055545
taaagagttgga

SEQ ID NO: 366112 - DNA, 12 bp, Artificial Sequence
  Oligonucleotide primer for the detection of SNP TSC0055546
aacaacttctaa

SEQ ID NO: 366113 - DNA, 12 bp, Artificial Sequence
  Oligonucleotide primer for the detection of SNP TSC0055546
atatgggtgtgt

SEQ ID NO: 366114 - DNA, 12 bp, Artificial Sequence
  Oligonucleotide primer for the detection of SNP TSC0055547
aggtattatttg

SEQ ID NO: 366115 - DNA, 12 bp, Artificial Sequence
  Oligonucleotide primer for the detection of SNP TSC0055548
aaatatattcat

SEQ ID NO: 366116 - DNA, 12 bp, Artificial Sequence
  Oligonucleotide primer for the detection of SNP TSC0055548
ataatagtgata

SEQ ID NO: 366117 - DNA, 12 bp, Artificial Sequence
  Oligonucleotide primer for the detection of SNP TSC0055549
aatttctaaatc

SEQ ID NO: 366118 - DNA, 12 bp, Artificial Sequence
  Oligonucleotide primer for the detection of SNP TSC0055549
gggtggtatgtt

SEQ ID NO: 366119 - DNA, 12 bp, Artificial Sequence
  Oligonucleotide primer for the detection of SNP TSC0055549
gggtggtatgtc

SEQ ID NO: 366120 - DNA, 12 bp, Artificial Sequence
  Oligonucleotide primer for the detection of SNP TSC0055549
aaataacatatc

SEQ ID NO: 366121 - DNA, 12 bp, Artificial Sequence
  Oligonucleotide primer for the detection of SNP TSC0055550
tagttagtgtta

SEQ ID NO: 366122 - DNA, 12 bp, Artificial Sequence
  Oligonucleotide primer for the detection of SNP TSC0055551
agttataaatga

SEQ ID NO: 366123 - DNA, 12 bp, Artificial Sequence
  Oligonucleotide primer for the detection of SNP TSC0055552
attcaatataac

SEQ ID NO: 366124 - DNA, 12 bp, Artificial Sequence
  Oligonucleotide primer for the detection of SNP TSC0055552
ttattgttttgg

SEQ ID NO: 366125 - DNA, 12 bp, Artificial Sequence
  Oligonucleotide primer for the detection of SNP TSC0055552
tcattaccctaa

SEQ ID NO: 366126 - DNA, 12 bp, Artificial Sequence
  Oligonucleotide primer for the detection of SNP TSC0055552
atttaatgtgat

SEQ ID NO: 366127 - DNA, 12 bp, Artificial Sequence
  Oligonucleotide primer for the detection of SNP TSC0055553
gggaagtgatga

SEQ ID NO: 366128 - DNA, 12 bp, Artificial Sequence
  Oligonucleotide primer for the detection of SNP TSC0055554
ccccaatattat

SEQ ID NO: 366129 - DNA, 12 bp, Artificial Sequence
  Oligonucleotide primer for the detection of SNP TSC0055554
cttcccacctaa

SEQ ID NO: 366130 - DNA, 12 bp, Artificial Sequence
  Oligonucleotide primer for the detection of SNP TSC0055554
ttttagtgttgt

SEQ ID NO: 366131 - DNA, 12 bp, Artificial Sequence
  Oligonucleotide primer for the detection of SNP TSC0055555
ttgattttatta

SEQ ID NO: 366132 - DNA, 12 bp, Artificial Sequence
  Oligonucleotide primer for the detection of SNP TSC0055555
ttaattttacta

SEQ ID NO: 366133 - DNA, 12 bp, Artificial Sequence
  Oligonucleotide primer for the detection of SNP TSC0055555
gattataaaaat

SEQ ID NO: 366134 - DNA, 12 bp, Artificial Sequence
  Oligonucleotide primer for the detection of SNP TSC0055556
taatctaaatcc

SEQ ID NO: 366135 - DNA, 12 bp, Artificial Sequence
  Oligonukleotid-Primer
tagtttagtgga

SEQ ID NO: 366136 - DNA, 12 bp, Artificial Sequence
  Oligonucleotide primer for the detection of SNP TSC0055556
tagtttagcgga

SEQ ID NO: 366137 - DNA, 12 bp, Artificial Sequence
  Oligonucleotide primer for the detection of SNP TSC0055557
ttaacttcataa

SEQ ID NO: 366138 - DNA, 12 bp, Artificial Sequence
  Oligonucleotide primer for the detection of SNP TSC0055557
ttaacttcgtaa

SEQ ID NO: 366139 - DNA, 12 bp, Artificial Sequence
  Oligonucleotide primer for the detection of SNP TSC0055557
aggattgtttaa

SEQ ID NO: 366140 - DNA, 12 bp, Artificial Sequence
  Oligonucleotide primer for the detection of SNP TSC0055557
ttgattttgtgg

SEQ ID NO: 366141 - DNA, 12 bp, Artificial Sequence
  Oligonucleotide primer for the detection of SNP TSC0055557
ttgatttcgtgg

SEQ ID NO: 366142 - DNA, 12 bp, Artificial Sequence
  Oligonucleotide primer for the detection of SNP TSC0055558
aggattgaatta

SEQ ID NO: 366143 - DNA, 12 bp, Artificial Sequence
  Oligonucleotide primer for the detection of SNP TSC0055559
ttacttcttaat

SEQ ID NO: 366144 - DNA, 12 bp, Artificial Sequence
  Oligonucleotide primer for the detection of SNP TSC0055559
gtgtattaaaag

SEQ ID NO: 366145 - DNA, 12 bp, Artificial Sequence
  Oligonucleotide primer for the detection of SNP TSC0055561
taataactaaac

SEQ ID NO: 366146 - DNA, 12 bp, Artificial Sequence
  Oligonucleotide primer for the detection of SNP TSC0055561
tgaataattttg

SEQ ID NO: 366147 - DNA, 12 bp, Artificial Sequence
  Oligonucleotide primer for the detection of SNP TSC0055561
cgaataattttg

SEQ ID NO: 366148 - DNA, 12 bp, Artificial Sequence
  Oligonucleotide primer for the detection of SNP TSC0055561
aaacaattttaa

SEQ ID NO: 366149 - DNA, 12 bp, Artificial Sequence
  Oligonucleotide primer for the detection of SNP TSC0055561
gaacaattttaa

SEQ ID NO: 366150 - DNA, 12 bp, Artificial Sequence
  Oligonucleotide primer for the detection of SNP TSC0055561
taatggttggat

SEQ ID NO: 366151 - DNA, 12 bp, Artificial Sequence
  Oligonucleotide primer for the detection of SNP TSC0055562
tattgttggata

SEQ ID NO: 366152 - DNA, 12 bp, Artificial Sequence
  Oligonucleotide primer for the detection of SNP TSC0055562
tattattaaata

SEQ ID NO: 366153 - DNA, 12 bp, Artificial Sequence
  Oligonucleotide primer for the detection of SNP TSC0055562
aggtatgattat

SEQ ID NO: 366154 - DNA, 12 bp, Artificial Sequence
  Oligonucleotide primer for the detection of SNP TSC0055563
ctatctctactt

SEQ ID NO: 366155 - DNA, 12 bp, Artificial Sequence
  Oligonucleotide primer for the detection of SNP TSC0055563
ttttagattatt

SEQ ID NO: 366156 - DNA, 12 bp, Artificial Sequence
  Oligonucleotide primer for the detection of SNP TSC0055563
ctttaaattatt

SEQ ID NO: 366157 - DNA, 12 bp, Artificial Sequence
  Oligonucleotide primer for the detection of SNP TSC0055564
cactaaacatat

SEQ ID NO: 366158 - DNA, 12 bp, Artificial Sequence
  Oligonucleotide primer for the detection of SNP TSC0055564
cgctaaacatat

SEQ ID NO: 366159 - DNA, 12 bp, Artificial Sequence
  Oligonucleotide primer for the detection of SNP TSC0055564
ttttgttaagga

SEQ ID NO: 366160 - DNA, 12 bp, Artificial Sequence
  Oligonucleotide primer for the detection of SNP TSC0055565
ctactttaaact

SEQ ID NO: 366161 - DNA, 12 bp, Artificial Sequence
  Oligonucleotide primer for the detection of SNP TSC0055565
gaagttgtaaaa

SEQ ID NO: 366162 - DNA, 12 bp, Artificial Sequence
  Oligonucleotide primer for the detection of SNP TSC0055566
taaactcatttt

SEQ ID NO: 366163 - DNA, 12 bp, Artificial Sequence
  Oligonucleotide primer for the detection of SNP TSC0055566
agagaggtgaag

SEQ ID NO: 366164 - DNA, 12 bp, Artificial Sequence
  Oligonucleotide primer for the detection of SNP TSC0055567
caaactatacaa

SEQ ID NO: 366165 - DNA, 12 bp, Artificial Sequence
  Oligonucleotide primer for the detection of SNP TSC0055567
ctcattttacaa

SEQ ID NO: 366166 - DNA, 12 bp, Artificial Sequence
  Oligonucleotide primer for the detection of SNP TSC0055568
ctttattaaatc

SEQ ID NO: 366167 - DNA, 12 bp, Artificial Sequence
  Oligonucleotide primer for the detection of SNP TSC0055568
ggttatttgata

SEQ ID NO: 366168 - DNA, 12 bp, Artificial Sequence
  Oligonucleotide primer for the detection of SNP TSC0055568
aatcatctaata

SEQ ID NO: 366169 - DNA, 12 bp, Artificial Sequence
  Oligonucleotide primer for the detection of SNP TSC0055568
ttttattaagtt

SEQ ID NO: 366170 - DNA, 12 bp, Artificial Sequence
  Oligonucleotide primer for the detection of SNP TSC0055569
tagatattttta

SEQ ID NO: 366171 - DNA, 12 bp, Artificial Sequence
  Oligonucleotide primer for the detection of SNP TSC0055569
taaatatcctca

SEQ ID NO: 366172 - DNA, 12 bp, Artificial Sequence
  Oligonucleotide primer for the detection of SNP TSC0055569
gagaatgagtat

SEQ ID NO: 366173 - DNA, 12 bp, Artificial Sequence
  Oligonucleotide primer for the detection of SNP TSC0055573
caaaccctatca

SEQ ID NO: 366174 - DNA, 12 bp, Artificial Sequence
  Oligonucleotide primer for the detection of SNP TSC0055573
tttgagtagagg

SEQ ID NO: 366175 - DNA, 12 bp, Artificial Sequence
  Oligonucleotide primer for the detection of SNP TSC0055577
tttaaataactc

SEQ ID NO: 366176 - DNA, 12 bp, Artificial Sequence
  Oligonucleotide primer for the detection of SNP TSC0055577
atgatgaggagt

SEQ ID NO: 366177 - DNA, 12 bp, Artificial Sequence
  Oligonucleotide primer for the detection of SNP TSC0055577
tgagtaattttt

SEQ ID NO: 366178 - DNA, 12 bp, Artificial Sequence
  Oligonucleotide primer for the detection of SNP TSC0055580
acccacaaccac

SEQ ID NO: 366179 - DNA, 12 bp, Artificial Sequence
  Oligonucleotide primer for the detection of SNP TSC0055580
ttatagagtagg

SEQ ID NO: 366180 - DNA, 12 bp, Artificial Sequence
  Oligonucleotide primer for the detection of SNP TSC0055581
attttcaaatta

SEQ ID NO: 366181 - DNA, 12 bp, Artificial Sequence
  Oligonucleotide primer for the detection of SNP TSC0055581
gaatttgagatt

SEQ ID NO: 366182 - DNA, 12 bp, Artificial Sequence
  Oligonucleotide primer for the detection of SNP TSC0055581
tgtttttaaatt

SEQ ID NO: 366183 - DNA, 12 bp, Artificial Sequence
  Oligonucleotide primer for the detection of SNP TSC0055582
taaaactataat

SEQ ID NO: 366184 - DNA, 12 bp, Artificial Sequence
  Oligonucleotide primer for the detection of SNP TSC0055589
tccctcaaaaac

SEQ ID NO: 366185 - DNA, 12 bp, Artificial Sequence
  Oligonucleotide primer for the detection of SNP TSC0055589
taatgaatagaa

SEQ ID NO: 366186 - DNA, 12 bp, Artificial Sequence
  Oligonucleotide primer for the detection of SNP TSC0055590
tataactcatat

SEQ ID NO: 366187 - DNA, 12 bp, Artificial Sequence
  Oligonucleotide primer for the detection of SNP TSC0055592
tcccaaattcac

SEQ ID NO: 366188 - DNA, 12 bp, Artificial Sequence
  Oligonucleotide primer for the detection of SNP TSC0055592
tcccgaattcac

SEQ ID NO: 366189 - DNA, 12 bp, Artificial Sequence
  Oligonucleotide primer for the detection of SNP TSC0055592
ggtaggagaatg

SEQ ID NO: 366190 - DNA, 12 bp, Artificial Sequence
  Oligonucleotide primer for the detection of SNP TSC0055594
aaaaaaccccat

SEQ ID NO: 366191 - DNA, 12 bp, Artificial Sequence
  Oligonucleotide primer for the detection of SNP TSC0055596
agtgtaaatata

SEQ ID NO: 366192 - DNA, 12 bp, Artificial Sequence
  Oligonucleotide primer for the detection of SNP TSC0055597
actcaaaataca

SEQ ID NO: 366193 - DNA, 12 bp, Artificial Sequence
  Oligonucleotide primer for the detection of SNP TSC0055597
cacacacacata

SEQ ID NO: 366194 - DNA, 12 bp, Artificial Sequence
  Oligonucleotide primer for the detection of SNP TSC0055597
atttaagatata

SEQ ID NO: 366195 - DNA, 12 bp, Artificial Sequence
  Oligonucleotide primer for the detection of SNP TSC0055599
tggttaaattta

SEQ ID NO: 366196 - DNA, 12 bp, Artificial Sequence
  Oligonucleotide primer for the detection of SNP TSC0004881
accatacataac

SEQ ID NO: 366197 - DNA, 12 bp, Artificial Sequence
  Oligonucleotide primer for the detection of SNP TSC0004881
atggttgttata

SEQ ID NO: 366198 - DNA, 12 bp, Artificial Sequence
  Oligonucleotide primer for the detection of SNP TSC0055600
ctctctttaatc

SEQ ID NO: 366199 - DNA, 12 bp, Artificial Sequence
  Oligonucleotide primer for the detection of SNP TSC0055602
ccacctactcaa

SEQ ID NO: 366200 - DNA, 12 bp, Artificial Sequence
  Oligonucleotide primer for the detection of SNP TSC0055602
ccgcctactcaa

SEQ ID NO: 366201 - DNA, 12 bp, Artificial Sequence
  Oligonucleotide primer for the detection of SNP TSC0055602
atttaaagagat

SEQ ID NO: 366202 - DNA, 12 bp, Artificial Sequence
  Oligonucleotide primer for the detection of SNP TSC0055602
atttaaagagac

SEQ ID NO: 366203 - DNA, 12 bp, Artificial Sequence
  Oligonucleotide primer for the detection of SNP TSC0005609
acacaaaaacat

SEQ ID NO: 366204 - DNA, 12 bp, Artificial Sequence
  Oligonucleotide primer for the detection of SNP TSC0005609
agttaattgtat

SEQ ID NO: 366205 - DNA, 12 bp, Artificial Sequence
  Oligonucleotide primer for the detection of SNP TSC0005610
tattttcataaa

SEQ ID NO: 366206 - DNA, 12 bp, Artificial Sequence
  Oligonucleotide primer for the detection of SNP TSC0005610
taattctataaa

SEQ ID NO: 366207 - DNA, 12 bp, Artificial Sequence
  Oligonucleotide primer for the detection of SNP TSC0055604
taatacttattt

SEQ ID NO: 366208 - DNA, 12 bp, Artificial Sequence
  Oligonucleotide primer for the detection of SNP TSC0055604
caaaaactttta

SEQ ID NO: 366209 - DNA, 12 bp, Artificial Sequence
  Oligonucleotide primer for the detection of SNP TSC0055604
tgatatttattt

SEQ ID NO: 366210 - DNA, 12 bp, Artificial Sequence
  Oligonucleotide primer for the detection of SNP TSC0055605
tgaataggatta

SEQ ID NO: 366211 - DNA, 12 bp, Artificial Sequence
  Oligonucleotide primer for the detection of SNP TSC0055606
ccacatcttctt

SEQ ID NO: 366212 - DNA, 12 bp, Artificial Sequence
  Oligonucleotide primer for the detection of SNP TSC0055606
tgttgagtttag

SEQ ID NO: 366213 - DNA, 12 bp, Artificial Sequence
  Oligonucleotide primer for the detection of SNP TSC0055607
acctaacttttt

SEQ ID NO: 366214 - DNA, 12 bp, Artificial Sequence
  Oligonucleotide primer for the detection of SNP TSC0055607
agagagaaatta

SEQ ID NO: 366215 - DNA, 12 bp, Artificial Sequence
  Oligonucleotide primer for the detection of SNP TSC0055608
atatagtaaaat

SEQ ID NO: 366216 - DNA, 12 bp, Artificial Sequence
  Oligonucleotide primer for the detection of SNP TSC0055608
atatagtaaaac

SEQ ID NO: 366217 - DNA, 12 bp, Artificial Sequence
  Oligonucleotide primer for the detection of SNP TSC0055608
ttaaaataggtt

SEQ ID NO: 366218 - DNA, 12 bp, Artificial Sequence
  Oligonucleotide primer for the detection of SNP TSC0055609
tcctcatcctat

SEQ ID NO: 366219 - DNA, 12 bp, Artificial Sequence
  Oligonucleotide primer for the detection of SNP TSC0055609
tattttaaagta

SEQ ID NO: 366220 - DNA, 12 bp, Artificial Sequence
  Oligonucleotide primer for the detection of SNP TSC0055610
taaattcatatc

SEQ ID NO: 366221 - DNA, 12 bp, Artificial Sequence
  Oligonucleotide primer for the detection of SNP TSC0055610
gtaaaatgggaa

SEQ ID NO: 366222 - DNA, 12 bp, Artificial Sequence
  Oligonucleotide primer for the detection of SNP TSC0055611
atatggaaatgt

SEQ ID NO: 366223 - DNA, 12 bp, Artificial Sequence
  Oligonucleotide primer for the detection of SNP TSC0055611
atacggaaatgt

SEQ ID NO: 366224 - DNA, 12 bp, Artificial Sequence
  Oligonucleotide primer for the detection of SNP TSC0055611
atacaaaaatac

SEQ ID NO: 366225 - DNA, 12 bp, Artificial Sequence
  Oligonucleotide primer for the detection of SNP TSC0055611
atacgaaaatac

SEQ ID NO: 366226 - DNA, 12 bp, Artificial Sequence
  Oligonucleotide primer for the detection of SNP TSC0055611
tttgttgattaa

SEQ ID NO: 366227 - DNA, 12 bp, Artificial Sequence
  Oligonucleotide primer for the detection of SNP TSC0055612
atattagtaggg

SEQ ID NO: 366228 - DNA, 12 bp, Artificial Sequence
  Oligonucleotide primer for the detection of SNP TSC0055613
taaacatcctac

SEQ ID NO: 366229 - DNA, 12 bp, Artificial Sequence
  Oligonucleotide primer for the detection of SNP TSC0055613
tgggggattgtg

SEQ ID NO: 366230 - DNA, 12 bp, Artificial Sequence
  Oligonucleotide primer for the detection of SNP TSC0055613
taaaaaactata

SEQ ID NO: 366231 - DNA, 12 bp, Artificial Sequence
  Oligonucleotide primer for the detection of SNP TSC0055613
taagtattttgt

SEQ ID NO: 366232 - DNA, 12 bp, Artificial Sequence
  Oligonucleotide primer for the detection of SNP TSC0055614
aattatgtttgt

SEQ ID NO: 366233 - DNA, 12 bp, Artificial Sequence
  Oligonucleotide primer for the detection of SNP TSC0055614
aattacgtttgt

SEQ ID NO: 366234 - DNA, 12 bp, Artificial Sequence
  Oligonucleotide primer for the detection of SNP TSC0055614
taatcacatcta

SEQ ID NO: 366235 - DNA, 12 bp, Artificial Sequence
  Oligonucleotide primer for the detection of SNP TSC0055614
taatcacgtcta

SEQ ID NO: 366236 - DNA, 12 bp, Artificial Sequence
  Oligonucleotide primer for the detection of SNP TSC0055614
tagttaaaaaat

SEQ ID NO: 366237 - DNA, 12 bp, Artificial Sequence
  Oligonucleotide primer for the detection of SNP TSC0055616
aacactcactat

SEQ ID NO: 366238 - DNA, 12 bp, Artificial Sequence
  Oligonucleotide primer for the detection of SNP TSC0055616
agggtgtagggg

SEQ ID NO: 366239 - DNA, 12 bp, Artificial Sequence
  Oligonucleotide primer for the detection of SNP TSC0055616
agtatttattgt

SEQ ID NO: 366240 - DNA, 12 bp, Artificial Sequence
  Oligonucleotide primer for the detection of SNP TSC0055618
catattaacctt

SEQ ID NO: 366241 - DNA, 12 bp, Artificial Sequence
  Oligonucleotide primer for the detection of SNP TSC0055618
taaagagtagga

SEQ ID NO: 366242 - DNA, 12 bp, Artificial Sequence
  Oligonucleotide primer for the detection of SNP TSC0055620
taatcaatttta

SEQ ID NO: 366243 - DNA, 12 bp, Artificial Sequence
  Oligonucleotide primer for the detection of SNP TSC0055620
cacacaaattaa

SEQ ID NO: 366244 - DNA, 12 bp, Artificial Sequence
  Oligonucleotide primer for the detection of SNP TSC0055620
ttgattaatttt

SEQ ID NO: 366245 - DNA, 12 bp, Artificial Sequence
  Oligonucleotide primer for the detection of SNP TSC0055622
aattcaattaaa

SEQ ID NO: 366246 - DNA, 12 bp, Artificial Sequence
  Oligonucleotide primer for the detection of SNP TSC0055622
tgtattatatgg

SEQ ID NO: 366247 - DNA, 12 bp, Artificial Sequence
  Oligonucleotide primer for the detection of SNP TSC0055622
tatattacataa

SEQ ID NO: 366248 - DNA, 12 bp, Artificial Sequence
  Oligonucleotide primer for the detection of SNP TSC0055622
aatttaattgaa

SEQ ID NO: 366249 - DNA, 12 bp, Artificial Sequence
  Oligonucleotide primer for the detection of SNP TSC0055623
acaaaaaaactt

SEQ ID NO: 366250 - DNA, 12 bp, Artificial Sequence
  Oligonucleotide primer for the detection of SNP TSC0055623
ttactcacacaa

SEQ ID NO: 366251 - DNA, 12 bp, Artificial Sequence
  Oligonucleotide primer for the detection of SNP TSC0055623
ataagaaaattt

SEQ ID NO: 366252 - DNA, 12 bp, Artificial Sequence
  Oligonucleotide primer for the detection of SNP TSC0055624
aaatcactttaa

SEQ ID NO: 366253 - DNA, 12 bp, Artificial Sequence
  Oligonucleotide primer for the detection of SNP TSC0055624
atgttttggagt

SEQ ID NO: 366254 - DNA, 12 bp, Artificial Sequence
  Oligonucleotide primer for the detection of SNP TSC0055624
atactttaaaat

SEQ ID NO: 366255 - DNA, 12 bp, Artificial Sequence
  Oligonucleotide primer for the detection of SNP TSC0055626
aaaacacaacac

SEQ ID NO: 366256 - DNA, 12 bp, Artificial Sequence
  Oligonucleotide primer for the detection of SNP TSC0055626
gttattgttttg

SEQ ID NO: 366257 - DNA, 12 bp, Artificial Sequence
  Oligonucleotide primer for the detection of SNP TSC0055627
tatcaattataa

SEQ ID NO: 366258 - DNA, 12 bp, Artificial Sequence
  Oligonucleotide primer for the detection of SNP TSC0055627
gtttgtgattga

SEQ ID NO: 366259 - DNA, 12 bp, Artificial Sequence
  Oligonucleotide primer for the detection of SNP TSC0055627
atctataattaa

SEQ ID NO: 366260 - DNA, 12 bp, Artificial Sequence
  Oligonucleotide primer for the detection of SNP TSC0055627
tgttagttgtaa

SEQ ID NO: 366261 - DNA, 12 bp, Artificial Sequence
  Oligonucleotide primer for the detection of SNP TSC0055628
ttattagggatt

SEQ ID NO: 366262 - DNA, 12 bp, Artificial Sequence
  Oligonucleotide primer for the detection of SNP TSC0055628
attattaaaaac

SEQ ID NO: 366263 - DNA, 12 bp, Artificial Sequence
  Oligonucleotide primer for the detection of SNP TSC0055628
agagaaatatat

SEQ ID NO: 366264 - DNA, 12 bp, Artificial Sequence
  Oligonucleotide primer for the detection of SNP TSC0055629
aataattattta

SEQ ID NO: 366265 - DNA, 12 bp, Artificial Sequence
  Oligonucleotide primer for the detection of SNP TSC0055630
aaaactaataat

SEQ ID NO: 366266 - DNA, 12 bp, Artificial Sequence
  Oligonucleotide primer for the detection of SNP TSC0055630
tgtttttgttaa

SEQ ID NO: 366267 - DNA, 12 bp, Artificial Sequence
  Oligonucleotide primer for the detection of SNP TSC0055633
acctaatttaat

SEQ ID NO: 366268 - DNA, 12 bp, Artificial Sequence
  Oligonucleotide primer for the detection of SNP TSC0055633
gaagattggata

SEQ ID NO: 366269 - DNA, 12 bp, Artificial Sequence
  Oligonucleotide primer for the detection of SNP TSC0055636
tattcctcttca

SEQ ID NO: 366270 - DNA, 12 bp, Artificial Sequence
  Oligonucleotide primer for the detection of SNP TSC0055636
tattcctcttcg

SEQ ID NO: 366271 - DNA, 12 bp, Artificial Sequence
  Oligonucleotide primer for the detection of SNP TSC0055636
gaggagtattat

SEQ ID NO: 366272 - DNA, 12 bp, Artificial Sequence
  Oligonucleotide primer for the detection of SNP TSC0055641
ccaccatactca

SEQ ID NO: 366273 - DNA, 12 bp, Artificial Sequence
  Oligonucleotide primer for the detection of SNP TSC0055641
tcatcctaccac

SEQ ID NO: 366274 - DNA, 12 bp, Artificial Sequence
  Oligonucleotide primer for the detection of SNP TSC0055642
tgaaaggcgtat

SEQ ID NO: 366275 - DNA, 12 bp, Artificial Sequence
  Oligonucleotide primer for the detection of SNP TSC0055642
taaaaaacgtat

SEQ ID NO: 366276 - DNA, 12 bp, Artificial Sequence
  Oligonucleotide primer for the detection of SNP TSC0055642
aatgatttagtt

SEQ ID NO: 366277 - DNA, 12 bp, Artificial Sequence
  Oligonucleotide primer for the detection of SNP TSC0055643
atccaccctcaa

SEQ ID NO: 366278 - DNA, 12 bp, Artificial Sequence
  Oligonucleotide primer for the detection of SNP TSC0055643
tagagttattat

SEQ ID NO: 366279 - DNA, 12 bp, Artificial Sequence
  Oligonucleotide primer for the detection of SNP TSC0055643
caaaattaccat

SEQ ID NO: 366280 - DNA, 12 bp, Artificial Sequence
  Oligonucleotide primer for the detection of SNP TSC0055644
tacaaacaccta

SEQ ID NO: 366281 - DNA, 12 bp, Artificial Sequence
  Oligonucleotide primer for the detection of SNP TSC0055644
tagttaggggtg

SEQ ID NO: 366282 - DNA, 12 bp, Artificial Sequence
  Oligonucleotide primer for the detection of SNP TSC0055644
tataggtatttg

SEQ ID NO: 366283 - DNA, 12 bp, Artificial Sequence
  Oligonucleotide primer for the detection of SNP TSC0004626
tgtttgtgaata

SEQ ID NO: 366284 - DNA, 12 bp, Artificial Sequence
  Oligonucleotide primer for the detection of SNP TSC0004626
tgttcgtgaata

SEQ ID NO: 366285 - DNA, 12 bp, Artificial Sequence
  Oligonucleotide primer for the detection of SNP TSC0004626
tgtttgcgaata

SEQ ID NO: 366286 - DNA, 12 bp, Artificial Sequence
  Oligonucleotide primer for the detection of SNP TSC0004626
tgttcgcgaata

SEQ ID NO: 366287 - DNA, 12 bp, Artificial Sequence
  Oligonucleotide primer for the detection of SNP TSC0004626
tacccacaaaca

SEQ ID NO: 366288 - DNA, 12 bp, Artificial Sequence
  Oligonucleotide primer for the detection of SNP TSC0004626
tacccacgaaca

SEQ ID NO: 366289 - DNA, 12 bp, Artificial Sequence
  Oligonucleotide primer for the detection of SNP TSC0004626
tacccgcaaaca

SEQ ID NO: 366290 - DNA, 12 bp, Artificial Sequence
  Oligonucleotide primer for the detection of SNP TSC0004626
tacccgcgaaca

SEQ ID NO: 366291 - DNA, 12 bp, Artificial Sequence
  Oligonucleotide primer for the detection of SNP TSC0004626
agggataaaaaa

SEQ ID NO: 366292 - DNA, 12 bp, Artificial Sequence
  Oligonukleotid-Primer
ccttcttccctt

SEQ ID NO: 366293 - DNA, 12 bp, Artificial Sequence
  Oligonucleotide primer for the detection of SNP TSC0055649
aaaaaatagttt

SEQ ID NO: 366294 - DNA, 12 bp, Artificial Sequence
  Oligonucleotide primer for the detection of SNP TSC0055649
agggaaagatga

SEQ ID NO: 366295 - DNA, 12 bp, Artificial Sequence
  Oligonucleotide primer for the detection of SNP TSC0055650
ttatgaaaaggg

SEQ ID NO: 366296 - DNA, 12 bp, Artificial Sequence
  Oligonucleotide primer for the detection of SNP TSC0055651
atccatatcaat

SEQ ID NO: 366297 - DNA, 12 bp, Artificial Sequence
  Oligonucleotide primer for the detection of SNP TSC0055651
gaaaatattgta

SEQ ID NO: 366298 - DNA, 12 bp, Artificial Sequence
  Oligonucleotide primer for the detection of SNP TSC0055655
cccttaaaaata

SEQ ID NO: 366299 - DNA, 12 bp, Artificial Sequence
  Oligonucleotide primer for the detection of SNP TSC0055655
gtagatttaata

SEQ ID NO: 366300 - DNA, 12 bp, Artificial Sequence
  Oligonucleotide primer for the detection of SNP TSC0055657
tttaaaaccaaa

SEQ ID NO: 366301 - DNA, 12 bp, Artificial Sequence
  Oligonucleotide primer for the detection of SNP TSC0055657
agaggagaagtt

SEQ ID NO: 366302 - DNA, 12 bp, Artificial Sequence
  Oligonucleotide primer for the detection of SNP TSC0055658
aaaccttatacc

SEQ ID NO: 366303 - DNA, 12 bp, Artificial Sequence
  Oligonucleotide primer for the detection of SNP TSC0055658
agttaattttgt

SEQ ID NO: 366304 - DNA, 12 bp, Artificial Sequence
  Oligonucleotide primer for the detection of SNP TSC0055659
ttttaatactat

SEQ ID NO: 366305 - DNA, 12 bp, Artificial Sequence
  Oligonucleotide primer for the detection of SNP TSC0055659
aatttcgtttat

SEQ ID NO: 366306 - DNA, 12 bp, Artificial Sequence
  Oligonucleotide primer for the detection of SNP TSC0055659
aatcccatttat

SEQ ID NO: 366307 - DNA, 12 bp, Artificial Sequence
  Oligonucleotide primer for the detection of SNP TSC0055659
aatcccgtttat

SEQ ID NO: 366308 - DNA, 12 bp, Artificial Sequence
  Oligonukleotid-Primer
ttttgatgttat

SEQ ID NO: 366309 - DNA, 12 bp, Artificial Sequence
  Oligonucleotide primer for the detection of SNP TSC0055661
acccataactta

SEQ ID NO: 366310 - DNA, 12 bp, Artificial Sequence
  Oligonucleotide primer for the detection of SNP TSC0055661
tattttggatga

SEQ ID NO: 366311 - DNA, 12 bp, Artificial Sequence
  Oligonucleotide primer for the detection of SNP TSC0055661
taccctaaataa

SEQ ID NO: 366312 - DNA, 12 bp, Artificial Sequence
  Oligonukleotid-Primer
atttatgattta

SEQ ID NO: 366313 - DNA, 12 bp, Artificial Sequence
  Oligonucleotide primer for the detection of SNP TSC0055666
ttaatgagatat

SEQ ID NO: 366314 - DNA, 12 bp, Artificial Sequence
  Oligonucleotide primer for the detection of SNP TSC0055666
ttaatgagatac

SEQ ID NO: 366315 - DNA, 12 bp, Artificial Sequence
  Oligonucleotide primer for the detection of SNP TSC0055666
ttaataaaatac

SEQ ID NO: 366316 - DNA, 12 bp, Artificial Sequence
  Oligonucleotide primer for the detection of SNP TSC0055666
atgaataaaaaa

SEQ ID NO: 366317 - DNA, 12 bp, Artificial Sequence
  Oligonucleotide primer for the detection of SNP TSC0055667
tagaaatgattt

SEQ ID NO: 366318 - DNA, 12 bp, Artificial Sequence
  Oligonucleotide primer for the detection of SNP TSC0055667
atgaaaaattga

SEQ ID NO: 366319 - DNA, 12 bp, Artificial Sequence
  Oligonucleotide primer for the detection of SNP TSC0055669
aacctaaacaat

SEQ ID NO: 366320 - DNA, 12 bp, Artificial Sequence
  Oligonucleotide primer for the detection of SNP TSC0055669
ttttagattgag

SEQ ID NO: 366321 - DNA, 12 bp, Artificial Sequence
  Oligonucleotide primer for the detection of SNP TSC0055669
ttttaaactaaa

SEQ ID NO: 366322 - DNA, 12 bp, Artificial Sequence
  Oligonucleotide primer for the detection of SNP TSC0055671
tattaacatttt

SEQ ID NO: 366323 - DNA, 12 bp, Artificial Sequence
  Oligonucleotide primer for the detection of SNP TSC0055671
tattaacgtttt

SEQ ID NO: 366324 - DNA, 12 bp, Artificial Sequence
  Oligonucleotide primer for the detection of SNP TSC0055673
tatattcatatt

SEQ ID NO: 366325 - DNA, 12 bp, Artificial Sequence
  Oligonucleotide primer for the detection of SNP TSC0055673
taattaagaaaa

SEQ ID NO: 366326 - DNA, 12 bp, Artificial Sequence
  Oligonucleotide primer for the detection of SNP TSC0004537
tttagagtttaa

SEQ ID NO: 366327 - DNA, 12 bp, Artificial Sequence
  Oligonucleotide primer for the detection of SNP TSC0055674
tcctaccatcca

SEQ ID NO: 366328 - DNA, 12 bp, Artificial Sequence
  Oligonucleotide primer for the detection of SNP TSC0055674
tataatggattg

SEQ ID NO: 366329 - DNA, 12 bp, Artificial Sequence
  Oligonucleotide primer for the detection of SNP TSC0055674
tttgttatttat

SEQ ID NO: 366330 - DNA, 12 bp, Artificial Sequence
  Oligonucleotide primer for the detection of SNP TSC0055675
ccaaaaaacttt

SEQ ID NO: 366331 - DNA, 12 bp, Artificial Sequence
  Oligonucleotide primer for the detection of SNP TSC0055675
gagtatatgtgt

SEQ ID NO: 366332 - DNA, 12 bp, Artificial Sequence
  Oligonucleotide primer for the detection of SNP TSC0055676
aactattctcct

SEQ ID NO: 366333 - DNA, 12 bp, Artificial Sequence
  Oligonucleotide primer for the detection of SNP TSC0055677
taacaatctacc

SEQ ID NO: 366334 - DNA, 12 bp, Artificial Sequence
  Oligonucleotide primer for the detection of SNP TSC0055677
aaaataatattg

SEQ ID NO: 366335 - DNA, 12 bp, Artificial Sequence
  Oligonucleotide primer for the detection of SNP TSC0009567
aaaaatttctct

SEQ ID NO: 366336 - DNA, 12 bp, Artificial Sequence
  Oligonukleotid-Primer
atattacaatta

SEQ ID NO: 366337 - DNA, 12 bp, Artificial Sequence
  Oligonucleotide primer for the detection of SNP TSC0055680
aatttatttgtt

SEQ ID NO: 366338 - DNA, 12 bp, Artificial Sequence
  Oligonucleotide primer for the detection of SNP TSC0055680
ttcacctactaa

SEQ ID NO: 366339 - DNA, 12 bp, Artificial Sequence
  Oligonucleotide primer for the detection of SNP TSC0055680
tatgttataatt

SEQ ID NO: 366340 - DNA, 12 bp, Artificial Sequence
  Oligonucleotide primer for the detection of SNP TSC0055683
aataatatacac

SEQ ID NO: 366341 - DNA, 12 bp, Artificial Sequence
  Oligonucleotide primer for the detection of SNP TSC0004658
aatcatttttct

SEQ ID NO: 366342 - DNA, 12 bp, Artificial Sequence
  Oligonucleotide primer for the detection of SNP TSC0004658
tttagttgttaa

SEQ ID NO: 366343 - DNA, 12 bp, Artificial Sequence
  Oligonucleotide primer for the detection of SNP TSC0055687
acaaatctactc

SEQ ID NO: 366344 - DNA, 12 bp, Artificial Sequence
  Oligonucleotide primer for the detection of SNP TSC0055689
cttctaaaatct

SEQ ID NO: 366345 - DNA, 12 bp, Artificial Sequence
  Oligonucleotide primer for the detection of SNP TSC0055689
tagatttttaaa

SEQ ID NO: 366346 - DNA, 12 bp, Artificial Sequence
  Oligonucleotide primer for the detection of SNP TSC0055692
aatacaccttaa

SEQ ID NO: 366347 - DNA, 12 bp, Artificial Sequence
  Oligonucleotide primer for the detection of SNP TSC0055692
gatgaaaatttt

SEQ ID NO: 366348 - DNA, 12 bp, Artificial Sequence
  Oligonukleotid-Primer
gacgaaaatttt

SEQ ID NO: 366349 - DNA, 12 bp, Artificial Sequence
  Oligonucleotide primer for the detection of SNP TSC0055692
ataacgaaaact

SEQ ID NO: 366350 - DNA, 12 bp, Artificial Sequence
  Oligonucleotide primer for the detection of SNP TSC0055692
aaaatgtatttt

SEQ ID NO: 366351 - DNA, 12 bp, Artificial Sequence
  Oligonucleotide primer for the detection of SNP TSC0055693
ttttatgaaatg

SEQ ID NO: 366352 - DNA, 12 bp, Artificial Sequence
  Oligonukleotid-Primer
aacacaattttc

SEQ ID NO: 366353 - DNA, 12 bp, Artificial Sequence
  Oligonucleotide primer for the detection of SNP TSC0055695
taaattcaatat

SEQ ID NO: 366354 - DNA, 12 bp, Artificial Sequence
  Oligonucleotide primer for the detection of SNP TSC0055697
ttgtagtgagtt

SEQ ID NO: 366355 - DNA, 12 bp, Artificial Sequence
  Oligonucleotide primer for the detection of SNP TSC0055697
acaataaaccaa

SEQ ID NO: 366356 - DNA, 12 bp, Artificial Sequence
  Oligonucleotide primer for the detection of SNP TSC0055697
tagtgatgtgat

SEQ ID NO: 366357 - DNA, 12 bp, Artificial Sequence
  Oligonucleotide primer for the detection of SNP TSC0055698
cccctctatctt

SEQ ID NO: 366358 - DNA, 12 bp, Artificial Sequence
  Oligonucleotide primer for the detection of SNP TSC0055698
caccaacttcta

SEQ ID NO: 366359 - DNA, 12 bp, Artificial Sequence
  Oligonucleotide primer for the detection of SNP TSC0055699
catcactacact

SEQ ID NO: 366360 - DNA, 12 bp, Artificial Sequence
  Oligonucleotide primer for the detection of SNP TSC0055701
acttttactata

SEQ ID NO: 366361 - DNA, 12 bp, Artificial Sequence
  Oligonucleotide primer for the detection of SNP TSC0055702
tatttaaaatac

SEQ ID NO: 366362 - DNA, 12 bp, Artificial Sequence
  Oligonucleotide primer for the detection of SNP TSC0055702
atattattgtta

SEQ ID NO: 366363 - DNA, 12 bp, Artificial Sequence
  Oligonucleotide primer for the detection of SNP TSC0055704
aaacccaacatc

SEQ ID NO: 366364 - DNA, 12 bp, Artificial Sequence
  Oligonucleotide primer for the detection of SNP TSC0055704
ggatttttaagg

SEQ ID NO: 366365 - DNA, 12 bp, Artificial Sequence
  Oligonucleotide primer for the detection of SNP TSC0055704
aaactttcaaaa

SEQ ID NO: 366366 - DNA, 12 bp, Artificial Sequence
  Oligonucleotide primer for the detection of SNP TSC0055704
gggtttagtatt

SEQ ID NO: 366367 - DNA, 12 bp, Artificial Sequence
  Oligonucleotide primer for the detection of SNP TSC0055704
gggtttagtatc

SEQ ID NO: 366368 - DNA, 12 bp, Artificial Sequence
  Oligonucleotide primer for the detection of SNP TSC0055705
acaaacaaatac

SEQ ID NO: 366369 - DNA, 12 bp, Artificial Sequence
  Oligonucleotide primer for the detection of SNP TSC0055705
aatatattttgt

SEQ ID NO: 366370 - DNA, 12 bp, Artificial Sequence
  Oligonucleotide primer for the detection of SNP TSC0055705
acacatcctata

SEQ ID NO: 366371 - DNA, 12 bp, Artificial Sequence
  Oligonucleotide primer for the detection of SNP TSC0055705
gtaaataagtat

SEQ ID NO: 366372 - DNA, 12 bp, Artificial Sequence
  Oligonukleotid-Primer
gtaaataagtac

SEQ ID NO: 366373 - DNA, 12 bp, Artificial Sequence
  Oligonucleotide primer for the detection of SNP TSC0055708
caaatactaaat

SEQ ID NO: 366374 - DNA, 12 bp, Artificial Sequence
  Oligonucleotide primer for the detection of SNP TSC0055708
tttatgttaaga

SEQ ID NO: 366375 - DNA, 12 bp, Artificial Sequence
  Oligonucleotide primer for the detection of SNP TSC0055708
taagtattgagt

SEQ ID NO: 366376 - DNA, 12 bp, Artificial Sequence
  Oligonukleotid-Primer
cacaaataaatt

SEQ ID NO: 366377 - DNA, 12 bp, Artificial Sequence
  Oligonucleotide primer for the detection of SNP TSC0055709
tttgagagttat

SEQ ID NO: 366378 - DNA, 12 bp, Artificial Sequence
  Oligonucleotide primer for the detection of SNP TSC0055709
tctaaaaatcac

SEQ ID NO: 366379 - DNA, 12 bp, Artificial Sequence
  Oligonucleotide primer for the detection of SNP TSC0055709
tataggtgggtt

SEQ ID NO: 366380 - DNA, 12 bp, Artificial Sequence
  Oligonucleotide primer for the detection of SNP TSC0055710
ctatcaaaatac

SEQ ID NO: 366381 - DNA, 12 bp, Artificial Sequence
  Oligonucleotide primer for the detection of SNP TSC0055710
tgaagaatgtta

SEQ ID NO: 366382 - DNA, 12 bp, Artificial Sequence
  Oligonucleotide primer for the detection of SNP TSC0055711
atacataacaaa

SEQ ID NO: 366383 - DNA, 12 bp, Artificial Sequence
  Oligonucleotide primer for the detection of SNP TSC0055711
ttaggtgtattt

SEQ ID NO: 366384 - DNA, 12 bp, Artificial Sequence
  Oligonucleotide primer for the detection of SNP TSC0055711
caaatataccca

SEQ ID NO: 366385 - DNA, 12 bp, Artificial Sequence
  Oligonucleotide primer for the detection of SNP TSC0055711
atgtataataaa

SEQ ID NO: 366386 - DNA, 12 bp, Artificial Sequence
  Oligonucleotide primer for the detection of SNP TSC0009725
caataaccctta

SEQ ID NO: 366387 - DNA, 12 bp, Artificial Sequence
  Oligonucleotide primer for the detection of SNP TSC0009725
ataagggatttt

SEQ ID NO: 366388 - DNA, 12 bp, Artificial Sequence
  Oligonucleotide primer for the detection of SNP TSC0009726
taactataatct

SEQ ID NO: 366389 - DNA, 12 bp, Artificial Sequence
  Oligonucleotide primer for the detection of SNP TSC0055712
cttaacaattta

SEQ ID NO: 366390 - DNA, 12 bp, Artificial Sequence
  Oligonucleotide primer for the detection of SNP TSC0055718
tatttttccccc

SEQ ID NO: 366391 - DNA, 12 bp, Artificial Sequence
  Oligonucleotide primer for the detection of SNP TSC0055719
atttttcccccc

SEQ ID NO: 366392 - DNA, 12 bp, Artificial Sequence
  Oligonucleotide primer for the detection of SNP TSC0055719
ataggaattttt

SEQ ID NO: 366393 - DNA, 12 bp, Artificial Sequence
  Oligonucleotide primer for the detection of SNP TSC0055720
caaatacctata

SEQ ID NO: 366394 - DNA, 12 bp, Artificial Sequence
  Oligonucleotide primer for the detection of SNP TSC0055720
cgaatacctata

SEQ ID NO: 366395 - DNA, 12 bp, Artificial Sequence
  Oligonucleotide primer for the detection of SNP TSC0055720
gagtagttggga

SEQ ID NO: 366396 - DNA, 12 bp, Artificial Sequence
  Oligonucleotide primer for the detection of SNP TSC0055720
gaataactaaaa

SEQ ID NO: 366397 - DNA, 12 bp, Artificial Sequence
  Oligonucleotide primer for the detection of SNP TSC0055720
ttgggtatttgt

SEQ ID NO: 366398 - DNA, 12 bp, Artificial Sequence
  Oligonucleotide primer for the detection of SNP TSC0055720
tcgggtatttgt

SEQ ID NO: 366399 - DNA, 12 bp, Artificial Sequence
  Oligonucleotide primer for the detection of SNP TSC0055721
taacaaactcta

SEQ ID NO: 366400 - DNA, 12 bp, Artificial Sequence
  Oligonucleotide primer for the detection of SNP TSC0055721
agggtaaggtat

SEQ ID NO: 366401 - DNA, 12 bp, Artificial Sequence
  Oligonucleotide primer for the detection of SNP TSC0055721
tagtagattttg

SEQ ID NO: 366402 - DNA, 12 bp, Artificial Sequence
  Oligonucleotide primer for the detection of SNP TSC0055722
ttgtaataggag

SEQ ID NO: 366403 - DNA, 12 bp, Artificial Sequence
  Oligonucleotide primer for the detection of SNP TSC0055722
ttataacaaaaa

SEQ ID NO: 366404 - DNA, 12 bp, Artificial Sequence
  Oligonucleotide primer for the detection of SNP TSC0055723
aatagtttaatt

SEQ ID NO: 366405 - DNA, 12 bp, Artificial Sequence
  Oligonucleotide primer for the detection of SNP TSC0055723
aacaacttaatc

SEQ ID NO: 366406 - DNA, 12 bp, Artificial Sequence
  Oligonucleotide primer for the detection of SNP TSC0055726
ttacttaaacca

SEQ ID NO: 366407 - DNA, 12 bp, Artificial Sequence
  Oligonucleotide primer for the detection of SNP TSC0055726
gttttcgttttt

SEQ ID NO: 366408 - DNA, 12 bp, Artificial Sequence
  Oligonucleotide primer for the detection of SNP TSC0055730
tactcttcaacc

SEQ ID NO: 366409 - DNA, 12 bp, Artificial Sequence
  Oligonucleotide primer for the detection of SNP TSC0055730
attttttttgtc

SEQ ID NO: 366410 - DNA, 12 bp, Artificial Sequence
  Oligonucleotide primer for the detection of SNP TSC0055730
attctttttacc

SEQ ID NO: 366411 - DNA, 12 bp, Artificial Sequence
  Oligonucleotide primer for the detection of SNP TSC0055731
gtaggagaatta

SEQ ID NO: 366412 - DNA, 12 bp, Artificial Sequence
  Oligonucleotide primer for the detection of SNP TSC0055737
cttcaacctcct

SEQ ID NO: 366413 - DNA, 12 bp, Artificial Sequence
  Oligonucleotide primer for the detection of SNP TSC0055739
aatcctataccc

SEQ ID NO: 366414 - DNA, 12 bp, Artificial Sequence
  Oligonucleotide primer for the detection of SNP TSC0055739
tagaggggtagg

SEQ ID NO: 366415 - DNA, 12 bp, Artificial Sequence
  Oligonucleotide primer for the detection of SNP TSC0055739
aattttgtgttt

SEQ ID NO: 366416 - DNA, 12 bp, Artificial Sequence
  Oligonucleotide primer for the detection of SNP TSC0055740
atcccctctttc

SEQ ID NO: 366417 - DNA, 12 bp, Artificial Sequence
  Oligonucleotide primer for the detection of SNP TSC0055740
ctaatcccaaca

SEQ ID NO: 366418 - DNA, 12 bp, Artificial Sequence
  Oligonucleotide primer for the detection of SNP TSC0009540
aaatataaactc

SEQ ID NO: 366419 - DNA, 12 bp, Artificial Sequence
  Oligonucleotide primer for the detection of SNP TSC0009541
taatttaacaac

SEQ ID NO: 366420 - DNA, 12 bp, Artificial Sequence
  Oligonucleotide primer for the detection of SNP TSC0009541
aaaccaattaca

SEQ ID NO: 366421 - DNA, 12 bp, Artificial Sequence
  Oligonucleotide primer for the detection of SNP TSC0009542
attggtttgggg

SEQ ID NO: 366422 - DNA, 12 bp, Artificial Sequence
  Oligonucleotide primer for the detection of SNP TSC0055743
aatacatacatt

SEQ ID NO: 366423 - DNA, 12 bp, Artificial Sequence
  Oligonucleotide primer for the detection of SNP TSC0055743
atttgattatta

SEQ ID NO: 366424 - DNA, 12 bp, Artificial Sequence
  Oligonucleotide primer for the detection of SNP TSC0055743
attcgattatta

SEQ ID NO: 366425 - DNA, 12 bp, Artificial Sequence
  Oligonucleotide primer for the detection of SNP TSC0009481
ataaatatttac

SEQ ID NO: 366426 - DNA, 12 bp, Artificial Sequence
  Oligonucleotide primer for the detection of SNP TSC0009481
gggttatgggtt

SEQ ID NO: 366427 - DNA, 12 bp, Artificial Sequence
  Oligonucleotide primer for the detection of SNP TSC0055747
tatttaatgtta

SEQ ID NO: 366428 - DNA, 12 bp, Artificial Sequence
  Oligonucleotide primer for the detection of SNP TSC0055748
tgattatagtag

SEQ ID NO: 366429 - DNA, 12 bp, Artificial Sequence
  Oligonucleotide primer for the detection of SNP TSC0055749
ttcattaaaatc

SEQ ID NO: 366430 - DNA, 12 bp, Artificial Sequence
  Oligonucleotide primer for the detection of SNP TSC0055749
aagaatttttga

SEQ ID NO: 366431 - DNA, 12 bp, Artificial Sequence
  Oligonucleotide primer for the detection of SNP TSC0055750
tcaatatattct

SEQ ID NO: 366432 - DNA, 12 bp, Artificial Sequence
  Oligonucleotide primer for the detection of SNP TSC0055751
aatttacaaata

SEQ ID NO: 366433 - DNA, 12 bp, Artificial Sequence
  Oligonucleotide primer for the detection of SNP TSC0055751
tggaaaaaatat

SEQ ID NO: 366434 - DNA, 12 bp, Artificial Sequence
  Oligonucleotide primer for the detection of SNP TSC0055751
aatttgtaaata

SEQ ID NO: 366435 - DNA, 12 bp, Artificial Sequence
  Oligonucleotide primer for the detection of SNP TSC0055757
agatatagtttt

SEQ ID NO: 366436 - DNA, 12 bp, Artificial Sequence
  Oligonucleotide primer for the detection of SNP TSC0055757
aaacacaatctt

SEQ ID NO: 366437 - DNA, 12 bp, Artificial Sequence
  Oligonucleotide primer for the detection of SNP TSC0055758
gtgagttgaggt

SEQ ID NO: 366438 - DNA, 12 bp, Artificial Sequence
  Oligonucleotide primer for the detection of SNP TSC0055758
gtgagtcgaggt

SEQ ID NO: 366439 - DNA, 12 bp, Artificial Sequence
  Oligonucleotide primer for the detection of SNP TSC0055761
atctcccctact

SEQ ID NO: 366440 - DNA, 12 bp, Artificial Sequence
  Oligonucleotide primer for the detection of SNP TSC0055761
tgtttttgtagg

SEQ ID NO: 366441 - DNA, 12 bp, Artificial Sequence
  Oligonucleotide primer for the detection of SNP TSC0055762
aaaataccttca

SEQ ID NO: 366442 - DNA, 12 bp, Artificial Sequence
  Oligonucleotide primer for the detection of SNP TSC0055762
aggtggatgttt

SEQ ID NO: 366443 - DNA, 12 bp, Artificial Sequence
  Oligonucleotide primer for the detection of SNP TSC0055762
aggcggatgttt

SEQ ID NO: 366444 - DNA, 12 bp, Artificial Sequence
  Oligonucleotide primer for the detection of SNP TSC0055763
ccttcttactct

SEQ ID NO: 366445 - DNA, 12 bp, Artificial Sequence
  Oligonucleotide primer for the detection of SNP TSC0055763
agattaaagata

SEQ ID NO: 366446 - DNA, 12 bp, Artificial Sequence
  Oligonucleotide primer for the detection of SNP TSC0055764
ataccaataatc

SEQ ID NO: 366447 - DNA, 12 bp, Artificial Sequence
  Oligonucleotide primer for the detection of SNP TSC0055766
actaattaactt

SEQ ID NO: 366448 - DNA, 12 bp, Artificial Sequence
  Oligonucleotide primer for the detection of SNP TSC0055766
gaaggaaagatg

SEQ ID NO: 366449 - DNA, 12 bp, Artificial Sequence
  Oligonucleotide primer for the detection of SNP TSC0055767
ttaataaaaatc

SEQ ID NO: 366450 - DNA, 12 bp, Artificial Sequence
  Oligonucleotide primer for the detection of SNP TSC0055767
taatagtaaagg

SEQ ID NO: 366451 - DNA, 12 bp, Artificial Sequence
  Oligonucleotide primer for the detection of SNP TSC0055767
caataacaaaaa

SEQ ID NO: 366452 - DNA, 12 bp, Artificial Sequence
  Oligonucleotide primer for the detection of SNP TSC0055767
ttaatgaaaatt

SEQ ID NO: 366453 - DNA, 12 bp, Artificial Sequence
  Oligonucleotide primer for the detection of SNP TSC0055768
aaatctaacacc

SEQ ID NO: 366454 - DNA, 12 bp, Artificial Sequence
  Oligonucleotide primer for the detection of SNP TSC0055768
tttaaatattga

SEQ ID NO: 366455 - DNA, 12 bp, Artificial Sequence
  Oligonucleotide primer for the detection of SNP TSC0055768
ttcaaacactaa

SEQ ID NO: 366456 - DNA, 12 bp, Artificial Sequence
  Oligonucleotide primer for the detection of SNP TSC0055768
gagtttagtatt

SEQ ID NO: 366457 - DNA, 12 bp, Artificial Sequence
  Oligonucleotide primer for the detection of SNP TSC0009636
cattaattattc

SEQ ID NO: 366458 - DNA, 12 bp, Artificial Sequence
  Oligonucleotide primer for the detection of SNP TSC0009636
aattaaataata

SEQ ID NO: 366459 - DNA, 12 bp, Artificial Sequence
  Oligonucleotide primer for the detection of SNP TSC0055772
tctaaacctaaa

SEQ ID NO: 366460 - DNA, 12 bp, Artificial Sequence
  Oligonucleotide primer for the detection of SNP TSC0055772
tttagaattgtt

SEQ ID NO: 366461 - DNA, 12 bp, Artificial Sequence
  Oligonucleotide primer for the detection of SNP TSC0055772
tttgaatttgaa

SEQ ID NO: 366462 - DNA, 12 bp, Artificial Sequence
  Oligonucleotide primer for the detection of SNP TSC0055773
atcttcaaaaat

SEQ ID NO: 366463 - DNA, 12 bp, Artificial Sequence
  Oligonucleotide primer for the detection of SNP TSC0055773
gtaggtagttgg

SEQ ID NO: 366464 - DNA, 12 bp, Artificial Sequence
  Oligonucleotide primer for the detection of SNP TSC0055777
gataatgaatta

SEQ ID NO: 366465 - DNA, 12 bp, Artificial Sequence
  Oligonucleotide primer for the detection of SNP TSC0055780
actctctatccc

SEQ ID NO: 366466 - DNA, 12 bp, Artificial Sequence
  Oligonucleotide primer for the detection of SNP TSC0055780
aaattaggataa

SEQ ID NO: 366467 - DNA, 12 bp, Artificial Sequence
  Oligonucleotide primer for the detection of SNP TSC0055781
ctaaaactaacc

SEQ ID NO: 366468 - DNA, 12 bp, Artificial Sequence
  Oligonucleotide primer for the detection of SNP TSC0055781
atattagattgg

SEQ ID NO: 366469 - DNA, 12 bp, Artificial Sequence
  Oligonucleotide primer for the detection of SNP TSC0055783
aaatccaattta

SEQ ID NO: 366470 - DNA, 12 bp, Artificial Sequence
  Oligonucleotide primer for the detection of SNP TSC0055783
tttcaaaataac

SEQ ID NO: 366471 - DNA, 12 bp, Artificial Sequence
  Oligonucleotide primer for the detection of SNP TSC0055784
aataattattcc

SEQ ID NO: 366472 - DNA, 12 bp, Artificial Sequence
  Oligonucleotide primer for the detection of SNP TSC0055784
gtttattatgag

SEQ ID NO: 366473 - DNA, 12 bp, Artificial Sequence
  Oligonucleotide primer for the detection of SNP TSC0055785
aatcacttataa

SEQ ID NO: 366474 - DNA, 12 bp, Artificial Sequence
  Oligonucleotide primer for the detection of SNP TSC0055785
atctttatacaa

SEQ ID NO: 366475 - DNA, 12 bp, Artificial Sequence
  Oligonucleotide primer for the detection of SNP TSC0055785
taattatttatg

SEQ ID NO: 366476 - DNA, 12 bp, Artificial Sequence
  Oligonucleotide primer for the detection of SNP TSC0055786
cctcaacacaac

SEQ ID NO: 366477 - DNA, 12 bp, Artificial Sequence
  Oligonucleotide primer for the detection of SNP TSC0055786
cctcgacacaac

SEQ ID NO: 366478 - DNA, 12 bp, Artificial Sequence
  Oligonucleotide primer for the detection of SNP TSC0055787
ccacattttttt

SEQ ID NO: 366479 - DNA, 12 bp, Artificial Sequence
  Oligonucleotide primer for the detection of SNP TSC0055787
gaaagatttttt

SEQ ID NO: 366480 - DNA, 12 bp, Artificial Sequence
  Oligonucleotide primer for the detection of SNP TSC0055788
agagattgtatg

SEQ ID NO: 366481 - DNA, 12 bp, Artificial Sequence
  Oligonucleotide primer for the detection of SNP TSC0055789
acttttacactc

SEQ ID NO: 366482 - DNA, 12 bp, Artificial Sequence
  Oligonucleotide primer for the detection of SNP TSC0055792
attcattcaatc

SEQ ID NO: 366483 - DNA, 12 bp, Artificial Sequence
  Oligonucleotide primer for the detection of SNP TSC0055792
tgaatagtttta

SEQ ID NO: 366484 - DNA, 12 bp, Artificial Sequence
  Oligonucleotide primer for the detection of SNP TSC0055792
gtttatttagtt

SEQ ID NO: 366485 - DNA, 12 bp, Artificial Sequence
  Oligonucleotide primer for the detection of SNP TSC0055794
atatcttaacct

SEQ ID NO: 366486 - DNA, 12 bp, Artificial Sequence
  Oligonucleotide primer for the detection of SNP TSC0055794
agtgatggaaaa

SEQ ID NO: 366487 - DNA, 12 bp, Artificial Sequence
  Oligonucleotide primer for the detection of SNP TSC0055795
taaggttttgaa

SEQ ID NO: 366488 - DNA, 12 bp, Artificial Sequence
  Oligonucleotide primer for the detection of SNP TSC0007966
cttcttttttaa

SEQ ID NO: 366489 - DNA, 12 bp, Artificial Sequence
  Oligonucleotide primer for the detection of SNP TSC0007966
tattagtagatt

SEQ ID NO: 366490 - DNA, 12 bp, Artificial Sequence
  Oligonucleotide primer for the detection of SNP TSC0007966
catcaataaacc

SEQ ID NO: 366491 - DNA, 12 bp, Artificial Sequence
  Oligonucleotide primer for the detection of SNP TSC0055799
tccatttctttc

SEQ ID NO: 366492 - DNA, 12 bp, Artificial Sequence
  Oligonucleotide primer for the detection of SNP TSC0055799
ggtaggtggttg

SEQ ID NO: 366493 - DNA, 12 bp, Artificial Sequence
  Oligonucleotide primer for the detection of SNP TSC0055800
aaaactttcctt

SEQ ID NO: 366494 - DNA, 12 bp, Artificial Sequence
  Oligonucleotide primer for the detection of SNP TSC0055800
aagatgaagaag

SEQ ID NO: 366495 - DNA, 12 bp, Artificial Sequence
  Oligonucleotide primer for the detection of SNP TSC0055800
aagacgaagaag

SEQ ID NO: 366496 - DNA, 12 bp, Artificial Sequence
  Oligonucleotide primer for the detection of SNP TSC0006059
aacatttaattt

SEQ ID NO: 366497 - DNA, 12 bp, Artificial Sequence
  Oligonucleotide primer for the detection of SNP TSC0006059
tttttttgttaa

SEQ ID NO: 366498 - DNA, 12 bp, Artificial Sequence
  Oligonucleotide primer for the detection of SNP TSC0009543
ttataaatttcc

SEQ ID NO: 366499 - DNA, 12 bp, Artificial Sequence
  Oligonucleotide primer for the detection of SNP TSC0009543
ttggggaggatt

SEQ ID NO: 366500 - DNA, 12 bp, Artificial Sequence
  Oligonucleotide primer for the detection of SNP TSC0055801
aataaacgtatt

SEQ ID NO: 366501 - DNA, 12 bp, Artificial Sequence
  Oligonucleotide primer for the detection of SNP TSC0055801
gtgagagtggat

SEQ ID NO: 366502 - DNA, 12 bp, Artificial Sequence
  Oligonucleotide primer for the detection of SNP TSC0055801
gataaatgtatt

SEQ ID NO: 366503 - DNA, 12 bp, Artificial Sequence
  Oligonucleotide primer for the detection of SNP TSC0055801
gataaacgtatt

SEQ ID NO: 366504 - DNA, 12 bp, Artificial Sequence
  Oligonucleotide primer for the detection of SNP TSC0008071
agtgatatttag

SEQ ID NO: 366505 - DNA, 12 bp, Artificial Sequence
  Oligonucleotide primer for the detection of SNP TSC0008071
aataacattcaa

SEQ ID NO: 366506 - DNA, 12 bp, Artificial Sequence
  Oligonucleotide primer for the detection of SNP TSC0008071
atatatgtgaaa

SEQ ID NO: 366507 - DNA, 12 bp, Artificial Sequence
  Oligonucleotide primer for the detection of SNP TSC0008072
aacatacacact

SEQ ID NO: 366508 - DNA, 12 bp, Artificial Sequence
  Oligonucleotide primer for the detection of SNP TSC0008072
aacgtacacact

SEQ ID NO: 366509 - DNA, 12 bp, Artificial Sequence
  Oligonucleotide primer for the detection of SNP TSC0008072
aatagtgataag

SEQ ID NO: 366510 - DNA, 12 bp, Artificial Sequence
  Oligonucleotide primer for the detection of SNP TSC0055802
tttttagtagag

SEQ ID NO: 366511 - DNA, 12 bp, Artificial Sequence
  Oligonucleotide primer for the detection of SNP TSC0055803
atctcatcctta

SEQ ID NO: 366512 - DNA, 12 bp, Artificial Sequence
  Oligonucleotide primer for the detection of SNP TSC0055803
taagagaaggta

SEQ ID NO: 366513 - DNA, 12 bp, Artificial Sequence
  Oligonucleotide primer for the detection of SNP TSC0055804
aattattttctc

SEQ ID NO: 366514 - DNA, 12 bp, Artificial Sequence
  Oligonucleotide primer for the detection of SNP TSC0055804
aagaataatgag

SEQ ID NO: 366515 - DNA, 12 bp, Artificial Sequence
  Oligonucleotide primer for the detection of SNP TSC0055805
aataattccccc

SEQ ID NO: 366516 - DNA, 12 bp, Artificial Sequence
  Oligonucleotide primer for the detection of SNP TSC0055805
ggtagttttttc

SEQ ID NO: 366517 - DNA, 12 bp, Artificial Sequence
  Oligonucleotide primer for the detection of SNP TSC0055812
attaaacaaaaa

SEQ ID NO: 366518 - DNA, 12 bp, Artificial Sequence
  Oligonucleotide primer for the detection of SNP TSC0055812
aggtgttgttta

SEQ ID NO: 366519 - DNA, 12 bp, Artificial Sequence
  Oligonucleotide primer for the detection of SNP TSC0055812
aatactatccaa

SEQ ID NO: 366520 - DNA, 12 bp, Artificial Sequence
  Oligonucleotide primer for the detection of SNP TSC0055812
attaagtagggg

SEQ ID NO: 366521 - DNA, 12 bp, Artificial Sequence
  Oligonucleotide primer for the detection of SNP TSC0055814
tctaatacccct

SEQ ID NO: 366522 - DNA, 12 bp, Artificial Sequence
  Oligonucleotide primer for the detection of SNP TSC0055814
tgtgttaggtag

SEQ ID NO: 366523 - DNA, 12 bp, Artificial Sequence
  Oligonucleotide primer for the detection of SNP TSC0055814
tatatcaaacaa

SEQ ID NO: 366524 - DNA, 12 bp, Artificial Sequence
  Oligonucleotide primer for the detection of SNP TSC0055814
tttagtgttttt

SEQ ID NO: 366525 - DNA, 12 bp, Artificial Sequence
  Oligonucleotide primer for the detection of SNP TSC0055815
tagatagataga

SEQ ID NO: 366526 - DNA, 12 bp, Artificial Sequence
  Oligonucleotide primer for the detection of SNP TSC0055816
aaataagataga

SEQ ID NO: 366527 - DNA, 12 bp, Artificial Sequence
  Oligonucleotide primer for the detection of SNP TSC0055820
cttcacctccca

SEQ ID NO: 366528 - DNA, 12 bp, Artificial Sequence
  Oligonucleotide primer for the detection of SNP TSC0055820
aggaaggtgttt

SEQ ID NO: 366529 - DNA, 12 bp, Artificial Sequence
  Oligonucleotide primer for the detection of SNP TSC0055822
atgtgttgattt

SEQ ID NO: 366530 - DNA, 12 bp, Artificial Sequence
  Oligonucleotide primer for the detection of SNP TSC0055822
tatattaactca

SEQ ID NO: 366531 - DNA, 12 bp, Artificial Sequence
  Oligonucleotide primer for the detection of SNP TSC0055822
taggtaggaggt

SEQ ID NO: 366532 - DNA, 12 bp, Artificial Sequence
  Oligonucleotide primer for the detection of SNP TSC0055828
catcatctatac

SEQ ID NO: 366533 - DNA, 12 bp, Artificial Sequence
  Oligonucleotide primer for the detection of SNP TSC0055828
catcgtctatac

SEQ ID NO: 366534 - DNA, 12 bp, Artificial Sequence
  Oligonucleotide primer for the detection of SNP TSC0055828
aaggtaggaaaa

SEQ ID NO: 366535 - DNA, 12 bp, Artificial Sequence
  Oligonucleotide primer for the detection of SNP TSC0055829
caataaattatt

SEQ ID NO: 366536 - DNA, 12 bp, Artificial Sequence
  Oligonucleotide primer for the detection of SNP TSC0055829
tgatttttatga

SEQ ID NO: 366537 - DNA, 12 bp, Artificial Sequence
  Oligonucleotide primer for the detection of SNP TSC0055829
cgatttttatga

SEQ ID NO: 366538 - DNA, 12 bp, Artificial Sequence
  Oligonucleotide primer for the detection of SNP TSC0055830
ctttaccccaaa

SEQ ID NO: 366539 - DNA, 12 bp, Artificial Sequence
  Oligonucleotide primer for the detection of SNP TSC0055830
atgtaggttgtt

SEQ ID NO: 366540 - DNA, 12 bp, Artificial Sequence
  Oligonucleotide primer for the detection of SNP TSC0055830
atgtaggtcgtt

SEQ ID NO: 366541 - DNA, 12 bp, Artificial Sequence
  Oligonucleotide primer for the detection of SNP TSC0055830
atataaatcact

SEQ ID NO: 366542 - DNA, 12 bp, Artificial Sequence
  Oligonucleotide primer for the detection of SNP TSC0055830
atataaatcgct

SEQ ID NO: 366543 - DNA, 12 bp, Artificial Sequence
  Oligonucleotide primer for the detection of SNP TSC0055833
tacaaatataat

SEQ ID NO: 366544 - DNA, 12 bp, Artificial Sequence
  Oligonucleotide primer for the detection of SNP TSC0055833
ttatgaatatta

SEQ ID NO: 366545 - DNA, 12 bp, Artificial Sequence
  Oligonucleotide primer for the detection of SNP TSC0055834
taaccatattca

SEQ ID NO: 366546 - DNA, 12 bp, Artificial Sequence
  Oligonucleotide primer for the detection of SNP TSC0055834
ggtaaatttgat

SEQ ID NO: 366547 - DNA, 12 bp, Artificial Sequence
  Oligonucleotide primer for the detection of SNP TSC0055834
ggtaaatttgac

SEQ ID NO: 366548 - DNA, 12 bp, Artificial Sequence
  Oligonucleotide primer for the detection of SNP TSC0055834
gattatatttat

SEQ ID NO: 366549 - DNA, 12 bp, Artificial Sequence
  Oligonucleotide primer for the detection of SNP TSC0055835
accaactaattt

SEQ ID NO: 366550 - DNA, 12 bp, Artificial Sequence
  Oligonucleotide primer for the detection of SNP TSC0055835
ggtgggtatagg

SEQ ID NO: 366551 - DNA, 12 bp, Artificial Sequence
  Oligonucleotide primer for the detection of SNP TSC0055836
ttctacactcac

SEQ ID NO: 366552 - DNA, 12 bp, Artificial Sequence
  Oligonucleotide primer for the detection of SNP TSC0055836
tgtttagagttg

SEQ ID NO: 366553 - DNA, 12 bp, Artificial Sequence
  Oligonucleotide primer for the detection of SNP TSC0055837
aaaatactttct

SEQ ID NO: 366554 - DNA, 12 bp, Artificial Sequence
  Oligonucleotide primer for the detection of SNP TSC0055837
agagtgtttttt

SEQ ID NO: 366555 - DNA, 12 bp, Artificial Sequence
  Oligonucleotide primer for the detection of SNP TSC0055838
gaaatttatggt

SEQ ID NO: 366556 - DNA, 12 bp, Artificial Sequence
  Oligonucleotide primer for the detection of SNP TSC0055838
gaaatttatggc

SEQ ID NO: 366557 - DNA, 12 bp, Artificial Sequence
  Oligonucleotide primer for the detection of SNP TSC0055838
aaaattcataac

SEQ ID NO: 366558 - DNA, 12 bp, Artificial Sequence
  Oligonucleotide primer for the detection of SNP TSC0055838
gttattacgttt

SEQ ID NO: 366559 - DNA, 12 bp, Artificial Sequence
  Oligonucleotide primer for the detection of SNP TSC0055838
gttattatgttc

SEQ ID NO: 366560 - DNA, 12 bp, Artificial Sequence
  Oligonucleotide primer for the detection of SNP TSC0055838
gttattacgttc

SEQ ID NO: 366561 - DNA, 12 bp, Artificial Sequence
  Oligonucleotide primer for the detection of SNP TSC0055839
acacaatttttt

SEQ ID NO: 366562 - DNA, 12 bp, Artificial Sequence
  Oligonucleotide primer for the detection of SNP TSC0055839
acgcaatttttt

SEQ ID NO: 366563 - DNA, 12 bp, Artificial Sequence
  Oligonucleotide primer for the detection of SNP TSC0055840
atactcaaaaat

SEQ ID NO: 366564 - DNA, 12 bp, Artificial Sequence
  Oligonucleotide primer for the detection of SNP TSC0055840
aaattgatttga

SEQ ID NO: 366565 - DNA, 12 bp, Artificial Sequence
  Oligonucleotide primer for the detection of SNP TSC0055841
aaccaatacata

SEQ ID NO: 366566 - DNA, 12 bp, Artificial Sequence
  Oligonucleotide primer for the detection of SNP TSC0055841
aaccaatacgta

SEQ ID NO: 366567 - DNA, 12 bp, Artificial Sequence
  Oligonucleotide primer for the detection of SNP TSC0055841
tagatgaatttt

SEQ ID NO: 366568 - DNA, 12 bp, Artificial Sequence
  Oligonucleotide primer for the detection of SNP TSC0055841
ccaaataaatcc

SEQ ID NO: 366569 - DNA, 12 bp, Artificial Sequence
  Oligonucleotide primer for the detection of SNP TSC0055841
gttaatatgtgt

SEQ ID NO: 366570 - DNA, 12 bp, Artificial Sequence
  Oligonucleotide primer for the detection of SNP TSC0055841
gttaatacgtgt

SEQ ID NO: 366571 - DNA, 12 bp, Artificial Sequence
  Oligonucleotide primer for the detection of SNP TSC0055842
tataatacattt

SEQ ID NO: 366572 - DNA, 12 bp, Artificial Sequence
  Oligonucleotide primer for the detection of SNP TSC0055842
tataatacgttt

SEQ ID NO: 366573 - DNA, 12 bp, Artificial Sequence
  Oligonucleotide primer for the detection of SNP TSC0055843
aattattttcat

SEQ ID NO: 366574 - DNA, 12 bp, Artificial Sequence
  Oligonucleotide primer for the detection of SNP TSC0055843
atgtaatggggg

SEQ ID NO: 366575 - DNA, 12 bp, Artificial Sequence
  Oligonucleotide primer for the detection of SNP TSC0055845
ataaaccacaaa

SEQ ID NO: 366576 - DNA, 12 bp, Artificial Sequence
  Oligonucleotide primer for the detection of SNP TSC0055845
tattcatttttt

SEQ ID NO: 366577 - DNA, 12 bp, Artificial Sequence
  Oligonucleotide primer for the detection of SNP TSC0055845
atgagttataag

SEQ ID NO: 366578 - DNA, 12 bp, Artificial Sequence
  Oligonucleotide primer for the detection of SNP TSC0055846
acctttcttttt

SEQ ID NO: 366579 - DNA, 12 bp, Artificial Sequence
  Oligonucleotide primer for the detection of SNP TSC0055846
tgttttgggggg

SEQ ID NO: 366580 - DNA, 12 bp, Artificial Sequence
  Oligonucleotide primer for the detection of SNP TSC0055846
tgtttcgggggg

SEQ ID NO: 366581 - DNA, 12 bp, Artificial Sequence
  Oligonucleotide primer for the detection of SNP TSC0055847
tcacttaccttt

SEQ ID NO: 366582 - DNA, 12 bp, Artificial Sequence
  Oligonucleotide primer for the detection of SNP TSC0055847
gggggggaaaaa

SEQ ID NO: 366583 - DNA, 12 bp, Artificial Sequence
  Oligonucleotide primer for the detection of SNP TSC0055848
cttttaccaaat

SEQ ID NO: 366584 - DNA, 12 bp, Artificial Sequence
  Oligonucleotide primer for the detection of SNP TSC0055848
taaagaattata

SEQ ID NO: 366585 - DNA, 12 bp, Artificial Sequence
  Oligonukleotid-Primer
taaaaaatcata

SEQ ID NO: 366586 - DNA, 12 bp, Artificial Sequence
  Oligonucleotide primer for the detection of SNP TSC0005546
cctaaccctcct

SEQ ID NO: 366587 - DNA, 12 bp, Artificial Sequence
  Oligonucleotide primer for the detection of SNP TSC0005546
ttgtatgttgta

SEQ ID NO: 366588 - DNA, 12 bp, Artificial Sequence
  Oligonucleotide primer for the detection of SNP TSC0055854
acattaaactcg

SEQ ID NO: 366589 - DNA, 12 bp, Artificial Sequence
  Oligonukleotid-Primer
acgttaaactca

SEQ ID NO: 366590 - DNA, 12 bp, Artificial Sequence
  Oligonucleotide primer for the detection of SNP TSC0055854
acgttaaactcg

SEQ ID NO: 366591 - DNA, 12 bp, Artificial Sequence
  Oligonucleotide primer for the detection of SNP TSC0055854
gttgtggtgtat

SEQ ID NO: 366592 - DNA, 12 bp, Artificial Sequence
  Oligonucleotide primer for the detection of SNP TSC0055854
gttgcggtgtat

SEQ ID NO: 366593 - DNA, 12 bp, Artificial Sequence
  Oligonucleotide primer for the detection of SNP TSC0055854
gttgtggcgtat

SEQ ID NO: 366594 - DNA, 12 bp, Artificial Sequence
  Oligonucleotide primer for the detection of SNP TSC0055854
gttgcggcgtat

SEQ ID NO: 366595 - DNA, 12 bp, Artificial Sequence
  Oligonucleotide primer for the detection of SNP TSC0055854
attacaacatat

SEQ ID NO: 366596 - DNA, 12 bp, Artificial Sequence
  Oligonucleotide primer for the detection of SNP TSC0055854
attacaacgtat

SEQ ID NO: 366597 - DNA, 12 bp, Artificial Sequence
  Oligonucleotide primer for the detection of SNP TSC0055854
attacgacatat

SEQ ID NO: 366598 - DNA, 12 bp, Artificial Sequence
  Oligonucleotide primer for the detection of SNP TSC0055854
attacgacgtat

SEQ ID NO: 366599 - DNA, 12 bp, Artificial Sequence
  Oligonucleotide primer for the detection of SNP TSC0055854
gtgttaaatttg

SEQ ID NO: 366600 - DNA, 12 bp, Artificial Sequence
  Oligonucleotide primer for the detection of SNP TSC0055854
gcgttaaatttg

SEQ ID NO: 366601 - DNA, 12 bp, Artificial Sequence
  Oligonucleotide primer for the detection of SNP TSC0055854
gtgttaaattcg

SEQ ID NO: 366602 - DNA, 12 bp, Artificial Sequence
  Oligonucleotide primer for the detection of SNP TSC0055854
gcgttaaattcg

SEQ ID NO: 366603 - DNA, 12 bp, Artificial Sequence
  Oligonucleotide primer for the detection of SNP TSC0055857
agatagggtttc

SEQ ID NO: 366604 - DNA, 12 bp, Artificial Sequence
  Oligonucleotide primer for the detection of SNP TSC0055857
tggttaatatgt

SEQ ID NO: 366605 - DNA, 12 bp, Artificial Sequence
  Oligonucleotide primer for the detection of SNP TSC0055858
acaactcctact

SEQ ID NO: 366606 - DNA, 12 bp, Artificial Sequence
  Oligonucleotide primer for the detection of SNP TSC0055858
gttgtttttatg

SEQ ID NO: 366607 - DNA, 12 bp, Artificial Sequence
  Oligonucleotide primer for the detection of SNP TSC0055858
gtcgtttttatg

SEQ ID NO: 366608 - DNA, 12 bp, Artificial Sequence
  Oligonucleotide primer for the detection of SNP TSC0055858
gttgtttttacg

SEQ ID NO: 366609 - DNA, 12 bp, Artificial Sequence
  Oligonucleotide primer for the detection of SNP TSC0055858
gtcgtttttacg

SEQ ID NO: 366610 - DNA, 12 bp, Artificial Sequence
  Oligonucleotide primer for the detection of SNP TSC0055860
agggttaataaa

SEQ ID NO: 366611 - DNA, 12 bp, Artificial Sequence
  Oligonucleotide primer for the detection of SNP TSC0055860
aaaatcaacaaa

SEQ ID NO: 366612 - DNA, 12 bp, Artificial Sequence
  Oligonucleotide primer for the detection of SNP TSC0055860
gttttttatagg

SEQ ID NO: 366613 - DNA, 12 bp, Artificial Sequence
  Oligonucleotide primer for the detection of SNP TSC0055861
acacctccctct

SEQ ID NO: 366614 - DNA, 12 bp, Artificial Sequence
  Oligonucleotide primer for the detection of SNP TSC0055861
aagggagtaaga

SEQ ID NO: 366615 - DNA, 12 bp, Artificial Sequence
  Oligonucleotide primer for the detection of SNP TSC0055862
atttttaaggta

SEQ ID NO: 366616 - DNA, 12 bp, Artificial Sequence
  Oligonucleotide primer for the detection of SNP TSC0055863
gtgagattgggt

SEQ ID NO: 366617 - DNA, 12 bp, Artificial Sequence
  Oligonucleotide primer for the detection of SNP TSC0055863
gcgagattgggt

SEQ ID NO: 366618 - DNA, 12 bp, Artificial Sequence
  Oligonucleotide primer for the detection of SNP TSC0055863
gtgagattgggc

SEQ ID NO: 366619 - DNA, 12 bp, Artificial Sequence
  Oligonucleotide primer for the detection of SNP TSC0055863
gcgagattgggc

SEQ ID NO: 366620 - DNA, 12 bp, Artificial Sequence
  Oligonucleotide primer for the detection of SNP TSC0055863
aacgaaattaaa

SEQ ID NO: 366621 - DNA, 12 bp, Artificial Sequence
  Oligonucleotide primer for the detection of SNP TSC0055863
aggagtaggaat

SEQ ID NO: 366622 - DNA, 12 bp, Artificial Sequence
  Oligonucleotide primer for the detection of SNP TSC0055865
ccatattaacat

SEQ ID NO: 366623 - DNA, 12 bp, Artificial Sequence
  Oligonucleotide primer for the detection of SNP TSC0055865
attaatgtagta

SEQ ID NO: 366624 - DNA, 12 bp, Artificial Sequence
  Oligonucleotide primer for the detection of SNP TSC0055866
ctcaaactcacc

SEQ ID NO: 366625 - DNA, 12 bp, Artificial Sequence
  Oligonucleotide primer for the detection of SNP TSC0055866
ctcgaactcacc

SEQ ID NO: 366626 - DNA, 12 bp, Artificial Sequence
  Oligonucleotide primer for the detection of SNP TSC0055866
tttaaaggtaga

SEQ ID NO: 366627 - DNA, 12 bp, Artificial Sequence
  Oligonucleotide primer for the detection of SNP TSC0055867
ctcataatcctc

SEQ ID NO: 366628 - DNA, 12 bp, Artificial Sequence
  Oligonucleotide primer for the detection of SNP TSC0055867
ataggttagttt

SEQ ID NO: 366629 - DNA, 12 bp, Artificial Sequence
  Oligonucleotide primer for the detection of SNP TSC0055867
caaaccaaccta

SEQ ID NO: 366630 - DNA, 12 bp, Artificial Sequence
  Oligonucleotide primer for the detection of SNP TSC0055868
ctaacttaatca

SEQ ID NO: 366631 - DNA, 12 bp, Artificial Sequence
  Oligonucleotide primer for the detection of SNP TSC0055868
tacattacacat

SEQ ID NO: 366632 - DNA, 12 bp, Artificial Sequence
  Oligonucleotide primer for the detection of SNP TSC0055868
ttggtttgatta

SEQ ID NO: 366633 - DNA, 12 bp, Artificial Sequence
  Oligonucleotide primer for the detection of SNP TSC0055874
aacaacataacc

SEQ ID NO: 366634 - DNA, 12 bp, Artificial Sequence
  Oligonucleotide primer for the detection of SNP TSC0055874
ttggtgtagtag

SEQ ID NO: 366635 - DNA, 12 bp, Artificial Sequence
  Oligonucleotide primer for the detection of SNP TSC0055882
acaaaaacattt

SEQ ID NO: 366636 - DNA, 12 bp, Artificial Sequence
  Oligonucleotide primer for the detection of SNP TSC0055882
acaaaaacgttt

SEQ ID NO: 366637 - DNA, 12 bp, Artificial Sequence
  Oligonucleotide primer for the detection of SNP TSC0055882
acgaaaacattt

SEQ ID NO: 366638 - DNA, 12 bp, Artificial Sequence
  Oligonucleotide primer for the detection of SNP TSC0055882
acgaaaacgttt

SEQ ID NO: 366639 - DNA, 12 bp, Artificial Sequence
  Oligonucleotide primer for the detection of SNP TSC0055882
aagagaggttaa

SEQ ID NO: 366640 - DNA, 12 bp, Artificial Sequence
  Oligonucleotide primer for the detection of SNP TSC0055885
attctcttataa

SEQ ID NO: 366641 - DNA, 12 bp, Artificial Sequence
  Oligonucleotide primer for the detection of SNP TSC0055885
atttctaacctt

SEQ ID NO: 366642 - DNA, 12 bp, Artificial Sequence
  Oligonucleotide primer for the detection of SNP TSC0055885
atttttttatag

SEQ ID NO: 366643 - DNA, 12 bp, Artificial Sequence
  Oligonucleotide primer for the detection of SNP TSC0055888
aaaaatttactt

SEQ ID NO: 366644 - DNA, 12 bp, Artificial Sequence
  Oligonucleotide primer for the detection of SNP TSC0055889
cttcactctttt

SEQ ID NO: 366645 - DNA, 12 bp, Artificial Sequence
  Oligonucleotide primer for the detection of SNP TSC0055889
tggatagttata

SEQ ID NO: 366646 - DNA, 12 bp, Artificial Sequence
  Oligonucleotide primer for the detection of SNP TSC0055891
tatactatatac

SEQ ID NO: 366647 - DNA, 12 bp, Artificial Sequence
  Oligonucleotide primer for the detection of SNP TSC0055891
agtattttatta

SEQ ID NO: 366648 - DNA, 12 bp, Artificial Sequence
  Oligonucleotide primer for the detection of SNP TSC0055894
taacaattattt

SEQ ID NO: 366649 - DNA, 12 bp, Artificial Sequence
  Oligonucleotide primer for the detection of SNP TSC0055896
atactatataac

SEQ ID NO: 366650 - DNA, 12 bp, Artificial Sequence
  Oligonucleotide primer for the detection of SNP TSC0055896
atagtaattttg

SEQ ID NO: 366651 - DNA, 12 bp, Artificial Sequence
  Oligonucleotide primer for the detection of SNP TSC0055896
atagtaatttcg

SEQ ID NO: 366652 - DNA, 12 bp, Artificial Sequence
  Oligonucleotide primer for the detection of SNP TSC0055897
aagttttaattt

SEQ ID NO: 366653 - DNA, 12 bp, Artificial Sequence
  Oligonucleotide primer for the detection of SNP TSC0055897
aagttttaattc

SEQ ID NO: 366654 - DNA, 12 bp, Artificial Sequence
  Oligonucleotide primer for the detection of SNP TSC0055897
aaaaccccaatt

SEQ ID NO: 366655 - DNA, 12 bp, Artificial Sequence
  Oligonucleotide primer for the detection of SNP TSC0055897
tataaaaaaaga

SEQ ID NO: 366656 - DNA, 12 bp, Artificial Sequence
  Oligonucleotide primer for the detection of SNP TSC0055898
tttacctaaatt

SEQ ID NO: 366657 - DNA, 12 bp, Artificial Sequence
  Oligonucleotide primer for the detection of SNP TSC0055898
aaaaaaaaaaga

SEQ ID NO: 366658 - DNA, 12 bp, Artificial Sequence
  Oligonucleotide primer for the detection of SNP TSC0055902
tttttttatctt

SEQ ID NO: 366659 - DNA, 12 bp, Artificial Sequence
  Oligonucleotide primer for the detection of SNP TSC0055902
agatgataattg

SEQ ID NO: 366660 - DNA, 12 bp, Artificial Sequence
  Oligonucleotide primer for the detection of SNP TSC0055903
aactacaaactc

SEQ ID NO: 366661 - DNA, 12 bp, Artificial Sequence
  Oligonucleotide primer for the detection of SNP TSC0055903
gttagttagtgg

SEQ ID NO: 366662 - DNA, 12 bp, Artificial Sequence
  Oligonucleotide primer for the detection of SNP TSC0055906
ttattatttata

SEQ ID NO: 366663 - DNA, 12 bp, Artificial Sequence
  Oligonucleotide primer for the detection of SNP TSC0055907
tatttctcattc

SEQ ID NO: 366664 - DNA, 12 bp, Artificial Sequence
  Oligonucleotide primer for the detection of SNP TSC0055907
ttgagatgtaag

SEQ ID NO: 366665 - DNA, 12 bp, Artificial Sequence
  Oligonucleotide primer for the detection of SNP TSC0055908
caaacaaacata

SEQ ID NO: 366666 - DNA, 12 bp, Artificial Sequence
  Oligonucleotide primer for the detection of SNP TSC0055908
atcaccttccct

SEQ ID NO: 366667 - DNA, 12 bp, Artificial Sequence
  Oligonucleotide primer for the detection of SNP TSC0055908
tagataagtata

SEQ ID NO: 366668 - DNA, 12 bp, Artificial Sequence
  Oligonucleotide primer for the detection of SNP TSC0055911
aaattaactctc

SEQ ID NO: 366669 - DNA, 12 bp, Artificial Sequence
  Oligonucleotide primer for the detection of SNP TSC0055911
ttggggttaatt

SEQ ID NO: 366670 - DNA, 12 bp, Artificial Sequence
  Oligonucleotide primer for the detection of SNP TSC0055912
tttcataattct

SEQ ID NO: 366671 - DNA, 12 bp, Artificial Sequence
  Oligonucleotide primer for the detection of SNP TSC0055912
aggatttttagt

SEQ ID NO: 366672 - DNA, 12 bp, Artificial Sequence
  Oligonucleotide primer for the detection of SNP TSC0055912
aaaaacctccaa

SEQ ID NO: 366673 - DNA, 12 bp, Artificial Sequence
  Oligonucleotide primer for the detection of SNP TSC0008182
tataaaataaac

SEQ ID NO: 366674 - DNA, 12 bp, Artificial Sequence
  Oligonucleotide primer for the detection of SNP TSC0008182
tgtaaaataaat

SEQ ID NO: 366675 - DNA, 12 bp, Artificial Sequence
  Oligonucleotide primer for the detection of SNP TSC0008183
ttttaaaattat

SEQ ID NO: 366676 - DNA, 12 bp, Artificial Sequence
  Oligonucleotide primer for the detection of SNP TSC0008183
taataaatgtta

SEQ ID NO: 366677 - DNA, 12 bp, Artificial Sequence
  Oligonucleotide primer for the detection of SNP TSC0055914
ttctctacctta

SEQ ID NO: 366678 - DNA, 12 bp, Artificial Sequence
  Oligonucleotide primer for the detection of SNP TSC0055914
aatagattattg

SEQ ID NO: 366679 - DNA, 12 bp, Artificial Sequence
  Oligonucleotide primer for the detection of SNP TSC0055915
tccttatatctc

SEQ ID NO: 366680 - DNA, 12 bp, Artificial Sequence
  Oligonucleotide primer for the detection of SNP TSC0055915
attagaaaagag

SEQ ID NO: 366681 - DNA, 12 bp, Artificial Sequence
  Oligonucleotide primer for the detection of SNP TSC0055916
aacaataaaacc

SEQ ID NO: 366682 - DNA, 12 bp, Artificial Sequence
  Oligonucleotide primer for the detection of SNP TSC0055916
ttggtaaggtag

SEQ ID NO: 366683 - DNA, 12 bp, Artificial Sequence
  Oligonucleotide primer for the detection of SNP TSC0055917
tttatcaaaatt

SEQ ID NO: 366684 - DNA, 12 bp, Artificial Sequence
  Oligonucleotide primer for the detection of SNP TSC0055917
agtaatataaaa

SEQ ID NO: 366685 - DNA, 12 bp, Artificial Sequence
  Oligonucleotide primer for the detection of SNP TSC0055918
ttatctttttat

SEQ ID NO: 366686 - DNA, 12 bp, Artificial Sequence
  Oligonucleotide primer for the detection of SNP TSC0055918
ttgtattaagta

SEQ ID NO: 366687 - DNA, 12 bp, Artificial Sequence
  Oligonucleotide primer for the detection of SNP TSC0055918
tcgtattaagta

SEQ ID NO: 366688 - DNA, 12 bp, Artificial Sequence
  Oligonucleotide primer for the detection of SNP TSC0055918
ccatattaaata

SEQ ID NO: 366689 - DNA, 12 bp, Artificial Sequence
  Oligonucleotide primer for the detection of SNP TSC0055918
ccgtattaaata

SEQ ID NO: 366690 - DNA, 12 bp, Artificial Sequence
  Oligonucleotide primer for the detection of SNP TSC0055919
tttacttaacct

SEQ ID NO: 366691 - DNA, 12 bp, Artificial Sequence
  Oligonucleotide primer for the detection of SNP TSC0055919
agtatttttggg

SEQ ID NO: 366692 - DNA, 12 bp, Artificial Sequence
  Oligonucleotide primer for the detection of SNP TSC0055919
aatacctttaaa

SEQ ID NO: 366693 - DNA, 12 bp, Artificial Sequence
  Oligonucleotide primer for the detection of SNP TSC0055920
atacaactctct

SEQ ID NO: 366694 - DNA, 12 bp, Artificial Sequence
  Oligonucleotide primer for the detection of SNP TSC0055924
acgtaatattta

SEQ ID NO: 366695 - DNA, 12 bp, Artificial Sequence
  Oligonucleotide primer for the detection of SNP TSC0055924
tgattttgttat

SEQ ID NO: 366696 - DNA, 12 bp, Artificial Sequence
  Oligonucleotide primer for the detection of SNP TSC0055924
taactttatcac

SEQ ID NO: 366697 - DNA, 12 bp, Artificial Sequence
  Oligonucleotide primer for the detection of SNP TSC0055924
atgtgatattta

SEQ ID NO: 366698 - DNA, 12 bp, Artificial Sequence
  Oligonucleotide primer for the detection of SNP TSC0055924
acgtgatattta

SEQ ID NO: 366699 - DNA, 12 bp, Artificial Sequence
  Oligonucleotide primer for the detection of SNP TSC0055927
cacaactcacta

SEQ ID NO: 366700 - DNA, 12 bp, Artificial Sequence
  Oligonucleotide primer for the detection of SNP TSC0055927
ggagtttaaggt

SEQ ID NO: 366701 - DNA, 12 bp, Artificial Sequence
  Oligonucleotide primer for the detection of SNP TSC0055928
atagggtttttt

SEQ ID NO: 366702 - DNA, 12 bp, Artificial Sequence
  Oligonucleotide primer for the detection of SNP TSC0055928
gtttttaaaaga

SEQ ID NO: 366703 - DNA, 12 bp, Artificial Sequence
  Oligonucleotide primer for the detection of SNP TSC0055930
tcacctattttc

SEQ ID NO: 366704 - DNA, 12 bp, Artificial Sequence
  Oligonucleotide primer for the detection of SNP TSC0055930
aatcgtaagtta

SEQ ID NO: 366705 - DNA, 12 bp, Artificial Sequence
  Oligonucleotide primer for the detection of SNP TSC0005243
gttattgtaaaa

SEQ ID NO: 366706 - DNA, 12 bp, Artificial Sequence
  Oligonucleotide primer for the detection of SNP TSC0055931
tcaaaacactta

SEQ ID NO: 366707 - DNA, 12 bp, Artificial Sequence
  Oligonucleotide primer for the detection of SNP TSC0055931
ttatgtgttatt

SEQ ID NO: 366708 - DNA, 12 bp, Artificial Sequence
  Oligonucleotide primer for the detection of SNP TSC0055931
ttacgtgttatt

SEQ ID NO: 366709 - DNA, 12 bp, Artificial Sequence
  Oligonucleotide primer for the detection of SNP TSC0055931
ccacgtactacc

SEQ ID NO: 366710 - DNA, 12 bp, Artificial Sequence
  Oligonucleotide primer for the detection of SNP TSC0055931
gttaaagtattt

SEQ ID NO: 366711 - DNA, 12 bp, Artificial Sequence
  Oligonucleotide primer for the detection of SNP TSC0055934
ttattttattct

SEQ ID NO: 366712 - DNA, 12 bp, Artificial Sequence
  Oligonucleotide primer for the detection of SNP TSC0055934
tgggtttagtag

SEQ ID NO: 366713 - DNA, 12 bp, Artificial Sequence
  Oligonucleotide primer for the detection of SNP TSC0055935
tataaatcatta

SEQ ID NO: 366714 - DNA, 12 bp, Artificial Sequence
  Oligonucleotide primer for the detection of SNP TSC0055935
tttgggttaggt

SEQ ID NO: 366715 - DNA, 12 bp, Artificial Sequence
  Oligonucleotide primer for the detection of SNP TSC0055935
tttgggttaggc

SEQ ID NO: 366716 - DNA, 12 bp, Artificial Sequence
  Oligonucleotide primer for the detection of SNP TSC0055935
cttaaaccaaac

SEQ ID NO: 366717 - DNA, 12 bp, Artificial Sequence
  Oligonucleotide primer for the detection of SNP TSC0055935
tgtgggttattg

SEQ ID NO: 366718 - DNA, 12 bp, Artificial Sequence
  Oligonucleotide primer for the detection of SNP TSC0055936
aattttgggtta

SEQ ID NO: 366719 - DNA, 12 bp, Artificial Sequence
  Oligonucleotide primer for the detection of SNP TSC0055936
ccttaaaccaaa

SEQ ID NO: 366720 - DNA, 12 bp, Artificial Sequence
  Oligonucleotide primer for the detection of SNP TSC0055936
gtgggttattgt

SEQ ID NO: 366721 - DNA, 12 bp, Artificial Sequence
  Oligonucleotide primer for the detection of SNP TSC0055936
gtgggttattgc

SEQ ID NO: 366722 - DNA, 12 bp, Artificial Sequence
  Oligonucleotide primer for the detection of SNP TSC0055937
acacctaaccca

SEQ ID NO: 366723 - DNA, 12 bp, Artificial Sequence
  Oligonucleotide primer for the detection of SNP TSC0055937
acgcctaaccca

SEQ ID NO: 366724 - DNA, 12 bp, Artificial Sequence
  Oligonucleotide primer for the detection of SNP TSC0055937
aaatatagaatt

SEQ ID NO: 366725 - DNA, 12 bp, Artificial Sequence
  Oligonucleotide primer for the detection of SNP TSC0055937
aaatatagaatc

SEQ ID NO: 366726 - DNA, 12 bp, Artificial Sequence
  Oligonucleotide primer for the detection of SNP TSC0055937
gcgtttggttta

SEQ ID NO: 366727 - DNA, 12 bp, Artificial Sequence
  Oligonucleotide primer for the detection of SNP TSC0055938
attttgggagtt

SEQ ID NO: 366728 - DNA, 12 bp, Artificial Sequence
  Oligonucleotide primer for the detection of SNP TSC0055938
accttaaaaatc

SEQ ID NO: 366729 - DNA, 12 bp, Artificial Sequence
  Oligonucleotide primer for the detection of SNP TSC0055940
caaaacacaaat

SEQ ID NO: 366730 - DNA, 12 bp, Artificial Sequence
  Oligonucleotide primer for the detection of SNP TSC0055940
atagtaagtttg

SEQ ID NO: 366731 - DNA, 12 bp, Artificial Sequence
  Oligonucleotide primer for the detection of SNP TSC0055940
ataacaaaccta

SEQ ID NO: 366732 - DNA, 12 bp, Artificial Sequence
  Oligonucleotide primer for the detection of SNP TSC0055941
aatattacaatc

SEQ ID NO: 366733 - DNA, 12 bp, Artificial Sequence
  Oligonucleotide primer for the detection of SNP TSC0055941
ggaagagagtat

SEQ ID NO: 366734 - DNA, 12 bp, Artificial Sequence
  Oligonucleotide primer for the detection of SNP TSC0055941
atattataattt

SEQ ID NO: 366735 - DNA, 12 bp, Artificial Sequence
  Oligonucleotide primer for the detection of SNP TSC0055942
gagtatatagat

SEQ ID NO: 366736 - DNA, 12 bp, Artificial Sequence
  Oligonucleotide primer for the detection of SNP TSC0055942
ggtaaatattat

SEQ ID NO: 366737 - DNA, 12 bp, Artificial Sequence
  Oligonucleotide primer for the detection of SNP TSC0055943
aaaatttttcat

SEQ ID NO: 366738 - DNA, 12 bp, Artificial Sequence
  Oligonucleotide primer for the detection of SNP TSC0055944
atttaaataaaa

SEQ ID NO: 366739 - DNA, 12 bp, Artificial Sequence
  Oligonucleotide primer for the detection of SNP TSC0055944
aatatactatct

SEQ ID NO: 366740 - DNA, 12 bp, Artificial Sequence
  Oligonucleotide primer for the detection of SNP TSC0055944
atttgaatagga

SEQ ID NO: 366741 - DNA, 12 bp, Artificial Sequence
  Oligonucleotide primer for the detection of SNP TSC0055945
tttaaaacacat

SEQ ID NO: 366742 - DNA, 12 bp, Artificial Sequence
  Oligonucleotide primer for the detection of SNP TSC0055946
aaatataatacc

SEQ ID NO: 366743 - DNA, 12 bp, Artificial Sequence
  Oligonucleotide primer for the detection of SNP TSC0055946
ttttattaaatg

SEQ ID NO: 366744 - DNA, 12 bp, Artificial Sequence
  Oligonucleotide primer for the detection of SNP TSC0055947
tgagtgatagag

SEQ ID NO: 366745 - DNA, 12 bp, Artificial Sequence
  Oligonucleotide primer for the detection of SNP TSC0055947
gagatagggttt

SEQ ID NO: 366746 - DNA, 12 bp, Artificial Sequence
  Oligonucleotide primer for the detection of SNP TSC0055948
taaaacttaaat

SEQ ID NO: 366747 - DNA, 12 bp, Artificial Sequence
  Oligonucleotide primer for the detection of SNP TSC0055948
ttgtttgatgtt

SEQ ID NO: 366748 - DNA, 12 bp, Artificial Sequence
  Oligonucleotide primer for the detection of SNP TSC0055950
gaaaaataatag

SEQ ID NO: 366749 - DNA, 12 bp, Artificial Sequence
  Oligonucleotide primer for the detection of SNP TSC0055951
tatcacatataa

SEQ ID NO: 366750 - DNA, 12 bp, Artificial Sequence
  Oligonucleotide primer for the detection of SNP TSC0055951
aatttagttaag

SEQ ID NO: 366751 - DNA, 12 bp, Artificial Sequence
  Oligonucleotide primer for the detection of SNP TSC0055951
aatttaatcaaa

SEQ ID NO: 366752 - DNA, 12 bp, Artificial Sequence
  Oligonucleotide primer for the detection of SNP TSC0055951
tattatatatga

SEQ ID NO: 366753 - DNA, 12 bp, Artificial Sequence
  Oligonucleotide primer for the detection of SNP TSC0055952
tataacatacaa

SEQ ID NO: 366754 - DNA, 12 bp, Artificial Sequence
  Oligonucleotide primer for the detection of SNP TSC0055952
agaggatttgat

SEQ ID NO: 366755 - DNA, 12 bp, Artificial Sequence
  Oligonucleotide primer for the detection of SNP TSC0055952
tgtgatatatag

SEQ ID NO: 366756 - DNA, 12 bp, Artificial Sequence
  Oligonucleotide primer for the detection of SNP TSC0055953
tacactaaatat

SEQ ID NO: 366757 - DNA, 12 bp, Artificial Sequence
  Oligonucleotide primer for the detection of SNP TSC0055953
actatttcccta

SEQ ID NO: 366758 - DNA, 12 bp, Artificial Sequence
  Oligonukleotid-Primer
tgtattaggtat

SEQ ID NO: 366759 - DNA, 12 bp, Artificial Sequence
  Oligonucleotide primer for the detection of SNP TSC0055955
ctaaccatccat

SEQ ID NO: 366760 - DNA, 12 bp, Artificial Sequence
  Oligonucleotide primer for the detection of SNP TSC0055955
ttttcctctcca

SEQ ID NO: 366761 - DNA, 12 bp, Artificial Sequence
  Oligonucleotide primer for the detection of SNP TSC0055955
ttagttatttat

SEQ ID NO: 366762 - DNA, 12 bp, Artificial Sequence
  Oligonukleotid-Primer
attaatgtaatg

SEQ ID NO: 366763 - DNA, 12 bp, Artificial Sequence
  Oligonucleotide primer for the detection of SNP TSC0055957
ttaaaacaccca

SEQ ID NO: 366764 - DNA, 12 bp, Artificial Sequence
  Oligonucleotide primer for the detection of SNP TSC0055957
tttatgaaatgt

SEQ ID NO: 366765 - DNA, 12 bp, Artificial Sequence
  Oligonucleotide primer for the detection of SNP TSC0055957
tttatgaaatgc

SEQ ID NO: 366766 - DNA, 12 bp, Artificial Sequence
  Oligonucleotide primer for the detection of SNP TSC0055957
tccataaaatac

SEQ ID NO: 366767 - DNA, 12 bp, Artificial Sequence
  Oligonucleotide primer for the detection of SNP TSC0055957
tttagagtattt

SEQ ID NO: 366768 - DNA, 12 bp, Artificial Sequence
  Oligonucleotide primer for the detection of SNP TSC0055959
atattttaagtg

SEQ ID NO: 366769 - DNA, 12 bp, Artificial Sequence
  Oligonucleotide primer for the detection of SNP TSC0055960
attatcaatata

SEQ ID NO: 366770 - DNA, 12 bp, Artificial Sequence
  Oligonucleotide primer for the detection of SNP TSC0055960
attattagtatg

SEQ ID NO: 366771 - DNA, 12 bp, Artificial Sequence
  Oligonucleotide primer for the detection of SNP TSC0055961
tacctcttatcc

SEQ ID NO: 366772 - DNA, 12 bp, Artificial Sequence
  Oligonucleotide primer for the detection of SNP TSC0055961
ttgtaatttgta

SEQ ID NO: 366773 - DNA, 12 bp, Artificial Sequence
  Oligonucleotide primer for the detection of SNP TSC0055962
caacttaaacct

SEQ ID NO: 366774 - DNA, 12 bp, Artificial Sequence
  Oligonucleotide primer for the detection of SNP TSC0055962
tgtggggtgtag

SEQ ID NO: 366775 - DNA, 12 bp, Artificial Sequence
  Oligonucleotide primer for the detection of SNP TSC0055962
tgcggggtgtag

SEQ ID NO: 366776 - DNA, 12 bp, Artificial Sequence
  Oligonucleotide primer for the detection of SNP TSC0055967
caaaaacactac

SEQ ID NO: 366777 - DNA, 12 bp, Artificial Sequence
  Oligonucleotide primer for the detection of SNP TSC0008916
aactataaatca

SEQ ID NO: 366778 - DNA, 12 bp, Artificial Sequence
  Oligonucleotide primer for the detection of SNP TSC0008916
gtttagagaatt

SEQ ID NO: 366779 - DNA, 12 bp, Artificial Sequence
  Oligonucleotide primer for the detection of SNP TSC0008916
tcaaaaaatcaa

SEQ ID NO: 366780 - DNA, 12 bp, Artificial Sequence
  Oligonucleotide primer for the detection of SNP TSC0008917
tatatatcaatc

SEQ ID NO: 366781 - DNA, 12 bp, Artificial Sequence
  Oligonucleotide primer for the detection of SNP TSC0055971
attggttaggag

SEQ ID NO: 366782 - DNA, 12 bp, Artificial Sequence
  Oligonukleotid-Primer
ctcaaacctttc

SEQ ID NO: 366783 - DNA, 12 bp, Artificial Sequence
  Oligonucleotide primer for the detection of SNP TSC0055973
ttgggaggttgt

SEQ ID NO: 366784 - DNA, 12 bp, Artificial Sequence
  Oligonucleotide primer for the detection of SNP TSC0055973
ttgggaggtcgt

SEQ ID NO: 366785 - DNA, 12 bp, Artificial Sequence
  Oligonucleotide primer for the detection of SNP TSC0055973
ttgggaggttgc

SEQ ID NO: 366786 - DNA, 12 bp, Artificial Sequence
  Oligonucleotide primer for the detection of SNP TSC0055973
ttgggaggtcgc

SEQ ID NO: 366787 - DNA, 12 bp, Artificial Sequence
  Oligonucleotide primer for the detection of SNP TSC0055973
ttaaaaaaccgc

SEQ ID NO: 366788 - DNA, 12 bp, Artificial Sequence
  Oligonucleotide primer for the detection of SNP TSC0055973
ttaagtgatttg

SEQ ID NO: 366789 - DNA, 12 bp, Artificial Sequence
  Oligonucleotide primer for the detection of SNP TSC0055973
ttaagtgattcg

SEQ ID NO: 366790 - DNA, 12 bp, Artificial Sequence
  Oligonucleotide primer for the detection of SNP TSC0010567
tgattgtaaatt

SEQ ID NO: 366791 - DNA, 12 bp, Artificial Sequence
  Oligonucleotide primer for the detection of SNP TSC0010567
tctaactacaaa

SEQ ID NO: 366792 - DNA, 12 bp, Artificial Sequence
  Oligonucleotide primer for the detection of SNP TSC0010567
ggaggggaaagt

SEQ ID NO: 366793 - DNA, 12 bp, Artificial Sequence
  Oligonucleotide primer for the detection of SNP TSC0055975
tcaatacaaatt

SEQ ID NO: 366794 - DNA, 12 bp, Artificial Sequence
  Oligonucleotide primer for the detection of SNP TSC0055975
tttaatagaagg

SEQ ID NO: 366795 - DNA, 12 bp, Artificial Sequence
  Oligonucleotide primer for the detection of SNP TSC0055975
tccaataaaaaa

SEQ ID NO: 366796 - DNA, 12 bp, Artificial Sequence
  Oligonucleotide primer for the detection of SNP TSC0055977
ttctaacttttt

SEQ ID NO: 366797 - DNA, 12 bp, Artificial Sequence
  Oligonucleotide primer for the detection of SNP TSC0055977
gggtataatgtg

SEQ ID NO: 366798 - DNA, 12 bp, Artificial Sequence
  Oligonucleotide primer for the detection of SNP TSC0055978
attccttctact

SEQ ID NO: 366799 - DNA, 12 bp, Artificial Sequence
  Oligonucleotide primer for the detection of SNP TSC0008225
atcccaacccta

SEQ ID NO: 366800 - DNA, 12 bp, Artificial Sequence
  Oligonucleotide primer for the detection of SNP TSC0008225
tgatagtaagtg

SEQ ID NO: 366801 - DNA, 12 bp, Artificial Sequence
  Oligonucleotide primer for the detection of SNP TSC0055979
acacaaactcac

SEQ ID NO: 366802 - DNA, 12 bp, Artificial Sequence
  Oligonucleotide primer for the detection of SNP TSC0055979
acgcaaactcac

SEQ ID NO: 366803 - DNA, 12 bp, Artificial Sequence
  Oligonucleotide primer for the detection of SNP TSC0055980
cttcctatttca

SEQ ID NO: 366804 - DNA, 12 bp, Artificial Sequence
  Oligonucleotide primer for the detection of SNP TSC0055980
aatggtggtggt

SEQ ID NO: 366805 - DNA, 12 bp, Artificial Sequence
  Oligonucleotide primer for the detection of SNP TSC0055980
aatggtggtggc

SEQ ID NO: 366806 - DNA, 12 bp, Artificial Sequence
  Oligonucleotide primer for the detection of SNP TSC0055980
aataataataac

SEQ ID NO: 366807 - DNA, 12 bp, Artificial Sequence
  Oligonucleotide primer for the detection of SNP TSC0055981
caaaccaccacc

SEQ ID NO: 366808 - DNA, 12 bp, Artificial Sequence
  Oligonucleotide primer for the detection of SNP TSC0055981
atttagagagaa

SEQ ID NO: 366809 - DNA, 12 bp, Artificial Sequence
  Oligonucleotide primer for the detection of SNP TSC0055982
tagattatttag

SEQ ID NO: 366810 - DNA, 12 bp, Artificial Sequence
  Oligonucleotide primer for the detection of SNP TSC0055983
aaattcaacaat

SEQ ID NO: 366811 - DNA, 12 bp, Artificial Sequence
  Oligonucleotide primer for the detection of SNP TSC0055983
ttagatatgatg

SEQ ID NO: 366812 - DNA, 12 bp, Artificial Sequence
  Oligonucleotide primer for the detection of SNP TSC0055984
atctaattttaa

SEQ ID NO: 366813 - DNA, 12 bp, Artificial Sequence
  Oligonucleotide primer for the detection of SNP TSC0055984
atattatcctaa

SEQ ID NO: 366814 - DNA, 12 bp, Artificial Sequence
  Oligonucleotide primer for the detection of SNP TSC0055984
tttggttttggt

SEQ ID NO: 366815 - DNA, 12 bp, Artificial Sequence
  Oligonucleotide primer for the detection of SNP TSC0007574
ataattttctct

SEQ ID NO: 366816 - DNA, 12 bp, Artificial Sequence
  Oligonucleotide primer for the detection of SNP TSC0007574
ctacccctccca

SEQ ID NO: 366817 - DNA, 12 bp, Artificial Sequence
  Oligonucleotide primer for the detection of SNP TSC0010781
atatactaaaaa

SEQ ID NO: 366818 - DNA, 12 bp, Artificial Sequence
  Oligonucleotide primer for the detection of SNP TSC0010781
tgtatggaaata

SEQ ID NO: 366819 - DNA, 12 bp, Artificial Sequence
  Oligonucleotide primer for the detection of SNP TSC0010781
tatataaaaaca

SEQ ID NO: 366820 - DNA, 12 bp, Artificial Sequence
  Oligonucleotide primer for the detection of SNP TSC0010781
atatattgaaga

SEQ ID NO: 366821 - DNA, 12 bp, Artificial Sequence
  Oligonucleotide primer for the detection of SNP TSC0010312
acatatttctac

SEQ ID NO: 366822 - DNA, 12 bp, Artificial Sequence
  Oligonucleotide primer for the detection of SNP TSC0010312
atttgttttata

SEQ ID NO: 366823 - DNA, 12 bp, Artificial Sequence
  Oligonucleotide primer for the detection of SNP TSC0055987
caatcccaactt

SEQ ID NO: 366824 - DNA, 12 bp, Artificial Sequence
  Oligonucleotide primer for the detection of SNP TSC0055987
tttgtagtggaa

SEQ ID NO: 366825 - DNA, 12 bp, Artificial Sequence
  Oligonucleotide primer for the detection of SNP TSC0055988
tcccttacaaac

SEQ ID NO: 366826 - DNA, 12 bp, Artificial Sequence
  Oligonucleotide primer for the detection of SNP TSC0055993
tatttatccttc

SEQ ID NO: 366827 - DNA, 12 bp, Artificial Sequence
  Oligonucleotide primer for the detection of SNP TSC0055993
gtttaatatagg

SEQ ID NO: 366828 - DNA, 12 bp, Artificial Sequence
  Oligonucleotide primer for the detection of SNP TSC0056000
ttcaacaaaatc

SEQ ID NO: 366829 - DNA, 12 bp, Artificial Sequence
  Oligonucleotide primer for the detection of SNP TSC0056000
tatctaactcca

SEQ ID NO: 366830 - DNA, 12 bp, Artificial Sequence
  Oligonucleotide primer for the detection of SNP TSC0056009
aaactccatata

SEQ ID NO: 366831 - DNA, 12 bp, Artificial Sequence
  Oligonucleotide primer for the detection of SNP TSC0056009
atggaatttttt

SEQ ID NO: 366832 - DNA, 12 bp, Artificial Sequence
  Oligonucleotide primer for the detection of SNP TSC0056009
ataaaatcttcc

SEQ ID NO: 366833 - DNA, 12 bp, Artificial Sequence
  Oligonucleotide primer for the detection of SNP TSC0056009
gaattttatgtg

SEQ ID NO: 366834 - DNA, 12 bp, Artificial Sequence
  Oligonucleotide primer for the detection of SNP TSC0056010
taaacattctca

SEQ ID NO: 366835 - DNA, 12 bp, Artificial Sequence
  Oligonucleotide primer for the detection of SNP TSC0056010
tttagtgatgtt

SEQ ID NO: 366836 - DNA, 12 bp, Artificial Sequence
  Oligonucleotide primer for the detection of SNP TSC0056010
ctcaataatact

SEQ ID NO: 366837 - DNA, 12 bp, Artificial Sequence
  Oligonucleotide primer for the detection of SNP TSC0056010
tgaatattttta

SEQ ID NO: 366838 - DNA, 12 bp, Artificial Sequence
  Oligonucleotide primer for the detection of SNP TSC0056011
atacttctaaaa

SEQ ID NO: 366839 - DNA, 12 bp, Artificial Sequence
  Oligonucleotide primer for the detection of SNP TSC0056011
tatgaattatat

SEQ ID NO: 366840 - DNA, 12 bp, Artificial Sequence
  Oligonucleotide primer for the detection of SNP TSC0056011
ataaactacata

SEQ ID NO: 366841 - DNA, 12 bp, Artificial Sequence
  Oligonucleotide primer for the detection of SNP TSC0056011
atttttagggtt

SEQ ID NO: 366842 - DNA, 12 bp, Artificial Sequence
  Oligonucleotide primer for the detection of SNP TSC0056013
aatctctaaccc

SEQ ID NO: 366843 - DNA, 12 bp, Artificial Sequence
  Oligonucleotide primer for the detection of SNP TSC0056013
agtggtagtagg

SEQ ID NO: 366844 - DNA, 12 bp, Artificial Sequence
  Oligonucleotide primer for the detection of SNP TSC0056014
cccaaatccatc

SEQ ID NO: 366845 - DNA, 12 bp, Artificial Sequence
  Oligonucleotide primer for the detection of SNP TSC0056014
ttatagatagta

SEQ ID NO: 366846 - DNA, 12 bp, Artificial Sequence
  Oligonucleotide primer for the detection of SNP TSC0056014
ccataaataata

SEQ ID NO: 366847 - DNA, 12 bp, Artificial Sequence
  Oligonucleotide primer for the detection of SNP TSC0056015
aaaaccctaaaa

SEQ ID NO: 366848 - DNA, 12 bp, Artificial Sequence
  Oligonucleotide primer for the detection of SNP TSC0056015
atttaccattct

SEQ ID NO: 366849 - DNA, 12 bp, Artificial Sequence
  Oligonucleotide primer for the detection of SNP TSC0056017
cataatcttacc

SEQ ID NO: 366850 - DNA, 12 bp, Artificial Sequence
  Oligonucleotide primer for the detection of SNP TSC0056017
taccttatttta

SEQ ID NO: 366851 - DNA, 12 bp, Artificial Sequence
  Oligonucleotide primer for the detection of SNP TSC0056018
taattctttctc

SEQ ID NO: 366852 - DNA, 12 bp, Artificial Sequence
  Oligonucleotide primer for the detection of SNP TSC0056018
tttaagataata

SEQ ID NO: 366853 - DNA, 12 bp, Artificial Sequence
  Oligonucleotide primer for the detection of SNP TSC0056021
ctaatttcaaaa

SEQ ID NO: 366854 - DNA, 12 bp, Artificial Sequence
  Oligonucleotide primer for the detection of SNP TSC0056021
tttttaaaaaca

SEQ ID NO: 366855 - DNA, 12 bp, Artificial Sequence
  Oligonucleotide primer for the detection of SNP TSC0056021
gttgattttaag

SEQ ID NO: 366856 - DNA, 12 bp, Artificial Sequence
  Oligonucleotide primer for the detection of SNP TSC0056022
tttttaacatat

SEQ ID NO: 366857 - DNA, 12 bp, Artificial Sequence
  Oligonucleotide primer for the detection of SNP TSC0056022
gatatgttagaa

SEQ ID NO: 366858 - DNA, 12 bp, Artificial Sequence
  Oligonucleotide primer for the detection of SNP TSC0009491
aacttaaaatat

SEQ ID NO: 366859 - DNA, 12 bp, Artificial Sequence
  Oligonucleotide primer for the detection of SNP TSC0009491
ttaattaaggga

SEQ ID NO: 366860 - DNA, 12 bp, Artificial Sequence
  Oligonucleotide primer for the detection of SNP TSC0056024
ttaattctattt

SEQ ID NO: 366861 - DNA, 12 bp, Artificial Sequence
  Oligonucleotide primer for the detection of SNP TSC0056025
ttctacatcatt

SEQ ID NO: 366862 - DNA, 12 bp, Artificial Sequence
  Oligonucleotide primer for the detection of SNP TSC0056025
tttaaatataga

SEQ ID NO: 366863 - DNA, 12 bp, Artificial Sequence
  Oligonucleotide primer for the detection of SNP TSC0056026
attaccaatttc

SEQ ID NO: 366864 - DNA, 12 bp, Artificial Sequence
  Oligonucleotide primer for the detection of SNP TSC0056026
tggtatttttgg

SEQ ID NO: 366865 - DNA, 12 bp, Artificial Sequence
  Oligonucleotide primer for the detection of SNP TSC0056027
aaattaattaac

SEQ ID NO: 366866 - DNA, 12 bp, Artificial Sequence
  Oligonucleotide primer for the detection of SNP TSC0056027
gaagagttgtta

SEQ ID NO: 366867 - DNA, 12 bp, Artificial Sequence
  Oligonucleotide primer for the detection of SNP TSC0056031
acattatttaaa

SEQ ID NO: 366868 - DNA, 12 bp, Artificial Sequence
  Oligonucleotide primer for the detection of SNP TSC0056031
atattatttagg

SEQ ID NO: 366869 - DNA, 12 bp, Artificial Sequence
  Oligonucleotide primer for the detection of SNP TSC0056032
atgtagaggttt

SEQ ID NO: 366870 - DNA, 12 bp, Artificial Sequence
  Oligonucleotide primer for the detection of SNP TSC0056032
acgtagaggttt

SEQ ID NO: 366871 - DNA, 12 bp, Artificial Sequence
  Oligonucleotide primer for the detection of SNP TSC0056032
atgtagaggttc

SEQ ID NO: 366872 - DNA, 12 bp, Artificial Sequence
  Oligonucleotide primer for the detection of SNP TSC0056032
acgtagaggttc

SEQ ID NO: 366873 - DNA, 12 bp, Artificial Sequence
  Oligonucleotide primer for the detection of SNP TSC0056032
aatacgtaaaaa

SEQ ID NO: 366874 - DNA, 12 bp, Artificial Sequence
  Oligonucleotide primer for the detection of SNP TSC0056032
aatgggtaaggt

SEQ ID NO: 366875 - DNA, 12 bp, Artificial Sequence
  Oligonucleotide primer for the detection of SNP TSC0056033
tttttttcctat

SEQ ID NO: 366876 - DNA, 12 bp, Artificial Sequence
  Oligonucleotide primer for the detection of SNP TSC0056033
ttgtttggtagg

SEQ ID NO: 366877 - DNA, 12 bp, Artificial Sequence
  Oligonucleotide primer for the detection of SNP TSC0056033
ttacctaataaa

SEQ ID NO: 366878 - DNA, 12 bp, Artificial Sequence
  Oligonucleotide primer for the detection of SNP TSC0056035
  unsure (2): unknown base
anaaattgattt

SEQ ID NO: 366879 - DNA, 12 bp, Artificial Sequence
  Oligonucleotide primer for the detection of SNP TSC0056035
  unsure (2): unknown base
anaaattaattc

SEQ ID NO: 366880 - DNA, 12 bp, Artificial Sequence
  Oligonucleotide primer for the detection of SNP TSC0056035
gtatttgaatag

SEQ ID NO: 366881 - DNA, 12 bp, Artificial Sequence
  Oligonucleotide primer for the detection of SNP TSC0056036
catatactcaaa

SEQ ID NO: 366882 - DNA, 12 bp, Artificial Sequence
  Oligonucleotide primer for the detection of SNP TSC0056036
catatactcgaa

SEQ ID NO: 366883 - DNA, 12 bp, Artificial Sequence
  Oligonucleotide primer for the detection of SNP TSC0056036
tgaaagttatgt

SEQ ID NO: 366884 - DNA, 12 bp, Artificial Sequence
  Oligonucleotide primer for the detection of SNP TSC0056036
cgaaagttatgt

SEQ ID NO: 366885 - DNA, 12 bp, Artificial Sequence
  Oligonucleotide primer for the detection of SNP TSC0056036
aaaaaccataca

SEQ ID NO: 366886 - DNA, 12 bp, Artificial Sequence
  Oligonucleotide primer for the detection of SNP TSC0056036
gaaaaccataca

SEQ ID NO: 366887 - DNA, 12 bp, Artificial Sequence
  Oligonucleotide primer for the detection of SNP TSC0056036
atatatttgagt

SEQ ID NO: 366888 - DNA, 12 bp, Artificial Sequence
  Oligonucleotide primer for the detection of SNP TSC0056036
atatattcgagt

SEQ ID NO: 366889 - DNA, 12 bp, Artificial Sequence
  Oligonucleotide primer for the detection of SNP TSC0056037
caaaaaaaatat

SEQ ID NO: 366890 - DNA, 12 bp, Artificial Sequence
  Oligonucleotide primer for the detection of SNP TSC0056037
atgttagattta

SEQ ID NO: 366891 - DNA, 12 bp, Artificial Sequence
  Oligonucleotide primer for the detection of SNP TSC0056037
ataccaaatcca

SEQ ID NO: 366892 - DNA, 12 bp, Artificial Sequence
  Oligonucleotide primer for the detection of SNP TSC0056037
tagggagaatgt

SEQ ID NO: 366893 - DNA, 12 bp, Artificial Sequence
  Oligonucleotide primer for the detection of SNP TSC0056038
caaataaaacat

SEQ ID NO: 366894 - DNA, 12 bp, Artificial Sequence
  Oligonucleotide primer for the detection of SNP TSC0056038
ccacttccccat

SEQ ID NO: 366895 - DNA, 12 bp, Artificial Sequence
  Oligonucleotide primer for the detection of SNP TSC0056038
tagataaagtat

SEQ ID NO: 366896 - DNA, 12 bp, Artificial Sequence
  Oligonucleotide primer for the detection of SNP TSC0056040
aataaaaaaaca

SEQ ID NO: 366897 - DNA, 12 bp, Artificial Sequence
  Oligonucleotide primer for the detection of SNP TSC0056040
ggaataagtgtt

SEQ ID NO: 366898 - DNA, 12 bp, Artificial Sequence
  Oligonucleotide primer for the detection of SNP TSC0056040
aaacaaatatta

SEQ ID NO: 366899 - DNA, 12 bp, Artificial Sequence
  Oligonucleotide primer for the detection of SNP TSC0056040
tggtgaggaagt

SEQ ID NO: 366900 - DNA, 12 bp, Artificial Sequence
  Oligonucleotide primer for the detection of SNP TSC0056041
atttccctccaa

SEQ ID NO: 366901 - DNA, 12 bp, Artificial Sequence
  Oligonucleotide primer for the detection of SNP TSC0056041
ttatgtgaagat

SEQ ID NO: 366902 - DNA, 12 bp, Artificial Sequence
  Oligonucleotide primer for the detection of SNP TSC0004704
attgaaggtata

SEQ ID NO: 366903 - DNA, 12 bp, Artificial Sequence
  Oligonucleotide primer for the detection of SNP TSC0004705
atccaaaaataa

SEQ ID NO: 366904 - DNA, 12 bp, Artificial Sequence
  Oligonucleotide primer for the detection of SNP TSC0004705
tcaacttataat

SEQ ID NO: 366905 - DNA, 12 bp, Artificial Sequence
  Oligonucleotide primer for the detection of SNP TSC0004705
atttagaggtaa

SEQ ID NO: 366906 - DNA, 12 bp, Artificial Sequence
  Oligonucleotide primer for the detection of SNP TSC0056045
acattaatttat

SEQ ID NO: 366907 - DNA, 12 bp, Artificial Sequence
  Oligonucleotide primer for the detection of SNP TSC0056046
ctaaattttaat

SEQ ID NO: 366908 - DNA, 12 bp, Artificial Sequence
  Oligonucleotide primer for the detection of SNP TSC0056046
ctatacctttta

SEQ ID NO: 366909 - DNA, 12 bp, Artificial Sequence
  Oligonucleotide primer for the detection of SNP TSC0056047
aaggattttttc

SEQ ID NO: 366910 - DNA, 12 bp, Artificial Sequence
  Oligonucleotide primer for the detection of SNP TSC0056047
aaaaacttcctc

SEQ ID NO: 366911 - DNA, 12 bp, Artificial Sequence
  Oligonucleotide primer for the detection of SNP TSC0056048
tgaaagtttttt

SEQ ID NO: 366912 - DNA, 12 bp, Artificial Sequence
  Oligonucleotide primer for the detection of SNP TSC0056048
taaaaattcccc

SEQ ID NO: 366913 - DNA, 12 bp, Artificial Sequence
  Oligonucleotide primer for the detection of SNP TSC0056048
atggatgtagag

SEQ ID NO: 366914 - DNA, 12 bp, Artificial Sequence
  Oligonucleotide primer for the detection of SNP TSC0056050
gttgtagtttaa

SEQ ID NO: 366915 - DNA, 12 bp, Artificial Sequence
  Oligonucleotide primer for the detection of SNP TSC0056050
ctacaattcaaa

SEQ ID NO: 366916 - DNA, 12 bp, Artificial Sequence
  Oligonucleotide primer for the detection of SNP TSC0056051
cccaatatttct

SEQ ID NO: 366917 - DNA, 12 bp, Artificial Sequence
  Oligonucleotide primer for the detection of SNP TSC0056052
tcactactatat

SEQ ID NO: 366918 - DNA, 12 bp, Artificial Sequence
  Oligonucleotide primer for the detection of SNP TSC0056052
ttattggttagt

SEQ ID NO: 366919 - DNA, 12 bp, Artificial Sequence
  Oligonucleotide primer for the detection of SNP TSC0056052
tcattaattaac

SEQ ID NO: 366920 - DNA, 12 bp, Artificial Sequence
  Oligonucleotide primer for the detection of SNP TSC0056054
cgattctcctac

SEQ ID NO: 366921 - DNA, 12 bp, Artificial Sequence
  Oligonucleotide primer for the detection of SNP TSC0056055
tagttttggtta

SEQ ID NO: 366922 - DNA, 12 bp, Artificial Sequence
  Oligonucleotide primer for the detection of SNP TSC0056055
tagtttcggtta

SEQ ID NO: 366923 - DNA, 12 bp, Artificial Sequence
  Oligonucleotide primer for the detection of SNP TSC0056055
caatcccgacta

SEQ ID NO: 366924 - DNA, 12 bp, Artificial Sequence
  Oligonucleotide primer for the detection of SNP TSC0056057
atatattcaatc

SEQ ID NO: 366925 - DNA, 12 bp, Artificial Sequence
  Oligonucleotide primer for the detection of SNP TSC0056057
ttatttaatata

SEQ ID NO: 366926 - DNA, 12 bp, Artificial Sequence
  Oligonucleotide primer for the detection of SNP TSC0056057
atatatttagtt

SEQ ID NO: 366927 - DNA, 12 bp, Artificial Sequence
  Oligonucleotide primer for the detection of SNP TSC0056058
ataaactaactc

SEQ ID NO: 366928 - DNA, 12 bp, Artificial Sequence
  Oligonucleotide primer for the detection of SNP TSC0056058
gaggatatttta

SEQ ID NO: 366929 - DNA, 12 bp, Artificial Sequence
  Oligonucleotide primer for the detection of SNP TSC0056059
atttatctaatt

SEQ ID NO: 366930 - DNA, 12 bp, Artificial Sequence
  Oligonucleotide primer for the detection of SNP TSC0056059
tattagaaaatg

SEQ ID NO: 366931 - DNA, 12 bp, Artificial Sequence
  Oligonucleotide primer for the detection of SNP TSC0056060
atgtatatgtgt

SEQ ID NO: 366932 - DNA, 12 bp, Artificial Sequence
  Oligonucleotide primer for the detection of SNP TSC0056062
agatatttgttt

SEQ ID NO: 366933 - DNA, 12 bp, Artificial Sequence
  Oligonucleotide primer for the detection of SNP TSC0056062
aatatctactta

SEQ ID NO: 366934 - DNA, 12 bp, Artificial Sequence
  Oligonucleotide primer for the detection of SNP TSC0056062
tttatgtatagt

SEQ ID NO: 366935 - DNA, 12 bp, Artificial Sequence
  Oligonucleotide primer for the detection of SNP TSC0056063
ctcactataaat

SEQ ID NO: 366936 - DNA, 12 bp, Artificial Sequence
  Oligonucleotide primer for the detection of SNP TSC0056063
gaatgttttgag

SEQ ID NO: 366937 - DNA, 12 bp, Artificial Sequence
  Oligonucleotide primer for the detection of SNP TSC0056064
tcttactaacct

SEQ ID NO: 366938 - DNA, 12 bp, Artificial Sequence
  Oligonucleotide primer for the detection of SNP TSC0056064
aatgatgtttta

SEQ ID NO: 366939 - DNA, 12 bp, Artificial Sequence
  Oligonucleotide primer for the detection of SNP TSC0056064
aataatacttca

SEQ ID NO: 366940 - DNA, 12 bp, Artificial Sequence
  Oligonucleotide primer for the detection of SNP TSC0056065
gattaaaaaaaa

SEQ ID NO: 366941 - DNA, 12 bp, Artificial Sequence
  Oligonucleotide primer for the detection of SNP TSC0056066
tataacataaac

SEQ ID NO: 366942 - DNA, 12 bp, Artificial Sequence
  Oligonucleotide primer for the detection of SNP TSC0056066
agaaggatgttg

SEQ ID NO: 366943 - DNA, 12 bp, Artificial Sequence
  Oligonucleotide primer for the detection of SNP TSC0056069
aaatacaaccct

SEQ ID NO: 366944 - DNA, 12 bp, Artificial Sequence
  Oligonucleotide primer for the detection of SNP TSC0056069
agtaaggggtta

SEQ ID NO: 366945 - DNA, 12 bp, Artificial Sequence
  Oligonucleotide primer for the detection of SNP TSC0056070
aaaactatattt

SEQ ID NO: 366946 - DNA, 12 bp, Artificial Sequence
  Oligonucleotide primer for the detection of SNP TSC0056070
agtatttagaag

SEQ ID NO: 366947 - DNA, 12 bp, Artificial Sequence
  Oligonucleotide primer for the detection of SNP TSC0056071
tttaggggtaga

SEQ ID NO: 366948 - DNA, 12 bp, Artificial Sequence
  Oligonucleotide primer for the detection of SNP TSC0056072
aaccctaaacac

SEQ ID NO: 366949 - DNA, 12 bp, Artificial Sequence
  Oligonucleotide primer for the detection of SNP TSC0056072
gttttttggtag

SEQ ID NO: 366950 - DNA, 12 bp, Artificial Sequence
  Oligonucleotide primer for the detection of SNP TSC0006800
gtatttgttttc

SEQ ID NO: 366951 - DNA, 12 bp, Artificial Sequence
  Oligonucleotide primer for the detection of SNP TSC0006800
acacctactccc

SEQ ID NO: 366952 - DNA, 12 bp, Artificial Sequence
  Oligonucleotide primer for the detection of SNP TSC0006800
atgttttttggt

SEQ ID NO: 366953 - DNA, 12 bp, Artificial Sequence
  Oligonucleotide primer for the detection of SNP TSC0010737
taaaacttcact

SEQ ID NO: 366954 - DNA, 12 bp, Artificial Sequence
  Oligonucleotide primer for the detection of SNP TSC0010737
gttgtgtttgaa

SEQ ID NO: 366955 - DNA, 12 bp, Artificial Sequence
  Oligonucleotide primer for the detection of SNP TSC0010737
gtcgtgtttgaa

SEQ ID NO: 366956 - DNA, 12 bp, Artificial Sequence
  Oligonucleotide primer for the detection of SNP TSC0005304
ggtattgtttat

SEQ ID NO: 366957 - DNA, 12 bp, Artificial Sequence
  Oligonucleotide primer for the detection of SNP TSC0005304
attgtaaatatt

SEQ ID NO: 366958 - DNA, 12 bp, Artificial Sequence
  Oligonucleotide primer for the detection of SNP TSC0005305
tttactaatacc

SEQ ID NO: 366959 - DNA, 12 bp, Artificial Sequence
  Oligonucleotide primer for the detection of SNP TSC0005305
tttggtatttta

SEQ ID NO: 366960 - DNA, 12 bp, Artificial Sequence
  Oligonucleotide primer for the detection of SNP TSC0005305
tctaatatctca

SEQ ID NO: 366961 - DNA, 12 bp, Artificial Sequence
  Oligonucleotide primer for the detection of SNP TSC0005305
tttgttagtatt

SEQ ID NO: 366962 - DNA, 12 bp, Artificial Sequence
  Oligonucleotide primer for the detection of SNP TSC0005306
aacacaacatca

SEQ ID NO: 366963 - DNA, 12 bp, Artificial Sequence
  Oligonucleotide primer for the detection of SNP TSC0005306
aacacaacatcg

SEQ ID NO: 366964 - DNA, 12 bp, Artificial Sequence
  Oligonucleotide primer for the detection of SNP TSC0005306
aaagtagttttt

SEQ ID NO: 366965 - DNA, 12 bp, Artificial Sequence
  Oligonucleotide primer for the detection of SNP TSC0005306
aaaacaaccctt

SEQ ID NO: 366966 - DNA, 12 bp, Artificial Sequence
  Oligonucleotide primer for the detection of SNP TSC0005306
taatataatatt

SEQ ID NO: 366967 - DNA, 12 bp, Artificial Sequence
  Oligonucleotide primer for the detection of SNP TSC0005306
taatataatatc

SEQ ID NO: 366968 - DNA, 12 bp, Artificial Sequence
  Oligonucleotide primer for the detection of SNP TSC0056073
ttaactaaacct

SEQ ID NO: 366969 - DNA, 12 bp, Artificial Sequence
  Oligonucleotide primer for the detection of SNP TSC0056074
gtaattttaagt

SEQ ID NO: 366970 - DNA, 12 bp, Artificial Sequence
  Oligonucleotide primer for the detection of SNP TSC0056074
tagtgatttgtt

SEQ ID NO: 366971 - DNA, 12 bp, Artificial Sequence
  Oligonucleotide primer for the detection of SNP TSC0056075
cactaataaaca

SEQ ID NO: 366972 - DNA, 12 bp, Artificial Sequence
  Oligonucleotide primer for the detection of SNP TSC0056075
atatgtttttgt

SEQ ID NO: 366973 - DNA, 12 bp, Artificial Sequence
  Oligonucleotide primer for the detection of SNP TSC0056075
acatacttttat

SEQ ID NO: 366974 - DNA, 12 bp, Artificial Sequence
  Oligonucleotide primer for the detection of SNP TSC0056075
tattggtaagta

SEQ ID NO: 366975 - DNA, 12 bp, Artificial Sequence
  Oligonucleotide primer for the detection of SNP TSC0056076
gtttttagttag

SEQ ID NO: 366976 - DNA, 12 bp, Artificial Sequence
  Oligonucleotide primer for the detection of SNP TSC0056076
acttttaattaa

SEQ ID NO: 366977 - DNA, 12 bp, Artificial Sequence
  Oligonucleotide primer for the detection of SNP TSC0056076
gtagttagaggg

SEQ ID NO: 366978 - DNA, 12 bp, Artificial Sequence
  Oligonucleotide primer for the detection of SNP TSC0056077
aacaacttaaac

SEQ ID NO: 366979 - DNA, 12 bp, Artificial Sequence
  Oligonukleotid-Primer
tagataggtgag

SEQ ID NO: 366980 - DNA, 12 bp, Artificial Sequence
  Oligonucleotide primer for the detection of SNP TSC0056077
aataatttagat

SEQ ID NO: 366981 - DNA, 12 bp, Artificial Sequence
  Oligonucleotide primer for the detection of SNP TSC0056080
ttataaacatcg

SEQ ID NO: 366982 - DNA, 12 bp, Artificial Sequence
  Oligonucleotide primer for the detection of SNP TSC0056080
ttataaacgtca

SEQ ID NO: 366983 - DNA, 12 bp, Artificial Sequence
  Oligonucleotide primer for the detection of SNP TSC0056080
ttataaacgtcg

SEQ ID NO: 366984 - DNA, 12 bp, Artificial Sequence
  Oligonucleotide primer for the detection of SNP TSC0056080
gatgtatattta

SEQ ID NO: 366985 - DNA, 12 bp, Artificial Sequence
  Oligonucleotide primer for the detection of SNP TSC0056080
aatacatattca

SEQ ID NO: 366986 - DNA, 12 bp, Artificial Sequence
  Oligonucleotide primer for the detection of SNP TSC0056080
tttgtaggtgtt

SEQ ID NO: 366987 - DNA, 12 bp, Artificial Sequence
  Oligonucleotide primer for the detection of SNP TSC0056080
tttgtaggcgtt

SEQ ID NO: 366988 - DNA, 12 bp, Artificial Sequence
  Oligonucleotide primer for the detection of SNP TSC0056080
tttgtaggtgtc

SEQ ID NO: 366989 - DNA, 12 bp, Artificial Sequence
  Oligonucleotide primer for the detection of SNP TSC0056080
tttgtaggcgtc

SEQ ID NO: 366990 - DNA, 12 bp, Artificial Sequence
  Oligonucleotide primer for the detection of SNP TSC0005579
atgagtagatgt

SEQ ID NO: 366991 - DNA, 12 bp, Artificial Sequence
  Oligonucleotide primer for the detection of SNP TSC0005579
ataaacaaatat

SEQ ID NO: 366992 - DNA, 12 bp, Artificial Sequence
  Oligonucleotide primer for the detection of SNP TSC0005579
gttaaagaataa

SEQ ID NO: 366993 - DNA, 12 bp, Artificial Sequence
  Oligonucleotide primer for the detection of SNP TSC0056081
acttatcacatc

SEQ ID NO: 366994 - DNA, 12 bp, Artificial Sequence
  Oligonucleotide primer for the detection of SNP TSC0056081
taatataaagta

SEQ ID NO: 366995 - DNA, 12 bp, Artificial Sequence
  Oligonucleotide primer for the detection of SNP TSC0006330
tatcctactaaa

SEQ ID NO: 366996 - DNA, 12 bp, Artificial Sequence
  Oligonucleotide primer for the detection of SNP TSC0006330
ttaaagttaatg

SEQ ID NO: 366997 - DNA, 12 bp, Artificial Sequence
  Oligonucleotide primer for the detection of SNP TSC0006330
tgttttgttgag

SEQ ID NO: 366998 - DNA, 12 bp, Artificial Sequence
  Oligonucleotide primer for the detection of SNP TSC0056086
attactacttta

SEQ ID NO: 366999 - DNA, 12 bp, Artificial Sequence
  Oligonucleotide primer for the detection of SNP TSC0056086
tggtaataagtt

SEQ ID NO: 367000 - DNA, 12 bp, Artificial Sequence
  Oligonucleotide primer for the detection of SNP TSC0005227
tattttggttag

SEQ ID NO: 367001 - DNA, 12 bp, Artificial Sequence
  Oligonucleotide primer for the detection of SNP TSC0005228
tgtagtgtagtg

SEQ ID NO: 367002 - DNA, 12 bp, Artificial Sequence
  Oligonucleotide primer for the detection of SNP TSC0056089
atattaatccaa

SEQ ID NO: 367003 - DNA, 12 bp, Artificial Sequence
  Oligonucleotide primer for the detection of SNP TSC0056089
gtgttaatttag

SEQ ID NO: 367004 - DNA, 12 bp, Artificial Sequence
  Oligonucleotide primer for the detection of SNP TSC0004569
cctttccaaata

SEQ ID NO: 367005 - DNA, 12 bp, Artificial Sequence
  Oligonucleotide primer for the detection of SNP TSC0004569
tttttaggagga

SEQ ID NO: 367006 - DNA, 12 bp, Artificial Sequence
  Oligonucleotide primer for the detection of SNP TSC0005143
acaacaaataat

SEQ ID NO: 367007 - DNA, 12 bp, Artificial Sequence
  Oligonucleotide primer for the detection of SNP TSC0005143
ttgttaataata

SEQ ID NO: 367008 - DNA, 12 bp, Artificial Sequence
  Oligonucleotide primer for the detection of SNP TSC0005145
tacctaaacctt

SEQ ID NO: 367009 - DNA, 12 bp, Artificial Sequence
  Oligonucleotide primer for the detection of SNP TSC0005145
tgataagtttta

SEQ ID NO: 367010 - DNA, 12 bp, Artificial Sequence
  Oligonucleotide primer for the detection of SNP TSC0056097
aatcataactaa

SEQ ID NO: 367011 - DNA, 12 bp, Artificial Sequence
  Oligonucleotide primer for the detection of SNP TSC0056097
aaagggaaatgt

SEQ ID NO: 367012 - DNA, 12 bp, Artificial Sequence
  Oligonucleotide primer for the detection of SNP TSC0056097
agttatggttag

SEQ ID NO: 367013 - DNA, 12 bp, Artificial Sequence
  Oligonucleotide primer for the detection of SNP TSC0056098
agtgtttttatg

SEQ ID NO: 367014 - DNA, 12 bp, Artificial Sequence
  Oligonucleotide primer for the detection of SNP TSC0056099
ttcttatttttt

SEQ ID NO: 367015 - DNA, 12 bp, Artificial Sequence
  Oligonucleotide primer for the detection of SNP TSC0056099
ggaagatagtta

SEQ ID NO: 367016 - DNA, 12 bp, Artificial Sequence
  Oligonucleotide primer for the detection of SNP TSC0056100
tcttacaataac

SEQ ID NO: 367017 - DNA, 12 bp, Artificial Sequence
  Oligonucleotide primer for the detection of SNP TSC0056100
tctttccatcaa

SEQ ID NO: 367018 - DNA, 12 bp, Artificial Sequence
  Oligonucleotide primer for the detection of SNP TSC0056100
tttgtaataatt

SEQ ID NO: 367019 - DNA, 12 bp, Artificial Sequence
  Oligonucleotide primer for the detection of SNP TSC0056102
ccattttactct

SEQ ID NO: 367020 - DNA, 12 bp, Artificial Sequence
  Oligonucleotide primer for the detection of SNP TSC0056102
tttattaaatta

SEQ ID NO: 367021 - DNA, 12 bp, Artificial Sequence
  Oligonucleotide primer for the detection of SNP TSC0056102
tttactaaatca

SEQ ID NO: 367022 - DNA, 12 bp, Artificial Sequence
  Oligonucleotide primer for the detection of SNP TSC0056104
cccaaactaact

SEQ ID NO: 367023 - DNA, 12 bp, Artificial Sequence
  Oligonucleotide primer for the detection of SNP TSC0056104
attgtagataga

SEQ ID NO: 367024 - DNA, 12 bp, Artificial Sequence
  Oligonucleotide primer for the detection of SNP TSC0056104
atcgtagataga

SEQ ID NO: 367025 - DNA, 12 bp, Artificial Sequence
  Oligonucleotide primer for the detection of SNP TSC0056106
atatacaatcta

SEQ ID NO: 367026 - DNA, 12 bp, Artificial Sequence
  Oligonucleotide primer for the detection of SNP TSC0056106
atatacgatcta

SEQ ID NO: 367027 - DNA, 12 bp, Artificial Sequence
  Oligonucleotide primer for the detection of SNP TSC0056107
aacaacaatctc

SEQ ID NO: 367028 - DNA, 12 bp, Artificial Sequence
  Oligonucleotide primer for the detection of SNP TSC0056107
tcgtatattttt

SEQ ID NO: 367029 - DNA, 12 bp, Artificial Sequence
  Oligonucleotide primer for the detection of SNP TSC0056108
ttttatgaggaa

SEQ ID NO: 367030 - DNA, 12 bp, Artificial Sequence
  Oligonucleotide primer for the detection of SNP TSC0056109
atactatataat

SEQ ID NO: 367031 - DNA, 12 bp, Artificial Sequence
  Oligonucleotide primer for the detection of SNP TSC0056109
agatttggttga

SEQ ID NO: 367032 - DNA, 12 bp, Artificial Sequence
  Oligonucleotide primer for the detection of SNP TSC0056110
attctcattatc

SEQ ID NO: 367033 - DNA, 12 bp, Artificial Sequence
  Oligonucleotide primer for the detection of SNP TSC0056110
agagaaataaag

SEQ ID NO: 367034 - DNA, 12 bp, Artificial Sequence
  Oligonucleotide primer for the detection of SNP TSC0056114
attaattcaaaa

SEQ ID NO: 367035 - DNA, 12 bp, Artificial Sequence
  Oligonucleotide primer for the detection of SNP TSC0056114
tgtaaagtaagt

SEQ ID NO: 367036 - DNA, 12 bp, Artificial Sequence
  Oligonucleotide primer for the detection of SNP TSC0056114
tgtaaagtaagc

SEQ ID NO: 367037 - DNA, 12 bp, Artificial Sequence
  Oligonucleotide primer for the detection of SNP TSC0056114
attagtttaaga

SEQ ID NO: 367038 - DNA, 12 bp, Artificial Sequence
  Oligonucleotide primer for the detection of SNP TSC0056115
acactaatataa

SEQ ID NO: 367039 - DNA, 12 bp, Artificial Sequence
  Oligonucleotide primer for the detection of SNP TSC0056115
ggtttgtataat

SEQ ID NO: 367040 - DNA, 12 bp, Artificial Sequence
  Oligonucleotide primer for the detection of SNP TSC0056115
ggtttgtataac

SEQ ID NO: 367041 - DNA, 12 bp, Artificial Sequence
  Oligonucleotide primer for the detection of SNP TSC0056115
atattagtataa

SEQ ID NO: 367042 - DNA, 12 bp, Artificial Sequence
  Oligonucleotide primer for the detection of SNP TSC0056116
ataagatataaa

SEQ ID NO: 367043 - DNA, 12 bp, Artificial Sequence
  Oligonucleotide primer for the detection of SNP TSC0056117
catcattacttt

SEQ ID NO: 367044 - DNA, 12 bp, Artificial Sequence
  Oligonucleotide primer for the detection of SNP TSC0056118
atataatttctc

SEQ ID NO: 367045 - DNA, 12 bp, Artificial Sequence
  Oligonucleotide primer for the detection of SNP TSC0056118
aagaataaaatt

SEQ ID NO: 367046 - DNA, 12 bp, Artificial Sequence
  Oligonucleotide primer for the detection of SNP TSC0056119
ttttcctaaccc

SEQ ID NO: 367047 - DNA, 12 bp, Artificial Sequence
  Oligonucleotide primer for the detection of SNP TSC0056119
aaatatgtttga

SEQ ID NO: 367048 - DNA, 12 bp, Artificial Sequence
  Oligonucleotide primer for the detection of SNP TSC0056121
ttttttatgggt

SEQ ID NO: 367049 - DNA, 12 bp, Artificial Sequence
  Oligonucleotide primer for the detection of SNP TSC0056121
cctcataaataa

SEQ ID NO: 367050 - DNA, 12 bp, Artificial Sequence
  Oligonucleotide primer for the detection of SNP TSC0056121
tgatgattagat

SEQ ID NO: 367051 - DNA, 12 bp, Artificial Sequence
  Oligonucleotide primer for the detection of SNP TSC0056122
atgggtaaggtt

SEQ ID NO: 367052 - DNA, 12 bp, Artificial Sequence
  Oligonucleotide primer for the detection of SNP TSC0056122
atgggtaaggtc

SEQ ID NO: 367053 - DNA, 12 bp, Artificial Sequence
  Oligonucleotide primer for the detection of SNP TSC0056122
tttatgatgatt

SEQ ID NO: 367054 - DNA, 12 bp, Artificial Sequence
  Oligonucleotide primer for the detection of SNP TSC0056123
gatgtggtggtg

SEQ ID NO: 367055 - DNA, 12 bp, Artificial Sequence
  Oligonucleotide primer for the detection of SNP TSC0056123
gacgtggtggtg

SEQ ID NO: 367056 - DNA, 12 bp, Artificial Sequence
  Oligonucleotide primer for the detection of SNP TSC0056123
aattgggattat

SEQ ID NO: 367057 - DNA, 12 bp, Artificial Sequence
  Oligonucleotide primer for the detection of SNP TSC0008992
ctataattattt

SEQ ID NO: 367058 - DNA, 12 bp, Artificial Sequence
  Oligonucleotide primer for the detection of SNP TSC0008992
ggtaaaagagaa

SEQ ID NO: 367059 - DNA, 12 bp, Artificial Sequence
  Oligonucleotide primer for the detection of SNP TSC0008215
tacccatctcct

SEQ ID NO: 367060 - DNA, 12 bp, Artificial Sequence
  Oligonucleotide primer for the detection of SNP TSC0008215
ggtgatatttaa

SEQ ID NO: 367061 - DNA, 12 bp, Artificial Sequence
  Oligonucleotide primer for the detection of SNP TSC0005125
acattacaaacc

SEQ ID NO: 367062 - DNA, 12 bp, Artificial Sequence
  Oligonucleotide primer for the detection of SNP TSC0005125
ttgttatatttg

SEQ ID NO: 367063 - DNA, 12 bp, Artificial Sequence
  Oligonucleotide primer for the detection of SNP TSC0005126
actctaaatctt

SEQ ID NO: 367064 - DNA, 12 bp, Artificial Sequence
  Oligonucleotide primer for the detection of SNP TSC0056130
ttgtatttatta

SEQ ID NO: 367065 - DNA, 12 bp, Artificial Sequence
  Oligonucleotide primer for the detection of SNP TSC0056131
aattataaaaac

SEQ ID NO: 367066 - DNA, 12 bp, Artificial Sequence
  Oligonucleotide primer for the detection of SNP TSC0056135
ataaaatatctt

SEQ ID NO: 367067 - DNA, 12 bp, Artificial Sequence
  Oligonucleotide primer for the detection of SNP TSC0056135
ttttcgaggtgg

SEQ ID NO: 367068 - DNA, 12 bp, Artificial Sequence
  Oligonucleotide primer for the detection of SNP TSC0056136
actcttaaaacc

SEQ ID NO: 367069 - DNA, 12 bp, Artificial Sequence
  Oligonucleotide primer for the detection of SNP TSC0056136
aaataatgttta

SEQ ID NO: 367070 - DNA, 12 bp, Artificial Sequence
  Oligonucleotide primer for the detection of SNP TSC0056136
aaataacgttta

SEQ ID NO: 367071 - DNA, 12 bp, Artificial Sequence
  Oligonucleotide primer for the detection of SNP TSC0056137
tttaattctatt

SEQ ID NO: 367072 - DNA, 12 bp, Artificial Sequence
  Oligonucleotide primer for the detection of SNP TSC0056137
atagaagattta

SEQ ID NO: 367073 - DNA, 12 bp, Artificial Sequence
  Oligonucleotide primer for the detection of SNP TSC0056139
acatttaactaa

SEQ ID NO: 367074 - DNA, 12 bp, Artificial Sequence
  Oligonucleotide primer for the detection of SNP TSC0056139
tggtgagttaag

SEQ ID NO: 367075 - DNA, 12 bp, Artificial Sequence
  Oligonucleotide primer for the detection of SNP TSC0056139
taataaaccaaa

SEQ ID NO: 367076 - DNA, 12 bp, Artificial Sequence
  Oligonucleotide primer for the detection of SNP TSC0056139
atttaattgatt

SEQ ID NO: 367077 - DNA, 12 bp, Artificial Sequence
  Oligonucleotide primer for the detection of SNP TSC0056140
tacaaaaatcca

SEQ ID NO: 367078 - DNA, 12 bp, Artificial Sequence
  Oligonucleotide primer for the detection of SNP TSC0056140
ttgtggataaat

SEQ ID NO: 367079 - DNA, 12 bp, Artificial Sequence
  Oligonucleotide primer for the detection of SNP TSC0056141
aactcacttcct

SEQ ID NO: 367080 - DNA, 12 bp, Artificial Sequence
  Oligonucleotide primer for the detection of SNP TSC0006184
atcattttaact

SEQ ID NO: 367081 - DNA, 12 bp, Artificial Sequence
  Oligonucleotide primer for the detection of SNP TSC0006184
ttgatagtagaa

SEQ ID NO: 367082 - DNA, 12 bp, Artificial Sequence
  Oligonucleotide primer for the detection of SNP TSC0006353
tacctttatttt

SEQ ID NO: 367083 - DNA, 12 bp, Artificial Sequence
  Oligonucleotide primer for the detection of SNP TSC0006353
ttttgaaagaaa

SEQ ID NO: 367084 - DNA, 12 bp, Artificial Sequence
  Oligonucleotide primer for the detection of SNP TSC0056143
taacccccaaac

SEQ ID NO: 367085 - DNA, 12 bp, Artificial Sequence
  Oligonucleotide primer for the detection of SNP TSC0056143
gtattttagagg

SEQ ID NO: 367086 - DNA, 12 bp, Artificial Sequence
  Oligonucleotide primer for the detection of SNP TSC0056143
tggtttttaaat

SEQ ID NO: 367087 - DNA, 12 bp, Artificial Sequence
  Oligonucleotide primer for the detection of SNP TSC0056143
tggtttttaaac

SEQ ID NO: 367088 - DNA, 12 bp, Artificial Sequence
  Oligonucleotide primer for the detection of SNP TSC0008467
atactaatataa

SEQ ID NO: 367089 - DNA, 12 bp, Artificial Sequence
  Oligonucleotide primer for the detection of SNP TSC0008467
ggatatagttaa

SEQ ID NO: 367090 - DNA, 12 bp, Artificial Sequence
  Oligonucleotide primer for the detection of SNP TSC0008467
aaacacaaccaa

SEQ ID NO: 367091 - DNA, 12 bp, Artificial Sequence
  Oligonucleotide primer for the detection of SNP TSC0008467
atgttgatatgg

SEQ ID NO: 367092 - DNA, 12 bp, Artificial Sequence
  Oligonucleotide primer for the detection of SNP TSC0056150
ttaaaaccctca

SEQ ID NO: 367093 - DNA, 12 bp, Artificial Sequence
  Oligonucleotide primer for the detection of SNP TSC0056150
tgagaattttat

SEQ ID NO: 367094 - DNA, 12 bp, Artificial Sequence
  Oligonucleotide primer for the detection of SNP TSC0056151
aaattactcaca

SEQ ID NO: 367095 - DNA, 12 bp, Artificial Sequence
  Oligonucleotide primer for the detection of SNP TSC0056152
aatgagttttag

SEQ ID NO: 367096 - DNA, 12 bp, Artificial Sequence
  Oligonucleotide primer for the detection of SNP TSC0056153
aatataacccta

SEQ ID NO: 367097 - DNA, 12 bp, Artificial Sequence
  Oligonucleotide primer for the detection of SNP TSC0056153
tttttgagatat

SEQ ID NO: 367098 - DNA, 12 bp, Artificial Sequence
  Oligonucleotide primer for the detection of SNP TSC0056153
ttttcgagatat

SEQ ID NO: 367099 - DNA, 12 bp, Artificial Sequence
  Oligonucleotide primer for the detection of SNP TSC0056153
ctcccaaaacac

SEQ ID NO: 367100 - DNA, 12 bp, Artificial Sequence
  Oligonucleotide primer for the detection of SNP TSC0056153
ctcccgaaacac

SEQ ID NO: 367101 - DNA, 12 bp, Artificial Sequence
  Oligonucleotide primer for the detection of SNP TSC0056153
gatgtggtttta

SEQ ID NO: 367102 - DNA, 12 bp, Artificial Sequence
  Oligonucleotide primer for the detection of SNP TSC0056156
ttcttccaatat

SEQ ID NO: 367103 - DNA, 12 bp, Artificial Sequence
  Oligonucleotide primer for the detection of SNP TSC0056163
taaaacaacata

SEQ ID NO: 367104 - DNA, 12 bp, Artificial Sequence
  Oligonucleotide primer for the detection of SNP TSC0056163
agattgagggtt

SEQ ID NO: 367105 - DNA, 12 bp, Artificial Sequence
  Oligonucleotide primer for the detection of SNP TSC0056163
taaggtaatatg

SEQ ID NO: 367106 - DNA, 12 bp, Artificial Sequence
  Oligonucleotide primer for the detection of SNP TSC0056164
tttcacaaactt

SEQ ID NO: 367107 - DNA, 12 bp, Artificial Sequence
  Oligonucleotide primer for the detection of SNP TSC0056164
tggtgggatgaa

SEQ ID NO: 367108 - DNA, 12 bp, Artificial Sequence
  Oligonucleotide primer for the detection of SNP TSC0056164
tggtgggacgaa

SEQ ID NO: 367109 - DNA, 12 bp, Artificial Sequence
  Oligonucleotide primer for the detection of SNP TSC0056164
taataaaacgaa

SEQ ID NO: 367110 - DNA, 12 bp, Artificial Sequence
  Oligonucleotide primer for the detection of SNP TSC0056165
tacaaaaactct

SEQ ID NO: 367111 - DNA, 12 bp, Artificial Sequence
  Oligonucleotide primer for the detection of SNP TSC0056167
ttacatatatta

SEQ ID NO: 367112 - DNA, 12 bp, Artificial Sequence
  Oligonucleotide primer for the detection of SNP TSC0056167
agtgagttatgt

SEQ ID NO: 367113 - DNA, 12 bp, Artificial Sequence
  Oligonucleotide primer for the detection of SNP TSC0056167
ttgtatgtatta

SEQ ID NO: 367114 - DNA, 12 bp, Artificial Sequence
  Oligonucleotide primer for the detection of SNP TSC0056170
ataaaacctccc

SEQ ID NO: 367115 - DNA, 12 bp, Artificial Sequence
  Oligonucleotide primer for the detection of SNP TSC0056171
tgagaatagatt

SEQ ID NO: 367116 - DNA, 12 bp, Artificial Sequence
  Oligonucleotide primer for the detection of SNP TSC0056171
aagaaggtgtat

SEQ ID NO: 367117 - DNA, 12 bp, Artificial Sequence
  Oligonucleotide primer for the detection of SNP TSC0056172
gatattttagtt

SEQ ID NO: 367118 - DNA, 12 bp, Artificial Sequence
  Oligonucleotide primer for the detection of SNP TSC0056172
aaaatatttcaa

SEQ ID NO: 367119 - DNA, 12 bp, Artificial Sequence
  Oligonucleotide primer for the detection of SNP TSC0056172
ttgattgaaagt

SEQ ID NO: 367120 - DNA, 12 bp, Artificial Sequence
  Oligonucleotide primer for the detection of SNP TSC0056173
tgttttatgtat

SEQ ID NO: 367121 - DNA, 12 bp, Artificial Sequence
  Oligonucleotide primer for the detection of SNP TSC0056173
tacctcatatat

SEQ ID NO: 367122 - DNA, 12 bp, Artificial Sequence
  Oligonucleotide primer for the detection of SNP TSC0056173
atgttaaaagtg

SEQ ID NO: 367123 - DNA, 12 bp, Artificial Sequence
  Oligonucleotide primer for the detection of SNP TSC0056174
ctcttaaatcat

SEQ ID NO: 367124 - DNA, 12 bp, Artificial Sequence
  Oligonucleotide primer for the detection of SNP TSC0056174
tatttaaaaaag

SEQ ID NO: 367125 - DNA, 12 bp, Artificial Sequence
  Oligonucleotide primer for the detection of SNP TSC0056179
ctcactctaaca

SEQ ID NO: 367126 - DNA, 12 bp, Artificial Sequence
  Oligonucleotide primer for the detection of SNP TSC0056179
ataacctctaac

SEQ ID NO: 367127 - DNA, 12 bp, Artificial Sequence
  Oligonucleotide primer for the detection of SNP TSC0056179
gtaacctctaac

SEQ ID NO: 367128 - DNA, 12 bp, Artificial Sequence
  Oligonucleotide primer for the detection of SNP TSC0008627
gattgtgaaagt

SEQ ID NO: 367129 - DNA, 12 bp, Artificial Sequence
  Oligonucleotide primer for the detection of SNP TSC0008627
gataataaggag

SEQ ID NO: 367130 - DNA, 12 bp, Artificial Sequence
  Oligonucleotide primer for the detection of SNP TSC0009298
aaaattaacctc

SEQ ID NO: 367131 - DNA, 12 bp, Artificial Sequence
  Oligonucleotide primer for the detection of SNP TSC0009298
ttgggtgattag

SEQ ID NO: 367132 - DNA, 12 bp, Artificial Sequence
  Oligonucleotide primer for the detection of SNP TSC0009298
ttaaataatcaa

SEQ ID NO: 367133 - DNA, 12 bp, Artificial Sequence
  Oligonucleotide primer for the detection of SNP TSC0009298
gaagttgatttt

SEQ ID NO: 367134 - DNA, 12 bp, Artificial Sequence
  Oligonucleotide primer for the detection of SNP TSC0056184
aaatttcctcac

SEQ ID NO: 367135 - DNA, 12 bp, Artificial Sequence
  Oligonucleotide primer for the detection of SNP TSC0056184
aggattattaga

SEQ ID NO: 367136 - DNA, 12 bp, Artificial Sequence
  Oligonucleotide primer for the detection of SNP TSC0056184
aaaaccaccaaa

SEQ ID NO: 367137 - DNA, 12 bp, Artificial Sequence
  Oligonucleotide primer for the detection of SNP TSC0056186
tttttaaatttc

SEQ ID NO: 367138 - DNA, 12 bp, Artificial Sequence
  Oligonucleotide primer for the detection of SNP TSC0056186
tttttcaaactt

SEQ ID NO: 367139 - DNA, 12 bp, Artificial Sequence
  Oligonucleotide primer for the detection of SNP TSC0056186
gtaggattgaaa

SEQ ID NO: 367140 - DNA, 12 bp, Artificial Sequence
  Oligonucleotide primer for the detection of SNP TSC0056190
tggttatagcgg

SEQ ID NO: 367141 - DNA, 12 bp, Artificial Sequence
  Oligonucleotide primer for the detection of SNP TSC0056191
tataactataat

SEQ ID NO: 367142 - DNA, 12 bp, Artificial Sequence
  Oligonucleotide primer for the detection of SNP TSC0056191
ttatagtcgtta

SEQ ID NO: 367143 - DNA, 12 bp, Artificial Sequence
  Oligonucleotide primer for the detection of SNP TSC0056191
ccataaccacta

SEQ ID NO: 367144 - DNA, 12 bp, Artificial Sequence
  Oligonucleotide primer for the detection of SNP TSC0056191
ccataaccgcta

SEQ ID NO: 367145 - DNA, 12 bp, Artificial Sequence
  Oligonucleotide primer for the detection of SNP TSC0056191
atggttgtggtt

SEQ ID NO: 367146 - DNA, 12 bp, Artificial Sequence
  Oligonucleotide primer for the detection of SNP TSC0056192
ctaaaatttaac

SEQ ID NO: 367147 - DNA, 12 bp, Artificial Sequence
  Oligonucleotide primer for the detection of SNP TSC0056192
tttggtaatgtg

SEQ ID NO: 367148 - DNA, 12 bp, Artificial Sequence
  Oligonucleotide primer for the detection of SNP TSC0056193
ttttgtggaaaa

SEQ ID NO: 367149 - DNA, 12 bp, Artificial Sequence
  Oligonucleotide primer for the detection of SNP TSC0056193
tttcgtggaaaa

SEQ ID NO: 367150 - DNA, 12 bp, Artificial Sequence
  Oligonucleotide primer for the detection of SNP TSC0056193
tttcataaaaaa

SEQ ID NO: 367151 - DNA, 12 bp, Artificial Sequence
  Oligonucleotide primer for the detection of SNP TSC0056193
tttcgtaaaaaa

SEQ ID NO: 367152 - DNA, 12 bp, Artificial Sequence
  Oligonucleotide primer for the detection of SNP TSC0056193
agaatgattggg

SEQ ID NO: 367153 - DNA, 12 bp, Artificial Sequence
  Oligonucleotide primer for the detection of SNP TSC0056196
tcctaatcatac

SEQ ID NO: 367154 - DNA, 12 bp, Artificial Sequence
  Oligonucleotide primer for the detection of SNP TSC0056196
tttgttgggatg

SEQ ID NO: 367155 - DNA, 12 bp, Artificial Sequence
  Oligonucleotide primer for the detection of SNP TSC0056196
tttgttgggacg

SEQ ID NO: 367156 - DNA, 12 bp, Artificial Sequence
  Oligonucleotide primer for the detection of SNP TSC0056196
tttactaaaacg

SEQ ID NO: 367157 - DNA, 12 bp, Artificial Sequence
  Oligonucleotide primer for the detection of SNP TSC0056197
aaaatttaatta

SEQ ID NO: 367158 - DNA, 12 bp, Artificial Sequence
  Oligonucleotide primer for the detection of SNP TSC0056203
ttgtttagaatg

SEQ ID NO: 367159 - DNA, 12 bp, Artificial Sequence
  Oligonucleotide primer for the detection of SNP TSC0056204
aatcttatacca

SEQ ID NO: 367160 - DNA, 12 bp, Artificial Sequence
  Oligonucleotide primer for the detection of SNP TSC0056204
taaatagaaatt

SEQ ID NO: 367161 - DNA, 12 bp, Artificial Sequence
  Oligonucleotide primer for the detection of SNP TSC0056205
ctttactaaaca

SEQ ID NO: 367162 - DNA, 12 bp, Artificial Sequence
  Oligonucleotide primer for the detection of SNP TSC0056205
tggtataagatt

SEQ ID NO: 367163 - DNA, 12 bp, Artificial Sequence
  Oligonucleotide primer for the detection of SNP TSC0056205
gttttattaaat

SEQ ID NO: 367164 - DNA, 12 bp, Artificial Sequence
  Oligonucleotide primer for the detection of SNP TSC0056206
caaaaataactc

SEQ ID NO: 367165 - DNA, 12 bp, Artificial Sequence
  Oligonucleotide primer for the detection of SNP TSC0056206
attaaattttgg

SEQ ID NO: 367166 - DNA, 12 bp, Artificial Sequence
  Oligonucleotide primer for the detection of SNP TSC0056207
tgagattataat

SEQ ID NO: 367167 - DNA, 12 bp, Artificial Sequence
  Oligonucleotide primer for the detection of SNP TSC0056207
ttaaaaccacaa

SEQ ID NO: 367168 - DNA, 12 bp, Artificial Sequence
  Oligonucleotide primer for the detection of SNP TSC0056207
gatggtattggt

SEQ ID NO: 367169 - DNA, 12 bp, Artificial Sequence
  Oligonucleotide primer for the detection of SNP TSC0056208
aaatagaaatta

SEQ ID NO: 367170 - DNA, 12 bp, Artificial Sequence
  Oligonucleotide primer for the detection of SNP TSC0056209
gatattgatgtg

SEQ ID NO: 367171 - DNA, 12 bp, Artificial Sequence
  Oligonucleotide primer for the detection of SNP TSC0056209
aacactaatata

SEQ ID NO: 367172 - DNA, 12 bp, Artificial Sequence
  Oligonucleotide primer for the detection of SNP TSC0056209
aatttatttggt

SEQ ID NO: 367173 - DNA, 12 bp, Artificial Sequence
  Oligonucleotide primer for the detection of SNP TSC0056210
ccattatcatta

SEQ ID NO: 367174 - DNA, 12 bp, Artificial Sequence
  Oligonucleotide primer for the detection of SNP TSC0056210
tataattaatgt

SEQ ID NO: 367175 - DNA, 12 bp, Artificial Sequence
  Oligonucleotide primer for the detection of SNP TSC0056210
acaattaataca

SEQ ID NO: 367176 - DNA, 12 bp, Artificial Sequence
  Oligonucleotide primer for the detection of SNP TSC0056211
ataaaacccatt

SEQ ID NO: 367177 - DNA, 12 bp, Artificial Sequence
  Oligonucleotide primer for the detection of SNP TSC0056213
aatgtagtttgg

SEQ ID NO: 367178 - DNA, 12 bp, Artificial Sequence
  Oligonucleotide primer for the detection of SNP TSC0056214
ttatggatttta

SEQ ID NO: 367179 - DNA, 12 bp, Artificial Sequence
  Oligonucleotide primer for the detection of SNP TSC0056215
tagataaagtag

SEQ ID NO: 367180 - DNA, 12 bp, Artificial Sequence
  Oligonucleotide primer for the detection of SNP TSC0056215
attagtagtttt

SEQ ID NO: 367181 - DNA, 12 bp, Artificial Sequence
  Oligonucleotide primer for the detection of SNP TSC0056216
atccaattactc

SEQ ID NO: 367182 - DNA, 12 bp, Artificial Sequence
  Oligonucleotide primer for the detection of SNP TSC0056216
ataaagagggag

SEQ ID NO: 367183 - DNA, 12 bp, Artificial Sequence
  Oligonucleotide primer for the detection of SNP TSC0056217
gtaatttttttc

SEQ ID NO: 367184 - DNA, 12 bp, Artificial Sequence
  Oligonucleotide primer for the detection of SNP TSC0056217
tataacctcttt

SEQ ID NO: 367185 - DNA, 12 bp, Artificial Sequence
  Oligonucleotide primer for the detection of SNP TSC0056217
gataaataaata

SEQ ID NO: 367186 - DNA, 12 bp, Artificial Sequence
  Oligonucleotide primer for the detection of SNP TSC0056218
ttttgagggttg

SEQ ID NO: 367187 - DNA, 12 bp, Artificial Sequence
  Oligonucleotide primer for the detection of SNP TSC0056219
attctacaataa

SEQ ID NO: 367188 - DNA, 12 bp, Artificial Sequence
  Oligonucleotide primer for the detection of SNP TSC0056219
ccttcataccta

SEQ ID NO: 367189 - DNA, 12 bp, Artificial Sequence
  Oligonucleotide primer for the detection of SNP TSC0056219
ggttttgtagta

SEQ ID NO: 367190 - DNA, 12 bp, Artificial Sequence
  Oligonucleotide primer for the detection of SNP TSC0056220
aactaatccaac

SEQ ID NO: 367191 - DNA, 12 bp, Artificial Sequence
  Oligonucleotide primer for the detection of SNP TSC0056221
ctacctatattc

SEQ ID NO: 367192 - DNA, 12 bp, Artificial Sequence
  Oligonucleotide primer for the detection of SNP TSC0056221
cctaaaacctta

SEQ ID NO: 367193 - DNA, 12 bp, Artificial Sequence
  Oligonucleotide primer for the detection of SNP TSC0056221
ttgtttatattt

SEQ ID NO: 367194 - DNA, 12 bp, Artificial Sequence
  Oligonucleotide primer for the detection of SNP TSC0056222
gtgatagttaga

SEQ ID NO: 367195 - DNA, 12 bp, Artificial Sequence
  Oligonucleotide primer for the detection of SNP TSC0056222
ataacaaccaaa

SEQ ID NO: 367196 - DNA, 12 bp, Artificial Sequence
  Oligonucleotide primer for the detection of SNP TSC0056224
caatatacaact

SEQ ID NO: 367197 - DNA, 12 bp, Artificial Sequence
  Oligonucleotide primer for the detection of SNP TSC0056224
ttaagaaaggaa

SEQ ID NO: 367198 - DNA, 12 bp, Artificial Sequence
  Oligonucleotide primer for the detection of SNP TSC0056224
taatgtatagtt

SEQ ID NO: 367199 - DNA, 12 bp, Artificial Sequence
  Oligonucleotide primer for the detection of SNP TSC0004767
aaataagattaa

SEQ ID NO: 367200 - DNA, 12 bp, Artificial Sequence
  Oligonucleotide primer for the detection of SNP TSC0056226
ttaatataaaag

SEQ ID NO: 367201 - DNA, 12 bp, Artificial Sequence
  Oligonucleotide primer for the detection of SNP TSC0056229
tctacaaaatat

SEQ ID NO: 367202 - DNA, 12 bp, Artificial Sequence
  Oligonucleotide primer for the detection of SNP TSC0056229
gttttttgaaag

SEQ ID NO: 367203 - DNA, 12 bp, Artificial Sequence
  Oligonucleotide primer for the detection of SNP TSC0056232
acacacacacgc

SEQ ID NO: 367204 - DNA, 12 bp, Artificial Sequence
  Oligonucleotide primer for the detection of SNP TSC0056232
acgcacacacac

SEQ ID NO: 367205 - DNA, 12 bp, Artificial Sequence
  Oligonucleotide primer for the detection of SNP TSC0056232
acgcacacacgc

SEQ ID NO: 367206 - DNA, 12 bp, Artificial Sequence
  Oligonucleotide primer for the detection of SNP TSC0056232
catacatatata

SEQ ID NO: 367207 - DNA, 12 bp, Artificial Sequence
  Oligonucleotide primer for the detection of SNP TSC0056232
catacgtatata

SEQ ID NO: 367208 - DNA, 12 bp, Artificial Sequence
  Oligonucleotide primer for the detection of SNP TSC0056232
cgtacatatata

SEQ ID NO: 367209 - DNA, 12 bp, Artificial Sequence
  Oligonucleotide primer for the detection of SNP TSC0056232
cgtacgtatata

SEQ ID NO: 367210 - DNA, 12 bp, Artificial Sequence
  Oligonucleotide primer for the detection of SNP TSC0056232
atgtatatatgt

SEQ ID NO: 367211 - DNA, 12 bp, Artificial Sequence
  Oligonucleotide primer for the detection of SNP TSC0056232
acgtatatatgt

SEQ ID NO: 367212 - DNA, 12 bp, Artificial Sequence
  Oligonukleotid-Primer
atgtatatacgt

SEQ ID NO: 367213 - DNA, 12 bp, Artificial Sequence
  Oligonucleotide primer for the detection of SNP TSC0056232
acgtatatacgt

SEQ ID NO: 367214 - DNA, 12 bp, Artificial Sequence
  Oligonucleotide primer for the detection of SNP TSC0056233
acatatatacgt

SEQ ID NO: 367215 - DNA, 12 bp, Artificial Sequence
  Oligonucleotide primer for the detection of SNP TSC0056233
acgtatatacat

SEQ ID NO: 367216 - DNA, 12 bp, Artificial Sequence
  Oligonukleotid-Primer
atacatacgtat

SEQ ID NO: 367217 - DNA, 12 bp, Artificial Sequence
  Oligonucleotide primer for the detection of SNP TSC0056234
atacgtacatat

SEQ ID NO: 367218 - DNA, 12 bp, Artificial Sequence
  Oligonucleotide primer for the detection of SNP TSC0056234
atacgtacgtat

SEQ ID NO: 367219 - DNA, 12 bp, Artificial Sequence
  Oligonucleotide primer for the detection of SNP TSC0056234
tgtatatatatg

SEQ ID NO: 367220 - DNA, 12 bp, Artificial Sequence
  Oligonucleotide primer for the detection of SNP TSC0056234
cgtatatatatg

SEQ ID NO: 367221 - DNA, 12 bp, Artificial Sequence
  Oligonucleotide primer for the detection of SNP TSC0056234
tgtatatatacg

SEQ ID NO: 367222 - DNA, 12 bp, Artificial Sequence
  Oligonucleotide primer for the detection of SNP TSC0056234
cgtatatatacg

SEQ ID NO: 367223 - DNA, 12 bp, Artificial Sequence
  Oligonucleotide primer for the detection of SNP TSC0056235
atacatatatac

SEQ ID NO: 367224 - DNA, 12 bp, Artificial Sequence
  Oligonucleotide primer for the detection of SNP TSC0056235
atacgtatatac

SEQ ID NO: 367225 - DNA, 12 bp, Artificial Sequence
  Oligonucleotide primer for the detection of SNP TSC0056235
gtacatatatac

SEQ ID NO: 367226 - DNA, 12 bp, Artificial Sequence
  Oligonucleotide primer for the detection of SNP TSC0056235
gtacgtatatac

SEQ ID NO: 367227 - DNA, 12 bp, Artificial Sequence
  Oligonucleotide primer for the detection of SNP TSC0056235
tacgtatatatg

SEQ ID NO: 367228 - DNA, 12 bp, Artificial Sequence
  Oligonucleotide primer for the detection of SNP TSC0056235
tatgtatatacg

SEQ ID NO: 367229 - DNA, 12 bp, Artificial Sequence
  Oligonucleotide primer for the detection of SNP TSC0056235
tacgtatatacg

SEQ ID NO: 367230 - DNA, 12 bp, Artificial Sequence
  Oligonucleotide primer for the detection of SNP TSC0056236
tacaatttttat

SEQ ID NO: 367231 - DNA, 12 bp, Artificial Sequence
  Oligonucleotide primer for the detection of SNP TSC0056236
aaaatccactta

SEQ ID NO: 367232 - DNA, 12 bp, Artificial Sequence
  Oligonucleotide primer for the detection of SNP TSC0056236
tatagtttttgt

SEQ ID NO: 367233 - DNA, 12 bp, Artificial Sequence
  Oligonucleotide primer for the detection of SNP TSC0056237
actttttctctt

SEQ ID NO: 367234 - DNA, 12 bp, Artificial Sequence
  Oligonucleotide primer for the detection of SNP TSC0056238
atctcttaaaac

SEQ ID NO: 367235 - DNA, 12 bp, Artificial Sequence
  Oligonucleotide primer for the detection of SNP TSC0056238
gttttgagttta

SEQ ID NO: 367236 - DNA, 12 bp, Artificial Sequence
  Oligonucleotide primer for the detection of SNP TSC0056239
aggaattaataa

SEQ ID NO: 367237 - DNA, 12 bp, Artificial Sequence
  Oligonucleotide primer for the detection of SNP TSC0056239
gaggtggatatt

SEQ ID NO: 367238 - DNA, 12 bp, Artificial Sequence
  Oligonucleotide primer for the detection of SNP TSC0056240
attaataccatt

SEQ ID NO: 367239 - DNA, 12 bp, Artificial Sequence
  Oligonucleotide primer for the detection of SNP TSC0056240
tatgttatttta

SEQ ID NO: 367240 - DNA, 12 bp, Artificial Sequence
  Oligonucleotide primer for the detection of SNP TSC0007480
acaaaaaaccta

SEQ ID NO: 367241 - DNA, 12 bp, Artificial Sequence
  Oligonucleotide primer for the detection of SNP TSC0007480
gtagagaattta

SEQ ID NO: 367242 - DNA, 12 bp, Artificial Sequence
  Oligonucleotide primer for the detection of SNP TSC0056241
acaaaaaaatac

SEQ ID NO: 367243 - DNA, 12 bp, Artificial Sequence
  Oligonucleotide primer for the detection of SNP TSC0056242
acattaaaatct

SEQ ID NO: 367244 - DNA, 12 bp, Artificial Sequence
  Oligonucleotide primer for the detection of SNP TSC0056242
taataatagtgg

SEQ ID NO: 367245 - DNA, 12 bp, Artificial Sequence
  Oligonucleotide primer for the detection of SNP TSC0056243
actaaaaccata

SEQ ID NO: 367246 - DNA, 12 bp, Artificial Sequence
  Oligonucleotide primer for the detection of SNP TSC0056243
acaaccctttta

SEQ ID NO: 367247 - DNA, 12 bp, Artificial Sequence
  Oligonucleotide primer for the detection of SNP TSC0056243
agttaaagttat

SEQ ID NO: 367248 - DNA, 12 bp, Artificial Sequence
  Oligonucleotide primer for the detection of SNP TSC0005173
caatttaaatca

SEQ ID NO: 367249 - DNA, 12 bp, Artificial Sequence
  Oligonucleotide primer for the detection of SNP TSC0005173
taggtaaataat

SEQ ID NO: 367250 - DNA, 12 bp, Artificial Sequence
  Oligonucleotide primer for the detection of SNP TSC0005173
taatttgaatta

SEQ ID NO: 367251 - DNA, 12 bp, Artificial Sequence
  Oligonucleotide primer for the detection of SNP TSC0056244
ataaaatattct

SEQ ID NO: 367252 - DNA, 12 bp, Artificial Sequence
  Oligonucleotide primer for the detection of SNP TSC0056244
atttaatagata

SEQ ID NO: 367253 - DNA, 12 bp, Artificial Sequence
  Oligonucleotide primer for the detection of SNP TSC0056246
tactccaaaatc

SEQ ID NO: 367254 - DNA, 12 bp, Artificial Sequence
  Oligonucleotide primer for the detection of SNP TSC0056246
tggaggttttta

SEQ ID NO: 367255 - DNA, 12 bp, Artificial Sequence
  Oligonucleotide primer for the detection of SNP TSC0056247
gaaatgttgata

SEQ ID NO: 367256 - DNA, 12 bp, Artificial Sequence
  Oligonucleotide primer for the detection of SNP TSC0056247
aaaatattaaca

SEQ ID NO: 367257 - DNA, 12 bp, Artificial Sequence
  Oligonucleotide primer for the detection of SNP TSC0056249
ctccatcacaca

SEQ ID NO: 367258 - DNA, 12 bp, Artificial Sequence
  Oligonucleotide primer for the detection of SNP TSC0056250
agtataattgaa

SEQ ID NO: 367259 - DNA, 12 bp, Artificial Sequence
  Oligonucleotide primer for the detection of SNP TSC0056251
taaaactaaaac

SEQ ID NO: 367260 - DNA, 12 bp, Artificial Sequence
  Oligonucleotide primer for the detection of SNP TSC0056252
atttaaatcaac

SEQ ID NO: 367261 - DNA, 12 bp, Artificial Sequence
  Oligonucleotide primer for the detection of SNP TSC0056252
gtgtgttttgag

SEQ ID NO: 367262 - DNA, 12 bp, Artificial Sequence
  Oligonucleotide primer for the detection of SNP TSC0056253
tttaatgtttat

SEQ ID NO: 367263 - DNA, 12 bp, Artificial Sequence
  Oligonucleotide primer for the detection of SNP TSC0056254
taaagataagtt

SEQ ID NO: 367264 - DNA, 12 bp, Artificial Sequence
  Oligonucleotide primer for the detection of SNP TSC0056255
catttatttcaa

SEQ ID NO: 367265 - DNA, 12 bp, Artificial Sequence
  Oligonucleotide primer for the detection of SNP TSC0056255
tagtgggattgt

SEQ ID NO: 367266 - DNA, 12 bp, Artificial Sequence
  Oligonucleotide primer for the detection of SNP TSC0056255
taataaaattac

SEQ ID NO: 367267 - DNA, 12 bp, Artificial Sequence
  Oligonucleotide primer for the detection of SNP TSC0008140
tataatcttctc

SEQ ID NO: 367268 - DNA, 12 bp, Artificial Sequence
  Oligonucleotide primer for the detection of SNP TSC0008140
ttttgggagttt

SEQ ID NO: 367269 - DNA, 12 bp, Artificial Sequence
  Oligonucleotide primer for the detection of SNP TSC0008140
ctctaaaaattt

SEQ ID NO: 367270 - DNA, 12 bp, Artificial Sequence
  Oligonucleotide primer for the detection of SNP TSC0008868
caacttaaccaa

SEQ ID NO: 367271 - DNA, 12 bp, Artificial Sequence
  Oligonucleotide primer for the detection of SNP TSC0056256
tttaaaccataa

SEQ ID NO: 367272 - DNA, 12 bp, Artificial Sequence
  Oligonucleotide primer for the detection of SNP TSC0056256
atatggttattt

SEQ ID NO: 367273 - DNA, 12 bp, Artificial Sequence
  Oligonucleotide primer for the detection of SNP TSC0056256
acataaccaccc

SEQ ID NO: 367274 - DNA, 12 bp, Artificial Sequence
  Oligonucleotide primer for the detection of SNP TSC0056256
tttgggttatgg

SEQ ID NO: 367275 - DNA, 12 bp, Artificial Sequence
  Oligonucleotide primer for the detection of SNP TSC0009105
ttacaaacccct

SEQ ID NO: 367276 - DNA, 12 bp, Artificial Sequence
  Oligonucleotide primer for the detection of SNP TSC0009105
aggagataggta

SEQ ID NO: 367277 - DNA, 12 bp, Artificial Sequence
  Oligonucleotide primer for the detection of SNP TSC0056259
ttaaaatcaaac

SEQ ID NO: 367278 - DNA, 12 bp, Artificial Sequence
  Oligonucleotide primer for the detection of SNP TSC0056260
catcattccatc

SEQ ID NO: 367279 - DNA, 12 bp, Artificial Sequence
  Oligonucleotide primer for the detection of SNP TSC0056260
cgtcattccatc

SEQ ID NO: 367280 - DNA, 12 bp, Artificial Sequence
  Oligonucleotide primer for the detection of SNP TSC0056260
gtatatagttta

SEQ ID NO: 367281 - DNA, 12 bp, Artificial Sequence
  Oligonucleotide primer for the detection of SNP TSC0056261
tcacaaccttac

SEQ ID NO: 367282 - DNA, 12 bp, Artificial Sequence
  Oligonucleotide primer for the detection of SNP TSC0056262
caaccctatccc

SEQ ID NO: 367283 - DNA, 12 bp, Artificial Sequence
  Oligonucleotide primer for the detection of SNP TSC0056262
gggtgagggtag

SEQ ID NO: 367284 - DNA, 12 bp, Artificial Sequence
  Oligonucleotide primer for the detection of SNP TSC0056263
tccctactaccc

SEQ ID NO: 367285 - DNA, 12 bp, Artificial Sequence
  Oligonucleotide primer for the detection of SNP TSC0056263
attaagagggtg

SEQ ID NO: 367286 - DNA, 12 bp, Artificial Sequence
  Oligonucleotide primer for the detection of SNP TSC0056264
atatttctttaa

SEQ ID NO: 367287 - DNA, 12 bp, Artificial Sequence
  Oligonucleotide primer for the detection of SNP TSC0056264
taataatttatt

SEQ ID NO: 367288 - DNA, 12 bp, Artificial Sequence
  Oligonucleotide primer for the detection of SNP TSC0056264
aataattcatta

SEQ ID NO: 367289 - DNA, 12 bp, Artificial Sequence
  Oligonucleotide primer for the detection of SNP TSC0056264
atatttttttga

SEQ ID NO: 367290 - DNA, 12 bp, Artificial Sequence
  Oligonucleotide primer for the detection of SNP TSC0056265
taatcataacaa

SEQ ID NO: 367291 - DNA, 12 bp, Artificial Sequence
  Oligonucleotide primer for the detection of SNP TSC0056265
agtaagttttta

SEQ ID NO: 367292 - DNA, 12 bp, Artificial Sequence
  Oligonucleotide primer for the detection of SNP TSC0056265
aacaaatttcca

SEQ ID NO: 367293 - DNA, 12 bp, Artificial Sequence
  Oligonucleotide primer for the detection of SNP TSC0056265
tgtaattatgat

SEQ ID NO: 367294 - DNA, 12 bp, Artificial Sequence
  Oligonucleotide primer for the detection of SNP TSC0056266
actctttactac

SEQ ID NO: 367295 - DNA, 12 bp, Artificial Sequence
  Oligonucleotide primer for the detection of SNP TSC0056266
gaatatataaag

SEQ ID NO: 367296 - DNA, 12 bp, Artificial Sequence
  Oligonucleotide primer for the detection of SNP TSC0056267
ataaaatttata

SEQ ID NO: 367297 - DNA, 12 bp, Artificial Sequence
  Oligonucleotide primer for the detection of SNP TSC0056267
tagttaggtttt

SEQ ID NO: 367298 - DNA, 12 bp, Artificial Sequence
  Oligonucleotide primer for the detection of SNP TSC0056267
gtagagtttgtg

SEQ ID NO: 367299 - DNA, 12 bp, Artificial Sequence
  Oligonucleotide primer for the detection of SNP TSC0056272
aaatataaccac

SEQ ID NO: 367300 - DNA, 12 bp, Artificial Sequence
  Oligonucleotide primer for the detection of SNP TSC0056272
aaatataaccgc

SEQ ID NO: 367301 - DNA, 12 bp, Artificial Sequence
  Oligonucleotide primer for the detection of SNP TSC0056272
tatttcctctaa

SEQ ID NO: 367302 - DNA, 12 bp, Artificial Sequence
  Oligonucleotide primer for the detection of SNP TSC0056272
aaatgtgattgt

SEQ ID NO: 367303 - DNA, 12 bp, Artificial Sequence
  Oligonucleotide primer for the detection of SNP TSC0056272
aaatgtgatcgt

SEQ ID NO: 367304 - DNA, 12 bp, Artificial Sequence
  Oligonucleotide primer for the detection of SNP TSC0056272
aaatgtgattgc

SEQ ID NO: 367305 - DNA, 12 bp, Artificial Sequence
  Oligonucleotide primer for the detection of SNP TSC0056272
aaatgtgatcgc

SEQ ID NO: 367306 - DNA, 12 bp, Artificial Sequence
  Oligonucleotide primer for the detection of SNP TSC0056273
ccactcaaaaat

SEQ ID NO: 367307 - DNA, 12 bp, Artificial Sequence
  Oligonucleotide primer for the detection of SNP TSC0056273
ccgctcaaaaat

SEQ ID NO: 367308 - DNA, 12 bp, Artificial Sequence
  Oligonucleotide primer for the detection of SNP TSC0056273
aaaggataaaag

SEQ ID NO: 367309 - DNA, 12 bp, Artificial Sequence
  Oligonucleotide primer for the detection of SNP TSC0010397
tcctaaatattc

SEQ ID NO: 367310 - DNA, 12 bp, Artificial Sequence
  Oligonucleotide primer for the detection of SNP TSC0010397
tgtgggaggaaa

SEQ ID NO: 367311 - DNA, 12 bp, Artificial Sequence
  Oligonucleotide primer for the detection of SNP TSC0010397
ttttgggtattt

SEQ ID NO: 367312 - DNA, 12 bp, Artificial Sequence
  Oligonucleotide primer for the detection of SNP TSC0008837
caaattcaataa

SEQ ID NO: 367313 - DNA, 12 bp, Artificial Sequence
  Oligonucleotide primer for the detection of SNP TSC0006849
ctcttctaactt

SEQ ID NO: 367314 - DNA, 12 bp, Artificial Sequence
  Oligonucleotide primer for the detection of SNP TSC0006849
aagagtgtgagg

SEQ ID NO: 367315 - DNA, 12 bp, Artificial Sequence
  Oligonucleotide primer for the detection of SNP TSC0006850
catttacactca

SEQ ID NO: 367316 - DNA, 12 bp, Artificial Sequence
  Oligonucleotide primer for the detection of SNP TSC0006850
cgtttacactca

SEQ ID NO: 367317 - DNA, 12 bp, Artificial Sequence
  Oligonucleotide primer for the detection of SNP TSC0006850
agttttgagtaa

SEQ ID NO: 367318 - DNA, 12 bp, Artificial Sequence
  Oligonucleotide primer for the detection of SNP TSC0006851
tctatattaatc

SEQ ID NO: 367319 - DNA, 12 bp, Artificial Sequence
  Oligonucleotide primer for the detection of SNP TSC0006851
gtagtttgagaa

SEQ ID NO: 367320 - DNA, 12 bp, Artificial Sequence
  Oligonucleotide primer for the detection of SNP TSC0056277
caacctataact

SEQ ID NO: 367321 - DNA, 12 bp, Artificial Sequence
  Oligonucleotide primer for the detection of SNP TSC0009154
aatcaaacaata

SEQ ID NO: 367322 - DNA, 12 bp, Artificial Sequence
  Oligonucleotide primer for the detection of SNP TSC0009154
ggttttggttat

SEQ ID NO: 367323 - DNA, 12 bp, Artificial Sequence
  Oligonucleotide primer for the detection of SNP TSC0009154
aactttaactac

SEQ ID NO: 367324 - DNA, 12 bp, Artificial Sequence
  Oligonucleotide primer for the detection of SNP TSC0009154
agttaaatagta

SEQ ID NO: 367325 - DNA, 12 bp, Artificial Sequence
  Oligonucleotide primer for the detection of SNP TSC0056279
ttgaagttaaga

SEQ ID NO: 367326 - DNA, 12 bp, Artificial Sequence
  Oligonucleotide primer for the detection of SNP TSC0056280
ttttaaaaggtg

SEQ ID NO: 367327 - DNA, 12 bp, Artificial Sequence
  Oligonucleotide primer for the detection of SNP TSC0056281
atacaatatata

SEQ ID NO: 367328 - DNA, 12 bp, Artificial Sequence
  Oligonucleotide primer for the detection of SNP TSC0056281
ccaaccctaatc

SEQ ID NO: 367329 - DNA, 12 bp, Artificial Sequence
  Oligonucleotide primer for the detection of SNP TSC0056281
gtatagtgtata

SEQ ID NO: 367330 - DNA, 12 bp, Artificial Sequence
  Oligonucleotide primer for the detection of SNP TSC0056282
aatatttaaata

SEQ ID NO: 367331 - DNA, 12 bp, Artificial Sequence
  Oligonucleotide primer for the detection of SNP TSC0056282
ttttacggtttt

SEQ ID NO: 367332 - DNA, 12 bp, Artificial Sequence
  Oligonucleotide primer for the detection of SNP TSC0056282
cctcacaatttc

SEQ ID NO: 367333 - DNA, 12 bp, Artificial Sequence
  Oligonucleotide primer for the detection of SNP TSC0056282
cctcacgatttc

SEQ ID NO: 367334 - DNA, 12 bp, Artificial Sequence
  Oligonucleotide primer for the detection of SNP TSC0056282
aatgtttaaatg

SEQ ID NO: 367335 - DNA, 12 bp, Artificial Sequence
  Oligonucleotide primer for the detection of SNP TSC0056283
ggtaggtaaata

SEQ ID NO: 367336 - DNA, 12 bp, Artificial Sequence
  Oligonucleotide primer for the detection of SNP TSC0056284
tctctactcaaa

SEQ ID NO: 367337 - DNA, 12 bp, Artificial Sequence
  Oligonucleotide primer for the detection of SNP TSC0056284
atgaggaaagag

SEQ ID NO: 367338 - DNA, 12 bp, Artificial Sequence
  Oligonucleotide primer for the detection of SNP TSC0056285
tttaagtgttat

SEQ ID NO: 367339 - DNA, 12 bp, Artificial Sequence
  Oligonucleotide primer for the detection of SNP TSC0056285
ctcaaatactac

SEQ ID NO: 367340 - DNA, 12 bp, Artificial Sequence
  Oligonucleotide primer for the detection of SNP TSC0056285
ttaatgaattag

SEQ ID NO: 367341 - DNA, 12 bp, Artificial Sequence
  Oligonucleotide primer for the detection of SNP TSC0056288
ccacacaattaa

SEQ ID NO: 367342 - DNA, 12 bp, Artificial Sequence
  Oligonucleotide primer for the detection of SNP TSC0056288
ttgtgtattttt

SEQ ID NO: 367343 - DNA, 12 bp, Artificial Sequence
  Oligonucleotide primer for the detection of SNP TSC0056288
ctatatatcttt

SEQ ID NO: 367344 - DNA, 12 bp, Artificial Sequence
  Oligonucleotide primer for the detection of SNP TSC0056288
ttatataattaa

SEQ ID NO: 367345 - DNA, 12 bp, Artificial Sequence
  Oligonucleotide primer for the detection of SNP TSC0056291
cctttccttaat

SEQ ID NO: 367346 - DNA, 12 bp, Artificial Sequence
  Oligonucleotide primer for the detection of SNP TSC0056291
taataaaaatag

SEQ ID NO: 367347 - DNA, 12 bp, Artificial Sequence
  Oligonucleotide primer for the detection of SNP TSC0056292
ctaaccaaaaca

SEQ ID NO: 367348 - DNA, 12 bp, Artificial Sequence
  Oligonucleotide primer for the detection of SNP TSC0056292
tatattggtgtt

SEQ ID NO: 367349 - DNA, 12 bp, Artificial Sequence
  Oligonucleotide primer for the detection of SNP TSC0056292
tatactaatacc

SEQ ID NO: 367350 - DNA, 12 bp, Artificial Sequence
  Oligonucleotide primer for the detection of SNP TSC0056293
tctacaaattca

SEQ ID NO: 367351 - DNA, 12 bp, Artificial Sequence
  Oligonucleotide primer for the detection of SNP TSC0056293
gatagggattgt

SEQ ID NO: 367352 - DNA, 12 bp, Artificial Sequence
  Oligonucleotide primer for the detection of SNP TSC0056294
atggtgagaggt

SEQ ID NO: 367353 - DNA, 12 bp, Artificial Sequence
  Oligonucleotide primer for the detection of SNP TSC0056294
aatggaattgga

SEQ ID NO: 367354 - DNA, 12 bp, Artificial Sequence
  Oligonucleotide primer for the detection of SNP TSC0056295
ctaaattaacca

SEQ ID NO: 367355 - DNA, 12 bp, Artificial Sequence
  Oligonucleotide primer for the detection of SNP TSC0056295
atagttttagag

SEQ ID NO: 367356 - DNA, 12 bp, Artificial Sequence
  Oligonucleotide primer for the detection of SNP TSC0056295
acaatctcaaaa

SEQ ID NO: 367357 - DNA, 12 bp, Artificial Sequence
  Oligonucleotide primer for the detection of SNP TSC0056295
gttgggttggtt

SEQ ID NO: 367358 - DNA, 12 bp, Artificial Sequence
  Oligonucleotide primer for the detection of SNP TSC0056296
taatctttatcc

SEQ ID NO: 367359 - DNA, 12 bp, Artificial Sequence
  Oligonucleotide primer for the detection of SNP TSC0056296
ttttaggaatta

SEQ ID NO: 367360 - DNA, 12 bp, Artificial Sequence
  Oligonucleotide primer for the detection of SNP TSC0056297
tacattcacaac

SEQ ID NO: 367361 - DNA, 12 bp, Artificial Sequence
  Oligonucleotide primer for the detection of SNP TSC0056297
aagagttagtta

SEQ ID NO: 367362 - DNA, 12 bp, Artificial Sequence
  Oligonucleotide primer for the detection of SNP TSC0056298
tggaagttagta

SEQ ID NO: 367363 - DNA, 12 bp, Artificial Sequence
  Oligonucleotide primer for the detection of SNP TSC0056300
attgtttgagaa

SEQ ID NO: 367364 - DNA, 12 bp, Artificial Sequence
  Oligonucleotide primer for the detection of SNP TSC0056302
ttaactaaaaac

SEQ ID NO: 367365 - DNA, 12 bp, Artificial Sequence
  Oligonucleotide primer for the detection of SNP TSC0056302
tgttatagttaa

SEQ ID NO: 367366 - DNA, 12 bp, Artificial Sequence
  Oligonucleotide primer for the detection of SNP TSC0056303
acccaactattc

SEQ ID NO: 367367 - DNA, 12 bp, Artificial Sequence
  Oligonucleotide primer for the detection of SNP TSC0056303
tggaagtatttg

SEQ ID NO: 367368 - DNA, 12 bp, Artificial Sequence
  Oligonucleotide primer for the detection of SNP TSC0007627
aaattaccccat

SEQ ID NO: 367369 - DNA, 12 bp, Artificial Sequence
  Oligonucleotide primer for the detection of SNP TSC0007627
ggagatgtttgg

SEQ ID NO: 367370 - DNA, 12 bp, Artificial Sequence
  Oligonucleotide primer for the detection of SNP TSC0056304
aaacaacataaa

SEQ ID NO: 367371 - DNA, 12 bp, Artificial Sequence
  Oligonucleotide primer for the detection of SNP TSC0056304
gattatggggta

SEQ ID NO: 367372 - DNA, 12 bp, Artificial Sequence
  Oligonucleotide primer for the detection of SNP TSC0056305
atctcattaata

SEQ ID NO: 367373 - DNA, 12 bp, Artificial Sequence
  Oligonucleotide primer for the detection of SNP TSC0056305
tgtaagttgtat

SEQ ID NO: 367374 - DNA, 12 bp, Artificial Sequence
  Oligonucleotide primer for the detection of SNP TSC0056305
tgtaagttgtac

SEQ ID NO: 367375 - DNA, 12 bp, Artificial Sequence
  Oligonucleotide primer for the detection of SNP TSC0056305
tataaactacac

SEQ ID NO: 367376 - DNA, 12 bp, Artificial Sequence
  Oligonucleotide primer for the detection of SNP TSC0056305
attttattggtg

SEQ ID NO: 367377 - DNA, 12 bp, Artificial Sequence
  Oligonucleotide primer for the detection of SNP TSC0008219
tctcccaccacc

SEQ ID NO: 367378 - DNA, 12 bp, Artificial Sequence
  Oligonucleotide primer for the detection of SNP TSC0008219
tagttattgaga

SEQ ID NO: 367379 - DNA, 12 bp, Artificial Sequence
  Oligonucleotide primer for the detection of SNP TSC0056307
aaattggtttat

SEQ ID NO: 367380 - DNA, 12 bp, Artificial Sequence
  Oligonucleotide primer for the detection of SNP TSC0007039
tatataaaacaa

SEQ ID NO: 367381 - DNA, 12 bp, Artificial Sequence
  Oligonucleotide primer for the detection of SNP TSC0007039
tgtgggtttttt

SEQ ID NO: 367382 - DNA, 12 bp, Artificial Sequence
  Oligonucleotide primer for the detection of SNP TSC0007039
ttatataaaccc

SEQ ID NO: 367383 - DNA, 12 bp, Artificial Sequence
  Oligonucleotide primer for the detection of SNP TSC0007039
gatatatggaat

SEQ ID NO: 367384 - DNA, 12 bp, Artificial Sequence
  Oligonucleotide primer for the detection of SNP TSC0007040
acaaaacctttt

SEQ ID NO: 367385 - DNA, 12 bp, Artificial Sequence
  Oligonucleotide primer for the detection of SNP TSC0056311
aaaaataacatc

SEQ ID NO: 367386 - DNA, 12 bp, Artificial Sequence
  Oligonucleotide primer for the detection of SNP TSC0056311
ggaaagttgtta

SEQ ID NO: 367387 - DNA, 12 bp, Artificial Sequence
  Oligonucleotide primer for the detection of SNP TSC0056312
taaattaaatag

SEQ ID NO: 367388 - DNA, 12 bp, Artificial Sequence
  Oligonucleotide primer for the detection of SNP TSC0056313
ctattttctatt

SEQ ID NO: 367389 - DNA, 12 bp, Artificial Sequence
  Oligonucleotide primer for the detection of SNP TSC0056313
tgagaaattata

SEQ ID NO: 367390 - DNA, 12 bp, Artificial Sequence
  Oligonucleotide primer for the detection of SNP TSC0005180
tccattcaccac

SEQ ID NO: 367391 - DNA, 12 bp, Artificial Sequence
  Oligonucleotide primer for the detection of SNP TSC0005180
ttttgatttttg

SEQ ID NO: 367392 - DNA, 12 bp, Artificial Sequence
  Oligonucleotide primer for the detection of SNP TSC0056314
caactatcttct

SEQ ID NO: 367393 - DNA, 12 bp, Artificial Sequence
  Oligonucleotide primer for the detection of SNP TSC0056314
atataaacataa

SEQ ID NO: 367394 - DNA, 12 bp, Artificial Sequence
  Oligonucleotide primer for the detection of SNP TSC0056315
atttcatacatc

SEQ ID NO: 367395 - DNA, 12 bp, Artificial Sequence
  Oligonucleotide primer for the detection of SNP TSC0056315
gttagttaaata

SEQ ID NO: 367396 - DNA, 12 bp, Artificial Sequence
  Oligonucleotide primer for the detection of SNP TSC0056316
ggttagttaaat

SEQ ID NO: 367397 - DNA, 12 bp, Artificial Sequence
  Oligonucleotide primer for the detection of SNP TSC0056316
aactaattaaac

SEQ ID NO: 367398 - DNA, 12 bp, Artificial Sequence
  Oligonucleotide primer for the detection of SNP TSC0056317
aaaaactatttc

SEQ ID NO: 367399 - DNA, 12 bp, Artificial Sequence
  Oligonucleotide primer for the detection of SNP TSC0056317
atagttaaaaat

SEQ ID NO: 367400 - DNA, 12 bp, Artificial Sequence
  Oligonucleotide primer for the detection of SNP TSC0056319
tagttgtggtgg

SEQ ID NO: 367401 - DNA, 12 bp, Artificial Sequence
  Oligonucleotide primer for the detection of SNP TSC0056319
tagtcgtggtgg

SEQ ID NO: 367402 - DNA, 12 bp, Artificial Sequence
  Oligonucleotide primer for the detection of SNP TSC0056319
caaccataataa

SEQ ID NO: 367403 - DNA, 12 bp, Artificial Sequence
  Oligonucleotide primer for the detection of SNP TSC0056319
caaccgtaataa

SEQ ID NO: 367404 - DNA, 12 bp, Artificial Sequence
  Oligonucleotide primer for the detection of SNP TSC0005418
cataacctaaac

SEQ ID NO: 367405 - DNA, 12 bp, Artificial Sequence
  Oligonucleotide primer for the detection of SNP TSC0005418
cgtaacctaaac

SEQ ID NO: 367406 - DNA, 12 bp, Artificial Sequence
  Oligonucleotide primer for the detection of SNP TSC0056321
aaacttcttccc

SEQ ID NO: 367407 - DNA, 12 bp, Artificial Sequence
  Oligonucleotide primer for the detection of SNP TSC0056321
tttttaagaaaa

SEQ ID NO: 367408 - DNA, 12 bp, Artificial Sequence
  Oligonucleotide primer for the detection of SNP TSC0056322
ttatacttttat

SEQ ID NO: 367409 - DNA, 12 bp, Artificial Sequence
  Oligonucleotide primer for the detection of SNP TSC0056323
tcccaatattca

SEQ ID NO: 367410 - DNA, 12 bp, Artificial Sequence
  Oligonucleotide primer for the detection of SNP TSC0056323
tatggagaaaat

SEQ ID NO: 367411 - DNA, 12 bp, Artificial Sequence
  Oligonucleotide primer for the detection of SNP TSC0007714
ctctataaatta

SEQ ID NO: 367412 - DNA, 12 bp, Artificial Sequence
  Oligonucleotide primer for the detection of SNP TSC0007714
tgaggtgtgtat

SEQ ID NO: 367413 - DNA, 12 bp, Artificial Sequence
  Oligonucleotide primer for the detection of SNP TSC0007714
taaaatatacat

SEQ ID NO: 367414 - DNA, 12 bp, Artificial Sequence
  Oligonucleotide primer for the detection of SNP TSC0007715
agaaaatgagat

SEQ ID NO: 367415 - DNA, 12 bp, Artificial Sequence
  Oligonucleotide primer for the detection of SNP TSC0056324
ttacacacctca

SEQ ID NO: 367416 - DNA, 12 bp, Artificial Sequence
  Oligonucleotide primer for the detection of SNP TSC0056324
ggaaatattttt

SEQ ID NO: 367417 - DNA, 12 bp, Artificial Sequence
  Oligonucleotide primer for the detection of SNP TSC0056324
gaaaacatcttt

SEQ ID NO: 367418 - DNA, 12 bp, Artificial Sequence
  Oligonucleotide primer for the detection of SNP TSC0056325
cactcacaaatt

SEQ ID NO: 367419 - DNA, 12 bp, Artificial Sequence
  Oligonucleotide primer for the detection of SNP TSC0056325
cactcgcaaatt

SEQ ID NO: 367420 - DNA, 12 bp, Artificial Sequence
  Oligonucleotide primer for the detection of SNP TSC0056325
tctctttttaca

SEQ ID NO: 367421 - DNA, 12 bp, Artificial Sequence
  Oligonucleotide primer for the detection of SNP TSC0056325
tatttgtagatt

SEQ ID NO: 367422 - DNA, 12 bp, Artificial Sequence
  Oligonucleotide primer for the detection of SNP TSC0056325
tattcgtagatt

SEQ ID NO: 367423 - DNA, 12 bp, Artificial Sequence
  Oligonucleotide primer for the detection of SNP TSC0004669
atatattcttaa

SEQ ID NO: 367424 - DNA, 12 bp, Artificial Sequence
  Oligonucleotide primer for the detection of SNP TSC0004669
gtttaggtattt

SEQ ID NO: 367425 - DNA, 12 bp, Artificial Sequence
  Oligonucleotide primer for the detection of SNP TSC0004669
acccaaacactc

SEQ ID NO: 367426 - DNA, 12 bp, Artificial Sequence
  Oligonucleotide primer for the detection of SNP TSC0004669
atgtgtttttga

SEQ ID NO: 367427 - DNA, 12 bp, Artificial Sequence
  Oligonucleotide primer for the detection of SNP TSC0056329
aataacttattt

SEQ ID NO: 367428 - DNA, 12 bp, Artificial Sequence
  Oligonucleotide primer for the detection of SNP TSC0056330
agattattagaa

SEQ ID NO: 367429 - DNA, 12 bp, Artificial Sequence
  Oligonucleotide primer for the detection of SNP TSC0056330
ttaaataaaagg

SEQ ID NO: 367430 - DNA, 12 bp, Artificial Sequence
  Oligonucleotide primer for the detection of SNP TSC0056331
ctataatctctc

SEQ ID NO: 367431 - DNA, 12 bp, Artificial Sequence
  Oligonucleotide primer for the detection of SNP TSC0006664
gagttttgtttt

SEQ ID NO: 367432 - DNA, 12 bp, Artificial Sequence
  Oligonucleotide primer for the detection of SNP TSC0006664
aaaatcctaccc

SEQ ID NO: 367433 - DNA, 12 bp, Artificial Sequence
  Oligonucleotide primer for the detection of SNP TSC0006664
tttattattaag

SEQ ID NO: 367434 - DNA, 12 bp, Artificial Sequence
  Oligonucleotide primer for the detection of SNP TSC0056333
aaacactatatt

SEQ ID NO: 367435 - DNA, 12 bp, Artificial Sequence
  Oligonucleotide primer for the detection of SNP TSC0056333
tttgatgattta

SEQ ID NO: 367436 - DNA, 12 bp, Artificial Sequence
  Oligonucleotide primer for the detection of SNP TSC0056333
ggatattatatt

SEQ ID NO: 367437 - DNA, 12 bp, Artificial Sequence
  Oligonucleotide primer for the detection of SNP TSC0056334
tacatcacattt

SEQ ID NO: 367438 - DNA, 12 bp, Artificial Sequence
  Oligonucleotide primer for the detection of SNP TSC0056334
aagtggataaat

SEQ ID NO: 367439 - DNA, 12 bp, Artificial Sequence
  Oligonucleotide primer for the detection of SNP TSC0007360
aatatctccccc

SEQ ID NO: 367440 - DNA, 12 bp, Artificial Sequence
  Oligonucleotide primer for the detection of SNP TSC0007360
ttattagtgaat

SEQ ID NO: 367441 - DNA, 12 bp, Artificial Sequence
  Oligonucleotide primer for the detection of SNP TSC0007360
ggtgtttttttt

SEQ ID NO: 367442 - DNA, 12 bp, Artificial Sequence
  Oligonucleotide primer for the detection of SNP TSC0056335
cttccttttttt

SEQ ID NO: 367443 - DNA, 12 bp, Artificial Sequence
  Oligonucleotide primer for the detection of SNP TSC0056335
agatttataaaa

SEQ ID NO: 367444 - DNA, 12 bp, Artificial Sequence
  Oligonucleotide primer for the detection of SNP TSC0056337
aataaatacccc

SEQ ID NO: 367445 - DNA, 12 bp, Artificial Sequence
  Oligonucleotide primer for the detection of SNP TSC0056337
gataaatacccc

SEQ ID NO: 367446 - DNA, 12 bp, Artificial Sequence
  Oligonucleotide primer for the detection of SNP TSC0056337
tttaggtaggtg

SEQ ID NO: 367447 - DNA, 12 bp, Artificial Sequence
  Oligonucleotide primer for the detection of SNP TSC0056343
tatttcaaattt

SEQ ID NO: 367448 - DNA, 12 bp, Artificial Sequence
  Oligonucleotide primer for the detection of SNP TSC0056348
tataactaaaac

SEQ ID NO: 367449 - DNA, 12 bp, Artificial Sequence
  Oligonucleotide primer for the detection of SNP TSC0056348
ggtgttgttagg

SEQ ID NO: 367450 - DNA, 12 bp, Artificial Sequence
  Oligonucleotide primer for the detection of SNP TSC0056352
aacaccttaatc

SEQ ID NO: 367451 - DNA, 12 bp, Artificial Sequence
  Oligonucleotide primer for the detection of SNP TSC0056353
gtaggtaggtag

SEQ ID NO: 367452 - DNA, 12 bp, Artificial Sequence
  Oligonucleotide primer for the detection of SNP TSC0056354
tttgaaagtgtt

SEQ ID NO: 367453 - DNA, 12 bp, Artificial Sequence
  Oligonucleotide primer for the detection of SNP TSC0056354
taagaaaaaata

SEQ ID NO: 367454 - DNA, 12 bp, Artificial Sequence
  Oligonucleotide primer for the detection of SNP TSC0056355
ttccataatttc

SEQ ID NO: 367455 - DNA, 12 bp, Artificial Sequence
  Oligonucleotide primer for the detection of SNP TSC0056355
aggtaataaagg

SEQ ID NO: 367456 - DNA, 12 bp, Artificial Sequence
  Oligonucleotide primer for the detection of SNP TSC0056356
ataaccaaaaac

SEQ ID NO: 367457 - DNA, 12 bp, Artificial Sequence
  Oligonucleotide primer for the detection of SNP TSC0056356
tattaattattc

SEQ ID NO: 367458 - DNA, 12 bp, Artificial Sequence
  Oligonucleotide primer for the detection of SNP TSC0056356
caccaatcattc

SEQ ID NO: 367459 - DNA, 12 bp, Artificial Sequence
  Oligonucleotide primer for the detection of SNP TSC0056356
tggttaaaggtt

SEQ ID NO: 367460 - DNA, 12 bp, Artificial Sequence
  Oligonucleotide primer for the detection of SNP TSC0056357
atactaaatact

SEQ ID NO: 367461 - DNA, 12 bp, Artificial Sequence
  Oligonucleotide primer for the detection of SNP TSC0056358
atttttattgtg

SEQ ID NO: 367462 - DNA, 12 bp, Artificial Sequence
  Oligonucleotide primer for the detection of SNP TSC0056359
aaatataacaat

SEQ ID NO: 367463 - DNA, 12 bp, Artificial Sequence
  Oligonucleotide primer for the detection of SNP TSC0056360
atattttttatc

SEQ ID NO: 367464 - DNA, 12 bp, Artificial Sequence
  Oligonucleotide primer for the detection of SNP TSC0056360
aaacatctttta

SEQ ID NO: 367465 - DNA, 12 bp, Artificial Sequence
  Oligonucleotide primer for the detection of SNP TSC0056360
tgggaatatgga

SEQ ID NO: 367466 - DNA, 12 bp, Artificial Sequence
  Oligonucleotide primer for the detection of SNP TSC0056361
tttaataacata

SEQ ID NO: 367467 - DNA, 12 bp, Artificial Sequence
  Oligonucleotide primer for the detection of SNP TSC0056361
gatgttttgtgt

SEQ ID NO: 367468 - DNA, 12 bp, Artificial Sequence
  Oligonucleotide primer for the detection of SNP TSC0056361
taatactttata

SEQ ID NO: 367469 - DNA, 12 bp, Artificial Sequence
  Oligonucleotide primer for the detection of SNP TSC0056361
atttagtagtat

SEQ ID NO: 367470 - DNA, 12 bp, Artificial Sequence
  Oligonucleotide primer for the detection of SNP TSC0056362
tcatctttttct

SEQ ID NO: 367471 - DNA, 12 bp, Artificial Sequence
  Oligonucleotide primer for the detection of SNP TSC0056365
aaacttaattat

SEQ ID NO: 367472 - DNA, 12 bp, Artificial Sequence
  Oligonucleotide primer for the detection of SNP TSC0056365
attataaagtaa

SEQ ID NO: 367473 - DNA, 12 bp, Artificial Sequence
  Oligonucleotide primer for the detection of SNP TSC0056369
actatttcatca

SEQ ID NO: 367474 - DNA, 12 bp, Artificial Sequence
  Oligonucleotide primer for the detection of SNP TSC0056369
actatttcatcg

SEQ ID NO: 367475 - DNA, 12 bp, Artificial Sequence
  Oligonucleotide primer for the detection of SNP TSC0056369
ccaacctctcta

SEQ ID NO: 367476 - DNA, 12 bp, Artificial Sequence
  Oligonucleotide primer for the detection of SNP TSC0056369
agttattttatt

SEQ ID NO: 367477 - DNA, 12 bp, Artificial Sequence
  Oligonucleotide primer for the detection of SNP TSC0056369
agttattttatc

SEQ ID NO: 367478 - DNA, 12 bp, Artificial Sequence
  Oligonucleotide primer for the detection of SNP TSC0056370
aacttccacaac

SEQ ID NO: 367479 - DNA, 12 bp, Artificial Sequence
  Oligonucleotide primer for the detection of SNP TSC0056370
tttccacactcc

SEQ ID NO: 367480 - DNA, 12 bp, Artificial Sequence
  Oligonucleotide primer for the detection of SNP TSC0056370
ggtttttataat

SEQ ID NO: 367481 - DNA, 12 bp, Artificial Sequence
  Oligonucleotide primer for the detection of SNP TSC0056370
ggtttttataac

SEQ ID NO: 367482 - DNA, 12 bp, Artificial Sequence
  Oligonucleotide primer for the detection of SNP TSC0056372
accaacaaaaac

SEQ ID NO: 367483 - DNA, 12 bp, Artificial Sequence
  Oligonucleotide primer for the detection of SNP TSC0056372
ataaattatgta

SEQ ID NO: 367484 - DNA, 12 bp, Artificial Sequence
  Oligonucleotide primer for the detection of SNP TSC0056373
ttatgatataat

SEQ ID NO: 367485 - DNA, 12 bp, Artificial Sequence
  Oligonucleotide primer for the detection of SNP TSC0056373
tcataatataat

SEQ ID NO: 367486 - DNA, 12 bp, Artificial Sequence
  Oligonucleotide primer for the detection of SNP TSC0056373
aagagataagaa

SEQ ID NO: 367487 - DNA, 12 bp, Artificial Sequence
  Oligonucleotide primer for the detection of SNP TSC0056375
acataataatca

SEQ ID NO: 367488 - DNA, 12 bp, Artificial Sequence
  Oligonucleotide primer for the detection of SNP TSC0056375
tgttgaataatt

SEQ ID NO: 367489 - DNA, 12 bp, Artificial Sequence
  Oligonucleotide primer for the detection of SNP TSC0056375
tactaaacaatc

SEQ ID NO: 367490 - DNA, 12 bp, Artificial Sequence
  Oligonucleotide primer for the detection of SNP TSC0056375
gtatagtagtta

SEQ ID NO: 367491 - DNA, 12 bp, Artificial Sequence
  Oligonucleotide primer for the detection of SNP TSC0056377
atttgtttggtt

SEQ ID NO: 367492 - DNA, 12 bp, Artificial Sequence
  Oligonucleotide primer for the detection of SNP TSC0056377
atttgttcggtt

SEQ ID NO: 367493 - DNA, 12 bp, Artificial Sequence
  Oligonucleotide primer for the detection of SNP TSC0056377
tctactcaatta

SEQ ID NO: 367494 - DNA, 12 bp, Artificial Sequence
  Oligonucleotide primer for the detection of SNP TSC0056377
tctactcgatta

SEQ ID NO: 367495 - DNA, 12 bp, Artificial Sequence
  Oligonucleotide primer for the detection of SNP TSC0056377
aagagttagaga

SEQ ID NO: 367496 - DNA, 12 bp, Artificial Sequence
  Oligonucleotide primer for the detection of SNP TSC0056378
aggttaaagaat

SEQ ID NO: 367497 - DNA, 12 bp, Artificial Sequence
  Oligonucleotide primer for the detection of SNP TSC0056378
ataatgtatatg

SEQ ID NO: 367498 - DNA, 12 bp, Artificial Sequence
  Oligonucleotide primer for the detection of SNP TSC0056379
ataatctaataa

SEQ ID NO: 367499 - DNA, 12 bp, Artificial Sequence
  Oligonucleotide primer for the detection of SNP TSC0056379
gtaatctaataa

SEQ ID NO: 367500 - DNA, 12 bp, Artificial Sequence
  Oligonucleotide primer for the detection of SNP TSC0056379
ctctttacctta

SEQ ID NO: 367501 - DNA, 12 bp, Artificial Sequence
  Oligonucleotide primer for the detection of SNP TSC0056379
gtggtttggtag

SEQ ID NO: 367502 - DNA, 12 bp, Artificial Sequence
  Oligonucleotide primer for the detection of SNP TSC0056380
aattcttacttt

SEQ ID NO: 367503 - DNA, 12 bp, Artificial Sequence
  Oligonucleotide primer for the detection of SNP TSC0056380
ctatattctaca

SEQ ID NO: 367504 - DNA, 12 bp, Artificial Sequence
  Oligonucleotide primer for the detection of SNP TSC0056381
atctaactcatc

SEQ ID NO: 367505 - DNA, 12 bp, Artificial Sequence
  Oligonucleotide primer for the detection of SNP TSC0056381
ttatagaggtgg

SEQ ID NO: 367506 - DNA, 12 bp, Artificial Sequence
  Oligonucleotide primer for the detection of SNP TSC0056382
taattaaaacaa

SEQ ID NO: 367507 - DNA, 12 bp, Artificial Sequence
  Oligonucleotide primer for the detection of SNP TSC0056382
atctcatctcct

SEQ ID NO: 367508 - DNA, 12 bp, Artificial Sequence
  Oligonucleotide primer for the detection of SNP TSC0056382
atggttagagta

SEQ ID NO: 367509 - DNA, 12 bp, Artificial Sequence
  Oligonucleotide primer for the detection of SNP TSC0056383
acaataatccca

SEQ ID NO: 367510 - DNA, 12 bp, Artificial Sequence
  Oligonucleotide primer for the detection of SNP TSC0056383
acgataatccca

SEQ ID NO: 367511 - DNA, 12 bp, Artificial Sequence
  Oligonucleotide primer for the detection of SNP TSC0056383
gagtagggtatt

SEQ ID NO: 367512 - DNA, 12 bp, Artificial Sequence
  Oligonucleotide primer for the detection of SNP TSC0056383
aaacaaaacatc

SEQ ID NO: 367513 - DNA, 12 bp, Artificial Sequence
  Oligonucleotide primer for the detection of SNP TSC0056383
gtggtggtttta

SEQ ID NO: 367514 - DNA, 12 bp, Artificial Sequence
  Oligonucleotide primer for the detection of SNP TSC0056383
gcggtggtttta

SEQ ID NO: 367515 - DNA, 12 bp, Artificial Sequence
  Oligonucleotide primer for the detection of SNP TSC0056384
tctaaaacctcc

SEQ ID NO: 367516 - DNA, 12 bp, Artificial Sequence
  Oligonucleotide primer for the detection of SNP TSC0056384
ttattttcgttg

SEQ ID NO: 367517 - DNA, 12 bp, Artificial Sequence
  Oligonukleotid-Primer
ttatttttgtcg

SEQ ID NO: 367518 - DNA, 12 bp, Artificial Sequence
  Oligonucleotide primer for the detection of SNP TSC0056384
ttattttcgtcg

SEQ ID NO: 367519 - DNA, 12 bp, Artificial Sequence
  Oligonucleotide primer for the detection of SNP TSC0056385
gcgtagtggtgt

SEQ ID NO: 367520 - DNA, 12 bp, Artificial Sequence
  Oligonucleotide primer for the detection of SNP TSC0056385
gcgtagtggtgc

SEQ ID NO: 367521 - DNA, 12 bp, Artificial Sequence
  Oligonucleotide primer for the detection of SNP TSC0056385
gagattaatagg

SEQ ID NO: 367522 - DNA, 12 bp, Artificial Sequence
  Oligonucleotide primer for the detection of SNP TSC0056386
cctatcaacctt

SEQ ID NO: 367523 - DNA, 12 bp, Artificial Sequence
  Oligonucleotide primer for the detection of SNP TSC0056386
aattattagaga

SEQ ID NO: 367524 - DNA, 12 bp, Artificial Sequence
  Oligonucleotide primer for the detection of SNP TSC0056390
taccattcactt

SEQ ID NO: 367525 - DNA, 12 bp, Artificial Sequence
  Oligonucleotide primer for the detection of SNP TSC0056390
taatgatggtag

SEQ ID NO: 367526 - DNA, 12 bp, Artificial Sequence
  Oligonucleotide primer for the detection of SNP TSC0056391
aaaaaaaaccat

SEQ ID NO: 367527 - DNA, 12 bp, Artificial Sequence
  Oligonucleotide primer for the detection of SNP TSC0056391
agattttaggga

SEQ ID NO: 367528 - DNA, 12 bp, Artificial Sequence
  Oligonucleotide primer for the detection of SNP TSC0056393
tataatattctt

SEQ ID NO: 367529 - DNA, 12 bp, Artificial Sequence
  Oligonukleotid-Primer
tattttgggttg

SEQ ID NO: 367530 - DNA, 12 bp, Artificial Sequence
  Oligonucleotide primer for the detection of SNP TSC0056395
aaaaacgtattt

SEQ ID NO: 367531 - DNA, 12 bp, Artificial Sequence
  Oligonucleotide primer for the detection of SNP TSC0056395
gtggaaggggaa

SEQ ID NO: 367532 - DNA, 12 bp, Artificial Sequence
  Oligonucleotide primer for the detection of SNP TSC0056396
ataaaactcttt

SEQ ID NO: 367533 - DNA, 12 bp, Artificial Sequence
  Oligonukleotid-Primer
gtttttatagaa

SEQ ID NO: 367534 - DNA, 12 bp, Artificial Sequence
  Oligonucleotide primer for the detection of SNP TSC0056396
attcttacaaaa

SEQ ID NO: 367535 - DNA, 12 bp, Artificial Sequence
  Oligonucleotide primer for the detection of SNP TSC0056396
atagaatttttt

SEQ ID NO: 367536 - DNA, 12 bp, Artificial Sequence
  Oligonucleotide primer for the detection of SNP TSC0056398
gtgtttttgtta

SEQ ID NO: 367537 - DNA, 12 bp, Artificial Sequence
  Oligonucleotide primer for the detection of SNP TSC0056398
atctttactaaa

SEQ ID NO: 367538 - DNA, 12 bp, Artificial Sequence
  Oligonucleotide primer for the detection of SNP TSC0056398
ggatattgtttt

SEQ ID NO: 367539 - DNA, 12 bp, Artificial Sequence
  Oligonucleotide primer for the detection of SNP TSC0056402
ctaccctcataa

SEQ ID NO: 367540 - DNA, 12 bp, Artificial Sequence
  Oligonucleotide primer for the detection of SNP TSC0056402
tagtttataatt

SEQ ID NO: 367541 - DNA, 12 bp, Artificial Sequence
  Oligonucleotide primer for the detection of SNP TSC0056402
tagtttataatc

SEQ ID NO: 367542 - DNA, 12 bp, Artificial Sequence
  Oligonucleotide primer for the detection of SNP TSC0056404
ttatatgggatt

SEQ ID NO: 367543 - DNA, 12 bp, Artificial Sequence
  Oligonucleotide primer for the detection of SNP TSC0056404
tcacataaaatt

SEQ ID NO: 367544 - DNA, 12 bp, Artificial Sequence
  Oligonucleotide primer for the detection of SNP TSC0056404
ttaagataaata

SEQ ID NO: 367545 - DNA, 12 bp, Artificial Sequence
  Oligonukleotid-Primer
taatactcacac

SEQ ID NO: 367546 - DNA, 12 bp, Artificial Sequence
  Oligonucleotide primer for the detection of SNP TSC0056407
attgggtttata

SEQ ID NO: 367547 - DNA, 12 bp, Artificial Sequence
  Oligonucleotide primer for the detection of SNP TSC0056408
ttgagtttagga

SEQ ID NO: 367548 - DNA, 12 bp, Artificial Sequence
  Oligonucleotide primer for the detection of SNP TSC0056409
tttttaatcttt

SEQ ID NO: 367549 - DNA, 12 bp, Artificial Sequence
  Oligonukleotid-Primer
aaattctatcta

SEQ ID NO: 367550 - DNA, 12 bp, Artificial Sequence
  Oligonucleotide primer for the detection of SNP TSC0056412
aatatataactc

SEQ ID NO: 367551 - DNA, 12 bp, Artificial Sequence
  Oligonucleotide primer for the detection of SNP TSC0056412
ttatgaatatat

SEQ ID NO: 367552 - DNA, 12 bp, Artificial Sequence
  Oligonucleotide primer for the detection of SNP TSC0056412
ttacgaatatat

SEQ ID NO: 367553 - DNA, 12 bp, Artificial Sequence
  Oligonucleotide primer for the detection of SNP TSC0056413
tctatacaaata

SEQ ID NO: 367554 - DNA, 12 bp, Artificial Sequence
  Oligonucleotide primer for the detection of SNP TSC0056413
gggatatatttt

SEQ ID NO: 367555 - DNA, 12 bp, Artificial Sequence
  Oligonucleotide primer for the detection of SNP TSC0056413
aaaatacacttc

SEQ ID NO: 367556 - DNA, 12 bp, Artificial Sequence
  Oligonucleotide primer for the detection of SNP TSC0056413
tttgtgtaaata

SEQ ID NO: 367557 - DNA, 12 bp, Artificial Sequence
  Oligonucleotide primer for the detection of SNP TSC0056414
attaaatgagaa

SEQ ID NO: 367558 - DNA, 12 bp, Artificial Sequence
  Oligonucleotide primer for the detection of SNP TSC0056415
aattttctaact

SEQ ID NO: 367559 - DNA, 12 bp, Artificial Sequence
  Oligonucleotide primer for the detection of SNP TSC0056416
atttactaatta

SEQ ID NO: 367560 - DNA, 12 bp, Artificial Sequence
  Oligonucleotide primer for the detection of SNP TSC0056416
tatattttttcg

SEQ ID NO: 367561 - DNA, 12 bp, Artificial Sequence
  Oligonucleotide primer for the detection of SNP TSC0056416
atattttctcaa

SEQ ID NO: 367562 - DNA, 12 bp, Artificial Sequence
  Oligonucleotide primer for the detection of SNP TSC0056416
atattttctcga

SEQ ID NO: 367563 - DNA, 12 bp, Artificial Sequence
  Oligonucleotide primer for the detection of SNP TSC0056416
aatttgttagtt

SEQ ID NO: 367564 - DNA, 12 bp, Artificial Sequence
  Oligonucleotide primer for the detection of SNP TSC0056418
ttatattattga

SEQ ID NO: 367565 - DNA, 12 bp, Artificial Sequence
  Oligonucleotide primer for the detection of SNP TSC0056419
ccttatcttatc

SEQ ID NO: 367566 - DNA, 12 bp, Artificial Sequence
  Oligonucleotide primer for the detection of SNP TSC0056419
agttattagtta

SEQ ID NO: 367567 - DNA, 12 bp, Artificial Sequence
  Oligonucleotide primer for the detection of SNP TSC0056420
tttcattctatt

SEQ ID NO: 367568 - DNA, 12 bp, Artificial Sequence
  Oligonucleotide primer for the detection of SNP TSC0056420
ttttattaatga

SEQ ID NO: 367569 - DNA, 12 bp, Artificial Sequence
  Oligonucleotide primer for the detection of SNP TSC0056421
gagttatgatgg

SEQ ID NO: 367570 - DNA, 12 bp, Artificial Sequence
  Oligonucleotide primer for the detection of SNP TSC0056421
aaactataataa

SEQ ID NO: 367571 - DNA, 12 bp, Artificial Sequence
  Oligonucleotide primer for the detection of SNP TSC0056422
accactttctca

SEQ ID NO: 367572 - DNA, 12 bp, Artificial Sequence
  Oligonucleotide primer for the detection of SNP TSC0056422
aaaagagttatt

SEQ ID NO: 367573 - DNA, 12 bp, Artificial Sequence
  Oligonucleotide primer for the detection of SNP TSC0056423
tttcaacaaaaa

SEQ ID NO: 367574 - DNA, 12 bp, Artificial Sequence
  Oligonucleotide primer for the detection of SNP TSC0056423
tttctctaaatt

SEQ ID NO: 367575 - DNA, 12 bp, Artificial Sequence
  Oligonucleotide primer for the detection of SNP TSC0056423
tagttttaataa

SEQ ID NO: 367576 - DNA, 12 bp, Artificial Sequence
  Oligonucleotide primer for the detection of SNP TSC0056426
actatacataaa

SEQ ID NO: 367577 - DNA, 12 bp, Artificial Sequence
  Oligonukleotid-Primer
acaataaatctt

SEQ ID NO: 367578 - DNA, 12 bp, Artificial Sequence
  Oligonucleotide primer for the detection of SNP TSC0056426
tatatatgggtt

SEQ ID NO: 367579 - DNA, 12 bp, Artificial Sequence
  Oligonucleotide primer for the detection of SNP TSC0056429
taattccttata

SEQ ID NO: 367580 - DNA, 12 bp, Artificial Sequence
  Oligonucleotide primer for the detection of SNP TSC0056429
ttttagttaatt

SEQ ID NO: 367581 - DNA, 12 bp, Artificial Sequence
  Oligonucleotide primer for the detection of SNP TSC0056429
acttcaaccaac

SEQ ID NO: 367582 - DNA, 12 bp, Artificial Sequence
  Oligonucleotide primer for the detection of SNP TSC0056429
tagttttttgtg

SEQ ID NO: 367583 - DNA, 12 bp, Artificial Sequence
  Oligonucleotide primer for the detection of SNP TSC0009653
tagttgttggat

SEQ ID NO: 367584 - DNA, 12 bp, Artificial Sequence
  Oligonucleotide primer for the detection of SNP TSC0009653
caattactaaac

SEQ ID NO: 367585 - DNA, 12 bp, Artificial Sequence
  Oligonukleotid-Primer
atggtagtggag

SEQ ID NO: 367586 - DNA, 12 bp, Artificial Sequence
  Oligonucleotide primer for the detection of SNP TSC0056433
acggtagtggag

SEQ ID NO: 367587 - DNA, 12 bp, Artificial Sequence
  Oligonucleotide primer for the detection of SNP TSC0056433
acaacaataaaa

SEQ ID NO: 367588 - DNA, 12 bp, Artificial Sequence
  Oligonucleotide primer for the detection of SNP TSC0056433
acgacaataaaa

SEQ ID NO: 367589 - DNA, 12 bp, Artificial Sequence
  Oligonucleotide primer for the detection of SNP TSC0056433
agtttagtattc

SEQ ID NO: 367590 - DNA, 12 bp, Artificial Sequence
  Oligonucleotide primer for the detection of SNP TSC0056436
caccccaaaaca

SEQ ID NO: 367591 - DNA, 12 bp, Artificial Sequence
  Oligonucleotide primer for the detection of SNP TSC0056436
gttggtaaagta

SEQ ID NO: 367592 - DNA, 12 bp, Artificial Sequence
  Oligonucleotide primer for the detection of SNP TSC0008118
cctaatccaata

SEQ ID NO: 367593 - DNA, 12 bp, Artificial Sequence
  Oligonucleotide primer for the detection of SNP TSC0008118
gggttgttaatt

SEQ ID NO: 367594 - DNA, 12 bp, Artificial Sequence
  Oligonucleotide primer for the detection of SNP TSC0056438
tataaaatatct

SEQ ID NO: 367595 - DNA, 12 bp, Artificial Sequence
  Oligonucleotide primer for the detection of SNP TSC0056438
ttatgaattttg

SEQ ID NO: 367596 - DNA, 12 bp, Artificial Sequence
  Oligonucleotide primer for the detection of SNP TSC0056439
attactccacaa

SEQ ID NO: 367597 - DNA, 12 bp, Artificial Sequence
  Oligonucleotide primer for the detection of SNP TSC0056439
gaatttaagtag

SEQ ID NO: 367598 - DNA, 12 bp, Artificial Sequence
  Oligonucleotide primer for the detection of SNP TSC0056439
ggttgttttata

SEQ ID NO: 367599 - DNA, 12 bp, Artificial Sequence
  Oligonucleotide primer for the detection of SNP TSC0010020
aaaattaaactc

SEQ ID NO: 367600 - DNA, 12 bp, Artificial Sequence
  Oligonucleotide primer for the detection of SNP TSC0010021
acaccgaaaacc

SEQ ID NO: 367601 - DNA, 12 bp, Artificial Sequence
  Oligonucleotide primer for the detection of SNP TSC0010021
tagattttgtgg

SEQ ID NO: 367602 - DNA, 12 bp, Artificial Sequence
  Oligonucleotide primer for the detection of SNP TSC0010021
tagatttcgtgg

SEQ ID NO: 367603 - DNA, 12 bp, Artificial Sequence
  Oligonucleotide primer for the detection of SNP TSC0010021
caaatttcataa

SEQ ID NO: 367604 - DNA, 12 bp, Artificial Sequence
  Oligonucleotide primer for the detection of SNP TSC0010021
caaatttcgtaa

SEQ ID NO: 367605 - DNA, 12 bp, Artificial Sequence
  Oligonucleotide primer for the detection of SNP TSC0010021
atattgaaggtt

SEQ ID NO: 367606 - DNA, 12 bp, Artificial Sequence
  Oligonucleotide primer for the detection of SNP TSC0010021
atatcgaaggtt

SEQ ID NO: 367607 - DNA, 12 bp, Artificial Sequence
  Oligonucleotide primer for the detection of SNP TSC0056446
taaacaacatac

SEQ ID NO: 367608 - DNA, 12 bp, Artificial Sequence
  Oligonucleotide primer for the detection of SNP TSC0056446
taaacaacgtac

SEQ ID NO: 367609 - DNA, 12 bp, Artificial Sequence
  Oligonucleotide primer for the detection of SNP TSC0056448
tcatacatcctt

SEQ ID NO: 367610 - DNA, 12 bp, Artificial Sequence
  Oligonucleotide primer for the detection of SNP TSC0056449
aatatggaataa

SEQ ID NO: 367611 - DNA, 12 bp, Artificial Sequence
  Oligonucleotide primer for the detection of SNP TSC0056450
aatttaaactca

SEQ ID NO: 367612 - DNA, 12 bp, Artificial Sequence
  Oligonucleotide primer for the detection of SNP TSC0056450
ataaattgtggt

SEQ ID NO: 367613 - DNA, 12 bp, Artificial Sequence
  Oligonucleotide primer for the detection of SNP TSC0056450
ataaatcgtggt

SEQ ID NO: 367614 - DNA, 12 bp, Artificial Sequence
  Oligonucleotide primer for the detection of SNP TSC0056450
taaatcataaca

SEQ ID NO: 367615 - DNA, 12 bp, Artificial Sequence
  Oligonucleotide primer for the detection of SNP TSC0056450
taaatcgtaaca

SEQ ID NO: 367616 - DNA, 12 bp, Artificial Sequence
  Oligonucleotide primer for the detection of SNP TSC0056450
tgatttaaattt

SEQ ID NO: 367617 - DNA, 12 bp, Artificial Sequence
  Oligonucleotide primer for the detection of SNP TSC0056452
cataacacaata

SEQ ID NO: 367618 - DNA, 12 bp, Artificial Sequence
  Oligonucleotide primer for the detection of SNP TSC0056452
ggagtgaaattt

SEQ ID NO: 367619 - DNA, 12 bp, Artificial Sequence
  Oligonucleotide primer for the detection of SNP TSC0056452
ggagcgaaattt

SEQ ID NO: 367620 - DNA, 12 bp, Artificial Sequence
  Oligonucleotide primer for the detection of SNP TSC0056452
ttatggtataat

SEQ ID NO: 367621 - DNA, 12 bp, Artificial Sequence
  Oligonucleotide primer for the detection of SNP TSC0010291
tccaaatatatt

SEQ ID NO: 367622 - DNA, 12 bp, Artificial Sequence
  Oligonucleotide primer for the detection of SNP TSC0010291
gatattattttt

SEQ ID NO: 367623 - DNA, 12 bp, Artificial Sequence
  Oligonucleotide primer for the detection of SNP TSC0010291
cctaaaacacta

SEQ ID NO: 367624 - DNA, 12 bp, Artificial Sequence
  Oligonucleotide primer for the detection of SNP TSC0010291
tttaagtgtgtt

SEQ ID NO: 367625 - DNA, 12 bp, Artificial Sequence
  Oligonucleotide primer for the detection of SNP TSC0004985
tagttagtatta

SEQ ID NO: 367626 - DNA, 12 bp, Artificial Sequence
  Oligonucleotide primer for the detection of SNP TSC0004986
ttatggttatat

SEQ ID NO: 367627 - DNA, 12 bp, Artificial Sequence
  Oligonucleotide primer for the detection of SNP TSC0004986
ttatggttatac

SEQ ID NO: 367628 - DNA, 12 bp, Artificial Sequence
  Oligonucleotide primer for the detection of SNP TSC0004986
tctataaccata

SEQ ID NO: 367629 - DNA, 12 bp, Artificial Sequence
  Oligonucleotide primer for the detection of SNP TSC0005643
aaggattttagt

SEQ ID NO: 367630 - DNA, 12 bp, Artificial Sequence
  Oligonucleotide primer for the detection of SNP TSC0005643
aaaaaccccaat

SEQ ID NO: 367631 - DNA, 12 bp, Artificial Sequence
  Oligonucleotide primer for the detection of SNP TSC0005643
gtgattaaagag

SEQ ID NO: 367632 - DNA, 12 bp, Artificial Sequence
  Oligonucleotide primer for the detection of SNP TSC0056459
attttttgaata

SEQ ID NO: 367633 - DNA, 12 bp, Artificial Sequence
  Oligonucleotide primer for the detection of SNP TSC0056460
ctcataataata

SEQ ID NO: 367634 - DNA, 12 bp, Artificial Sequence
  Oligonucleotide primer for the detection of SNP TSC0056460
aagtaataaaat

SEQ ID NO: 367635 - DNA, 12 bp, Artificial Sequence
  Oligonucleotide primer for the detection of SNP TSC0056460
ttttatagtagt

SEQ ID NO: 367636 - DNA, 12 bp, Artificial Sequence
  Oligonucleotide primer for the detection of SNP TSC0007541
tcattataccct

SEQ ID NO: 367637 - DNA, 12 bp, Artificial Sequence
  Oligonucleotide primer for the detection of SNP TSC0007541
ctctcaaccata

SEQ ID NO: 367638 - DNA, 12 bp, Artificial Sequence
  Oligonucleotide primer for the detection of SNP TSC0007542
taaatcactttt

SEQ ID NO: 367639 - DNA, 12 bp, Artificial Sequence
  Oligonucleotide primer for the detection of SNP TSC0007542
tttaatattgta

SEQ ID NO: 367640 - DNA, 12 bp, Artificial Sequence
  Oligonucleotide primer for the detection of SNP TSC0004600
atttacaatata

SEQ ID NO: 367641 - DNA, 12 bp, Artificial Sequence
  Oligonucleotide primer for the detection of SNP TSC0004600
aaataatatgaa

SEQ ID NO: 367642 - DNA, 12 bp, Artificial Sequence
  Oligonucleotide primer for the detection of SNP TSC0004601
cataacaaatat

SEQ ID NO: 367643 - DNA, 12 bp, Artificial Sequence
  Oligonucleotide primer for the detection of SNP TSC0004601
atgttaatgtat

SEQ ID NO: 367644 - DNA, 12 bp, Artificial Sequence
  Oligonucleotide primer for the detection of SNP TSC0056461
tagaaaatgagt

SEQ ID NO: 367645 - DNA, 12 bp, Artificial Sequence
  Oligonucleotide primer for the detection of SNP TSC0056461
tagaaaacgagt

SEQ ID NO: 367646 - DNA, 12 bp, Artificial Sequence
  Oligonucleotide primer for the detection of SNP TSC0056461
caaaaaacaaat

SEQ ID NO: 367647 - DNA, 12 bp, Artificial Sequence
  Oligonucleotide primer for the detection of SNP TSC0056461
caaaaaacgaat

SEQ ID NO: 367648 - DNA, 12 bp, Artificial Sequence
  Oligonucleotide primer for the detection of SNP TSC0056462
ttatatcattat

SEQ ID NO: 367649 - DNA, 12 bp, Artificial Sequence
  Oligonucleotide primer for the detection of SNP TSC0056462
agtgatgtaaaa

SEQ ID NO: 367650 - DNA, 12 bp, Artificial Sequence
  Oligonucleotide primer for the detection of SNP TSC0056463
aaatatagaaaa

SEQ ID NO: 367651 - DNA, 12 bp, Artificial Sequence
  Oligonucleotide primer for the detection of SNP TSC0056465
taatttataatt

SEQ ID NO: 367652 - DNA, 12 bp, Artificial Sequence
  Oligonucleotide primer for the detection of SNP TSC0056465
gggagtgattta

SEQ ID NO: 367653 - DNA, 12 bp, Artificial Sequence
  Oligonucleotide primer for the detection of SNP TSC0056466
aattctacaaat

SEQ ID NO: 367654 - DNA, 12 bp, Artificial Sequence
  Oligonucleotide primer for the detection of SNP TSC0056466
agtagataataa

SEQ ID NO: 367655 - DNA, 12 bp, Artificial Sequence
  Oligonucleotide primer for the detection of SNP TSC0056469
aattacataaaa

SEQ ID NO: 367656 - DNA, 12 bp, Artificial Sequence
  Oligonucleotide primer for the detection of SNP TSC0056469
aaactaaccttt

SEQ ID NO: 367657 - DNA, 12 bp, Artificial Sequence
  Oligonucleotide primer for the detection of SNP TSC0056470
cactacctaccc

SEQ ID NO: 367658 - DNA, 12 bp, Artificial Sequence
  Oligonucleotide primer for the detection of SNP TSC0056471
ccaaccctaaaa

SEQ ID NO: 367659 - DNA, 12 bp, Artificial Sequence
  Oligonucleotide primer for the detection of SNP TSC0056471
cttaattcttcc

SEQ ID NO: 367660 - DNA, 12 bp, Artificial Sequence
  Oligonucleotide primer for the detection of SNP TSC0056471
ttagttttgagg

SEQ ID NO: 367661 - DNA, 12 bp, Artificial Sequence
  Oligonucleotide primer for the detection of SNP TSC0056472
ctataaataatc

SEQ ID NO: 367662 - DNA, 12 bp, Artificial Sequence
  Oligonucleotide primer for the detection of SNP TSC0056472
aattggtaggta

SEQ ID NO: 367663 - DNA, 12 bp, Artificial Sequence
  Oligonucleotide primer for the detection of SNP TSC0056473
cactactatctc

SEQ ID NO: 367664 - DNA, 12 bp, Artificial Sequence
  Oligonucleotide primer for the detection of SNP TSC0056473
cgctactatctc

SEQ ID NO: 367665 - DNA, 12 bp, Artificial Sequence
  Oligonucleotide primer for the detection of SNP TSC0056474
aattaatccatt

SEQ ID NO: 367666 - DNA, 12 bp, Artificial Sequence
  Oligonucleotide primer for the detection of SNP TSC0056474
aataagaatagg

SEQ ID NO: 367667 - DNA, 12 bp, Artificial Sequence
  Oligonucleotide primer for the detection of SNP TSC0056475
tacattcaaatt

SEQ ID NO: 367668 - DNA, 12 bp, Artificial Sequence
  Oligonucleotide primer for the detection of SNP TSC0056475
tacgttcaaatt

SEQ ID NO: 367669 - DNA, 12 bp, Artificial Sequence
  Oligonucleotide primer for the detection of SNP TSC0056475
ggaaaaatagag

SEQ ID NO: 367670 - DNA, 12 bp, Artificial Sequence
  Oligonucleotide primer for the detection of SNP TSC0004864
agaattgagtta

SEQ ID NO: 367671 - DNA, 12 bp, Artificial Sequence
  Oligonucleotide primer for the detection of SNP TSC0004865
taacaattatat

SEQ ID NO: 367672 - DNA, 12 bp, Artificial Sequence
  Oligonucleotide primer for the detection of SNP TSC0004865
tacataatctaa

SEQ ID NO: 367673 - DNA, 12 bp, Artificial Sequence
  Oligonucleotide primer for the detection of SNP TSC0004865
taataattatat

SEQ ID NO: 367674 - DNA, 12 bp, Artificial Sequence
  Oligonucleotide primer for the detection of SNP TSC0004884
taataagggagg

SEQ ID NO: 367675 - DNA, 12 bp, Artificial Sequence
  Oligonucleotide primer for the detection of SNP TSC0056480
aaaaatccatcc

SEQ ID NO: 367676 - DNA, 12 bp, Artificial Sequence
  Oligonucleotide primer for the detection of SNP TSC0007621
gtaataaagatt

SEQ ID NO: 367677 - DNA, 12 bp, Artificial Sequence
  Oligonucleotide primer for the detection of SNP TSC0007621
atagtttgtgga

SEQ ID NO: 367678 - DNA, 12 bp, Artificial Sequence
  Oligonucleotide primer for the detection of SNP TSC0056481
atttaggtaata

SEQ ID NO: 367679 - DNA, 12 bp, Artificial Sequence
  Oligonucleotide primer for the detection of SNP TSC0005488
atctctaaatta

SEQ ID NO: 367680 - DNA, 12 bp, Artificial Sequence
  Oligonucleotide primer for the detection of SNP TSC0005488
tttaaatataat

SEQ ID NO: 367681 - DNA, 12 bp, Artificial Sequence
  Oligonucleotide primer for the detection of SNP TSC0005488
cccaaatacaac

SEQ ID NO: 367682 - DNA, 12 bp, Artificial Sequence
  Oligonucleotide primer for the detection of SNP TSC0005585
ttcccccaaatc

SEQ ID NO: 367683 - DNA, 12 bp, Artificial Sequence
  Oligonucleotide primer for the detection of SNP TSC0005585
ttcccccgaatc

SEQ ID NO: 367684 - DNA, 12 bp, Artificial Sequence
  Oligonucleotide primer for the detection of SNP TSC0005585
gggagaagtatg

SEQ ID NO: 367685 - DNA, 12 bp, Artificial Sequence
  Oligonucleotide primer for the detection of SNP TSC0005585
ttttttcgaatt

SEQ ID NO: 367686 - DNA, 12 bp, Artificial Sequence
  Oligonucleotide primer for the detection of SNP TSC0056483
atttaaaacatc

SEQ ID NO: 367687 - DNA, 12 bp, Artificial Sequence
  Oligonucleotide primer for the detection of SNP TSC0056484
aaaatatataac

SEQ ID NO: 367688 - DNA, 12 bp, Artificial Sequence
  Oligonucleotide primer for the detection of SNP TSC0056484
gtgaaaattgtg

SEQ ID NO: 367689 - DNA, 12 bp, Artificial Sequence
  Oligonucleotide primer for the detection of SNP TSC0056485
atcaaataaatt

SEQ ID NO: 367690 - DNA, 12 bp, Artificial Sequence
  Oligonucleotide primer for the detection of SNP TSC0056485
aataagtggtta

SEQ ID NO: 367691 - DNA, 12 bp, Artificial Sequence
  Oligonucleotide primer for the detection of SNP TSC0056486
tatattatatga

SEQ ID NO: 367692 - DNA, 12 bp, Artificial Sequence
  Oligonucleotide primer for the detection of SNP TSC0056487
tgtattatttgg

SEQ ID NO: 367693 - DNA, 12 bp, Artificial Sequence
  Oligonucleotide primer for the detection of SNP TSC0056489
taataaactata

SEQ ID NO: 367694 - DNA, 12 bp, Artificial Sequence
  Oligonucleotide primer for the detection of SNP TSC0056489
attgtatatttt

SEQ ID NO: 367695 - DNA, 12 bp, Artificial Sequence
  Oligonucleotide primer for the detection of SNP TSC0056489
acccactacata

SEQ ID NO: 367696 - DNA, 12 bp, Artificial Sequence
  Oligonucleotide primer for the detection of SNP TSC0056489
agtaggttgtac

SEQ ID NO: 367697 - DNA, 12 bp, Artificial Sequence
  Oligonucleotide primer for the detection of SNP TSC0056490
aaggaaattgta

SEQ ID NO: 367698 - DNA, 12 bp, Artificial Sequence
  Oligonucleotide primer for the detection of SNP TSC0056490
gaaatataagat

SEQ ID NO: 367699 - DNA, 12 bp, Artificial Sequence
  Oligonucleotide primer for the detection of SNP TSC0056492
acacaccaccca

SEQ ID NO: 367700 - DNA, 12 bp, Artificial Sequence
  Oligonucleotide primer for the detection of SNP TSC0056492
acacaccacccg

SEQ ID NO: 367701 - DNA, 12 bp, Artificial Sequence
  Oligonucleotide primer for the detection of SNP TSC0056492
tgtgattgttat

SEQ ID NO: 367702 - DNA, 12 bp, Artificial Sequence
  Oligonucleotide primer for the detection of SNP TSC0056492
tatattatttgt

SEQ ID NO: 367703 - DNA, 12 bp, Artificial Sequence
  Oligonucleotide primer for the detection of SNP TSC0056492
tatattattcgt

SEQ ID NO: 367704 - DNA, 12 bp, Artificial Sequence
  Oligonucleotide primer for the detection of SNP TSC0056494
aatctaaataac

SEQ ID NO: 367705 - DNA, 12 bp, Artificial Sequence
  Oligonucleotide primer for the detection of SNP TSC0056494
aatagggagtaa

SEQ ID NO: 367706 - DNA, 12 bp, Artificial Sequence
  Oligonucleotide primer for the detection of SNP TSC0056498
aaaattattcct

SEQ ID NO: 367707 - DNA, 12 bp, Artificial Sequence
  Oligonucleotide primer for the detection of SNP TSC0056500
gatattaaggga

SEQ ID NO: 367708 - DNA, 12 bp, Artificial Sequence
  Oligonucleotide primer for the detection of SNP TSC0056500
atatatatagtt

SEQ ID NO: 367709 - DNA, 12 bp, Artificial Sequence
  Oligonucleotide primer for the detection of SNP TSC0056500
atatatatagtc

SEQ ID NO: 367710 - DNA, 12 bp, Artificial Sequence
  Oligonucleotide primer for the detection of SNP TSC0056501
atcacctactcc

SEQ ID NO: 367711 - DNA, 12 bp, Artificial Sequence
  Oligonucleotide primer for the detection of SNP TSC0056501
aggagtaggaga

SEQ ID NO: 367712 - DNA, 12 bp, Artificial Sequence
  Oligonucleotide primer for the detection of SNP TSC0056502
cttctaaatatc

SEQ ID NO: 367713 - DNA, 12 bp, Artificial Sequence
  Oligonucleotide primer for the detection of SNP TSC0056506
ataaactattta

SEQ ID NO: 367714 - DNA, 12 bp, Artificial Sequence
  Oligonucleotide primer for the detection of SNP TSC0056506
tgtgtagaaaat

SEQ ID NO: 367715 - DNA, 12 bp, Artificial Sequence
  Oligonucleotide primer for the detection of SNP TSC0056506
cgtgtagaaaat

SEQ ID NO: 367716 - DNA, 12 bp, Artificial Sequence
  Oligonucleotide primer for the detection of SNP TSC0056506
cgtacaaaaaat

SEQ ID NO: 367717 - DNA, 12 bp, Artificial Sequence
  Oligonucleotide primer for the detection of SNP TSC0056506
gattgtttattt

SEQ ID NO: 367718 - DNA, 12 bp, Artificial Sequence
  Oligonucleotide primer for the detection of SNP TSC0056507
ctacttataact

SEQ ID NO: 367719 - DNA, 12 bp, Artificial Sequence
  Oligonucleotide primer for the detection of SNP TSC0056511
acttaattaacc

SEQ ID NO: 367720 - DNA, 12 bp, Artificial Sequence
  Oligonucleotide primer for the detection of SNP TSC0056511
gattttatattt

SEQ ID NO: 367721 - DNA, 12 bp, Artificial Sequence
  Oligonucleotide primer for the detection of SNP TSC0056511
atttcacatcca

SEQ ID NO: 367722 - DNA, 12 bp, Artificial Sequence
  Oligonucleotide primer for the detection of SNP TSC0056512
atataagagaaa

SEQ ID NO: 367723 - DNA, 12 bp, Artificial Sequence
  Oligonucleotide primer for the detection of SNP TSC0056512
taggatataaag

SEQ ID NO: 367724 - DNA, 12 bp, Artificial Sequence
  Oligonucleotide primer for the detection of SNP TSC0056514
aggaaggtagag

SEQ ID NO: 367725 - DNA, 12 bp, Artificial Sequence
  Oligonucleotide primer for the detection of SNP TSC0056516
aacactaattat

SEQ ID NO: 367726 - DNA, 12 bp, Artificial Sequence
  Oligonucleotide primer for the detection of SNP TSC0056516
tatgtatatttg

SEQ ID NO: 367727 - DNA, 12 bp, Artificial Sequence
  Oligonucleotide primer for the detection of SNP TSC0056519
actttaattttc

SEQ ID NO: 367728 - DNA, 12 bp, Artificial Sequence
  Oligonucleotide primer for the detection of SNP TSC0056519
tatttgttgatg

SEQ ID NO: 367729 - DNA, 12 bp, Artificial Sequence
  Oligonucleotide primer for the detection of SNP TSC0056520
ataatctaaact

SEQ ID NO: 367730 - DNA, 12 bp, Artificial Sequence
  Oligonucleotide primer for the detection of SNP TSC0056520
aataacattcca

SEQ ID NO: 367731 - DNA, 12 bp, Artificial Sequence
  Oligonucleotide primer for the detection of SNP TSC0056520
atagtttgaatt

SEQ ID NO: 367732 - DNA, 12 bp, Artificial Sequence
  Oligonucleotide primer for the detection of SNP TSC0056521
caacctaaaacc

SEQ ID NO: 367733 - DNA, 12 bp, Artificial Sequence
  Oligonucleotide primer for the detection of SNP TSC0056521
ataagtagtata

SEQ ID NO: 367734 - DNA, 12 bp, Artificial Sequence
  Oligonucleotide primer for the detection of SNP TSC0056523
tctctaaccata

SEQ ID NO: 367735 - DNA, 12 bp, Artificial Sequence
  Oligonucleotide primer for the detection of SNP TSC0056523
atggataaatat

SEQ ID NO: 367736 - DNA, 12 bp, Artificial Sequence
  Oligonucleotide primer for the detection of SNP TSC0056523
ttttgattatat

SEQ ID NO: 367737 - DNA, 12 bp, Artificial Sequence
  Oligonucleotide primer for the detection of SNP TSC0056529
acctcaacctct

SEQ ID NO: 367738 - DNA, 12 bp, Artificial Sequence
  Oligonucleotide primer for the detection of SNP TSC0056529
aactaccaacta

SEQ ID NO: 367739 - DNA, 12 bp, Artificial Sequence
  Oligonucleotide primer for the detection of SNP TSC0056530
cctcctaaattc

SEQ ID NO: 367740 - DNA, 12 bp, Artificial Sequence
  Oligonucleotide primer for the detection of SNP TSC0056531
caaaaacatata

SEQ ID NO: 367741 - DNA, 12 bp, Artificial Sequence
  Oligonucleotide primer for the detection of SNP TSC0056531
tattttaagaat

SEQ ID NO: 367742 - DNA, 12 bp, Artificial Sequence
  Oligonucleotide primer for the detection of SNP TSC0056531
taccctaaaaat

SEQ ID NO: 367743 - DNA, 12 bp, Artificial Sequence
  Oligonucleotide primer for the detection of SNP TSC0056532
aaatattaacaa

SEQ ID NO: 367744 - DNA, 12 bp, Artificial Sequence
  Oligonucleotide primer for the detection of SNP TSC0056532
cttttttaaatt

SEQ ID NO: 367745 - DNA, 12 bp, Artificial Sequence
  Oligonucleotide primer for the detection of SNP TSC0056532
taaatattgata

SEQ ID NO: 367746 - DNA, 12 bp, Artificial Sequence
  Oligonucleotide primer for the detection of SNP TSC0056533
ttaactccaatt

SEQ ID NO: 367747 - DNA, 12 bp, Artificial Sequence
  Oligonucleotide primer for the detection of SNP TSC0056534
aataaacacaca

SEQ ID NO: 367748 - DNA, 12 bp, Artificial Sequence
  Oligonucleotide primer for the detection of SNP TSC0056534
gttgattgtatt

SEQ ID NO: 367749 - DNA, 12 bp, Artificial Sequence
  Oligonucleotide primer for the detection of SNP TSC0056534
aataggtatata

SEQ ID NO: 367750 - DNA, 12 bp, Artificial Sequence
  Oligonucleotide primer for the detection of SNP TSC0056535
acaccaaacaac

SEQ ID NO: 367751 - DNA, 12 bp, Artificial Sequence
  Oligonucleotide primer for the detection of SNP TSC0056536
ctatcttacaaa

SEQ ID NO: 367752 - DNA, 12 bp, Artificial Sequence
  Oligonucleotide primer for the detection of SNP TSC0056536
atttaccccaat

SEQ ID NO: 367753 - DNA, 12 bp, Artificial Sequence
  Oligonucleotide primer for the detection of SNP TSC0056537
ttaaaccactca

SEQ ID NO: 367754 - DNA, 12 bp, Artificial Sequence
  Oligonucleotide primer for the detection of SNP TSC0056537
tttcctttcttc

SEQ ID NO: 367755 - DNA, 12 bp, Artificial Sequence
  Oligonucleotide primer for the detection of SNP TSC0056537
tgagttatttat

SEQ ID NO: 367756 - DNA, 12 bp, Artificial Sequence
  Oligonucleotide primer for the detection of SNP TSC0056537
tgagttatttac

SEQ ID NO: 367757 - DNA, 12 bp, Artificial Sequence
  Oligonucleotide primer for the detection of SNP TSC0056539
atggtgtgagtt

SEQ ID NO: 367758 - DNA, 12 bp, Artificial Sequence
  Oligonucleotide primer for the detection of SNP TSC0056539
ataatataaact

SEQ ID NO: 367759 - DNA, 12 bp, Artificial Sequence
  Oligonucleotide primer for the detection of SNP TSC0056539
gagtaagtgaga

SEQ ID NO: 367760 - DNA, 12 bp, Artificial Sequence
  Oligonucleotide primer for the detection of SNP TSC0056543
attatacccact

SEQ ID NO: 367761 - DNA, 12 bp, Artificial Sequence
  Oligonucleotide primer for the detection of SNP TSC0056543
ttttgggtagaa

SEQ ID NO: 367762 - DNA, 12 bp, Artificial Sequence
  Oligonucleotide primer for the detection of SNP TSC0056549
tttaaaaactta

SEQ ID NO: 367763 - DNA, 12 bp, Artificial Sequence
  Oligonucleotide primer for the detection of SNP TSC0056549
atttagaggttt

SEQ ID NO: 367764 - DNA, 12 bp, Artificial Sequence
  Oligonucleotide primer for the detection of SNP TSC0056550
caaaatttctca

SEQ ID NO: 367765 - DNA, 12 bp, Artificial Sequence
  Oligonucleotide primer for the detection of SNP TSC0056550
taaacctaaatc

SEQ ID NO: 367766 - DNA, 12 bp, Artificial Sequence
  Oligonucleotide primer for the detection of SNP TSC0056551
atgtatttgttt

SEQ ID NO: 367767 - DNA, 12 bp, Artificial Sequence
  Oligonucleotide primer for the detection of SNP TSC0056551
atacatttatct

SEQ ID NO: 367768 - DNA, 12 bp, Artificial Sequence
  Oligonucleotide primer for the detection of SNP TSC0056553
tagataaattta

SEQ ID NO: 367769 - DNA, 12 bp, Artificial Sequence
  Oligonucleotide primer for the detection of SNP TSC0056553
caaataaattta

SEQ ID NO: 367770 - DNA, 12 bp, Artificial Sequence
  Oligonucleotide primer for the detection of SNP TSC0056554
aaactctttaat

SEQ ID NO: 367771 - DNA, 12 bp, Artificial Sequence
  Oligonucleotide primer for the detection of SNP TSC0056554
tttatcttctac

SEQ ID NO: 367772 - DNA, 12 bp, Artificial Sequence
  Oligonucleotide primer for the detection of SNP TSC0056554
gggttttttggt

SEQ ID NO: 367773 - DNA, 12 bp, Artificial Sequence
  Oligonucleotide primer for the detection of SNP TSC0056555
ggtttttgaaat

SEQ ID NO: 367774 - DNA, 12 bp, Artificial Sequence
  Oligonucleotide primer for the detection of SNP TSC0056555
tgagtagaagat

SEQ ID NO: 367775 - DNA, 12 bp, Artificial Sequence
  Oligonucleotide primer for the detection of SNP TSC0056556
actaaataaact

SEQ ID NO: 367776 - DNA, 12 bp, Artificial Sequence
  Oligonucleotide primer for the detection of SNP TSC0056557
catatcaaacaa

SEQ ID NO: 367777 - DNA, 12 bp, Artificial Sequence
  Oligonucleotide primer for the detection of SNP TSC0056557
ttattttgtatt

SEQ ID NO: 367778 - DNA, 12 bp, Artificial Sequence
  Oligonucleotide primer for the detection of SNP TSC0056557
ttattttgtatc

SEQ ID NO: 367779 - DNA, 12 bp, Artificial Sequence
  Oligonucleotide primer for the detection of SNP TSC0056557
ttattttatatc

SEQ ID NO: 367780 - DNA, 12 bp, Artificial Sequence
  Oligonucleotide primer for the detection of SNP TSC0056557
tatattaaataa

SEQ ID NO: 367781 - DNA, 12 bp, Artificial Sequence
  Oligonucleotide primer for the detection of SNP TSC0056562
aagatggtgaag

SEQ ID NO: 367782 - DNA, 12 bp, Artificial Sequence
  Oligonucleotide primer for the detection of SNP TSC0056563
ctaccttaatta

SEQ ID NO: 367783 - DNA, 12 bp, Artificial Sequence
  Oligonucleotide primer for the detection of SNP TSC0056563
ttgttttgatta

SEQ ID NO: 367784 - DNA, 12 bp, Artificial Sequence
  Oligonucleotide primer for the detection of SNP TSC0056564
ggttttttaaaa

SEQ ID NO: 367785 - DNA, 12 bp, Artificial Sequence
  Oligonucleotide primer for the detection of SNP TSC0056565
aatatctattat

SEQ ID NO: 367786 - DNA, 12 bp, Artificial Sequence
  Oligonucleotide primer for the detection of SNP TSC0056565
tttaagtatggg

SEQ ID NO: 367787 - DNA, 12 bp, Artificial Sequence
  Oligonucleotide primer for the detection of SNP TSC0056566
tgtaaaataatt

SEQ ID NO: 367788 - DNA, 12 bp, Artificial Sequence
  Oligonucleotide primer for the detection of SNP TSC0056566
atacaaaataac

SEQ ID NO: 367789 - DNA, 12 bp, Artificial Sequence
  Oligonucleotide primer for the detection of SNP TSC0056571
aacacttccact

SEQ ID NO: 367790 - DNA, 12 bp, Artificial Sequence
  Oligonucleotide primer for the detection of SNP TSC0056571
ttatttttagtt

SEQ ID NO: 367791 - DNA, 12 bp, Artificial Sequence
  Oligonucleotide primer for the detection of SNP TSC0056571
ccactttcaact

SEQ ID NO: 367792 - DNA, 12 bp, Artificial Sequence
  Oligonucleotide primer for the detection of SNP TSC0056572
tcaattacattt

SEQ ID NO: 367793 - DNA, 12 bp, Artificial Sequence
  Oligonucleotide primer for the detection of SNP TSC0056572
tcaattacgttt

SEQ ID NO: 367794 - DNA, 12 bp, Artificial Sequence
  Oligonucleotide primer for the detection of SNP TSC0056572
ttgtaaattata

SEQ ID NO: 367795 - DNA, 12 bp, Artificial Sequence
  Oligonucleotide primer for the detection of SNP TSC0056573
ggtattatttat

SEQ ID NO: 367796 - DNA, 12 bp, Artificial Sequence
  Oligonucleotide primer for the detection of SNP TSC0056573
taacactatcca

SEQ ID NO: 367797 - DNA, 12 bp, Artificial Sequence
  Oligonucleotide primer for the detection of SNP TSC0056573
taagaagtttgt

SEQ ID NO: 367798 - DNA, 12 bp, Artificial Sequence
  Oligonucleotide primer for the detection of SNP TSC0056573
taagaagtttgc

SEQ ID NO: 367799 - DNA, 12 bp, Artificial Sequence
  Oligonucleotide primer for the detection of SNP TSC0056576
aacacaaaaatt

SEQ ID NO: 367800 - DNA, 12 bp, Artificial Sequence
  Oligonucleotide primer for the detection of SNP TSC0056576
cgtttattatag

SEQ ID NO: 367801 - DNA, 12 bp, Artificial Sequence
  Oligonucleotide primer for the detection of SNP TSC0056577
aactacaaaatc

SEQ ID NO: 367802 - DNA, 12 bp, Artificial Sequence
  Oligonucleotide primer for the detection of SNP TSC0056577
gtttttttgaaa

SEQ ID NO: 367803 - DNA, 12 bp, Artificial Sequence
  Oligonucleotide primer for the detection of SNP TSC0056578
caaatctcttat

SEQ ID NO: 367804 - DNA, 12 bp, Artificial Sequence
  Oligonucleotide primer for the detection of SNP TSC0056578
aatagagtaata

SEQ ID NO: 367805 - DNA, 12 bp, Artificial Sequence
  Oligonucleotide primer for the detection of SNP TSC0056579
acctaactacat

SEQ ID NO: 367806 - DNA, 12 bp, Artificial Sequence
  Oligonucleotide primer for the detection of SNP TSC0056580
tcccacaattca

SEQ ID NO: 367807 - DNA, 12 bp, Artificial Sequence
  Oligonucleotide primer for the detection of SNP TSC0056584
ataatcttttaa

SEQ ID NO: 367808 - DNA, 12 bp, Artificial Sequence
  Oligonucleotide primer for the detection of SNP TSC0056584
ttagtagaaaat

SEQ ID NO: 367809 - DNA, 12 bp, Artificial Sequence
  Oligonucleotide primer for the detection of SNP TSC0056585
attacactccat

SEQ ID NO: 367810 - DNA, 12 bp, Artificial Sequence
  Oligonucleotide primer for the detection of SNP TSC0056585
attacgctccat

SEQ ID NO: 367811 - DNA, 12 bp, Artificial Sequence
  Oligonucleotide primer for the detection of SNP TSC0056585
tagtttagtaag

SEQ ID NO: 367812 - DNA, 12 bp, Artificial Sequence
  Oligonucleotide primer for the detection of SNP TSC0056586
actaaaactacg

SEQ ID NO: 367813 - DNA, 12 bp, Artificial Sequence
  Oligonucleotide primer for the detection of SNP TSC0056586
ggttgaagtgta

SEQ ID NO: 367814 - DNA, 12 bp, Artificial Sequence
  Oligonucleotide primer for the detection of SNP TSC0056587
caaacataaact

SEQ ID NO: 367815 - DNA, 12 bp, Artificial Sequence
  Oligonucleotide primer for the detection of SNP TSC0056587
tagttatgtttg

SEQ ID NO: 367816 - DNA, 12 bp, Artificial Sequence
  Oligonucleotide primer for the detection of SNP TSC0056588
ggttaggttgta

SEQ ID NO: 367817 - DNA, 12 bp, Artificial Sequence
  Oligonucleotide primer for the detection of SNP TSC0056589
tttctccacaac

SEQ ID NO: 367818 - DNA, 12 bp, Artificial Sequence
  Oligonucleotide primer for the detection of SNP TSC0056589
atataactacta

SEQ ID NO: 367819 - DNA, 12 bp, Artificial Sequence
  Oligonucleotide primer for the detection of SNP TSC0056590
acttttctccac

SEQ ID NO: 367820 - DNA, 12 bp, Artificial Sequence
  Oligonucleotide primer for the detection of SNP TSC0056590
ataattattacg

SEQ ID NO: 367821 - DNA, 12 bp, Artificial Sequence
  Oligonucleotide primer for the detection of SNP TSC0000348
ctatttttttat

SEQ ID NO: 367822 - DNA, 12 bp, Artificial Sequence
  Oligonucleotide primer for the detection of SNP TSC0000349
attgtaagttaa

SEQ ID NO: 367823 - DNA, 12 bp, Artificial Sequence
  Oligonucleotide primer for the detection of SNP TSC0056591
aattccctcaaa

SEQ ID NO: 367824 - DNA, 12 bp, Artificial Sequence
  Oligonucleotide primer for the detection of SNP TSC0056591
gtattgtatgtt

SEQ ID NO: 367825 - DNA, 12 bp, Artificial Sequence
  Oligonucleotide primer for the detection of SNP TSC0056591
cattatatacca

SEQ ID NO: 367826 - DNA, 12 bp, Artificial Sequence
  Oligonucleotide primer for the detection of SNP TSC0056592
ataattataaac

SEQ ID NO: 367827 - DNA, 12 bp, Artificial Sequence
  Oligonucleotide primer for the detection of SNP TSC0056592
ttgggttgaatg

SEQ ID NO: 367828 - DNA, 12 bp, Artificial Sequence
  Oligonucleotide primer for the detection of SNP TSC0056595
taaacaatactc

SEQ ID NO: 367829 - DNA, 12 bp, Artificial Sequence
  Oligonucleotide primer for the detection of SNP TSC0056595
aaatagtaaata

SEQ ID NO: 367830 - DNA, 12 bp, Artificial Sequence
  Oligonucleotide primer for the detection of SNP TSC0056596
tcaaatccttat

SEQ ID NO: 367831 - DNA, 12 bp, Artificial Sequence
  Oligonucleotide primer for the detection of SNP TSC0056596
ttggttttaata

SEQ ID NO: 367832 - DNA, 12 bp, Artificial Sequence
  Oligonucleotide primer for the detection of SNP TSC0056597
ccataaaaatac

SEQ ID NO: 367833 - DNA, 12 bp, Artificial Sequence
  Oligonucleotide primer for the detection of SNP TSC0056597
ttttaatttttg

SEQ ID NO: 367834 - DNA, 12 bp, Artificial Sequence
  Oligonucleotide primer for the detection of SNP TSC0056597
cctcaacctcta

SEQ ID NO: 367835 - DNA, 12 bp, Artificial Sequence
  Oligonucleotide primer for the detection of SNP TSC0056597
ttatagagatgt

SEQ ID NO: 367836 - DNA, 12 bp, Artificial Sequence
  Oligonucleotide primer for the detection of SNP TSC0008376
ttaaattacata

SEQ ID NO: 367837 - DNA, 12 bp, Artificial Sequence
  Oligonucleotide primer for the detection of SNP TSC0008376
ggatttttatat

SEQ ID NO: 367838 - DNA, 12 bp, Artificial Sequence
  Oligonucleotide primer for the detection of SNP TSC0008376
aattttcacata

SEQ ID NO: 367839 - DNA, 12 bp, Artificial Sequence
  Oligonucleotide primer for the detection of SNP TSC0056599
tgtatgtttaga

SEQ ID NO: 367840 - DNA, 12 bp, Artificial Sequence
  Oligonucleotide primer for the detection of SNP TSC0056600
aaatttcctaca

SEQ ID NO: 367841 - DNA, 12 bp, Artificial Sequence
  Oligonucleotide primer for the detection of SNP TSC0056600
aattagtttatt

SEQ ID NO: 367842 - DNA, 12 bp, Artificial Sequence
  Oligonucleotide primer for the detection of SNP TSC0056600
aactaattcact

SEQ ID NO: 367843 - DNA, 12 bp, Artificial Sequence
  Oligonucleotide primer for the detection of SNP TSC0056601
tcactaattaat

SEQ ID NO: 367844 - DNA, 12 bp, Artificial Sequence
  Oligonucleotide primer for the detection of SNP TSC0056601
ttggggtggttg

SEQ ID NO: 367845 - DNA, 12 bp, Artificial Sequence
  Oligonucleotide primer for the detection of SNP TSC0056602
ggtgtgttattt

SEQ ID NO: 367846 - DNA, 12 bp, Artificial Sequence
  Oligonucleotide primer for the detection of SNP TSC0056602
aatataccatcc

SEQ ID NO: 367847 - DNA, 12 bp, Artificial Sequence
  Oligonucleotide primer for the detection of SNP TSC0056603
aggatttgagag

SEQ ID NO: 367848 - DNA, 12 bp, Artificial Sequence
  Oligonucleotide primer for the detection of SNP TSC0056603
aggattcgagag

SEQ ID NO: 367849 - DNA, 12 bp, Artificial Sequence
  Oligonucleotide primer for the detection of SNP TSC0056604
tttggaagataa

SEQ ID NO: 367850 - DNA, 12 bp, Artificial Sequence
  Oligonucleotide primer for the detection of SNP TSC0056604
gaggatattatt

SEQ ID NO: 367851 - DNA, 12 bp, Artificial Sequence
  Oligonucleotide primer for the detection of SNP TSC0000389
tatattcttaac

SEQ ID NO: 367852 - DNA, 12 bp, Artificial Sequence
  Oligonucleotide primer for the detection of SNP TSC0000389
tttttaataaag

SEQ ID NO: 367853 - DNA, 12 bp, Artificial Sequence
  Oligonucleotide primer for the detection of SNP TSC0056610
tttaccttaatt

SEQ ID NO: 367854 - DNA, 12 bp, Artificial Sequence
  Oligonucleotide primer for the detection of SNP TSC0056610
tagataataata

SEQ ID NO: 367855 - DNA, 12 bp, Artificial Sequence
  Oligonucleotide primer for the detection of SNP TSC0056612
ttccctataact

SEQ ID NO: 367856 - DNA, 12 bp, Artificial Sequence
  Oligonucleotide primer for the detection of SNP TSC0056612
aggatggtttta

SEQ ID NO: 367857 - DNA, 12 bp, Artificial Sequence
  Oligonucleotide primer for the detection of SNP TSC0056612
aaaataattcta

SEQ ID NO: 367858 - DNA, 12 bp, Artificial Sequence
  Oligonucleotide primer for the detection of SNP TSC0056613
caacccatacat

SEQ ID NO: 367859 - DNA, 12 bp, Artificial Sequence
  Oligonucleotide primer for the detection of SNP TSC0056613
tatataaatggg

SEQ ID NO: 367860 - DNA, 12 bp, Artificial Sequence
  Oligonucleotide primer for the detection of SNP TSC0056617
ctaaaacttatc

SEQ ID NO: 367861 - DNA, 12 bp, Artificial Sequence
  Oligonucleotide primer for the detection of SNP TSC0056617
tttatagaagga

SEQ ID NO: 367862 - DNA, 12 bp, Artificial Sequence
  Oligonucleotide primer for the detection of SNP TSC0056620
tataattaaaat

SEQ ID NO: 367863 - DNA, 12 bp, Artificial Sequence
  Oligonucleotide primer for the detection of SNP TSC0056620
aaattcttatta

SEQ ID NO: 367864 - DNA, 12 bp, Artificial Sequence
  Oligonucleotide primer for the detection of SNP TSC0056620
tgtgattgagat

SEQ ID NO: 367865 - DNA, 12 bp, Artificial Sequence
  Oligonucleotide primer for the detection of SNP TSC0056623
ataataaattca

SEQ ID NO: 367866 - DNA, 12 bp, Artificial Sequence
  Oligonucleotide primer for the detection of SNP TSC0056623
tatatttggaat

SEQ ID NO: 367867 - DNA, 12 bp, Artificial Sequence
  Oligonucleotide primer for the detection of SNP TSC0056623
catacttaaaac

SEQ ID NO: 367868 - DNA, 12 bp, Artificial Sequence
  Oligonucleotide primer for the detection of SNP TSC0056623
gtgatgagttta

SEQ ID NO: 367869 - DNA, 12 bp, Artificial Sequence
  Oligonucleotide primer for the detection of SNP TSC0056627
ttcatctaccta

SEQ ID NO: 367870 - DNA, 12 bp, Artificial Sequence
  Oligonucleotide primer for the detection of SNP TSC0056627
ttttatgtaaat

SEQ ID NO: 367871 - DNA, 12 bp, Artificial Sequence
  Oligonucleotide primer for the detection of SNP TSC0056627
tcccatataaat

SEQ ID NO: 367872 - DNA, 12 bp, Artificial Sequence
  Oligonucleotide primer for the detection of SNP TSC0056630
ctaaatttaatt

SEQ ID NO: 367873 - DNA, 12 bp, Artificial Sequence
  Oligonucleotide primer for the detection of SNP TSC0056630
tggtagagataa

SEQ ID NO: 367874 - DNA, 12 bp, Artificial Sequence
  Oligonucleotide primer for the detection of SNP TSC0056631
ttatattactct

SEQ ID NO: 367875 - DNA, 12 bp, Artificial Sequence
  Oligonucleotide primer for the detection of SNP TSC0056631
tgggaaaggaga

SEQ ID NO: 367876 - DNA, 12 bp, Artificial Sequence
  Oligonucleotide primer for the detection of SNP TSC0056631
cgggaaaggaga

SEQ ID NO: 367877 - DNA, 12 bp, Artificial Sequence
  Oligonucleotide primer for the detection of SNP TSC0056632
caaccacaaact

SEQ ID NO: 367878 - DNA, 12 bp, Artificial Sequence
  Oligonucleotide primer for the detection of SNP TSC0056632
gttgatagtgta

SEQ ID NO: 367879 - DNA, 12 bp, Artificial Sequence
  Oligonucleotide primer for the detection of SNP TSC0056633
ccctatactttt

SEQ ID NO: 367880 - DNA, 12 bp, Artificial Sequence
  Oligonucleotide primer for the detection of SNP TSC0056633
atgtgaggaaga

SEQ ID NO: 367881 - DNA, 12 bp, Artificial Sequence
  Oligonucleotide primer for the detection of SNP TSC0056634
ctaaccccaaat

SEQ ID NO: 367882 - DNA, 12 bp, Artificial Sequence
  Oligonucleotide primer for the detection of SNP TSC0056634
gtgattagttgg

SEQ ID NO: 367883 - DNA, 12 bp, Artificial Sequence
  Oligonucleotide primer for the detection of SNP TSC0056635
tttatatatatc

SEQ ID NO: 367884 - DNA, 12 bp, Artificial Sequence
  Oligonucleotide primer for the detection of SNP TSC0056636
tcttattttata

SEQ ID NO: 367885 - DNA, 12 bp, Artificial Sequence
  Oligonucleotide primer for the detection of SNP TSC0056636
aaaatatgatat

SEQ ID NO: 367886 - DNA, 12 bp, Artificial Sequence
  Oligonucleotide primer for the detection of SNP TSC0056637
tggttgaggaat

SEQ ID NO: 367887 - DNA, 12 bp, Artificial Sequence
  Oligonucleotide primer for the detection of SNP TSC0056637
atgtataagata

SEQ ID NO: 367888 - DNA, 12 bp, Artificial Sequence
  Oligonucleotide primer for the detection of SNP TSC0056638
tgttgttaaatt

SEQ ID NO: 367889 - DNA, 12 bp, Artificial Sequence
  Oligonucleotide primer for the detection of SNP TSC0056638
tattatcaaatt

SEQ ID NO: 367890 - DNA, 12 bp, Artificial Sequence
  Oligonucleotide primer for the detection of SNP TSC0056638
tgtagaaatagt

SEQ ID NO: 367891 - DNA, 12 bp, Artificial Sequence
  Oligonucleotide primer for the detection of SNP TSC0056639
tacaaaaataat

SEQ ID NO: 367892 - DNA, 12 bp, Artificial Sequence
  Oligonucleotide primer for the detection of SNP TSC0056639
taatgttgttaa

SEQ ID NO: 367893 - DNA, 12 bp, Artificial Sequence
  Oligonucleotide primer for the detection of SNP TSC0056640
ttatattgtatt

SEQ ID NO: 367894 - DNA, 12 bp, Artificial Sequence
  Oligonucleotide primer for the detection of SNP TSC0056640
ttatatcgtatt

SEQ ID NO: 367895 - DNA, 12 bp, Artificial Sequence
  Oligonucleotide primer for the detection of SNP TSC0056640
ttacatcatact

SEQ ID NO: 367896 - DNA, 12 bp, Artificial Sequence
  Oligonucleotide primer for the detection of SNP TSC0056640
ttacatcgtact

SEQ ID NO: 367897 - DNA, 12 bp, Artificial Sequence
  Oligonucleotide primer for the detection of SNP TSC0056640
attaaagtaaga

SEQ ID NO: 367898 - DNA, 12 bp, Artificial Sequence
  Oligonucleotide primer for the detection of SNP TSC0056641
actaaaaatcaa

SEQ ID NO: 367899 - DNA, 12 bp, Artificial Sequence
  Oligonucleotide primer for the detection of SNP TSC0056641
tatgttaatgtt

SEQ ID NO: 367900 - DNA, 12 bp, Artificial Sequence
  Oligonucleotide primer for the detection of SNP TSC0056641
tatattaatacc

SEQ ID NO: 367901 - DNA, 12 bp, Artificial Sequence
  Oligonucleotide primer for the detection of SNP TSC0056641
gttggggattag

SEQ ID NO: 367902 - DNA, 12 bp, Artificial Sequence
  Oligonucleotide primer for the detection of SNP TSC0056642
atattcacccca

SEQ ID NO: 367903 - DNA, 12 bp, Artificial Sequence
  Oligonucleotide primer for the detection of SNP TSC0056642
acaaaatcttct

SEQ ID NO: 367904 - DNA, 12 bp, Artificial Sequence
  Oligonucleotide primer for the detection of SNP TSC0056642
gtgtttatttta

SEQ ID NO: 367905 - DNA, 12 bp, Artificial Sequence
  Oligonucleotide primer for the detection of SNP TSC0056643
attaaaaatcta

SEQ ID NO: 367906 - DNA, 12 bp, Artificial Sequence
  Oligonucleotide primer for the detection of SNP TSC0056643
aattagtgtttt

SEQ ID NO: 367907 - DNA, 12 bp, Artificial Sequence
  Oligonucleotide primer for the detection of SNP TSC0056643
aattagtgtttc

SEQ ID NO: 367908 - DNA, 12 bp, Artificial Sequence
  Oligonucleotide primer for the detection of SNP TSC0056643
caaatcaatact

SEQ ID NO: 367909 - DNA, 12 bp, Artificial Sequence
  Oligonucleotide primer for the detection of SNP TSC0056643
ttaggggtttat

SEQ ID NO: 367910 - DNA, 12 bp, Artificial Sequence
  Oligonucleotide primer for the detection of SNP TSC0056644
aaattctaatat

SEQ ID NO: 367911 - DNA, 12 bp, Artificial Sequence
  Oligonucleotide primer for the detection of SNP TSC0056648
acactttaaaac

SEQ ID NO: 367912 - DNA, 12 bp, Artificial Sequence
  Oligonucleotide primer for the detection of SNP TSC0056648
acgctttaaaac

SEQ ID NO: 367913 - DNA, 12 bp, Artificial Sequence
  Oligonucleotide primer for the detection of SNP TSC0056648
gagaagttaatg

SEQ ID NO: 367914 - DNA, 12 bp, Artificial Sequence
  Oligonucleotide primer for the detection of SNP TSC0056651
ttcactaaaaca

SEQ ID NO: 367915 - DNA, 12 bp, Artificial Sequence
  Oligonucleotide primer for the detection of SNP TSC0056651
ttcgctaaaaca

SEQ ID NO: 367916 - DNA, 12 bp, Artificial Sequence
  Oligonucleotide primer for the detection of SNP TSC0056651
acctttacctta

SEQ ID NO: 367917 - DNA, 12 bp, Artificial Sequence
  Oligonucleotide primer for the detection of SNP TSC0056651
tttcgttaaggt

SEQ ID NO: 367918 - DNA, 12 bp, Artificial Sequence
  Oligonucleotide primer for the detection of SNP TSC0056652
tatacaacatca

SEQ ID NO: 367919 - DNA, 12 bp, Artificial Sequence
  Oligonucleotide primer for the detection of SNP TSC0056652
tatacaacgtca

SEQ ID NO: 367920 - DNA, 12 bp, Artificial Sequence
  Oligonucleotide primer for the detection of SNP TSC0056652
gatgtgttgata

SEQ ID NO: 367921 - DNA, 12 bp, Artificial Sequence
  Oligonucleotide primer for the detection of SNP TSC0056652
aatatattaaca

SEQ ID NO: 367922 - DNA, 12 bp, Artificial Sequence
  Oligonucleotide primer for the detection of SNP TSC0056652
ttatgtaatgtt

SEQ ID NO: 367923 - DNA, 12 bp, Artificial Sequence
  Oligonucleotide primer for the detection of SNP TSC0056652
ttatgtaacgtt

SEQ ID NO: 367924 - DNA, 12 bp, Artificial Sequence
  Oligonucleotide primer for the detection of SNP TSC0056653
ttcatatcaatc

SEQ ID NO: 367925 - DNA, 12 bp, Artificial Sequence
  Oligonucleotide primer for the detection of SNP TSC0056653
ttcgtatcaatc

SEQ ID NO: 367926 - DNA, 12 bp, Artificial Sequence
  Oligonucleotide primer for the detection of SNP TSC0056653
ggaaatttgaaa

SEQ ID NO: 367927 - DNA, 12 bp, Artificial Sequence
  Oligonucleotide primer for the detection of SNP TSC0005515
ccaattcccttt

SEQ ID NO: 367928 - DNA, 12 bp, Artificial Sequence
  Oligonucleotide primer for the detection of SNP TSC0004540
ttctaaaaacat

SEQ ID NO: 367929 - DNA, 12 bp, Artificial Sequence
  Oligonucleotide primer for the detection of SNP TSC0004540
tttttaatagga

SEQ ID NO: 367930 - DNA, 12 bp, Artificial Sequence
  Oligonucleotide primer for the detection of SNP TSC0004540
ttttgaaaatat

SEQ ID NO: 367931 - DNA, 12 bp, Artificial Sequence
  Oligonucleotide primer for the detection of SNP TSC0004541
tctcaaccaata

SEQ ID NO: 367932 - DNA, 12 bp, Artificial Sequence
  Oligonucleotide primer for the detection of SNP TSC0004541
tctcgaccaata

SEQ ID NO: 367933 - DNA, 12 bp, Artificial Sequence
  Oligonucleotide primer for the detection of SNP TSC0004541
tatattaaagat

SEQ ID NO: 367934 - DNA, 12 bp, Artificial Sequence
  Oligonucleotide primer for the detection of SNP TSC0004541
tttcggttaata

SEQ ID NO: 367935 - DNA, 12 bp, Artificial Sequence
  Oligonucleotide primer for the detection of SNP TSC0004542
agtgtttttgag

SEQ ID NO: 367936 - DNA, 12 bp, Artificial Sequence
  Oligonucleotide primer for the detection of SNP TSC0056654
aacaactatcaa

SEQ ID NO: 367937 - DNA, 12 bp, Artificial Sequence
  Oligonucleotide primer for the detection of SNP TSC0056654
aacgactatcaa

SEQ ID NO: 367938 - DNA, 12 bp, Artificial Sequence
  Oligonucleotide primer for the detection of SNP TSC0056654
attttttaaaac

SEQ ID NO: 367939 - DNA, 12 bp, Artificial Sequence
  Oligonucleotide primer for the detection of SNP TSC0056654
aatgattgttaa

SEQ ID NO: 367940 - DNA, 12 bp, Artificial Sequence
  Oligonucleotide primer for the detection of SNP TSC0056654
aacgattgttaa

SEQ ID NO: 367941 - DNA, 12 bp, Artificial Sequence
  Oligonucleotide primer for the detection of SNP TSC0056655
aacttctattat

SEQ ID NO: 367942 - DNA, 12 bp, Artificial Sequence
  Oligonucleotide primer for the detection of SNP TSC0056655
ttgggtggtatg

SEQ ID NO: 367943 - DNA, 12 bp, Artificial Sequence
  Oligonucleotide primer for the detection of SNP TSC0056655
ttgggtggtacg

SEQ ID NO: 367944 - DNA, 12 bp, Artificial Sequence
  Oligonucleotide primer for the detection of SNP TSC0056659
tggatgtgttga

SEQ ID NO: 367945 - DNA, 12 bp, Artificial Sequence
  Oligonucleotide primer for the detection of SNP TSC0056659
tggatgtgtcga

SEQ ID NO: 367946 - DNA, 12 bp, Artificial Sequence
  Oligonucleotide primer for the detection of SNP TSC0056661
ttgtataattta

SEQ ID NO: 367947 - DNA, 12 bp, Artificial Sequence
  Oligonucleotide primer for the detection of SNP TSC0056661
ttatacaactca

SEQ ID NO: 367948 - DNA, 12 bp, Artificial Sequence
  Oligonucleotide primer for the detection of SNP TSC0056661
tattgaaaagta

SEQ ID NO: 367949 - DNA, 12 bp, Artificial Sequence
  Oligonucleotide primer for the detection of SNP TSC0010114
gtaaatatttat

SEQ ID NO: 367950 - DNA, 12 bp, Artificial Sequence
  Oligonucleotide primer for the detection of SNP TSC0056663
aacaaacaaaca

SEQ ID NO: 367951 - DNA, 12 bp, Artificial Sequence
  Oligonucleotide primer for the detection of SNP TSC0056664
aatacttaatct

SEQ ID NO: 367952 - DNA, 12 bp, Artificial Sequence
  Oligonucleotide primer for the detection of SNP TSC0056664
tttatgttaaag

SEQ ID NO: 367953 - DNA, 12 bp, Artificial Sequence
  Oligonucleotide primer for the detection of SNP TSC0056665
aaattataattc

SEQ ID NO: 367954 - DNA, 12 bp, Artificial Sequence
  Oligonucleotide primer for the detection of SNP TSC0056665
aatttaaagtta

SEQ ID NO: 367955 - DNA, 12 bp, Artificial Sequence
  Oligonucleotide primer for the detection of SNP TSC0056665
ggattataattt

SEQ ID NO: 367956 - DNA, 12 bp, Artificial Sequence
  Oligonucleotide primer for the detection of SNP TSC0056666
aatcacaaaaat

SEQ ID NO: 367957 - DNA, 12 bp, Artificial Sequence
  Oligonucleotide primer for the detection of SNP TSC0056666
aaaattgtgata

SEQ ID NO: 367958 - DNA, 12 bp, Artificial Sequence
  Oligonucleotide primer for the detection of SNP TSC0056671
tttcttctccac

SEQ ID NO: 367959 - DNA, 12 bp, Artificial Sequence
  Oligonucleotide primer for the detection of SNP TSC0056672
acatacatattt

SEQ ID NO: 367960 - DNA, 12 bp, Artificial Sequence
  Oligonucleotide primer for the detection of SNP TSC0056672
taagttgtgttg

SEQ ID NO: 367961 - DNA, 12 bp, Artificial Sequence
  Oligonucleotide primer for the detection of SNP TSC0009109
aattaataaact

SEQ ID NO: 367962 - DNA, 12 bp, Artificial Sequence
  Oligonucleotide primer for the detection of SNP TSC0009109
atgttatgtttt

SEQ ID NO: 367963 - DNA, 12 bp, Artificial Sequence
  Oligonucleotide primer for the detection of SNP TSC0009109
ataccatatctt

SEQ ID NO: 367964 - DNA, 12 bp, Artificial Sequence
  Oligonucleotide primer for the detection of SNP TSC0009109
aattaatagatt

SEQ ID NO: 367965 - DNA, 12 bp, Artificial Sequence
  Oligonucleotide primer for the detection of SNP TSC0056673
tttataaaatca

SEQ ID NO: 367966 - DNA, 12 bp, Artificial Sequence
  Oligonucleotide primer for the detection of SNP TSC0056673
tagttaattgta

SEQ ID NO: 367967 - DNA, 12 bp, Artificial Sequence
  Oligonucleotide primer for the detection of SNP TSC0056676
ttattactcctc

SEQ ID NO: 367968 - DNA, 12 bp, Artificial Sequence
  Oligonucleotide primer for the detection of SNP TSC0056676
agggattttaag

SEQ ID NO: 367969 - DNA, 12 bp, Artificial Sequence
  Oligonucleotide primer for the detection of SNP TSC0056677
aaaaaccatacc

SEQ ID NO: 367970 - DNA, 12 bp, Artificial Sequence
  Oligonucleotide primer for the detection of SNP TSC0056677
tagaataaatag

SEQ ID NO: 367971 - DNA, 12 bp, Artificial Sequence
  Oligonucleotide primer for the detection of SNP TSC0056677
gggattatattt

SEQ ID NO: 367972 - DNA, 12 bp, Artificial Sequence
  Oligonucleotide primer for the detection of SNP TSC0056679
aactattaacaa

SEQ ID NO: 367973 - DNA, 12 bp, Artificial Sequence
  Oligonucleotide primer for the detection of SNP TSC0056679
ccctatccaaca

SEQ ID NO: 367974 - DNA, 12 bp, Artificial Sequence
  Oligonucleotide primer for the detection of SNP TSC0056679
ggttgttagtag

SEQ ID NO: 367975 - DNA, 12 bp, Artificial Sequence
  Oligonucleotide primer for the detection of SNP TSC0056680
taataacaaaca

SEQ ID NO: 367976 - DNA, 12 bp, Artificial Sequence
  Oligonucleotide primer for the detection of SNP TSC0056681
tattgtgggagg

SEQ ID NO: 367977 - DNA, 12 bp, Artificial Sequence
  Oligonucleotide primer for the detection of SNP TSC0056682
actcgaaaatcc

SEQ ID NO: 367978 - DNA, 12 bp, Artificial Sequence
  Oligonucleotide primer for the detection of SNP TSC0056682
accctacctacc

SEQ ID NO: 367979 - DNA, 12 bp, Artificial Sequence
  Oligonucleotide primer for the detection of SNP TSC0056682
gttcggaagttt

SEQ ID NO: 367980 - DNA, 12 bp, Artificial Sequence
  Oligonucleotide primer for the detection of SNP TSC0056683
tattacatatca

SEQ ID NO: 367981 - DNA, 12 bp, Artificial Sequence
  Oligonucleotide primer for the detection of SNP TSC0056683
tcctctttctac

SEQ ID NO: 367982 - DNA, 12 bp, Artificial Sequence
  Oligonucleotide primer for the detection of SNP TSC0056683
attgtatgttat

SEQ ID NO: 367983 - DNA, 12 bp, Artificial Sequence
  Oligonucleotide primer for the detection of SNP TSC0056684
ctcaacctcact

SEQ ID NO: 367984 - DNA, 12 bp, Artificial Sequence
  Oligonucleotide primer for the detection of SNP TSC0056685
gttaaggtgggt

SEQ ID NO: 367985 - DNA, 12 bp, Artificial Sequence
  Oligonucleotide primer for the detection of SNP TSC0056687
cccaaaatacca

SEQ ID NO: 367986 - DNA, 12 bp, Artificial Sequence
  Oligonucleotide primer for the detection of SNP TSC0056687
cccaaaataccg

SEQ ID NO: 367987 - DNA, 12 bp, Artificial Sequence
  Oligonucleotide primer for the detection of SNP TSC0056687
atatttgtagtt

SEQ ID NO: 367988 - DNA, 12 bp, Artificial Sequence
  Oligonucleotide primer for the detection of SNP TSC0056687
atatttgtagtc

SEQ ID NO: 367989 - DNA, 12 bp, Artificial Sequence
  Oligonucleotide primer for the detection of SNP TSC0056687
acacctacaatc

SEQ ID NO: 367990 - DNA, 12 bp, Artificial Sequence
  Oligonucleotide primer for the detection of SNP TSC0056687
tttaaaatgttg

SEQ ID NO: 367991 - DNA, 12 bp, Artificial Sequence
  Oligonucleotide primer for the detection of SNP TSC0056687
tttaaaatgtcg

SEQ ID NO: 367992 - DNA, 12 bp, Artificial Sequence
  Oligonucleotide primer for the detection of SNP TSC0056688
gaggattttttg

SEQ ID NO: 367993 - DNA, 12 bp, Artificial Sequence
  Oligonucleotide primer for the detection of SNP TSC0056688
aaaatcccttaa

SEQ ID NO: 367994 - DNA, 12 bp, Artificial Sequence
  Oligonucleotide primer for the detection of SNP TSC0056689
ctcctcaaacac

SEQ ID NO: 367995 - DNA, 12 bp, Artificial Sequence
  Oligonucleotide primer for the detection of SNP TSC0056689
ttaaataagggg

SEQ ID NO: 367996 - DNA, 12 bp, Artificial Sequence
  Oligonucleotide primer for the detection of SNP TSC0056690
caaaataataca

SEQ ID NO: 367997 - DNA, 12 bp, Artificial Sequence
  Oligonucleotide primer for the detection of SNP TSC0056690
ttttggaattga

SEQ ID NO: 367998 - DNA, 12 bp, Artificial Sequence
  Oligonucleotide primer for the detection of SNP TSC0056690
ttaaggtggtat

SEQ ID NO: 367999 - DNA, 12 bp, Artificial Sequence
  Oligonucleotide primer for the detection of SNP TSC0056691
taattattattc

SEQ ID NO: 368000 - DNA, 12 bp, Artificial Sequence
  Oligonucleotide primer for the detection of SNP TSC0056692
ataccctaaata

SEQ ID NO: 368001 - DNA, 12 bp, Artificial Sequence
  Oligonucleotide primer for the detection of SNP TSC0056692
aagttatataaa

SEQ ID NO: 368002 - DNA, 12 bp, Artificial Sequence
  Oligonucleotide primer for the detection of SNP TSC0056693
tgttaatttttt

SEQ ID NO: 368003 - DNA, 12 bp, Artificial Sequence
  Oligonucleotide primer for the detection of SNP TSC0056693
ttattaattttc

SEQ ID NO: 368004 - DNA, 12 bp, Artificial Sequence
  Oligonucleotide primer for the detection of SNP TSC0056694
gaaaacttaaat

SEQ ID NO: 368005 - DNA, 12 bp, Artificial Sequence
  Oligonucleotide primer for the detection of SNP TSC0056694
gagtttaggtaa

SEQ ID NO: 368006 - DNA, 12 bp, Artificial Sequence
  Oligonucleotide primer for the detection of SNP TSC0056695
tataattacaaa

SEQ ID NO: 368007 - DNA, 12 bp, Artificial Sequence
  Oligonucleotide primer for the detection of SNP TSC0056695
gtatagtgattt

SEQ ID NO: 368008 - DNA, 12 bp, Artificial Sequence
  Oligonucleotide primer for the detection of SNP TSC0056696
aatccccacctt

SEQ ID NO: 368009 - DNA, 12 bp, Artificial Sequence
  Oligonucleotide primer for the detection of SNP TSC0056696
gatggagattgt

SEQ ID NO: 368010 - DNA, 12 bp, Artificial Sequence
  Oligonucleotide primer for the detection of SNP TSC0056698
ctaatactcaat

SEQ ID NO: 368011 - DNA, 12 bp, Artificial Sequence
  Oligonucleotide primer for the detection of SNP TSC0056698
ttaagttttaga

SEQ ID NO: 368012 - DNA, 12 bp, Artificial Sequence
  Oligonucleotide primer for the detection of SNP TSC0056701
cacaacatatat

SEQ ID NO: 368013 - DNA, 12 bp, Artificial Sequence
  Oligonucleotide primer for the detection of SNP TSC0056701
ataaaacactaa

SEQ ID NO: 368014 - DNA, 12 bp, Artificial Sequence
  Oligonucleotide primer for the detection of SNP TSC0056701
tatagtatatgt

SEQ ID NO: 368015 - DNA, 12 bp, Artificial Sequence
  Oligonucleotide primer for the detection of SNP TSC0006157
ccttaaaaaaac

SEQ ID NO: 368016 - DNA, 12 bp, Artificial Sequence
  Oligonucleotide primer for the detection of SNP TSC0006157
tttaaagagaag

SEQ ID NO: 368017 - DNA, 12 bp, Artificial Sequence
  Oligonucleotide primer for the detection of SNP TSC0056703
aataaattctat

SEQ ID NO: 368018 - DNA, 12 bp, Artificial Sequence
  Oligonucleotide primer for the detection of SNP TSC0056703
atggtagtaata

SEQ ID NO: 368019 - DNA, 12 bp, Artificial Sequence
  Oligonucleotide primer for the detection of SNP TSC0056703
ataacaataaca

SEQ ID NO: 368020 - DNA, 12 bp, Artificial Sequence
  Oligonucleotide primer for the detection of SNP TSC0056703
aatggattttat

SEQ ID NO: 368021 - DNA, 12 bp, Artificial Sequence
  Oligonucleotide primer for the detection of SNP TSC0056707
ttccttccccaa

SEQ ID NO: 368022 - DNA, 12 bp, Artificial Sequence
  Oligonucleotide primer for the detection of SNP TSC0056707
tttttttttcct

SEQ ID NO: 368023 - DNA, 12 bp, Artificial Sequence
  Oligonucleotide primer for the detection of SNP TSC0056708
ttaaacacacat

SEQ ID NO: 368024 - DNA, 12 bp, Artificial Sequence
  Oligonucleotide primer for the detection of SNP TSC0056708
aggagattttga

SEQ ID NO: 368025 - DNA, 12 bp, Artificial Sequence
  Oligonucleotide primer for the detection of SNP TSC0056708
ttgggtatatat

SEQ ID NO: 368026 - DNA, 12 bp, Artificial Sequence
  Oligonucleotide primer for the detection of SNP TSC0056709
tatacattcttc

SEQ ID NO: 368027 - DNA, 12 bp, Artificial Sequence
  Oligonucleotide primer for the detection of SNP TSC0056709
gtttgttagaaa

SEQ ID NO: 368028 - DNA, 12 bp, Artificial Sequence
  Oligonucleotide primer for the detection of SNP TSC0056709
gttcgttagaaa

SEQ ID NO: 368029 - DNA, 12 bp, Artificial Sequence
  Oligonucleotide primer for the detection of SNP TSC0056710
ataaaatacctt

SEQ ID NO: 368030 - DNA, 12 bp, Artificial Sequence
  Oligonucleotide primer for the detection of SNP TSC0056710
atgaataaagta

SEQ ID NO: 368031 - DNA, 12 bp, Artificial Sequence
  Oligonucleotide primer for the detection of SNP TSC0056712
aaaaatttttat

SEQ ID NO: 368032 - DNA, 12 bp, Artificial Sequence
  Oligonucleotide primer for the detection of SNP TSC0056712
aaagaataaaaa

SEQ ID NO: 368033 - DNA, 12 bp, Artificial Sequence
  Oligonucleotide primer for the detection of SNP TSC0056713
taacaaccattt

SEQ ID NO: 368034 - DNA, 12 bp, Artificial Sequence
  Oligonucleotide primer for the detection of SNP TSC0056713
gtggtagaggga

SEQ ID NO: 368035 - DNA, 12 bp, Artificial Sequence
  Oligonucleotide primer for the detection of SNP TSC0056714
acttatctatac

SEQ ID NO: 368036 - DNA, 12 bp, Artificial Sequence
  Oligonucleotide primer for the detection of SNP TSC0056714
ttttttaaggag

SEQ ID NO: 368037 - DNA, 12 bp, Artificial Sequence
  Oligonucleotide primer for the detection of SNP TSC0005236
actcaataaata

SEQ ID NO: 368038 - DNA, 12 bp, Artificial Sequence
  Oligonucleotide primer for the detection of SNP TSC0005236
gttttagaattg

SEQ ID NO: 368039 - DNA, 12 bp, Artificial Sequence
  Oligonucleotide primer for the detection of SNP TSC0005236
tgtttaataaat

SEQ ID NO: 368040 - DNA, 12 bp, Artificial Sequence
  Oligonucleotide primer for the detection of SNP TSC0005240
ttggataatgtt

SEQ ID NO: 368041 - DNA, 12 bp, Artificial Sequence
  Oligonucleotide primer for the detection of SNP TSC0005240
taaataatacta

SEQ ID NO: 368042 - DNA, 12 bp, Artificial Sequence
  Oligonucleotide primer for the detection of SNP TSC0005240
gagaaagtattt

SEQ ID NO: 368043 - DNA, 12 bp, Artificial Sequence
  Oligonucleotide primer for the detection of SNP TSC0056715
atctttcaacaa

SEQ ID NO: 368044 - DNA, 12 bp, Artificial Sequence
  Oligonucleotide primer for the detection of SNP TSC0056715
gtaatagttttt

SEQ ID NO: 368045 - DNA, 12 bp, Artificial Sequence
  Oligonucleotide primer for the detection of SNP TSC0056717
ttctcttattcc

SEQ ID NO: 368046 - DNA, 12 bp, Artificial Sequence
  Oligonucleotide primer for the detection of SNP TSC0056717
gaaagataaaga

SEQ ID NO: 368047 - DNA, 12 bp, Artificial Sequence
  Oligonucleotide primer for the detection of SNP TSC0004525
tgtaaaatatta

SEQ ID NO: 368048 - DNA, 12 bp, Artificial Sequence
  Oligonucleotide primer for the detection of SNP TSC0004525
ttagaagagaat

SEQ ID NO: 368049 - DNA, 12 bp, Artificial Sequence
  Oligonucleotide primer for the detection of SNP TSC0056720
agtgtataagtt

SEQ ID NO: 368050 - DNA, 12 bp, Artificial Sequence
  Oligonucleotide primer for the detection of SNP TSC0056720
aatatacaaatc

SEQ ID NO: 368051 - DNA, 12 bp, Artificial Sequence
  Oligonucleotide primer for the detection of SNP TSC0056721
tttcctttattt

SEQ ID NO: 368052 - DNA, 12 bp, Artificial Sequence
  Oligonucleotide primer for the detection of SNP TSC0056721
  unsure (3): unknown base
tanttagtttta

SEQ ID NO: 368053 - DNA, 12 bp, Artificial Sequence
  Oligonucleotide primer for the detection of SNP TSC0056722
taaaaacaaccc

SEQ ID NO: 368054 - DNA, 12 bp, Artificial Sequence
  Oligonucleotide primer for the detection of SNP TSC0056722
gtttatggatat

SEQ ID NO: 368055 - DNA, 12 bp, Artificial Sequence
  Oligonucleotide primer for the detection of SNP TSC0056722
ttcataaacaca

SEQ ID NO: 368056 - DNA, 12 bp, Artificial Sequence
  Oligonucleotide primer for the detection of SNP TSC0056722
tgaaagtaattt

SEQ ID NO: 368057 - DNA, 12 bp, Artificial Sequence
  Oligonucleotide primer for the detection of SNP TSC0056723
acacattacata

SEQ ID NO: 368058 - DNA, 12 bp, Artificial Sequence
  Oligonucleotide primer for the detection of SNP TSC0056723
aatgaggaatta

SEQ ID NO: 368059 - DNA, 12 bp, Artificial Sequence
  Oligonucleotide primer for the detection of SNP TSC0056724
actcaaaataac

SEQ ID NO: 368060 - DNA, 12 bp, Artificial Sequence
  Oligonucleotide primer for the detection of SNP TSC0056724
atctcctttcac

SEQ ID NO: 368061 - DNA, 12 bp, Artificial Sequence
  Oligonucleotide primer for the detection of SNP TSC0056724
atttaaaatgat

SEQ ID NO: 368062 - DNA, 12 bp, Artificial Sequence
  Oligonucleotide primer for the detection of SNP TSC0056724
atttaaaatgac

SEQ ID NO: 368063 - DNA, 12 bp, Artificial Sequence
  Oligonucleotide primer for the detection of SNP TSC0056725
aaattttcactt

SEQ ID NO: 368064 - DNA, 12 bp, Artificial Sequence
  Oligonucleotide primer for the detection of SNP TSC0056725
aaataaggaaga

SEQ ID NO: 368065 - DNA, 12 bp, Artificial Sequence
  Oligonucleotide primer for the detection of SNP TSC0056726
aaaaaatttcta

SEQ ID NO: 368066 - DNA, 12 bp, Artificial Sequence
  Oligonucleotide primer for the detection of SNP TSC0056726
aaaagatttttg

SEQ ID NO: 368067 - DNA, 12 bp, Artificial Sequence
  Oligonucleotide primer for the detection of SNP TSC0056732
ttatataggtaa

SEQ ID NO: 368068 - DNA, 12 bp, Artificial Sequence
  Oligonucleotide primer for the detection of SNP TSC0056732
tcatataaataa

SEQ ID NO: 368069 - DNA, 12 bp, Artificial Sequence
  Oligonucleotide primer for the detection of SNP TSC0056732
tatagtaggtat

SEQ ID NO: 368070 - DNA, 12 bp, Artificial Sequence
  Oligonucleotide primer for the detection of SNP TSC0056733
aatttttggttg

SEQ ID NO: 368071 - DNA, 12 bp, Artificial Sequence
  Oligonucleotide primer for the detection of SNP TSC0056734
ttataatattat

SEQ ID NO: 368072 - DNA, 12 bp, Artificial Sequence
  Oligonucleotide primer for the detection of SNP TSC0056734
ttgtaagagttt

SEQ ID NO: 368073 - DNA, 12 bp, Artificial Sequence
  Oligonucleotide primer for the detection of SNP TSC0056734
ttatgatattgt

SEQ ID NO: 368074 - DNA, 12 bp, Artificial Sequence
  Oligonucleotide primer for the detection of SNP TSC0056735
gtttgttgggat

SEQ ID NO: 368075 - DNA, 12 bp, Artificial Sequence
  Oligonucleotide primer for the detection of SNP TSC0056735
atctactaaaac

SEQ ID NO: 368076 - DNA, 12 bp, Artificial Sequence
  Oligonucleotide primer for the detection of SNP TSC0056735
aggtatggtaaa

SEQ ID NO: 368077 - DNA, 12 bp, Artificial Sequence
  Oligonucleotide primer for the detection of SNP TSC0056740
tcctaaaattat

SEQ ID NO: 368078 - DNA, 12 bp, Artificial Sequence
  Oligonucleotide primer for the detection of SNP TSC0056741
ctaaatccttca

SEQ ID NO: 368079 - DNA, 12 bp, Artificial Sequence
  Oligonucleotide primer for the detection of SNP TSC0056741
aaaagaggaaaa

SEQ ID NO: 368080 - DNA, 12 bp, Artificial Sequence
  Oligonucleotide primer for the detection of SNP TSC0056747
tcttttacactt

SEQ ID NO: 368081 - DNA, 12 bp, Artificial Sequence
  Oligonucleotide primer for the detection of SNP TSC0056747
ccaaattctcca

SEQ ID NO: 368082 - DNA, 12 bp, Artificial Sequence
  Oligonucleotide primer for the detection of SNP TSC0056749
aaccactcccca

SEQ ID NO: 368083 - DNA, 12 bp, Artificial Sequence
  Oligonucleotide primer for the detection of SNP TSC0056750
aacccaccaaac

SEQ ID NO: 368084 - DNA, 12 bp, Artificial Sequence
  Oligonucleotide primer for the detection of SNP TSC0056750
tttgagtgtttg

SEQ ID NO: 368085 - DNA, 12 bp, Artificial Sequence
  Oligonucleotide primer for the detection of SNP TSC0056751
tattaatatcac

SEQ ID NO: 368086 - DNA, 12 bp, Artificial Sequence
  Oligonucleotide primer for the detection of SNP TSC0056751
gattttttgtcg

SEQ ID NO: 368087 - DNA, 12 bp, Artificial Sequence
  Oligonucleotide primer for the detection of SNP TSC0056757
aatgaatattga

SEQ ID NO: 368088 - DNA, 12 bp, Artificial Sequence
  Oligonucleotide primer for the detection of SNP TSC0056758
acttttactaac

SEQ ID NO: 368089 - DNA, 12 bp, Artificial Sequence
  Oligonucleotide primer for the detection of SNP TSC0056758
atcccttcaata

SEQ ID NO: 368090 - DNA, 12 bp, Artificial Sequence
  Oligonucleotide primer for the detection of SNP TSC0056760
ttgttagataaa

SEQ ID NO: 368091 - DNA, 12 bp, Artificial Sequence
  Oligonucleotide primer for the detection of SNP TSC0056769
attaacaaatta

SEQ ID NO: 368092 - DNA, 12 bp, Artificial Sequence
  Oligonucleotide primer for the detection of SNP TSC0056769
aaatatataatt

SEQ ID NO: 368093 - DNA, 12 bp, Artificial Sequence
  Oligonucleotide primer for the detection of SNP TSC0056770
tcatattatatt

SEQ ID NO: 368094 - DNA, 12 bp, Artificial Sequence
  Oligonucleotide primer for the detection of SNP TSC0056770
tattaacttttt

SEQ ID NO: 368095 - DNA, 12 bp, Artificial Sequence
  Oligonucleotide primer for the detection of SNP TSC0056771
caaaactcatac

SEQ ID NO: 368096 - DNA, 12 bp, Artificial Sequence
  Oligonucleotide primer for the detection of SNP TSC0056772
tcctacctacca

SEQ ID NO: 368097 - DNA, 12 bp, Artificial Sequence
  Oligonucleotide primer for the detection of SNP TSC0056772
tagtggtatggt

SEQ ID NO: 368098 - DNA, 12 bp, Artificial Sequence
  Oligonucleotide primer for the detection of SNP TSC0056773
aaaacattcctt

SEQ ID NO: 368099 - DNA, 12 bp, Artificial Sequence
  Oligonucleotide primer for the detection of SNP TSC0009565
attcccaataaa

SEQ ID NO: 368100 - DNA, 12 bp, Artificial Sequence
  Oligonucleotide primer for the detection of SNP TSC0009565
gaagatgaggaa

SEQ ID NO: 368101 - DNA, 12 bp, Artificial Sequence
  Oligonucleotide primer for the detection of SNP TSC0056776
ttattctaatct

SEQ ID NO: 368102 - DNA, 12 bp, Artificial Sequence
  Oligonucleotide primer for the detection of SNP TSC0056776
gatgagagtaga

SEQ ID NO: 368103 - DNA, 12 bp, Artificial Sequence
  Oligonucleotide primer for the detection of SNP TSC0056777
tttataaacatc

SEQ ID NO: 368104 - DNA, 12 bp, Artificial Sequence
  Oligonucleotide primer for the detection of SNP TSC0056778
aaaaaactctcc

SEQ ID NO: 368105 - DNA, 12 bp, Artificial Sequence
  Oligonucleotide primer for the detection of SNP TSC0056778
attaaaaattta

SEQ ID NO: 368106 - DNA, 12 bp, Artificial Sequence
  Oligonucleotide primer for the detection of SNP TSC0056779
acgtaaattaaa

SEQ ID NO: 368107 - DNA, 12 bp, Artificial Sequence
  Oligonucleotide primer for the detection of SNP TSC0056779
atttttagtaaa

SEQ ID NO: 368108 - DNA, 12 bp, Artificial Sequence
  Oligonucleotide primer for the detection of SNP TSC0056780
gggaattagatt

SEQ ID NO: 368109 - DNA, 12 bp, Artificial Sequence
  Oligonucleotide primer for the detection of SNP TSC0056780
aaaaattaaatc

SEQ ID NO: 368110 - DNA, 12 bp, Artificial Sequence
  Oligonucleotide primer for the detection of SNP TSC0056780
ttggagagaaga

SEQ ID NO: 368111 - DNA, 12 bp, Artificial Sequence
  Oligonucleotide primer for the detection of SNP TSC0056781
taatgtttgtta

SEQ ID NO: 368112 - DNA, 12 bp, Artificial Sequence
  Oligonucleotide primer for the detection of SNP TSC0056782
taaatttatttg

SEQ ID NO: 368113 - DNA, 12 bp, Artificial Sequence
  Oligonucleotide primer for the detection of SNP TSC0056787
tcgtgttattgt

SEQ ID NO: 368114 - DNA, 12 bp, Artificial Sequence
  Oligonucleotide primer for the detection of SNP TSC0056787
tcgcgttattgt

SEQ ID NO: 368115 - DNA, 12 bp, Artificial Sequence
  Oligonucleotide primer for the detection of SNP TSC0056787
tcgcaccactac

SEQ ID NO: 368116 - DNA, 12 bp, Artificial Sequence
  Oligonucleotide primer for the detection of SNP TSC0056787
tcgcgccactac

SEQ ID NO: 368117 - DNA, 12 bp, Artificial Sequence
  Oligonucleotide primer for the detection of SNP TSC0056788
atctcgctctat

SEQ ID NO: 368118 - DNA, 12 bp, Artificial Sequence
  Oligonucleotide primer for the detection of SNP TSC0056789
acccaaaaaaaa

SEQ ID NO: 368119 - DNA, 12 bp, Artificial Sequence
  Oligonucleotide primer for the detection of SNP TSC0056789
gtttatgtatat

SEQ ID NO: 368120 - DNA, 12 bp, Artificial Sequence
  Oligonucleotide primer for the detection of SNP TSC0056789
aactcatataca

SEQ ID NO: 368121 - DNA, 12 bp, Artificial Sequence
  Oligonucleotide primer for the detection of SNP TSC0056790
gtgtatatttgt

SEQ ID NO: 368122 - DNA, 12 bp, Artificial Sequence
  Oligonucleotide primer for the detection of SNP TSC0056790
atacacacctat

SEQ ID NO: 368123 - DNA, 12 bp, Artificial Sequence
  Oligonucleotide primer for the detection of SNP TSC0056793
ccttatctcttc

SEQ ID NO: 368124 - DNA, 12 bp, Artificial Sequence
  Oligonucleotide primer for the detection of SNP TSC0056794
atagtaaatagg

SEQ ID NO: 368125 - DNA, 12 bp, Artificial Sequence
  Oligonucleotide primer for the detection of SNP TSC0056794
acaataaacaaa

SEQ ID NO: 368126 - DNA, 12 bp, Artificial Sequence
  Oligonucleotide primer for the detection of SNP TSC0056794
aaagaatgagtt

SEQ ID NO: 368127 - DNA, 12 bp, Artificial Sequence
  Oligonucleotide primer for the detection of SNP TSC0056795
cacaactcattc

SEQ ID NO: 368128 - DNA, 12 bp, Artificial Sequence
  Oligonucleotide primer for the detection of SNP TSC0056795
cgcaactcattc

SEQ ID NO: 368129 - DNA, 12 bp, Artificial Sequence
  Oligonucleotide primer for the detection of SNP TSC0056796
aatcactttaat

SEQ ID NO: 368130 - DNA, 12 bp, Artificial Sequence
  Oligonucleotide primer for the detection of SNP TSC0056798
taaaatcattta

SEQ ID NO: 368131 - DNA, 12 bp, Artificial Sequence
  Oligonucleotide primer for the detection of SNP TSC0056798
cctactcattcc

SEQ ID NO: 368132 - DNA, 12 bp, Artificial Sequence
  Oligonucleotide primer for the detection of SNP TSC0056798
tgagattatttg

SEQ ID NO: 368133 - DNA, 12 bp, Artificial Sequence
  Oligonucleotide primer for the detection of SNP TSC0056799
cactttcaacac

SEQ ID NO: 368134 - DNA, 12 bp, Artificial Sequence
  Oligonucleotide primer for the detection of SNP TSC0056799
tacttctctata

SEQ ID NO: 368135 - DNA, 12 bp, Artificial Sequence
  Oligonucleotide primer for the detection of SNP TSC0056804
atatatgtttat

SEQ ID NO: 368136 - DNA, 12 bp, Artificial Sequence
  Oligonucleotide primer for the detection of SNP TSC0056804
atacatactcat

SEQ ID NO: 368137 - DNA, 12 bp, Artificial Sequence
  Oligonucleotide primer for the detection of SNP TSC0056804
tagaaggaataa

SEQ ID NO: 368138 - DNA, 12 bp, Artificial Sequence
  Oligonucleotide primer for the detection of SNP TSC0056806
gagtttaggtag

SEQ ID NO: 368139 - DNA, 12 bp, Artificial Sequence
  Oligonucleotide primer for the detection of SNP TSC0056806
ggagtttgaggt

SEQ ID NO: 368140 - DNA, 12 bp, Artificial Sequence
  Oligonucleotide primer for the detection of SNP TSC0056807
tggattataggt

SEQ ID NO: 368141 - DNA, 12 bp, Artificial Sequence
  Oligonucleotide primer for the detection of SNP TSC0056807
taaactacaaat

SEQ ID NO: 368142 - DNA, 12 bp, Artificial Sequence
  Oligonucleotide primer for the detection of SNP TSC0056809
taactattaact

SEQ ID NO: 368143 - DNA, 12 bp, Artificial Sequence
  Oligonucleotide primer for the detection of SNP TSC0056810
atttctctttaa

SEQ ID NO: 368144 - DNA, 12 bp, Artificial Sequence
  Oligonucleotide primer for the detection of SNP TSC0056810
tattacttaaat

SEQ ID NO: 368145 - DNA, 12 bp, Artificial Sequence
  Oligonucleotide primer for the detection of SNP TSC0009580
tttattctaatt

SEQ ID NO: 368146 - DNA, 12 bp, Artificial Sequence
  Oligonucleotide primer for the detection of SNP TSC0009580
ggaattttttgg

SEQ ID NO: 368147 - DNA, 12 bp, Artificial Sequence
  Oligonucleotide primer for the detection of SNP TSC0056812
aactttactcta

SEQ ID NO: 368148 - DNA, 12 bp, Artificial Sequence
  Oligonucleotide primer for the detection of SNP TSC0056812
ttttggattgaa

SEQ ID NO: 368149 - DNA, 12 bp, Artificial Sequence
  Oligonucleotide primer for the detection of SNP TSC0056812
tcttaaattaaa

SEQ ID NO: 368150 - DNA, 12 bp, Artificial Sequence
  Oligonucleotide primer for the detection of SNP TSC0056815
ttcacatttctt

SEQ ID NO: 368151 - DNA, 12 bp, Artificial Sequence
  Oligonucleotide primer for the detection of SNP TSC0056815
ggtattaggaga

SEQ ID NO: 368152 - DNA, 12 bp, Artificial Sequence
  Oligonucleotide primer for the detection of SNP TSC0056816
ttttatttcatt

SEQ ID NO: 368153 - DNA, 12 bp, Artificial Sequence
  Oligonucleotide primer for the detection of SNP TSC0056817
cccctaaccaat

SEQ ID NO: 368154 - DNA, 12 bp, Artificial Sequence
  Oligonucleotide primer for the detection of SNP TSC0056817
tttttggttaat

SEQ ID NO: 368155 - DNA, 12 bp, Artificial Sequence
  Oligonucleotide primer for the detection of SNP TSC0056821
cctctatatcac

SEQ ID NO: 368156 - DNA, 12 bp, Artificial Sequence
  Oligonucleotide primer for the detection of SNP TSC0056821
tagaatagtttg

SEQ ID NO: 368157 - DNA, 12 bp, Artificial Sequence
  Oligonucleotide primer for the detection of SNP TSC0056821
tagaatagttcg

SEQ ID NO: 368158 - DNA, 12 bp, Artificial Sequence
  Oligonucleotide primer for the detection of SNP TSC0056822
tattcactcaac

SEQ ID NO: 368159 - DNA, 12 bp, Artificial Sequence
  Oligonucleotide primer for the detection of SNP TSC0056822
tattcgctcaac

SEQ ID NO: 368160 - DNA, 12 bp, Artificial Sequence
  Oligonucleotide primer for the detection of SNP TSC0056822
ggagttgggtat

SEQ ID NO: 368161 - DNA, 12 bp, Artificial Sequence
  Oligonucleotide primer for the detection of SNP TSC0056822
aaaactaaacat

SEQ ID NO: 368162 - DNA, 12 bp, Artificial Sequence
  Oligonucleotide primer for the detection of SNP TSC0056822
gttcgtttaatt

SEQ ID NO: 368163 - DNA, 12 bp, Artificial Sequence
  Oligonucleotide primer for the detection of SNP TSC0056824
aaatattaccca

SEQ ID NO: 368164 - DNA, 12 bp, Artificial Sequence
  Oligonucleotide primer for the detection of SNP TSC0056824
attaccctcctt

SEQ ID NO: 368165 - DNA, 12 bp, Artificial Sequence
  Oligonucleotide primer for the detection of SNP TSC0007514
gtaaaagtgtaa

SEQ ID NO: 368166 - DNA, 12 bp, Artificial Sequence
  Oligonucleotide primer for the detection of SNP TSC0056837
aaaacatactat

SEQ ID NO: 368167 - DNA, 12 bp, Artificial Sequence
  Oligonucleotide primer for the detection of SNP TSC0056837
aatggataggaa

SEQ ID NO: 368168 - DNA, 12 bp, Artificial Sequence
  Oligonucleotide primer for the detection of SNP TSC0056838
cctcacattata

SEQ ID NO: 368169 - DNA, 12 bp, Artificial Sequence
  Oligonucleotide primer for the detection of SNP TSC0056838
ttgtgtatattt

SEQ ID NO: 368170 - DNA, 12 bp, Artificial Sequence
  Oligonucleotide primer for the detection of SNP TSC0056838
ttatatatactt

SEQ ID NO: 368171 - DNA, 12 bp, Artificial Sequence
  Oligonucleotide primer for the detection of SNP TSC0056838
ttttatattgta

SEQ ID NO: 368172 - DNA, 12 bp, Artificial Sequence
  Oligonucleotide primer for the detection of SNP TSC0056839
ttaaccatcacc

SEQ ID NO: 368173 - DNA, 12 bp, Artificial Sequence
  Oligonucleotide primer for the detection of SNP TSC0056839
tttgaatgaatt

SEQ ID NO: 368174 - DNA, 12 bp, Artificial Sequence
  Oligonucleotide primer for the detection of SNP TSC0056839
ttggttattatc

SEQ ID NO: 368175 - DNA, 12 bp, Artificial Sequence
  Oligonucleotide primer for the detection of SNP TSC0000686
tcaataaattaa

SEQ ID NO: 368176 - DNA, 12 bp, Artificial Sequence
  Oligonucleotide primer for the detection of SNP TSC0000686
ttgttgtatagt

SEQ ID NO: 368177 - DNA, 12 bp, Artificial Sequence
  Oligonucleotide primer for the detection of SNP TSC0000686
ctactacacaat

SEQ ID NO: 368178 - DNA, 12 bp, Artificial Sequence
  Oligonucleotide primer for the detection of SNP TSC0000686
ttagtgaattgg

SEQ ID NO: 368179 - DNA, 12 bp, Artificial Sequence
  Oligonucleotide primer for the detection of SNP TSC0056840
ctaccccaaaaa

SEQ ID NO: 368180 - DNA, 12 bp, Artificial Sequence
  Oligonucleotide primer for the detection of SNP TSC0056840
aaatgtttggtt

SEQ ID NO: 368181 - DNA, 12 bp, Artificial Sequence
  Oligonucleotide primer for the detection of SNP TSC0056840
aaatgttcggtt

SEQ ID NO: 368182 - DNA, 12 bp, Artificial Sequence
  Oligonucleotide primer for the detection of SNP TSC0056840
aaatgtttggtc

SEQ ID NO: 368183 - DNA, 12 bp, Artificial Sequence
  Oligonucleotide primer for the detection of SNP TSC0056840
aaatgttcggtc

SEQ ID NO: 368184 - DNA, 12 bp, Artificial Sequence
  Oligonucleotide primer for the detection of SNP TSC0056840
aaatatccaacc

SEQ ID NO: 368185 - DNA, 12 bp, Artificial Sequence
  Oligonucleotide primer for the detection of SNP TSC0056840
aaatatccgacc

SEQ ID NO: 368186 - DNA, 12 bp, Artificial Sequence
  Oligonucleotide primer for the detection of SNP TSC0056840
ttattttagaaa

SEQ ID NO: 368187 - DNA, 12 bp, Artificial Sequence
  Oligonucleotide primer for the detection of SNP TSC0056841
actacaaaaact

SEQ ID NO: 368188 - DNA, 12 bp, Artificial Sequence
  Oligonucleotide primer for the detection of SNP TSC0056841
gtaggtgtatag

SEQ ID NO: 368189 - DNA, 12 bp, Artificial Sequence
  Oligonucleotide primer for the detection of SNP TSC0056842
aatccaaataac

SEQ ID NO: 368190 - DNA, 12 bp, Artificial Sequence
  Oligonucleotide primer for the detection of SNP TSC0056843
agatggagtttg

SEQ ID NO: 368191 - DNA, 12 bp, Artificial Sequence
  Oligonucleotide primer for the detection of SNP TSC0056843
aaataaaatcta

SEQ ID NO: 368192 - DNA, 12 bp, Artificial Sequence
  Oligonucleotide primer for the detection of SNP TSC0056852
taaaataacgct

SEQ ID NO: 368193 - DNA, 12 bp, Artificial Sequence
  Oligonucleotide primer for the detection of SNP TSC0056852
tagggtggtgtt

SEQ ID NO: 368194 - DNA, 12 bp, Artificial Sequence
  Oligonucleotide primer for the detection of SNP TSC0056852
tagggtggcgtt

SEQ ID NO: 368195 - DNA, 12 bp, Artificial Sequence
  Oligonucleotide primer for the detection of SNP TSC0056853
tttgtagttggg

SEQ ID NO: 368196 - DNA, 12 bp, Artificial Sequence
  Oligonucleotide primer for the detection of SNP TSC0056858
acctaaacttta

SEQ ID NO: 368197 - DNA, 12 bp, Artificial Sequence
  Oligonucleotide primer for the detection of SNP TSC0056858
aataaaactccc

SEQ ID NO: 368198 - DNA, 12 bp, Artificial Sequence
  Oligonucleotide primer for the detection of SNP TSC0056858
tttgagttttgt

SEQ ID NO: 368199 - DNA, 12 bp, Artificial Sequence
  Oligonucleotide primer for the detection of SNP TSC0007229
acatcaatttcc

SEQ ID NO: 368200 - DNA, 12 bp, Artificial Sequence
  Oligonucleotide primer for the detection of SNP TSC0007229
taattttttagg

SEQ ID NO: 368201 - DNA, 12 bp, Artificial Sequence
  Oligonucleotide primer for the detection of SNP TSC0007229
caattttccaaa

SEQ ID NO: 368202 - DNA, 12 bp, Artificial Sequence
  Oligonucleotide primer for the detection of SNP TSC0007229
gtattagttttt

SEQ ID NO: 368203 - DNA, 12 bp, Artificial Sequence
  Oligonucleotide primer for the detection of SNP TSC0056861
atcactaaattc

SEQ ID NO: 368204 - DNA, 12 bp, Artificial Sequence
  Oligonucleotide primer for the detection of SNP TSC0056863
ttttgaagattt

SEQ ID NO: 368205 - DNA, 12 bp, Artificial Sequence
  Oligonucleotide primer for the detection of SNP TSC0056863
taagagaggatt

SEQ ID NO: 368206 - DNA, 12 bp, Artificial Sequence
  Oligonucleotide primer for the detection of SNP TSC0056864
taaaaacttctt

SEQ ID NO: 368207 - DNA, 12 bp, Artificial Sequence
  Oligonucleotide primer for the detection of SNP TSC0056864
agagaggattaa

SEQ ID NO: 368208 - DNA, 12 bp, Artificial Sequence
  Oligonucleotide primer for the detection of SNP TSC0056865
cataaccaaatt

SEQ ID NO: 368209 - DNA, 12 bp, Artificial Sequence
  Oligonucleotide primer for the detection of SNP TSC0056866
actatattcata

SEQ ID NO: 368210 - DNA, 12 bp, Artificial Sequence
  Oligonucleotide primer for the detection of SNP TSC0056866
atgtttatgaag

SEQ ID NO: 368211 - DNA, 12 bp, Artificial Sequence
  Oligonucleotide primer for the detection of SNP TSC0056867
caataaaacttt

SEQ ID NO: 368212 - DNA, 12 bp, Artificial Sequence
  Oligonucleotide primer for the detection of SNP TSC0056867
cgataaaacttt

SEQ ID NO: 368213 - DNA, 12 bp, Artificial Sequence
  Oligonucleotide primer for the detection of SNP TSC0056867
ggtagattaata

SEQ ID NO: 368214 - DNA, 12 bp, Artificial Sequence
  Oligonucleotide primer for the detection of SNP TSC0056868
aaaaaaccattt

SEQ ID NO: 368215 - DNA, 12 bp, Artificial Sequence
  Oligonucleotide primer for the detection of SNP TSC0056868
ttcaacaaaaaa

SEQ ID NO: 368216 - DNA, 12 bp, Artificial Sequence
  Oligonucleotide primer for the detection of SNP TSC0056869
atattttactta

SEQ ID NO: 368217 - DNA, 12 bp, Artificial Sequence
  Oligonucleotide primer for the detection of SNP TSC0056869
atatcaatcctc

SEQ ID NO: 368218 - DNA, 12 bp, Artificial Sequence
  Oligonucleotide primer for the detection of SNP TSC0009282
caaaccacaact

SEQ ID NO: 368219 - DNA, 12 bp, Artificial Sequence
  Oligonucleotide primer for the detection of SNP TSC0009282
taattagttttg

SEQ ID NO: 368220 - DNA, 12 bp, Artificial Sequence
  Oligonucleotide primer for the detection of SNP TSC0056874
acaacccaacct

SEQ ID NO: 368221 - DNA, 12 bp, Artificial Sequence
  Oligonucleotide primer for the detection of SNP TSC0056874
tgtttgtgataa

SEQ ID NO: 368222 - DNA, 12 bp, Artificial Sequence
  Oligonucleotide primer for the detection of SNP TSC0056875
aataatatttac

SEQ ID NO: 368223 - DNA, 12 bp, Artificial Sequence
  Oligonucleotide primer for the detection of SNP TSC0056875
ttaggggtataa

SEQ ID NO: 368224 - DNA, 12 bp, Artificial Sequence
  Oligonucleotide primer for the detection of SNP TSC0056876
gtatagttgagg

SEQ ID NO: 368225 - DNA, 12 bp, Artificial Sequence
  Oligonucleotide primer for the detection of SNP TSC0056877
aactaccttaat

SEQ ID NO: 368226 - DNA, 12 bp, Artificial Sequence
  Oligonucleotide primer for the detection of SNP TSC0056878
acattttcataa

SEQ ID NO: 368227 - DNA, 12 bp, Artificial Sequence
  Oligonucleotide primer for the detection of SNP TSC0056878
acgttttcataa

SEQ ID NO: 368228 - DNA, 12 bp, Artificial Sequence
  Oligonucleotide primer for the detection of SNP TSC0056878
tgtggaatagtt

SEQ ID NO: 368229 - DNA, 12 bp, Artificial Sequence
  Oligonucleotide primer for the detection of SNP TSC0056878
tataaaataacc

SEQ ID NO: 368230 - DNA, 12 bp, Artificial Sequence
  Oligonucleotide primer for the detection of SNP TSC0056878
atgtttttatga

SEQ ID NO: 368231 - DNA, 12 bp, Artificial Sequence
  Oligonucleotide primer for the detection of SNP TSC0056878
acgtttttatga

SEQ ID NO: 368232 - DNA, 12 bp, Artificial Sequence
  Oligonucleotide primer for the detection of SNP TSC0000942
cttttttcaaac

SEQ ID NO: 368233 - DNA, 12 bp, Artificial Sequence
  Oligonucleotide primer for the detection of SNP TSC0000942
cttttttcgaac

SEQ ID NO: 368234 - DNA, 12 bp, Artificial Sequence
  Oligonucleotide primer for the detection of SNP TSC0000942
ggtaagtttttg

SEQ ID NO: 368235 - DNA, 12 bp, Artificial Sequence
  Oligonucleotide primer for the detection of SNP TSC0056879
accacactcaaa

SEQ ID NO: 368236 - DNA, 12 bp, Artificial Sequence
  Oligonucleotide primer for the detection of SNP TSC0056879
accacgctcaaa

SEQ ID NO: 368237 - DNA, 12 bp, Artificial Sequence
  Oligonucleotide primer for the detection of SNP TSC0056879
tagggtaaattt

SEQ ID NO: 368238 - DNA, 12 bp, Artificial Sequence
  Oligonucleotide primer for the detection of SNP TSC0056879
attatgtttaag

SEQ ID NO: 368239 - DNA, 12 bp, Artificial Sequence
  Oligonucleotide primer for the detection of SNP TSC0056879
attacgtttaag

SEQ ID NO: 368240 - DNA, 12 bp, Artificial Sequence
  Oligonucleotide primer for the detection of SNP TSC0056880
attcccaaatac

SEQ ID NO: 368241 - DNA, 12 bp, Artificial Sequence
  Oligonucleotide primer for the detection of SNP TSC0056880
aaggttgattgt

SEQ ID NO: 368242 - DNA, 12 bp, Artificial Sequence
  Oligonucleotide primer for the detection of SNP TSC0056880
aaggttgatcgt

SEQ ID NO: 368243 - DNA, 12 bp, Artificial Sequence
  Oligonucleotide primer for the detection of SNP TSC0000562
cctcaaaaacaa

SEQ ID NO: 368244 - DNA, 12 bp, Artificial Sequence
  Oligonucleotide primer for the detection of SNP TSC0000562
cctcaaaaacga

SEQ ID NO: 368245 - DNA, 12 bp, Artificial Sequence
  Oligonucleotide primer for the detection of SNP TSC0000562
gtaattttttga

SEQ ID NO: 368246 - DNA, 12 bp, Artificial Sequence
  Oligonucleotide primer for the detection of SNP TSC0000563
cctttaccccaa

SEQ ID NO: 368247 - DNA, 12 bp, Artificial Sequence
  Oligonucleotide primer for the detection of SNP TSC0000563
gaaaatgtagaa

SEQ ID NO: 368248 - DNA, 12 bp, Artificial Sequence
  Oligonucleotide primer for the detection of SNP TSC0056884
aactcctaccta

SEQ ID NO: 368249 - DNA, 12 bp, Artificial Sequence
  Oligonucleotide primer for the detection of SNP TSC0056884
tactttcccaaa

SEQ ID NO: 368250 - DNA, 12 bp, Artificial Sequence
  Oligonucleotide primer for the detection of SNP TSC0056885
tggtagtttatt

SEQ ID NO: 368251 - DNA, 12 bp, Artificial Sequence
  Oligonucleotide primer for the detection of SNP TSC0056885
taataatccatc

SEQ ID NO: 368252 - DNA, 12 bp, Artificial Sequence
  Oligonucleotide primer for the detection of SNP TSC0056885
gtttggggagtg

SEQ ID NO: 368253 - DNA, 12 bp, Artificial Sequence
  Oligonucleotide primer for the detection of SNP TSC0056886
cttccaatcctc

SEQ ID NO: 368254 - DNA, 12 bp, Artificial Sequence
  Oligonucleotide primer for the detection of SNP TSC0056886
gggttatgagaa

SEQ ID NO: 368255 - DNA, 12 bp, Artificial Sequence
  Oligonucleotide primer for the detection of SNP TSC0056888
tcaaaaccttta

SEQ ID NO: 368256 - DNA, 12 bp, Artificial Sequence
  Oligonucleotide primer for the detection of SNP TSC0056888
gtttagagttga

SEQ ID NO: 368257 - DNA, 12 bp, Artificial Sequence
  Oligonucleotide primer for the detection of SNP TSC0056888
ctcaaaactaaa

SEQ ID NO: 368258 - DNA, 12 bp, Artificial Sequence
  Oligonucleotide primer for the detection of SNP TSC0006995
gagttggtttaa

SEQ ID NO: 368259 - DNA, 12 bp, Artificial Sequence
  Oligonucleotide primer for the detection of SNP TSC0056889
taacaatattta

SEQ ID NO: 368260 - DNA, 12 bp, Artificial Sequence
  Oligonucleotide primer for the detection of SNP TSC0056889
caacataactta

SEQ ID NO: 368261 - DNA, 12 bp, Artificial Sequence
  Oligonucleotide primer for the detection of SNP TSC0056889
tagtaatgttta

SEQ ID NO: 368262 - DNA, 12 bp, Artificial Sequence
  Oligonucleotide primer for the detection of SNP TSC0056890
gattttttataa

SEQ ID NO: 368263 - DNA, 12 bp, Artificial Sequence
  Oligonucleotide primer for the detection of SNP TSC0056890
tttgttaaatat

SEQ ID NO: 368264 - DNA, 12 bp, Artificial Sequence
  Oligonucleotide primer for the detection of SNP TSC0056890
cttattaaacat

SEQ ID NO: 368265 - DNA, 12 bp, Artificial Sequence
  Oligonucleotide primer for the detection of SNP TSC0056892
caatcacataac

SEQ ID NO: 368266 - DNA, 12 bp, Artificial Sequence
  Oligonucleotide primer for the detection of SNP TSC0056892
agatgttagaag

SEQ ID NO: 368267 - DNA, 12 bp, Artificial Sequence
  Oligonucleotide primer for the detection of SNP TSC0009575
aaaccaaatcat

SEQ ID NO: 368268 - DNA, 12 bp, Artificial Sequence
  Oligonucleotide primer for the detection of SNP TSC0004556
agtttaagatat

SEQ ID NO: 368269 - DNA, 12 bp, Artificial Sequence
  Oligonucleotide primer for the detection of SNP TSC0056895
aaacctaaataa

SEQ ID NO: 368270 - DNA, 12 bp, Artificial Sequence
  Oligonucleotide primer for the detection of SNP TSC0056895
ttcataaaaata

SEQ ID NO: 368271 - DNA, 12 bp, Artificial Sequence
  Oligonucleotide primer for the detection of SNP TSC0056895
aatttgaatagt

SEQ ID NO: 368272 - DNA, 12 bp, Artificial Sequence
  Oligonucleotide primer for the detection of SNP TSC0056895
aatttgaatagc

SEQ ID NO: 368273 - DNA, 12 bp, Artificial Sequence
  Oligonucleotide primer for the detection of SNP TSC0056896
aatataactttt

SEQ ID NO: 368274 - DNA, 12 bp, Artificial Sequence
  Oligonucleotide primer for the detection of SNP TSC0005703
taacatccacta

SEQ ID NO: 368275 - DNA, 12 bp, Artificial Sequence
  Oligonucleotide primer for the detection of SNP TSC0005703
agtgtagttatg

SEQ ID NO: 368276 - DNA, 12 bp, Artificial Sequence
  Oligonucleotide primer for the detection of SNP TSC0005703
agtgtagttacg

SEQ ID NO: 368277 - DNA, 12 bp, Artificial Sequence
  Oligonucleotide primer for the detection of SNP TSC0056897
ctctcactcccc

SEQ ID NO: 368278 - DNA, 12 bp, Artificial Sequence
  Oligonucleotide primer for the detection of SNP TSC0056897
tgaatataggtt

SEQ ID NO: 368279 - DNA, 12 bp, Artificial Sequence
  Oligonucleotide primer for the detection of SNP TSC0056897
tgaatataggtc

SEQ ID NO: 368280 - DNA, 12 bp, Artificial Sequence
  Oligonucleotide primer for the detection of SNP TSC0056897
taaatacaaacc

SEQ ID NO: 368281 - DNA, 12 bp, Artificial Sequence
  Oligonucleotide primer for the detection of SNP TSC0056898
cacccaaacaaa

SEQ ID NO: 368282 - DNA, 12 bp, Artificial Sequence
  Oligonucleotide primer for the detection of SNP TSC0056898
gtgttattgtat

SEQ ID NO: 368283 - DNA, 12 bp, Artificial Sequence
  Oligonucleotide primer for the detection of SNP TSC0056898
cataccactaca

SEQ ID NO: 368284 - DNA, 12 bp, Artificial Sequence
  Oligonucleotide primer for the detection of SNP TSC0056898
cgtaccactaca

SEQ ID NO: 368285 - DNA, 12 bp, Artificial Sequence
  Oligonucleotide primer for the detection of SNP TSC0056899
aaacctcacaat

SEQ ID NO: 368286 - DNA, 12 bp, Artificial Sequence
  Oligonucleotide primer for the detection of SNP TSC0056899
cacctttcacca

SEQ ID NO: 368287 - DNA, 12 bp, Artificial Sequence
  Oligonucleotide primer for the detection of SNP TSC0056899
agattttataat

SEQ ID NO: 368288 - DNA, 12 bp, Artificial Sequence
  Oligonucleotide primer for the detection of SNP TSC0056901
accctaatatca

SEQ ID NO: 368289 - DNA, 12 bp, Artificial Sequence
  Oligonucleotide primer for the detection of SNP TSC0056901
gtttttttaatt

SEQ ID NO: 368290 - DNA, 12 bp, Artificial Sequence
  Oligonucleotide primer for the detection of SNP TSC0056903
taactctctctt

SEQ ID NO: 368291 - DNA, 12 bp, Artificial Sequence
  Oligonucleotide primer for the detection of SNP TSC0056904
tctcaataacct

SEQ ID NO: 368292 - DNA, 12 bp, Artificial Sequence
  Oligonucleotide primer for the detection of SNP TSC0005433
cacccttaatct

SEQ ID NO: 368293 - DNA, 12 bp, Artificial Sequence
  Oligonucleotide primer for the detection of SNP TSC0005433
agatgtttggga

SEQ ID NO: 368294 - DNA, 12 bp, Artificial Sequence
  Oligonucleotide primer for the detection of SNP TSC0056905
aaatacataaac

SEQ ID NO: 368295 - DNA, 12 bp, Artificial Sequence
  Oligonucleotide primer for the detection of SNP TSC0056905
taaaatttattg

SEQ ID NO: 368296 - DNA, 12 bp, Artificial Sequence
  Oligonucleotide primer for the detection of SNP TSC0007451
taaataagatag

SEQ ID NO: 368297 - DNA, 12 bp, Artificial Sequence
  Oligonucleotide primer for the detection of SNP TSC0007452
ctctttcctttc

SEQ ID NO: 368298 - DNA, 12 bp, Artificial Sequence
  Oligonucleotide primer for the detection of SNP TSC0007452
aaggggtttaaa

SEQ ID NO: 368299 - DNA, 12 bp, Artificial Sequence
  Oligonucleotide primer for the detection of SNP TSC0056909
atattaaaggta

SEQ ID NO: 368300 - DNA, 12 bp, Artificial Sequence
  Oligonucleotide primer for the detection of SNP TSC0056909
acactaaaaaca

SEQ ID NO: 368301 - DNA, 12 bp, Artificial Sequence
  Oligonucleotide primer for the detection of SNP TSC0056909
tgtaattagtat

SEQ ID NO: 368302 - DNA, 12 bp, Artificial Sequence
  Oligonucleotide primer for the detection of SNP TSC0007943
accccctaccaa

SEQ ID NO: 368303 - DNA, 12 bp, Artificial Sequence
  Oligonucleotide primer for the detection of SNP TSC0007943
ccaattttccct

SEQ ID NO: 368304 - DNA, 12 bp, Artificial Sequence
  Oligonucleotide primer for the detection of SNP TSC0007944
cctaaaaactat

SEQ ID NO: 368305 - DNA, 12 bp, Artificial Sequence
  Oligonucleotide primer for the detection of SNP TSC0006073
actactttaact

SEQ ID NO: 368306 - DNA, 12 bp, Artificial Sequence
  Oligonucleotide primer for the detection of SNP TSC0006073
aattgatgggat

SEQ ID NO: 368307 - DNA, 12 bp, Artificial Sequence
  Oligonucleotide primer for the detection of SNP TSC0006073
gttgttttagtt

SEQ ID NO: 368308 - DNA, 12 bp, Artificial Sequence
  Oligonucleotide primer for the detection of SNP TSC0056910
tttactttttac

SEQ ID NO: 368309 - DNA, 12 bp, Artificial Sequence
  Oligonucleotide primer for the detection of SNP TSC0056910
tagagtagtaag

SEQ ID NO: 368310 - DNA, 12 bp, Artificial Sequence
  Oligonucleotide primer for the detection of SNP TSC0056911
tactaataatat

SEQ ID NO: 368311 - DNA, 12 bp, Artificial Sequence
  Oligonucleotide primer for the detection of SNP TSC0056911
ttatgtgaaaag

SEQ ID NO: 368312 - DNA, 12 bp, Artificial Sequence
  Oligonucleotide primer for the detection of SNP TSC0056912
aaatcctataat

SEQ ID NO: 368313 - DNA, 12 bp, Artificial Sequence
  Oligonucleotide primer for the detection of SNP TSC0056913
atctctatttat

SEQ ID NO: 368314 - DNA, 12 bp, Artificial Sequence
  Oligonucleotide primer for the detection of SNP TSC0056913
ggttaattaagt

SEQ ID NO: 368315 - DNA, 12 bp, Artificial Sequence
  Oligonucleotide primer for the detection of SNP TSC0056914
cattttttatct

SEQ ID NO: 368316 - DNA, 12 bp, Artificial Sequence
  Oligonucleotide primer for the detection of SNP TSC0056914
aagtaataaata

SEQ ID NO: 368317 - DNA, 12 bp, Artificial Sequence
  Oligonucleotide primer for the detection of SNP TSC0056919
  unsure (6): unknown base
atttcnaaatta

SEQ ID NO: 368318 - DNA, 12 bp, Artificial Sequence
  Oligonucleotide primer for the detection of SNP TSC0056919
ttaacacaatac

SEQ ID NO: 368319 - DNA, 12 bp, Artificial Sequence
  Oligonucleotide primer for the detection of SNP TSC0056919
  unsure (6): unknown base
attttnaagttg

SEQ ID NO: 368320 - DNA, 12 bp, Artificial Sequence
  Oligonucleotide primer for the detection of SNP TSC0006338
taaattttcctt

SEQ ID NO: 368321 - DNA, 12 bp, Artificial Sequence
  Oligonucleotide primer for the detection of SNP TSC0056921
ttccttcacttc

SEQ ID NO: 368322 - DNA, 12 bp, Artificial Sequence
  Oligonucleotide primer for the detection of SNP TSC0056921
gaagagagagag

SEQ ID NO: 368323 - DNA, 12 bp, Artificial Sequence
  Oligonucleotide primer for the detection of SNP TSC0056922
tgtttttattta

SEQ ID NO: 368324 - DNA, 12 bp, Artificial Sequence
  Oligonucleotide primer for the detection of SNP TSC0056924
tacatataatta

SEQ ID NO: 368325 - DNA, 12 bp, Artificial Sequence
  Oligonucleotide primer for the detection of SNP TSC0056924
tcttctttcttc

SEQ ID NO: 368326 - DNA, 12 bp, Artificial Sequence
  Oligonucleotide primer for the detection of SNP TSC0056924
tgtatatagttg

SEQ ID NO: 368327 - DNA, 12 bp, Artificial Sequence
  Oligonucleotide primer for the detection of SNP TSC0056928
ataacatcatct

SEQ ID NO: 368328 - DNA, 12 bp, Artificial Sequence
  Oligonucleotide primer for the detection of SNP TSC0056928
aattaatattta

SEQ ID NO: 368329 - DNA, 12 bp, Artificial Sequence
  Oligonucleotide primer for the detection of SNP TSC0056929
caataaaaaacc

SEQ ID NO: 368330 - DNA, 12 bp, Artificial Sequence
  Oligonucleotide primer for the detection of SNP TSC0056930
tggttggatgga

SEQ ID NO: 368331 - DNA, 12 bp, Artificial Sequence
  Oligonucleotide primer for the detection of SNP TSC0056931
taattatgatat

SEQ ID NO: 368332 - DNA, 12 bp, Artificial Sequence
  Oligonucleotide primer for the detection of SNP TSC0056931
caaccataacac

SEQ ID NO: 368333 - DNA, 12 bp, Artificial Sequence
  Oligonucleotide primer for the detection of SNP TSC0056931
gaggtggggttt

SEQ ID NO: 368334 - DNA, 12 bp, Artificial Sequence
  Oligonucleotide primer for the detection of SNP TSC0056932
tattctaattat

SEQ ID NO: 368335 - DNA, 12 bp, Artificial Sequence
  Oligonucleotide primer for the detection of SNP TSC0056935
aagttatagaat

SEQ ID NO: 368336 - DNA, 12 bp, Artificial Sequence
  Oligonucleotide primer for the detection of SNP TSC0056935
aaatttgtttgg

SEQ ID NO: 368337 - DNA, 12 bp, Artificial Sequence
  Oligonucleotide primer for the detection of SNP TSC0056936
tataaggaagat

SEQ ID NO: 368338 - DNA, 12 bp, Artificial Sequence
  Oligonucleotide primer for the detection of SNP TSC0056936
aatttgttgttg

SEQ ID NO: 368339 - DNA, 12 bp, Artificial Sequence
  Oligonucleotide primer for the detection of SNP TSC0056937
caaatttttttt

SEQ ID NO: 368340 - DNA, 12 bp, Artificial Sequence
  Oligonucleotide primer for the detection of SNP TSC0056937
tttaaatagata

SEQ ID NO: 368341 - DNA, 12 bp, Artificial Sequence
  Oligonucleotide primer for the detection of SNP TSC0056938
attataaataat

SEQ ID NO: 368342 - DNA, 12 bp, Artificial Sequence
  Oligonucleotide primer for the detection of SNP TSC0056940
acccaaaaattc

SEQ ID NO: 368343 - DNA, 12 bp, Artificial Sequence
  Oligonucleotide primer for the detection of SNP TSC0056940
tttggtatattg

SEQ ID NO: 368344 - DNA, 12 bp, Artificial Sequence
  Oligonucleotide primer for the detection of SNP TSC0056942
taaatcccattt

SEQ ID NO: 368345 - DNA, 12 bp, Artificial Sequence
  Oligonucleotide primer for the detection of SNP TSC0056942
gagagagaaagg

SEQ ID NO: 368346 - DNA, 12 bp, Artificial Sequence
  Oligonucleotide primer for the detection of SNP TSC0056943
acccttacccct

SEQ ID NO: 368347 - DNA, 12 bp, Artificial Sequence
  Oligonucleotide primer for the detection of SNP TSC0056943
agaaaggttatg

SEQ ID NO: 368348 - DNA, 12 bp, Artificial Sequence
  Oligonucleotide primer for the detection of SNP TSC0056943
aaaaaaaccata

SEQ ID NO: 368349 - DNA, 12 bp, Artificial Sequence
  Oligonucleotide primer for the detection of SNP TSC0056944
ttgtttatgaat

SEQ ID NO: 368350 - DNA, 12 bp, Artificial Sequence
  Oligonucleotide primer for the detection of SNP TSC0056946
atacacaatctt

SEQ ID NO: 368351 - DNA, 12 bp, Artificial Sequence
  Oligonucleotide primer for the detection of SNP TSC0056946
agagttttgagg

SEQ ID NO: 368352 - DNA, 12 bp, Artificial Sequence
  Oligonucleotide primer for the detection of SNP TSC0056951
acaaaaccttcc

SEQ ID NO: 368353 - DNA, 12 bp, Artificial Sequence
  Oligonucleotide primer for the detection of SNP TSC0056951
gtgattttatga

SEQ ID NO: 368354 - DNA, 12 bp, Artificial Sequence
  Oligonucleotide primer for the detection of SNP TSC0056952
acaaaatttatc

SEQ ID NO: 368355 - DNA, 12 bp, Artificial Sequence
  Oligonucleotide primer for the detection of SNP TSC0056954
aaattatatact

SEQ ID NO: 368356 - DNA, 12 bp, Artificial Sequence
  Oligonucleotide primer for the detection of SNP TSC0056954
tttgatggaggg

SEQ ID NO: 368357 - DNA, 12 bp, Artificial Sequence
  Oligonucleotide primer for the detection of SNP TSC0056954
tttgacggaggg

SEQ ID NO: 368358 - DNA, 12 bp, Artificial Sequence
  Oligonucleotide primer for the detection of SNP TSC0056955
ccaaaaatcaca

SEQ ID NO: 368359 - DNA, 12 bp, Artificial Sequence
  Oligonucleotide primer for the detection of SNP TSC0056955
ataagatgtttt

SEQ ID NO: 368360 - DNA, 12 bp, Artificial Sequence
  Oligonucleotide primer for the detection of SNP TSC0056955
taaaatatctca

SEQ ID NO: 368361 - DNA, 12 bp, Artificial Sequence
  Oligonucleotide primer for the detection of SNP TSC0056955
tttaaggattat

SEQ ID NO: 368362 - DNA, 12 bp, Artificial Sequence
  Oligonucleotide primer for the detection of SNP TSC0056958
taggttggttaa

SEQ ID NO: 368363 - DNA, 12 bp, Artificial Sequence
  Oligonucleotide primer for the detection of SNP TSC0056965
acaaatcctctc

SEQ ID NO: 368364 - DNA, 12 bp, Artificial Sequence
  Oligonucleotide primer for the detection of SNP TSC0056966
ggtaagttgtgg

SEQ ID NO: 368365 - DNA, 12 bp, Artificial Sequence
  Oligonucleotide primer for the detection of SNP TSC0056966
aataaattataa

SEQ ID NO: 368366 - DNA, 12 bp, Artificial Sequence
  Oligonucleotide primer for the detection of SNP TSC0056968
ccctaactcctt

SEQ ID NO: 368367 - DNA, 12 bp, Artificial Sequence
  Oligonucleotide primer for the detection of SNP TSC0056968
taggtagttaga

SEQ ID NO: 368368 - DNA, 12 bp, Artificial Sequence
  Oligonucleotide primer for the detection of SNP TSC0056975
taaaaataaaca

SEQ ID NO: 368369 - DNA, 12 bp, Artificial Sequence
  Oligonucleotide primer for the detection of SNP TSC0004768
aattaaattctt

SEQ ID NO: 368370 - DNA, 12 bp, Artificial Sequence
  Oligonucleotide primer for the detection of SNP TSC0004768
ataagtagagtt

SEQ ID NO: 368371 - DNA, 12 bp, Artificial Sequence
  Oligonucleotide primer for the detection of SNP TSC0056983
ctcacaaaaaat

SEQ ID NO: 368372 - DNA, 12 bp, Artificial Sequence
  Oligonucleotide primer for the detection of SNP TSC0056983
ctcgcaaaaaat

SEQ ID NO: 368373 - DNA, 12 bp, Artificial Sequence
  Oligonucleotide primer for the detection of SNP TSC0056984
atttaaaatttc

SEQ ID NO: 368374 - DNA, 12 bp, Artificial Sequence
  Oligonucleotide primer for the detection of SNP TSC0056984
tagttatataga

SEQ ID NO: 368375 - DNA, 12 bp, Artificial Sequence
  Oligonucleotide primer for the detection of SNP TSC0056985
gaagaagtgtat

SEQ ID NO: 368376 - DNA, 12 bp, Artificial Sequence
  Oligonucleotide primer for the detection of SNP TSC0056985
gaagaagcgtat

SEQ ID NO: 368377 - DNA, 12 bp, Artificial Sequence
  Oligonucleotide primer for the detection of SNP TSC0056985
aaaaaaacacac

SEQ ID NO: 368378 - DNA, 12 bp, Artificial Sequence
  Oligonucleotide primer for the detection of SNP TSC0056985
aaaaaaacgcac

SEQ ID NO: 368379 - DNA, 12 bp, Artificial Sequence
  Oligonucleotide primer for the detection of SNP TSC0056985
tggtttgtgggt

SEQ ID NO: 368380 - DNA, 12 bp, Artificial Sequence
  Oligonucleotide primer for the detection of SNP TSC0056986
ttttgttgatta

SEQ ID NO: 368381 - DNA, 12 bp, Artificial Sequence
  Oligonucleotide primer for the detection of SNP TSC0056987
tagattatatta

SEQ ID NO: 368382 - DNA, 12 bp, Artificial Sequence
  Oligonucleotide primer for the detection of SNP TSC0056987
caaattacatta

SEQ ID NO: 368383 - DNA, 12 bp, Artificial Sequence
  Oligonucleotide primer for the detection of SNP TSC0056987
tgagaagttgta

SEQ ID NO: 368384 - DNA, 12 bp, Artificial Sequence
  Oligonucleotide primer for the detection of SNP TSC0056990
tttttgagacgg

SEQ ID NO: 368385 - DNA, 12 bp, Artificial Sequence
  Oligonucleotide primer for the detection of SNP TSC0056990
tttttaaaacga

SEQ ID NO: 368386 - DNA, 12 bp, Artificial Sequence
  Oligonucleotide primer for the detection of SNP TSC0056994
taaactatccta

SEQ ID NO: 368387 - DNA, 12 bp, Artificial Sequence
  Oligonucleotide primer for the detection of SNP TSC0056994
attttaagaata

SEQ ID NO: 368388 - DNA, 12 bp, Artificial Sequence
  Oligonucleotide primer for the detection of SNP TSC0056994
attccaaaaata

SEQ ID NO: 368389 - DNA, 12 bp, Artificial Sequence
  Oligonucleotide primer for the detection of SNP TSC0010037
atatactataat

SEQ ID NO: 368390 - DNA, 12 bp, Artificial Sequence
  Oligonucleotide primer for the detection of SNP TSC0010037
ttaatattattt

SEQ ID NO: 368391 - DNA, 12 bp, Artificial Sequence
  Oligonucleotide primer for the detection of SNP TSC0010037
gtgtgttgtaat

SEQ ID NO: 368392 - DNA, 12 bp, Artificial Sequence
  Oligonucleotide primer for the detection of SNP TSC0010038
accatacccaaa

SEQ ID NO: 368393 - DNA, 12 bp, Artificial Sequence
  Oligonucleotide primer for the detection of SNP TSC0010038
accatacccgaa

SEQ ID NO: 368394 - DNA, 12 bp, Artificial Sequence
  Oligonucleotide primer for the detection of SNP TSC0010038
aaataagaaagt

SEQ ID NO: 368395 - DNA, 12 bp, Artificial Sequence
  Oligonucleotide primer for the detection of SNP TSC0010038
attatgttcggg

SEQ ID NO: 368396 - DNA, 12 bp, Artificial Sequence
  Oligonucleotide primer for the detection of SNP TSC0056998
ctcataaaatat

SEQ ID NO: 368397 - DNA, 12 bp, Artificial Sequence
  Oligonucleotide primer for the detection of SNP TSC0056998
gaatttgtttga

SEQ ID NO: 368398 - DNA, 12 bp, Artificial Sequence
  Oligonucleotide primer for the detection of SNP TSC0004792
taggagtaaata

SEQ ID NO: 368399 - DNA, 12 bp, Artificial Sequence
  Oligonucleotide primer for the detection of SNP TSC0004792
ttttagagttgg

SEQ ID NO: 368400 - DNA, 12 bp, Artificial Sequence
  Oligonucleotide primer for the detection of SNP TSC0004793
aattcttaactt

SEQ ID NO: 368401 - DNA, 12 bp, Artificial Sequence
  Oligonucleotide primer for the detection of SNP TSC0004793
atttgttttaag

SEQ ID NO: 368402 - DNA, 12 bp, Artificial Sequence
  Oligonucleotide primer for the detection of SNP TSC0056999
aaaaaatactac

SEQ ID NO: 368403 - DNA, 12 bp, Artificial Sequence
  Oligonucleotide primer for the detection of SNP TSC0056999
tagataaattaa

SEQ ID NO: 368404 - DNA, 12 bp, Artificial Sequence
  Oligonucleotide primer for the detection of SNP TSC0004833
atggaaagatag

SEQ ID NO: 368405 - DNA, 12 bp, Artificial Sequence
  Oligonucleotide primer for the detection of SNP TSC0057007
atattggaaggg

SEQ ID NO: 368406 - DNA, 12 bp, Artificial Sequence
  Oligonucleotide primer for the detection of SNP TSC0057007
gaggagatagta

SEQ ID NO: 368407 - DNA, 12 bp, Artificial Sequence
  Oligonucleotide primer for the detection of SNP TSC0057010
cataacaaaact

SEQ ID NO: 368408 - DNA, 12 bp, Artificial Sequence
  Oligonucleotide primer for the detection of SNP TSC0057010
tagataggagaa

SEQ ID NO: 368409 - DNA, 12 bp, Artificial Sequence
  Oligonucleotide primer for the detection of SNP TSC0057010
tatggtagaatt

SEQ ID NO: 368410 - DNA, 12 bp, Artificial Sequence
  Oligonucleotide primer for the detection of SNP TSC0057012
gtttgaaaatat

SEQ ID NO: 368411 - DNA, 12 bp, Artificial Sequence
  Oligonucleotide primer for the detection of SNP TSC0057012
atctaaaaatat

SEQ ID NO: 368412 - DNA, 12 bp, Artificial Sequence
  Oligonucleotide primer for the detection of SNP TSC0057012
atagattttgat

SEQ ID NO: 368413 - DNA, 12 bp, Artificial Sequence
  Oligonucleotide primer for the detection of SNP TSC0057013
tcttcatttata

SEQ ID NO: 368414 - DNA, 12 bp, Artificial Sequence
  Oligonucleotide primer for the detection of SNP TSC0057013
gttaatgggttt

SEQ ID NO: 368415 - DNA, 12 bp, Artificial Sequence
  Oligonucleotide primer for the detection of SNP TSC0057013
tactaataaatc

SEQ ID NO: 368416 - DNA, 12 bp, Artificial Sequence
  Oligonucleotide primer for the detection of SNP TSC0057014
ctacactacaac

SEQ ID NO: 368417 - DNA, 12 bp, Artificial Sequence
  Oligonucleotide primer for the detection of SNP TSC0057015
caccctataaaa

SEQ ID NO: 368418 - DNA, 12 bp, Artificial Sequence
  Oligonucleotide primer for the detection of SNP TSC0057015
tattttgtgaaa

SEQ ID NO: 368419 - DNA, 12 bp, Artificial Sequence
  Oligonucleotide primer for the detection of SNP TSC0057017
caactaacttcc

SEQ ID NO: 368420 - DNA, 12 bp, Artificial Sequence
  Oligonucleotide primer for the detection of SNP TSC0057017
cgactaacttcc

SEQ ID NO: 368421 - DNA, 12 bp, Artificial Sequence
  Oligonucleotide primer for the detection of SNP TSC0057017
atatagaaagta

SEQ ID NO: 368422 - DNA, 12 bp, Artificial Sequence
  Oligonucleotide primer for the detection of SNP TSC0057017
tggttgattttt

SEQ ID NO: 368423 - DNA, 12 bp, Artificial Sequence
  Oligonucleotide primer for the detection of SNP TSC0057017
cggttgattttt

SEQ ID NO: 368424 - DNA, 12 bp, Artificial Sequence
  Oligonucleotide primer for the detection of SNP TSC0057017
tggttgattttc

SEQ ID NO: 368425 - DNA, 12 bp, Artificial Sequence
  Oligonucleotide primer for the detection of SNP TSC0057017
cggttgattttc

SEQ ID NO: 368426 - DNA, 12 bp, Artificial Sequence
  Oligonucleotide primer for the detection of SNP TSC0057018
tatcccaaaata

SEQ ID NO: 368427 - DNA, 12 bp, Artificial Sequence
  Oligonucleotide primer for the detection of SNP TSC0057018
aatttggaaatt

SEQ ID NO: 368428 - DNA, 12 bp, Artificial Sequence
  Oligonucleotide primer for the detection of SNP TSC0057023
attttattgttg

SEQ ID NO: 368429 - DNA, 12 bp, Artificial Sequence
  Oligonucleotide primer for the detection of SNP TSC0057026
accataaaaatt

SEQ ID NO: 368430 - DNA, 12 bp, Artificial Sequence
  Oligonucleotide primer for the detection of SNP TSC0057026
tgatgagtatgg

SEQ ID NO: 368431 - DNA, 12 bp, Artificial Sequence
  Oligonucleotide primer for the detection of SNP TSC0057026
tgacgagtatgg

SEQ ID NO: 368432 - DNA, 12 bp, Artificial Sequence
  Oligonucleotide primer for the detection of SNP TSC0057026
tgatgagtacgg

SEQ ID NO: 368433 - DNA, 12 bp, Artificial Sequence
  Oligonucleotide primer for the detection of SNP TSC0057026
tgacgagtacgg

SEQ ID NO: 368434 - DNA, 12 bp, Artificial Sequence
  Oligonucleotide primer for the detection of SNP TSC0057027
tttaaaacctaa

SEQ ID NO: 368435 - DNA, 12 bp, Artificial Sequence
  Oligonucleotide primer for the detection of SNP TSC0057027
aggggttgtgtt

SEQ ID NO: 368436 - DNA, 12 bp, Artificial Sequence
  Oligonucleotide primer for the detection of SNP TSC0057027
aggggtcgtgtt

SEQ ID NO: 368437 - DNA, 12 bp, Artificial Sequence
  Oligonucleotide primer for the detection of SNP TSC0057027
caaaaaccatac

SEQ ID NO: 368438 - DNA, 12 bp, Artificial Sequence
  Oligonucleotide primer for the detection of SNP TSC0057027
caaaaaccgtac

SEQ ID NO: 368439 - DNA, 12 bp, Artificial Sequence
  Oligonucleotide primer for the detection of SNP TSC0057027
ttagggtttgat

SEQ ID NO: 368440 - DNA, 12 bp, Artificial Sequence
  Oligonucleotide primer for the detection of SNP TSC0057027
ttagggtttgac

SEQ ID NO: 368441 - DNA, 12 bp, Artificial Sequence
  Oligonucleotide primer for the detection of SNP TSC0057028
caaatacaaatc

SEQ ID NO: 368442 - DNA, 12 bp, Artificial Sequence
  Oligonucleotide primer for the detection of SNP TSC0057028
caaatacgaatc

SEQ ID NO: 368443 - DNA, 12 bp, Artificial Sequence
  Oligonucleotide primer for the detection of SNP TSC0057028
gttgataaggag

SEQ ID NO: 368444 - DNA, 12 bp, Artificial Sequence
  Oligonucleotide primer for the detection of SNP TSC0057029
aatttacaacct

SEQ ID NO: 368445 - DNA, 12 bp, Artificial Sequence
  Oligonucleotide primer for the detection of SNP TSC0057029
cctataaaattt

SEQ ID NO: 368446 - DNA, 12 bp, Artificial Sequence
  Oligonucleotide primer for the detection of SNP TSC0057029
gatttatagttt

SEQ ID NO: 368447 - DNA, 12 bp, Artificial Sequence
  Oligonucleotide primer for the detection of SNP TSC0057030
tttctataaaat

SEQ ID NO: 368448 - DNA, 12 bp, Artificial Sequence
  Oligonucleotide primer for the detection of SNP TSC0057030
tttcacctttca

SEQ ID NO: 368449 - DNA, 12 bp, Artificial Sequence
  Oligonucleotide primer for the detection of SNP TSC0057030
tttttgtgaaat

SEQ ID NO: 368450 - DNA, 12 bp, Artificial Sequence
  Oligonucleotide primer for the detection of SNP TSC0057031
aataaaacttac

SEQ ID NO: 368451 - DNA, 12 bp, Artificial Sequence
  Oligonukleotid-Primer
taatttttagtg

SEQ ID NO: 368452 - DNA, 12 bp, Artificial Sequence
  Oligonucleotide primer for the detection of SNP TSC0057032
aaaaactcaacc

SEQ ID NO: 368453 - DNA, 12 bp, Artificial Sequence
  Oligonucleotide primer for the detection of SNP TSC0057032
aaaaactcgacc

SEQ ID NO: 368454 - DNA, 12 bp, Artificial Sequence
  Oligonucleotide primer for the detection of SNP TSC0057032
caacccatatta

SEQ ID NO: 368455 - DNA, 12 bp, Artificial Sequence
  Oligonucleotide primer for the detection of SNP TSC0057032
gaaaatttggtt

SEQ ID NO: 368456 - DNA, 12 bp, Artificial Sequence
  Oligonucleotide primer for the detection of SNP TSC0057032
gaaaattcggtt

SEQ ID NO: 368457 - DNA, 12 bp, Artificial Sequence
  Oligonucleotide primer for the detection of SNP TSC0057034
aattatattcta

SEQ ID NO: 368458 - DNA, 12 bp, Artificial Sequence
  Oligonucleotide primer for the detection of SNP TSC0057034
agtatggtatta

SEQ ID NO: 368459 - DNA, 12 bp, Artificial Sequence
  Oligonukleotid-Primer
gtatttagttta

SEQ ID NO: 368460 - DNA, 12 bp, Artificial Sequence
  Oligonucleotide primer for the detection of SNP TSC0057041
caaaataaaatt

SEQ ID NO: 368461 - DNA, 12 bp, Artificial Sequence
  Oligonucleotide primer for the detection of SNP TSC0057041
taagatgagatt

SEQ ID NO: 368462 - DNA, 12 bp, Artificial Sequence
  Oligonucleotide primer for the detection of SNP TSC0057042
cctaataattaa

SEQ ID NO: 368463 - DNA, 12 bp, Artificial Sequence
  Oligonukleotid-Primer
ttttgatgttgt

SEQ ID NO: 368464 - DNA, 12 bp, Artificial Sequence
  Oligonucleotide primer for the detection of SNP TSC0057042
ttttgacgttgt

SEQ ID NO: 368465 - DNA, 12 bp, Artificial Sequence
  Oligonucleotide primer for the detection of SNP TSC0057042
ctttaacactac

SEQ ID NO: 368466 - DNA, 12 bp, Artificial Sequence
  Oligonucleotide primer for the detection of SNP TSC0057042
ctttaacgctac

SEQ ID NO: 368467 - DNA, 12 bp, Artificial Sequence
  Oligonucleotide primer for the detection of SNP TSC0057042
tttgataattaa

SEQ ID NO: 368468 - DNA, 12 bp, Artificial Sequence
  Oligonucleotide primer for the detection of SNP TSC0057043
aatataataata

SEQ ID NO: 368469 - DNA, 12 bp, Artificial Sequence
  Oligonucleotide primer for the detection of SNP TSC0057043
gagtttagagat

SEQ ID NO: 368470 - DNA, 12 bp, Artificial Sequence
  Oligonucleotide primer for the detection of SNP TSC0057043
aatccaaaaaca

SEQ ID NO: 368471 - DNA, 12 bp, Artificial Sequence
  Oligonucleotide primer for the detection of SNP TSC0057043
agtataatgatg

SEQ ID NO: 368472 - DNA, 12 bp, Artificial Sequence
  Oligonucleotide primer for the detection of SNP TSC0057044
tttgggaggtcg

SEQ ID NO: 368473 - DNA, 12 bp, Artificial Sequence
  Oligonucleotide primer for the detection of SNP TSC0057045
aacttccttttt

SEQ ID NO: 368474 - DNA, 12 bp, Artificial Sequence
  Oligonucleotide primer for the detection of SNP TSC0057045
gtgttaaaaaaa

SEQ ID NO: 368475 - DNA, 12 bp, Artificial Sequence
  Oligonucleotide primer for the detection of SNP TSC0057046
tccctctctaat

SEQ ID NO: 368476 - DNA, 12 bp, Artificial Sequence
  Oligonucleotide primer for the detection of SNP TSC0057046
ttatggatttga

SEQ ID NO: 368477 - DNA, 12 bp, Artificial Sequence
  Oligonucleotide primer for the detection of SNP TSC0057047
aaatctcacaat

SEQ ID NO: 368478 - DNA, 12 bp, Artificial Sequence
  Oligonucleotide primer for the detection of SNP TSC0057047
attgaatttgag

SEQ ID NO: 368479 - DNA, 12 bp, Artificial Sequence
  Oligonucleotide primer for the detection of SNP TSC0010523
atcttattacac

SEQ ID NO: 368480 - DNA, 12 bp, Artificial Sequence
  Oligonucleotide primer for the detection of SNP TSC0010523
gtagttaataaa

SEQ ID NO: 368481 - DNA, 12 bp, Artificial Sequence
  Oligonucleotide primer for the detection of SNP TSC0010524
cataactacaat

SEQ ID NO: 368482 - DNA, 12 bp, Artificial Sequence
  Oligonucleotide primer for the detection of SNP TSC0010524
tgtagtgatata

SEQ ID NO: 368483 - DNA, 12 bp, Artificial Sequence
  Oligonucleotide primer for the detection of SNP TSC0010524
tatggttataat

SEQ ID NO: 368484 - DNA, 12 bp, Artificial Sequence
  Oligonucleotide primer for the detection of SNP TSC0010525
attttattatac

SEQ ID NO: 368485 - DNA, 12 bp, Artificial Sequence
  Oligonucleotide primer for the detection of SNP TSC0010525
gaagattgttaa

SEQ ID NO: 368486 - DNA, 12 bp, Artificial Sequence
  Oligonucleotide primer for the detection of SNP TSC0057048
ccctccttcccc

SEQ ID NO: 368487 - DNA, 12 bp, Artificial Sequence
  Oligonucleotide primer for the detection of SNP TSC0057048
tatagattgtag

SEQ ID NO: 368488 - DNA, 12 bp, Artificial Sequence
  Oligonucleotide primer for the detection of SNP TSC0057048
tacaaactacaa

SEQ ID NO: 368489 - DNA, 12 bp, Artificial Sequence
  Oligonucleotide primer for the detection of SNP TSC0057049
aattcctaacct

SEQ ID NO: 368490 - DNA, 12 bp, Artificial Sequence
  Oligonucleotide primer for the detection of SNP TSC0057049
gtaggtagagta

SEQ ID NO: 368491 - DNA, 12 bp, Artificial Sequence
  Oligonucleotide primer for the detection of SNP TSC0057050
gtaatgaggggt

SEQ ID NO: 368492 - DNA, 12 bp, Artificial Sequence
  Oligonucleotide primer for the detection of SNP TSC0057050
ttggttggtaga

SEQ ID NO: 368493 - DNA, 12 bp, Artificial Sequence
  Oligonucleotide primer for the detection of SNP TSC0057051
aaaatttttctt

SEQ ID NO: 368494 - DNA, 12 bp, Artificial Sequence
  Oligonucleotide primer for the detection of SNP TSC0057051
ttaagggattta

SEQ ID NO: 368495 - DNA, 12 bp, Artificial Sequence
  Oligonucleotide primer for the detection of SNP TSC0057052
caatctccaacc

SEQ ID NO: 368496 - DNA, 12 bp, Artificial Sequence
  Oligonucleotide primer for the detection of SNP TSC0057052
ttggtgttaaaa

SEQ ID NO: 368497 - DNA, 12 bp, Artificial Sequence
  Oligonucleotide primer for the detection of SNP TSC0057054
aatacaatactt

SEQ ID NO: 368498 - DNA, 12 bp, Artificial Sequence
  Oligonucleotide primer for the detection of SNP TSC0057054
tgttttatggga

SEQ ID NO: 368499 - DNA, 12 bp, Artificial Sequence
  Oligonucleotide primer for the detection of SNP TSC0057055
ccataacttctt

SEQ ID NO: 368500 - DNA, 12 bp, Artificial Sequence
  Oligonucleotide primer for the detection of SNP TSC0057055
attttatagaaa

SEQ ID NO: 368501 - DNA, 12 bp, Artificial Sequence
  Oligonucleotide primer for the detection of SNP TSC0057055
ataatttttttc

SEQ ID NO: 368502 - DNA, 12 bp, Artificial Sequence
  Oligonucleotide primer for the detection of SNP TSC0057056
taaaataacatc

SEQ ID NO: 368503 - DNA, 12 bp, Artificial Sequence
  Oligonucleotide primer for the detection of SNP TSC0057056
tttagtagtatc

SEQ ID NO: 368504 - DNA, 12 bp, Artificial Sequence
  Oligonucleotide primer for the detection of SNP TSC0057056
ctcaacaatacc

SEQ ID NO: 368505 - DNA, 12 bp, Artificial Sequence
  Oligonucleotide primer for the detection of SNP TSC0057056
tgaggtggtatt

SEQ ID NO: 368506 - DNA, 12 bp, Artificial Sequence
  Oligonucleotide primer for the detection of SNP TSC0057056
tgaggtggtatc

SEQ ID NO: 368507 - DNA, 12 bp, Artificial Sequence
  Oligonucleotide primer for the detection of SNP TSC0057057
attttacatctt

SEQ ID NO: 368508 - DNA, 12 bp, Artificial Sequence
  Oligonucleotide primer for the detection of SNP TSC0057057
gattttaaggaa

SEQ ID NO: 368509 - DNA, 12 bp, Artificial Sequence
  Oligonucleotide primer for the detection of SNP TSC0057058
cattaaattacc

SEQ ID NO: 368510 - DNA, 12 bp, Artificial Sequence
  Oligonucleotide primer for the detection of SNP TSC0057058
aaataatataga

SEQ ID NO: 368511 - DNA, 12 bp, Artificial Sequence
  Oligonucleotide primer for the detection of SNP TSC0057059
taccaactaaaa

SEQ ID NO: 368512 - DNA, 12 bp, Artificial Sequence
  Oligonucleotide primer for the detection of SNP TSC0057059
tggaaagtagat

SEQ ID NO: 368513 - DNA, 12 bp, Artificial Sequence
  Oligonucleotide primer for the detection of SNP TSC0057059
taaaaaataaac

SEQ ID NO: 368514 - DNA, 12 bp, Artificial Sequence
  Oligonucleotide primer for the detection of SNP TSC0057059
tgttagttgaga

SEQ ID NO: 368515 - DNA, 12 bp, Artificial Sequence
  Oligonucleotide primer for the detection of SNP TSC0057060
acccaacacgat

SEQ ID NO: 368516 - DNA, 12 bp, Artificial Sequence
  Oligonucleotide primer for the detection of SNP TSC0057060
gttggtattgta

SEQ ID NO: 368517 - DNA, 12 bp, Artificial Sequence
  Oligonucleotide primer for the detection of SNP TSC0057060
gttggtatcgta

SEQ ID NO: 368518 - DNA, 12 bp, Artificial Sequence
  Oligonucleotide primer for the detection of SNP TSC0057060
actaatatcaca

SEQ ID NO: 368519 - DNA, 12 bp, Artificial Sequence
  Oligonucleotide primer for the detection of SNP TSC0057060
actaatatcgca

SEQ ID NO: 368520 - DNA, 12 bp, Artificial Sequence
  Oligonucleotide primer for the detection of SNP TSC0057060
gtttagtatgat

SEQ ID NO: 368521 - DNA, 12 bp, Artificial Sequence
  Oligonucleotide primer for the detection of SNP TSC0057060
gtttagtacgat

SEQ ID NO: 368522 - DNA, 12 bp, Artificial Sequence
  Oligonucleotide primer for the detection of SNP TSC0057062
ctattttaaaaa

SEQ ID NO: 368523 - DNA, 12 bp, Artificial Sequence
  Oligonucleotide primer for the detection of SNP TSC0057062
gaggtatataaa

SEQ ID NO: 368524 - DNA, 12 bp, Artificial Sequence
  Oligonucleotide primer for the detection of SNP TSC0057062
tgttttgaggat

SEQ ID NO: 368525 - DNA, 12 bp, Artificial Sequence
  Oligonucleotide primer for the detection of SNP TSC0057062
tgttttgaggac

SEQ ID NO: 368526 - DNA, 12 bp, Artificial Sequence
  Oligonucleotide primer for the detection of SNP TSC0057063
attataacattt

SEQ ID NO: 368527 - DNA, 12 bp, Artificial Sequence
  Oligonucleotide primer for the detection of SNP TSC0057063
ttgaaatttaaa

SEQ ID NO: 368528 - DNA, 12 bp, Artificial Sequence
  Oligonucleotide primer for the detection of SNP TSC0057065
aacctaatatca

SEQ ID NO: 368529 - DNA, 12 bp, Artificial Sequence
  Oligonucleotide primer for the detection of SNP TSC0057065
ggtttaatgtta

SEQ ID NO: 368530 - DNA, 12 bp, Artificial Sequence
  Oligonucleotide primer for the detection of SNP TSC0057068
atataacttcaa

SEQ ID NO: 368531 - DNA, 12 bp, Artificial Sequence
  Oligonucleotide primer for the detection of SNP TSC0057068
gtatgattttag

SEQ ID NO: 368532 - DNA, 12 bp, Artificial Sequence
  Oligonucleotide primer for the detection of SNP TSC0057069
aaaattactctt

SEQ ID NO: 368533 - DNA, 12 bp, Artificial Sequence
  Oligonucleotide primer for the detection of SNP TSC0057069
ctaaattacata

SEQ ID NO: 368534 - DNA, 12 bp, Artificial Sequence
  Oligonucleotide primer for the detection of SNP TSC0057069
agagttgttttt

SEQ ID NO: 368535 - DNA, 12 bp, Artificial Sequence
  Oligonucleotide primer for the detection of SNP TSC0057070
taatatttcata

SEQ ID NO: 368536 - DNA, 12 bp, Artificial Sequence
  Oligonucleotide primer for the detection of SNP TSC0057070
taatatttcgta

SEQ ID NO: 368537 - DNA, 12 bp, Artificial Sequence
  Oligonucleotide primer for the detection of SNP TSC0057070
aattttaaaaca

SEQ ID NO: 368538 - DNA, 12 bp, Artificial Sequence
  Oligonucleotide primer for the detection of SNP TSC0057070
aatgttttgtat

SEQ ID NO: 368539 - DNA, 12 bp, Artificial Sequence
  Oligonucleotide primer for the detection of SNP TSC0057070
aatgtttcgtat

SEQ ID NO: 368540 - DNA, 12 bp, Artificial Sequence
  Oligonucleotide primer for the detection of SNP TSC0057071
gtttatttattt

SEQ ID NO: 368541 - DNA, 12 bp, Artificial Sequence
  Oligonucleotide primer for the detection of SNP TSC0057072
attctctcaaaa

SEQ ID NO: 368542 - DNA, 12 bp, Artificial Sequence
  Oligonucleotide primer for the detection of SNP TSC0057072
gtttttttaaaa

SEQ ID NO: 368543 - DNA, 12 bp, Artificial Sequence
  Oligonucleotide primer for the detection of SNP TSC0057073
ttatttgagggt

SEQ ID NO: 368544 - DNA, 12 bp, Artificial Sequence
  Oligonucleotide primer for the detection of SNP TSC0057073
gagttatagttt

SEQ ID NO: 368545 - DNA, 12 bp, Artificial Sequence
  Oligonucleotide primer for the detection of SNP TSC0057074
ctatttcttata

SEQ ID NO: 368546 - DNA, 12 bp, Artificial Sequence
  Oligonucleotide primer for the detection of SNP TSC0057074
ttattagagaat

SEQ ID NO: 368547 - DNA, 12 bp, Artificial Sequence
  Oligonucleotide primer for the detection of SNP TSC0057075
attaatagtgag

SEQ ID NO: 368548 - DNA, 12 bp, Artificial Sequence
  Oligonucleotide primer for the detection of SNP TSC0057079
aatcatttaaac

SEQ ID NO: 368549 - DNA, 12 bp, Artificial Sequence
  Oligonucleotide primer for the detection of SNP TSC0057079
  unsure (3): unknown base
tantagtattta

SEQ ID NO: 368550 - DNA, 12 bp, Artificial Sequence
  Oligonucleotide primer for the detection of SNP TSC0057080
tatcaatcaaaa

SEQ ID NO: 368551 - DNA, 12 bp, Artificial Sequence
  Oligonucleotide primer for the detection of SNP TSC0057080
agtaaaggtaat

SEQ ID NO: 368552 - DNA, 12 bp, Artificial Sequence
  Oligonucleotide primer for the detection of SNP TSC0057080
tgttagttaaag

SEQ ID NO: 368553 - DNA, 12 bp, Artificial Sequence
  Oligonucleotide primer for the detection of SNP TSC0000157
ctatcccataaa

SEQ ID NO: 368554 - DNA, 12 bp, Artificial Sequence
  Oligonucleotide primer for the detection of SNP TSC0000157
ctatcccgtaaa

SEQ ID NO: 368555 - DNA, 12 bp, Artificial Sequence
  Oligonucleotide primer for the detection of SNP TSC0000157
ggtgaaatatat

SEQ ID NO: 368556 - DNA, 12 bp, Artificial Sequence
  Oligonucleotide primer for the detection of SNP TSC0000157
aataaaatacat

SEQ ID NO: 368557 - DNA, 12 bp, Artificial Sequence
  Oligonucleotide primer for the detection of SNP TSC0000157
ttatttcgtggg

SEQ ID NO: 368558 - DNA, 12 bp, Artificial Sequence
  Oligonucleotide primer for the detection of SNP TSC0057082
aaccctcttaac

SEQ ID NO: 368559 - DNA, 12 bp, Artificial Sequence
  Oligonucleotide primer for the detection of SNP TSC0057083
ataactaatttt

SEQ ID NO: 368560 - DNA, 12 bp, Artificial Sequence
  Oligonucleotide primer for the detection of SNP TSC0057083
ttttttaaatat

SEQ ID NO: 368561 - DNA, 12 bp, Artificial Sequence
  Oligonucleotide primer for the detection of SNP TSC0057083
ttttttaaatac

SEQ ID NO: 368562 - DNA, 12 bp, Artificial Sequence
  Oligonucleotide primer for the detection of SNP TSC0057083
atgattaatttt

SEQ ID NO: 368563 - DNA, 12 bp, Artificial Sequence
  Oligonucleotide primer for the detection of SNP TSC0057086
caataatactct

SEQ ID NO: 368564 - DNA, 12 bp, Artificial Sequence
  Oligonucleotide primer for the detection of SNP TSC0057086
attttaaaatga

SEQ ID NO: 368565 - DNA, 12 bp, Artificial Sequence
  Oligonucleotide primer for the detection of SNP TSC0057087
ttactacaaaaa

SEQ ID NO: 368566 - DNA, 12 bp, Artificial Sequence
  Oligonucleotide primer for the detection of SNP TSC0057087
ttataatcttca

SEQ ID NO: 368567 - DNA, 12 bp, Artificial Sequence
  Oligonucleotide primer for the detection of SNP TSC0057087
tattgtaaggat

SEQ ID NO: 368568 - DNA, 12 bp, Artificial Sequence
  Oligonucleotide primer for the detection of SNP TSC0057087
tattgtaaggac

SEQ ID NO: 368569 - DNA, 12 bp, Artificial Sequence
  Oligonucleotide primer for the detection of SNP TSC0057088
ataaaatttttg

SEQ ID NO: 368570 - DNA, 12 bp, Artificial Sequence
  Oligonucleotide primer for the detection of SNP TSC0057088
ataaaattttcg

SEQ ID NO: 368571 - DNA, 12 bp, Artificial Sequence
  Oligonucleotide primer for the detection of SNP TSC0057089
aaaaccatcctt

SEQ ID NO: 368572 - DNA, 12 bp, Artificial Sequence
  Oligonucleotide primer for the detection of SNP TSC0057089
aaaaccgtcctt

SEQ ID NO: 368573 - DNA, 12 bp, Artificial Sequence
  Oligonucleotide primer for the detection of SNP TSC0057089
tttagtaaatat

SEQ ID NO: 368574 - DNA, 12 bp, Artificial Sequence
  Oligonucleotide primer for the detection of SNP TSC0057089
aaaattgttttt

SEQ ID NO: 368575 - DNA, 12 bp, Artificial Sequence
  Oligonucleotide primer for the detection of SNP TSC0057089
aaaatcgttttt

SEQ ID NO: 368576 - DNA, 12 bp, Artificial Sequence
  Oligonucleotide primer for the detection of SNP TSC0010025
ttttttctattt

SEQ ID NO: 368577 - DNA, 12 bp, Artificial Sequence
  Oligonucleotide primer for the detection of SNP TSC0010025
ttaagtaaatag

SEQ ID NO: 368578 - DNA, 12 bp, Artificial Sequence
  Oligonucleotide primer for the detection of SNP TSC0010026
taataagaagta

SEQ ID NO: 368579 - DNA, 12 bp, Artificial Sequence
  Oligonucleotide primer for the detection of SNP TSC0057091
tatttcctattt

SEQ ID NO: 368580 - DNA, 12 bp, Artificial Sequence
  Oligonucleotide primer for the detection of SNP TSC0009520
catattaaacct

SEQ ID NO: 368581 - DNA, 12 bp, Artificial Sequence
  Oligonucleotide primer for the detection of SNP TSC0009520
gggagggtggta

SEQ ID NO: 368582 - DNA, 12 bp, Artificial Sequence
  Oligonucleotide primer for the detection of SNP TSC0009521
caaatccaactt

SEQ ID NO: 368583 - DNA, 12 bp, Artificial Sequence
  Oligonucleotide primer for the detection of SNP TSC0009521
aaacgttattta

SEQ ID NO: 368584 - DNA, 12 bp, Artificial Sequence
  Oligonucleotide primer for the detection of SNP TSC0057094
tatcttttcatc

SEQ ID NO: 368585 - DNA, 12 bp, Artificial Sequence
  Oligonucleotide primer for the detection of SNP TSC0057094
gtagtttagata

SEQ ID NO: 368586 - DNA, 12 bp, Artificial Sequence
  Oligonucleotide primer for the detection of SNP TSC0057096
ttatatactttc

SEQ ID NO: 368587 - DNA, 12 bp, Artificial Sequence
  Oligonucleotide primer for the detection of SNP TSC0057097
ccccttaatcat

SEQ ID NO: 368588 - DNA, 12 bp, Artificial Sequence
  Oligonucleotide primer for the detection of SNP TSC0057097
ccccttaatcgt

SEQ ID NO: 368589 - DNA, 12 bp, Artificial Sequence
  Oligonucleotide primer for the detection of SNP TSC0057099
actactaattta

SEQ ID NO: 368590 - DNA, 12 bp, Artificial Sequence
  Oligonucleotide primer for the detection of SNP TSC0057099
attcccttttat

SEQ ID NO: 368591 - DNA, 12 bp, Artificial Sequence
  Oligonucleotide primer for the detection of SNP TSC0057099
attattgatttg

SEQ ID NO: 368592 - DNA, 12 bp, Artificial Sequence
  Oligonucleotide primer for the detection of SNP TSC0057100
ttcactatttat

SEQ ID NO: 368593 - DNA, 12 bp, Artificial Sequence
  Oligonucleotide primer for the detection of SNP TSC0057100
aatttaaatatg

SEQ ID NO: 368594 - DNA, 12 bp, Artificial Sequence
  Oligonucleotide primer for the detection of SNP TSC0057101
taaattctcaat

SEQ ID NO: 368595 - DNA, 12 bp, Artificial Sequence
  Oligonucleotide primer for the detection of SNP TSC0057101
tagtaattatta

SEQ ID NO: 368596 - DNA, 12 bp, Artificial Sequence
  Oligonucleotide primer for the detection of SNP TSC0057101
caataattacca

SEQ ID NO: 368597 - DNA, 12 bp, Artificial Sequence
  Oligonucleotide primer for the detection of SNP TSC0057101
tagatttttaat

SEQ ID NO: 368598 - DNA, 12 bp, Artificial Sequence
  Oligonucleotide primer for the detection of SNP TSC0057102
gagttgtttgaa

SEQ ID NO: 368599 - DNA, 12 bp, Artificial Sequence
  Oligonucleotide primer for the detection of SNP TSC0057103
aaatatatatga

SEQ ID NO: 368600 - DNA, 12 bp, Artificial Sequence
  Oligonucleotide primer for the detection of SNP TSC0057103
aaacatacataa

SEQ ID NO: 368601 - DNA, 12 bp, Artificial Sequence
  Oligonucleotide primer for the detection of SNP TSC0057106
tccactataact

SEQ ID NO: 368602 - DNA, 12 bp, Artificial Sequence
  Oligonucleotide primer for the detection of SNP TSC0057106
aagtgtttggtg

SEQ ID NO: 368603 - DNA, 12 bp, Artificial Sequence
  Oligonucleotide primer for the detection of SNP TSC0057109
ttccataaaaaa

SEQ ID NO: 368604 - DNA, 12 bp, Artificial Sequence
  Oligonucleotide primer for the detection of SNP TSC0057109
ttctatttttct

SEQ ID NO: 368605 - DNA, 12 bp, Artificial Sequence
  Oligonucleotide primer for the detection of SNP TSC0057110
tgaaaatgattt

SEQ ID NO: 368606 - DNA, 12 bp, Artificial Sequence
  Oligonucleotide primer for the detection of SNP TSC0057113
aaaccaatactt

SEQ ID NO: 368607 - DNA, 12 bp, Artificial Sequence
  Oligonucleotide primer for the detection of SNP TSC0057113
agggaggattaa

SEQ ID NO: 368608 - DNA, 12 bp, Artificial Sequence
  Oligonucleotide primer for the detection of SNP TSC0057113
agattagtgttt

SEQ ID NO: 368609 - DNA, 12 bp, Artificial Sequence
  Oligonucleotide primer for the detection of SNP TSC0057114
ttgttaatatta

SEQ ID NO: 368610 - DNA, 12 bp, Artificial Sequence
  Oligonucleotide primer for the detection of SNP TSC0057115
tctattattcct

SEQ ID NO: 368611 - DNA, 12 bp, Artificial Sequence
  Oligonucleotide primer for the detection of SNP TSC0057115
ataaaagaaata

SEQ ID NO: 368612 - DNA, 12 bp, Artificial Sequence
  Oligonucleotide primer for the detection of SNP TSC0057116
tatattgtttgt

SEQ ID NO: 368613 - DNA, 12 bp, Artificial Sequence
  Oligonucleotide primer for the detection of SNP TSC0057116
atattatctaca

SEQ ID NO: 368614 - DNA, 12 bp, Artificial Sequence
  Oligonucleotide primer for the detection of SNP TSC0057116
taagggtgagat

SEQ ID NO: 368615 - DNA, 12 bp, Artificial Sequence
  Oligonucleotide primer for the detection of SNP TSC0057117
cttaaacaatta

SEQ ID NO: 368616 - DNA, 12 bp, Artificial Sequence
  Oligonucleotide primer for the detection of SNP TSC0057117
attaaagtatat

SEQ ID NO: 368617 - DNA, 12 bp, Artificial Sequence
  Oligonucleotide primer for the detection of SNP TSC0057117
tttaagtaatta

SEQ ID NO: 368618 - DNA, 12 bp, Artificial Sequence
  Oligonucleotide primer for the detection of SNP TSC0057118
atacccttataa

SEQ ID NO: 368619 - DNA, 12 bp, Artificial Sequence
  Oligonucleotide primer for the detection of SNP TSC0057118
cccttaaacccc

SEQ ID NO: 368620 - DNA, 12 bp, Artificial Sequence
  Oligonucleotide primer for the detection of SNP TSC0057119
aattccacccac

SEQ ID NO: 368621 - DNA, 12 bp, Artificial Sequence
  Oligonucleotide primer for the detection of SNP TSC0057119
tctctcctatat

SEQ ID NO: 368622 - DNA, 12 bp, Artificial Sequence
  Oligonucleotide primer for the detection of SNP TSC0057119
aattttatttat

SEQ ID NO: 368623 - DNA, 12 bp, Artificial Sequence
  Oligonucleotide primer for the detection of SNP TSC0057120
gtgatttttttc

SEQ ID NO: 368624 - DNA, 12 bp, Artificial Sequence
  Oligonucleotide primer for the detection of SNP TSC0057120
ataatcctctcc

SEQ ID NO: 368625 - DNA, 12 bp, Artificial Sequence
  Oligonucleotide primer for the detection of SNP TSC0057120
atggaagttgag

SEQ ID NO: 368626 - DNA, 12 bp, Artificial Sequence
  Oligonucleotide primer for the detection of SNP TSC0057125
tcattaaaaaaa

SEQ ID NO: 368627 - DNA, 12 bp, Artificial Sequence
  Oligonucleotide primer for the detection of SNP TSC0057125
ttcgtagttttt

SEQ ID NO: 368628 - DNA, 12 bp, Artificial Sequence
  Oligonukleotid-Primer
tcataactttta

SEQ ID NO: 368629 - DNA, 12 bp, Artificial Sequence
  Oligonucleotide primer for the detection of SNP TSC0057125
tcgtaactttta

SEQ ID NO: 368630 - DNA, 12 bp, Artificial Sequence
  Oligonucleotide primer for the detection of SNP TSC0057125
tattgagagggt

SEQ ID NO: 368631 - DNA, 12 bp, Artificial Sequence
  Oligonucleotide primer for the detection of SNP TSC0057126
actaattctatc

SEQ ID NO: 368632 - DNA, 12 bp, Artificial Sequence
  Oligonucleotide primer for the detection of SNP TSC0057126
ctcacatttcat

SEQ ID NO: 368633 - DNA, 12 bp, Artificial Sequence
  Oligonucleotide primer for the detection of SNP TSC0057126
attaattttgtt

SEQ ID NO: 368634 - DNA, 12 bp, Artificial Sequence
  Oligonucleotide primer for the detection of SNP TSC0057127
acaaattacatt

SEQ ID NO: 368635 - DNA, 12 bp, Artificial Sequence
  Oligonucleotide primer for the detection of SNP TSC0057127
aatgtagaggtg

SEQ ID NO: 368636 - DNA, 12 bp, Artificial Sequence
  Oligonucleotide primer for the detection of SNP TSC0057127
ataagttatatt

SEQ ID NO: 368637 - DNA, 12 bp, Artificial Sequence
  Oligonucleotide primer for the detection of SNP TSC0057128
ctttaccttaat

SEQ ID NO: 368638 - DNA, 12 bp, Artificial Sequence
  Oligonucleotide primer for the detection of SNP TSC0057128
gaaaggataaga

SEQ ID NO: 368639 - DNA, 12 bp, Artificial Sequence
  Oligonucleotide primer for the detection of SNP TSC0057131
attccacattat

SEQ ID NO: 368640 - DNA, 12 bp, Artificial Sequence
  Oligonucleotide primer for the detection of SNP TSC0057131
aaataaatttgt

SEQ ID NO: 368641 - DNA, 12 bp, Artificial Sequence
  Oligonucleotide primer for the detection of SNP TSC0057131
aaataaattcgt

SEQ ID NO: 368642 - DNA, 12 bp, Artificial Sequence
  Oligonucleotide primer for the detection of SNP TSC0057131
aacaaattcata

SEQ ID NO: 368643 - DNA, 12 bp, Artificial Sequence
  Oligonucleotide primer for the detection of SNP TSC0057131
aacaaattcgta

SEQ ID NO: 368644 - DNA, 12 bp, Artificial Sequence
  Oligonucleotide primer for the detection of SNP TSC0057131
gttttatattgt

SEQ ID NO: 368645 - DNA, 12 bp, Artificial Sequence
  Oligonucleotide primer for the detection of SNP TSC0057132
tcctaaactaac

SEQ ID NO: 368646 - DNA, 12 bp, Artificial Sequence
  Oligonucleotide primer for the detection of SNP TSC0057132
gagaatatatag

SEQ ID NO: 368647 - DNA, 12 bp, Artificial Sequence
  Oligonucleotide primer for the detection of SNP TSC0057133
aatcttaaaaca

SEQ ID NO: 368648 - DNA, 12 bp, Artificial Sequence
  Oligonucleotide primer for the detection of SNP TSC0057133
aatagtagaaat

SEQ ID NO: 368649 - DNA, 12 bp, Artificial Sequence
  Oligonucleotide primer for the detection of SNP TSC0057133
agttttggggta

SEQ ID NO: 368650 - DNA, 12 bp, Artificial Sequence
  Oligonucleotide primer for the detection of SNP TSC0057134
accctttctata

SEQ ID NO: 368651 - DNA, 12 bp, Artificial Sequence
  Oligonucleotide primer for the detection of SNP TSC0057134
tattttgaatat

SEQ ID NO: 368652 - DNA, 12 bp, Artificial Sequence
  Oligonucleotide primer for the detection of SNP TSC0057134
caccttaaacat

SEQ ID NO: 368653 - DNA, 12 bp, Artificial Sequence
  Oligonucleotide primer for the detection of SNP TSC0057135
gataagtaagtt

SEQ ID NO: 368654 - DNA, 12 bp, Artificial Sequence
  Oligonucleotide primer for the detection of SNP TSC0057135
ggagagagggat

SEQ ID NO: 368655 - DNA, 12 bp, Artificial Sequence
  Oligonucleotide primer for the detection of SNP TSC0057139
cttctataatta

SEQ ID NO: 368656 - DNA, 12 bp, Artificial Sequence
  Oligonucleotide primer for the detection of SNP TSC0057139
acccttactcat

SEQ ID NO: 368657 - DNA, 12 bp, Artificial Sequence
  Oligonucleotide primer for the detection of SNP TSC0057140
ctataattaaat

SEQ ID NO: 368658 - DNA, 12 bp, Artificial Sequence
  Oligonucleotide primer for the detection of SNP TSC0057140
tgtgtggaaaaa

SEQ ID NO: 368659 - DNA, 12 bp, Artificial Sequence
  Oligonucleotide primer for the detection of SNP TSC0005010
actacctaaaat

SEQ ID NO: 368660 - DNA, 12 bp, Artificial Sequence
  Oligonucleotide primer for the detection of SNP TSC0005010
tagtaattgtgt

SEQ ID NO: 368661 - DNA, 12 bp, Artificial Sequence
  Oligonucleotide primer for the detection of SNP TSC0005010
ttatttgagatt

SEQ ID NO: 368662 - DNA, 12 bp, Artificial Sequence
  Oligonucleotide primer for the detection of SNP TSC0057141
ttttcgtgtttg

SEQ ID NO: 368663 - DNA, 12 bp, Artificial Sequence
  Oligonucleotide primer for the detection of SNP TSC0057141
ccctcatatcta

SEQ ID NO: 368664 - DNA, 12 bp, Artificial Sequence
  Oligonucleotide primer for the detection of SNP TSC0057141
ccctcgtatcta

SEQ ID NO: 368665 - DNA, 12 bp, Artificial Sequence
  Oligonucleotide primer for the detection of SNP TSC0057141
aagagtttaaag

SEQ ID NO: 368666 - DNA, 12 bp, Artificial Sequence
  Oligonucleotide primer for the detection of SNP TSC0057143
attatttttaag

SEQ ID NO: 368667 - DNA, 12 bp, Artificial Sequence
  Oligonucleotide primer for the detection of SNP TSC0057143
attattctcaaa

SEQ ID NO: 368668 - DNA, 12 bp, Artificial Sequence
  Oligonucleotide primer for the detection of SNP TSC0057143
tttgggatatag

SEQ ID NO: 368669 - DNA, 12 bp, Artificial Sequence
  Oligonucleotide primer for the detection of SNP TSC0057145
gagttgtgagtt

SEQ ID NO: 368670 - DNA, 12 bp, Artificial Sequence
  Oligonucleotide primer for the detection of SNP TSC0057145
gagttgcgagtt

SEQ ID NO: 368671 - DNA, 12 bp, Artificial Sequence
  Oligonucleotide primer for the detection of SNP TSC0057145
aaactacaaact

SEQ ID NO: 368672 - DNA, 12 bp, Artificial Sequence
  Oligonucleotide primer for the detection of SNP TSC0057145
aaactacgaact

SEQ ID NO: 368673 - DNA, 12 bp, Artificial Sequence
  Oligonucleotide primer for the detection of SNP TSC0057145
agaataataggt

SEQ ID NO: 368674 - DNA, 12 bp, Artificial Sequence
  Oligonucleotide primer for the detection of SNP TSC0057146
ataataaaattt

SEQ ID NO: 368675 - DNA, 12 bp, Artificial Sequence
  Oligonucleotide primer for the detection of SNP TSC0057148
taatctactatt

SEQ ID NO: 368676 - DNA, 12 bp, Artificial Sequence
  Oligonucleotide primer for the detection of SNP TSC0057148
taaggtatagtg

SEQ ID NO: 368677 - DNA, 12 bp, Artificial Sequence
  Oligonucleotide primer for the detection of SNP TSC0057149
tataccttacat

SEQ ID NO: 368678 - DNA, 12 bp, Artificial Sequence
  Oligonucleotide primer for the detection of SNP TSC0057149
gagttataatat

SEQ ID NO: 368679 - DNA, 12 bp, Artificial Sequence
  Oligonucleotide primer for the detection of SNP TSC0057149
atcataatataa

SEQ ID NO: 368680 - DNA, 12 bp, Artificial Sequence
  Oligonucleotide primer for the detection of SNP TSC0057150
atcacaaaacat

SEQ ID NO: 368681 - DNA, 12 bp, Artificial Sequence
  Oligonucleotide primer for the detection of SNP TSC0057150
atcacaaaacgt

SEQ ID NO: 368682 - DNA, 12 bp, Artificial Sequence
  Oligonucleotide primer for the detection of SNP TSC0057150
gaaaagttatag

SEQ ID NO: 368683 - DNA, 12 bp, Artificial Sequence
  Oligonucleotide primer for the detection of SNP TSC0057154
aacatactaact

SEQ ID NO: 368684 - DNA, 12 bp, Artificial Sequence
  Oligonucleotide primer for the detection of SNP TSC0057154
tttaattggtta

SEQ ID NO: 368685 - DNA, 12 bp, Artificial Sequence
  Oligonucleotide primer for the detection of SNP TSC0000173
acataaataact

SEQ ID NO: 368686 - DNA, 12 bp, Artificial Sequence
  Oligonucleotide primer for the detection of SNP TSC0000173
ttataaaatagg

SEQ ID NO: 368687 - DNA, 12 bp, Artificial Sequence
  Oligonucleotide primer for the detection of SNP TSC0000174
ttattcaattcc

SEQ ID NO: 368688 - DNA, 12 bp, Artificial Sequence
  Oligonucleotide primer for the detection of SNP TSC0000174
ggttaagaaata

SEQ ID NO: 368689 - DNA, 12 bp, Artificial Sequence
  Oligonucleotide primer for the detection of SNP TSC0057155
accaatcataac

SEQ ID NO: 368690 - DNA, 12 bp, Artificial Sequence
  Oligonucleotide primer for the detection of SNP TSC0057155
accaatcgtaac

SEQ ID NO: 368691 - DNA, 12 bp, Artificial Sequence
  Oligonucleotide primer for the detection of SNP TSC0057155
tattatgaataa

SEQ ID NO: 368692 - DNA, 12 bp, Artificial Sequence
  Oligonucleotide primer for the detection of SNP TSC0057155
tattacgaataa

SEQ ID NO: 368693 - DNA, 12 bp, Artificial Sequence
  Oligonucleotide primer for the detection of SNP TSC0057156
aatctcattttc

SEQ ID NO: 368694 - DNA, 12 bp, Artificial Sequence
  Oligonucleotide primer for the detection of SNP TSC0057156
actttacactta

SEQ ID NO: 368695 - DNA, 12 bp, Artificial Sequence
  Oligonucleotide primer for the detection of SNP TSC0057163
actccctttcca

SEQ ID NO: 368696 - DNA, 12 bp, Artificial Sequence
  Oligonucleotide primer for the detection of SNP TSC0057164
tacctcaacccc

SEQ ID NO: 368697 - DNA, 12 bp, Artificial Sequence
  Oligonucleotide primer for the detection of SNP TSC0057164
agggtatggagg

SEQ ID NO: 368698 - DNA, 12 bp, Artificial Sequence
  Oligonucleotide primer for the detection of SNP TSC0057165
aatttagttatt

SEQ ID NO: 368699 - DNA, 12 bp, Artificial Sequence
  Oligonucleotide primer for the detection of SNP TSC0057165
aacccaactatt

SEQ ID NO: 368700 - DNA, 12 bp, Artificial Sequence
  Oligonucleotide primer for the detection of SNP TSC0057165
tgtttaagggta

SEQ ID NO: 368701 - DNA, 12 bp, Artificial Sequence
  Oligonucleotide primer for the detection of SNP TSC0004687
acctcattttac

SEQ ID NO: 368702 - DNA, 12 bp, Artificial Sequence
  Oligonucleotide primer for the detection of SNP TSC0004687
aatttagtagga

SEQ ID NO: 368703 - DNA, 12 bp, Artificial Sequence
  Oligonucleotide primer for the detection of SNP TSC0057170
ctcactataacc

SEQ ID NO: 368704 - DNA, 12 bp, Artificial Sequence
  Oligonucleotide primer for the detection of SNP TSC0057170
aatttaggatgt

SEQ ID NO: 368705 - DNA, 12 bp, Artificial Sequence
  Oligonucleotide primer for the detection of SNP TSC0057170
acccaaaataca

SEQ ID NO: 368706 - DNA, 12 bp, Artificial Sequence
  Oligonucleotide primer for the detection of SNP TSC0057172
taataaatacta

SEQ ID NO: 368707 - DNA, 12 bp, Artificial Sequence
  Oligonucleotide primer for the detection of SNP TSC0057172
ttaatttgttaa

SEQ ID NO: 368708 - DNA, 12 bp, Artificial Sequence
  Oligonucleotide primer for the detection of SNP TSC0057173
actaaataacaa

SEQ ID NO: 368709 - DNA, 12 bp, Artificial Sequence
  Oligonucleotide primer for the detection of SNP TSC0057173
ttaagtaataat

SEQ ID NO: 368710 - DNA, 12 bp, Artificial Sequence
  Oligonucleotide primer for the detection of SNP TSC0057175
taactcatattt

SEQ ID NO: 368711 - DNA, 12 bp, Artificial Sequence
  Oligonucleotide primer for the detection of SNP TSC0057175
ttgaattaaaaa

SEQ ID NO: 368712 - DNA, 12 bp, Artificial Sequence
  Oligonucleotide primer for the detection of SNP TSC0057176
atcaatttctcc

SEQ ID NO: 368713 - DNA, 12 bp, Artificial Sequence
  Oligonucleotide primer for the detection of SNP TSC0057176
atgagttgattg

SEQ ID NO: 368714 - DNA, 12 bp, Artificial Sequence
  Oligonucleotide primer for the detection of SNP TSC0057177
aataaataactt

SEQ ID NO: 368715 - DNA, 12 bp, Artificial Sequence
  Oligonucleotide primer for the detection of SNP TSC0057177
acccacttactc

SEQ ID NO: 368716 - DNA, 12 bp, Artificial Sequence
  Oligonucleotide primer for the detection of SNP TSC0057178
taacaacaaaac

SEQ ID NO: 368717 - DNA, 12 bp, Artificial Sequence
  Oligonucleotide primer for the detection of SNP TSC0057178
gattttttgata

SEQ ID NO: 368718 - DNA, 12 bp, Artificial Sequence
  Oligonucleotide primer for the detection of SNP TSC0057183
cttaacaactct

SEQ ID NO: 368719 - DNA, 12 bp, Artificial Sequence
  Oligonucleotide primer for the detection of SNP TSC0057183
ttttggttatgg

SEQ ID NO: 368720 - DNA, 12 bp, Artificial Sequence
  Oligonucleotide primer for the detection of SNP TSC0057183
ttttggttacgg

SEQ ID NO: 368721 - DNA, 12 bp, Artificial Sequence
  Oligonucleotide primer for the detection of SNP TSC0057184
tcatatttaacc

SEQ ID NO: 368722 - DNA, 12 bp, Artificial Sequence
  Oligonucleotide primer for the detection of SNP TSC0057184
tcgtatttaacc

SEQ ID NO: 368723 - DNA, 12 bp, Artificial Sequence
  Oligonucleotide primer for the detection of SNP TSC0057184
agttaattggtg

SEQ ID NO: 368724 - DNA, 12 bp, Artificial Sequence
  Oligonucleotide primer for the detection of SNP TSC0057184
tgtatttggttt

SEQ ID NO: 368725 - DNA, 12 bp, Artificial Sequence
  Oligonucleotide primer for the detection of SNP TSC0057184
cgtatttggttt

SEQ ID NO: 368726 - DNA, 12 bp, Artificial Sequence
  Oligonucleotide primer for the detection of SNP TSC0057186
taatgttgtgta

SEQ ID NO: 368727 - DNA, 12 bp, Artificial Sequence
  Oligonucleotide primer for the detection of SNP TSC0057187
gaataaatgtag

SEQ ID NO: 368728 - DNA, 12 bp, Artificial Sequence
  Oligonucleotide primer for the detection of SNP TSC0057187
aaataaatacaa

SEQ ID NO: 368729 - DNA, 12 bp, Artificial Sequence
  Oligonucleotide primer for the detection of SNP TSC0057187
ggaggaaaggtt

SEQ ID NO: 368730 - DNA, 12 bp, Artificial Sequence
  Oligonucleotide primer for the detection of SNP TSC0057188
tgtgggatgttt

SEQ ID NO: 368731 - DNA, 12 bp, Artificial Sequence
  Oligonucleotide primer for the detection of SNP TSC0057189
tttgaaaaatga

SEQ ID NO: 368732 - DNA, 12 bp, Artificial Sequence
  Oligonucleotide primer for the detection of SNP TSC0057191
tcaattacaaca

SEQ ID NO: 368733 - DNA, 12 bp, Artificial Sequence
  Oligonucleotide primer for the detection of SNP TSC0057191
tcgattacaaca

SEQ ID NO: 368734 - DNA, 12 bp, Artificial Sequence
  Oligonucleotide primer for the detection of SNP TSC0057191
ttgattgtagta

SEQ ID NO: 368735 - DNA, 12 bp, Artificial Sequence
  Oligonucleotide primer for the detection of SNP TSC0057191
tcgattgtagta

SEQ ID NO: 368736 - DNA, 12 bp, Artificial Sequence
  Oligonucleotide primer for the detection of SNP TSC0057196
taattaatctcc

SEQ ID NO: 368737 - DNA, 12 bp, Artificial Sequence
  Oligonucleotide primer for the detection of SNP TSC0057196
tattttatgaag

SEQ ID NO: 368738 - DNA, 12 bp, Artificial Sequence
  Oligonucleotide primer for the detection of SNP TSC0057197
attatctcatcc

SEQ ID NO: 368739 - DNA, 12 bp, Artificial Sequence
  Oligonucleotide primer for the detection of SNP TSC0057197
tgggtgtattgg

SEQ ID NO: 368740 - DNA, 12 bp, Artificial Sequence
  Oligonucleotide primer for the detection of SNP TSC0057197
tgggcgtattgg

SEQ ID NO: 368741 - DNA, 12 bp, Artificial Sequence
  Oligonucleotide primer for the detection of SNP TSC0057198
gagtagtaagat

SEQ ID NO: 368742 - DNA, 12 bp, Artificial Sequence
  Oligonucleotide primer for the detection of SNP TSC0057198
tgggagtttgtt

SEQ ID NO: 368743 - DNA, 12 bp, Artificial Sequence
  Oligonucleotide primer for the detection of SNP TSC0057200
catactcaaata

SEQ ID NO: 368744 - DNA, 12 bp, Artificial Sequence
  Oligonucleotide primer for the detection of SNP TSC0057200
cgtactcaaata

SEQ ID NO: 368745 - DNA, 12 bp, Artificial Sequence
  Oligonucleotide primer for the detection of SNP TSC0057200
tgtgtttaggta

SEQ ID NO: 368746 - DNA, 12 bp, Artificial Sequence
  Oligonucleotide primer for the detection of SNP TSC0057200
cgtgtttaggta

SEQ ID NO: 368747 - DNA, 12 bp, Artificial Sequence
  Oligonucleotide primer for the detection of SNP TSC0057204
attcctaaatca

SEQ ID NO: 368748 - DNA, 12 bp, Artificial Sequence
  Oligonucleotide primer for the detection of SNP TSC0057204
tttatttatgtt

SEQ ID NO: 368749 - DNA, 12 bp, Artificial Sequence
  Oligonucleotide primer for the detection of SNP TSC0057204
tttatttacgtt

SEQ ID NO: 368750 - DNA, 12 bp, Artificial Sequence
  Oligonucleotide primer for the detection of SNP TSC0057204
attcacccacac

SEQ ID NO: 368751 - DNA, 12 bp, Artificial Sequence
  Oligonucleotide primer for the detection of SNP TSC0057204
attcacccacgc

SEQ ID NO: 368752 - DNA, 12 bp, Artificial Sequence
  Oligonucleotide primer for the detection of SNP TSC0057204
gttcacccacac

SEQ ID NO: 368753 - DNA, 12 bp, Artificial Sequence
  Oligonucleotide primer for the detection of SNP TSC0057204
gttcacccacgc

SEQ ID NO: 368754 - DNA, 12 bp, Artificial Sequence
  Oligonucleotide primer for the detection of SNP TSC0057205
caacaatatatt

SEQ ID NO: 368755 - DNA, 12 bp, Artificial Sequence
  Oligonucleotide primer for the detection of SNP TSC0057205
taaaattaaatg

SEQ ID NO: 368756 - DNA, 12 bp, Artificial Sequence
  Oligonucleotide primer for the detection of SNP TSC0057206
aaaactctaaca

SEQ ID NO: 368757 - DNA, 12 bp, Artificial Sequence
  Oligonucleotide primer for the detection of SNP TSC0057206
ttaatgaggttg

SEQ ID NO: 368758 - DNA, 12 bp, Artificial Sequence
  Oligonucleotide primer for the detection of SNP TSC0057206
taataaaattaa

SEQ ID NO: 368759 - DNA, 12 bp, Artificial Sequence
  Oligonucleotide primer for the detection of SNP TSC0057206
aagttttggtat

SEQ ID NO: 368760 - DNA, 12 bp, Artificial Sequence
  Oligonucleotide primer for the detection of SNP TSC0057207
tctcctcccaat

SEQ ID NO: 368761 - DNA, 12 bp, Artificial Sequence
  Oligonucleotide primer for the detection of SNP TSC0057207
tctcctcccgat

SEQ ID NO: 368762 - DNA, 12 bp, Artificial Sequence
  Oligonucleotide primer for the detection of SNP TSC0057207
aataaatgaaag

SEQ ID NO: 368763 - DNA, 12 bp, Artificial Sequence
  Oligonucleotide primer for the detection of SNP TSC0057208
tgttgtaaatag

SEQ ID NO: 368764 - DNA, 12 bp, Artificial Sequence
  Oligonucleotide primer for the detection of SNP TSC0057208
ggatgatagtat

SEQ ID NO: 368765 - DNA, 12 bp, Artificial Sequence
  Oligonucleotide primer for the detection of SNP TSC0057209
tttctacctaac

SEQ ID NO: 368766 - DNA, 12 bp, Artificial Sequence
  Oligonucleotide primer for the detection of SNP TSC0057211
taattttatcac

SEQ ID NO: 368767 - DNA, 12 bp, Artificial Sequence
  Oligonucleotide primer for the detection of SNP TSC0057211
gtgataggaatt

SEQ ID NO: 368768 - DNA, 12 bp, Artificial Sequence
  Oligonucleotide primer for the detection of SNP TSC0057214
tctatcaccaac

SEQ ID NO: 368769 - DNA, 12 bp, Artificial Sequence
  Oligonucleotide primer for the detection of SNP TSC0057214
ttttaaaggata

SEQ ID NO: 368770 - DNA, 12 bp, Artificial Sequence
  Oligonucleotide primer for the detection of SNP TSC0057216
ctattaacatca

SEQ ID NO: 368771 - DNA, 12 bp, Artificial Sequence
  Oligonucleotide primer for the detection of SNP TSC0057216
ctattaacatcg

SEQ ID NO: 368772 - DNA, 12 bp, Artificial Sequence
  Oligonucleotide primer for the detection of SNP TSC0057216
gagaaaagtatt

SEQ ID NO: 368773 - DNA, 12 bp, Artificial Sequence
  Oligonucleotide primer for the detection of SNP TSC0057216
tgttgatattgt

SEQ ID NO: 368774 - DNA, 12 bp, Artificial Sequence
  Oligonucleotide primer for the detection of SNP TSC0057216
tgttgatatcgt

SEQ ID NO: 368775 - DNA, 12 bp, Artificial Sequence
  Oligonucleotide primer for the detection of SNP TSC0057217
aaaaggtgtaag

SEQ ID NO: 368776 - DNA, 12 bp, Artificial Sequence
  Oligonucleotide primer for the detection of SNP TSC0057218
aatttataaatc

SEQ ID NO: 368777 - DNA, 12 bp, Artificial Sequence
  Oligonucleotide primer for the detection of SNP TSC0057219
ttctacactttc

SEQ ID NO: 368778 - DNA, 12 bp, Artificial Sequence
  Oligonucleotide primer for the detection of SNP TSC0057219
gggtaatagaag

SEQ ID NO: 368779 - DNA, 12 bp, Artificial Sequence
  Oligonucleotide primer for the detection of SNP TSC0057220
aattcataaatc

SEQ ID NO: 368780 - DNA, 12 bp, Artificial Sequence
  Oligonucleotide primer for the detection of SNP TSC0057221
aattaataaaac

SEQ ID NO: 368781 - DNA, 12 bp, Artificial Sequence
  Oligonucleotide primer for the detection of SNP TSC0057221
acccctatcaaa

SEQ ID NO: 368782 - DNA, 12 bp, Artificial Sequence
  Oligonucleotide primer for the detection of SNP TSC0057221
ggttaataaaat

SEQ ID NO: 368783 - DNA, 12 bp, Artificial Sequence
  Oligonucleotide primer for the detection of SNP TSC0057222
aacaaataaatt

SEQ ID NO: 368784 - DNA, 12 bp, Artificial Sequence
  Oligonucleotide primer for the detection of SNP TSC0057222
tctttacttcca

SEQ ID NO: 368785 - DNA, 12 bp, Artificial Sequence
  Oligonucleotide primer for the detection of SNP TSC0057222
agtaaatgggtt

SEQ ID NO: 368786 - DNA, 12 bp, Artificial Sequence
  Oligonucleotide primer for the detection of SNP TSC0057226
ctataactaaaa

SEQ ID NO: 368787 - DNA, 12 bp, Artificial Sequence
  Oligonucleotide primer for the detection of SNP TSC0057226
tttccctactct

SEQ ID NO: 368788 - DNA, 12 bp, Artificial Sequence
  Oligonucleotide primer for the detection of SNP TSC0057226
ttgtagttagaa

SEQ ID NO: 368789 - DNA, 12 bp, Artificial Sequence
  Oligonucleotide primer for the detection of SNP TSC0057228
gataaataaatt

SEQ ID NO: 368790 - DNA, 12 bp, Artificial Sequence
  Oligonucleotide primer for the detection of SNP TSC0057228
aaaaaaaagaag

SEQ ID NO: 368791 - DNA, 12 bp, Artificial Sequence
  Oligonucleotide primer for the detection of SNP TSC0057231
aactcattctat

SEQ ID NO: 368792 - DNA, 12 bp, Artificial Sequence
  Oligonucleotide primer for the detection of SNP TSC0057232
aattttcacact

SEQ ID NO: 368793 - DNA, 12 bp, Artificial Sequence
  Oligonucleotide primer for the detection of SNP TSC0057232
aattttcacgct

SEQ ID NO: 368794 - DNA, 12 bp, Artificial Sequence
  Oligonucleotide primer for the detection of SNP TSC0057232
gaaagaatttta

SEQ ID NO: 368795 - DNA, 12 bp, Artificial Sequence
  Oligonucleotide primer for the detection of SNP TSC0057233
ataccctttcaa

SEQ ID NO: 368796 - DNA, 12 bp, Artificial Sequence
  Oligonucleotide primer for the detection of SNP TSC0057233
tacttatctccc

SEQ ID NO: 368797 - DNA, 12 bp, Artificial Sequence
  Oligonucleotide primer for the detection of SNP TSC0057234
ctctctaacctt

SEQ ID NO: 368798 - DNA, 12 bp, Artificial Sequence
  Oligonucleotide primer for the detection of SNP TSC0057234
ttgttaggaatg

SEQ ID NO: 368799 - DNA, 12 bp, Artificial Sequence
  Oligonucleotide primer for the detection of SNP TSC0057234
ttgttaggaacg

SEQ ID NO: 368800 - DNA, 12 bp, Artificial Sequence
  Oligonucleotide primer for the detection of SNP TSC0057235
aggtttatttgg

SEQ ID NO: 368801 - DNA, 12 bp, Artificial Sequence
  Oligonucleotide primer for the detection of SNP TSC0057236
attaccaaaaac

SEQ ID NO: 368802 - DNA, 12 bp, Artificial Sequence
  Oligonucleotide primer for the detection of SNP TSC0057236
tttatgtaggtg

SEQ ID NO: 368803 - DNA, 12 bp, Artificial Sequence
  Oligonucleotide primer for the detection of SNP TSC0057237
agtggtaataaa

SEQ ID NO: 368804 - DNA, 12 bp, Artificial Sequence
  Oligonucleotide primer for the detection of SNP TSC0008093
cacttaaaaaac

SEQ ID NO: 368805 - DNA, 12 bp, Artificial Sequence
  Oligonucleotide primer for the detection of SNP TSC0008093
ttgataaggagg

SEQ ID NO: 368806 - DNA, 12 bp, Artificial Sequence
  Oligonucleotide primer for the detection of SNP TSC0009558
agtgatggtatt

SEQ ID NO: 368807 - DNA, 12 bp, Artificial Sequence
  Oligonucleotide primer for the detection of SNP TSC0057241
ttggttatatat

SEQ ID NO: 368808 - DNA, 12 bp, Artificial Sequence
  Oligonucleotide primer for the detection of SNP TSC0057241
taactatatata

SEQ ID NO: 368809 - DNA, 12 bp, Artificial Sequence
  Oligonucleotide primer for the detection of SNP TSC0057242
tgagattatagg

SEQ ID NO: 368810 - DNA, 12 bp, Artificial Sequence
  Oligonucleotide primer for the detection of SNP TSC0057243
acttcttaatac

SEQ ID NO: 368811 - DNA, 12 bp, Artificial Sequence
  Oligonucleotide primer for the detection of SNP TSC0057243
agttagagttga

SEQ ID NO: 368812 - DNA, 12 bp, Artificial Sequence
  Oligonucleotide primer for the detection of SNP TSC0057244
caaacactactt

SEQ ID NO: 368813 - DNA, 12 bp, Artificial Sequence
  Oligonucleotide primer for the detection of SNP TSC0057245
ttggtttttgaa

SEQ ID NO: 368814 - DNA, 12 bp, Artificial Sequence
  Oligonucleotide primer for the detection of SNP TSC0057246
atattaaacatt

SEQ ID NO: 368815 - DNA, 12 bp, Artificial Sequence
  Oligonucleotide primer for the detection of SNP TSC0057246
ttagattgtgaa

SEQ ID NO: 368816 - DNA, 12 bp, Artificial Sequence
  Oligonucleotide primer for the detection of SNP TSC0057246
ctaaactataaa

SEQ ID NO: 368817 - DNA, 12 bp, Artificial Sequence
  Oligonucleotide primer for the detection of SNP TSC0057246
gtgttagatatt

SEQ ID NO: 368818 - DNA, 12 bp, Artificial Sequence
  Oligonucleotide primer for the detection of SNP TSC0057247
ttattaaatgta

SEQ ID NO: 368819 - DNA, 12 bp, Artificial Sequence
  Oligonucleotide primer for the detection of SNP TSC0057248
aacacaaaccta

SEQ ID NO: 368820 - DNA, 12 bp, Artificial Sequence
  Oligonucleotide primer for the detection of SNP TSC0057248
aacacgaaccta

SEQ ID NO: 368821 - DNA, 12 bp, Artificial Sequence
  Oligonucleotide primer for the detection of SNP TSC0057248
ttaaatttgatt

SEQ ID NO: 368822 - DNA, 12 bp, Artificial Sequence
  Oligonucleotide primer for the detection of SNP TSC0057248
ttaaatttgatc

SEQ ID NO: 368823 - DNA, 12 bp, Artificial Sequence
  Oligonucleotide primer for the detection of SNP TSC0057248
taatatgagttt

SEQ ID NO: 368824 - DNA, 12 bp, Artificial Sequence
  Oligonucleotide primer for the detection of SNP TSC0057248
taatacgagttt

SEQ ID NO: 368825 - DNA, 12 bp, Artificial Sequence
  Oligonucleotide primer for the detection of SNP TSC0057250
caccatcatctc

SEQ ID NO: 368826 - DNA, 12 bp, Artificial Sequence
  Oligonucleotide primer for the detection of SNP TSC0057250
tattggtttaag

SEQ ID NO: 368827 - DNA, 12 bp, Artificial Sequence
  Oligonucleotide primer for the detection of SNP TSC0057250
cactaatccaaa

SEQ ID NO: 368828 - DNA, 12 bp, Artificial Sequence
  Oligonucleotide primer for the detection of SNP TSC0057250
tattattatttt

SEQ ID NO: 368829 - DNA, 12 bp, Artificial Sequence
  Oligonucleotide primer for the detection of SNP TSC0057251
tttttttattac

SEQ ID NO: 368830 - DNA, 12 bp, Artificial Sequence
  Oligonucleotide primer for the detection of SNP TSC0057251
cttctccattac

SEQ ID NO: 368831 - DNA, 12 bp, Artificial Sequence
  Oligonucleotide primer for the detection of SNP TSC0057252
atttattccatt

SEQ ID NO: 368832 - DNA, 12 bp, Artificial Sequence
  Oligonucleotide primer for the detection of SNP TSC0057252
ctcttctaatta

SEQ ID NO: 368833 - DNA, 12 bp, Artificial Sequence
  Oligonucleotide primer for the detection of SNP TSC0057253
gttttggtatag

SEQ ID NO: 368834 - DNA, 12 bp, Artificial Sequence
  Oligonucleotide primer for the detection of SNP TSC0057254
atacaaattaaa

SEQ ID NO: 368835 - DNA, 12 bp, Artificial Sequence
  Oligonucleotide primer for the detection of SNP TSC0057254
gatgaatttaag

SEQ ID NO: 368836 - DNA, 12 bp, Artificial Sequence
  Oligonucleotide primer for the detection of SNP TSC0057255
aaattcctaaat

SEQ ID NO: 368837 - DNA, 12 bp, Artificial Sequence
  Oligonucleotide primer for the detection of SNP TSC0057256
acattttctatt

SEQ ID NO: 368838 - DNA, 12 bp, Artificial Sequence
  Oligonucleotide primer for the detection of SNP TSC0057256
taattttaaaag

SEQ ID NO: 368839 - DNA, 12 bp, Artificial Sequence
  Oligonucleotide primer for the detection of SNP TSC0057258
attaatcataat

SEQ ID NO: 368840 - DNA, 12 bp, Artificial Sequence
  Oligonucleotide primer for the detection of SNP TSC0057258
attaatcgtaat

SEQ ID NO: 368841 - DNA, 12 bp, Artificial Sequence
  Oligonucleotide primer for the detection of SNP TSC0057258
tttgttttatga

SEQ ID NO: 368842 - DNA, 12 bp, Artificial Sequence
  Oligonucleotide primer for the detection of SNP TSC0057259
tacaataatact

SEQ ID NO: 368843 - DNA, 12 bp, Artificial Sequence
  Oligonucleotide primer for the detection of SNP TSC0057259
tgttttatatta

SEQ ID NO: 368844 - DNA, 12 bp, Artificial Sequence
  Oligonucleotide primer for the detection of SNP TSC0057263
ctttattcacta

SEQ ID NO: 368845 - DNA, 12 bp, Artificial Sequence
  Oligonucleotide primer for the detection of SNP TSC0057263
taaggagaaaat

SEQ ID NO: 368846 - DNA, 12 bp, Artificial Sequence
  Oligonucleotide primer for the detection of SNP TSC0057264
acttaacaatta

SEQ ID NO: 368847 - DNA, 12 bp, Artificial Sequence
  Oligonucleotide primer for the detection of SNP TSC0057264
gtagtaattata

SEQ ID NO: 368848 - DNA, 12 bp, Artificial Sequence
  Oligonucleotide primer for the detection of SNP TSC0057264
acaacaattata

SEQ ID NO: 368849 - DNA, 12 bp, Artificial Sequence
  Oligonucleotide primer for the detection of SNP TSC0057264
ggtttagtaatt

SEQ ID NO: 368850 - DNA, 12 bp, Artificial Sequence
  Oligonucleotide primer for the detection of SNP TSC0010264
caaaatatactc

SEQ ID NO: 368851 - DNA, 12 bp, Artificial Sequence
  Oligonucleotide primer for the detection of SNP TSC0010264
tatatttagata

SEQ ID NO: 368852 - DNA, 12 bp, Artificial Sequence
  Oligonucleotide primer for the detection of SNP TSC0057266
aaaatttactat

SEQ ID NO: 368853 - DNA, 12 bp, Artificial Sequence
  Oligonucleotide primer for the detection of SNP TSC0057266
ataggttttgga

SEQ ID NO: 368854 - DNA, 12 bp, Artificial Sequence
  Oligonucleotide primer for the detection of SNP TSC0057270
ctactacattac

SEQ ID NO: 368855 - DNA, 12 bp, Artificial Sequence
  Oligonucleotide primer for the detection of SNP TSC0057270
tttatgaaatta

SEQ ID NO: 368856 - DNA, 12 bp, Artificial Sequence
  Oligonucleotide primer for the detection of SNP TSC0057271
attacaactctt

SEQ ID NO: 368857 - DNA, 12 bp, Artificial Sequence
  Oligonucleotide primer for the detection of SNP TSC0057271
gattaataaata

SEQ ID NO: 368858 - DNA, 12 bp, Artificial Sequence
  Oligonucleotide primer for the detection of SNP TSC0057275
aggagaagatag

SEQ ID NO: 368859 - DNA, 12 bp, Artificial Sequence
  Oligonucleotide primer for the detection of SNP TSC0057277
tatataaaaaat

SEQ ID NO: 368860 - DNA, 12 bp, Artificial Sequence
  Oligonucleotide primer for the detection of SNP TSC0057278
aaattataaact

SEQ ID NO: 368861 - DNA, 12 bp, Artificial Sequence
  Oligonucleotide primer for the detection of SNP TSC0057280
gtagatagtaaa

SEQ ID NO: 368862 - DNA, 12 bp, Artificial Sequence
  Oligonucleotide primer for the detection of SNP TSC0057283
acacaaacactt

SEQ ID NO: 368863 - DNA, 12 bp, Artificial Sequence
  Oligonucleotide primer for the detection of SNP TSC0057283
ataaatgttgaa

SEQ ID NO: 368864 - DNA, 12 bp, Artificial Sequence
  Oligonucleotide primer for the detection of SNP TSC0057285
attaaaattccc

SEQ ID NO: 368865 - DNA, 12 bp, Artificial Sequence
  Oligonucleotide primer for the detection of SNP TSC0057285
ttgtttaggata

SEQ ID NO: 368866 - DNA, 12 bp, Artificial Sequence
  Oligonucleotide primer for the detection of SNP TSC0057285
ttactcaaaaca

SEQ ID NO: 368867 - DNA, 12 bp, Artificial Sequence
  Oligonucleotide primer for the detection of SNP TSC0057285
gttaaagttttt

SEQ ID NO: 368868 - DNA, 12 bp, Artificial Sequence
  Oligonucleotide primer for the detection of SNP TSC0057286
taaaaactattt

SEQ ID NO: 368869 - DNA, 12 bp, Artificial Sequence
  Oligonucleotide primer for the detection of SNP TSC0057287
caaaatttattc

SEQ ID NO: 368870 - DNA, 12 bp, Artificial Sequence
  Oligonucleotide primer for the detection of SNP TSC0057287
agataaggtatt

SEQ ID NO: 368871 - DNA, 12 bp, Artificial Sequence
  Oligonucleotide primer for the detection of SNP TSC0057287
aacaaaacacca

SEQ ID NO: 368872 - DNA, 12 bp, Artificial Sequence
  Oligonucleotide primer for the detection of SNP TSC0057287
taggatttgttt

SEQ ID NO: 368873 - DNA, 12 bp, Artificial Sequence
  Oligonucleotide primer for the detection of SNP TSC0057287
taggatttgttc

SEQ ID NO: 368874 - DNA, 12 bp, Artificial Sequence
  Oligonucleotide primer for the detection of SNP TSC0057288
ataacctaaaat

SEQ ID NO: 368875 - DNA, 12 bp, Artificial Sequence
  Oligonucleotide primer for the detection of SNP TSC0057288
ttgttttagggg

SEQ ID NO: 368876 - DNA, 12 bp, Artificial Sequence
  Oligonucleotide primer for the detection of SNP TSC0057289
atttgttttatt

SEQ ID NO: 368877 - DNA, 12 bp, Artificial Sequence
  Oligonucleotide primer for the detection of SNP TSC0057289
atctaccttatt

SEQ ID NO: 368878 - DNA, 12 bp, Artificial Sequence
  Oligonucleotide primer for the detection of SNP TSC0057289
gattaatggata

SEQ ID NO: 368879 - DNA, 12 bp, Artificial Sequence
  Oligonucleotide primer for the detection of SNP TSC0057290
aatcatttttat

SEQ ID NO: 368880 - DNA, 12 bp, Artificial Sequence
  Oligonucleotide primer for the detection of SNP TSC0057290
atgttatttaag

SEQ ID NO: 368881 - DNA, 12 bp, Artificial Sequence
  Oligonucleotide primer for the detection of SNP TSC0057291
gtaagtagtgat

SEQ ID NO: 368882 - DNA, 12 bp, Artificial Sequence
  Oligonucleotide primer for the detection of SNP TSC0057291
acaaataataat

SEQ ID NO: 368883 - DNA, 12 bp, Artificial Sequence
  Oligonucleotide primer for the detection of SNP TSC0057291
ttttgaagtgga

SEQ ID NO: 368884 - DNA, 12 bp, Artificial Sequence
  Oligonucleotide primer for the detection of SNP TSC0057292
aaactcttccaa

SEQ ID NO: 368885 - DNA, 12 bp, Artificial Sequence
  Oligonucleotide primer for the detection of SNP TSC0057293
tttaagtatttg

SEQ ID NO: 368886 - DNA, 12 bp, Artificial Sequence
  Oligonucleotide primer for the detection of SNP TSC0057295
ctactaacaaac

SEQ ID NO: 368887 - DNA, 12 bp, Artificial Sequence
  Oligonucleotide primer for the detection of SNP TSC0057295
ctactaacgaac

SEQ ID NO: 368888 - DNA, 12 bp, Artificial Sequence
  Oligonucleotide primer for the detection of SNP TSC0057295
gaaagagtttag

SEQ ID NO: 368889 - DNA, 12 bp, Artificial Sequence
  Oligonucleotide primer for the detection of SNP TSC0057297
cccacttttatt

SEQ ID NO: 368890 - DNA, 12 bp, Artificial Sequence
  Oligonucleotide primer for the detection of SNP TSC0057297
tatgtttataaa

SEQ ID NO: 368891 - DNA, 12 bp, Artificial Sequence
  Oligonucleotide primer for the detection of SNP TSC0057297
tatatctataaa

SEQ ID NO: 368892 - DNA, 12 bp, Artificial Sequence
  Oligonucleotide primer for the detection of SNP TSC0057299
aaactcgtaaac

SEQ ID NO: 368893 - DNA, 12 bp, Artificial Sequence
  Oligonucleotide primer for the detection of SNP TSC0057299
tataaatattta

SEQ ID NO: 368894 - DNA, 12 bp, Artificial Sequence
  Oligonucleotide primer for the detection of SNP TSC0057300
ttagtaaataat

SEQ ID NO: 368895 - DNA, 12 bp, Artificial Sequence
  Oligonucleotide primer for the detection of SNP TSC0057300
ttcaataaataa

SEQ ID NO: 368896 - DNA, 12 bp, Artificial Sequence
  Oligonucleotide primer for the detection of SNP TSC0057300
tgattattaaaa

SEQ ID NO: 368897 - DNA, 12 bp, Artificial Sequence
  Oligonucleotide primer for the detection of SNP TSC0057301
cttcaaaaaaac

SEQ ID NO: 368898 - DNA, 12 bp, Artificial Sequence
  Oligonucleotide primer for the detection of SNP TSC0057303
ctataactaccc

SEQ ID NO: 368899 - DNA, 12 bp, Artificial Sequence
  Oligonucleotide primer for the detection of SNP TSC0057305
aatactaaaact

SEQ ID NO: 368900 - DNA, 12 bp, Artificial Sequence
  Oligonucleotide primer for the detection of SNP TSC0057305
aagtgatttatg

SEQ ID NO: 368901 - DNA, 12 bp, Artificial Sequence
  Oligonucleotide primer for the detection of SNP TSC0057306
attatatttctc

SEQ ID NO: 368902 - DNA, 12 bp, Artificial Sequence
  Oligonucleotide primer for the detection of SNP TSC0057306
tcataccaacta

SEQ ID NO: 368903 - DNA, 12 bp, Artificial Sequence
  Oligonucleotide primer for the detection of SNP TSC0057307
gtagtatgatat

SEQ ID NO: 368904 - DNA, 12 bp, Artificial Sequence
  Oligonucleotide primer for the detection of SNP TSC0057307
ataatataatat

SEQ ID NO: 368905 - DNA, 12 bp, Artificial Sequence
  Oligonucleotide primer for the detection of SNP TSC0057307
atgtgataaata

SEQ ID NO: 368906 - DNA, 12 bp, Artificial Sequence
  Oligonucleotide primer for the detection of SNP TSC0005031
cacctttccaac

SEQ ID NO: 368907 - DNA, 12 bp, Artificial Sequence
  Oligonucleotide primer for the detection of SNP TSC0005031
tagggtttatta

SEQ ID NO: 368908 - DNA, 12 bp, Artificial Sequence
  Oligonucleotide primer for the detection of SNP TSC0005032
cccacaaatctt

SEQ ID NO: 368909 - DNA, 12 bp, Artificial Sequence
  Oligonucleotide primer for the detection of SNP TSC0005032
cccgcaaatctt

SEQ ID NO: 368910 - DNA, 12 bp, Artificial Sequence
  Oligonucleotide primer for the detection of SNP TSC0057317
aaaaactctatt

SEQ ID NO: 368911 - DNA, 12 bp, Artificial Sequence
  Oligonucleotide primer for the detection of SNP TSC0057317
gtgatttttaag

SEQ ID NO: 368912 - DNA, 12 bp, Artificial Sequence
  Oligonucleotide primer for the detection of SNP TSC0004832
ccttaataactc

SEQ ID NO: 368913 - DNA, 12 bp, Artificial Sequence
  Oligonucleotide primer for the detection of SNP TSC0004832
ttagaaataaaa

SEQ ID NO: 368914 - DNA, 12 bp, Artificial Sequence
  Oligonucleotide primer for the detection of SNP TSC0057318
aaaacattaaat

SEQ ID NO: 368915 - DNA, 12 bp, Artificial Sequence
  Oligonucleotide primer for the detection of SNP TSC0057318
gttatgttttag

SEQ ID NO: 368916 - DNA, 12 bp, Artificial Sequence
  Oligonucleotide primer for the detection of SNP TSC0057318
gttatattttaa

SEQ ID NO: 368917 - DNA, 12 bp, Artificial Sequence
  Oligonucleotide primer for the detection of SNP TSC0057318
agaatattgaat

SEQ ID NO: 368918 - DNA, 12 bp, Artificial Sequence
  Oligonucleotide primer for the detection of SNP TSC0004853
acattcctatac

SEQ ID NO: 368919 - DNA, 12 bp, Artificial Sequence
  Oligonucleotide primer for the detection of SNP TSC0004853
acgttcctatac

SEQ ID NO: 368920 - DNA, 12 bp, Artificial Sequence
  Oligonucleotide primer for the detection of SNP TSC0004853
tgtgatgattgg

SEQ ID NO: 368921 - DNA, 12 bp, Artificial Sequence
  Oligonucleotide primer for the detection of SNP TSC0057319
acatacaatcta

SEQ ID NO: 368922 - DNA, 12 bp, Artificial Sequence
  Oligonucleotide primer for the detection of SNP TSC0057319
cttactattcct

SEQ ID NO: 368923 - DNA, 12 bp, Artificial Sequence
  Oligonucleotide primer for the detection of SNP TSC0057323
tattcacacact

SEQ ID NO: 368924 - DNA, 12 bp, Artificial Sequence
  Oligonucleotide primer for the detection of SNP TSC0057323
taatatttagta

SEQ ID NO: 368925 - DNA, 12 bp, Artificial Sequence
  Oligonucleotide primer for the detection of SNP TSC0057324
cttatccactca

SEQ ID NO: 368926 - DNA, 12 bp, Artificial Sequence
  Oligonucleotide primer for the detection of SNP TSC0057324
gattagagagag

SEQ ID NO: 368927 - DNA, 12 bp, Artificial Sequence
  Oligonucleotide primer for the detection of SNP TSC0057326
ttatcaaaaaac

SEQ ID NO: 368928 - DNA, 12 bp, Artificial Sequence
  Oligonucleotide primer for the detection of SNP TSC0057326
atggaaagttaa

SEQ ID NO: 368929 - DNA, 12 bp, Artificial Sequence
  Oligonucleotide primer for the detection of SNP TSC0057327
actttctatttt

SEQ ID NO: 368930 - DNA, 12 bp, Artificial Sequence
  Oligonucleotide primer for the detection of SNP TSC0057327
tattattattaa

SEQ ID NO: 368931 - DNA, 12 bp, Artificial Sequence
  Oligonucleotide primer for the detection of SNP TSC0057329
gagttttattaa

SEQ ID NO: 368932 - DNA, 12 bp, Artificial Sequence
  Oligonucleotide primer for the detection of SNP TSC0057329
aaattccatcaa

SEQ ID NO: 368933 - DNA, 12 bp, Artificial Sequence
  Oligonucleotide primer for the detection of SNP TSC0057329
tttaaagttggt

SEQ ID NO: 368934 - DNA, 12 bp, Artificial Sequence
  Oligonucleotide primer for the detection of SNP TSC0057329
tttaaagttggc

SEQ ID NO: 368935 - DNA, 12 bp, Artificial Sequence
  Oligonucleotide primer for the detection of SNP TSC0057330
atggtaagtaaa

SEQ ID NO: 368936 - DNA, 12 bp, Artificial Sequence
  Oligonucleotide primer for the detection of SNP TSC0057331
caaaccccttaa

SEQ ID NO: 368937 - DNA, 12 bp, Artificial Sequence
  Oligonucleotide primer for the detection of SNP TSC0057331
taaactcaacta

SEQ ID NO: 368938 - DNA, 12 bp, Artificial Sequence
  Oligonucleotide primer for the detection of SNP TSC0057332
atactcaaaaac

SEQ ID NO: 368939 - DNA, 12 bp, Artificial Sequence
  Oligonucleotide primer for the detection of SNP TSC0057332
ttaaaaaggaaa

SEQ ID NO: 368940 - DNA, 12 bp, Artificial Sequence
  Oligonucleotide primer for the detection of SNP TSC0057333
tttaaaagaatg

SEQ ID NO: 368941 - DNA, 12 bp, Artificial Sequence
  Oligonucleotide primer for the detection of SNP TSC0057334
aactaatctaca

SEQ ID NO: 368942 - DNA, 12 bp, Artificial Sequence
  Oligonucleotide primer for the detection of SNP TSC0057334
taaattttatca

SEQ ID NO: 368943 - DNA, 12 bp, Artificial Sequence
  Oligonucleotide primer for the detection of SNP TSC0057335
aaataacaacca

SEQ ID NO: 368944 - DNA, 12 bp, Artificial Sequence
  Oligonucleotide primer for the detection of SNP TSC0057335
tttttgtgataa

SEQ ID NO: 368945 - DNA, 12 bp, Artificial Sequence
  Oligonucleotide primer for the detection of SNP TSC0057336
tctatataaacc

SEQ ID NO: 368946 - DNA, 12 bp, Artificial Sequence
  Oligonucleotide primer for the detection of SNP TSC0057336
gttagatattat

SEQ ID NO: 368947 - DNA, 12 bp, Artificial Sequence
  Oligonucleotide primer for the detection of SNP TSC0057336
atcaaacactat

SEQ ID NO: 368948 - DNA, 12 bp, Artificial Sequence
  Oligonucleotide primer for the detection of SNP TSC0057336
tttatatgaatt

SEQ ID NO: 368949 - DNA, 12 bp, Artificial Sequence
  Oligonucleotide primer for the detection of SNP TSC0057337
tattttgggtaa

SEQ ID NO: 368950 - DNA, 12 bp, Artificial Sequence
  Oligonucleotide primer for the detection of SNP TSC0057337
caccctaaacaa

SEQ ID NO: 368951 - DNA, 12 bp, Artificial Sequence
  Oligonucleotide primer for the detection of SNP TSC0057348
aactatctaaca

SEQ ID NO: 368952 - DNA, 12 bp, Artificial Sequence
  Oligonucleotide primer for the detection of SNP TSC0057348
gtggatttattt

SEQ ID NO: 368953 - DNA, 12 bp, Artificial Sequence
  Oligonucleotide primer for the detection of SNP TSC0057348
ataaactcatct

SEQ ID NO: 368954 - DNA, 12 bp, Artificial Sequence
  Oligonucleotide primer for the detection of SNP TSC0057348
gattgtttaata

SEQ ID NO: 368955 - DNA, 12 bp, Artificial Sequence
  Oligonucleotide primer for the detection of SNP TSC0057349
aactcatcaaat

SEQ ID NO: 368956 - DNA, 12 bp, Artificial Sequence
  Oligonucleotide primer for the detection of SNP TSC0057349
agtagggttgta

SEQ ID NO: 368957 - DNA, 12 bp, Artificial Sequence
  Oligonucleotide primer for the detection of SNP TSC0057352
caccatcaccta

SEQ ID NO: 368958 - DNA, 12 bp, Artificial Sequence
  Oligonucleotide primer for the detection of SNP TSC0057352
aaggatgtttat

SEQ ID NO: 368959 - DNA, 12 bp, Artificial Sequence
  Oligonucleotide primer for the detection of SNP TSC0057352
aaaaatattcat

SEQ ID NO: 368960 - DNA, 12 bp, Artificial Sequence
  Oligonucleotide primer for the detection of SNP TSC0057356
atctcaaaccat

SEQ ID NO: 368961 - DNA, 12 bp, Artificial Sequence
  Oligonucleotide primer for the detection of SNP TSC0057356
gtctcaaaccat

SEQ ID NO: 368962 - DNA, 12 bp, Artificial Sequence
  Oligonucleotide primer for the detection of SNP TSC0057356
agtttttattag

SEQ ID NO: 368963 - DNA, 12 bp, Artificial Sequence
  Oligonucleotide primer for the detection of SNP TSC0057360
aatttctccgta

SEQ ID NO: 368964 - DNA, 12 bp, Artificial Sequence
  Oligonucleotide primer for the detection of SNP TSC0057361
atctattatctt

SEQ ID NO: 368965 - DNA, 12 bp, Artificial Sequence
  Oligonucleotide primer for the detection of SNP TSC0057361
ctactctattaa

SEQ ID NO: 368966 - DNA, 12 bp, Artificial Sequence
  Oligonucleotide primer for the detection of SNP TSC0057361
gtttgttgtttt

SEQ ID NO: 368967 - DNA, 12 bp, Artificial Sequence
  Oligonucleotide primer for the detection of SNP TSC0057362
ccaacccctatc

SEQ ID NO: 368968 - DNA, 12 bp, Artificial Sequence
  Oligonucleotide primer for the detection of SNP TSC0057362
gtgtttagttta

SEQ ID NO: 368969 - DNA, 12 bp, Artificial Sequence
  Oligonucleotide primer for the detection of SNP TSC0057362
atactcaactca

SEQ ID NO: 368970 - DNA, 12 bp, Artificial Sequence
  Oligonucleotide primer for the detection of SNP TSC0057363
acgattgtgagg

SEQ ID NO: 368971 - DNA, 12 bp, Artificial Sequence
  Oligonucleotide primer for the detection of SNP TSC0057363
acgattataaaa

SEQ ID NO: 368972 - DNA, 12 bp, Artificial Sequence
  Oligonucleotide primer for the detection of SNP TSC0057363
gtggttgaggag

SEQ ID NO: 368973 - DNA, 12 bp, Artificial Sequence
  Oligonucleotide primer for the detection of SNP TSC0057364
aattctaatttc

SEQ ID NO: 368974 - DNA, 12 bp, Artificial Sequence
  Oligonucleotide primer for the detection of SNP TSC0057364
ttaaaataagtg

SEQ ID NO: 368975 - DNA, 12 bp, Artificial Sequence
  Oligonucleotide primer for the detection of SNP TSC0057367
tattgatttagg

SEQ ID NO: 368976 - DNA, 12 bp, Artificial Sequence
  Oligonucleotide primer for the detection of SNP TSC0057367
tattaactcaaa

SEQ ID NO: 368977 - DNA, 12 bp, Artificial Sequence
  Oligonucleotide primer for the detection of SNP TSC0057367
aaatgagagtat

SEQ ID NO: 368978 - DNA, 12 bp, Artificial Sequence
  Oligonucleotide primer for the detection of SNP TSC0006876
ctattttacacc

SEQ ID NO: 368979 - DNA, 12 bp, Artificial Sequence
  Oligonucleotide primer for the detection of SNP TSC0006876
tttgtaatttaa

SEQ ID NO: 368980 - DNA, 12 bp, Artificial Sequence
  Oligonucleotide primer for the detection of SNP TSC0057373
aaaaaacacctt

SEQ ID NO: 368981 - DNA, 12 bp, Artificial Sequence
  Oligonucleotide primer for the detection of SNP TSC0057373
aaaaaacgcctt

SEQ ID NO: 368982 - DNA, 12 bp, Artificial Sequence
  Oligonucleotide primer for the detection of SNP TSC0057373
tttggagagggg

SEQ ID NO: 368983 - DNA, 12 bp, Artificial Sequence
  Oligonucleotide primer for the detection of SNP TSC0057373
gaaggatgtttt

SEQ ID NO: 368984 - DNA, 12 bp, Artificial Sequence
  Oligonucleotide primer for the detection of SNP TSC0057373
gaaggacgtttt

SEQ ID NO: 368985 - DNA, 12 bp, Artificial Sequence
  Oligonucleotide primer for the detection of SNP TSC0006352
aaatatgataat

SEQ ID NO: 368986 - DNA, 12 bp, Artificial Sequence
  Oligonucleotide primer for the detection of SNP TSC0006352
aaacataacaat

SEQ ID NO: 368987 - DNA, 12 bp, Artificial Sequence
  Oligonucleotide primer for the detection of SNP TSC0006352
ttaaagtgggag

SEQ ID NO: 368988 - DNA, 12 bp, Artificial Sequence
  Oligonucleotide primer for the detection of SNP TSC0057388
tattggattatg

SEQ ID NO: 368989 - DNA, 12 bp, Artificial Sequence
  Oligonucleotide primer for the detection of SNP TSC0057389
taacttactact

SEQ ID NO: 368990 - DNA, 12 bp, Artificial Sequence
  Oligonucleotide primer for the detection of SNP TSC0057389
ttaaaccccaat

SEQ ID NO: 368991 - DNA, 12 bp, Artificial Sequence
  Oligonucleotide primer for the detection of SNP TSC0057389
tagtttattatt

SEQ ID NO: 368992 - DNA, 12 bp, Artificial Sequence
  Oligonucleotide primer for the detection of SNP TSC0057391
cgttttttttgt

SEQ ID NO: 368993 - DNA, 12 bp, Artificial Sequence
  Oligonucleotide primer for the detection of SNP TSC0057391
cacccttcctac

SEQ ID NO: 368994 - DNA, 12 bp, Artificial Sequence
  Oligonucleotide primer for the detection of SNP TSC0057391
cgcccttcctac

SEQ ID NO: 368995 - DNA, 12 bp, Artificial Sequence
  Oligonucleotide primer for the detection of SNP TSC0057391
gaagtaggtggg

SEQ ID NO: 368996 - DNA, 12 bp, Artificial Sequence
  Oligonucleotide primer for the detection of SNP TSC0006476
ggtgatggatta

SEQ ID NO: 368997 - DNA, 12 bp, Artificial Sequence
  Oligonucleotide primer for the detection of SNP TSC0057392
aaaacccctcaa

SEQ ID NO: 368998 - DNA, 12 bp, Artificial Sequence
  Oligonucleotide primer for the detection of SNP TSC0057392
accttaacttta

SEQ ID NO: 368999 - DNA, 12 bp, Artificial Sequence
  Oligonucleotide primer for the detection of SNP TSC0057393
ctactattaatt

SEQ ID NO: 369000 - DNA, 12 bp, Artificial Sequence
  Oligonucleotide primer for the detection of SNP TSC0057393
gtgtatttgtag

SEQ ID NO: 369001 - DNA, 12 bp, Artificial Sequence
  Oligonucleotide primer for the detection of SNP TSC0057394
tattaatatttc

SEQ ID NO: 369002 - DNA, 12 bp, Artificial Sequence
  Oligonucleotide primer for the detection of SNP TSC0057394
aaaaatatttag

SEQ ID NO: 369003 - DNA, 12 bp, Artificial Sequence
  Oligonucleotide primer for the detection of SNP TSC0057397
ttttgatatagg

SEQ ID NO: 369004 - DNA, 12 bp, Artificial Sequence
  Oligonucleotide primer for the detection of SNP TSC0057397
tttcgatatagg

SEQ ID NO: 369005 - DNA, 12 bp, Artificial Sequence
  Oligonucleotide primer for the detection of SNP TSC0057398
atcataataaac

SEQ ID NO: 369006 - DNA, 12 bp, Artificial Sequence
  Oligonucleotide primer for the detection of SNP TSC0057398
gttataataggt

SEQ ID NO: 369007 - DNA, 12 bp, Artificial Sequence
  Oligonucleotide primer for the detection of SNP TSC0057399
taaatacaaaaa

SEQ ID NO: 369008 - DNA, 12 bp, Artificial Sequence
  Oligonucleotide primer for the detection of SNP TSC0057399
ttgttaaatgtt

SEQ ID NO: 369009 - DNA, 12 bp, Artificial Sequence
  Oligonucleotide primer for the detection of SNP TSC0057399
ttatcaaatatt

SEQ ID NO: 369010 - DNA, 12 bp, Artificial Sequence
  Oligonucleotide primer for the detection of SNP TSC0057399
tagatatagaga

SEQ ID NO: 369011 - DNA, 12 bp, Artificial Sequence
  Oligonucleotide primer for the detection of SNP TSC0057401
gaaactcaaaat

SEQ ID NO: 369012 - DNA, 12 bp, Artificial Sequence
  Oligonucleotide primer for the detection of SNP TSC0057401
aaaatttttgtg

SEQ ID NO: 369013 - DNA, 12 bp, Artificial Sequence
  Oligonucleotide primer for the detection of SNP TSC0057402
caaacaatcaac

SEQ ID NO: 369014 - DNA, 12 bp, Artificial Sequence
  Oligonucleotide primer for the detection of SNP TSC0057403
tcccttcttaaa

SEQ ID NO: 369015 - DNA, 12 bp, Artificial Sequence
  Oligonucleotide primer for the detection of SNP TSC0057403
gattattagggt

SEQ ID NO: 369016 - DNA, 12 bp, Artificial Sequence
  Oligonucleotide primer for the detection of SNP TSC0057404
ccctcttaaatt

SEQ ID NO: 369017 - DNA, 12 bp, Artificial Sequence
  Oligonucleotide primer for the detection of SNP TSC0057404
ttgatttgataa

SEQ ID NO: 369018 - DNA, 12 bp, Artificial Sequence
  Oligonucleotide primer for the detection of SNP TSC0057404
ctaacttaacaa

SEQ ID NO: 369019 - DNA, 12 bp, Artificial Sequence
  Oligonucleotide primer for the detection of SNP TSC0057405
tgggagttgagg

SEQ ID NO: 369020 - DNA, 12 bp, Artificial Sequence
  Oligonucleotide primer for the detection of SNP TSC0057406
ttcctcattccc

SEQ ID NO: 369021 - DNA, 12 bp, Artificial Sequence
  Oligonucleotide primer for the detection of SNP TSC0057407
ctataattttta

SEQ ID NO: 369022 - DNA, 12 bp, Artificial Sequence
  Oligonucleotide primer for the detection of SNP TSC0057407
gtgaagagtgat

SEQ ID NO: 369023 - DNA, 12 bp, Artificial Sequence
  Oligonucleotide primer for the detection of SNP TSC0057407
gttatgattttt

SEQ ID NO: 369024 - DNA, 12 bp, Artificial Sequence
  Oligonucleotide primer for the detection of SNP TSC0057409
atatgtatggta

SEQ ID NO: 369025 - DNA, 12 bp, Artificial Sequence
  Oligonucleotide primer for the detection of SNP TSC0057410
ttttttcctttt

SEQ ID NO: 369026 - DNA, 12 bp, Artificial Sequence
  Oligonucleotide primer for the detection of SNP TSC0007267
taccttaaatat

SEQ ID NO: 369027 - DNA, 12 bp, Artificial Sequence
  Oligonucleotide primer for the detection of SNP TSC0006454
tatcctttcctt

SEQ ID NO: 369028 - DNA, 12 bp, Artificial Sequence
  Oligonucleotide primer for the detection of SNP TSC0006454
attggaagttta

SEQ ID NO: 369029 - DNA, 12 bp, Artificial Sequence
  Oligonucleotide primer for the detection of SNP TSC0006454
atcggaagttta

SEQ ID NO: 369030 - DNA, 12 bp, Artificial Sequence
  Oligonucleotide primer for the detection of SNP TSC0057415
tggtgaagttgt

SEQ ID NO: 369031 - DNA, 12 bp, Artificial Sequence
  Oligonucleotide primer for the detection of SNP TSC0057415
cggtgaagttgt

SEQ ID NO: 369032 - DNA, 12 bp, Artificial Sequence
  Oligonucleotide primer for the detection of SNP TSC0057415
acaataaaacta

SEQ ID NO: 369033 - DNA, 12 bp, Artificial Sequence
  Oligonucleotide primer for the detection of SNP TSC0057415
acgataaaacta

SEQ ID NO: 369034 - DNA, 12 bp, Artificial Sequence
  Oligonucleotide primer for the detection of SNP TSC0057415
tattgtgaattt

SEQ ID NO: 369035 - DNA, 12 bp, Artificial Sequence
  Oligonucleotide primer for the detection of SNP TSC0057416
gtgtgttttaaa

SEQ ID NO: 369036 - DNA, 12 bp, Artificial Sequence
  Oligonucleotide primer for the detection of SNP TSC0057421
ttattttatgtg

SEQ ID NO: 369037 - DNA, 12 bp, Artificial Sequence
  Oligonucleotide primer for the detection of SNP TSC0057421
ttattttacgtg

SEQ ID NO: 369038 - DNA, 12 bp, Artificial Sequence
  Oligonucleotide primer for the detection of SNP TSC0057422
ttacaaaaccac

SEQ ID NO: 369039 - DNA, 12 bp, Artificial Sequence
  Oligonucleotide primer for the detection of SNP TSC0057422
attgtttatagt

SEQ ID NO: 369040 - DNA, 12 bp, Artificial Sequence
  Oligonucleotide primer for the detection of SNP TSC0057422
ttactcacaaca

SEQ ID NO: 369041 - DNA, 12 bp, Artificial Sequence
  Oligonucleotide primer for the detection of SNP TSC0057422
ttatagagttat

SEQ ID NO: 369042 - DNA, 12 bp, Artificial Sequence
  Oligonucleotide primer for the detection of SNP TSC0057422
ttatagagttac

SEQ ID NO: 369043 - DNA, 12 bp, Artificial Sequence
  Oligonucleotide primer for the detection of SNP TSC0057423
aaataactattt

SEQ ID NO: 369044 - DNA, 12 bp, Artificial Sequence
  Oligonucleotide primer for the detection of SNP TSC0057423
tgataaaattag

SEQ ID NO: 369045 - DNA, 12 bp, Artificial Sequence
  Oligonucleotide primer for the detection of SNP TSC0057424
tacggtaagata

SEQ ID NO: 369046 - DNA, 12 bp, Artificial Sequence
  Oligonucleotide primer for the detection of SNP TSC0057425
tactcataaaat

SEQ ID NO: 369047 - DNA, 12 bp, Artificial Sequence
  Oligonucleotide primer for the detection of SNP TSC0057426
taggagttatta

SEQ ID NO: 369048 - DNA, 12 bp, Artificial Sequence
  Oligonucleotide primer for the detection of SNP TSC0057426
caaaaaccatca

SEQ ID NO: 369049 - DNA, 12 bp, Artificial Sequence
  Oligonucleotide primer for the detection of SNP TSC0057426
ttagagtgtagt

SEQ ID NO: 369050 - DNA, 12 bp, Artificial Sequence
  Oligonucleotide primer for the detection of SNP TSC0057427
attcaccaatca

SEQ ID NO: 369051 - DNA, 12 bp, Artificial Sequence
  Oligonucleotide primer for the detection of SNP TSC0057427
attcaccgatca

SEQ ID NO: 369052 - DNA, 12 bp, Artificial Sequence
  Oligonucleotide primer for the detection of SNP TSC0057427
ggtatgtgttat

SEQ ID NO: 369053 - DNA, 12 bp, Artificial Sequence
  Oligonucleotide primer for the detection of SNP TSC0057429
aaaggaaggaga

SEQ ID NO: 369054 - DNA, 12 bp, Artificial Sequence
  Oligonucleotide primer for the detection of SNP TSC0057432
acacacacaacc

SEQ ID NO: 369055 - DNA, 12 bp, Artificial Sequence
  Oligonucleotide primer for the detection of SNP TSC0057433
atccaaaaatac

SEQ ID NO: 369056 - DNA, 12 bp, Artificial Sequence
  Oligonucleotide primer for the detection of SNP TSC0057433
atttatatatag

SEQ ID NO: 369057 - DNA, 12 bp, Artificial Sequence
  Oligonucleotide primer for the detection of SNP TSC0057434
aaattctcccta

SEQ ID NO: 369058 - DNA, 12 bp, Artificial Sequence
  Oligonucleotide primer for the detection of SNP TSC0057434
aggaaagggtgt

SEQ ID NO: 369059 - DNA, 12 bp, Artificial Sequence
  Oligonucleotide primer for the detection of SNP TSC0057434
ggattttttttg

SEQ ID NO: 369060 - DNA, 12 bp, Artificial Sequence
  Oligonucleotide primer for the detection of SNP TSC0057435
gttatgatttgt

SEQ ID NO: 369061 - DNA, 12 bp, Artificial Sequence
  Oligonucleotide primer for the detection of SNP TSC0057435
accataatctac

SEQ ID NO: 369062 - DNA, 12 bp, Artificial Sequence
  Oligonucleotide primer for the detection of SNP TSC0057435
aagtaatgttta

SEQ ID NO: 369063 - DNA, 12 bp, Artificial Sequence
  Oligonucleotide primer for the detection of SNP TSC0057436
ctaataccaata

SEQ ID NO: 369064 - DNA, 12 bp, Artificial Sequence
  Oligonucleotide primer for the detection of SNP TSC0057436
ggggaagttggg

SEQ ID NO: 369065 - DNA, 12 bp, Artificial Sequence
  Oligonukleotid-Primer
ggggaagtcggg

SEQ ID NO: 369066 - DNA, 12 bp, Artificial Sequence
  Oligonucleotide primer for the detection of SNP TSC0057436
ttggtgttagtg

SEQ ID NO: 369067 - DNA, 12 bp, Artificial Sequence
  Oligonucleotide primer for the detection of SNP TSC0057437
ttttatctttta

SEQ ID NO: 369068 - DNA, 12 bp, Artificial Sequence
  Oligonucleotide primer for the detection of SNP TSC0057437
atagtttaagtg

SEQ ID NO: 369069 - DNA, 12 bp, Artificial Sequence
  Oligonukleotid-Primer
acctatcaaatt

SEQ ID NO: 369070 - DNA, 12 bp, Artificial Sequence
  Oligonucleotide primer for the detection of SNP TSC0057438
aatttttgttaa

SEQ ID NO: 369071 - DNA, 12 bp, Artificial Sequence
  Oligonucleotide primer for the detection of SNP TSC0057438
aatttttatcaa

SEQ ID NO: 369072 - DNA, 12 bp, Artificial Sequence
  Oligonucleotide primer for the detection of SNP TSC0057438
atttattagatt

SEQ ID NO: 369073 - DNA, 12 bp, Artificial Sequence
  Oligonucleotide primer for the detection of SNP TSC0057439
gagttttttaat

SEQ ID NO: 369074 - DNA, 12 bp, Artificial Sequence
  Oligonucleotide primer for the detection of SNP TSC0057439
taaaatttggat

SEQ ID NO: 369075 - DNA, 12 bp, Artificial Sequence
  Oligonucleotide primer for the detection of SNP TSC0010353
aaactataatac

SEQ ID NO: 369076 - DNA, 12 bp, Artificial Sequence
  Oligonucleotide primer for the detection of SNP TSC0010353
ttttagttggat

SEQ ID NO: 369077 - DNA, 12 bp, Artificial Sequence
  Oligonucleotide primer for the detection of SNP TSC0010353
tctcaactaaat

SEQ ID NO: 369078 - DNA, 12 bp, Artificial Sequence
  Oligonucleotide primer for the detection of SNP TSC0010353
gagttgtggtgt

SEQ ID NO: 369079 - DNA, 12 bp, Artificial Sequence
  Oligonucleotide primer for the detection of SNP TSC0057441
ctatacctccac

SEQ ID NO: 369080 - DNA, 12 bp, Artificial Sequence
  Oligonucleotide primer for the detection of SNP TSC0057441
gattttagtggg

SEQ ID NO: 369081 - DNA, 12 bp, Artificial Sequence
  Oligonucleotide primer for the detection of SNP TSC0057441
gattttagcggg

SEQ ID NO: 369082 - DNA, 12 bp, Artificial Sequence
  Oligonucleotide primer for the detection of SNP TSC0057441
tttaacgaaaaa

SEQ ID NO: 369083 - DNA, 12 bp, Artificial Sequence
  Oligonucleotide primer for the detection of SNP TSC0057442
taatcttcttta

SEQ ID NO: 369084 - DNA, 12 bp, Artificial Sequence
  Oligonucleotide primer for the detection of SNP TSC0057442
gtagaattttaa

SEQ ID NO: 369085 - DNA, 12 bp, Artificial Sequence
  Oligonucleotide primer for the detection of SNP TSC0057442
caaaacttcaaa

SEQ ID NO: 369086 - DNA, 12 bp, Artificial Sequence
  Oligonucleotide primer for the detection of SNP TSC0057443
agtttaggttat

SEQ ID NO: 369087 - DNA, 12 bp, Artificial Sequence
  Oligonucleotide primer for the detection of SNP TSC0057443
aactcaaaccac

SEQ ID NO: 369088 - DNA, 12 bp, Artificial Sequence
  Oligonucleotide primer for the detection of SNP TSC0057444
ggtggtgggtat

SEQ ID NO: 369089 - DNA, 12 bp, Artificial Sequence
  Oligonucleotide primer for the detection of SNP TSC0057444
ggtggcgggtat

SEQ ID NO: 369090 - DNA, 12 bp, Artificial Sequence
  Oligonucleotide primer for the detection of SNP TSC0057444
ggtggtgggtac

SEQ ID NO: 369091 - DNA, 12 bp, Artificial Sequence
  Oligonucleotide primer for the detection of SNP TSC0057444
ggtggcgggtac

SEQ ID NO: 369092 - DNA, 12 bp, Artificial Sequence
  Oligonucleotide primer for the detection of SNP TSC0057446
ctaaactctcca

SEQ ID NO: 369093 - DNA, 12 bp, Artificial Sequence
  Oligonucleotide primer for the detection of SNP TSC0057446
gtaaattttatt

SEQ ID NO: 369094 - DNA, 12 bp, Artificial Sequence
  Oligonucleotide primer for the detection of SNP TSC0057446
ataaatcctact

SEQ ID NO: 369095 - DNA, 12 bp, Artificial Sequence
  Oligonucleotide primer for the detection of SNP TSC0057447
ccatttcttact

SEQ ID NO: 369096 - DNA, 12 bp, Artificial Sequence
  Oligonucleotide primer for the detection of SNP TSC0057447
ttagggtaggag

SEQ ID NO: 369097 - DNA, 12 bp, Artificial Sequence
  Oligonucleotide primer for the detection of SNP TSC0057448
ctcccaataact

SEQ ID NO: 369098 - DNA, 12 bp, Artificial Sequence
  Oligonucleotide primer for the detection of SNP TSC0057448
ctcccgataact

SEQ ID NO: 369099 - DNA, 12 bp, Artificial Sequence
  Oligonucleotide primer for the detection of SNP TSC0057448
ttagttgttgaa

SEQ ID NO: 369100 - DNA, 12 bp, Artificial Sequence
  Oligonucleotide primer for the detection of SNP TSC0057449
cctacaaaccta

SEQ ID NO: 369101 - DNA, 12 bp, Artificial Sequence
  Oligonucleotide primer for the detection of SNP TSC0057449
taattttaagta

SEQ ID NO: 369102 - DNA, 12 bp, Artificial Sequence
  Oligonucleotide primer for the detection of SNP TSC0057449
caattttaaaca

SEQ ID NO: 369103 - DNA, 12 bp, Artificial Sequence
  Oligonucleotide primer for the detection of SNP TSC0057450
cctttttaaata

SEQ ID NO: 369104 - DNA, 12 bp, Artificial Sequence
  Oligonucleotide primer for the detection of SNP TSC0057452
ttctcaaaaatt

SEQ ID NO: 369105 - DNA, 12 bp, Artificial Sequence
  Oligonucleotide primer for the detection of SNP TSC0057452
agtataatttta

SEQ ID NO: 369106 - DNA, 12 bp, Artificial Sequence
  Oligonucleotide primer for the detection of SNP TSC0057453
gaggtaagggag

SEQ ID NO: 369107 - DNA, 12 bp, Artificial Sequence
  Oligonucleotide primer for the detection of SNP TSC0057454
cattctacatct

SEQ ID NO: 369108 - DNA, 12 bp, Artificial Sequence
  Oligonucleotide primer for the detection of SNP TSC0057454
cattctacgtct

SEQ ID NO: 369109 - DNA, 12 bp, Artificial Sequence
  Oligonucleotide primer for the detection of SNP TSC0057454
tagtttgttatg

SEQ ID NO: 369110 - DNA, 12 bp, Artificial Sequence
  Oligonucleotide primer for the detection of SNP TSC0057454
caatctaccata

SEQ ID NO: 369111 - DNA, 12 bp, Artificial Sequence
  Oligonucleotide primer for the detection of SNP TSC0057454
tattttgcgttt

SEQ ID NO: 369112 - DNA, 12 bp, Artificial Sequence
  Oligonucleotide primer for the detection of SNP TSC0000235
ttctattttctc

SEQ ID NO: 369113 - DNA, 12 bp, Artificial Sequence
  Oligonucleotide primer for the detection of SNP TSC0000235
tttaaattatag

SEQ ID NO: 369114 - DNA, 12 bp, Artificial Sequence
  Oligonucleotide primer for the detection of SNP TSC0057458
acatacttatca

SEQ ID NO: 369115 - DNA, 12 bp, Artificial Sequence
  Oligonucleotide primer for the detection of SNP TSC0057458
gatgtttttgtg

SEQ ID NO: 369116 - DNA, 12 bp, Artificial Sequence
  Oligonucleotide primer for the detection of SNP TSC0057458
gatgttttcgtg

SEQ ID NO: 369117 - DNA, 12 bp, Artificial Sequence
  Oligonucleotide primer for the detection of SNP TSC0057458
gatgtttttgcg

SEQ ID NO: 369118 - DNA, 12 bp, Artificial Sequence
  Oligonucleotide primer for the detection of SNP TSC0057458
gatgttttcgcg

SEQ ID NO: 369119 - DNA, 12 bp, Artificial Sequence
  Oligonucleotide primer for the detection of SNP TSC0057458
atattttcacaa

SEQ ID NO: 369120 - DNA, 12 bp, Artificial Sequence
  Oligonucleotide primer for the detection of SNP TSC0057458
atattttcacga

SEQ ID NO: 369121 - DNA, 12 bp, Artificial Sequence
  Oligonucleotide primer for the detection of SNP TSC0057458
atattttcgcaa

SEQ ID NO: 369122 - DNA, 12 bp, Artificial Sequence
  Oligonucleotide primer for the detection of SNP TSC0057458
atattttcgcga

SEQ ID NO: 369123 - DNA, 12 bp, Artificial Sequence
  Oligonucleotide primer for the detection of SNP TSC0057458
tatatttgttat

SEQ ID NO: 369124 - DNA, 12 bp, Artificial Sequence
  Oligonucleotide primer for the detection of SNP TSC0057459
aaaacaataacc

SEQ ID NO: 369125 - DNA, 12 bp, Artificial Sequence
  Oligonucleotide primer for the detection of SNP TSC0057459
tatgtatatggt

SEQ ID NO: 369126 - DNA, 12 bp, Artificial Sequence
  Oligonucleotide primer for the detection of SNP TSC0057459
gaataatagttt

SEQ ID NO: 369127 - DNA, 12 bp, Artificial Sequence
  Oligonucleotide primer for the detection of SNP TSC0057460
ttagatgttttc

SEQ ID NO: 369128 - DNA, 12 bp, Artificial Sequence
  Oligonucleotide primer for the detection of SNP TSC0057460
ctaaatattttc

SEQ ID NO: 369129 - DNA, 12 bp, Artificial Sequence
  Oligonucleotide primer for the detection of SNP TSC0057462
atcaccctcttc

SEQ ID NO: 369130 - DNA, 12 bp, Artificial Sequence
  Oligonucleotide primer for the detection of SNP TSC0057462
gtaggtggatta

SEQ ID NO: 369131 - DNA, 12 bp, Artificial Sequence
  Oligonucleotide primer for the detection of SNP TSC0057463
cccaaatcaccc

SEQ ID NO: 369132 - DNA, 12 bp, Artificial Sequence
  Oligonucleotide primer for the detection of SNP TSC0057463
ggtaggtggatt

SEQ ID NO: 369133 - DNA, 12 bp, Artificial Sequence
  Oligonucleotide primer for the detection of SNP TSC0057463
aataaataaacc

SEQ ID NO: 369134 - DNA, 12 bp, Artificial Sequence
  Oligonucleotide primer for the detection of SNP TSC0057463
tttaggttattt

SEQ ID NO: 369135 - DNA, 12 bp, Artificial Sequence
  Oligonucleotide primer for the detection of SNP TSC0057464
caacatcactcc

SEQ ID NO: 369136 - DNA, 12 bp, Artificial Sequence
  Oligonucleotide primer for the detection of SNP TSC0010188
aaattttcaatc

SEQ ID NO: 369137 - DNA, 12 bp, Artificial Sequence
  Oligonucleotide primer for the detection of SNP TSC0010188
ataactcattaa

SEQ ID NO: 369138 - DNA, 12 bp, Artificial Sequence
  Oligonucleotide primer for the detection of SNP TSC0057467
tttattaattct

SEQ ID NO: 369139 - DNA, 12 bp, Artificial Sequence
  Oligonucleotide primer for the detection of SNP TSC0057467
aagatgtgtaga

SEQ ID NO: 369140 - DNA, 12 bp, Artificial Sequence
  Oligonucleotide primer for the detection of SNP TSC0057468
tatctaatttca

SEQ ID NO: 369141 - DNA, 12 bp, Artificial Sequence
  Oligonucleotide primer for the detection of SNP TSC0057468
tatttagtttta

SEQ ID NO: 369142 - DNA, 12 bp, Artificial Sequence
  Oligonucleotide primer for the detection of SNP TSC0057470
gtatagggtttg

SEQ ID NO: 369143 - DNA, 12 bp, Artificial Sequence
  Oligonucleotide primer for the detection of SNP TSC0057470
acacaaaatcta

SEQ ID NO: 369144 - DNA, 12 bp, Artificial Sequence
  Oligonucleotide primer for the detection of SNP TSC0057470
atgataggttta

SEQ ID NO: 369145 - DNA, 12 bp, Artificial Sequence
  Oligonucleotide primer for the detection of SNP TSC0057471
atgattgttttt

SEQ ID NO: 369146 - DNA, 12 bp, Artificial Sequence
  Oligonucleotide primer for the detection of SNP TSC0057472
aaggaattaggg

SEQ ID NO: 369147 - DNA, 12 bp, Artificial Sequence
  Oligonucleotide primer for the detection of SNP TSC0057473
tttctcacttcc

SEQ ID NO: 369148 - DNA, 12 bp, Artificial Sequence
  Oligonucleotide primer for the detection of SNP TSC0057473
ggagttagggag

SEQ ID NO: 369149 - DNA, 12 bp, Artificial Sequence
  Oligonucleotide primer for the detection of SNP TSC0057474
tcacaacatttt

SEQ ID NO: 369150 - DNA, 12 bp, Artificial Sequence
  Oligonucleotide primer for the detection of SNP TSC0057474
tggttttatatg

SEQ ID NO: 369151 - DNA, 12 bp, Artificial Sequence
  Oligonucleotide primer for the detection of SNP TSC0057475
atttagttatat

SEQ ID NO: 369152 - DNA, 12 bp, Artificial Sequence
  Oligonucleotide primer for the detection of SNP TSC0057475
attcaaccacat

SEQ ID NO: 369153 - DNA, 12 bp, Artificial Sequence
  Oligonucleotide primer for the detection of SNP TSC0057475
gtgggtttggag

SEQ ID NO: 369154 - DNA, 12 bp, Artificial Sequence
  Oligonucleotide primer for the detection of SNP TSC0057476
acactaatttat

SEQ ID NO: 369155 - DNA, 12 bp, Artificial Sequence
  Oligonucleotide primer for the detection of SNP TSC0057477
ccattaaactac

SEQ ID NO: 369156 - DNA, 12 bp, Artificial Sequence
  Oligonucleotide primer for the detection of SNP TSC0057477
tttttgtttgaa

SEQ ID NO: 369157 - DNA, 12 bp, Artificial Sequence
  Oligonucleotide primer for the detection of SNP TSC0057483
ataaaaattaat

SEQ ID NO: 369158 - DNA, 12 bp, Artificial Sequence
  Oligonucleotide primer for the detection of SNP TSC0057483
gtaaaagtgata

SEQ ID NO: 369159 - DNA, 12 bp, Artificial Sequence
  Oligonucleotide primer for the detection of SNP TSC0057483
gtggaaattggt

SEQ ID NO: 369160 - DNA, 12 bp, Artificial Sequence
  Oligonucleotide primer for the detection of SNP TSC0057485
aagttttaggtt

SEQ ID NO: 369161 - DNA, 12 bp, Artificial Sequence
  Oligonucleotide primer for the detection of SNP TSC0057485
aagttttaggtc

SEQ ID NO: 369162 - DNA, 12 bp, Artificial Sequence
  Oligonucleotide primer for the detection of SNP TSC0057485
tgagtaaaaata

SEQ ID NO: 369163 - DNA, 12 bp, Artificial Sequence
  Oligonucleotide primer for the detection of SNP TSC0057486
gttttattttaa

SEQ ID NO: 369164 - DNA, 12 bp, Artificial Sequence
  Oligonucleotide primer for the detection of SNP TSC0057490
catacacattta

SEQ ID NO: 369165 - DNA, 12 bp, Artificial Sequence
  Oligonucleotide primer for the detection of SNP TSC0057490
atccccctccac

SEQ ID NO: 369166 - DNA, 12 bp, Artificial Sequence
  Oligonucleotide primer for the detection of SNP TSC0057490
tatatatatttg

SEQ ID NO: 369167 - DNA, 12 bp, Artificial Sequence
  Oligonucleotide primer for the detection of SNP TSC0057493
aaccatcaaaat

SEQ ID NO: 369168 - DNA, 12 bp, Artificial Sequence
  Oligonucleotide primer for the detection of SNP TSC0057493
atgattttttta

SEQ ID NO: 369169 - DNA, 12 bp, Artificial Sequence
  Oligonucleotide primer for the detection of SNP TSC0057494
aatacaattatt

SEQ ID NO: 369170 - DNA, 12 bp, Artificial Sequence
  Oligonucleotide primer for the detection of SNP TSC0057495
ttaaatagtgat

SEQ ID NO: 369171 - DNA, 12 bp, Artificial Sequence
  Oligonucleotide primer for the detection of SNP TSC0057495
aaaatataagtt

SEQ ID NO: 369172 - DNA, 12 bp, Artificial Sequence
  Oligonucleotide primer for the detection of SNP TSC0057498
aatcccaaaatt

SEQ ID NO: 369173 - DNA, 12 bp, Artificial Sequence
  Oligonucleotide primer for the detection of SNP TSC0057498
gaatatttgtta

SEQ ID NO: 369174 - DNA, 12 bp, Artificial Sequence
  Oligonucleotide primer for the detection of SNP TSC0057498
gaatattcgtta

SEQ ID NO: 369175 - DNA, 12 bp, Artificial Sequence
  Oligonucleotide primer for the detection of SNP TSC0057499
actcccgaaaac

SEQ ID NO: 369176 - DNA, 12 bp, Artificial Sequence
  Oligonucleotide primer for the detection of SNP TSC0057499
gaaattttagat

SEQ ID NO: 369177 - DNA, 12 bp, Artificial Sequence
  Oligonucleotide primer for the detection of SNP TSC0057499
tttttgaaagtt

SEQ ID NO: 369178 - DNA, 12 bp, Artificial Sequence
  Oligonucleotide primer for the detection of SNP TSC0057499
ttttcgaaagtt

SEQ ID NO: 369179 - DNA, 12 bp, Artificial Sequence
  Oligonucleotide primer for the detection of SNP TSC0004713
tacctaatttaa

SEQ ID NO: 369180 - DNA, 12 bp, Artificial Sequence
  Oligonucleotide primer for the detection of SNP TSC0004713
gaaggtgtagta

SEQ ID NO: 369181 - DNA, 12 bp, Artificial Sequence
  Oligonucleotide primer for the detection of SNP TSC0004713
tgtttagtttgg

SEQ ID NO: 369182 - DNA, 12 bp, Artificial Sequence
  Oligonucleotide primer for the detection of SNP TSC0004714
ttaggaatttgg

SEQ ID NO: 369183 - DNA, 12 bp, Artificial Sequence
  Oligonucleotide primer for the detection of SNP TSC0057502
tccccatttaaa

SEQ ID NO: 369184 - DNA, 12 bp, Artificial Sequence
  Oligonucleotide primer for the detection of SNP TSC0057502
gttaatatatta

SEQ ID NO: 369185 - DNA, 12 bp, Artificial Sequence
  Oligonucleotide primer for the detection of SNP TSC0057502
actaacacatta

SEQ ID NO: 369186 - DNA, 12 bp, Artificial Sequence
  Oligonucleotide primer for the detection of SNP TSC0057503
tctatcatatat

SEQ ID NO: 369187 - DNA, 12 bp, Artificial Sequence
  Oligonucleotide primer for the detection of SNP TSC0057503
gagttttataat

SEQ ID NO: 369188 - DNA, 12 bp, Artificial Sequence
  Oligonucleotide primer for the detection of SNP TSC0057503
gaatcctacaat

SEQ ID NO: 369189 - DNA, 12 bp, Artificial Sequence
  Oligonucleotide primer for the detection of SNP TSC0057503
tttgttatgtgt

SEQ ID NO: 369190 - DNA, 12 bp, Artificial Sequence
  Oligonucleotide primer for the detection of SNP TSC0057504
attctaaaactc

SEQ ID NO: 369191 - DNA, 12 bp, Artificial Sequence
  Oligonucleotide primer for the detection of SNP TSC0057504
gataggtaaaag

SEQ ID NO: 369192 - DNA, 12 bp, Artificial Sequence
  Oligonucleotide primer for the detection of SNP TSC0057504
ttttggagtttt

SEQ ID NO: 369193 - DNA, 12 bp, Artificial Sequence
  Oligonucleotide primer for the detection of SNP TSC0057505
tactctctatct

SEQ ID NO: 369194 - DNA, 12 bp, Artificial Sequence
  Oligonucleotide primer for the detection of SNP TSC0057505
tatgttgtatgg

SEQ ID NO: 369195 - DNA, 12 bp, Artificial Sequence
  Oligonucleotide primer for the detection of SNP TSC0057505
tatgttgtacgg

SEQ ID NO: 369196 - DNA, 12 bp, Artificial Sequence
  Oligonucleotide primer for the detection of SNP TSC0057507
tttttaaccaat

SEQ ID NO: 369197 - DNA, 12 bp, Artificial Sequence
  Oligonucleotide primer for the detection of SNP TSC0057507
ttataaatagta

SEQ ID NO: 369198 - DNA, 12 bp, Artificial Sequence
  Oligonucleotide primer for the detection of SNP TSC0057508
ctataatatacc

SEQ ID NO: 369199 - DNA, 12 bp, Artificial Sequence
  Oligonucleotide primer for the detection of SNP TSC0057508
aaagttatagga

SEQ ID NO: 369200 - DNA, 12 bp, Artificial Sequence
  Oligonucleotide primer for the detection of SNP TSC0057509
accaccttttat

SEQ ID NO: 369201 - DNA, 12 bp, Artificial Sequence
  Oligonucleotide primer for the detection of SNP TSC0057509
ggtgtatgaaaa

SEQ ID NO: 369202 - DNA, 12 bp, Artificial Sequence
  Oligonucleotide primer for the detection of SNP TSC0004800
attaatatataa

SEQ ID NO: 369203 - DNA, 12 bp, Artificial Sequence
  Oligonucleotide primer for the detection of SNP TSC0004800
attagttgtgat

SEQ ID NO: 369204 - DNA, 12 bp, Artificial Sequence
  Oligonucleotide primer for the detection of SNP TSC0004800
atcaattataat

SEQ ID NO: 369205 - DNA, 12 bp, Artificial Sequence
  Oligonucleotide primer for the detection of SNP TSC0004800
gttagtatatga

SEQ ID NO: 369206 - DNA, 12 bp, Artificial Sequence
  Oligonucleotide primer for the detection of SNP TSC0006429
accttctaaacc

SEQ ID NO: 369207 - DNA, 12 bp, Artificial Sequence
  Oligonucleotide primer for the detection of SNP TSC0006429
atgaagaaattg

SEQ ID NO: 369208 - DNA, 12 bp, Artificial Sequence
  Oligonucleotide primer for the detection of SNP TSC0057511
cactataacaat

SEQ ID NO: 369209 - DNA, 12 bp, Artificial Sequence
  Oligonucleotide primer for the detection of SNP TSC0057515
ttccttcttccc

SEQ ID NO: 369210 - DNA, 12 bp, Artificial Sequence
  Oligonucleotide primer for the detection of SNP TSC0057515
ggaggaaggaag

SEQ ID NO: 369211 - DNA, 12 bp, Artificial Sequence
  Oligonucleotide primer for the detection of SNP TSC0057516
tttacaacaact

SEQ ID NO: 369212 - DNA, 12 bp, Artificial Sequence
  Oligonucleotide primer for the detection of SNP TSC0057519
gtagattaggaa

SEQ ID NO: 369213 - DNA, 12 bp, Artificial Sequence
  Oligonucleotide primer for the detection of SNP TSC0057520
atataaacccac

SEQ ID NO: 369214 - DNA, 12 bp, Artificial Sequence
  Oligonucleotide primer for the detection of SNP TSC0057520
atatgattatga

SEQ ID NO: 369215 - DNA, 12 bp, Artificial Sequence
  Oligonucleotide primer for the detection of SNP TSC0057521
acacccttaaaa

SEQ ID NO: 369216 - DNA, 12 bp, Artificial Sequence
  Oligonucleotide primer for the detection of SNP TSC0057521
caaataaaactt

SEQ ID NO: 369217 - DNA, 12 bp, Artificial Sequence
  Oligonucleotide primer for the detection of SNP TSC0057521
gtatttttgaag

SEQ ID NO: 369218 - DNA, 12 bp, Artificial Sequence
  Oligonucleotide primer for the detection of SNP TSC0057524
ataatttcctac

SEQ ID NO: 369219 - DNA, 12 bp, Artificial Sequence
  Oligonucleotide primer for the detection of SNP TSC0057524
ttctctcaccaa

SEQ ID NO: 369220 - DNA, 12 bp, Artificial Sequence
  Oligonucleotide primer for the detection of SNP TSC0057525
ggttgcgttttt

SEQ ID NO: 369221 - DNA, 12 bp, Artificial Sequence
  Oligonucleotide primer for the detection of SNP TSC0057525
aactacatctcc

SEQ ID NO: 369222 - DNA, 12 bp, Artificial Sequence
  Oligonucleotide primer for the detection of SNP TSC0057525
aactacgtctcc

SEQ ID NO: 369223 - DNA, 12 bp, Artificial Sequence
  Oligonucleotide primer for the detection of SNP TSC0057525
gtaggagttggg

SEQ ID NO: 369224 - DNA, 12 bp, Artificial Sequence
  Oligonucleotide primer for the detection of SNP TSC0057526
actttcaactca

SEQ ID NO: 369225 - DNA, 12 bp, Artificial Sequence
  Oligonucleotide primer for the detection of SNP TSC0057526
tattttatagac

SEQ ID NO: 369226 - DNA, 12 bp, Artificial Sequence
  Oligonukleotid-Primer
attttataaaca

SEQ ID NO: 369227 - DNA, 12 bp, Artificial Sequence
  Oligonucleotide primer for the detection of SNP TSC0057526
attttataaacg

SEQ ID NO: 369228 - DNA, 12 bp, Artificial Sequence
  Oligonucleotide primer for the detection of SNP TSC0057527
tgattgaggtat

SEQ ID NO: 369229 - DNA, 12 bp, Artificial Sequence
  Oligonucleotide primer for the detection of SNP TSC0057527
taactaaaacat

SEQ ID NO: 369230 - DNA, 12 bp, Artificial Sequence
  Oligonucleotide primer for the detection of SNP TSC0057529
cctaataataat

SEQ ID NO: 369231 - DNA, 12 bp, Artificial Sequence
  Oligonucleotide primer for the detection of SNP TSC0057529
gtaatagtaata

SEQ ID NO: 369232 - DNA, 12 bp, Artificial Sequence
  Oligonucleotide primer for the detection of SNP TSC0057533
attctcattctt

SEQ ID NO: 369233 - DNA, 12 bp, Artificial Sequence
  Oligonucleotide primer for the detection of SNP TSC0057533
taaatatttagg

SEQ ID NO: 369234 - DNA, 12 bp, Artificial Sequence
  Oligonucleotide primer for the detection of SNP TSC0057535
aaaatttatcaa

SEQ ID NO: 369235 - DNA, 12 bp, Artificial Sequence
  Oligonucleotide primer for the detection of SNP TSC0057535
attttatttatt

SEQ ID NO: 369236 - DNA, 12 bp, Artificial Sequence
  Oligonucleotide primer for the detection of SNP TSC0057535
actctacctatt

SEQ ID NO: 369237 - DNA, 12 bp, Artificial Sequence
  Oligonucleotide primer for the detection of SNP TSC0057537
acttaactttct

SEQ ID NO: 369238 - DNA, 12 bp, Artificial Sequence
  Oligonukleotid-Primer
tatatagggtag

SEQ ID NO: 369239 - DNA, 12 bp, Artificial Sequence
  Oligonucleotide primer for the detection of SNP TSC0057538
tactaaactccc

SEQ ID NO: 369240 - DNA, 12 bp, Artificial Sequence
  Oligonucleotide primer for the detection of SNP TSC0057538
atttagtaggta

SEQ ID NO: 369241 - DNA, 12 bp, Artificial Sequence
  Oligonucleotide primer for the detection of SNP TSC0057539
taataaatactc

SEQ ID NO: 369242 - DNA, 12 bp, Artificial Sequence
  Oligonukleotid-Primer
gtgttatagttg

SEQ ID NO: 369243 - DNA, 12 bp, Artificial Sequence
  Oligonucleotide primer for the detection of SNP TSC0057541
taccctctatcc

SEQ ID NO: 369244 - DNA, 12 bp, Artificial Sequence
  Oligonucleotide primer for the detection of SNP TSC0057541
gaggttggttta

SEQ ID NO: 369245 - DNA, 12 bp, Artificial Sequence
  Oligonucleotide primer for the detection of SNP TSC0057542
atcaaataataa

SEQ ID NO: 369246 - DNA, 12 bp, Artificial Sequence
  Oligonukleotid-Primer
cttcaattacta

SEQ ID NO: 369247 - DNA, 12 bp, Artificial Sequence
  Oligonucleotide primer for the detection of SNP TSC0057542
attaagtagtaa

SEQ ID NO: 369248 - DNA, 12 bp, Artificial Sequence
  Oligonucleotide primer for the detection of SNP TSC0004763
acatttcatcct

SEQ ID NO: 369249 - DNA, 12 bp, Artificial Sequence
  Oligonucleotide primer for the detection of SNP TSC0057552
taatcaataact

SEQ ID NO: 369250 - DNA, 12 bp, Artificial Sequence
  Oligonucleotide primer for the detection of SNP TSC0057552
ggttatttttta

SEQ ID NO: 369251 - DNA, 12 bp, Artificial Sequence
  Oligonucleotide primer for the detection of SNP TSC0057553
acccaaacacat

SEQ ID NO: 369252 - DNA, 12 bp, Artificial Sequence
  Oligonucleotide primer for the detection of SNP TSC0057553
acccaaacgcat

SEQ ID NO: 369253 - DNA, 12 bp, Artificial Sequence
  Oligonucleotide primer for the detection of SNP TSC0057553
ttttgtttaaaa

SEQ ID NO: 369254 - DNA, 12 bp, Artificial Sequence
  Oligonucleotide primer for the detection of SNP TSC0057554
tttgttgaagtt

SEQ ID NO: 369255 - DNA, 12 bp, Artificial Sequence
  Oligonucleotide primer for the detection of SNP TSC0057554
ggtggtagtggg

SEQ ID NO: 369256 - DNA, 12 bp, Artificial Sequence
  Oligonucleotide primer for the detection of SNP TSC0057557
cttactacaaca

SEQ ID NO: 369257 - DNA, 12 bp, Artificial Sequence
  Oligonucleotide primer for the detection of SNP TSC0057557
cttactacaacg

SEQ ID NO: 369258 - DNA, 12 bp, Artificial Sequence
  Oligonucleotide primer for the detection of SNP TSC0057557
gaagttttgata

SEQ ID NO: 369259 - DNA, 12 bp, Artificial Sequence
  Oligonucleotide primer for the detection of SNP TSC0057557
aaaattctaata

SEQ ID NO: 369260 - DNA, 12 bp, Artificial Sequence
  Oligonucleotide primer for the detection of SNP TSC0057557
ttgttgtagtgt

SEQ ID NO: 369261 - DNA, 12 bp, Artificial Sequence
  Oligonucleotide primer for the detection of SNP TSC0057557
ttgttgtagcgt

SEQ ID NO: 369262 - DNA, 12 bp, Artificial Sequence
  Oligonucleotide primer for the detection of SNP TSC0057557
ttgttgtagtgc

SEQ ID NO: 369263 - DNA, 12 bp, Artificial Sequence
  Oligonucleotide primer for the detection of SNP TSC0057557
ttgttgtagcgc

SEQ ID NO: 369264 - DNA, 12 bp, Artificial Sequence
  Oligonucleotide primer for the detection of SNP TSC0057558
ttcatataaata

SEQ ID NO: 369265 - DNA, 12 bp, Artificial Sequence
  Oligonucleotide primer for the detection of SNP TSC0057558
ttttttatgatt

SEQ ID NO: 369266 - DNA, 12 bp, Artificial Sequence
  Oligonucleotide primer for the detection of SNP TSC0057558
aatcttctataa

SEQ ID NO: 369267 - DNA, 12 bp, Artificial Sequence
  Oligonucleotide primer for the detection of SNP TSC0057558
tttatgtaagtg

SEQ ID NO: 369268 - DNA, 12 bp, Artificial Sequence
  Oligonucleotide primer for the detection of SNP TSC0057559
ttgatttttata

SEQ ID NO: 369269 - DNA, 12 bp, Artificial Sequence
  Oligonucleotide primer for the detection of SNP TSC0057560
agttttgatatg

SEQ ID NO: 369270 - DNA, 12 bp, Artificial Sequence
  Oligonucleotide primer for the detection of SNP TSC0057560
agttttgatacg

SEQ ID NO: 369271 - DNA, 12 bp, Artificial Sequence
  Oligonucleotide primer for the detection of SNP TSC0057560
aattctaataca

SEQ ID NO: 369272 - DNA, 12 bp, Artificial Sequence
  Oligonucleotide primer for the detection of SNP TSC0057560
aattctaatacg

SEQ ID NO: 369273 - DNA, 12 bp, Artificial Sequence
  Oligonucleotide primer for the detection of SNP TSC0057561
ctactttctatc

SEQ ID NO: 369274 - DNA, 12 bp, Artificial Sequence
  Oligonucleotide primer for the detection of SNP TSC0057561
gggaaagtttat

SEQ ID NO: 369275 - DNA, 12 bp, Artificial Sequence
  Oligonucleotide primer for the detection of SNP TSC0057561
aaaaaatccata

SEQ ID NO: 369276 - DNA, 12 bp, Artificial Sequence
  Oligonucleotide primer for the detection of SNP TSC0057565
aatctctctctt

SEQ ID NO: 369277 - DNA, 12 bp, Artificial Sequence
  Oligonucleotide primer for the detection of SNP TSC0057565
aagtagagaaag

SEQ ID NO: 369278 - DNA, 12 bp, Artificial Sequence
  Oligonucleotide primer for the detection of SNP TSC0057566
ctaattattctt

SEQ ID NO: 369279 - DNA, 12 bp, Artificial Sequence
  Oligonucleotide primer for the detection of SNP TSC0057566
gggtgaatttaa

SEQ ID NO: 369280 - DNA, 12 bp, Artificial Sequence
  Oligonucleotide primer for the detection of SNP TSC0006260
acactcaaacaa

SEQ ID NO: 369281 - DNA, 12 bp, Artificial Sequence
  Oligonucleotide primer for the detection of SNP TSC0006260
acactcgaacaa

SEQ ID NO: 369282 - DNA, 12 bp, Artificial Sequence
  Oligonucleotide primer for the detection of SNP TSC0006260
ttatattatatt

SEQ ID NO: 369283 - DNA, 12 bp, Artificial Sequence
  Oligonucleotide primer for the detection of SNP TSC0006260
ccatatcatatc

SEQ ID NO: 369284 - DNA, 12 bp, Artificial Sequence
  Oligonucleotide primer for the detection of SNP TSC0006260
gtatttggataa

SEQ ID NO: 369285 - DNA, 12 bp, Artificial Sequence
  Oligonucleotide primer for the detection of SNP TSC0006260
gtattcggataa

SEQ ID NO: 369286 - DNA, 12 bp, Artificial Sequence
  Oligonucleotide primer for the detection of SNP TSC0009202
cacaaaaacaaa

SEQ ID NO: 369287 - DNA, 12 bp, Artificial Sequence
  Oligonucleotide primer for the detection of SNP TSC0009202
cacaaaaacgaa

SEQ ID NO: 369288 - DNA, 12 bp, Artificial Sequence
  Oligonucleotide primer for the detection of SNP TSC0009202
cacgaaaacaaa

SEQ ID NO: 369289 - DNA, 12 bp, Artificial Sequence
  Oligonucleotide primer for the detection of SNP TSC0009202
cacgaaaacgaa

SEQ ID NO: 369290 - DNA, 12 bp, Artificial Sequence
  Oligonucleotide primer for the detection of SNP TSC0009202
gtttattgtaat

SEQ ID NO: 369291 - DNA, 12 bp, Artificial Sequence
  Oligonucleotide primer for the detection of SNP TSC0009202
gtttattgtaac

SEQ ID NO: 369292 - DNA, 12 bp, Artificial Sequence
  Oligonucleotide primer for the detection of SNP TSC0009202
tatggaagtgga

SEQ ID NO: 369293 - DNA, 12 bp, Artificial Sequence
  Oligonucleotide primer for the detection of SNP TSC0009202
tacggaagtgga

SEQ ID NO: 369294 - DNA, 12 bp, Artificial Sequence
  Oligonucleotide primer for the detection of SNP TSC0009202
tatggaagcgga

SEQ ID NO: 369295 - DNA, 12 bp, Artificial Sequence
  Oligonucleotide primer for the detection of SNP TSC0009202
tacggaagcgga

SEQ ID NO: 369296 - DNA, 12 bp, Artificial Sequence
  Oligonucleotide primer for the detection of SNP TSC0009203
caacttcccaaa

SEQ ID NO: 369297 - DNA, 12 bp, Artificial Sequence
  Oligonucleotide primer for the detection of SNP TSC0057568
taaatattaaac

SEQ ID NO: 369298 - DNA, 12 bp, Artificial Sequence
  Oligonucleotide primer for the detection of SNP TSC0057568
tcaaatactaaa

SEQ ID NO: 369299 - DNA, 12 bp, Artificial Sequence
  Oligonucleotide primer for the detection of SNP TSC0057568
ggtggtaaaaaa

SEQ ID NO: 369300 - DNA, 12 bp, Artificial Sequence
  Oligonucleotide primer for the detection of SNP TSC0057569
tatcatttaatt

SEQ ID NO: 369301 - DNA, 12 bp, Artificial Sequence
  Oligonucleotide primer for the detection of SNP TSC0057570
aataaaatccaa

SEQ ID NO: 369302 - DNA, 12 bp, Artificial Sequence
  Oligonucleotide primer for the detection of SNP TSC0057570
tatagagggttt

SEQ ID NO: 369303 - DNA, 12 bp, Artificial Sequence
  Oligonucleotide primer for the detection of SNP TSC0057570
ttaataggattt

SEQ ID NO: 369304 - DNA, 12 bp, Artificial Sequence
  Oligonucleotide primer for the detection of SNP TSC0057571
aaaacccacttc

SEQ ID NO: 369305 - DNA, 12 bp, Artificial Sequence
  Oligonucleotide primer for the detection of SNP TSC0057571
agattgagttta

SEQ ID NO: 369306 - DNA, 12 bp, Artificial Sequence
  Oligonucleotide primer for the detection of SNP TSC0057572
aaaatacatata

SEQ ID NO: 369307 - DNA, 12 bp, Artificial Sequence
  Oligonucleotide primer for the detection of SNP TSC0057572
gtcgatattttt

SEQ ID NO: 369308 - DNA, 12 bp, Artificial Sequence
  Oligonucleotide primer for the detection of SNP TSC0057572
atcaatattctt

SEQ ID NO: 369309 - DNA, 12 bp, Artificial Sequence
  Oligonucleotide primer for the detection of SNP TSC0057572
atcgatattctt

SEQ ID NO: 369310 - DNA, 12 bp, Artificial Sequence
  Oligonucleotide primer for the detection of SNP TSC0057572
agaatatatgta

SEQ ID NO: 369311 - DNA, 12 bp, Artificial Sequence
  Oligonucleotide primer for the detection of SNP TSC0057573
acaataaattat

SEQ ID NO: 369312 - DNA, 12 bp, Artificial Sequence
  Oligonucleotide primer for the detection of SNP TSC0057574
aaaaaaacgttt

SEQ ID NO: 369313 - DNA, 12 bp, Artificial Sequence
  Oligonucleotide primer for the detection of SNP TSC0057574
gtgtaagtattt

SEQ ID NO: 369314 - DNA, 12 bp, Artificial Sequence
  Oligonucleotide primer for the detection of SNP TSC0057575
agggatataaat

SEQ ID NO: 369315 - DNA, 12 bp, Artificial Sequence
  Oligonucleotide primer for the detection of SNP TSC0057575
gaagagggttag

SEQ ID NO: 369316 - DNA, 12 bp, Artificial Sequence
  Oligonucleotide primer for the detection of SNP TSC0057576
cccaaataactt

SEQ ID NO: 369317 - DNA, 12 bp, Artificial Sequence
  Oligonucleotide primer for the detection of SNP TSC0057576
gaaagttagaaa

SEQ ID NO: 369318 - DNA, 12 bp, Artificial Sequence
  Oligonucleotide primer for the detection of SNP TSC0057576
tttagatgattt

SEQ ID NO: 369319 - DNA, 12 bp, Artificial Sequence
  Oligonucleotide primer for the detection of SNP TSC0057577
tattgatggtaa

SEQ ID NO: 369320 - DNA, 12 bp, Artificial Sequence
  Oligonucleotide primer for the detection of SNP TSC0057580
aatttttttaga

SEQ ID NO: 369321 - DNA, 12 bp, Artificial Sequence
  Oligonucleotide primer for the detection of SNP TSC0057581
ccatcttaaaat

SEQ ID NO: 369322 - DNA, 12 bp, Artificial Sequence
  Oligonucleotide primer for the detection of SNP TSC0057581
atgtattatgta

SEQ ID NO: 369323 - DNA, 12 bp, Artificial Sequence
  Oligonucleotide primer for the detection of SNP TSC0057582
caccaaaaacta

SEQ ID NO: 369324 - DNA, 12 bp, Artificial Sequence
  Oligonucleotide primer for the detection of SNP TSC0057582
tattaaaaattg

SEQ ID NO: 369325 - DNA, 12 bp, Artificial Sequence
  Oligonucleotide primer for the detection of SNP TSC0008809
aaataatctcct

SEQ ID NO: 369326 - DNA, 12 bp, Artificial Sequence
  Oligonucleotide primer for the detection of SNP TSC0008809
gagtagagttta

SEQ ID NO: 369327 - DNA, 12 bp, Artificial Sequence
  Oligonucleotide primer for the detection of SNP TSC0057583
tataataaccca

SEQ ID NO: 369328 - DNA, 12 bp, Artificial Sequence
  Oligonucleotide primer for the detection of SNP TSC0057583
agtttttttttc

SEQ ID NO: 369329 - DNA, 12 bp, Artificial Sequence
  Oligonucleotide primer for the detection of SNP TSC0057583
ccaactccctct

SEQ ID NO: 369330 - DNA, 12 bp, Artificial Sequence
  Oligonucleotide primer for the detection of SNP TSC0008000
aaatgtaattta

SEQ ID NO: 369331 - DNA, 12 bp, Artificial Sequence
  Oligonucleotide primer for the detection of SNP TSC0057585
ttaaaatgagtg

SEQ ID NO: 369332 - DNA, 12 bp, Artificial Sequence
  Oligonucleotide primer for the detection of SNP TSC0057585
gtaaaataaagt

SEQ ID NO: 369333 - DNA, 12 bp, Artificial Sequence
  Oligonucleotide primer for the detection of SNP TSC0057586
caaactcatctt

SEQ ID NO: 369334 - DNA, 12 bp, Artificial Sequence
  Oligonucleotide primer for the detection of SNP TSC0057586
caaactcgtctt

SEQ ID NO: 369335 - DNA, 12 bp, Artificial Sequence
  Oligonucleotide primer for the detection of SNP TSC0057586
ttattatgtgaa

SEQ ID NO: 369336 - DNA, 12 bp, Artificial Sequence
  Oligonucleotide primer for the detection of SNP TSC0057586
taaattcgtttt

SEQ ID NO: 369337 - DNA, 12 bp, Artificial Sequence
  Oligonucleotide primer for the detection of SNP TSC0057587
cataattctata

SEQ ID NO: 369338 - DNA, 12 bp, Artificial Sequence
  Oligonucleotide primer for the detection of SNP TSC0057587
agagtggataat

SEQ ID NO: 369339 - DNA, 12 bp, Artificial Sequence
  Oligonucleotide primer for the detection of SNP TSC0057587
aaataaacaaca

SEQ ID NO: 369340 - DNA, 12 bp, Artificial Sequence
  Oligonucleotide primer for the detection of SNP TSC0057588
aaatcataaaac

SEQ ID NO: 369341 - DNA, 12 bp, Artificial Sequence
  Oligonucleotide primer for the detection of SNP TSC0057588
tttttggaatga

SEQ ID NO: 369342 - DNA, 12 bp, Artificial Sequence
  Oligonucleotide primer for the detection of SNP TSC0057589
acttaaaaactt

SEQ ID NO: 369343 - DNA, 12 bp, Artificial Sequence
  Oligonucleotide primer for the detection of SNP TSC0005301
ctacaaaatcac

SEQ ID NO: 369344 - DNA, 12 bp, Artificial Sequence
  Oligonucleotide primer for the detection of SNP TSC0005301
ctacaaaatcgc

SEQ ID NO: 369345 - DNA, 12 bp, Artificial Sequence
  Oligonucleotide primer for the detection of SNP TSC0005301
tagttagtaata

SEQ ID NO: 369346 - DNA, 12 bp, Artificial Sequence
  Oligonucleotide primer for the detection of SNP TSC0057593
acacacacaaac

SEQ ID NO: 369347 - DNA, 12 bp, Artificial Sequence
  Oligonucleotide primer for the detection of SNP TSC0057593
tttaagggggaa

SEQ ID NO: 369348 - DNA, 12 bp, Artificial Sequence
  Oligonucleotide primer for the detection of SNP TSC0057594
catcacactatt

SEQ ID NO: 369349 - DNA, 12 bp, Artificial Sequence
  Oligonucleotide primer for the detection of SNP TSC0057594
ttgttgttataa

SEQ ID NO: 369350 - DNA, 12 bp, Artificial Sequence
  Oligonucleotide primer for the detection of SNP TSC0057596
cccattcttctt

SEQ ID NO: 369351 - DNA, 12 bp, Artificial Sequence
  Oligonucleotide primer for the detection of SNP TSC0057596
tttcgtagggta

SEQ ID NO: 369352 - DNA, 12 bp, Artificial Sequence
  Oligonucleotide primer for the detection of SNP TSC0057596
ttcgtaaaataa

SEQ ID NO: 369353 - DNA, 12 bp, Artificial Sequence
  Oligonucleotide primer for the detection of SNP TSC0000302
caaaaaaattca

SEQ ID NO: 369354 - DNA, 12 bp, Artificial Sequence
  Oligonucleotide primer for the detection of SNP TSC0000302
tccacacaccta

SEQ ID NO: 369355 - DNA, 12 bp, Artificial Sequence
  Oligonucleotide primer for the detection of SNP TSC0000302
aaaagagtttat

SEQ ID NO: 369356 - DNA, 12 bp, Artificial Sequence
  Oligonucleotide primer for the detection of SNP TSC0000303
tttacaattcca

SEQ ID NO: 369357 - DNA, 12 bp, Artificial Sequence
  Oligonucleotide primer for the detection of SNP TSC0000303
tttacgattcca

SEQ ID NO: 369358 - DNA, 12 bp, Artificial Sequence
  Oligonucleotide primer for the detection of SNP TSC0000303
tttgtggtttta

SEQ ID NO: 369359 - DNA, 12 bp, Artificial Sequence
  Oligonucleotide primer for the detection of SNP TSC0000303
tttgcggtttta

SEQ ID NO: 369360 - DNA, 12 bp, Artificial Sequence
  Oligonucleotide primer for the detection of SNP TSC0057597
acttcaaattat

SEQ ID NO: 369361 - DNA, 12 bp, Artificial Sequence
  Oligonucleotide primer for the detection of SNP TSC0057597
tatagttttgta

SEQ ID NO: 369362 - DNA, 12 bp, Artificial Sequence
  Oligonucleotide primer for the detection of SNP TSC0005348
atcctcacctta

SEQ ID NO: 369363 - DNA, 12 bp, Artificial Sequence
  Oligonucleotide primer for the detection of SNP TSC0005348
atcctcgcctta

SEQ ID NO: 369364 - DNA, 12 bp, Artificial Sequence
  Oligonucleotide primer for the detection of SNP TSC0005348
ttctatcccaaa

SEQ ID NO: 369365 - DNA, 12 bp, Artificial Sequence
  Oligonucleotide primer for the detection of SNP TSC0005348
tattttcgtttt

SEQ ID NO: 369366 - DNA, 12 bp, Artificial Sequence
  Oligonucleotide primer for the detection of SNP TSC0057599
tactactaaaat

SEQ ID NO: 369367 - DNA, 12 bp, Artificial Sequence
  Oligonucleotide primer for the detection of SNP TSC0057599
gatagtaaattg

SEQ ID NO: 369368 - DNA, 12 bp, Artificial Sequence
  Oligonucleotide primer for the detection of SNP TSC0057599
aacaacaaatta

SEQ ID NO: 369369 - DNA, 12 bp, Artificial Sequence
  Oligonucleotide primer for the detection of SNP TSC0057599
tgttattggggt

SEQ ID NO: 369370 - DNA, 12 bp, Artificial Sequence
  Oligonucleotide primer for the detection of SNP TSC0005749
ctactatatatt

SEQ ID NO: 369371 - DNA, 12 bp, Artificial Sequence
  Oligonucleotide primer for the detection of SNP TSC0005749
aattagttgtta

SEQ ID NO: 369372 - DNA, 12 bp, Artificial Sequence
  Oligonucleotide primer for the detection of SNP TSC0005749
atcaactaccaa

SEQ ID NO: 369373 - DNA, 12 bp, Artificial Sequence
  Oligonucleotide primer for the detection of SNP TSC0005749
tgttgtatattc

SEQ ID NO: 369374 - DNA, 12 bp, Artificial Sequence
  Oligonucleotide primer for the detection of SNP TSC0005750
ccctccctctct

SEQ ID NO: 369375 - DNA, 12 bp, Artificial Sequence
  Oligonucleotide primer for the detection of SNP TSC0005750
gaggataggagg

SEQ ID NO: 369376 - DNA, 12 bp, Artificial Sequence
  Oligonucleotide primer for the detection of SNP TSC0057602
aaatcatttcca

SEQ ID NO: 369377 - DNA, 12 bp, Artificial Sequence
  Oligonucleotide primer for the detection of SNP TSC0057602
tcatttttttaa

SEQ ID NO: 369378 - DNA, 12 bp, Artificial Sequence
  Oligonucleotide primer for the detection of SNP TSC0057603
gtggtgaaattt

SEQ ID NO: 369379 - DNA, 12 bp, Artificial Sequence
  Oligonucleotide primer for the detection of SNP TSC0000520
acaacctccaac

SEQ ID NO: 369380 - DNA, 12 bp, Artificial Sequence
  Oligonucleotide primer for the detection of SNP TSC0000520
gttattaatgag

SEQ ID NO: 369381 - DNA, 12 bp, Artificial Sequence
  Oligonucleotide primer for the detection of SNP TSC0000520
accatcaataaa

SEQ ID NO: 369382 - DNA, 12 bp, Artificial Sequence
  Oligonucleotide primer for the detection of SNP TSC0000520
ataatttttagt

SEQ ID NO: 369383 - DNA, 12 bp, Artificial Sequence
  Oligonucleotide primer for the detection of SNP TSC0057608
tactattttatt

SEQ ID NO: 369384 - DNA, 12 bp, Artificial Sequence
  Oligonucleotide primer for the detection of SNP TSC0057608
aggagataagaa

SEQ ID NO: 369385 - DNA, 12 bp, Artificial Sequence
  Oligonucleotide primer for the detection of SNP TSC0057608
tattgttttgtt

SEQ ID NO: 369386 - DNA, 12 bp, Artificial Sequence
  Oligonucleotide primer for the detection of SNP TSC0057609
ttaatatttatt

SEQ ID NO: 369387 - DNA, 12 bp, Artificial Sequence
  Oligonukleotid-Primer
taatagagatga

SEQ ID NO: 369388 - DNA, 12 bp, Artificial Sequence
  Oligonucleotide primer for the detection of SNP TSC0057610
tttaaatatatc

SEQ ID NO: 369389 - DNA, 12 bp, Artificial Sequence
  Oligonucleotide primer for the detection of SNP TSC0057610
aatttatatata

SEQ ID NO: 369390 - DNA, 12 bp, Artificial Sequence
  Oligonucleotide primer for the detection of SNP TSC0001464
cttaaactacaa

SEQ ID NO: 369391 - DNA, 12 bp, Artificial Sequence
  Oligonucleotide primer for the detection of SNP TSC0001464
tattaccataaa

SEQ ID NO: 369392 - DNA, 12 bp, Artificial Sequence
  Oligonucleotide primer for the detection of SNP TSC0001464
tgggttataatt

SEQ ID NO: 369393 - DNA, 12 bp, Artificial Sequence
  Oligonucleotide primer for the detection of SNP TSC0001465
ttaacatctccc

SEQ ID NO: 369394 - DNA, 12 bp, Artificial Sequence
  Oligonucleotide primer for the detection of SNP TSC0057612
ataaaatcttac

SEQ ID NO: 369395 - DNA, 12 bp, Artificial Sequence
  Oligonucleotide primer for the detection of SNP TSC0057612
tttggaagatag

SEQ ID NO: 369396 - DNA, 12 bp, Artificial Sequence
  Oligonucleotide primer for the detection of SNP TSC0057613
aaaaaacctctc

SEQ ID NO: 369397 - DNA, 12 bp, Artificial Sequence
  Oligonucleotide primer for the detection of SNP TSC0057613
tagaggaaaaat

SEQ ID NO: 369398 - DNA, 12 bp, Artificial Sequence
  Oligonucleotide primer for the detection of SNP TSC0057613
gggaattttttt

SEQ ID NO: 369399 - DNA, 12 bp, Artificial Sequence
  Oligonucleotide primer for the detection of SNP TSC0057615
aaaaacaataca

SEQ ID NO: 369400 - DNA, 12 bp, Artificial Sequence
  Oligonucleotide primer for the detection of SNP TSC0057615
aatttccattat

SEQ ID NO: 369401 - DNA, 12 bp, Artificial Sequence
  Oligonucleotide primer for the detection of SNP TSC0057615
gaaagtaatata

SEQ ID NO: 369402 - DNA, 12 bp, Artificial Sequence
  Oligonucleotide primer for the detection of SNP TSC0057616
ccaatatccaaa

SEQ ID NO: 369403 - DNA, 12 bp, Artificial Sequence
  Oligonukleotid-Primer
gagtatttttat

SEQ ID NO: 369404 - DNA, 12 bp, Artificial Sequence
  Oligonucleotide primer for the detection of SNP TSC0057616
aaatattcctac

SEQ ID NO: 369405 - DNA, 12 bp, Artificial Sequence
  Oligonucleotide primer for the detection of SNP TSC0057618
ttaattatactt

SEQ ID NO: 369406 - DNA, 12 bp, Artificial Sequence
  Oligonucleotide primer for the detection of SNP TSC0057618
gaataaaataag

SEQ ID NO: 369407 - DNA, 12 bp, Artificial Sequence
  Oligonukleotid-Primer
cccatccaaaat

SEQ ID NO: 369408 - DNA, 12 bp, Artificial Sequence
  Oligonucleotide primer for the detection of SNP TSC0057620
atttttctaacc

SEQ ID NO: 369409 - DNA, 12 bp, Artificial Sequence
  Oligonucleotide primer for the detection of SNP TSC0057620
gggtttttcggt

SEQ ID NO: 369410 - DNA, 12 bp, Artificial Sequence
  Oligonucleotide primer for the detection of SNP TSC0057620
aaacccctcaat

SEQ ID NO: 369411 - DNA, 12 bp, Artificial Sequence
  Oligonucleotide primer for the detection of SNP TSC0057620
aaacccctcgat

SEQ ID NO: 369412 - DNA, 12 bp, Artificial Sequence
  Oligonucleotide primer for the detection of SNP TSC0004734
cactctatatat

SEQ ID NO: 369413 - DNA, 12 bp, Artificial Sequence
  Oligonucleotide primer for the detection of SNP TSC0004735
aaaactaaccac

SEQ ID NO: 369414 - DNA, 12 bp, Artificial Sequence
  Oligonucleotide primer for the detection of SNP TSC0004735
aaaactaaccgc

SEQ ID NO: 369415 - DNA, 12 bp, Artificial Sequence
  Oligonucleotide primer for the detection of SNP TSC0004735
gtatattgagtt

SEQ ID NO: 369416 - DNA, 12 bp, Artificial Sequence
  Oligonucleotide primer for the detection of SNP TSC0004735
gtatattgagtc

SEQ ID NO: 369417 - DNA, 12 bp, Artificial Sequence
  Oligonucleotide primer for the detection of SNP TSC0004735
acacactaaacc

SEQ ID NO: 369418 - DNA, 12 bp, Artificial Sequence
  Oligonucleotide primer for the detection of SNP TSC0004735
aggattgattgt

SEQ ID NO: 369419 - DNA, 12 bp, Artificial Sequence
  Oligonucleotide primer for the detection of SNP TSC0004735
aggattgatcgt

SEQ ID NO: 369420 - DNA, 12 bp, Artificial Sequence
  Oligonucleotide primer for the detection of SNP TSC0004735
aggattgattgc

SEQ ID NO: 369421 - DNA, 12 bp, Artificial Sequence
  Oligonucleotide primer for the detection of SNP TSC0004735
aggattgatcgc

SEQ ID NO: 369422 - DNA, 12 bp, Artificial Sequence
  Oligonucleotide primer for the detection of SNP TSC0057621
aataattctatc

SEQ ID NO: 369423 - DNA, 12 bp, Artificial Sequence
  Oligonucleotide primer for the detection of SNP TSC0057621
gtatgttttttg

SEQ ID NO: 369424 - DNA, 12 bp, Artificial Sequence
  Oligonucleotide primer for the detection of SNP TSC0057621
gtacgttttttg

SEQ ID NO: 369425 - DNA, 12 bp, Artificial Sequence
  Oligonucleotide primer for the detection of SNP TSC0057623
aaataatttgat

SEQ ID NO: 369426 - DNA, 12 bp, Artificial Sequence
  Oligonucleotide primer for the detection of SNP TSC0057623
aaataatttaac

SEQ ID NO: 369427 - DNA, 12 bp, Artificial Sequence
  Oligonucleotide primer for the detection of SNP TSC0057623
tgaaaaaagaat

SEQ ID NO: 369428 - DNA, 12 bp, Artificial Sequence
  Oligonucleotide primer for the detection of SNP TSC0057624
cctcctaccccc

SEQ ID NO: 369429 - DNA, 12 bp, Artificial Sequence
  Oligonucleotide primer for the detection of SNP TSC0057624
gagtaagagtag

SEQ ID NO: 369430 - DNA, 12 bp, Artificial Sequence
  Oligonucleotide primer for the detection of SNP TSC0057625
ggggggtaggag

SEQ ID NO: 369431 - DNA, 12 bp, Artificial Sequence
  Oligonucleotide primer for the detection of SNP TSC0057626
atgagaattaag

SEQ ID NO: 369432 - DNA, 12 bp, Artificial Sequence
  Oligonucleotide primer for the detection of SNP TSC0057626
acgagaattaag

SEQ ID NO: 369433 - DNA, 12 bp, Artificial Sequence
  Oligonucleotide primer for the detection of SNP TSC0057626
atattgattaat

SEQ ID NO: 369434 - DNA, 12 bp, Artificial Sequence
  Oligonucleotide primer for the detection of SNP TSC0057627
tatgaatgtgaa

SEQ ID NO: 369435 - DNA, 12 bp, Artificial Sequence
  Oligonucleotide primer for the detection of SNP TSC0057629
tcatttattctt

SEQ ID NO: 369436 - DNA, 12 bp, Artificial Sequence
  Oligonucleotide primer for the detection of SNP TSC0009249
tccttctcttac

SEQ ID NO: 369437 - DNA, 12 bp, Artificial Sequence
  Oligonucleotide primer for the detection of SNP TSC0009249
agttagaggggg

SEQ ID NO: 369438 - DNA, 12 bp, Artificial Sequence
  Oligonucleotide primer for the detection of SNP TSC0057630
ctacttatataa

SEQ ID NO: 369439 - DNA, 12 bp, Artificial Sequence
  Oligonucleotide primer for the detection of SNP TSC0057630
aaggttatatta

SEQ ID NO: 369440 - DNA, 12 bp, Artificial Sequence
  Oligonucleotide primer for the detection of SNP TSC0057630
ttgtttatgtag

SEQ ID NO: 369441 - DNA, 12 bp, Artificial Sequence
  Oligonucleotide primer for the detection of SNP TSC0057634
tataaaaacaaa

SEQ ID NO: 369442 - DNA, 12 bp, Artificial Sequence
  Oligonucleotide primer for the detection of SNP TSC0057634
aaattacattcc

SEQ ID NO: 369443 - DNA, 12 bp, Artificial Sequence
  Oligonucleotide primer for the detection of SNP TSC0057634
gattatagaaat

SEQ ID NO: 369444 - DNA, 12 bp, Artificial Sequence
  Oligonucleotide primer for the detection of SNP TSC0057635
tagggtttgtta

SEQ ID NO: 369445 - DNA, 12 bp, Artificial Sequence
  Oligonucleotide primer for the detection of SNP TSC0057636
tttttatgttat

SEQ ID NO: 369446 - DNA, 12 bp, Artificial Sequence
  Oligonucleotide primer for the detection of SNP TSC0057636
ctttcatattat

SEQ ID NO: 369447 - DNA, 12 bp, Artificial Sequence
  Oligonucleotide primer for the detection of SNP TSC0057636
taaggaaagaag

SEQ ID NO: 369448 - DNA, 12 bp, Artificial Sequence
  Oligonucleotide primer for the detection of SNP TSC0008942
acccttaaatat

SEQ ID NO: 369449 - DNA, 12 bp, Artificial Sequence
  Oligonucleotide primer for the detection of SNP TSC0057641
tatttatttatc

SEQ ID NO: 369450 - DNA, 12 bp, Artificial Sequence
  Oligonucleotide primer for the detection of SNP TSC0057641
catccatccatc

SEQ ID NO: 369451 - DNA, 12 bp, Artificial Sequence
  Oligonucleotide primer for the detection of SNP TSC0057641
ggagggatggat

SEQ ID NO: 369452 - DNA, 12 bp, Artificial Sequence
  Oligonucleotide primer for the detection of SNP TSC0057642
cctcaccccaac

SEQ ID NO: 369453 - DNA, 12 bp, Artificial Sequence
  Oligonucleotide primer for the detection of SNP TSC0057642
tgtggggtaggg

SEQ ID NO: 369454 - DNA, 12 bp, Artificial Sequence
  Oligonucleotide primer for the detection of SNP TSC0006447
tcaaatcctaca

SEQ ID NO: 369455 - DNA, 12 bp, Artificial Sequence
  Oligonucleotide primer for the detection of SNP TSC0006447
ttggtgttttaa

SEQ ID NO: 369456 - DNA, 12 bp, Artificial Sequence
  Oligonucleotide primer for the detection of SNP TSC0006447
ctaatattttaa

SEQ ID NO: 369457 - DNA, 12 bp, Artificial Sequence
  Oligonucleotide primer for the detection of SNP TSC0057645
cacatcttctct

SEQ ID NO: 369458 - DNA, 12 bp, Artificial Sequence
  Oligonucleotide primer for the detection of SNP TSC0057646
tatataggttag

SEQ ID NO: 369459 - DNA, 12 bp, Artificial Sequence
  Oligonucleotide primer for the detection of SNP TSC0057647
acaaatttactc

SEQ ID NO: 369460 - DNA, 12 bp, Artificial Sequence
  Oligonucleotide primer for the detection of SNP TSC0057647
tgtagagtgaaa

SEQ ID NO: 369461 - DNA, 12 bp, Artificial Sequence
  Oligonucleotide primer for the detection of SNP TSC0057650
aacccgaaaaaa

SEQ ID NO: 369462 - DNA, 12 bp, Artificial Sequence
  Oligonucleotide primer for the detection of SNP TSC0057650
tcactaacctac

SEQ ID NO: 369463 - DNA, 12 bp, Artificial Sequence
  Oligonucleotide primer for the detection of SNP TSC0057650
ggatttggggag

SEQ ID NO: 369464 - DNA, 12 bp, Artificial Sequence
  Oligonucleotide primer for the detection of SNP TSC0057650
ggattcggggag

SEQ ID NO: 369465 - DNA, 12 bp, Artificial Sequence
  Oligonucleotide primer for the detection of SNP TSC0057651
tccccaaatccc

SEQ ID NO: 369466 - DNA, 12 bp, Artificial Sequence
  Oligonucleotide primer for the detection of SNP TSC0057651
tccccgaatccc

SEQ ID NO: 369467 - DNA, 12 bp, Artificial Sequence
  Oligonucleotide primer for the detection of SNP TSC0057651
ggggtggggatg

SEQ ID NO: 369468 - DNA, 12 bp, Artificial Sequence
  Oligonucleotide primer for the detection of SNP TSC0057652
cacaacaaaaat

SEQ ID NO: 369469 - DNA, 12 bp, Artificial Sequence
  Oligonucleotide primer for the detection of SNP TSC0057652
tgttattgttgg

SEQ ID NO: 369470 - DNA, 12 bp, Artificial Sequence
  Oligonucleotide primer for the detection of SNP TSC0005670
ccccacaaattt

SEQ ID NO: 369471 - DNA, 12 bp, Artificial Sequence
  Oligonucleotide primer for the detection of SNP TSC0005670
tgatttttgggg

SEQ ID NO: 369472 - DNA, 12 bp, Artificial Sequence
  Oligonucleotide primer for the detection of SNP TSC0057653
ttaagaaaatag

SEQ ID NO: 369473 - DNA, 12 bp, Artificial Sequence
  Oligonucleotide primer for the detection of SNP TSC0057653
ataaataatatt

SEQ ID NO: 369474 - DNA, 12 bp, Artificial Sequence
  Oligonucleotide primer for the detection of SNP TSC0057654
attttaactaat

SEQ ID NO: 369475 - DNA, 12 bp, Artificial Sequence
  Oligonucleotide primer for the detection of SNP TSC0001284
cgaaaataaatt

SEQ ID NO: 369476 - DNA, 12 bp, Artificial Sequence
  Oligonucleotide primer for the detection of SNP TSC0001284
atttgttttatg

SEQ ID NO: 369477 - DNA, 12 bp, Artificial Sequence
  Oligonucleotide primer for the detection of SNP TSC0001284
atttatcctata

SEQ ID NO: 369478 - DNA, 12 bp, Artificial Sequence
  Oligonucleotide primer for the detection of SNP TSC0001284
tgagaataaatt

SEQ ID NO: 369479 - DNA, 12 bp, Artificial Sequence
  Oligonucleotide primer for the detection of SNP TSC0001284
cgagaataaatt

SEQ ID NO: 369480 - DNA, 12 bp, Artificial Sequence
  Oligonucleotide primer for the detection of SNP TSC0057656
taccacactatt

SEQ ID NO: 369481 - DNA, 12 bp, Artificial Sequence
  Oligonucleotide primer for the detection of SNP TSC0057656
gtttagtagggg

SEQ ID NO: 369482 - DNA, 12 bp, Artificial Sequence
  Oligonucleotide primer for the detection of SNP TSC0057657
ccctccaaaccc

SEQ ID NO: 369483 - DNA, 12 bp, Artificial Sequence
  Oligonucleotide primer for the detection of SNP TSC0057657
gtggtggtttag

SEQ ID NO: 369484 - DNA, 12 bp, Artificial Sequence
  Oligonucleotide primer for the detection of SNP TSC0057657
gcggtggtttag

SEQ ID NO: 369485 - DNA, 12 bp, Artificial Sequence
  Oligonucleotide primer for the detection of SNP TSC0057658
tcaacataaacc

SEQ ID NO: 369486 - DNA, 12 bp, Artificial Sequence
  Oligonucleotide primer for the detection of SNP TSC0057658
atagttgtttta

SEQ ID NO: 369487 - DNA, 12 bp, Artificial Sequence
  Oligonucleotide primer for the detection of SNP TSC0057659
gtttggatttta

SEQ ID NO: 369488 - DNA, 12 bp, Artificial Sequence
  Oligonucleotide primer for the detection of SNP TSC0057661
aggatgatttta

SEQ ID NO: 369489 - DNA, 12 bp, Artificial Sequence
  Oligonucleotide primer for the detection of SNP TSC0057662
tagaaggggata

SEQ ID NO: 369490 - DNA, 12 bp, Artificial Sequence
  Oligonucleotide primer for the detection of SNP TSC0057663
aacacatatata

SEQ ID NO: 369491 - DNA, 12 bp, Artificial Sequence
  Oligonucleotide primer for the detection of SNP TSC0057663
ggttagttatat

SEQ ID NO: 369492 - DNA, 12 bp, Artificial Sequence
  Oligonucleotide primer for the detection of SNP TSC0057664
cgatatttttaa

SEQ ID NO: 369493 - DNA, 12 bp, Artificial Sequence
  Oligonucleotide primer for the detection of SNP TSC0057665
ccccaacaacca

SEQ ID NO: 369494 - DNA, 12 bp, Artificial Sequence
  Oligonucleotide primer for the detection of SNP TSC0057665
agagggtagaag

SEQ ID NO: 369495 - DNA, 12 bp, Artificial Sequence
  Oligonucleotide primer for the detection of SNP TSC0057666
caatcttaattt

SEQ ID NO: 369496 - DNA, 12 bp, Artificial Sequence
  Oligonucleotide primer for the detection of SNP TSC0057666
gagaaaatgaga

SEQ ID NO: 369497 - DNA, 12 bp, Artificial Sequence
  Oligonucleotide primer for the detection of SNP TSC0057667
tttatctaaatt

SEQ ID NO: 369498 - DNA, 12 bp, Artificial Sequence
  Oligonucleotide primer for the detection of SNP TSC0057667
gatagttttgaa

SEQ ID NO: 369499 - DNA, 12 bp, Artificial Sequence
  Oligonucleotide primer for the detection of SNP TSC0008120
ctcattaacctc

SEQ ID NO: 369500 - DNA, 12 bp, Artificial Sequence
  Oligonucleotide primer for the detection of SNP TSC0057673
cttataaaaccc

SEQ ID NO: 369501 - DNA, 12 bp, Artificial Sequence
  Oligonucleotide primer for the detection of SNP TSC0057674
caaatattatat

SEQ ID NO: 369502 - DNA, 12 bp, Artificial Sequence
  Oligonucleotide primer for the detection of SNP TSC0057674
gattaaagagta

SEQ ID NO: 369503 - DNA, 12 bp, Artificial Sequence
  Oligonucleotide primer for the detection of SNP TSC0057675
gggtatttttgt

SEQ ID NO: 369504 - DNA, 12 bp, Artificial Sequence
  Oligonucleotide primer for the detection of SNP TSC0057675
taaaagatatag

SEQ ID NO: 369505 - DNA, 12 bp, Artificial Sequence
  Oligonucleotide primer for the detection of SNP TSC0057677
actaatactttc

SEQ ID NO: 369506 - DNA, 12 bp, Artificial Sequence
  Oligonucleotide primer for the detection of SNP TSC0057678
taaaaactacat

SEQ ID NO: 369507 - DNA, 12 bp, Artificial Sequence
  Oligonucleotide primer for the detection of SNP TSC0057678
tagggaagttga

SEQ ID NO: 369508 - DNA, 12 bp, Artificial Sequence
  Oligonucleotide primer for the detection of SNP TSC0057678
tgaaggttgtat

SEQ ID NO: 369509 - DNA, 12 bp, Artificial Sequence
  Oligonucleotide primer for the detection of SNP TSC0057679
ggagaataaagg

SEQ ID NO: 369510 - DNA, 12 bp, Artificial Sequence
  Oligonucleotide primer for the detection of SNP TSC0057679
taaagtaaaatt

SEQ ID NO: 369511 - DNA, 12 bp, Artificial Sequence
  Oligonucleotide primer for the detection of SNP TSC0057682
aaatttactaat

SEQ ID NO: 369512 - DNA, 12 bp, Artificial Sequence
  Oligonucleotide primer for the detection of SNP TSC0057682
aggtggaagaaa

SEQ ID NO: 369513 - DNA, 12 bp, Artificial Sequence
  Oligonucleotide primer for the detection of SNP TSC0057682
aggcggaagaaa

SEQ ID NO: 369514 - DNA, 12 bp, Artificial Sequence
  Oligonucleotide primer for the detection of SNP TSC0057683
aatggttttatt

SEQ ID NO: 369515 - DNA, 12 bp, Artificial Sequence
  Oligonucleotide primer for the detection of SNP TSC0057683
tatatagttatt

SEQ ID NO: 369516 - DNA, 12 bp, Artificial Sequence
  Oligonucleotide primer for the detection of SNP TSC0057687
ttaaatctactt

SEQ ID NO: 369517 - DNA, 12 bp, Artificial Sequence
  Oligonucleotide primer for the detection of SNP TSC0057687
aggaagaatatg

SEQ ID NO: 369518 - DNA, 12 bp, Artificial Sequence
  Oligonucleotide primer for the detection of SNP TSC0057688
ctaaatacactt

SEQ ID NO: 369519 - DNA, 12 bp, Artificial Sequence
  Oligonucleotide primer for the detection of SNP TSC0057690
tgatttgtagat

SEQ ID NO: 369520 - DNA, 12 bp, Artificial Sequence
  Oligonucleotide primer for the detection of SNP TSC0057690
ttaacttataaa

SEQ ID NO: 369521 - DNA, 12 bp, Artificial Sequence
  Oligonucleotide primer for the detection of SNP TSC0057690
attggagagatt

SEQ ID NO: 369522 - DNA, 12 bp, Artificial Sequence
  Oligonucleotide primer for the detection of SNP TSC0057691
aattttttttac

SEQ ID NO: 369523 - DNA, 12 bp, Artificial Sequence
  Oligonucleotide primer for the detection of SNP TSC0057691
aatctcccccac

SEQ ID NO: 369524 - DNA, 12 bp, Artificial Sequence
  Oligonucleotide primer for the detection of SNP TSC0057691
attttttgagag

SEQ ID NO: 369525 - DNA, 12 bp, Artificial Sequence
  Oligonucleotide primer for the detection of SNP TSC0057693
acttccctatat

SEQ ID NO: 369526 - DNA, 12 bp, Artificial Sequence
  Oligonucleotide primer for the detection of SNP TSC0057693
tttgatggttta

SEQ ID NO: 369527 - DNA, 12 bp, Artificial Sequence
  Oligonucleotide primer for the detection of SNP TSC0057696
attttccataat

SEQ ID NO: 369528 - DNA, 12 bp, Artificial Sequence
  Oligonucleotide primer for the detection of SNP TSC0057696
taaattagtata

SEQ ID NO: 369529 - DNA, 12 bp, Artificial Sequence
  Oligonucleotide primer for the detection of SNP TSC0057697
gaggatttggag

SEQ ID NO: 369530 - DNA, 12 bp, Artificial Sequence
  Oligonucleotide primer for the detection of SNP TSC0057698
attcaaactatt

SEQ ID NO: 369531 - DNA, 12 bp, Artificial Sequence
  Oligonucleotide primer for the detection of SNP TSC0057698
atgttggaagta

SEQ ID NO: 369532 - DNA, 12 bp, Artificial Sequence
  Oligonucleotide primer for the detection of SNP TSC0057698
gtttaggttgtt

SEQ ID NO: 369533 - DNA, 12 bp, Artificial Sequence
  Oligonucleotide primer for the detection of SNP TSC0057700
ccatccaaaatc

SEQ ID NO: 369534 - DNA, 12 bp, Artificial Sequence
  Oligonucleotide primer for the detection of SNP TSC0057700
ccgtccaaaatc

SEQ ID NO: 369535 - DNA, 12 bp, Artificial Sequence
  Oligonucleotide primer for the detection of SNP TSC0057700
gttttttaggtg

SEQ ID NO: 369536 - DNA, 12 bp, Artificial Sequence
  Oligonucleotide primer for the detection of SNP TSC0057700
atcctccaaata

SEQ ID NO: 369537 - DNA, 12 bp, Artificial Sequence
  Oligonucleotide primer for the detection of SNP TSC0057700
tcgtttaaaatt

SEQ ID NO: 369538 - DNA, 12 bp, Artificial Sequence
  Oligonucleotide primer for the detection of SNP TSC0057707
aataatttcttt

SEQ ID NO: 369539 - DNA, 12 bp, Artificial Sequence
  Oligonucleotide primer for the detection of SNP TSC0057707
tgggatatgtta

SEQ ID NO: 369540 - DNA, 12 bp, Artificial Sequence
  Oligonucleotide primer for the detection of SNP TSC0057707
taaaacatacta

SEQ ID NO: 369541 - DNA, 12 bp, Artificial Sequence
  Oligonucleotide primer for the detection of SNP TSC0057708
aaacaaataccc

SEQ ID NO: 369542 - DNA, 12 bp, Artificial Sequence
  Oligonucleotide primer for the detection of SNP TSC0057708
gagtaaatgttt

SEQ ID NO: 369543 - DNA, 12 bp, Artificial Sequence
  Oligonucleotide primer for the detection of SNP TSC0057709
tatcttccccac

SEQ ID NO: 369544 - DNA, 12 bp, Artificial Sequence
  Oligonucleotide primer for the detection of SNP TSC0005336
aagtagaaatat

SEQ ID NO: 369545 - DNA, 12 bp, Artificial Sequence
  Oligonucleotide primer for the detection of SNP TSC0005336
agtttagtatgg

SEQ ID NO: 369546 - DNA, 12 bp, Artificial Sequence
  Oligonucleotide primer for the detection of SNP TSC0057710
aaaaggagtata

SEQ ID NO: 369547 - DNA, 12 bp, Artificial Sequence
  Oligonucleotide primer for the detection of SNP TSC0057711
aaaataaatact

SEQ ID NO: 369548 - DNA, 12 bp, Artificial Sequence
  Oligonucleotide primer for the detection of SNP TSC0057711
ctaccaattaaa

SEQ ID NO: 369549 - DNA, 12 bp, Artificial Sequence
  Oligonucleotide primer for the detection of SNP TSC0057711
agggtaaatgtt

SEQ ID NO: 369550 - DNA, 12 bp, Artificial Sequence
  Oligonucleotide primer for the detection of SNP TSC0057712
tggaatttggtg

SEQ ID NO: 369551 - DNA, 12 bp, Artificial Sequence
  Oligonucleotide primer for the detection of SNP TSC0057712
tggaattcggtg

SEQ ID NO: 369552 - DNA, 12 bp, Artificial Sequence
  Oligonucleotide primer for the detection of SNP TSC0057714
ttacaataaaac

SEQ ID NO: 369553 - DNA, 12 bp, Artificial Sequence
  Oligonucleotide primer for the detection of SNP TSC0057714
atattatgagta

SEQ ID NO: 369554 - DNA, 12 bp, Artificial Sequence
  Oligonucleotide primer for the detection of SNP TSC0057714
acaccataaaca

SEQ ID NO: 369555 - DNA, 12 bp, Artificial Sequence
  Oligonucleotide primer for the detection of SNP TSC0057714
ttataatagggt

SEQ ID NO: 369556 - DNA, 12 bp, Artificial Sequence
  Oligonucleotide primer for the detection of SNP TSC0057715
tacaaaaccaat

SEQ ID NO: 369557 - DNA, 12 bp, Artificial Sequence
  Oligonucleotide primer for the detection of SNP TSC0057715
gttggataatgg

SEQ ID NO: 369558 - DNA, 12 bp, Artificial Sequence
  Oligonucleotide primer for the detection of SNP TSC0057717
gaatatttattt

SEQ ID NO: 369559 - DNA, 12 bp, Artificial Sequence
  Oligonucleotide primer for the detection of SNP TSC0057717
aaacacttactc

SEQ ID NO: 369560 - DNA, 12 bp, Artificial Sequence
  Oligonucleotide primer for the detection of SNP TSC0057717
attgtttaaggt

SEQ ID NO: 369561 - DNA, 12 bp, Artificial Sequence
  Oligonucleotide primer for the detection of SNP TSC0057718
ctcctacaaaaa

SEQ ID NO: 369562 - DNA, 12 bp, Artificial Sequence
  Oligonucleotide primer for the detection of SNP TSC0057718
ctcctacgaaaa

SEQ ID NO: 369563 - DNA, 12 bp, Artificial Sequence
  Oligonucleotide primer for the detection of SNP TSC0057718
ttattagtttgt

SEQ ID NO: 369564 - DNA, 12 bp, Artificial Sequence
  Oligonucleotide primer for the detection of SNP TSC0057718
atcaatttacaa

SEQ ID NO: 369565 - DNA, 12 bp, Artificial Sequence
  Oligonucleotide primer for the detection of SNP TSC0057718
tttttgtggaag

SEQ ID NO: 369566 - DNA, 12 bp, Artificial Sequence
  Oligonucleotide primer for the detection of SNP TSC0057718
tttttgcggaag

SEQ ID NO: 369567 - DNA, 12 bp, Artificial Sequence
  Oligonucleotide primer for the detection of SNP TSC0057719
aaataaactcct

SEQ ID NO: 369568 - DNA, 12 bp, Artificial Sequence
  Oligonucleotide primer for the detection of SNP TSC0057719
ttagtttgtaat

SEQ ID NO: 369569 - DNA, 12 bp, Artificial Sequence
  Oligonucleotide primer for the detection of SNP TSC0057719
tcaatttacaac

SEQ ID NO: 369570 - DNA, 12 bp, Artificial Sequence
  Oligonucleotide primer for the detection of SNP TSC0057719
ggatgggttttt

SEQ ID NO: 369571 - DNA, 12 bp, Artificial Sequence
  Oligonucleotide primer for the detection of SNP TSC0006534
atattacaaaac

SEQ ID NO: 369572 - DNA, 12 bp, Artificial Sequence
  Oligonucleotide primer for the detection of SNP TSC0006534
taaatgttattc

SEQ ID NO: 369573 - DNA, 12 bp, Artificial Sequence
  Oligonucleotide primer for the detection of SNP TSC0006534
caaatactattc

SEQ ID NO: 369574 - DNA, 12 bp, Artificial Sequence
  Oligonucleotide primer for the detection of SNP TSC0006534
attatagggttt

SEQ ID NO: 369575 - DNA, 12 bp, Artificial Sequence
  Oligonucleotide primer for the detection of SNP TSC0057723
actccaataaca

SEQ ID NO: 369576 - DNA, 12 bp, Artificial Sequence
  Oligonucleotide primer for the detection of SNP TSC0057723
actccgataaca

SEQ ID NO: 369577 - DNA, 12 bp, Artificial Sequence
  Oligonucleotide primer for the detection of SNP TSC0057723
aattgtagaggt

SEQ ID NO: 369578 - DNA, 12 bp, Artificial Sequence
  Oligonucleotide primer for the detection of SNP TSC0057723
aatcgtagaggt

SEQ ID NO: 369579 - DNA, 12 bp, Artificial Sequence
  Oligonucleotide primer for the detection of SNP TSC0057723
caatcgcaaaaa

SEQ ID NO: 369580 - DNA, 12 bp, Artificial Sequence
  Oligonucleotide primer for the detection of SNP TSC0057723
ttggtagtattt

SEQ ID NO: 369581 - DNA, 12 bp, Artificial Sequence
  Oligonucleotide primer for the detection of SNP TSC0057723
tcggtagtattt

SEQ ID NO: 369582 - DNA, 12 bp, Artificial Sequence
  Oligonucleotide primer for the detection of SNP TSC0057725
cctatatctttt

SEQ ID NO: 369583 - DNA, 12 bp, Artificial Sequence
  Oligonucleotide primer for the detection of SNP TSC0057726
atataatacctc

SEQ ID NO: 369584 - DNA, 12 bp, Artificial Sequence
  Oligonucleotide primer for the detection of SNP TSC0057727
tcaacattttta

SEQ ID NO: 369585 - DNA, 12 bp, Artificial Sequence
  Oligonucleotide primer for the detection of SNP TSC0057727
tcaacgttttta

SEQ ID NO: 369586 - DNA, 12 bp, Artificial Sequence
  Oligonucleotide primer for the detection of SNP TSC0057728
tttttactttcc

SEQ ID NO: 369587 - DNA, 12 bp, Artificial Sequence
  Oligonucleotide primer for the detection of SNP TSC0057729
caataaaaacat

SEQ ID NO: 369588 - DNA, 12 bp, Artificial Sequence
  Oligonucleotide primer for the detection of SNP TSC0057730
ctttctaaaacc

SEQ ID NO: 369589 - DNA, 12 bp, Artificial Sequence
  Oligonucleotide primer for the detection of SNP TSC0057730
gttagttttttg

SEQ ID NO: 369590 - DNA, 12 bp, Artificial Sequence
  Oligonucleotide primer for the detection of SNP TSC0057733
ttctcccctcac

SEQ ID NO: 369591 - DNA, 12 bp, Artificial Sequence
  Oligonucleotide primer for the detection of SNP TSC0057733
ggagagtgtaaa

SEQ ID NO: 369592 - DNA, 12 bp, Artificial Sequence
  Oligonucleotide primer for the detection of SNP TSC0057735
acataacatatc

SEQ ID NO: 369593 - DNA, 12 bp, Artificial Sequence
  Oligonucleotide primer for the detection of SNP TSC0057735
agtagagatgta

SEQ ID NO: 369594 - DNA, 12 bp, Artificial Sequence
  Oligonucleotide primer for the detection of SNP TSC0057736
tacaaactaatc

SEQ ID NO: 369595 - DNA, 12 bp, Artificial Sequence
  Oligonucleotide primer for the detection of SNP TSC0057736
tagtttatttta

SEQ ID NO: 369596 - DNA, 12 bp, Artificial Sequence
  Oligonucleotide primer for the detection of SNP TSC0057737
caacctataaaa

SEQ ID NO: 369597 - DNA, 12 bp, Artificial Sequence
  Oligonucleotide primer for the detection of SNP TSC0057737
aaaccaatttct

SEQ ID NO: 369598 - DNA, 12 bp, Artificial Sequence
  Oligonucleotide primer for the detection of SNP TSC0057737
aatttgtgaaat

SEQ ID NO: 369599 - DNA, 12 bp, Artificial Sequence
  Oligonucleotide primer for the detection of SNP TSC0057739
attactactata

SEQ ID NO: 369600 - DNA, 12 bp, Artificial Sequence
  Oligonucleotide primer for the detection of SNP TSC0057739
agtatagtaatt

SEQ ID NO: 369601 - DNA, 12 bp, Artificial Sequence
  Oligonucleotide primer for the detection of SNP TSC0057739
aattattattat

SEQ ID NO: 369602 - DNA, 12 bp, Artificial Sequence
  Oligonucleotide primer for the detection of SNP TSC0057740
ttatatcaatta

SEQ ID NO: 369603 - DNA, 12 bp, Artificial Sequence
  Oligonucleotide primer for the detection of SNP TSC0057740
taaaggtttaag

SEQ ID NO: 369604 - DNA, 12 bp, Artificial Sequence
  Oligonucleotide primer for the detection of SNP TSC0057741
tctactccaata

SEQ ID NO: 369605 - DNA, 12 bp, Artificial Sequence
  Oligonucleotide primer for the detection of SNP TSC0057741
aaaaaagaaaat

SEQ ID NO: 369606 - DNA, 12 bp, Artificial Sequence
  Oligonucleotide primer for the detection of SNP TSC0057743
tatatttttaca

SEQ ID NO: 369607 - DNA, 12 bp, Artificial Sequence
  Oligonucleotide primer for the detection of SNP TSC0057743
tgttttgggtaa

SEQ ID NO: 369608 - DNA, 12 bp, Artificial Sequence
  Oligonucleotide primer for the detection of SNP TSC0057745
gtggtttatgtt

SEQ ID NO: 369609 - DNA, 12 bp, Artificial Sequence
  Oligonucleotide primer for the detection of SNP TSC0057745
ataactcatacc

SEQ ID NO: 369610 - DNA, 12 bp, Artificial Sequence
  Oligonucleotide primer for the detection of SNP TSC0057745
gtgttggaatta

SEQ ID NO: 369611 - DNA, 12 bp, Artificial Sequence
  Oligonucleotide primer for the detection of SNP TSC0006515
atttcttaatca

SEQ ID NO: 369612 - DNA, 12 bp, Artificial Sequence
  Oligonucleotide primer for the detection of SNP TSC0006515
gtaaatggtatt

SEQ ID NO: 369613 - DNA, 12 bp, Artificial Sequence
  Oligonucleotide primer for the detection of SNP TSC0057746
aaccaaactaac

SEQ ID NO: 369614 - DNA, 12 bp, Artificial Sequence
  Oligonucleotide primer for the detection of SNP TSC0057746
aatttcaccata

SEQ ID NO: 369615 - DNA, 12 bp, Artificial Sequence
  Oligonucleotide primer for the detection of SNP TSC0057746
gattaggttggt

SEQ ID NO: 369616 - DNA, 12 bp, Artificial Sequence
  Oligonucleotide primer for the detection of SNP TSC0057746
gattaggttggc

SEQ ID NO: 369617 - DNA, 12 bp, Artificial Sequence
  Oligonucleotide primer for the detection of SNP TSC0057747
gaggttgagggg

SEQ ID NO: 369618 - DNA, 12 bp, Artificial Sequence
  Oligonucleotide primer for the detection of SNP TSC0057748
acccctattact

SEQ ID NO: 369619 - DNA, 12 bp, Artificial Sequence
  Oligonucleotide primer for the detection of SNP TSC0057749
taaattacaccc

SEQ ID NO: 369620 - DNA, 12 bp, Artificial Sequence
  Oligonucleotide primer for the detection of SNP TSC0057749
taaccacctaca

SEQ ID NO: 369621 - DNA, 12 bp, Artificial Sequence
  Oligonucleotide primer for the detection of SNP TSC0057749
tgagttatattt

SEQ ID NO: 369622 - DNA, 12 bp, Artificial Sequence
  Oligonucleotide primer for the detection of SNP TSC0057750
atggtatatagt

SEQ ID NO: 369623 - DNA, 12 bp, Artificial Sequence
  Oligonucleotide primer for the detection of SNP TSC0057750
tttattgagaat

SEQ ID NO: 369624 - DNA, 12 bp, Artificial Sequence
  Oligonucleotide primer for the detection of SNP TSC0057752
ttattttttatc

SEQ ID NO: 369625 - DNA, 12 bp, Artificial Sequence
  Oligonucleotide primer for the detection of SNP TSC0057752
taagaagtattt

SEQ ID NO: 369626 - DNA, 12 bp, Artificial Sequence
  Oligonucleotide primer for the detection of SNP TSC0057753
taattggattag

SEQ ID NO: 369627 - DNA, 12 bp, Artificial Sequence
  Oligonucleotide primer for the detection of SNP TSC0057753
tgttgagtatgt

SEQ ID NO: 369628 - DNA, 12 bp, Artificial Sequence
  Oligonucleotide primer for the detection of SNP TSC0057756
ctacaaaatttt

SEQ ID NO: 369629 - DNA, 12 bp, Artificial Sequence
  Oligonucleotide primer for the detection of SNP TSC0057756
ctacgaaatttt

SEQ ID NO: 369630 - DNA, 12 bp, Artificial Sequence
  Oligonucleotide primer for the detection of SNP TSC0057757
aaactacaaatt

SEQ ID NO: 369631 - DNA, 12 bp, Artificial Sequence
  Oligonucleotide primer for the detection of SNP TSC0057757
tattatgaattg

SEQ ID NO: 369632 - DNA, 12 bp, Artificial Sequence
  Oligonucleotide primer for the detection of SNP TSC0057760
catatataaatc

SEQ ID NO: 369633 - DNA, 12 bp, Artificial Sequence
  Oligonucleotide primer for the detection of SNP TSC0057760
aggtgaataggg

SEQ ID NO: 369634 - DNA, 12 bp, Artificial Sequence
  Oligonucleotide primer for the detection of SNP TSC0057760
tatatgtggatt

SEQ ID NO: 369635 - DNA, 12 bp, Artificial Sequence
  Oligonucleotide primer for the detection of SNP TSC0057764
caacttcaaaaa

SEQ ID NO: 369636 - DNA, 12 bp, Artificial Sequence
  Oligonucleotide primer for the detection of SNP TSC0057764
tcttttctcttc

SEQ ID NO: 369637 - DNA, 12 bp, Artificial Sequence
  Oligonucleotide primer for the detection of SNP TSC0057764
gttttaaagatt

SEQ ID NO: 369638 - DNA, 12 bp, Artificial Sequence
  Oligonucleotide primer for the detection of SNP TSC0005710
aacaaactatct

SEQ ID NO: 369639 - DNA, 12 bp, Artificial Sequence
  Oligonucleotide primer for the detection of SNP TSC0005711
ttttatattatc

SEQ ID NO: 369640 - DNA, 12 bp, Artificial Sequence
  Oligonucleotide primer for the detection of SNP TSC0005711
tcctatatcatc

SEQ ID NO: 369641 - DNA, 12 bp, Artificial Sequence
  Oligonucleotide primer for the detection of SNP TSC0005711
tttgaaaaaata

SEQ ID NO: 369642 - DNA, 12 bp, Artificial Sequence
  Oligonucleotide primer for the detection of SNP TSC0005712
tataaatcacac

SEQ ID NO: 369643 - DNA, 12 bp, Artificial Sequence
  Oligonucleotide primer for the detection of SNP TSC0005713
atactactttct

SEQ ID NO: 369644 - DNA, 12 bp, Artificial Sequence
  Oligonucleotide primer for the detection of SNP TSC0005713
taggagttgtta

SEQ ID NO: 369645 - DNA, 12 bp, Artificial Sequence
  Oligonucleotide primer for the detection of SNP TSC0057765
tcatatttttca

SEQ ID NO: 369646 - DNA, 12 bp, Artificial Sequence
  Oligonucleotide primer for the detection of SNP TSC0057765
ttattttctttc

SEQ ID NO: 369647 - DNA, 12 bp, Artificial Sequence
  Oligonucleotide primer for the detection of SNP TSC0057765
tatattttttat

SEQ ID NO: 369648 - DNA, 12 bp, Artificial Sequence
  Oligonucleotide primer for the detection of SNP TSC0057765
tatattttttac

SEQ ID NO: 369649 - DNA, 12 bp, Artificial Sequence
  Oligonucleotide primer for the detection of SNP TSC0057766
tccccaaatata

SEQ ID NO: 369650 - DNA, 12 bp, Artificial Sequence
  Oligonucleotide primer for the detection of SNP TSC0057766
attagtataatt

SEQ ID NO: 369651 - DNA, 12 bp, Artificial Sequence
  Oligonucleotide primer for the detection of SNP TSC0057767
acccatctatcc

SEQ ID NO: 369652 - DNA, 12 bp, Artificial Sequence
  Oligonucleotide primer for the detection of SNP TSC0057767
acccgtctatcc

SEQ ID NO: 369653 - DNA, 12 bp, Artificial Sequence
  Oligonucleotide primer for the detection of SNP TSC0005385
tattttaaactt

SEQ ID NO: 369654 - DNA, 12 bp, Artificial Sequence
  Oligonucleotide primer for the detection of SNP TSC0005385
tgtaagtttatg

SEQ ID NO: 369655 - DNA, 12 bp, Artificial Sequence
  Oligonucleotide primer for the detection of SNP TSC0005386
tctaaaaacact

SEQ ID NO: 369656 - DNA, 12 bp, Artificial Sequence
  Oligonucleotide primer for the detection of SNP TSC0005386
ttttaagtttaa

SEQ ID NO: 369657 - DNA, 12 bp, Artificial Sequence
  Oligonucleotide primer for the detection of SNP TSC0004701
attttaattata

SEQ ID NO: 369658 - DNA, 12 bp, Artificial Sequence
  Oligonucleotide primer for the detection of SNP TSC0057768
taaaaacccacc

SEQ ID NO: 369659 - DNA, 12 bp, Artificial Sequence
  Oligonucleotide primer for the detection of SNP TSC0057768
gttttaatttta

SEQ ID NO: 369660 - DNA, 12 bp, Artificial Sequence
  Oligonucleotide primer for the detection of SNP TSC0005241
acaaaacatctc

SEQ ID NO: 369661 - DNA, 12 bp, Artificial Sequence
  Oligonucleotide primer for the detection of SNP TSC0005241
accactcctata

SEQ ID NO: 369662 - DNA, 12 bp, Artificial Sequence
  Oligonucleotide primer for the detection of SNP TSC0005241
atagagtatttt

SEQ ID NO: 369663 - DNA, 12 bp, Artificial Sequence
  Oligonucleotide primer for the detection of SNP TSC0006935
caacctcctata

SEQ ID NO: 369664 - DNA, 12 bp, Artificial Sequence
  Oligonucleotide primer for the detection of SNP TSC0006935
tgtaggttagta

SEQ ID NO: 369665 - DNA, 12 bp, Artificial Sequence
  Oligonucleotide primer for the detection of SNP TSC0006935
acaaatcaataa

SEQ ID NO: 369666 - DNA, 12 bp, Artificial Sequence
  Oligonucleotide primer for the detection of SNP TSC0057771
agaatatataaa

SEQ ID NO: 369667 - DNA, 12 bp, Artificial Sequence
  Oligonucleotide primer for the detection of SNP TSC0057772
tcaattttcttc

SEQ ID NO: 369668 - DNA, 12 bp, Artificial Sequence
  Oligonucleotide primer for the detection of SNP TSC0057773
atcttcatccat

SEQ ID NO: 369669 - DNA, 12 bp, Artificial Sequence
  Oligonucleotide primer for the detection of SNP TSC0057773
tatatatgggat

SEQ ID NO: 369670 - DNA, 12 bp, Artificial Sequence
  Oligonucleotide primer for the detection of SNP TSC0057773
atatataaaata

SEQ ID NO: 369671 - DNA, 12 bp, Artificial Sequence
  Oligonucleotide primer for the detection of SNP TSC0057774
acttacaaaata

SEQ ID NO: 369672 - DNA, 12 bp, Artificial Sequence
  Oligonucleotide primer for the detection of SNP TSC0057774
tattaccctaaa

SEQ ID NO: 369673 - DNA, 12 bp, Artificial Sequence
  Oligonucleotide primer for the detection of SNP TSC0057774
tttataaagtac

SEQ ID NO: 369674 - DNA, 12 bp, Artificial Sequence
  Oligonucleotide primer for the detection of SNP TSC0057775
ttaaatagaaag

SEQ ID NO: 369675 - DNA, 12 bp, Artificial Sequence
  Oligonucleotide primer for the detection of SNP TSC0057776
gtgttatttgga

SEQ ID NO: 369676 - DNA, 12 bp, Artificial Sequence
  Oligonucleotide primer for the detection of SNP TSC0057778
aactattattac

SEQ ID NO: 369677 - DNA, 12 bp, Artificial Sequence
  Oligonucleotide primer for the detection of SNP TSC0057778
ttttttgtaata

SEQ ID NO: 369678 - DNA, 12 bp, Artificial Sequence
  Oligonucleotide primer for the detection of SNP TSC0057779
tacaaaacatac

SEQ ID NO: 369679 - DNA, 12 bp, Artificial Sequence
  Oligonucleotide primer for the detection of SNP TSC0057779
aataattcattt

SEQ ID NO: 369680 - DNA, 12 bp, Artificial Sequence
  Oligonucleotide primer for the detection of SNP TSC0057779
tgtaaagtatat

SEQ ID NO: 369681 - DNA, 12 bp, Artificial Sequence
  Oligonucleotide primer for the detection of SNP TSC0057780
ttaaaaattacc

SEQ ID NO: 369682 - DNA, 12 bp, Artificial Sequence
  Oligonucleotide primer for the detection of SNP TSC0057781
aaatgtttgatt

SEQ ID NO: 369683 - DNA, 12 bp, Artificial Sequence
  Oligonucleotide primer for the detection of SNP TSC0057781
ttaattaaaagg

SEQ ID NO: 369684 - DNA, 12 bp, Artificial Sequence
  Oligonucleotide primer for the detection of SNP TSC0057782
atctctactata

SEQ ID NO: 369685 - DNA, 12 bp, Artificial Sequence
  Oligonucleotide primer for the detection of SNP TSC0057782
gttgtatattag

SEQ ID NO: 369686 - DNA, 12 bp, Artificial Sequence
  Oligonucleotide primer for the detection of SNP TSC0057782
attacacactaa

SEQ ID NO: 369687 - DNA, 12 bp, Artificial Sequence
  Oligonucleotide primer for the detection of SNP TSC0057782
ggtttttgttgt

SEQ ID NO: 369688 - DNA, 12 bp, Artificial Sequence
  Oligonucleotide primer for the detection of SNP TSC0057785
ctcaacaatcac

SEQ ID NO: 369689 - DNA, 12 bp, Artificial Sequence
  Oligonucleotide primer for the detection of SNP TSC0057785
tagtgtatatta

SEQ ID NO: 369690 - DNA, 12 bp, Artificial Sequence
  Oligonucleotide primer for the detection of SNP TSC0057786
aaaaacattatt

SEQ ID NO: 369691 - DNA, 12 bp, Artificial Sequence
  Oligonucleotide primer for the detection of SNP TSC0057786
aattggttgtta

SEQ ID NO: 369692 - DNA, 12 bp, Artificial Sequence
  Oligonucleotide primer for the detection of SNP TSC0057786
aattaattatca

SEQ ID NO: 369693 - DNA, 12 bp, Artificial Sequence
  Oligonucleotide primer for the detection of SNP TSC0057786
agaagtattgtt

SEQ ID NO: 369694 - DNA, 12 bp, Artificial Sequence
  Oligonucleotide primer for the detection of SNP TSC0057787
atttacttatat

SEQ ID NO: 369695 - DNA, 12 bp, Artificial Sequence
  Oligonucleotide primer for the detection of SNP TSC0057789
ataatataaaaa

SEQ ID NO: 369696 - DNA, 12 bp, Artificial Sequence
  Oligonucleotide primer for the detection of SNP TSC0057789
acctaactctcc

SEQ ID NO: 369697 - DNA, 12 bp, Artificial Sequence
  Oligonucleotide primer for the detection of SNP TSC0057789
gtagtatggaag

SEQ ID NO: 369698 - DNA, 12 bp, Artificial Sequence
  Oligonucleotide primer for the detection of SNP TSC0057790
ctcttacataac

SEQ ID NO: 369699 - DNA, 12 bp, Artificial Sequence
  Oligonucleotide primer for the detection of SNP TSC0057790
gagaggtttttt

SEQ ID NO: 369700 - DNA, 12 bp, Artificial Sequence
  Oligonucleotide primer for the detection of SNP TSC0057791
taaatatttcat

SEQ ID NO: 369701 - DNA, 12 bp, Artificial Sequence
  Oligonucleotide primer for the detection of SNP TSC0057792
ataatacccata

SEQ ID NO: 369702 - DNA, 12 bp, Artificial Sequence
  Oligonucleotide primer for the detection of SNP TSC0057792
tttgtgtttgat

SEQ ID NO: 369703 - DNA, 12 bp, Artificial Sequence
  Oligonucleotide primer for the detection of SNP TSC0057792
tttgcgtttgat

SEQ ID NO: 369704 - DNA, 12 bp, Artificial Sequence
  Oligonucleotide primer for the detection of SNP TSC0057792
cctacacttaac

SEQ ID NO: 369705 - DNA, 12 bp, Artificial Sequence
  Oligonucleotide primer for the detection of SNP TSC0057792
cctacgcttaac

SEQ ID NO: 369706 - DNA, 12 bp, Artificial Sequence
  Oligonucleotide primer for the detection of SNP TSC0057793
gggtatagtttg

SEQ ID NO: 369707 - DNA, 12 bp, Artificial Sequence
  Oligonucleotide primer for the detection of SNP TSC0057795
tttgattggttg

SEQ ID NO: 369708 - DNA, 12 bp, Artificial Sequence
  Oligonucleotide primer for the detection of SNP TSC0009654
aatgaattgtat

SEQ ID NO: 369709 - DNA, 12 bp, Artificial Sequence
  Oligonucleotide primer for the detection of SNP TSC0009655
aaattttaatca

SEQ ID NO: 369710 - DNA, 12 bp, Artificial Sequence
  Oligonucleotide primer for the detection of SNP TSC0009655
ttttagtttagt

SEQ ID NO: 369711 - DNA, 12 bp, Artificial Sequence
  Oligonucleotide primer for the detection of SNP TSC0009655
ttttagtttagc

SEQ ID NO: 369712 - DNA, 12 bp, Artificial Sequence
  Oligonucleotide primer for the detection of SNP TSC0009655
ctttcaactcaa

SEQ ID NO: 369713 - DNA, 12 bp, Artificial Sequence
  Oligonucleotide primer for the detection of SNP TSC0009655
aagttttgatta

SEQ ID NO: 369714 - DNA, 12 bp, Artificial Sequence
  Oligonucleotide primer for the detection of SNP TSC0057796
actaaaaatcac

SEQ ID NO: 369715 - DNA, 12 bp, Artificial Sequence
  Oligonucleotide primer for the detection of SNP TSC0057796
ttacattactta

SEQ ID NO: 369716 - DNA, 12 bp, Artificial Sequence
  Oligonucleotide primer for the detection of SNP TSC0057797
tttaccctacac

SEQ ID NO: 369717 - DNA, 12 bp, Artificial Sequence
  Oligonucleotide primer for the detection of SNP TSC0057798
ccaattaaatat

SEQ ID NO: 369718 - DNA, 12 bp, Artificial Sequence
  Oligonucleotide primer for the detection of SNP TSC0057798
tatataaaattg

SEQ ID NO: 369719 - DNA, 12 bp, Artificial Sequence
  Oligonucleotide primer for the detection of SNP TSC0057799
aacaaatactaa

SEQ ID NO: 369720 - DNA, 12 bp, Artificial Sequence
  Oligonucleotide primer for the detection of SNP TSC0057799
tttagagagatt

SEQ ID NO: 369721 - DNA, 12 bp, Artificial Sequence
  Oligonucleotide primer for the detection of SNP TSC0057799
cctaaaaaaatc

SEQ ID NO: 369722 - DNA, 12 bp, Artificial Sequence
  Oligonucleotide primer for the detection of SNP TSC0057800
ccccttcccctt

SEQ ID NO: 369723 - DNA, 12 bp, Artificial Sequence
  Oligonucleotide primer for the detection of SNP TSC0057800
gttggaggtata

SEQ ID NO: 369724 - DNA, 12 bp, Artificial Sequence
  Oligonucleotide primer for the detection of SNP TSC0057801
tttagaaggagt

SEQ ID NO: 369725 - DNA, 12 bp, Artificial Sequence
  Oligonucleotide primer for the detection of SNP TSC0057801
taaaaagttttt

SEQ ID NO: 369726 - DNA, 12 bp, Artificial Sequence
  Oligonucleotide primer for the detection of SNP TSC0057801
taaaaagttttc

SEQ ID NO: 369727 - DNA, 12 bp, Artificial Sequence
  Oligonucleotide primer for the detection of SNP TSC0057802
ccactactctct

SEQ ID NO: 369728 - DNA, 12 bp, Artificial Sequence
  Oligonucleotide primer for the detection of SNP TSC0057802
ttcgatagtttt

SEQ ID NO: 369729 - DNA, 12 bp, Artificial Sequence
  Oligonucleotide primer for the detection of SNP TSC0057802
ccaacaactcta

SEQ ID NO: 369730 - DNA, 12 bp, Artificial Sequence
  Oligonucleotide primer for the detection of SNP TSC0057802
ccgacaactcta

SEQ ID NO: 369731 - DNA, 12 bp, Artificial Sequence
  Oligonucleotide primer for the detection of SNP TSC0004543
ctacctcattta

SEQ ID NO: 369732 - DNA, 12 bp, Artificial Sequence
  Oligonucleotide primer for the detection of SNP TSC0004543
ctacctcgttta

SEQ ID NO: 369733 - DNA, 12 bp, Artificial Sequence
  Oligonucleotide primer for the detection of SNP TSC0004543
aaagtatgggga

SEQ ID NO: 369734 - DNA, 12 bp, Artificial Sequence
  Oligonucleotide primer for the detection of SNP TSC0005449
tatcccccacat

SEQ ID NO: 369735 - DNA, 12 bp, Artificial Sequence
  Oligonucleotide primer for the detection of SNP TSC0001653
atacccccctcc

SEQ ID NO: 369736 - DNA, 12 bp, Artificial Sequence
  Oligonucleotide primer for the detection of SNP TSC0001653
atatgattaagg

SEQ ID NO: 369737 - DNA, 12 bp, Artificial Sequence
  Oligonucleotide primer for the detection of SNP TSC0000091
aacaaacataat

SEQ ID NO: 369738 - DNA, 12 bp, Artificial Sequence
  Oligonucleotide primer for the detection of SNP TSC0000091
aaatccaacctc

SEQ ID NO: 369739 - DNA, 12 bp, Artificial Sequence
  Oligonucleotide primer for the detection of SNP TSC0000091
gaatccaacctc

SEQ ID NO: 369740 - DNA, 12 bp, Artificial Sequence
  Oligonucleotide primer for the detection of SNP TSC0000091
ataggtatagtt

SEQ ID NO: 369741 - DNA, 12 bp, Artificial Sequence
  Oligonucleotide primer for the detection of SNP TSC0000091
ataggtatagtc

SEQ ID NO: 369742 - DNA, 12 bp, Artificial Sequence
  Oligonucleotide primer for the detection of SNP TSC0057804
tttcctctccct

SEQ ID NO: 369743 - DNA, 12 bp, Artificial Sequence
  Oligonucleotide primer for the detection of SNP TSC0057805
ataacaaaatct

SEQ ID NO: 369744 - DNA, 12 bp, Artificial Sequence
  Oligonucleotide primer for the detection of SNP TSC0057806
tcaaataatttt

SEQ ID NO: 369745 - DNA, 12 bp, Artificial Sequence
  Oligonucleotide primer for the detection of SNP TSC0057806
taaggtagtaaa

SEQ ID NO: 369746 - DNA, 12 bp, Artificial Sequence
  Oligonucleotide primer for the detection of SNP TSC0057807
tggggaggtggg

SEQ ID NO: 369747 - DNA, 12 bp, Artificial Sequence
  Oligonucleotide primer for the detection of SNP TSC0057808
caaatatacttt

SEQ ID NO: 369748 - DNA, 12 bp, Artificial Sequence
  Oligonucleotide primer for the detection of SNP TSC0057808
attattatgagt

SEQ ID NO: 369749 - DNA, 12 bp, Artificial Sequence
  Oligonucleotide primer for the detection of SNP TSC0057808
attactataaat

SEQ ID NO: 369750 - DNA, 12 bp, Artificial Sequence
  Oligonucleotide primer for the detection of SNP TSC0057808
taggtatatttt

SEQ ID NO: 369751 - DNA, 12 bp, Artificial Sequence
  Oligonucleotide primer for the detection of SNP TSC0057809
acataattctac

SEQ ID NO: 369752 - DNA, 12 bp, Artificial Sequence
  Oligonucleotide primer for the detection of SNP TSC0057809
gaagatatatta

SEQ ID NO: 369753 - DNA, 12 bp, Artificial Sequence
  Oligonucleotide primer for the detection of SNP TSC0057809
gtataattttgt

SEQ ID NO: 369754 - DNA, 12 bp, Artificial Sequence
  Oligonucleotide primer for the detection of SNP TSC0057810
taaaaacaacca

SEQ ID NO: 369755 - DNA, 12 bp, Artificial Sequence
  Oligonucleotide primer for the detection of SNP TSC0057810
ttggattttgtt

SEQ ID NO: 369756 - DNA, 12 bp, Artificial Sequence
  Oligonucleotide primer for the detection of SNP TSC0057810
ttaaactctatt

SEQ ID NO: 369757 - DNA, 12 bp, Artificial Sequence
  Oligonucleotide primer for the detection of SNP TSC0057811
tcctcaaaccaa

SEQ ID NO: 369758 - DNA, 12 bp, Artificial Sequence
  Oligonucleotide primer for the detection of SNP TSC0057811
tagattattgga

SEQ ID NO: 369759 - DNA, 12 bp, Artificial Sequence
  Oligonucleotide primer for the detection of SNP TSC0057813
tttttttttctt

SEQ ID NO: 369760 - DNA, 12 bp, Artificial Sequence
  Oligonucleotide primer for the detection of SNP TSC0010057
ttatgttagatt

SEQ ID NO: 369761 - DNA, 12 bp, Artificial Sequence
  Oligonucleotide primer for the detection of SNP TSC0010057
tatatcaaatta

SEQ ID NO: 369762 - DNA, 12 bp, Artificial Sequence
  Oligonucleotide primer for the detection of SNP TSC0010057
aaaattgattat

SEQ ID NO: 369763 - DNA, 12 bp, Artificial Sequence
  Oligonucleotide primer for the detection of SNP TSC0057815
aacaaaatcata

SEQ ID NO: 369764 - DNA, 12 bp, Artificial Sequence
  Oligonucleotide primer for the detection of SNP TSC0057815
aacgaaatcata

SEQ ID NO: 369765 - DNA, 12 bp, Artificial Sequence
  Oligonucleotide primer for the detection of SNP TSC0057815
gagaatgtggtt

SEQ ID NO: 369766 - DNA, 12 bp, Artificial Sequence
  Oligonucleotide primer for the detection of SNP TSC0057815
atgaaattatat

SEQ ID NO: 369767 - DNA, 12 bp, Artificial Sequence
  Oligonucleotide primer for the detection of SNP TSC0057815
acgaaattatat

SEQ ID NO: 369768 - DNA, 12 bp, Artificial Sequence
  Oligonucleotide primer for the detection of SNP TSC0057817
taatctactaaa

SEQ ID NO: 369769 - DNA, 12 bp, Artificial Sequence
  Oligonucleotide primer for the detection of SNP TSC0057817
atgtttaagtat

SEQ ID NO: 369770 - DNA, 12 bp, Artificial Sequence
  Oligonucleotide primer for the detection of SNP TSC0057817
atacttaaacac

SEQ ID NO: 369771 - DNA, 12 bp, Artificial Sequence
  Oligonucleotide primer for the detection of SNP TSC0057817
tgatttattaga

SEQ ID NO: 369772 - DNA, 12 bp, Artificial Sequence
  Oligonucleotide primer for the detection of SNP TSC0057818
tctcttaaaact

SEQ ID NO: 369773 - DNA, 12 bp, Artificial Sequence
  Oligonucleotide primer for the detection of SNP TSC0057818
ttttttgtgttg

SEQ ID NO: 369774 - DNA, 12 bp, Artificial Sequence
  Oligonucleotide primer for the detection of SNP TSC0057819
atttaataacta

SEQ ID NO: 369775 - DNA, 12 bp, Artificial Sequence
  Oligonucleotide primer for the detection of SNP TSC0057819
tgttatagtgta

SEQ ID NO: 369776 - DNA, 12 bp, Artificial Sequence
  Oligonucleotide primer for the detection of SNP TSC0057819
tattacaataca

SEQ ID NO: 369777 - DNA, 12 bp, Artificial Sequence
  Oligonucleotide primer for the detection of SNP TSC0057819
gtttgatgattg

SEQ ID NO: 369778 - DNA, 12 bp, Artificial Sequence
  Oligonucleotide primer for the detection of SNP TSC0057821
attttctcacaa

SEQ ID NO: 369779 - DNA, 12 bp, Artificial Sequence
  Oligonucleotide primer for the detection of SNP TSC0057821
aacctatcttta

SEQ ID NO: 369780 - DNA, 12 bp, Artificial Sequence
  Oligonucleotide primer for the detection of SNP TSC0057822
aagaagaaaaaa

SEQ ID NO: 369781 - DNA, 12 bp, Artificial Sequence
  Oligonucleotide primer for the detection of SNP TSC0057822
gagatattttat

SEQ ID NO: 369782 - DNA, 12 bp, Artificial Sequence
  Oligonucleotide primer for the detection of SNP TSC0057822
gagatattttac

SEQ ID NO: 369783 - DNA, 12 bp, Artificial Sequence
  Oligonucleotide primer for the detection of SNP TSC0057823
caaacacctaac

SEQ ID NO: 369784 - DNA, 12 bp, Artificial Sequence
  Oligonucleotide primer for the detection of SNP TSC0057823
atatagtttaag

SEQ ID NO: 369785 - DNA, 12 bp, Artificial Sequence
  Oligonucleotide primer for the detection of SNP TSC0057824
ctcctccactcc

SEQ ID NO: 369786 - DNA, 12 bp, Artificial Sequence
  Oligonucleotide primer for the detection of SNP TSC0057824
agttatttgatg

SEQ ID NO: 369787 - DNA, 12 bp, Artificial Sequence
  Oligonucleotide primer for the detection of SNP TSC0057824
aattacctaata

SEQ ID NO: 369788 - DNA, 12 bp, Artificial Sequence
  Oligonucleotide primer for the detection of SNP TSC0057825
tatctcctttct

SEQ ID NO: 369789 - DNA, 12 bp, Artificial Sequence
  Oligonucleotide primer for the detection of SNP TSC0057825
attttttattga

SEQ ID NO: 369790 - DNA, 12 bp, Artificial Sequence
  Oligonucleotide primer for the detection of SNP TSC0057827
catacatacact

SEQ ID NO: 369791 - DNA, 12 bp, Artificial Sequence
  Oligonucleotide primer for the detection of SNP TSC0057827
catacatacgct

SEQ ID NO: 369792 - DNA, 12 bp, Artificial Sequence
  Oligonucleotide primer for the detection of SNP TSC0057827
aataagaaatga

SEQ ID NO: 369793 - DNA, 12 bp, Artificial Sequence
  Oligonucleotide primer for the detection of SNP TSC0057827
aataagaaacga

SEQ ID NO: 369794 - DNA, 12 bp, Artificial Sequence
  Oligonucleotide primer for the detection of SNP TSC0057828
aacaaccatcgt

SEQ ID NO: 369795 - DNA, 12 bp, Artificial Sequence
  Oligonucleotide primer for the detection of SNP TSC0057828
atattgagattg

SEQ ID NO: 369796 - DNA, 12 bp, Artificial Sequence
  Oligonucleotide primer for the detection of SNP TSC0057828
gatagttattgt

SEQ ID NO: 369797 - DNA, 12 bp, Artificial Sequence
  Oligonucleotide primer for the detection of SNP TSC0057828
gatagttatcgt

SEQ ID NO: 369798 - DNA, 12 bp, Artificial Sequence
  Oligonucleotide primer for the detection of SNP TSC0057829
ataataataacc

SEQ ID NO: 369799 - DNA, 12 bp, Artificial Sequence
  Oligonucleotide primer for the detection of SNP TSC0057829
tggttgtttatg

SEQ ID NO: 369800 - DNA, 12 bp, Artificial Sequence
  Oligonucleotide primer for the detection of SNP TSC0057830
ttattagttatt

SEQ ID NO: 369801 - DNA, 12 bp, Artificial Sequence
  Oligonucleotide primer for the detection of SNP TSC0057830
tattaattatta

SEQ ID NO: 369802 - DNA, 12 bp, Artificial Sequence
  Oligonucleotide primer for the detection of SNP TSC0057830
aagagattaata

SEQ ID NO: 369803 - DNA, 12 bp, Artificial Sequence
  Oligonucleotide primer for the detection of SNP TSC0000226
tattttgaggta

SEQ ID NO: 369804 - DNA, 12 bp, Artificial Sequence
  Oligonucleotide primer for the detection of SNP TSC0057831
atacccaaatac

SEQ ID NO: 369805 - DNA, 12 bp, Artificial Sequence
  Oligonucleotide primer for the detection of SNP TSC0057832
cctaaaacctaa

SEQ ID NO: 369806 - DNA, 12 bp, Artificial Sequence
  Oligonucleotide primer for the detection of SNP TSC0057832
aggtgaatttag

SEQ ID NO: 369807 - DNA, 12 bp, Artificial Sequence
  Oligonucleotide primer for the detection of SNP TSC0057832
aaataaatccaa

SEQ ID NO: 369808 - DNA, 12 bp, Artificial Sequence
  Oligonucleotide primer for the detection of SNP TSC0057833
gggagatgtatt

SEQ ID NO: 369809 - DNA, 12 bp, Artificial Sequence
  Oligonucleotide primer for the detection of SNP TSC0057833
ggaggagatttg

SEQ ID NO: 369810 - DNA, 12 bp, Artificial Sequence
  Oligonucleotide primer for the detection of SNP TSC0057834
caatcacttcac

SEQ ID NO: 369811 - DNA, 12 bp, Artificial Sequence
  Oligonucleotide primer for the detection of SNP TSC0057834
caatcgcttcac

SEQ ID NO: 369812 - DNA, 12 bp, Artificial Sequence
  Oligonukleotid-Primer
aggttttgtgtg

SEQ ID NO: 369813 - DNA, 12 bp, Artificial Sequence
  Oligonucleotide primer for the detection of SNP TSC0057834
aggttttgcgtg

SEQ ID NO: 369814 - DNA, 12 bp, Artificial Sequence
  Oligonucleotide primer for the detection of SNP TSC0057834
aaatcctacata

SEQ ID NO: 369815 - DNA, 12 bp, Artificial Sequence
  Oligonucleotide primer for the detection of SNP TSC0057834
aaatcctacgta

SEQ ID NO: 369816 - DNA, 12 bp, Artificial Sequence
  Oligonucleotide primer for the detection of SNP TSC0057834
tagttgttttat

SEQ ID NO: 369817 - DNA, 12 bp, Artificial Sequence
  Oligonucleotide primer for the detection of SNP TSC0057834
tagtcgttttat

SEQ ID NO: 369818 - DNA, 12 bp, Artificial Sequence
  Oligonucleotide primer for the detection of SNP TSC0057835
ataccctataat

SEQ ID NO: 369819 - DNA, 12 bp, Artificial Sequence
  Oligonucleotide primer for the detection of SNP TSC0057835
gagagagtttta

SEQ ID NO: 369820 - DNA, 12 bp, Artificial Sequence
  Oligonucleotide primer for the detection of SNP TSC0057836
ttataccacttc

SEQ ID NO: 369821 - DNA, 12 bp, Artificial Sequence
  Oligonucleotide primer for the detection of SNP TSC0057836
ttgtgttatttt

SEQ ID NO: 369822 - DNA, 12 bp, Artificial Sequence
  Oligonucleotide primer for the detection of SNP TSC0057837
ttaaataagtga

SEQ ID NO: 369823 - DNA, 12 bp, Artificial Sequence
  Oligonucleotide primer for the detection of SNP TSC0057838
aactaattacct

SEQ ID NO: 369824 - DNA, 12 bp, Artificial Sequence
  Oligonucleotide primer for the detection of SNP TSC0057838
tttatacttaat

SEQ ID NO: 369825 - DNA, 12 bp, Artificial Sequence
  Oligonucleotide primer for the detection of SNP TSC0057838
aattggttattt

SEQ ID NO: 369826 - DNA, 12 bp, Artificial Sequence
  Oligonucleotide primer for the detection of SNP TSC0057839
acttaaacaatt

SEQ ID NO: 369827 - DNA, 12 bp, Artificial Sequence
  Oligonucleotide primer for the detection of SNP TSC0057839
acttaaacgatt

SEQ ID NO: 369828 - DNA, 12 bp, Artificial Sequence
  Oligonucleotide primer for the detection of SNP TSC0057839
gataaggtaaga

SEQ ID NO: 369829 - DNA, 12 bp, Artificial Sequence
  Oligonucleotide primer for the detection of SNP TSC0057840
ggttagattttt

SEQ ID NO: 369830 - DNA, 12 bp, Artificial Sequence
  Oligonucleotide primer for the detection of SNP TSC0057840
aactaaattttt

SEQ ID NO: 369831 - DNA, 12 bp, Artificial Sequence
  Oligonucleotide primer for the detection of SNP TSC0004861
taacttataaat

SEQ ID NO: 369832 - DNA, 12 bp, Artificial Sequence
  Oligonucleotide primer for the detection of SNP TSC0057842
taaatttcacat

SEQ ID NO: 369833 - DNA, 12 bp, Artificial Sequence
  Oligonucleotide primer for the detection of SNP TSC0057842
ttatagaagaag

SEQ ID NO: 369834 - DNA, 12 bp, Artificial Sequence
  Oligonucleotide primer for the detection of SNP TSC0057843
ctcttcaaatcc

SEQ ID NO: 369835 - DNA, 12 bp, Artificial Sequence
  Oligonucleotide primer for the detection of SNP TSC0057843
ctcttcgaatcc

SEQ ID NO: 369836 - DNA, 12 bp, Artificial Sequence
  Oligonucleotide primer for the detection of SNP TSC0057843
tgttggtggaga

SEQ ID NO: 369837 - DNA, 12 bp, Artificial Sequence
  Oligonucleotide primer for the detection of SNP TSC0057844
tttcacaaataa

SEQ ID NO: 369838 - DNA, 12 bp, Artificial Sequence
  Oligonucleotide primer for the detection of SNP TSC0057844
taatttgtttat

SEQ ID NO: 369839 - DNA, 12 bp, Artificial Sequence
  Oligonucleotide primer for the detection of SNP TSC0057844
ctaacttattta

SEQ ID NO: 369840 - DNA, 12 bp, Artificial Sequence
  Oligonucleotide primer for the detection of SNP TSC0057844
gtttttataaat

SEQ ID NO: 369841 - DNA, 12 bp, Artificial Sequence
  Oligonucleotide primer for the detection of SNP TSC0005586
acctccctaaac

SEQ ID NO: 369842 - DNA, 12 bp, Artificial Sequence
  Oligonucleotide primer for the detection of SNP TSC0005586
tgtgtaaattga

SEQ ID NO: 369843 - DNA, 12 bp, Artificial Sequence
  Oligonucleotide primer for the detection of SNP TSC0005586
tgtgtaaatcga

SEQ ID NO: 369844 - DNA, 12 bp, Artificial Sequence
  Oligonucleotide primer for the detection of SNP TSC0001462
ccttacttttat

SEQ ID NO: 369845 - DNA, 12 bp, Artificial Sequence
  Oligonucleotide primer for the detection of SNP TSC0001462
ggaaatatggga

SEQ ID NO: 369846 - DNA, 12 bp, Artificial Sequence
  Oligonucleotide primer for the detection of SNP TSC0001462
ggaaatacggga

SEQ ID NO: 369847 - DNA, 12 bp, Artificial Sequence
  Oligonucleotide primer for the detection of SNP TSC0001463
taattaaattta

SEQ ID NO: 369848 - DNA, 12 bp, Artificial Sequence
  Oligonucleotide primer for the detection of SNP TSC0001463
gtagtaggtttg

SEQ ID NO: 369849 - DNA, 12 bp, Artificial Sequence
  Oligonucleotide primer for the detection of SNP TSC0057847
tatatacttttt

SEQ ID NO: 369850 - DNA, 12 bp, Artificial Sequence
  Oligonucleotide primer for the detection of SNP TSC0057848
caaaattaaacc

SEQ ID NO: 369851 - DNA, 12 bp, Artificial Sequence
  Oligonucleotide primer for the detection of SNP TSC0057848
cgaaattaaacc

SEQ ID NO: 369852 - DNA, 12 bp, Artificial Sequence
  Oligonucleotide primer for the detection of SNP TSC0057848
tgagattgggtt

SEQ ID NO: 369853 - DNA, 12 bp, Artificial Sequence
  Oligonucleotide primer for the detection of SNP TSC0057848
cgagattgggtt

SEQ ID NO: 369854 - DNA, 12 bp, Artificial Sequence
  Oligonucleotide primer for the detection of SNP TSC0057849
atattaaatttc

SEQ ID NO: 369855 - DNA, 12 bp, Artificial Sequence
  Oligonucleotide primer for the detection of SNP TSC0057849
attagaagtttt

SEQ ID NO: 369856 - DNA, 12 bp, Artificial Sequence
  Oligonucleotide primer for the detection of SNP TSC0057849
attaaaaatttc

SEQ ID NO: 369857 - DNA, 12 bp, Artificial Sequence
  Oligonucleotide primer for the detection of SNP TSC0057849
atattgaatttt

SEQ ID NO: 369858 - DNA, 12 bp, Artificial Sequence
  Oligonucleotide primer for the detection of SNP TSC0057850
ataactccattt

SEQ ID NO: 369859 - DNA, 12 bp, Artificial Sequence
  Oligonucleotide primer for the detection of SNP TSC0057850
gaatagataagg

SEQ ID NO: 369860 - DNA, 12 bp, Artificial Sequence
  Oligonucleotide primer for the detection of SNP TSC0057851
aaaaacctaatc

SEQ ID NO: 369861 - DNA, 12 bp, Artificial Sequence
  Oligonucleotide primer for the detection of SNP TSC0057851
ttaaatagttta

SEQ ID NO: 369862 - DNA, 12 bp, Artificial Sequence
  Oligonucleotide primer for the detection of SNP TSC0057853
atcctctccctt

SEQ ID NO: 369863 - DNA, 12 bp, Artificial Sequence
  Oligonucleotide primer for the detection of SNP TSC0057853
tataggtattag

SEQ ID NO: 369864 - DNA, 12 bp, Artificial Sequence
  Oligonucleotide primer for the detection of SNP TSC0057854
cttcccatttac

SEQ ID NO: 369865 - DNA, 12 bp, Artificial Sequence
  Oligonucleotide primer for the detection of SNP TSC0057854
tgagatttttta

SEQ ID NO: 369866 - DNA, 12 bp, Artificial Sequence
  Oligonucleotide primer for the detection of SNP TSC0057855
taatatagaaat

SEQ ID NO: 369867 - DNA, 12 bp, Artificial Sequence
  Oligonucleotide primer for the detection of SNP TSC0057855
ctaacataaaaa

SEQ ID NO: 369868 - DNA, 12 bp, Artificial Sequence
  Oligonucleotide primer for the detection of SNP TSC0057856
tctacctttatt

SEQ ID NO: 369869 - DNA, 12 bp, Artificial Sequence
  Oligonucleotide primer for the detection of SNP TSC0057856
agatataggtta

SEQ ID NO: 369870 - DNA, 12 bp, Artificial Sequence
  Oligonucleotide primer for the detection of SNP TSC0057857
agttggagtttt

SEQ ID NO: 369871 - DNA, 12 bp, Artificial Sequence
  Oligonucleotide primer for the detection of SNP TSC0057857
agtcggagtttt

SEQ ID NO: 369872 - DNA, 12 bp, Artificial Sequence
  Oligonucleotide primer for the detection of SNP TSC0057857
agttggagtttc

SEQ ID NO: 369873 - DNA, 12 bp, Artificial Sequence
  Oligonucleotide primer for the detection of SNP TSC0057857
agtcggagtttc

SEQ ID NO: 369874 - DNA, 12 bp, Artificial Sequence
  Oligonucleotide primer for the detection of SNP TSC0057857
taatcaaaatct

SEQ ID NO: 369875 - DNA, 12 bp, Artificial Sequence
  Oligonucleotide primer for the detection of SNP TSC0057857
taatcgaaatct

SEQ ID NO: 369876 - DNA, 12 bp, Artificial Sequence
  Oligonucleotide primer for the detection of SNP TSC0057857
ttaggtagtaga

SEQ ID NO: 369877 - DNA, 12 bp, Artificial Sequence
  Oligonucleotide primer for the detection of SNP TSC0057858
ccttccaaattc

SEQ ID NO: 369878 - DNA, 12 bp, Artificial Sequence
  Oligonucleotide primer for the detection of SNP TSC0057858
gaggtagaagaa

SEQ ID NO: 369879 - DNA, 12 bp, Artificial Sequence
  Oligonucleotide primer for the detection of SNP TSC0057859
accaatcaatat

SEQ ID NO: 369880 - DNA, 12 bp, Artificial Sequence
  Oligonucleotide primer for the detection of SNP TSC0057859
ttttgggtaata

SEQ ID NO: 369881 - DNA, 12 bp, Artificial Sequence
  Oligonucleotide primer for the detection of SNP TSC0057859
ctttaaacaaca

SEQ ID NO: 369882 - DNA, 12 bp, Artificial Sequence
  Oligonucleotide primer for the detection of SNP TSC0057859
attagttagtgt

SEQ ID NO: 369883 - DNA, 12 bp, Artificial Sequence
  Oligonucleotide primer for the detection of SNP TSC0057860
atttttatatgt

SEQ ID NO: 369884 - DNA, 12 bp, Artificial Sequence
  Oligonucleotide primer for the detection of SNP TSC0057860
acttttatatat

SEQ ID NO: 369885 - DNA, 12 bp, Artificial Sequence
  Oligonucleotide primer for the detection of SNP TSC0057860
gtgtttgaagat

SEQ ID NO: 369886 - DNA, 12 bp, Artificial Sequence
  Oligonucleotide primer for the detection of SNP TSC0057861
ttaatattccat

SEQ ID NO: 369887 - DNA, 12 bp, Artificial Sequence
  Oligonucleotide primer for the detection of SNP TSC0057861
atttattaatag

SEQ ID NO: 369888 - DNA, 12 bp, Artificial Sequence
  Oligonucleotide primer for the detection of SNP TSC0057867
ctccaatctttt

SEQ ID NO: 369889 - DNA, 12 bp, Artificial Sequence
  Oligonucleotide primer for the detection of SNP TSC0057868
aaacaaatctta

SEQ ID NO: 369890 - DNA, 12 bp, Artificial Sequence
  Oligonucleotide primer for the detection of SNP TSC0057868
tttttgtaaaat

SEQ ID NO: 369891 - DNA, 12 bp, Artificial Sequence
  Oligonucleotide primer for the detection of SNP TSC0057868
ctttataaaata

SEQ ID NO: 369892 - DNA, 12 bp, Artificial Sequence
  Oligonucleotide primer for the detection of SNP TSC0057868
ggagtaaatttt

SEQ ID NO: 369893 - DNA, 12 bp, Artificial Sequence
  Oligonucleotide primer for the detection of SNP TSC0057870
atagtttgttgt

SEQ ID NO: 369894 - DNA, 12 bp, Artificial Sequence
  Oligonucleotide primer for the detection of SNP TSC0057870
acttactataaa

SEQ ID NO: 369895 - DNA, 12 bp, Artificial Sequence
  Oligonucleotide primer for the detection of SNP TSC0057870
taaaaagtgata

SEQ ID NO: 369896 - DNA, 12 bp, Artificial Sequence
  Oligonucleotide primer for the detection of SNP TSC0057871
atttctatcact

SEQ ID NO: 369897 - DNA, 12 bp, Artificial Sequence
  Oligonucleotide primer for the detection of SNP TSC0057871
taaaaaaataga

SEQ ID NO: 369898 - DNA, 12 bp, Artificial Sequence
  Oligonucleotide primer for the detection of SNP TSC0057872
atcatctctcac

SEQ ID NO: 369899 - DNA, 12 bp, Artificial Sequence
  Oligonucleotide primer for the detection of SNP TSC0057872
gttgaatggtgt

SEQ ID NO: 369900 - DNA, 12 bp, Artificial Sequence
  Oligonucleotide primer for the detection of SNP TSC0057873
taatatatatct

SEQ ID NO: 369901 - DNA, 12 bp, Artificial Sequence
  Oligonucleotide primer for the detection of SNP TSC0057874
aaaactacctaa

SEQ ID NO: 369902 - DNA, 12 bp, Artificial Sequence
  Oligonucleotide primer for the detection of SNP TSC0057874
gaaactacctaa

SEQ ID NO: 369903 - DNA, 12 bp, Artificial Sequence
  Oligonucleotide primer for the detection of SNP TSC0057874
gaaataggaatt

SEQ ID NO: 369904 - DNA, 12 bp, Artificial Sequence
  Oligonucleotide primer for the detection of SNP TSC0057874
aaaacaaaaacc

SEQ ID NO: 369905 - DNA, 12 bp, Artificial Sequence
  Oligonucleotide primer for the detection of SNP TSC0057874
ggggttatttgg

SEQ ID NO: 369906 - DNA, 12 bp, Artificial Sequence
  Oligonucleotide primer for the detection of SNP TSC0057879
accttacccaac

SEQ ID NO: 369907 - DNA, 12 bp, Artificial Sequence
  Oligonucleotide primer for the detection of SNP TSC0057879
gttatgttttga

SEQ ID NO: 369908 - DNA, 12 bp, Artificial Sequence
  Oligonucleotide primer for the detection of SNP TSC0057880
tattttgaatag

SEQ ID NO: 369909 - DNA, 12 bp, Artificial Sequence
  Oligonucleotide primer for the detection of SNP TSC0057881
attttttcacta

SEQ ID NO: 369910 - DNA, 12 bp, Artificial Sequence
  Oligonucleotide primer for the detection of SNP TSC0057881
cccacttctaat

SEQ ID NO: 369911 - DNA, 12 bp, Artificial Sequence
  Oligonucleotide primer for the detection of SNP TSC0057883
tcttcccttaaa

SEQ ID NO: 369912 - DNA, 12 bp, Artificial Sequence
  Oligonucleotide primer for the detection of SNP TSC0057883
tgggagagattg

SEQ ID NO: 369913 - DNA, 12 bp, Artificial Sequence
  Oligonucleotide primer for the detection of SNP TSC0057884
cataattttccc

SEQ ID NO: 369914 - DNA, 12 bp, Artificial Sequence
  Oligonucleotide primer for the detection of SNP TSC0057884
gataagataaaa

SEQ ID NO: 369915 - DNA, 12 bp, Artificial Sequence
  Oligonucleotide primer for the detection of SNP TSC0007198
atactacttact

SEQ ID NO: 369916 - DNA, 12 bp, Artificial Sequence
  Oligonucleotide primer for the detection of SNP TSC0007198
agtttatttgag

SEQ ID NO: 369917 - DNA, 12 bp, Artificial Sequence
  Oligonucleotide primer for the detection of SNP TSC0007198
aattcacttaaa

SEQ ID NO: 369918 - DNA, 12 bp, Artificial Sequence
  Oligonucleotide primer for the detection of SNP TSC0007198
gtattgtttgtt

SEQ ID NO: 369919 - DNA, 12 bp, Artificial Sequence
  Oligonucleotide primer for the detection of SNP TSC0057885
atattttttaag

SEQ ID NO: 369920 - DNA, 12 bp, Artificial Sequence
  Oligonucleotide primer for the detection of SNP TSC0057886
tcctctattttt

SEQ ID NO: 369921 - DNA, 12 bp, Artificial Sequence
  Oligonucleotide primer for the detection of SNP TSC0057886
atcctactccta

SEQ ID NO: 369922 - DNA, 12 bp, Artificial Sequence
  Oligonucleotide primer for the detection of SNP TSC0007536
ctaaaatactaa

SEQ ID NO: 369923 - DNA, 12 bp, Artificial Sequence
  Oligonucleotide primer for the detection of SNP TSC0007536
ttgggatgttaa

SEQ ID NO: 369924 - DNA, 12 bp, Artificial Sequence
  Oligonucleotide primer for the detection of SNP TSC0057887
tcaaacaaaacc

SEQ ID NO: 369925 - DNA, 12 bp, Artificial Sequence
  Oligonucleotide primer for the detection of SNP TSC0057887
agggagaattta

SEQ ID NO: 369926 - DNA, 12 bp, Artificial Sequence
  Oligonucleotide primer for the detection of SNP TSC0057888
cttatatcttat

SEQ ID NO: 369927 - DNA, 12 bp, Artificial Sequence
  Oligonucleotide primer for the detection of SNP TSC0057888
agaggaaaataa

SEQ ID NO: 369928 - DNA, 12 bp, Artificial Sequence
  Oligonucleotide primer for the detection of SNP TSC0057889
actaaatataac

SEQ ID NO: 369929 - DNA, 12 bp, Artificial Sequence
  Oligonucleotide primer for the detection of SNP TSC0057890
aatattatacca

SEQ ID NO: 369930 - DNA, 12 bp, Artificial Sequence
  Oligonucleotide primer for the detection of SNP TSC0057890
ttattttattcg

SEQ ID NO: 369931 - DNA, 12 bp, Artificial Sequence
  Oligonucleotide primer for the detection of SNP TSC0057890
ttatttcattca

SEQ ID NO: 369932 - DNA, 12 bp, Artificial Sequence
  Oligonucleotide primer for the detection of SNP TSC0057890
ttatttcattcg

SEQ ID NO: 369933 - DNA, 12 bp, Artificial Sequence
  Oligonucleotide primer for the detection of SNP TSC0057890
aatattatgtta

SEQ ID NO: 369934 - DNA, 12 bp, Artificial Sequence
  Oligonucleotide primer for the detection of SNP TSC0057891
aaacgaaaaacc

SEQ ID NO: 369935 - DNA, 12 bp, Artificial Sequence
  Oligonucleotide primer for the detection of SNP TSC0057892
aacatttacatt

SEQ ID NO: 369936 - DNA, 12 bp, Artificial Sequence
  Oligonucleotide primer for the detection of SNP TSC0057894
tttttattacat

SEQ ID NO: 369937 - DNA, 12 bp, Artificial Sequence
  Oligonucleotide primer for the detection of SNP TSC0057894
tttttattacgt

SEQ ID NO: 369938 - DNA, 12 bp, Artificial Sequence
  Oligonucleotide primer for the detection of SNP TSC0057896
tccttatttata

SEQ ID NO: 369939 - DNA, 12 bp, Artificial Sequence
  Oligonucleotide primer for the detection of SNP TSC0057896
attatataagtt

SEQ ID NO: 369940 - DNA, 12 bp, Artificial Sequence
  Oligonucleotide primer for the detection of SNP TSC0057898
cttccctttcta

SEQ ID NO: 369941 - DNA, 12 bp, Artificial Sequence
  Oligonucleotide primer for the detection of SNP TSC0057898
gggagaaatggt

SEQ ID NO: 369942 - DNA, 12 bp, Artificial Sequence
  Oligonucleotide primer for the detection of SNP TSC0057899
tttaatctttct

SEQ ID NO: 369943 - DNA, 12 bp, Artificial Sequence
  Oligonucleotide primer for the detection of SNP TSC0057899
gaaattatttaa

SEQ ID NO: 369944 - DNA, 12 bp, Artificial Sequence
  Oligonucleotide primer for the detection of SNP TSC0057900
caatctacaaac

SEQ ID NO: 369945 - DNA, 12 bp, Artificial Sequence
  Oligonucleotide primer for the detection of SNP TSC0057900
tagttagagaag

SEQ ID NO: 369946 - DNA, 12 bp, Artificial Sequence
  Oligonucleotide primer for the detection of SNP TSC0057901
tgagaaatagta

SEQ ID NO: 369947 - DNA, 12 bp, Artificial Sequence
  Oligonucleotide primer for the detection of SNP TSC0057902
atccatcttata

SEQ ID NO: 369948 - DNA, 12 bp, Artificial Sequence
  Oligonucleotide primer for the detection of SNP TSC0057902
atgagtgttttg

SEQ ID NO: 369949 - DNA, 12 bp, Artificial Sequence
  Oligonucleotide primer for the detection of SNP TSC0057904
atccaaacaaat

SEQ ID NO: 369950 - DNA, 12 bp, Artificial Sequence
  Oligonucleotide primer for the detection of SNP TSC0057904
ttgtttatgtga

SEQ ID NO: 369951 - DNA, 12 bp, Artificial Sequence
  Oligonucleotide primer for the detection of SNP TSC0057904
ttacctatataa

SEQ ID NO: 369952 - DNA, 12 bp, Artificial Sequence
  Oligonucleotide primer for the detection of SNP TSC0057904
atttagataagt

SEQ ID NO: 369953 - DNA, 12 bp, Artificial Sequence
  Oligonucleotide primer for the detection of SNP TSC0057905
caatatttaaca

SEQ ID NO: 369954 - DNA, 12 bp, Artificial Sequence
  Oligonucleotide primer for the detection of SNP TSC0057905
gatgttaggtat

SEQ ID NO: 369955 - DNA, 12 bp, Artificial Sequence
  Oligonucleotide primer for the detection of SNP TSC0057905
gacgttaggtat

SEQ ID NO: 369956 - DNA, 12 bp, Artificial Sequence
  Oligonucleotide primer for the detection of SNP TSC0057905
aacgccaaacac

SEQ ID NO: 369957 - DNA, 12 bp, Artificial Sequence
  Oligonucleotide primer for the detection of SNP TSC0057905
agtgtttagtat

SEQ ID NO: 369958 - DNA, 12 bp, Artificial Sequence
  Oligonucleotide primer for the detection of SNP TSC0057905
agtgtttagtac

SEQ ID NO: 369959 - DNA, 12 bp, Artificial Sequence
  Oligonucleotide primer for the detection of SNP TSC0057906
acacccaaccta

SEQ ID NO: 369960 - DNA, 12 bp, Artificial Sequence
  Oligonucleotide primer for the detection of SNP TSC0057906
acgcccaaccta

SEQ ID NO: 369961 - DNA, 12 bp, Artificial Sequence
  Oligonucleotide primer for the detection of SNP TSC0057906
aaatttttgaat

SEQ ID NO: 369962 - DNA, 12 bp, Artificial Sequence
  Oligonucleotide primer for the detection of SNP TSC0057906
aaatttctaaac

SEQ ID NO: 369963 - DNA, 12 bp, Artificial Sequence
  Oligonucleotide primer for the detection of SNP TSC0057906
tgcgtttagttt

SEQ ID NO: 369964 - DNA, 12 bp, Artificial Sequence
  Oligonucleotide primer for the detection of SNP TSC0057908
attaaaaatata

SEQ ID NO: 369965 - DNA, 12 bp, Artificial Sequence
  Oligonucleotide primer for the detection of SNP TSC0057909
ttactcttatca

SEQ ID NO: 369966 - DNA, 12 bp, Artificial Sequence
  Oligonucleotide primer for the detection of SNP TSC0057909
ttactcttatcg

SEQ ID NO: 369967 - DNA, 12 bp, Artificial Sequence
  Oligonucleotide primer for the detection of SNP TSC0057909
ttgtttttgttg

SEQ ID NO: 369968 - DNA, 12 bp, Artificial Sequence
  Oligonucleotide primer for the detection of SNP TSC0057909
ttgtttttgtcg

SEQ ID NO: 369969 - DNA, 12 bp, Artificial Sequence
  Oligonucleotide primer for the detection of SNP TSC0057913
ttttgatagata

SEQ ID NO: 369970 - DNA, 12 bp, Artificial Sequence
  Oligonucleotide primer for the detection of SNP TSC0057913
ttctaataaata

SEQ ID NO: 369971 - DNA, 12 bp, Artificial Sequence
  Oligonucleotide primer for the detection of SNP TSC0057913
aattaagaatat

SEQ ID NO: 369972 - DNA, 12 bp, Artificial Sequence
  Oligonucleotide primer for the detection of SNP TSC0057914
cctattattttt

SEQ ID NO: 369973 - DNA, 12 bp, Artificial Sequence
  Oligonucleotide primer for the detection of SNP TSC0057914
aataaggtaatg

SEQ ID NO: 369974 - DNA, 12 bp, Artificial Sequence
  Oligonucleotide primer for the detection of SNP TSC0057915
tctaatacaaac

SEQ ID NO: 369975 - DNA, 12 bp, Artificial Sequence
  Oligonucleotide primer for the detection of SNP TSC0057915
atatattaattg

SEQ ID NO: 369976 - DNA, 12 bp, Artificial Sequence
  Oligonucleotide primer for the detection of SNP TSC0057917
tttaaaacctat

SEQ ID NO: 369977 - DNA, 12 bp, Artificial Sequence
  Oligonucleotide primer for the detection of SNP TSC0057917
ggggaaatatta

SEQ ID NO: 369978 - DNA, 12 bp, Artificial Sequence
  Oligonucleotide primer for the detection of SNP TSC0057918
atatacaaaatt

SEQ ID NO: 369979 - DNA, 12 bp, Artificial Sequence
  Oligonucleotide primer for the detection of SNP TSC0057918
tattttagtata

SEQ ID NO: 369980 - DNA, 12 bp, Artificial Sequence
  Oligonucleotide primer for the detection of SNP TSC0057919
cttcatatattc

SEQ ID NO: 369981 - DNA, 12 bp, Artificial Sequence
  Oligonucleotide primer for the detection of SNP TSC0057919
aaagagtgtaat

SEQ ID NO: 369982 - DNA, 12 bp, Artificial Sequence
  Oligonucleotide primer for the detection of SNP TSC0057920
cacccttctatc

SEQ ID NO: 369983 - DNA, 12 bp, Artificial Sequence
  Oligonucleotide primer for the detection of SNP TSC0057920
ttaggttgttta

SEQ ID NO: 369984 - DNA, 12 bp, Artificial Sequence
  Oligonucleotide primer for the detection of SNP TSC0057920
ttaggtcgttta

SEQ ID NO: 369985 - DNA, 12 bp, Artificial Sequence
  Oligonucleotide primer for the detection of SNP TSC0057921
cacatttttctt

SEQ ID NO: 369986 - DNA, 12 bp, Artificial Sequence
  Oligonucleotide primer for the detection of SNP TSC0057921
attttgaattaa

SEQ ID NO: 369987 - DNA, 12 bp, Artificial Sequence
  Oligonucleotide primer for the detection of SNP TSC0057922
aatctacctatc

SEQ ID NO: 369988 - DNA, 12 bp, Artificial Sequence
  Oligonucleotide primer for the detection of SNP TSC0057923
agaattataatg

SEQ ID NO: 369989 - DNA, 12 bp, Artificial Sequence
  Oligonucleotide primer for the detection of SNP TSC0057923
agaattataacg

SEQ ID NO: 369990 - DNA, 12 bp, Artificial Sequence
  Oligonucleotide primer for the detection of SNP TSC0005325
cttaataaacaa

SEQ ID NO: 369991 - DNA, 12 bp, Artificial Sequence
  Oligonucleotide primer for the detection of SNP TSC0005325
cctcaatcattt

SEQ ID NO: 369992 - DNA, 12 bp, Artificial Sequence
  Oligonucleotide primer for the detection of SNP TSC0005325
tttggtgagtag

SEQ ID NO: 369993 - DNA, 12 bp, Artificial Sequence
  Oligonucleotide primer for the detection of SNP TSC0057925
tgtgtgattatt

SEQ ID NO: 369994 - DNA, 12 bp, Artificial Sequence
  Oligonucleotide primer for the detection of SNP TSC0057925
cttatataatta

SEQ ID NO: 369995 - DNA, 12 bp, Artificial Sequence
  Oligonucleotide primer for the detection of SNP TSC0057925
aaaataataagg

SEQ ID NO: 369996 - DNA, 12 bp, Artificial Sequence
  Oligonucleotide primer for the detection of SNP TSC0057926
tctaaaataact

SEQ ID NO: 369997 - DNA, 12 bp, Artificial Sequence
  Oligonucleotide primer for the detection of SNP TSC0057926
atatttacttca

SEQ ID NO: 369998 - DNA, 12 bp, Artificial Sequence
  Oligonucleotide primer for the detection of SNP TSC0057926
tttaaagtgatt

SEQ ID NO: 369999 - DNA, 12 bp, Artificial Sequence
  Oligonucleotide primer for the detection of SNP TSC0057927
tttatattataa

SEQ ID NO: 370000 - DNA, 12 bp, Artificial Sequence
  Oligonucleotide primer for the detection of SNP TSC0057927
cttacactataa

SEQ ID NO: 370001 - DNA, 12 bp, Artificial Sequence
  Oligonucleotide primer for the detection of SNP TSC0057928
tagaaaagttga

SEQ ID NO: 370002 - DNA, 12 bp, Artificial Sequence
  Oligonucleotide primer for the detection of SNP TSC0057929
aatcacctaaat

SEQ ID NO: 370003 - DNA, 12 bp, Artificial Sequence
  Oligonucleotide primer for the detection of SNP TSC0057929
aatcgcctaaat

SEQ ID NO: 370004 - DNA, 12 bp, Artificial Sequence
  Oligonucleotide primer for the detection of SNP TSC0057932
tctcaaaccttc

SEQ ID NO: 370005 - DNA, 12 bp, Artificial Sequence
  Oligonucleotide primer for the detection of SNP TSC0057934
ataactattttt

SEQ ID NO: 370006 - DNA, 12 bp, Artificial Sequence
  Oligonucleotide primer for the detection of SNP TSC0057934
tgaaaataaaat

SEQ ID NO: 370007 - DNA, 12 bp, Artificial Sequence
  Oligonucleotide primer for the detection of SNP TSC0057934
atggttgttttt

SEQ ID NO: 370008 - DNA, 12 bp, Artificial Sequence
  Oligonucleotide primer for the detection of SNP TSC0057936
aacaaaaatcaa

SEQ ID NO: 370009 - DNA, 12 bp, Artificial Sequence
  Oligonucleotide primer for the detection of SNP TSC0057936
ctttaattacat

SEQ ID NO: 370010 - DNA, 12 bp, Artificial Sequence
  Oligonucleotide primer for the detection of SNP TSC0057936
taaaagttagtt

SEQ ID NO: 370011 - DNA, 12 bp, Artificial Sequence
  Oligonucleotide primer for the detection of SNP TSC0057937
atacgataactc

SEQ ID NO: 370012 - DNA, 12 bp, Artificial Sequence
  Oligonucleotide primer for the detection of SNP TSC0057937
cttctctccata

SEQ ID NO: 370013 - DNA, 12 bp, Artificial Sequence
  Oligonucleotide primer for the detection of SNP TSC0057937
atatgatgattt

SEQ ID NO: 370014 - DNA, 12 bp, Artificial Sequence
  Oligonucleotide primer for the detection of SNP TSC0057937
atacgatgattt

SEQ ID NO: 370015 - DNA, 12 bp, Artificial Sequence
  Oligonucleotide primer for the detection of SNP TSC0057939
agtggtagttat

SEQ ID NO: 370016 - DNA, 12 bp, Artificial Sequence
  Oligonucleotide primer for the detection of SNP TSC0057939
agtaaataaatt

SEQ ID NO: 370017 - DNA, 12 bp, Artificial Sequence
  Oligonucleotide primer for the detection of SNP TSC0057940
tgtatataaaga

SEQ ID NO: 370018 - DNA, 12 bp, Artificial Sequence
  Oligonucleotide primer for the detection of SNP TSC0057940
tagataaataga

SEQ ID NO: 370019 - DNA, 12 bp, Artificial Sequence
  Oligonucleotide primer for the detection of SNP TSC0057941
aatgaaattaga

SEQ ID NO: 370020 - DNA, 12 bp, Artificial Sequence
  Oligonucleotide primer for the detection of SNP TSC0057941
atgtagagagag

SEQ ID NO: 370021 - DNA, 12 bp, Artificial Sequence
  Oligonucleotide primer for the detection of SNP TSC0057944
taaatataaaac

SEQ ID NO: 370022 - DNA, 12 bp, Artificial Sequence
  Oligonucleotide primer for the detection of SNP TSC0057944
taggtgtaaaat

SEQ ID NO: 370023 - DNA, 12 bp, Artificial Sequence
  Oligonucleotide primer for the detection of SNP TSC0057945
cataatctaaac

SEQ ID NO: 370024 - DNA, 12 bp, Artificial Sequence
  Oligonucleotide primer for the detection of SNP TSC0057945
tgtaaaataaag

SEQ ID NO: 370025 - DNA, 12 bp, Artificial Sequence
  Oligonucleotide primer for the detection of SNP TSC0057946
tattataataag

SEQ ID NO: 370026 - DNA, 12 bp, Artificial Sequence
  Oligonucleotide primer for the detection of SNP TSC0057947
cttaaataattt

SEQ ID NO: 370027 - DNA, 12 bp, Artificial Sequence
  Oligonucleotide primer for the detection of SNP TSC0057948
ataatacatact

SEQ ID NO: 370028 - DNA, 12 bp, Artificial Sequence
  Oligonucleotide primer for the detection of SNP TSC0057948
agtatatgtata

SEQ ID NO: 370029 - DNA, 12 bp, Artificial Sequence
  Oligonucleotide primer for the detection of SNP TSC0057956
atcaattataaa

SEQ ID NO: 370030 - DNA, 12 bp, Artificial Sequence
  Oligonucleotide primer for the detection of SNP TSC0057956
aaaatattttag

SEQ ID NO: 370031 - DNA, 12 bp, Artificial Sequence
  Oligonucleotide primer for the detection of SNP TSC0057956
aattataaattt

SEQ ID NO: 370032 - DNA, 12 bp, Artificial Sequence
  Oligonucleotide primer for the detection of SNP TSC0057959
ataattataatt

SEQ ID NO: 370033 - DNA, 12 bp, Artificial Sequence
  Oligonucleotide primer for the detection of SNP TSC0057959
taggtgttatta

SEQ ID NO: 370034 - DNA, 12 bp, Artificial Sequence
  Oligonucleotide primer for the detection of SNP TSC0057959
taggcgttatta

SEQ ID NO: 370035 - DNA, 12 bp, Artificial Sequence
  Oligonucleotide primer for the detection of SNP TSC0057961
atatactttctt

SEQ ID NO: 370036 - DNA, 12 bp, Artificial Sequence
  Oligonucleotide primer for the detection of SNP TSC0057962
cccataaaattt

SEQ ID NO: 370037 - DNA, 12 bp, Artificial Sequence
  Oligonucleotide primer for the detection of SNP TSC0057962
tttaggttatta

SEQ ID NO: 370038 - DNA, 12 bp, Artificial Sequence
  Oligonucleotide primer for the detection of SNP TSC0057963
aatcactacacc

SEQ ID NO: 370039 - DNA, 12 bp, Artificial Sequence
  Oligonucleotide primer for the detection of SNP TSC0057963
attagtagttgg

SEQ ID NO: 370040 - DNA, 12 bp, Artificial Sequence
  Oligonucleotide primer for the detection of SNP TSC0057963
attaataattaa

SEQ ID NO: 370041 - DNA, 12 bp, Artificial Sequence
  Oligonucleotide primer for the detection of SNP TSC0057966
taaaggaagagg

SEQ ID NO: 370042 - DNA, 12 bp, Artificial Sequence
  Oligonucleotide primer for the detection of SNP TSC0006492
cctttatatctt

SEQ ID NO: 370043 - DNA, 12 bp, Artificial Sequence
  Oligonucleotide primer for the detection of SNP TSC0006492
attagataagag

SEQ ID NO: 370044 - DNA, 12 bp, Artificial Sequence
  Oligonucleotide primer for the detection of SNP TSC0004775
cattacatatac

SEQ ID NO: 370045 - DNA, 12 bp, Artificial Sequence
  Oligonucleotide primer for the detection of SNP TSC0057968
atataagtaaaa

SEQ ID NO: 370046 - DNA, 12 bp, Artificial Sequence
  Oligonucleotide primer for the detection of SNP TSC0057969
ctttttcttttt

SEQ ID NO: 370047 - DNA, 12 bp, Artificial Sequence
  Oligonucleotide primer for the detection of SNP TSC0057973
ccatatacactt

SEQ ID NO: 370048 - DNA, 12 bp, Artificial Sequence
  Oligonucleotide primer for the detection of SNP TSC0057973
ccgtatacactt

SEQ ID NO: 370049 - DNA, 12 bp, Artificial Sequence
  Oligonucleotide primer for the detection of SNP TSC0057973
atattgttataa

SEQ ID NO: 370050 - DNA, 12 bp, Artificial Sequence
  Oligonucleotide primer for the detection of SNP TSC0057973
cattactataaa

SEQ ID NO: 370051 - DNA, 12 bp, Artificial Sequence
  Oligonucleotide primer for the detection of SNP TSC0057973
tgtgtgtatttt

SEQ ID NO: 370052 - DNA, 12 bp, Artificial Sequence
  Oligonucleotide primer for the detection of SNP TSC0057973
cgtgtgtatttt

SEQ ID NO: 370053 - DNA, 12 bp, Artificial Sequence
  Oligonucleotide primer for the detection of SNP TSC0057975
aaaatctactac

SEQ ID NO: 370054 - DNA, 12 bp, Artificial Sequence
  Oligonucleotide primer for the detection of SNP TSC0057975
tatttttatggt

SEQ ID NO: 370055 - DNA, 12 bp, Artificial Sequence
  Oligonucleotide primer for the detection of SNP TSC0057975
tatttttacggt

SEQ ID NO: 370056 - DNA, 12 bp, Artificial Sequence
  Oligonucleotide primer for the detection of SNP TSC0057975
catttttacaac

SEQ ID NO: 370057 - DNA, 12 bp, Artificial Sequence
  Oligonucleotide primer for the detection of SNP TSC0057975
catttttacgac

SEQ ID NO: 370058 - DNA, 12 bp, Artificial Sequence
  Oligonucleotide primer for the detection of SNP TSC0057975
aaaatttattat

SEQ ID NO: 370059 - DNA, 12 bp, Artificial Sequence
  Oligonucleotide primer for the detection of SNP TSC0057976
aaccaccttaaa

SEQ ID NO: 370060 - DNA, 12 bp, Artificial Sequence
  Oligonucleotide primer for the detection of SNP TSC0057976
gatgtttagatg

SEQ ID NO: 370061 - DNA, 12 bp, Artificial Sequence
  Oligonucleotide primer for the detection of SNP TSC0057978
cccacttcccaa

SEQ ID NO: 370062 - DNA, 12 bp, Artificial Sequence
  Oligonucleotide primer for the detection of SNP TSC0057978
gtttgtagttat

SEQ ID NO: 370063 - DNA, 12 bp, Artificial Sequence
  Oligonucleotide primer for the detection of SNP TSC0057978
cctataatcata

SEQ ID NO: 370064 - DNA, 12 bp, Artificial Sequence
  Oligonucleotide primer for the detection of SNP TSC0057979
atttccaaattc

SEQ ID NO: 370065 - DNA, 12 bp, Artificial Sequence
  Oligonucleotide primer for the detection of SNP TSC0057980
atttattttatg

SEQ ID NO: 370066 - DNA, 12 bp, Artificial Sequence
  Oligonucleotide primer for the detection of SNP TSC0057981
tttaatctaatt

SEQ ID NO: 370067 - DNA, 12 bp, Artificial Sequence
  Oligonucleotide primer for the detection of SNP TSC0057981
aaggattattta

SEQ ID NO: 370068 - DNA, 12 bp, Artificial Sequence
  Oligonucleotide primer for the detection of SNP TSC0057981
aaaaatcattta

SEQ ID NO: 370069 - DNA, 12 bp, Artificial Sequence
  Oligonucleotide primer for the detection of SNP TSC0057981
tttaatttgatt

SEQ ID NO: 370070 - DNA, 12 bp, Artificial Sequence
  Oligonucleotide primer for the detection of SNP TSC0057983
cacccctaaact

SEQ ID NO: 370071 - DNA, 12 bp, Artificial Sequence
  Oligonucleotide primer for the detection of SNP TSC0057983
tatagttcgtag

SEQ ID NO: 370072 - DNA, 12 bp, Artificial Sequence
  Oligonucleotide primer for the detection of SNP TSC0057983
cacaacccacaa

SEQ ID NO: 370073 - DNA, 12 bp, Artificial Sequence
  Oligonucleotide primer for the detection of SNP TSC0057983
cacaacccgcaa

SEQ ID NO: 370074 - DNA, 12 bp, Artificial Sequence
  Oligonucleotide primer for the detection of SNP TSC0057983
tatttttgggtt

SEQ ID NO: 370075 - DNA, 12 bp, Artificial Sequence
  Oligonucleotide primer for the detection of SNP TSC0057985
ttaaaaccataa

SEQ ID NO: 370076 - DNA, 12 bp, Artificial Sequence
  Oligonucleotide primer for the detection of SNP TSC0057985
ttctattttcta

SEQ ID NO: 370077 - DNA, 12 bp, Artificial Sequence
  Oligonucleotide primer for the detection of SNP TSC0057985
tagagttatagt

SEQ ID NO: 370078 - DNA, 12 bp, Artificial Sequence
  Oligonucleotide primer for the detection of SNP TSC0057986
cactaaaaaaat

SEQ ID NO: 370079 - DNA, 12 bp, Artificial Sequence
  Oligonucleotide primer for the detection of SNP TSC0057987
atccactaaaac

SEQ ID NO: 370080 - DNA, 12 bp, Artificial Sequence
  Oligonucleotide primer for the detection of SNP TSC0057987
tttaagatttag

SEQ ID NO: 370081 - DNA, 12 bp, Artificial Sequence
  Oligonucleotide primer for the detection of SNP TSC0057990
ttccatcattat

SEQ ID NO: 370082 - DNA, 12 bp, Artificial Sequence
  Oligonucleotide primer for the detection of SNP TSC0057990
ttgaaaaatgga

SEQ ID NO: 370083 - DNA, 12 bp, Artificial Sequence
  Oligonucleotide primer for the detection of SNP TSC0005635
tatacaacattc

SEQ ID NO: 370084 - DNA, 12 bp, Artificial Sequence
  Oligonucleotide primer for the detection of SNP TSC0005635
gtgtagaataag

SEQ ID NO: 370085 - DNA, 12 bp, Artificial Sequence
  Oligonucleotide primer for the detection of SNP TSC0057996
aatctatataca

SEQ ID NO: 370086 - DNA, 12 bp, Artificial Sequence
  Oligonucleotide primer for the detection of SNP TSC0057996
tatttctcttct

SEQ ID NO: 370087 - DNA, 12 bp, Artificial Sequence
  Oligonucleotide primer for the detection of SNP TSC0057996
aatttgtgtata

SEQ ID NO: 370088 - DNA, 12 bp, Artificial Sequence
  Oligonucleotide primer for the detection of SNP TSC0057997
ttttaaatgtgt

SEQ ID NO: 370089 - DNA, 12 bp, Artificial Sequence
  Oligonucleotide primer for the detection of SNP TSC0057997
agaataatttgt

SEQ ID NO: 370090 - DNA, 12 bp, Artificial Sequence
  Oligonucleotide primer for the detection of SNP TSC0057998
gttggagttagg

SEQ ID NO: 370091 - DNA, 12 bp, Artificial Sequence
  Oligonucleotide primer for the detection of SNP TSC0057999
gttttattttgg

SEQ ID NO: 370092 - DNA, 12 bp, Artificial Sequence
  Oligonucleotide primer for the detection of SNP TSC0057999
acctcaccttaa

SEQ ID NO: 370093 - DNA, 12 bp, Artificial Sequence
  Oligonucleotide primer for the detection of SNP TSC0057999
tggagtatttga

SEQ ID NO: 370094 - DNA, 12 bp, Artificial Sequence
  Oligonucleotide primer for the detection of SNP TSC0058000
ctactctcaaac

SEQ ID NO: 370095 - DNA, 12 bp, Artificial Sequence
  Oligonucleotide primer for the detection of SNP TSC0058000
tgtttgagtttg

SEQ ID NO: 370096 - DNA, 12 bp, Artificial Sequence
  Oligonucleotide primer for the detection of SNP TSC0004952
tttttggtatta

SEQ ID NO: 370097 - DNA, 12 bp, Artificial Sequence
  Oligonucleotide primer for the detection of SNP TSC0004953
aacaaatcaaac

SEQ ID NO: 370098 - DNA, 12 bp, Artificial Sequence
  Oligonucleotide primer for the detection of SNP TSC0004953
ttagggttgagt

SEQ ID NO: 370099 - DNA, 12 bp, Artificial Sequence
  Oligonucleotide primer for the detection of SNP TSC0006854
tcataatactat

SEQ ID NO: 370100 - DNA, 12 bp, Artificial Sequence
  Oligonucleotide primer for the detection of SNP TSC0006854
atataagtgttg

SEQ ID NO: 370101 - DNA, 12 bp, Artificial Sequence
  Oligonucleotide primer for the detection of SNP TSC0058001
ctaaatatccaa

SEQ ID NO: 370102 - DNA, 12 bp, Artificial Sequence
  Oligonucleotide primer for the detection of SNP TSC0058001
tttatttttagc

SEQ ID NO: 370103 - DNA, 12 bp, Artificial Sequence
  Oligonucleotide primer for the detection of SNP TSC0058001
acccacccccaa

SEQ ID NO: 370104 - DNA, 12 bp, Artificial Sequence
  Oligonucleotide primer for the detection of SNP TSC0058001
gcccacccccaa

SEQ ID NO: 370105 - DNA, 12 bp, Artificial Sequence
  Oligonucleotide primer for the detection of SNP TSC0058002
ctccccctaaaa

SEQ ID NO: 370106 - DNA, 12 bp, Artificial Sequence
  Oligonucleotide primer for the detection of SNP TSC0058002
tgttgatttatc

SEQ ID NO: 370107 - DNA, 12 bp, Artificial Sequence
  Oligonucleotide primer for the detection of SNP TSC0058002
attactaactca

SEQ ID NO: 370108 - DNA, 12 bp, Artificial Sequence
  Oligonucleotide primer for the detection of SNP TSC0058003
ttattcaaaaat

SEQ ID NO: 370109 - DNA, 12 bp, Artificial Sequence
  Oligonucleotide primer for the detection of SNP TSC0058003
gaaggaaattga

SEQ ID NO: 370110 - DNA, 12 bp, Artificial Sequence
  Oligonucleotide primer for the detection of SNP TSC0058007
cacatatttcaa

SEQ ID NO: 370111 - DNA, 12 bp, Artificial Sequence
  Oligonucleotide primer for the detection of SNP TSC0058007
cgcatatttcaa

SEQ ID NO: 370112 - DNA, 12 bp, Artificial Sequence
  Oligonucleotide primer for the detection of SNP TSC0058007
gtgtatgtttta

SEQ ID NO: 370113 - DNA, 12 bp, Artificial Sequence
  Oligonucleotide primer for the detection of SNP TSC0058007
gcgtatgtttta

SEQ ID NO: 370114 - DNA, 12 bp, Artificial Sequence
  Oligonucleotide primer for the detection of SNP TSC0058008
aacttaaatata

SEQ ID NO: 370115 - DNA, 12 bp, Artificial Sequence
  Oligonucleotide primer for the detection of SNP TSC0058008
gtatagaatagt

SEQ ID NO: 370116 - DNA, 12 bp, Artificial Sequence
  Oligonucleotide primer for the detection of SNP TSC0058008
acataaaacaat

SEQ ID NO: 370117 - DNA, 12 bp, Artificial Sequence
  Oligonucleotide primer for the detection of SNP TSC0058008
aaatttgagtgt

SEQ ID NO: 370118 - DNA, 12 bp, Artificial Sequence
  Oligonucleotide primer for the detection of SNP TSC0058009
attactacatta

SEQ ID NO: 370119 - DNA, 12 bp, Artificial Sequence
  Oligonucleotide primer for the detection of SNP TSC0058009
gattggtgtatt

SEQ ID NO: 370120 - DNA, 12 bp, Artificial Sequence
  Oligonucleotide primer for the detection of SNP TSC0058009
gattggtgtatc

SEQ ID NO: 370121 - DNA, 12 bp, Artificial Sequence
  Oligonucleotide primer for the detection of SNP TSC0058010
taatataatcta

SEQ ID NO: 370122 - DNA, 12 bp, Artificial Sequence
  Oligonucleotide primer for the detection of SNP TSC0058010
tttatagggttt

SEQ ID NO: 370123 - DNA, 12 bp, Artificial Sequence
  Oligonucleotide primer for the detection of SNP TSC0058010
ctcataaaattc

SEQ ID NO: 370124 - DNA, 12 bp, Artificial Sequence
  Oligonucleotide primer for the detection of SNP TSC0058010
ttggtataattt

SEQ ID NO: 370125 - DNA, 12 bp, Artificial Sequence
  Oligonucleotide primer for the detection of SNP TSC0006202
tctttttaaaat

SEQ ID NO: 370126 - DNA, 12 bp, Artificial Sequence
  Oligonucleotide primer for the detection of SNP TSC0006202
aagtagatgtaa

SEQ ID NO: 370127 - DNA, 12 bp, Artificial Sequence
  Oligonucleotide primer for the detection of SNP TSC0058011
ccaatccaataa

SEQ ID NO: 370128 - DNA, 12 bp, Artificial Sequence
  Oligonucleotide primer for the detection of SNP TSC0058013
cctatcatacta

SEQ ID NO: 370129 - DNA, 12 bp, Artificial Sequence
  Oligonucleotide primer for the detection of SNP TSC0058013
atttggggagtt

SEQ ID NO: 370130 - DNA, 12 bp, Artificial Sequence
  Oligonucleotide primer for the detection of SNP TSC0058013
atctaaaaaacc

SEQ ID NO: 370131 - DNA, 12 bp, Artificial Sequence
  Oligonucleotide primer for the detection of SNP TSC0058013
tttgttatattg

SEQ ID NO: 370132 - DNA, 12 bp, Artificial Sequence
  Oligonucleotide primer for the detection of SNP TSC0058014
aatctcaaaaat

SEQ ID NO: 370133 - DNA, 12 bp, Artificial Sequence
  Oligonucleotide primer for the detection of SNP TSC0058015
acccaatcccct

SEQ ID NO: 370134 - DNA, 12 bp, Artificial Sequence
  Oligonucleotide primer for the detection of SNP TSC0000652
caaaccctactc

SEQ ID NO: 370135 - DNA, 12 bp, Artificial Sequence
  Oligonucleotide primer for the detection of SNP TSC0000652
gatagatgagag

SEQ ID NO: 370136 - DNA, 12 bp, Artificial Sequence
  Oligonucleotide primer for the detection of SNP TSC0000652
gatagacgagag

SEQ ID NO: 370137 - DNA, 12 bp, Artificial Sequence
  Oligonucleotide primer for the detection of SNP TSC0058016
taagttttatag

SEQ ID NO: 370138 - DNA, 12 bp, Artificial Sequence
  Oligonucleotide primer for the detection of SNP TSC0058016
taaatcttataa

SEQ ID NO: 370139 - DNA, 12 bp, Artificial Sequence
  Oligonucleotide primer for the detection of SNP TSC0058017
taggggtattag

SEQ ID NO: 370140 - DNA, 12 bp, Artificial Sequence
  Oligonucleotide primer for the detection of SNP TSC0058018
gtttggattttt

SEQ ID NO: 370141 - DNA, 12 bp, Artificial Sequence
  Oligonucleotide primer for the detection of SNP TSC0058018
taaacatctaaa

SEQ ID NO: 370142 - DNA, 12 bp, Artificial Sequence
  Oligonucleotide primer for the detection of SNP TSC0058018
taaacgtctaaa

SEQ ID NO: 370143 - DNA, 12 bp, Artificial Sequence
  Oligonucleotide primer for the detection of SNP TSC0058018
tagaatttaatt

SEQ ID NO: 370144 - DNA, 12 bp, Artificial Sequence
  Oligonucleotide primer for the detection of SNP TSC0058019
ccaaaccctctt

SEQ ID NO: 370145 - DNA, 12 bp, Artificial Sequence
  Oligonucleotide primer for the detection of SNP TSC0058019
ttgttattatga

SEQ ID NO: 370146 - DNA, 12 bp, Artificial Sequence
  Oligonucleotide primer for the detection of SNP TSC0058020
aaatttaattta

SEQ ID NO: 370147 - DNA, 12 bp, Artificial Sequence
  Oligonucleotide primer for the detection of SNP TSC0058020
aaaaacatctac

SEQ ID NO: 370148 - DNA, 12 bp, Artificial Sequence
  Oligonucleotide primer for the detection of SNP TSC0058022
ccatacaaataa

SEQ ID NO: 370149 - DNA, 12 bp, Artificial Sequence
  Oligonucleotide primer for the detection of SNP TSC0058022
aattttttagtt

SEQ ID NO: 370150 - DNA, 12 bp, Artificial Sequence
  Oligonucleotide primer for the detection of SNP TSC0058022
aacctttcaacc

SEQ ID NO: 370151 - DNA, 12 bp, Artificial Sequence
  Oligonucleotide primer for the detection of SNP TSC0058022
ttatgtagatga

SEQ ID NO: 370152 - DNA, 12 bp, Artificial Sequence
  Oligonucleotide primer for the detection of SNP TSC0058023
ttaaatcctatt

SEQ ID NO: 370153 - DNA, 12 bp, Artificial Sequence
  Oligonucleotide primer for the detection of SNP TSC0058025
gttttattattt

SEQ ID NO: 370154 - DNA, 12 bp, Artificial Sequence
  Oligonucleotide primer for the detection of SNP TSC0058025
accccactaccc

SEQ ID NO: 370155 - DNA, 12 bp, Artificial Sequence
  Oligonucleotide primer for the detection of SNP TSC0058025
ggttaggggttg

SEQ ID NO: 370156 - DNA, 12 bp, Artificial Sequence
  Oligonucleotide primer for the detection of SNP TSC0058026
atatttactata

SEQ ID NO: 370157 - DNA, 12 bp, Artificial Sequence
  Oligonucleotide primer for the detection of SNP TSC0058026
atgtgtttatgt

SEQ ID NO: 370158 - DNA, 12 bp, Artificial Sequence
  Oligonucleotide primer for the detection of SNP TSC0058026
tatgtttattat

SEQ ID NO: 370159 - DNA, 12 bp, Artificial Sequence
  Oligonucleotide primer for the detection of SNP TSC0058027
taaaataatact

SEQ ID NO: 370160 - DNA, 12 bp, Artificial Sequence
  Oligonucleotide primer for the detection of SNP TSC0058027
ataaatataggg

SEQ ID NO: 370161 - DNA, 12 bp, Artificial Sequence
  Oligonucleotide primer for the detection of SNP TSC0058029
atccacttaaat

SEQ ID NO: 370162 - DNA, 12 bp, Artificial Sequence
  Oligonucleotide primer for the detection of SNP TSC0058029
ggatattttgta

SEQ ID NO: 370163 - DNA, 12 bp, Artificial Sequence
  Oligonucleotide primer for the detection of SNP TSC0058035
actaccatatcc

SEQ ID NO: 370164 - DNA, 12 bp, Artificial Sequence
  Oligonucleotide primer for the detection of SNP TSC0058035
gaattggggttg

SEQ ID NO: 370165 - DNA, 12 bp, Artificial Sequence
  Oligonucleotide primer for the detection of SNP TSC0058036
aactaataatat

SEQ ID NO: 370166 - DNA, 12 bp, Artificial Sequence
  Oligonucleotide primer for the detection of SNP TSC0058036
ttggtaatggtg

SEQ ID NO: 370167 - DNA, 12 bp, Artificial Sequence
  Oligonucleotide primer for the detection of SNP TSC0058036
tcggtaatggtg

SEQ ID NO: 370168 - DNA, 12 bp, Artificial Sequence
  Oligonucleotide primer for the detection of SNP TSC0058036
ttggtaatggcg

SEQ ID NO: 370169 - DNA, 12 bp, Artificial Sequence
  Oligonucleotide primer for the detection of SNP TSC0058036
tcggtaatggcg

SEQ ID NO: 370170 - DNA, 12 bp, Artificial Sequence
  Oligonucleotide primer for the detection of SNP TSC0004787
tcaattattatt

SEQ ID NO: 370171 - DNA, 12 bp, Artificial Sequence
  Oligonucleotide primer for the detection of SNP TSC0058038
tatgttttttga

SEQ ID NO: 370172 - DNA, 12 bp, Artificial Sequence
  Oligonucleotide primer for the detection of SNP TSC0058038
tacgttttttga

SEQ ID NO: 370173 - DNA, 12 bp, Artificial Sequence
  Oligonucleotide primer for the detection of SNP TSC0005485
ttgattatggtg

SEQ ID NO: 370174 - DNA, 12 bp, Artificial Sequence
  Oligonucleotide primer for the detection of SNP TSC0058040
ctattaatttct

SEQ ID NO: 370175 - DNA, 12 bp, Artificial Sequence
  Oligonucleotide primer for the detection of SNP TSC0058040
tctctcaaaaaa

SEQ ID NO: 370176 - DNA, 12 bp, Artificial Sequence
  Oligonucleotide primer for the detection of SNP TSC0058043
aattaaattaaa

SEQ ID NO: 370177 - DNA, 12 bp, Artificial Sequence
  Oligonucleotide primer for the detection of SNP TSC0058043
ttatccatttcc

SEQ ID NO: 370178 - DNA, 12 bp, Artificial Sequence
  Oligonucleotide primer for the detection of SNP TSC0058043
aattagattggg

SEQ ID NO: 370179 - DNA, 12 bp, Artificial Sequence
  Oligonucleotide primer for the detection of SNP TSC0058044
ctttacaatact

SEQ ID NO: 370180 - DNA, 12 bp, Artificial Sequence
  Oligonucleotide primer for the detection of SNP TSC0058044
ctttacgatact

SEQ ID NO: 370181 - DNA, 12 bp, Artificial Sequence
  Oligonucleotide primer for the detection of SNP TSC0058044
tgatagtttttg

SEQ ID NO: 370182 - DNA, 12 bp, Artificial Sequence
  Oligonucleotide primer for the detection of SNP TSC0058045
aggtttgtattt

SEQ ID NO: 370183 - DNA, 12 bp, Artificial Sequence
  Oligonucleotide primer for the detection of SNP TSC0058045
aaatttacatcc

SEQ ID NO: 370184 - DNA, 12 bp, Artificial Sequence
  Oligonucleotide primer for the detection of SNP TSC0058045
gtgatgataaaa

SEQ ID NO: 370185 - DNA, 12 bp, Artificial Sequence
  Oligonucleotide primer for the detection of SNP TSC0006337
aatcccacctta

SEQ ID NO: 370186 - DNA, 12 bp, Artificial Sequence
  Oligonucleotide primer for the detection of SNP TSC0006337
cccttctcccat

SEQ ID NO: 370187 - DNA, 12 bp, Artificial Sequence
  Oligonucleotide primer for the detection of SNP TSC0000206
ccttaaaaattt

SEQ ID NO: 370188 - DNA, 12 bp, Artificial Sequence
  Oligonucleotide primer for the detection of SNP TSC0000206
atggaattatga

SEQ ID NO: 370189 - DNA, 12 bp, Artificial Sequence
  Oligonucleotide primer for the detection of SNP TSC0000206
atggaattacga

SEQ ID NO: 370190 - DNA, 12 bp, Artificial Sequence
  Oligonucleotide primer for the detection of SNP TSC0000206
ataaaattacaa

SEQ ID NO: 370191 - DNA, 12 bp, Artificial Sequence
  Oligonucleotide primer for the detection of SNP TSC0000206
ataaaattacga

SEQ ID NO: 370192 - DNA, 12 bp, Artificial Sequence
  Oligonucleotide primer for the detection of SNP TSC0000206
ttttagagattt

SEQ ID NO: 370193 - DNA, 12 bp, Artificial Sequence
  Oligonukleotid-Primer
aattcctcctct

SEQ ID NO: 370194 - DNA, 12 bp, Artificial Sequence
  Oligonucleotide primer for the detection of SNP TSC0000207
ggtattgttata

SEQ ID NO: 370195 - DNA, 12 bp, Artificial Sequence
  Oligonucleotide primer for the detection of SNP TSC0000207
aatactactata

SEQ ID NO: 370196 - DNA, 12 bp, Artificial Sequence
  Oligonucleotide primer for the detection of SNP TSC0058047
aaaaaaaaccct

SEQ ID NO: 370197 - DNA, 12 bp, Artificial Sequence
  Oligonucleotide primer for the detection of SNP TSC0058047
taaggggaagga

SEQ ID NO: 370198 - DNA, 12 bp, Artificial Sequence
  Oligonucleotide primer for the detection of SNP TSC0058048
actaaactaata

SEQ ID NO: 370199 - DNA, 12 bp, Artificial Sequence
  Oligonucleotide primer for the detection of SNP TSC0058048
ttttataaattg

SEQ ID NO: 370200 - DNA, 12 bp, Artificial Sequence
  Oligonucleotide primer for the detection of SNP TSC0058048
tcttacaaacta

SEQ ID NO: 370201 - DNA, 12 bp, Artificial Sequence
  Oligonucleotide primer for the detection of SNP TSC0058048
ttgaattgatat

SEQ ID NO: 370202 - DNA, 12 bp, Artificial Sequence
  Oligonucleotide primer for the detection of SNP TSC0058049
gaatgatttatt

SEQ ID NO: 370203 - DNA, 12 bp, Artificial Sequence
  Oligonucleotide primer for the detection of SNP TSC0058049
gaacgatttatt

SEQ ID NO: 370204 - DNA, 12 bp, Artificial Sequence
  Oligonucleotide primer for the detection of SNP TSC0058049
aaacaatttatc

SEQ ID NO: 370205 - DNA, 12 bp, Artificial Sequence
  Oligonucleotide primer for the detection of SNP TSC0058049
aaacgatttatc

SEQ ID NO: 370206 - DNA, 12 bp, Artificial Sequence
  Oligonucleotide primer for the detection of SNP TSC0058049
ttagatagtagg

SEQ ID NO: 370207 - DNA, 12 bp, Artificial Sequence
  Oligonucleotide primer for the detection of SNP TSC0058051
ttgaaatgtgaa

SEQ ID NO: 370208 - DNA, 12 bp, Artificial Sequence
  Oligonucleotide primer for the detection of SNP TSC0058054
taatttattcaa

SEQ ID NO: 370209 - DNA, 12 bp, Artificial Sequence
  Oligonucleotide primer for the detection of SNP TSC0058054
tcactaaactac

SEQ ID NO: 370210 - DNA, 12 bp, Artificial Sequence
  Oligonucleotide primer for the detection of SNP TSC0058054
gataatttgttt

SEQ ID NO: 370211 - DNA, 12 bp, Artificial Sequence
  Oligonucleotide primer for the detection of SNP TSC0007997
ttttggtttatg

SEQ ID NO: 370212 - DNA, 12 bp, Artificial Sequence
  Oligonucleotide primer for the detection of SNP TSC0001696
ctaatatactaa

SEQ ID NO: 370213 - DNA, 12 bp, Artificial Sequence
  Oligonucleotide primer for the detection of SNP TSC0001696
agggagttagtt

SEQ ID NO: 370214 - DNA, 12 bp, Artificial Sequence
  Oligonucleotide primer for the detection of SNP TSC0001696
aaaaaaccaatt

SEQ ID NO: 370215 - DNA, 12 bp, Artificial Sequence
  Oligonucleotide primer for the detection of SNP TSC0001696
ttggtgtgttgg

SEQ ID NO: 370216 - DNA, 12 bp, Artificial Sequence
  Oligonucleotide primer for the detection of SNP TSC0001697
accaatactcat

SEQ ID NO: 370217 - DNA, 12 bp, Artificial Sequence
  Oligonucleotide primer for the detection of SNP TSC0001697
tttagattgaag

SEQ ID NO: 370218 - DNA, 12 bp, Artificial Sequence
  Oligonucleotide primer for the detection of SNP TSC0058058
cacttttaatca

SEQ ID NO: 370219 - DNA, 12 bp, Artificial Sequence
  Oligonucleotide primer for the detection of SNP TSC0058058
gaagattagtgt

SEQ ID NO: 370220 - DNA, 12 bp, Artificial Sequence
  Oligonucleotide primer for the detection of SNP TSC0058058
aaaaatcaatac

SEQ ID NO: 370221 - DNA, 12 bp, Artificial Sequence
  Oligonucleotide primer for the detection of SNP TSC0058059
gttttgtgagta

SEQ ID NO: 370222 - DNA, 12 bp, Artificial Sequence
  Oligonucleotide primer for the detection of SNP TSC0058060
ccaataaatctc

SEQ ID NO: 370223 - DNA, 12 bp, Artificial Sequence
  Oligonucleotide primer for the detection of SNP TSC0058061
ttacctcactcc

SEQ ID NO: 370224 - DNA, 12 bp, Artificial Sequence
  Oligonucleotide primer for the detection of SNP TSC0058061
attttggtagtt

SEQ ID NO: 370225 - DNA, 12 bp, Artificial Sequence
  Oligonucleotide primer for the detection of SNP TSC0058061
attttggtagtc

SEQ ID NO: 370226 - DNA, 12 bp, Artificial Sequence
  Oligonucleotide primer for the detection of SNP TSC0058061
aaccttaacaat

SEQ ID NO: 370227 - DNA, 12 bp, Artificial Sequence
  Oligonucleotide primer for the detection of SNP TSC0058062
tttcttcctcta

SEQ ID NO: 370228 - DNA, 12 bp, Artificial Sequence
  Oligonucleotide primer for the detection of SNP TSC0058062
aggttatgtagt

SEQ ID NO: 370229 - DNA, 12 bp, Artificial Sequence
  Oligonucleotide primer for the detection of SNP TSC0058062
aggttatgtagc

SEQ ID NO: 370230 - DNA, 12 bp, Artificial Sequence
  Oligonucleotide primer for the detection of SNP TSC0000883
gttttataaatg

SEQ ID NO: 370231 - DNA, 12 bp, Artificial Sequence
  Oligonucleotide primer for the detection of SNP TSC0058063
acgaaaactaaa

SEQ ID NO: 370232 - DNA, 12 bp, Artificial Sequence
  Oligonucleotide primer for the detection of SNP TSC0058063
ccaaacttacat

SEQ ID NO: 370233 - DNA, 12 bp, Artificial Sequence
  Oligonucleotide primer for the detection of SNP TSC0058063
atggaggttgaa

SEQ ID NO: 370234 - DNA, 12 bp, Artificial Sequence
  Oligonucleotide primer for the detection of SNP TSC0058063
acggaggttgaa

SEQ ID NO: 370235 - DNA, 12 bp, Artificial Sequence
  Oligonucleotide primer for the detection of SNP TSC0001427
cctaaaccccct

SEQ ID NO: 370236 - DNA, 12 bp, Artificial Sequence
  Oligonucleotide primer for the detection of SNP TSC0001428
ttgaattggttt

SEQ ID NO: 370237 - DNA, 12 bp, Artificial Sequence
  Oligonucleotide primer for the detection of SNP TSC0001428
ttaaattaactc

SEQ ID NO: 370238 - DNA, 12 bp, Artificial Sequence
  Oligonucleotide primer for the detection of SNP TSC0001428
tagtttgtggaa

SEQ ID NO: 370239 - DNA, 12 bp, Artificial Sequence
  Oligonucleotide primer for the detection of SNP TSC0058068
aaatattaaaat

SEQ ID NO: 370240 - DNA, 12 bp, Artificial Sequence
  Oligonucleotide primer for the detection of SNP TSC0058068
taatataataat

SEQ ID NO: 370241 - DNA, 12 bp, Artificial Sequence
  Oligonucleotide primer for the detection of SNP TSC0058068
caacacaataat

SEQ ID NO: 370242 - DNA, 12 bp, Artificial Sequence
  Oligonucleotide primer for the detection of SNP TSC0058068
gggtgttgaagt

SEQ ID NO: 370243 - DNA, 12 bp, Artificial Sequence
  Oligonucleotide primer for the detection of SNP TSC0058069
acctacatttac

SEQ ID NO: 370244 - DNA, 12 bp, Artificial Sequence
  Oligonucleotide primer for the detection of SNP TSC0058070
tagggtaatttt

SEQ ID NO: 370245 - DNA, 12 bp, Artificial Sequence
  Oligonucleotide primer for the detection of SNP TSC0058070
taaaacaatttc

SEQ ID NO: 370246 - DNA, 12 bp, Artificial Sequence
  Oligonucleotide primer for the detection of SNP TSC0058070
gttgagtgaaag

SEQ ID NO: 370247 - DNA, 12 bp, Artificial Sequence
  Oligonucleotide primer for the detection of SNP TSC0058071
cctaatatatcc

SEQ ID NO: 370248 - DNA, 12 bp, Artificial Sequence
  Oligonucleotide primer for the detection of SNP TSC0058072
ctaaaaccaatt

SEQ ID NO: 370249 - DNA, 12 bp, Artificial Sequence
  Oligonucleotide primer for the detection of SNP TSC0058073
tttccttcttaa

SEQ ID NO: 370250 - DNA, 12 bp, Artificial Sequence
  Oligonucleotide primer for the detection of SNP TSC0058073
aacactactata

SEQ ID NO: 370251 - DNA, 12 bp, Artificial Sequence
  Oligonucleotide primer for the detection of SNP TSC0058074
atttcacctctt

SEQ ID NO: 370252 - DNA, 12 bp, Artificial Sequence
  Oligonucleotide primer for the detection of SNP TSC0058074
aattttgaatga

SEQ ID NO: 370253 - DNA, 12 bp, Artificial Sequence
  Oligonucleotide primer for the detection of SNP TSC0058078
taaacaatcaac

SEQ ID NO: 370254 - DNA, 12 bp, Artificial Sequence
  Oligonucleotide primer for the detection of SNP TSC0058078
aatgagttttgt

SEQ ID NO: 370255 - DNA, 12 bp, Artificial Sequence
  Oligonucleotide primer for the detection of SNP TSC0058078
aacgagttttgt

SEQ ID NO: 370256 - DNA, 12 bp, Artificial Sequence
  Oligonucleotide primer for the detection of SNP TSC0058078
aatgagttttgc

SEQ ID NO: 370257 - DNA, 12 bp, Artificial Sequence
  Oligonucleotide primer for the detection of SNP TSC0058078
aacgagttttgc

SEQ ID NO: 370258 - DNA, 12 bp, Artificial Sequence
  Oligonucleotide primer for the detection of SNP TSC0058078
aaacaaatccta

SEQ ID NO: 370259 - DNA, 12 bp, Artificial Sequence
  Oligonucleotide primer for the detection of SNP TSC0058078
aaacgaatccta

SEQ ID NO: 370260 - DNA, 12 bp, Artificial Sequence
  Oligonucleotide primer for the detection of SNP TSC0058078
taagtaattagt

SEQ ID NO: 370261 - DNA, 12 bp, Artificial Sequence
  Oligonucleotide primer for the detection of SNP TSC0058079
aaaaaatcacat

SEQ ID NO: 370262 - DNA, 12 bp, Artificial Sequence
  Oligonucleotide primer for the detection of SNP TSC0058079
gagaaatagaga

SEQ ID NO: 370263 - DNA, 12 bp, Artificial Sequence
  Oligonucleotide primer for the detection of SNP TSC0058079
gaaaggttatat

SEQ ID NO: 370264 - DNA, 12 bp, Artificial Sequence
  Oligonucleotide primer for the detection of SNP TSC0058080
acacatctttac

SEQ ID NO: 370265 - DNA, 12 bp, Artificial Sequence
  Oligonucleotide primer for the detection of SNP TSC0058080
aatggaatatgt

SEQ ID NO: 370266 - DNA, 12 bp, Artificial Sequence
  Oligonucleotide primer for the detection of SNP TSC0058080
ataaaacataca

SEQ ID NO: 370267 - DNA, 12 bp, Artificial Sequence
  Oligonucleotide primer for the detection of SNP TSC0058081
tattattctacc

SEQ ID NO: 370268 - DNA, 12 bp, Artificial Sequence
  Oligonucleotide primer for the detection of SNP TSC0058082
aatacataatcc

SEQ ID NO: 370269 - DNA, 12 bp, Artificial Sequence
  Oligonucleotide primer for the detection of SNP TSC0058084
ttaaataactac

SEQ ID NO: 370270 - DNA, 12 bp, Artificial Sequence
  Oligonucleotide primer for the detection of SNP TSC0058084
gatatataatta

SEQ ID NO: 370271 - DNA, 12 bp, Artificial Sequence
  Oligonucleotide primer for the detection of SNP TSC0058085
caacctaaaaaa

SEQ ID NO: 370272 - DNA, 12 bp, Artificial Sequence
  Oligonucleotide primer for the detection of SNP TSC0058085
cgacctaaaaaa

SEQ ID NO: 370273 - DNA, 12 bp, Artificial Sequence
  Oligonucleotide primer for the detection of SNP TSC0058088
ataaccaacaat

SEQ ID NO: 370274 - DNA, 12 bp, Artificial Sequence
  Oligonucleotide primer for the detection of SNP TSC0058088
ataaccgacaat

SEQ ID NO: 370275 - DNA, 12 bp, Artificial Sequence
  Oligonucleotide primer for the detection of SNP TSC0058088
gtagatagattg

SEQ ID NO: 370276 - DNA, 12 bp, Artificial Sequence
  Oligonucleotide primer for the detection of SNP TSC0058089
atttaaacaaaa

SEQ ID NO: 370277 - DNA, 12 bp, Artificial Sequence
  Oligonucleotide primer for the detection of SNP TSC0058089
gtttagatagag

SEQ ID NO: 370278 - DNA, 12 bp, Artificial Sequence
  Oligonucleotide primer for the detection of SNP TSC0058090
taaatatcccaa

SEQ ID NO: 370279 - DNA, 12 bp, Artificial Sequence
  Oligonucleotide primer for the detection of SNP TSC0058090
agtattatgaat

SEQ ID NO: 370280 - DNA, 12 bp, Artificial Sequence
  Oligonucleotide primer for the detection of SNP TSC0058090
ataccataaata

SEQ ID NO: 370281 - DNA, 12 bp, Artificial Sequence
  Oligonucleotide primer for the detection of SNP TSC0058090
gtaaatgtttta

SEQ ID NO: 370282 - DNA, 12 bp, Artificial Sequence
  Oligonucleotide primer for the detection of SNP TSC0058091
atttaatacatt

SEQ ID NO: 370283 - DNA, 12 bp, Artificial Sequence
  Oligonucleotide primer for the detection of SNP TSC0058091
aattttcttaat

SEQ ID NO: 370284 - DNA, 12 bp, Artificial Sequence
  Oligonucleotide primer for the detection of SNP TSC0058091
atttgatgtatt

SEQ ID NO: 370285 - DNA, 12 bp, Artificial Sequence
  Oligonucleotide primer for the detection of SNP TSC0058092
ttgtagtgaata

SEQ ID NO: 370286 - DNA, 12 bp, Artificial Sequence
  Oligonucleotide primer for the detection of SNP TSC0058092
ttgtagcgaata

SEQ ID NO: 370287 - DNA, 12 bp, Artificial Sequence
  Oligonucleotide primer for the detection of SNP TSC0058097
ccaccatcaaaa

SEQ ID NO: 370288 - DNA, 12 bp, Artificial Sequence
  Oligonucleotide primer for the detection of SNP TSC0058097
tggttgaggtag

SEQ ID NO: 370289 - DNA, 12 bp, Artificial Sequence
  Oligonucleotide primer for the detection of SNP TSC0058097
cggttgaggtag

SEQ ID NO: 370290 - DNA, 12 bp, Artificial Sequence
  Oligonucleotide primer for the detection of SNP TSC0058097
tggtcgaggtag

SEQ ID NO: 370291 - DNA, 12 bp, Artificial Sequence
  Oligonucleotide primer for the detection of SNP TSC0058097
cggtcgaggtag

SEQ ID NO: 370292 - DNA, 12 bp, Artificial Sequence
  Oligonucleotide primer for the detection of SNP TSC0058097
caaccaaaacaa

SEQ ID NO: 370293 - DNA, 12 bp, Artificial Sequence
  Oligonucleotide primer for the detection of SNP TSC0058097
caaccgaaacaa

SEQ ID NO: 370294 - DNA, 12 bp, Artificial Sequence
  Oligonucleotide primer for the detection of SNP TSC0058097
cgaccaaaacaa

SEQ ID NO: 370295 - DNA, 12 bp, Artificial Sequence
  Oligonucleotide primer for the detection of SNP TSC0058097
cgaccgaaacaa

SEQ ID NO: 370296 - DNA, 12 bp, Artificial Sequence
  Oligonucleotide primer for the detection of SNP TSC0058098
taactaactcac

SEQ ID NO: 370297 - DNA, 12 bp, Artificial Sequence
  Oligonucleotide primer for the detection of SNP TSC0058098
ttattggtgaag

SEQ ID NO: 370298 - DNA, 12 bp, Artificial Sequence
  Oligonucleotide primer for the detection of SNP TSC0058102
tgggaggatatt

SEQ ID NO: 370299 - DNA, 12 bp, Artificial Sequence
  Oligonucleotide primer for the detection of SNP TSC0058102
taaaaaaatatt

SEQ ID NO: 370300 - DNA, 12 bp, Artificial Sequence
  Oligonucleotide primer for the detection of SNP TSC0058102
ggattatagggg

SEQ ID NO: 370301 - DNA, 12 bp, Artificial Sequence
  Oligonucleotide primer for the detection of SNP TSC0058103
tactttcccaat

SEQ ID NO: 370302 - DNA, 12 bp, Artificial Sequence
  Oligonucleotide primer for the detection of SNP TSC0058106
atataaatataa

SEQ ID NO: 370303 - DNA, 12 bp, Artificial Sequence
  Oligonucleotide primer for the detection of SNP TSC0058106
aattgagtatgt

SEQ ID NO: 370304 - DNA, 12 bp, Artificial Sequence
  Oligonucleotide primer for the detection of SNP TSC0058106
aattgagtacgt

SEQ ID NO: 370305 - DNA, 12 bp, Artificial Sequence
  Oligonucleotide primer for the detection of SNP TSC0058106
atgtagatatga

SEQ ID NO: 370306 - DNA, 12 bp, Artificial Sequence
  Oligonucleotide primer for the detection of SNP TSC0058109
ataaattaaacc

SEQ ID NO: 370307 - DNA, 12 bp, Artificial Sequence
  Oligonucleotide primer for the detection of SNP TSC0058110
tataaaccaata

SEQ ID NO: 370308 - DNA, 12 bp, Artificial Sequence
  Oligonucleotide primer for the detection of SNP TSC0058110
aatgtttattag

SEQ ID NO: 370309 - DNA, 12 bp, Artificial Sequence
  Oligonucleotide primer for the detection of SNP TSC0058110
aatatttatcaa

SEQ ID NO: 370310 - DNA, 12 bp, Artificial Sequence
  Oligonucleotide primer for the detection of SNP TSC0058110
taggttaatatt

SEQ ID NO: 370311 - DNA, 12 bp, Artificial Sequence
  Oligonucleotide primer for the detection of SNP TSC0058111
ataaaaattcct

SEQ ID NO: 370312 - DNA, 12 bp, Artificial Sequence
  Oligonucleotide primer for the detection of SNP TSC0058116
ataaacgtaaac

SEQ ID NO: 370313 - DNA, 12 bp, Artificial Sequence
  Oligonucleotide primer for the detection of SNP TSC0058117
aatatatcaaat

SEQ ID NO: 370314 - DNA, 12 bp, Artificial Sequence
  Oligonucleotide primer for the detection of SNP TSC0058117
aaatattttagg

SEQ ID NO: 370315 - DNA, 12 bp, Artificial Sequence
  Oligonucleotide primer for the detection of SNP TSC0058117
aaacatttcaaa

SEQ ID NO: 370316 - DNA, 12 bp, Artificial Sequence
  Oligonucleotide primer for the detection of SNP TSC0058117
agtatgttagat

SEQ ID NO: 370317 - DNA, 12 bp, Artificial Sequence
  Oligonucleotide primer for the detection of SNP TSC0058118
aaacacaataat

SEQ ID NO: 370318 - DNA, 12 bp, Artificial Sequence
  Oligonucleotide primer for the detection of SNP TSC0058118
gaaaagttgtgt

SEQ ID NO: 370319 - DNA, 12 bp, Artificial Sequence
  Oligonucleotide primer for the detection of SNP TSC0058118
taaaaaattata

SEQ ID NO: 370320 - DNA, 12 bp, Artificial Sequence
  Oligonucleotide primer for the detection of SNP TSC0058118
aaatataatgat

SEQ ID NO: 370321 - DNA, 12 bp, Artificial Sequence
  Oligonucleotide primer for the detection of SNP TSC0058120
acaaaattattt

SEQ ID NO: 370322 - DNA, 12 bp, Artificial Sequence
  Oligonucleotide primer for the detection of SNP TSC0058120
gtgtgtatttgt

SEQ ID NO: 370323 - DNA, 12 bp, Artificial Sequence
  Oligonucleotide primer for the detection of SNP TSC0058120
atatatatctat

SEQ ID NO: 370324 - DNA, 12 bp, Artificial Sequence
  Oligonucleotide primer for the detection of SNP TSC0058120
gtatatatctat

SEQ ID NO: 370325 - DNA, 12 bp, Artificial Sequence
  Oligonucleotide primer for the detection of SNP TSC0058121
aaatccataaat

SEQ ID NO: 370326 - DNA, 12 bp, Artificial Sequence
  Oligonucleotide primer for the detection of SNP TSC0004938
actaacacaaaa

SEQ ID NO: 370327 - DNA, 12 bp, Artificial Sequence
  Oligonucleotide primer for the detection of SNP TSC0058122
aggggatttggt

SEQ ID NO: 370328 - DNA, 12 bp, Artificial Sequence
  Oligonucleotide primer for the detection of SNP TSC0058122
caaaaaacttaa

SEQ ID NO: 370329 - DNA, 12 bp, Artificial Sequence
  Oligonucleotide primer for the detection of SNP TSC0058122
ttagggttatag

SEQ ID NO: 370330 - DNA, 12 bp, Artificial Sequence
  Oligonucleotide primer for the detection of SNP TSC0007634
tctctctctatc

SEQ ID NO: 370331 - DNA, 12 bp, Artificial Sequence
  Oligonucleotide primer for the detection of SNP TSC0058123
ataactataaaa

SEQ ID NO: 370332 - DNA, 12 bp, Artificial Sequence
  Oligonucleotide primer for the detection of SNP TSC0058123
cacacatccaaa

SEQ ID NO: 370333 - DNA, 12 bp, Artificial Sequence
  Oligonucleotide primer for the detection of SNP TSC0058123
gataattgtggg

SEQ ID NO: 370334 - DNA, 12 bp, Artificial Sequence
  Oligonucleotide primer for the detection of SNP TSC0058124
aaataaattgta

SEQ ID NO: 370335 - DNA, 12 bp, Artificial Sequence
  Oligonucleotide primer for the detection of SNP TSC0058125
ttttaaacttat

SEQ ID NO: 370336 - DNA, 12 bp, Artificial Sequence
  Oligonucleotide primer for the detection of SNP TSC0058125
ttaaggatgata

SEQ ID NO: 370337 - DNA, 12 bp, Artificial Sequence
  Oligonucleotide primer for the detection of SNP TSC0058126
tttcatataatc

SEQ ID NO: 370338 - DNA, 12 bp, Artificial Sequence
  Oligonucleotide primer for the detection of SNP TSC0058126
tttgtgttgata

SEQ ID NO: 370339 - DNA, 12 bp, Artificial Sequence
  Oligonucleotide primer for the detection of SNP TSC0058126
ttcgtgttgata

SEQ ID NO: 370340 - DNA, 12 bp, Artificial Sequence
  Oligonucleotide primer for the detection of SNP TSC0058130
aaaattattcaa

SEQ ID NO: 370341 - DNA, 12 bp, Artificial Sequence
  Oligonucleotide primer for the detection of SNP TSC0058130
tgaggagttaga

SEQ ID NO: 370342 - DNA, 12 bp, Artificial Sequence
  Oligonucleotide primer for the detection of SNP TSC0058130
agaattgtttaa

SEQ ID NO: 370343 - DNA, 12 bp, Artificial Sequence
  Oligonucleotide primer for the detection of SNP TSC0058131
gggtattttagg

SEQ ID NO: 370344 - DNA, 12 bp, Artificial Sequence
  Oligonucleotide primer for the detection of SNP TSC0058132
aagagttaaaat

SEQ ID NO: 370345 - DNA, 12 bp, Artificial Sequence
  Oligonucleotide primer for the detection of SNP TSC0058132
attaggatatta

SEQ ID NO: 370346 - DNA, 12 bp, Artificial Sequence
  Oligonucleotide primer for the detection of SNP TSC0008626
ttatgtaaaaat

SEQ ID NO: 370347 - DNA, 12 bp, Artificial Sequence
  Oligonucleotide primer for the detection of SNP TSC0008626
atcatataaaaa

SEQ ID NO: 370348 - DNA, 12 bp, Artificial Sequence
  Oligonucleotide primer for the detection of SNP TSC0058136
taacaaaattat

SEQ ID NO: 370349 - DNA, 12 bp, Artificial Sequence
  Oligonucleotide primer for the detection of SNP TSC0058137
taatccacccac

SEQ ID NO: 370350 - DNA, 12 bp, Artificial Sequence
  Oligonucleotide primer for the detection of SNP TSC0058138
tacaaatttcat

SEQ ID NO: 370351 - DNA, 12 bp, Artificial Sequence
  Oligonucleotide primer for the detection of SNP TSC0058138
aaaatgtatata

SEQ ID NO: 370352 - DNA, 12 bp, Artificial Sequence
  Oligonucleotide primer for the detection of SNP TSC0058140
ttttgtatagtt

SEQ ID NO: 370353 - DNA, 12 bp, Artificial Sequence
  Oligonucleotide primer for the detection of SNP TSC0058140
cctatacaacca

SEQ ID NO: 370354 - DNA, 12 bp, Artificial Sequence
  Oligonucleotide primer for the detection of SNP TSC0058140
atgtagaaaata

SEQ ID NO: 370355 - DNA, 12 bp, Artificial Sequence
  Oligonucleotide primer for the detection of SNP TSC0005876
atttccaaaaac

SEQ ID NO: 370356 - DNA, 12 bp, Artificial Sequence
  Oligonucleotide primer for the detection of SNP TSC0005876
atttccgaaaac

SEQ ID NO: 370357 - DNA, 12 bp, Artificial Sequence
  Oligonucleotide primer for the detection of SNP TSC0005876
gtggggtagtgg

SEQ ID NO: 370358 - DNA, 12 bp, Artificial Sequence
  Oligonucleotide primer for the detection of SNP TSC0005876
gcggggtagtgg

SEQ ID NO: 370359 - DNA, 12 bp, Artificial Sequence
  Oligonucleotide primer for the detection of SNP TSC0058141
tttttaataata

SEQ ID NO: 370360 - DNA, 12 bp, Artificial Sequence
  Oligonucleotide primer for the detection of SNP TSC0058141
aaagtattttat

SEQ ID NO: 370361 - DNA, 12 bp, Artificial Sequence
  Oligonucleotide primer for the detection of SNP TSC0058141
aaaatacttcac

SEQ ID NO: 370362 - DNA, 12 bp, Artificial Sequence
  Oligonucleotide primer for the detection of SNP TSC0058141
atttttagtggt

SEQ ID NO: 370363 - DNA, 12 bp, Artificial Sequence
  Oligonucleotide primer for the detection of SNP TSC0058142
ataagggtttat

SEQ ID NO: 370364 - DNA, 12 bp, Artificial Sequence
  Oligonucleotide primer for the detection of SNP TSC0058142
aggtatggaata

SEQ ID NO: 370365 - DNA, 12 bp, Artificial Sequence
  Oligonucleotide primer for the detection of SNP TSC0058150
ctacattcattc

SEQ ID NO: 370366 - DNA, 12 bp, Artificial Sequence
  Oligonucleotide primer for the detection of SNP TSC0058150
aataaggatata

SEQ ID NO: 370367 - DNA, 12 bp, Artificial Sequence
  Oligonucleotide primer for the detection of SNP TSC0058151
tataatataaac

SEQ ID NO: 370368 - DNA, 12 bp, Artificial Sequence
  Oligonucleotide primer for the detection of SNP TSC0058151
agaatttgtagt

SEQ ID NO: 370369 - DNA, 12 bp, Artificial Sequence
  Oligonucleotide primer for the detection of SNP TSC0058151
agaattcgtagt

SEQ ID NO: 370370 - DNA, 12 bp, Artificial Sequence
  Oligonucleotide primer for the detection of SNP TSC0058151
aaaacccgtaat

SEQ ID NO: 370371 - DNA, 12 bp, Artificial Sequence
  Oligonucleotide primer for the detection of SNP TSC0058151
tgtggtataagt

SEQ ID NO: 370372 - DNA, 12 bp, Artificial Sequence
  Oligonucleotide primer for the detection of SNP TSC0058153
tcttctacaaaa

SEQ ID NO: 370373 - DNA, 12 bp, Artificial Sequence
  Oligonucleotide primer for the detection of SNP TSC0058153
tcttctacgaaa

SEQ ID NO: 370374 - DNA, 12 bp, Artificial Sequence
  Oligonucleotide primer for the detection of SNP TSC0058153
ttaataggttat

SEQ ID NO: 370375 - DNA, 12 bp, Artificial Sequence
  Oligonucleotide primer for the detection of SNP TSC0058153
ttaataggttac

SEQ ID NO: 370376 - DNA, 12 bp, Artificial Sequence
  Oligonucleotide primer for the detection of SNP TSC0058153
tttaacaaacca

SEQ ID NO: 370377 - DNA, 12 bp, Artificial Sequence
  Oligonucleotide primer for the detection of SNP TSC0058153
ttttttacgaaa

SEQ ID NO: 370378 - DNA, 12 bp, Artificial Sequence
  Oligonucleotide primer for the detection of SNP TSC0058154
atcaatattaat

SEQ ID NO: 370379 - DNA, 12 bp, Artificial Sequence
  Oligonucleotide primer for the detection of SNP TSC0058154
ttgttatgatta

SEQ ID NO: 370380 - DNA, 12 bp, Artificial Sequence
  Oligonucleotide primer for the detection of SNP TSC0058155
taaaatctaaaa

SEQ ID NO: 370381 - DNA, 12 bp, Artificial Sequence
  Oligonucleotide primer for the detection of SNP TSC0058156
taatttgtgatt

SEQ ID NO: 370382 - DNA, 12 bp, Artificial Sequence
  Oligonucleotide primer for the detection of SNP TSC0058156
taatttgtgatc

SEQ ID NO: 370383 - DNA, 12 bp, Artificial Sequence
  Oligonucleotide primer for the detection of SNP TSC0058156
ttttgaagttag

SEQ ID NO: 370384 - DNA, 12 bp, Artificial Sequence
  Oligonucleotide primer for the detection of SNP TSC0058157
gagttggagata

SEQ ID NO: 370385 - DNA, 12 bp, Artificial Sequence
  Oligonucleotide primer for the detection of SNP TSC0058158
gtaatggagttt

SEQ ID NO: 370386 - DNA, 12 bp, Artificial Sequence
  Oligonucleotide primer for the detection of SNP TSC0058158
acaataaaacct

SEQ ID NO: 370387 - DNA, 12 bp, Artificial Sequence
  Oligonucleotide primer for the detection of SNP TSC0058158
tgtttagggtta

SEQ ID NO: 370388 - DNA, 12 bp, Artificial Sequence
  Oligonucleotide primer for the detection of SNP TSC0007146
atataaccattt

SEQ ID NO: 370389 - DNA, 12 bp, Artificial Sequence
  Oligonucleotide primer for the detection of SNP TSC0007146
aagtttagttat

SEQ ID NO: 370390 - DNA, 12 bp, Artificial Sequence
  Oligonukleotid-Primer
aattcaatcata

SEQ ID NO: 370391 - DNA, 12 bp, Artificial Sequence
  Oligonucleotide primer for the detection of SNP TSC0058159
aattccatatac

SEQ ID NO: 370392 - DNA, 12 bp, Artificial Sequence
  Oligonucleotide primer for the detection of SNP TSC0058159
aatattaataag

SEQ ID NO: 370393 - DNA, 12 bp, Artificial Sequence
  Oligonucleotide primer for the detection of SNP TSC0058160
tattatttgtga

SEQ ID NO: 370394 - DNA, 12 bp, Artificial Sequence
  Oligonucleotide primer for the detection of SNP TSC0006692
ctccccatcaaa

SEQ ID NO: 370395 - DNA, 12 bp, Artificial Sequence
  Oligonucleotide primer for the detection of SNP TSC0006692
ctccccgtcaaa

SEQ ID NO: 370396 - DNA, 12 bp, Artificial Sequence
  Oligonucleotide primer for the detection of SNP TSC0006692
tttttcgttaag

SEQ ID NO: 370397 - DNA, 12 bp, Artificial Sequence
  Oligonucleotide primer for the detection of SNP TSC0007275
ataaaatcaaat

SEQ ID NO: 370398 - DNA, 12 bp, Artificial Sequence
  Oligonukleotid-Primer
gattaattttta

SEQ ID NO: 370399 - DNA, 12 bp, Artificial Sequence
  Oligonucleotide primer for the detection of SNP TSC0007276
atattttataag

SEQ ID NO: 370400 - DNA, 12 bp, Artificial Sequence
  Oligonucleotide primer for the detection of SNP TSC0058162
caaataaaatta

SEQ ID NO: 370401 - DNA, 12 bp, Artificial Sequence
  Oligonucleotide primer for the detection of SNP TSC0058162
tagagataatta

SEQ ID NO: 370402 - DNA, 12 bp, Artificial Sequence
  Oligonukleotid-Primer
caaaaataacca

SEQ ID NO: 370403 - DNA, 12 bp, Artificial Sequence
  Oligonucleotide primer for the detection of SNP TSC0058162
gataaaattgtt

SEQ ID NO: 370404 - DNA, 12 bp, Artificial Sequence
  Oligonucleotide primer for the detection of SNP TSC0058163
ctaaacctacta

SEQ ID NO: 370405 - DNA, 12 bp, Artificial Sequence
  Oligonucleotide primer for the detection of SNP TSC0058163
ttaaatttgttg

SEQ ID NO: 370406 - DNA, 12 bp, Artificial Sequence
  Oligonukleotid-Primer
atatgtttgtaa

SEQ ID NO: 370407 - DNA, 12 bp, Artificial Sequence
  Oligonucleotide primer for the detection of SNP TSC0058165
accctttaacac

SEQ ID NO: 370408 - DNA, 12 bp, Artificial Sequence
  Oligonucleotide primer for the detection of SNP TSC0058165
gaaggttgagtg

SEQ ID NO: 370409 - DNA, 12 bp, Artificial Sequence
  Oligonucleotide primer for the detection of SNP TSC0058165
gaaggtcgagtg

SEQ ID NO: 370410 - DNA, 12 bp, Artificial Sequence
  Oligonucleotide primer for the detection of SNP TSC0058165
aaaaaccgaata

SEQ ID NO: 370411 - DNA, 12 bp, Artificial Sequence
  Oligonucleotide primer for the detection of SNP TSC0058165
attttttaatac

SEQ ID NO: 370412 - DNA, 12 bp, Artificial Sequence
  Oligonucleotide primer for the detection of SNP TSC0058166
aaatttttctac

SEQ ID NO: 370413 - DNA, 12 bp, Artificial Sequence
  Oligonucleotide primer for the detection of SNP TSC0058167
attataaacatc

SEQ ID NO: 370414 - DNA, 12 bp, Artificial Sequence
  Oligonucleotide primer for the detection of SNP TSC0058167
tagggaaaatta

SEQ ID NO: 370415 - DNA, 12 bp, Artificial Sequence
  Oligonucleotide primer for the detection of SNP TSC0058168
atcatctaaatc

SEQ ID NO: 370416 - DNA, 12 bp, Artificial Sequence
  Oligonucleotide primer for the detection of SNP TSC0010153
atatactcacaa

SEQ ID NO: 370417 - DNA, 12 bp, Artificial Sequence
  Oligonucleotide primer for the detection of SNP TSC0010153
atatactcgcaa

SEQ ID NO: 370418 - DNA, 12 bp, Artificial Sequence
  Oligonucleotide primer for the detection of SNP TSC0010153
gttattgaattt

SEQ ID NO: 370419 - DNA, 12 bp, Artificial Sequence
  Oligonucleotide primer for the detection of SNP TSC0010153
accactaaatcc

SEQ ID NO: 370420 - DNA, 12 bp, Artificial Sequence
  Oligonucleotide primer for the detection of SNP TSC0010153
gtgtatttgtaa

SEQ ID NO: 370421 - DNA, 12 bp, Artificial Sequence
  Oligonucleotide primer for the detection of SNP TSC0010153
gtgtattcgtaa

SEQ ID NO: 370422 - DNA, 12 bp, Artificial Sequence
  Oligonucleotide primer for the detection of SNP TSC0058169
tattcacttatt

SEQ ID NO: 370423 - DNA, 12 bp, Artificial Sequence
  Oligonucleotide primer for the detection of SNP TSC0058169
tgtaagggatta

SEQ ID NO: 370424 - DNA, 12 bp, Artificial Sequence
  Oligonucleotide primer for the detection of SNP TSC0058171
aatattactcta

SEQ ID NO: 370425 - DNA, 12 bp, Artificial Sequence
  Oligonucleotide primer for the detection of SNP TSC0058171
ggtgttgttttg

SEQ ID NO: 370426 - DNA, 12 bp, Artificial Sequence
  Oligonucleotide primer for the detection of SNP TSC0008192
ttacttaacttt

SEQ ID NO: 370427 - DNA, 12 bp, Artificial Sequence
  Oligonucleotide primer for the detection of SNP TSC0008192
ggaggaaataga

SEQ ID NO: 370428 - DNA, 12 bp, Artificial Sequence
  Oligonucleotide primer for the detection of SNP TSC0058172
ctctatatcccc

SEQ ID NO: 370429 - DNA, 12 bp, Artificial Sequence
  Oligonucleotide primer for the detection of SNP TSC0058172
aatctcactttt

SEQ ID NO: 370430 - DNA, 12 bp, Artificial Sequence
  Oligonucleotide primer for the detection of SNP TSC0058173
aatttagtatat

SEQ ID NO: 370431 - DNA, 12 bp, Artificial Sequence
  Oligonucleotide primer for the detection of SNP TSC0058173
tttttattgaaa

SEQ ID NO: 370432 - DNA, 12 bp, Artificial Sequence
  Oligonucleotide primer for the detection of SNP TSC0058176
ttttaaaatctt

SEQ ID NO: 370433 - DNA, 12 bp, Artificial Sequence
  Oligonucleotide primer for the detection of SNP TSC0058176
catatttttcca

SEQ ID NO: 370434 - DNA, 12 bp, Artificial Sequence
  Oligonucleotide primer for the detection of SNP TSC0058177
gatagtttatag

SEQ ID NO: 370435 - DNA, 12 bp, Artificial Sequence
  Oligonucleotide primer for the detection of SNP TSC0058178
tctaaaatttcc

SEQ ID NO: 370436 - DNA, 12 bp, Artificial Sequence
  Oligonucleotide primer for the detection of SNP TSC0058178
gaagagaataat

SEQ ID NO: 370437 - DNA, 12 bp, Artificial Sequence
  Oligonucleotide primer for the detection of SNP TSC0001451
agagaaagggag

SEQ ID NO: 370438 - DNA, 12 bp, Artificial Sequence
  Oligonucleotide primer for the detection of SNP TSC0001451
agaaaatatatt

SEQ ID NO: 370439 - DNA, 12 bp, Artificial Sequence
  Oligonucleotide primer for the detection of SNP TSC0001452
caaaattaatat

SEQ ID NO: 370440 - DNA, 12 bp, Artificial Sequence
  Oligonucleotide primer for the detection of SNP TSC0001452
tgttgagagata

SEQ ID NO: 370441 - DNA, 12 bp, Artificial Sequence
  Oligonucleotide primer for the detection of SNP TSC0001452
tattaaaaaaca

SEQ ID NO: 370442 - DNA, 12 bp, Artificial Sequence
  Oligonucleotide primer for the detection of SNP TSC0001452
taaagttaatgt

SEQ ID NO: 370443 - DNA, 12 bp, Artificial Sequence
  Oligonucleotide primer for the detection of SNP TSC0058179
atttaaagtttt

SEQ ID NO: 370444 - DNA, 12 bp, Artificial Sequence
  Oligonucleotide primer for the detection of SNP TSC0058179
atctaaaatttc

SEQ ID NO: 370445 - DNA, 12 bp, Artificial Sequence
  Oligonucleotide primer for the detection of SNP TSC0058179
gtatattttgaa

SEQ ID NO: 370446 - DNA, 12 bp, Artificial Sequence
  Oligonucleotide primer for the detection of SNP TSC0009804
aatcccctacca

SEQ ID NO: 370447 - DNA, 12 bp, Artificial Sequence
  Oligonucleotide primer for the detection of SNP TSC0009804
gtggagatagtt

SEQ ID NO: 370448 - DNA, 12 bp, Artificial Sequence
  Oligonucleotide primer for the detection of SNP TSC0009804
gcggagatagtt

SEQ ID NO: 370449 - DNA, 12 bp, Artificial Sequence
  Oligonucleotide primer for the detection of SNP TSC0009804
acaaaaacaatc

SEQ ID NO: 370450 - DNA, 12 bp, Artificial Sequence
  Oligonucleotide primer for the detection of SNP TSC0009804
acgaaaacaatc

SEQ ID NO: 370451 - DNA, 12 bp, Artificial Sequence
  Oligonucleotide primer for the detection of SNP TSC0001527
acaattcaattc

SEQ ID NO: 370452 - DNA, 12 bp, Artificial Sequence
  Oligonucleotide primer for the detection of SNP TSC0001527
atttggtgggag

SEQ ID NO: 370453 - DNA, 12 bp, Artificial Sequence
  Oligonucleotide primer for the detection of SNP TSC0001527
attcggtgggag

SEQ ID NO: 370454 - DNA, 12 bp, Artificial Sequence
  Oligonucleotide primer for the detection of SNP TSC0058180
aattaatcatac

SEQ ID NO: 370455 - DNA, 12 bp, Artificial Sequence
  Oligonucleotide primer for the detection of SNP TSC0058180
ttatattggaag

SEQ ID NO: 370456 - DNA, 12 bp, Artificial Sequence
  Oligonucleotide primer for the detection of SNP TSC0058180
agttaattatat

SEQ ID NO: 370457 - DNA, 12 bp, Artificial Sequence
  Oligonucleotide primer for the detection of SNP TSC0009926
aatatactaact

SEQ ID NO: 370458 - DNA, 12 bp, Artificial Sequence
  Oligonucleotide primer for the detection of SNP TSC0009812
gaatcctaaaac

SEQ ID NO: 370459 - DNA, 12 bp, Artificial Sequence
  Oligonucleotide primer for the detection of SNP TSC0009812
aagtagtttggg

SEQ ID NO: 370460 - DNA, 12 bp, Artificial Sequence
  Oligonucleotide primer for the detection of SNP TSC0009812
aaacaacttaaa

SEQ ID NO: 370461 - DNA, 12 bp, Artificial Sequence
  Oligonucleotide primer for the detection of SNP TSC0058181
taaaaacaacga

SEQ ID NO: 370462 - DNA, 12 bp, Artificial Sequence
  Oligonucleotide primer for the detection of SNP TSC0058181
tggaggtggtta

SEQ ID NO: 370463 - DNA, 12 bp, Artificial Sequence
  Oligonucleotide primer for the detection of SNP TSC0058181
taaaaataatta

SEQ ID NO: 370464 - DNA, 12 bp, Artificial Sequence
  Oligonucleotide primer for the detection of SNP TSC0058181
tgggggtagtgg

SEQ ID NO: 370465 - DNA, 12 bp, Artificial Sequence
  Oligonucleotide primer for the detection of SNP TSC0058181
tgggggtagcgg

SEQ ID NO: 370466 - DNA, 12 bp, Artificial Sequence
  Oligonucleotide primer for the detection of SNP TSC0000440
ttcccttttttt

SEQ ID NO: 370467 - DNA, 12 bp, Artificial Sequence
  Oligonucleotide primer for the detection of SNP TSC0000440
tatgggagattt

SEQ ID NO: 370468 - DNA, 12 bp, Artificial Sequence
  Oligonucleotide primer for the detection of SNP TSC0058182
ttttttaattca

SEQ ID NO: 370469 - DNA, 12 bp, Artificial Sequence
  Oligonucleotide primer for the detection of SNP TSC0058182
gaaattattagt

SEQ ID NO: 370470 - DNA, 12 bp, Artificial Sequence
  Oligonucleotide primer for the detection of SNP TSC0058182
aaaattatcaac

SEQ ID NO: 370471 - DNA, 12 bp, Artificial Sequence
  Oligonucleotide primer for the detection of SNP TSC0058183
ttttaataatat

SEQ ID NO: 370472 - DNA, 12 bp, Artificial Sequence
  Oligonucleotide primer for the detection of SNP TSC0058183
taaattattaaa

SEQ ID NO: 370473 - DNA, 12 bp, Artificial Sequence
  Oligonucleotide primer for the detection of SNP TSC0058190
aacctaattact

SEQ ID NO: 370474 - DNA, 12 bp, Artificial Sequence
  Oligonucleotide primer for the detection of SNP TSC0058190
gtggtgggttaa

SEQ ID NO: 370475 - DNA, 12 bp, Artificial Sequence
  Oligonucleotide primer for the detection of SNP TSC0001297
aaattaaacctc

SEQ ID NO: 370476 - DNA, 12 bp, Artificial Sequence
  Oligonucleotide primer for the detection of SNP TSC0001297
cctactctataa

SEQ ID NO: 370477 - DNA, 12 bp, Artificial Sequence
  Oligonucleotide primer for the detection of SNP TSC0001297
aggttgagtttt

SEQ ID NO: 370478 - DNA, 12 bp, Artificial Sequence
  Oligonucleotide primer for the detection of SNP TSC0058191
tcctcccctccc

SEQ ID NO: 370479 - DNA, 12 bp, Artificial Sequence
  Oligonucleotide primer for the detection of SNP TSC0058191
gtgtggggtata

SEQ ID NO: 370480 - DNA, 12 bp, Artificial Sequence
  Oligonucleotide primer for the detection of SNP TSC0058192
tttataaaaacc

SEQ ID NO: 370481 - DNA, 12 bp, Artificial Sequence
  Oligonucleotide primer for the detection of SNP TSC0058194
tcaaccatttta

SEQ ID NO: 370482 - DNA, 12 bp, Artificial Sequence
  Oligonucleotide primer for the detection of SNP TSC0058194
tcaaccgtttta

SEQ ID NO: 370483 - DNA, 12 bp, Artificial Sequence
  Oligonucleotide primer for the detection of SNP TSC0058194
tatggaaaggaa

SEQ ID NO: 370484 - DNA, 12 bp, Artificial Sequence
  Oligonucleotide primer for the detection of SNP TSC0058194
tacggaaaggaa

SEQ ID NO: 370485 - DNA, 12 bp, Artificial Sequence
  Oligonucleotide primer for the detection of SNP TSC0058194
tttagtcgtttt

SEQ ID NO: 370486 - DNA, 12 bp, Artificial Sequence
  Oligonucleotide primer for the detection of SNP TSC0058195
attccttttccc

SEQ ID NO: 370487 - DNA, 12 bp, Artificial Sequence
  Oligonucleotide primer for the detection of SNP TSC0058195
atagaggtatat

SEQ ID NO: 370488 - DNA, 12 bp, Artificial Sequence
  Oligonucleotide primer for the detection of SNP TSC0058196
tccaataaaaat

SEQ ID NO: 370489 - DNA, 12 bp, Artificial Sequence
  Oligonucleotide primer for the detection of SNP TSC0058196
tttatagttaat

SEQ ID NO: 370490 - DNA, 12 bp, Artificial Sequence
  Oligonucleotide primer for the detection of SNP TSC0058196
tccacaaccaat

SEQ ID NO: 370491 - DNA, 12 bp, Artificial Sequence
  Oligonucleotide primer for the detection of SNP TSC0058196
tttagtaaaaat

SEQ ID NO: 370492 - DNA, 12 bp, Artificial Sequence
  Oligonucleotide primer for the detection of SNP TSC0058197
tttaatagggaa

SEQ ID NO: 370493 - DNA, 12 bp, Artificial Sequence
  Oligonucleotide primer for the detection of SNP TSC0058203
tactttattaaa

SEQ ID NO: 370494 - DNA, 12 bp, Artificial Sequence
  Oligonucleotide primer for the detection of SNP TSC0058203
ctttaaaactca

SEQ ID NO: 370495 - DNA, 12 bp, Artificial Sequence
  Oligonucleotide primer for the detection of SNP TSC0058203
attttgttagat

SEQ ID NO: 370496 - DNA, 12 bp, Artificial Sequence
  Oligonucleotide primer for the detection of SNP TSC0058204
aaaattaatcta

SEQ ID NO: 370497 - DNA, 12 bp, Artificial Sequence
  Oligonucleotide primer for the detection of SNP TSC0058204
acataatttcac

SEQ ID NO: 370498 - DNA, 12 bp, Artificial Sequence
  Oligonucleotide primer for the detection of SNP TSC0058204
acgtaatttcac

SEQ ID NO: 370499 - DNA, 12 bp, Artificial Sequence
  Oligonucleotide primer for the detection of SNP TSC0058205
acaaacactcca

SEQ ID NO: 370500 - DNA, 12 bp, Artificial Sequence
  Oligonucleotide primer for the detection of SNP TSC0058205
gtaggtaatttt

SEQ ID NO: 370501 - DNA, 12 bp, Artificial Sequence
  Oligonucleotide primer for the detection of SNP TSC0058205
ataaataactct

SEQ ID NO: 370502 - DNA, 12 bp, Artificial Sequence
  Oligonucleotide primer for the detection of SNP TSC0058206
aaaatctttcta

SEQ ID NO: 370503 - DNA, 12 bp, Artificial Sequence
  Oligonucleotide primer for the detection of SNP TSC0058206
ttattgtattta

SEQ ID NO: 370504 - DNA, 12 bp, Artificial Sequence
  Oligonucleotide primer for the detection of SNP TSC0058213
ctctccaaaacc

SEQ ID NO: 370505 - DNA, 12 bp, Artificial Sequence
  Oligonucleotide primer for the detection of SNP TSC0058213
aactaaacacta

SEQ ID NO: 370506 - DNA, 12 bp, Artificial Sequence
  Oligonucleotide primer for the detection of SNP TSC0058216
ttcataacacaa

SEQ ID NO: 370507 - DNA, 12 bp, Artificial Sequence
  Oligonucleotide primer for the detection of SNP TSC0058216
ataagataatgt

SEQ ID NO: 370508 - DNA, 12 bp, Artificial Sequence
  Oligonucleotide primer for the detection of SNP TSC0058216
acaaaataatac

SEQ ID NO: 370509 - DNA, 12 bp, Artificial Sequence
  Oligonucleotide primer for the detection of SNP TSC0058216
tttatagtatag

SEQ ID NO: 370510 - DNA, 12 bp, Artificial Sequence
  Oligonucleotide primer for the detection of SNP TSC0058220
tttattttaccc

SEQ ID NO: 370511 - DNA, 12 bp, Artificial Sequence
  Oligonucleotide primer for the detection of SNP TSC0058220
gagaattttttt

SEQ ID NO: 370512 - DNA, 12 bp, Artificial Sequence
  Oligonucleotide primer for the detection of SNP TSC0058220
aaattcttttaa

SEQ ID NO: 370513 - DNA, 12 bp, Artificial Sequence
  Oligonucleotide primer for the detection of SNP TSC0058221
ttcctcatcata

SEQ ID NO: 370514 - DNA, 12 bp, Artificial Sequence
  Oligonucleotide primer for the detection of SNP TSC0058221
gttagttgttat

SEQ ID NO: 370515 - DNA, 12 bp, Artificial Sequence
  Oligonucleotide primer for the detection of SNP TSC0058221
accaattatcat

SEQ ID NO: 370516 - DNA, 12 bp, Artificial Sequence
  Oligonucleotide primer for the detection of SNP TSC0058226
caccacatctat

SEQ ID NO: 370517 - DNA, 12 bp, Artificial Sequence
  Oligonucleotide primer for the detection of SNP TSC0058226
caccgcatctat

SEQ ID NO: 370518 - DNA, 12 bp, Artificial Sequence
  Oligonucleotide primer for the detection of SNP TSC0058226
gttggaagggag

SEQ ID NO: 370519 - DNA, 12 bp, Artificial Sequence
  Oligonucleotide primer for the detection of SNP TSC0058227
acctaaccatca

SEQ ID NO: 370520 - DNA, 12 bp, Artificial Sequence
  Oligonucleotide primer for the detection of SNP TSC0058227
gcctaaccatca

SEQ ID NO: 370521 - DNA, 12 bp, Artificial Sequence
  Oligonucleotide primer for the detection of SNP TSC0058227
taggtagttagt

SEQ ID NO: 370522 - DNA, 12 bp, Artificial Sequence
  Oligonucleotide primer for the detection of SNP TSC0058227
ttgattattatc

SEQ ID NO: 370523 - DNA, 12 bp, Artificial Sequence
  Oligonucleotide primer for the detection of SNP TSC0058228
attaaacacaaa

SEQ ID NO: 370524 - DNA, 12 bp, Artificial Sequence
  Oligonucleotide primer for the detection of SNP TSC0058228
ttgatttattat

SEQ ID NO: 370525 - DNA, 12 bp, Artificial Sequence
  Oligonucleotide primer for the detection of SNP TSC0058228
cctaattcatta

SEQ ID NO: 370526 - DNA, 12 bp, Artificial Sequence
  Oligonucleotide primer for the detection of SNP TSC0058228
attaaatataag

SEQ ID NO: 370527 - DNA, 12 bp, Artificial Sequence
  Oligonucleotide primer for the detection of SNP TSC0058231
taattccttaat

SEQ ID NO: 370528 - DNA, 12 bp, Artificial Sequence
  Oligonucleotide primer for the detection of SNP TSC0058231
tatttattgtta

SEQ ID NO: 370529 - DNA, 12 bp, Artificial Sequence
  Oligonucleotide primer for the detection of SNP TSC0058231
tacctattacta

SEQ ID NO: 370530 - DNA, 12 bp, Artificial Sequence
  Oligonucleotide primer for the detection of SNP TSC0058231
tagttttttagt

SEQ ID NO: 370531 - DNA, 12 bp, Artificial Sequence
  Oligonucleotide primer for the detection of SNP TSC0058232
tataaattcaat

SEQ ID NO: 370532 - DNA, 12 bp, Artificial Sequence
  Oligonucleotide primer for the detection of SNP TSC0058233
attcatttaaaa

SEQ ID NO: 370533 - DNA, 12 bp, Artificial Sequence
  Oligonucleotide primer for the detection of SNP TSC0058233
tgttggatttat

SEQ ID NO: 370534 - DNA, 12 bp, Artificial Sequence
  Oligonucleotide primer for the detection of SNP TSC0058233
tattaaatttac

SEQ ID NO: 370535 - DNA, 12 bp, Artificial Sequence
  Oligonucleotide primer for the detection of SNP TSC0058236
tttacaaatttt

SEQ ID NO: 370536 - DNA, 12 bp, Artificial Sequence
  Oligonucleotide primer for the detection of SNP TSC0058236
tagtaataattt

SEQ ID NO: 370537 - DNA, 12 bp, Artificial Sequence
  Oligonucleotide primer for the detection of SNP TSC0058236
aacaacaattta

SEQ ID NO: 370538 - DNA, 12 bp, Artificial Sequence
  Oligonucleotide primer for the detection of SNP TSC0058236
tttatagatttt

SEQ ID NO: 370539 - DNA, 12 bp, Artificial Sequence
  Oligonucleotide primer for the detection of SNP TSC0058238
cttaatacataa

SEQ ID NO: 370540 - DNA, 12 bp, Artificial Sequence
  Oligonucleotide primer for the detection of SNP TSC0058238
atcaccaaacat

SEQ ID NO: 370541 - DNA, 12 bp, Artificial Sequence
  Oligonucleotide primer for the detection of SNP TSC0058238
tttggtatatag

SEQ ID NO: 370542 - DNA, 12 bp, Artificial Sequence
  Oligonucleotide primer for the detection of SNP TSC0058239
tttagatattta

SEQ ID NO: 370543 - DNA, 12 bp, Artificial Sequence
  Oligonukleotid-Primer
tggatggtttat

SEQ ID NO: 370544 - DNA, 12 bp, Artificial Sequence
  Oligonucleotide primer for the detection of SNP TSC0058241
aaaccacacacc

SEQ ID NO: 370545 - DNA, 12 bp, Artificial Sequence
  Oligonucleotide primer for the detection of SNP TSC0058242
tactataatatc

SEQ ID NO: 370546 - DNA, 12 bp, Artificial Sequence
  Oligonucleotide primer for the detection of SNP TSC0058242
tagaaaaaatgg

SEQ ID NO: 370547 - DNA, 12 bp, Artificial Sequence
  Oligonukleotid-Primer
tgttgtgatgtt

SEQ ID NO: 370548 - DNA, 12 bp, Artificial Sequence
  Oligonucleotide primer for the detection of SNP TSC0058243
ttgtgagtgttt

SEQ ID NO: 370549 - DNA, 12 bp, Artificial Sequence
  Oligonucleotide primer for the detection of SNP TSC0058243
tataaatattca

SEQ ID NO: 370550 - DNA, 12 bp, Artificial Sequence
  Oligonucleotide primer for the detection of SNP TSC0058244
tttttagttaat

SEQ ID NO: 370551 - DNA, 12 bp, Artificial Sequence
  Oligonukleotid-Primer
cctttaaccaat

SEQ ID NO: 370552 - DNA, 12 bp, Artificial Sequence
  Oligonucleotide primer for the detection of SNP TSC0006739
catcattatatc

SEQ ID NO: 370553 - DNA, 12 bp, Artificial Sequence
  Oligonucleotide primer for the detection of SNP TSC0006739
tgttagatgttg

SEQ ID NO: 370554 - DNA, 12 bp, Artificial Sequence
  Oligonucleotide primer for the detection of SNP TSC0006739
tactaaatatta

SEQ ID NO: 370555 - DNA, 12 bp, Artificial Sequence
  Oligonucleotide primer for the detection of SNP TSC0006739
attattgtattt

SEQ ID NO: 370556 - DNA, 12 bp, Artificial Sequence
  Oligonucleotide primer for the detection of SNP TSC0006740
cactaattcaca

SEQ ID NO: 370557 - DNA, 12 bp, Artificial Sequence
  Oligonucleotide primer for the detection of SNP TSC0006740
atggaagatgaa

SEQ ID NO: 370558 - DNA, 12 bp, Artificial Sequence
  Oligonucleotide primer for the detection of SNP TSC0006740
atggaagacgaa

SEQ ID NO: 370559 - DNA, 12 bp, Artificial Sequence
  Oligonucleotide primer for the detection of SNP TSC0006740
tgatttatattt

SEQ ID NO: 370560 - DNA, 12 bp, Artificial Sequence
  Oligonucleotide primer for the detection of SNP TSC0058253
acaaaaatcccc

SEQ ID NO: 370561 - DNA, 12 bp, Artificial Sequence
  Oligonucleotide primer for the detection of SNP TSC0058253
ttttgggataat

SEQ ID NO: 370562 - DNA, 12 bp, Artificial Sequence
  Oligonucleotide primer for the detection of SNP TSC0058253
gtagaagttttt

SEQ ID NO: 370563 - DNA, 12 bp, Artificial Sequence
  Oligonucleotide primer for the detection of SNP TSC0058254
accaaaactaaa

SEQ ID NO: 370564 - DNA, 12 bp, Artificial Sequence
  Oligonucleotide primer for the detection of SNP TSC0058254
taggattgggtt

SEQ ID NO: 370565 - DNA, 12 bp, Artificial Sequence
  Oligonucleotide primer for the detection of SNP TSC0058254
taggatcgggtt

SEQ ID NO: 370566 - DNA, 12 bp, Artificial Sequence
  Oligonucleotide primer for the detection of SNP TSC0058254
caaaaccaaatt

SEQ ID NO: 370567 - DNA, 12 bp, Artificial Sequence
  Oligonucleotide primer for the detection of SNP TSC0058254
caaaaccgaatt

SEQ ID NO: 370568 - DNA, 12 bp, Artificial Sequence
  Oligonucleotide primer for the detection of SNP TSC0058254
tgttaaggttga

SEQ ID NO: 370569 - DNA, 12 bp, Artificial Sequence
  Oligonucleotide primer for the detection of SNP TSC0058255
ataaaacccacc

SEQ ID NO: 370570 - DNA, 12 bp, Artificial Sequence
  Oligonucleotide primer for the detection of SNP TSC0058255
ggttgttttgtg

SEQ ID NO: 370571 - DNA, 12 bp, Artificial Sequence
  Oligonucleotide primer for the detection of SNP TSC0005106
aatcaatacaac

SEQ ID NO: 370572 - DNA, 12 bp, Artificial Sequence
  Oligonucleotide primer for the detection of SNP TSC0058256
ctcaaataaaat

SEQ ID NO: 370573 - DNA, 12 bp, Artificial Sequence
  Oligonucleotide primer for the detection of SNP TSC0058257
acccacccaact

SEQ ID NO: 370574 - DNA, 12 bp, Artificial Sequence
  Oligonucleotide primer for the detection of SNP TSC0058257
tgggaatggagg

SEQ ID NO: 370575 - DNA, 12 bp, Artificial Sequence
  Oligonucleotide primer for the detection of SNP TSC0058260
ctaaaaactatt

SEQ ID NO: 370576 - DNA, 12 bp, Artificial Sequence
  Oligonucleotide primer for the detection of SNP TSC0058261
actaaataaatt

SEQ ID NO: 370577 - DNA, 12 bp, Artificial Sequence
  Oligonucleotide primer for the detection of SNP TSC0058261
atggattattta

SEQ ID NO: 370578 - DNA, 12 bp, Artificial Sequence
  Oligonucleotide primer for the detection of SNP TSC0058261
acggattattta

SEQ ID NO: 370579 - DNA, 12 bp, Artificial Sequence
  Oligonucleotide primer for the detection of SNP TSC0058262
aacccacacaat

SEQ ID NO: 370580 - DNA, 12 bp, Artificial Sequence
  Oligonucleotide primer for the detection of SNP TSC0058263
ttatagtaatta

SEQ ID NO: 370581 - DNA, 12 bp, Artificial Sequence
  Oligonucleotide primer for the detection of SNP TSC0058265
aatttatttttc

SEQ ID NO: 370582 - DNA, 12 bp, Artificial Sequence
  Oligonucleotide primer for the detection of SNP TSC0058265
aatccattcttc

SEQ ID NO: 370583 - DNA, 12 bp, Artificial Sequence
  Oligonucleotide primer for the detection of SNP TSC0058265
aaatttatgaat

SEQ ID NO: 370584 - DNA, 12 bp, Artificial Sequence
  Oligonucleotide primer for the detection of SNP TSC0005900
ttaataacaacc

SEQ ID NO: 370585 - DNA, 12 bp, Artificial Sequence
  Oligonucleotide primer for the detection of SNP TSC0006763
tcaattcttatt

SEQ ID NO: 370586 - DNA, 12 bp, Artificial Sequence
  Oligonucleotide primer for the detection of SNP TSC0006763
gtggatgagtta

SEQ ID NO: 370587 - DNA, 12 bp, Artificial Sequence
  Oligonucleotide primer for the detection of SNP TSC0007922
tataataaaact

SEQ ID NO: 370588 - DNA, 12 bp, Artificial Sequence
  Oligonucleotide primer for the detection of SNP TSC0007922
agagtttattag

SEQ ID NO: 370589 - DNA, 12 bp, Artificial Sequence
  Oligonucleotide primer for the detection of SNP TSC0058267
tgaagaaatatt

SEQ ID NO: 370590 - DNA, 12 bp, Artificial Sequence
  Oligonucleotide primer for the detection of SNP TSC0058268
tagagtagattt

SEQ ID NO: 370591 - DNA, 12 bp, Artificial Sequence
  Oligonucleotide primer for the detection of SNP TSC0058268
gaagaattgtgt

SEQ ID NO: 370592 - DNA, 12 bp, Artificial Sequence
  Oligonucleotide primer for the detection of SNP TSC0058268
gaagaattgtgc

SEQ ID NO: 370593 - DNA, 12 bp, Artificial Sequence
  Oligonucleotide primer for the detection of SNP TSC0058269
ccaaaattccat

SEQ ID NO: 370594 - DNA, 12 bp, Artificial Sequence
  Oligonucleotide primer for the detection of SNP TSC0058269
ccgaaattccat

SEQ ID NO: 370595 - DNA, 12 bp, Artificial Sequence
  Oligonucleotide primer for the detection of SNP TSC0058270
aattaaaaactt

SEQ ID NO: 370596 - DNA, 12 bp, Artificial Sequence
  Oligonucleotide primer for the detection of SNP TSC0058270
ttgttttttagg

SEQ ID NO: 370597 - DNA, 12 bp, Artificial Sequence
  Oligonucleotide primer for the detection of SNP TSC0058271
tttagtgtaatt

SEQ ID NO: 370598 - DNA, 12 bp, Artificial Sequence
  Oligonucleotide primer for the detection of SNP TSC0058271
ccccaatataat

SEQ ID NO: 370599 - DNA, 12 bp, Artificial Sequence
  Oligonucleotide primer for the detection of SNP TSC0058271
ttaagggttatt

SEQ ID NO: 370600 - DNA, 12 bp, Artificial Sequence
  Oligonucleotide primer for the detection of SNP TSC0058272
tggggagatagg

SEQ ID NO: 370601 - DNA, 12 bp, Artificial Sequence
  Oligonucleotide primer for the detection of SNP TSC0008243
ataaatacacat

SEQ ID NO: 370602 - DNA, 12 bp, Artificial Sequence
  Oligonucleotide primer for the detection of SNP TSC0008243
tatattaaattg

SEQ ID NO: 370603 - DNA, 12 bp, Artificial Sequence
  Oligonucleotide primer for the detection of SNP TSC0008243
tatatcaaacta

SEQ ID NO: 370604 - DNA, 12 bp, Artificial Sequence
  Oligonucleotide primer for the detection of SNP TSC0008243
atgggtatatat

SEQ ID NO: 370605 - DNA, 12 bp, Artificial Sequence
  Oligonucleotide primer for the detection of SNP TSC0058273
taattaaatcct

SEQ ID NO: 370606 - DNA, 12 bp, Artificial Sequence
  Oligonucleotide primer for the detection of SNP TSC0058273
accactaatatc

SEQ ID NO: 370607 - DNA, 12 bp, Artificial Sequence
  Oligonucleotide primer for the detection of SNP TSC0058273
taattgaatttt

SEQ ID NO: 370608 - DNA, 12 bp, Artificial Sequence
  Oligonucleotide primer for the detection of SNP TSC0058274
cacttctaatta

SEQ ID NO: 370609 - DNA, 12 bp, Artificial Sequence
  Oligonucleotide primer for the detection of SNP TSC0058274
gggaatgttata

SEQ ID NO: 370610 - DNA, 12 bp, Artificial Sequence
  Oligonucleotide primer for the detection of SNP TSC0058274
aaatactacaaa

SEQ ID NO: 370611 - DNA, 12 bp, Artificial Sequence
  Oligonucleotide primer for the detection of SNP TSC0058277
aaaacacaataa

SEQ ID NO: 370612 - DNA, 12 bp, Artificial Sequence
  Oligonucleotide primer for the detection of SNP TSC0058277
tctccattatat

SEQ ID NO: 370613 - DNA, 12 bp, Artificial Sequence
  Oligonucleotide primer for the detection of SNP TSC0058277
agggtataatag

SEQ ID NO: 370614 - DNA, 12 bp, Artificial Sequence
  Oligonucleotide primer for the detection of SNP TSC0007242
aatgttaatgtt

SEQ ID NO: 370615 - DNA, 12 bp, Artificial Sequence
  Oligonucleotide primer for the detection of SNP TSC0007242
aacgttaatgtt

SEQ ID NO: 370616 - DNA, 12 bp, Artificial Sequence
  Oligonucleotide primer for the detection of SNP TSC0007242
acaacactaata

SEQ ID NO: 370617 - DNA, 12 bp, Artificial Sequence
  Oligonucleotide primer for the detection of SNP TSC0007242
acaacgctaata

SEQ ID NO: 370618 - DNA, 12 bp, Artificial Sequence
  Oligonucleotide primer for the detection of SNP TSC0007242
agtaaagattag

SEQ ID NO: 370619 - DNA, 12 bp, Artificial Sequence
  Oligonucleotide primer for the detection of SNP TSC0058278
ttacctcttcac

SEQ ID NO: 370620 - DNA, 12 bp, Artificial Sequence
  Oligonucleotide primer for the detection of SNP TSC0058278
tggaatgtattt

SEQ ID NO: 370621 - DNA, 12 bp, Artificial Sequence
  Oligonucleotide primer for the detection of SNP TSC0058279
aataatcaacaa

SEQ ID NO: 370622 - DNA, 12 bp, Artificial Sequence
  Oligonucleotide primer for the detection of SNP TSC0058279
ttatcattttca

SEQ ID NO: 370623 - DNA, 12 bp, Artificial Sequence
  Oligonucleotide primer for the detection of SNP TSC0058279
agtaattaataa

SEQ ID NO: 370624 - DNA, 12 bp, Artificial Sequence
  Oligonucleotide primer for the detection of SNP TSC0058280
ctttcactaata

SEQ ID NO: 370625 - DNA, 12 bp, Artificial Sequence
  Oligonucleotide primer for the detection of SNP TSC0058281
tatatactctta

SEQ ID NO: 370626 - DNA, 12 bp, Artificial Sequence
  Oligonucleotide primer for the detection of SNP TSC0058281
taccttattaac

SEQ ID NO: 370627 - DNA, 12 bp, Artificial Sequence
  Oligonucleotide primer for the detection of SNP TSC0058282
atataaacaatc

SEQ ID NO: 370628 - DNA, 12 bp, Artificial Sequence
  Oligonucleotide primer for the detection of SNP TSC0058282
atataaacgatc

SEQ ID NO: 370629 - DNA, 12 bp, Artificial Sequence
  Oligonucleotide primer for the detection of SNP TSC0058282
cttctacttata

SEQ ID NO: 370630 - DNA, 12 bp, Artificial Sequence
  Oligonucleotide primer for the detection of SNP TSC0058282
tgtgggtgattt

SEQ ID NO: 370631 - DNA, 12 bp, Artificial Sequence
  Oligonucleotide primer for the detection of SNP TSC0058282
tgtgggcgattt

SEQ ID NO: 370632 - DNA, 12 bp, Artificial Sequence
  Oligonucleotide primer for the detection of SNP TSC0058283
actcttcttaac

SEQ ID NO: 370633 - DNA, 12 bp, Artificial Sequence
  Oligonucleotide primer for the detection of SNP TSC0058283
aagttagagaaa

SEQ ID NO: 370634 - DNA, 12 bp, Artificial Sequence
  Oligonucleotide primer for the detection of SNP TSC0058284
taacaaactaat

SEQ ID NO: 370635 - DNA, 12 bp, Artificial Sequence
  Oligonucleotide primer for the detection of SNP TSC0058285
gagtatttgttt

SEQ ID NO: 370636 - DNA, 12 bp, Artificial Sequence
  Oligonucleotide primer for the detection of SNP TSC0058285
aaacacctactc

SEQ ID NO: 370637 - DNA, 12 bp, Artificial Sequence
  Oligonucleotide primer for the detection of SNP TSC0058285
taatggtaggtg

SEQ ID NO: 370638 - DNA, 12 bp, Artificial Sequence
  Oligonucleotide primer for the detection of SNP TSC0058286
gttatagaaatt

SEQ ID NO: 370639 - DNA, 12 bp, Artificial Sequence
  Oligonucleotide primer for the detection of SNP TSC0058286
ccataaaaacta

SEQ ID NO: 370640 - DNA, 12 bp, Artificial Sequence
  Oligonucleotide primer for the detection of SNP TSC0058286
gggaagataatt

SEQ ID NO: 370641 - DNA, 12 bp, Artificial Sequence
  Oligonucleotide primer for the detection of SNP TSC0058286
gggaagataatc

SEQ ID NO: 370642 - DNA, 12 bp, Artificial Sequence
  Oligonucleotide primer for the detection of SNP TSC0058289
cactccaacccc

SEQ ID NO: 370643 - DNA, 12 bp, Artificial Sequence
  Oligonucleotide primer for the detection of SNP TSC0058289
tttatattgttg

SEQ ID NO: 370644 - DNA, 12 bp, Artificial Sequence
  Oligonucleotide primer for the detection of SNP TSC0058289
tttatattgtcg

SEQ ID NO: 370645 - DNA, 12 bp, Artificial Sequence
  Oligonucleotide primer for the detection of SNP TSC0058289
ctcacactatca

SEQ ID NO: 370646 - DNA, 12 bp, Artificial Sequence
  Oligonucleotide primer for the detection of SNP TSC0058289
ctcacactatcg

SEQ ID NO: 370647 - DNA, 12 bp, Artificial Sequence
  Oligonucleotide primer for the detection of SNP TSC0058290
tatcgtgtttgg

SEQ ID NO: 370648 - DNA, 12 bp, Artificial Sequence
  Oligonucleotide primer for the detection of SNP TSC0058290
caccatacctaa

SEQ ID NO: 370649 - DNA, 12 bp, Artificial Sequence
  Oligonucleotide primer for the detection of SNP TSC0058290
caccgtacctaa

SEQ ID NO: 370650 - DNA, 12 bp, Artificial Sequence
  Oligonucleotide primer for the detection of SNP TSC0058290
agaatttaatgt

SEQ ID NO: 370651 - DNA, 12 bp, Artificial Sequence
  Oligonucleotide primer for the detection of SNP TSC0058291
aaataaacatta

SEQ ID NO: 370652 - DNA, 12 bp, Artificial Sequence
  Oligonucleotide primer for the detection of SNP TSC0058291
gaggtagagttt

SEQ ID NO: 370653 - DNA, 12 bp, Artificial Sequence
  Oligonucleotide primer for the detection of SNP TSC0058291
gaggtagagttc

SEQ ID NO: 370654 - DNA, 12 bp, Artificial Sequence
  Oligonucleotide primer for the detection of SNP TSC0058291
gagtgagtatta

SEQ ID NO: 370655 - DNA, 12 bp, Artificial Sequence
  Oligonucleotide primer for the detection of SNP TSC0058293
attatctaaaaa

SEQ ID NO: 370656 - DNA, 12 bp, Artificial Sequence
  Oligonucleotide primer for the detection of SNP TSC0058293
cttcctctacaa

SEQ ID NO: 370657 - DNA, 12 bp, Artificial Sequence
  Oligonucleotide primer for the detection of SNP TSC0058293
ttatttgagagt

SEQ ID NO: 370658 - DNA, 12 bp, Artificial Sequence
  Oligonucleotide primer for the detection of SNP TSC0058295
gtttttatgttt

SEQ ID NO: 370659 - DNA, 12 bp, Artificial Sequence
  Oligonucleotide primer for the detection of SNP TSC0058295
atcctcatattt

SEQ ID NO: 370660 - DNA, 12 bp, Artificial Sequence
  Oligonucleotide primer for the detection of SNP TSC0058296
tgggaagtttat

SEQ ID NO: 370661 - DNA, 12 bp, Artificial Sequence
  Oligonucleotide primer for the detection of SNP TSC0058296
aattaaagtaag

SEQ ID NO: 370662 - DNA, 12 bp, Artificial Sequence
  Oligonucleotide primer for the detection of SNP TSC0005890
aaacccaccaac

SEQ ID NO: 370663 - DNA, 12 bp, Artificial Sequence
  Oligonucleotide primer for the detection of SNP TSC0004699
tctatttctaaa

SEQ ID NO: 370664 - DNA, 12 bp, Artificial Sequence
  Oligonucleotide primer for the detection of SNP TSC0004699
aataaaatatag

SEQ ID NO: 370665 - DNA, 12 bp, Artificial Sequence
  Oligonucleotide primer for the detection of SNP TSC0058301
aataccattttt

SEQ ID NO: 370666 - DNA, 12 bp, Artificial Sequence
  Oligonucleotide primer for the detection of SNP TSC0058301
tgtaagataagg

SEQ ID NO: 370667 - DNA, 12 bp, Artificial Sequence
  Oligonucleotide primer for the detection of SNP TSC0058302
ttattcatataa

SEQ ID NO: 370668 - DNA, 12 bp, Artificial Sequence
  Oligonucleotide primer for the detection of SNP TSC0058303
tatcctcctttt

SEQ ID NO: 370669 - DNA, 12 bp, Artificial Sequence
  Oligonucleotide primer for the detection of SNP TSC0058303
tggagttataag

SEQ ID NO: 370670 - DNA, 12 bp, Artificial Sequence
  Oligonucleotide primer for the detection of SNP TSC0058303
cggagttataag

SEQ ID NO: 370671 - DNA, 12 bp, Artificial Sequence
  Oligonucleotide primer for the detection of SNP TSC0058305
gtagaaatagga

SEQ ID NO: 370672 - DNA, 12 bp, Artificial Sequence
  Oligonucleotide primer for the detection of SNP TSC0058310
aaaaaccttccc

SEQ ID NO: 370673 - DNA, 12 bp, Artificial Sequence
  Oligonucleotide primer for the detection of SNP TSC0058310
tagaagaggtgg

SEQ ID NO: 370674 - DNA, 12 bp, Artificial Sequence
  Oligonucleotide primer for the detection of SNP TSC0058311
aacaaccactta

SEQ ID NO: 370675 - DNA, 12 bp, Artificial Sequence
  Oligonucleotide primer for the detection of SNP TSC0058311
gtattaaagttt

SEQ ID NO: 370676 - DNA, 12 bp, Artificial Sequence
  Oligonucleotide primer for the detection of SNP TSC0058311
aatatcaaaatc

SEQ ID NO: 370677 - DNA, 12 bp, Artificial Sequence
  Oligonucleotide primer for the detection of SNP TSC0058311
gggtaattattt

SEQ ID NO: 370678 - DNA, 12 bp, Artificial Sequence
  Oligonucleotide primer for the detection of SNP TSC0058315
ttctttaaatta

SEQ ID NO: 370679 - DNA, 12 bp, Artificial Sequence
  Oligonucleotide primer for the detection of SNP TSC0058315
tattaagtagat

SEQ ID NO: 370680 - DNA, 12 bp, Artificial Sequence
  Oligonucleotide primer for the detection of SNP TSC0058315
cactaaacaaat

SEQ ID NO: 370681 - DNA, 12 bp, Artificial Sequence
  Oligonucleotide primer for the detection of SNP TSC0058317
tatttaaaaaat

SEQ ID NO: 370682 - DNA, 12 bp, Artificial Sequence
  Oligonucleotide primer for the detection of SNP TSC0058317
atttggtgatga

SEQ ID NO: 370683 - DNA, 12 bp, Artificial Sequence
  Oligonucleotide primer for the detection of SNP TSC0058317
atctaataataa

SEQ ID NO: 370684 - DNA, 12 bp, Artificial Sequence
  Oligonucleotide primer for the detection of SNP TSC0058317
tatttgaaggat

SEQ ID NO: 370685 - DNA, 12 bp, Artificial Sequence
  Oligonucleotide primer for the detection of SNP TSC0058318
aaaaataccttc

SEQ ID NO: 370686 - DNA, 12 bp, Artificial Sequence
  Oligonucleotide primer for the detection of SNP TSC0058318
tttatattaatg

SEQ ID NO: 370687 - DNA, 12 bp, Artificial Sequence
  Oligonucleotide primer for the detection of SNP TSC0058319
aaatattttaat

SEQ ID NO: 370688 - DNA, 12 bp, Artificial Sequence
  Oligonucleotide primer for the detection of SNP TSC0058319
gaaagaatatag

SEQ ID NO: 370689 - DNA, 12 bp, Artificial Sequence
  Oligonucleotide primer for the detection of SNP TSC0058320
tattctttctct

SEQ ID NO: 370690 - DNA, 12 bp, Artificial Sequence
  Oligonucleotide primer for the detection of SNP TSC0058320
agaaaaaaataa

SEQ ID NO: 370691 - DNA, 12 bp, Artificial Sequence
  Oligonucleotide primer for the detection of SNP TSC0058321
acattataaaat

SEQ ID NO: 370692 - DNA, 12 bp, Artificial Sequence
  Oligonucleotide primer for the detection of SNP TSC0058322
acaattcccatc

SEQ ID NO: 370693 - DNA, 12 bp, Artificial Sequence
  Oligonucleotide primer for the detection of SNP TSC0058322
gttaattattat

SEQ ID NO: 370694 - DNA, 12 bp, Artificial Sequence
  Oligonucleotide primer for the detection of SNP TSC0058323
ggttagatatga

SEQ ID NO: 370695 - DNA, 12 bp, Artificial Sequence
  Oligonucleotide primer for the detection of SNP TSC0058323
tcaaacataaaa

SEQ ID NO: 370696 - DNA, 12 bp, Artificial Sequence
  Oligonucleotide primer for the detection of SNP TSC0058324
ccaacataaaaa

SEQ ID NO: 370697 - DNA, 12 bp, Artificial Sequence
  Oligonucleotide primer for the detection of SNP TSC0058324
taaatcttctaa

SEQ ID NO: 370698 - DNA, 12 bp, Artificial Sequence
  Oligonucleotide primer for the detection of SNP TSC0058324
ttagtatgggag

SEQ ID NO: 370699 - DNA, 12 bp, Artificial Sequence
  Oligonucleotide primer for the detection of SNP TSC0058325
ctcccatactaa

SEQ ID NO: 370700 - DNA, 12 bp, Artificial Sequence
  Oligonucleotide primer for the detection of SNP TSC0058325
gggtaggaagta

SEQ ID NO: 370701 - DNA, 12 bp, Artificial Sequence
  Oligonucleotide primer for the detection of SNP TSC0058326
ccacaataaact

SEQ ID NO: 370702 - DNA, 12 bp, Artificial Sequence
  Oligonucleotide primer for the detection of SNP TSC0058326
ttagtttgtaga

SEQ ID NO: 370703 - DNA, 12 bp, Artificial Sequence
  Oligonucleotide primer for the detection of SNP TSC0058326
tcaacttacaaa

SEQ ID NO: 370704 - DNA, 12 bp, Artificial Sequence
  Oligonucleotide primer for the detection of SNP TSC0058326
ttataataggtt

SEQ ID NO: 370705 - DNA, 12 bp, Artificial Sequence
  Oligonucleotide primer for the detection of SNP TSC0058327
ccatccctttct

SEQ ID NO: 370706 - DNA, 12 bp, Artificial Sequence
  Oligonucleotide primer for the detection of SNP TSC0058327
gaagttttttta

SEQ ID NO: 370707 - DNA, 12 bp, Artificial Sequence
  Oligonucleotide primer for the detection of SNP TSC0006975
aaaaatatacta

SEQ ID NO: 370708 - DNA, 12 bp, Artificial Sequence
  Oligonucleotide primer for the detection of SNP TSC0006975
catatatacaaa

SEQ ID NO: 370709 - DNA, 12 bp, Artificial Sequence
  Oligonucleotide primer for the detection of SNP TSC0006975
gaaggatgtatt

SEQ ID NO: 370710 - DNA, 12 bp, Artificial Sequence
  Oligonucleotide primer for the detection of SNP TSC0058329
cctctatcacct

SEQ ID NO: 370711 - DNA, 12 bp, Artificial Sequence
  Oligonucleotide primer for the detection of SNP TSC0058329
attatttttatg

SEQ ID NO: 370712 - DNA, 12 bp, Artificial Sequence
  Oligonucleotide primer for the detection of SNP TSC0058331
tccaataacttc

SEQ ID NO: 370713 - DNA, 12 bp, Artificial Sequence
  Oligonucleotide primer for the detection of SNP TSC0058331
aaaaaaaagtaa

SEQ ID NO: 370714 - DNA, 12 bp, Artificial Sequence
  Oligonucleotide primer for the detection of SNP TSC0058332
ttcaattctaat

SEQ ID NO: 370715 - DNA, 12 bp, Artificial Sequence
  Oligonucleotide primer for the detection of SNP TSC0058333
taacctaaataa

SEQ ID NO: 370716 - DNA, 12 bp, Artificial Sequence
  Oligonucleotide primer for the detection of SNP TSC0058333
agtttgtaaagg

SEQ ID NO: 370717 - DNA, 12 bp, Artificial Sequence
  Oligonucleotide primer for the detection of SNP TSC0058333
aatttacaaaaa

SEQ ID NO: 370718 - DNA, 12 bp, Artificial Sequence
  Oligonucleotide primer for the detection of SNP TSC0058333
taatttgagtgg

SEQ ID NO: 370719 - DNA, 12 bp, Artificial Sequence
  Oligonucleotide primer for the detection of SNP TSC0058334
ccataaaatttt

SEQ ID NO: 370720 - DNA, 12 bp, Artificial Sequence
  Oligonucleotide primer for the detection of SNP TSC0058334
tagagggatgta

SEQ ID NO: 370721 - DNA, 12 bp, Artificial Sequence
  Oligonucleotide primer for the detection of SNP TSC0058335
atccaaaaatct

SEQ ID NO: 370722 - DNA, 12 bp, Artificial Sequence
  Oligonucleotide primer for the detection of SNP TSC0058338
aaacacacacta

SEQ ID NO: 370723 - DNA, 12 bp, Artificial Sequence
  Oligonucleotide primer for the detection of SNP TSC0058338
taatgtgagtag

SEQ ID NO: 370724 - DNA, 12 bp, Artificial Sequence
  Oligonucleotide primer for the detection of SNP TSC0058339
cacattacatta

SEQ ID NO: 370725 - DNA, 12 bp, Artificial Sequence
  Oligonucleotide primer for the detection of SNP TSC0058339
tccttattctaa

SEQ ID NO: 370726 - DNA, 12 bp, Artificial Sequence
  Oligonucleotide primer for the detection of SNP TSC0058339
tatattgtattg

SEQ ID NO: 370727 - DNA, 12 bp, Artificial Sequence
  Oligonucleotide primer for the detection of SNP TSC0058340
atcaactaacca

SEQ ID NO: 370728 - DNA, 12 bp, Artificial Sequence
  Oligonucleotide primer for the detection of SNP TSC0058340
atcgactaacca

SEQ ID NO: 370729 - DNA, 12 bp, Artificial Sequence
  Oligonucleotide primer for the detection of SNP TSC0058340
ccttcaaaaaac

SEQ ID NO: 370730 - DNA, 12 bp, Artificial Sequence
  Oligonucleotide primer for the detection of SNP TSC0058340
tgttgattggtt

SEQ ID NO: 370731 - DNA, 12 bp, Artificial Sequence
  Oligonucleotide primer for the detection of SNP TSC0058340
tgtcgattggtt

SEQ ID NO: 370732 - DNA, 12 bp, Artificial Sequence
  Oligonucleotide primer for the detection of SNP TSC0058347
aacatacttcaa

SEQ ID NO: 370733 - DNA, 12 bp, Artificial Sequence
  Oligonucleotide primer for the detection of SNP TSC0058347
taaggttatttt

SEQ ID NO: 370734 - DNA, 12 bp, Artificial Sequence
  Oligonucleotide primer for the detection of SNP TSC0058347
caaaaccatttc

SEQ ID NO: 370735 - DNA, 12 bp, Artificial Sequence
  Oligonucleotide primer for the detection of SNP TSC0058347
aatatgttttaa

SEQ ID NO: 370736 - DNA, 12 bp, Artificial Sequence
  Oligonucleotide primer for the detection of SNP TSC0058353
acaaaccaatat

SEQ ID NO: 370737 - DNA, 12 bp, Artificial Sequence
  Oligonucleotide primer for the detection of SNP TSC0058354
caaaaataccat

SEQ ID NO: 370738 - DNA, 12 bp, Artificial Sequence
  Oligonucleotide primer for the detection of SNP TSC0058354
aatgtttttaga

SEQ ID NO: 370739 - DNA, 12 bp, Artificial Sequence
  Oligonucleotide primer for the detection of SNP TSC0058355
acactttcttaa

SEQ ID NO: 370740 - DNA, 12 bp, Artificial Sequence
  Oligonucleotide primer for the detection of SNP TSC0058355
aaaaccattctc

SEQ ID NO: 370741 - DNA, 12 bp, Artificial Sequence
  Oligonucleotide primer for the detection of SNP TSC0058358
ataattccactt

SEQ ID NO: 370742 - DNA, 12 bp, Artificial Sequence
  Oligonucleotide primer for the detection of SNP TSC0058359
ttatgtatttta

SEQ ID NO: 370743 - DNA, 12 bp, Artificial Sequence
  Oligonucleotide primer for the detection of SNP TSC0058359
ttatatacctta

SEQ ID NO: 370744 - DNA, 12 bp, Artificial Sequence
  Oligonucleotide primer for the detection of SNP TSC0058361
tcccctcttcct

SEQ ID NO: 370745 - DNA, 12 bp, Artificial Sequence
  Oligonucleotide primer for the detection of SNP TSC0058361
tgttagtaaaga

SEQ ID NO: 370746 - DNA, 12 bp, Artificial Sequence
  Oligonucleotide primer for the detection of SNP TSC0058362
tgggataattgt

SEQ ID NO: 370747 - DNA, 12 bp, Artificial Sequence
  Oligonucleotide primer for the detection of SNP TSC0058362
taaaacaactat

SEQ ID NO: 370748 - DNA, 12 bp, Artificial Sequence
  Oligonucleotide primer for the detection of SNP TSC0058362
ggatagaaaagt

SEQ ID NO: 370749 - DNA, 12 bp, Artificial Sequence
  Oligonucleotide primer for the detection of SNP TSC0058363
tttgagatagag

SEQ ID NO: 370750 - DNA, 12 bp, Artificial Sequence
  Oligonucleotide primer for the detection of SNP TSC0058364
aggtgtgggggt

SEQ ID NO: 370751 - DNA, 12 bp, Artificial Sequence
  Oligonucleotide primer for the detection of SNP TSC0058365
aaaattcctcat

SEQ ID NO: 370752 - DNA, 12 bp, Artificial Sequence
  Oligonucleotide primer for the detection of SNP TSC0058365
aaaattcctcgt

SEQ ID NO: 370753 - DNA, 12 bp, Artificial Sequence
  Oligonucleotide primer for the detection of SNP TSC0058365
tttttgaagatg

SEQ ID NO: 370754 - DNA, 12 bp, Artificial Sequence
  Oligonucleotide primer for the detection of SNP TSC0058372
aataaaatatat

SEQ ID NO: 370755 - DNA, 12 bp, Artificial Sequence
  Oligonucleotide primer for the detection of SNP TSC0058372
taatataagaaa

SEQ ID NO: 370756 - DNA, 12 bp, Artificial Sequence
  Oligonucleotide primer for the detection of SNP TSC0058373
tgattgatagaa

SEQ ID NO: 370757 - DNA, 12 bp, Artificial Sequence
  Oligonucleotide primer for the detection of SNP TSC0058374
taagcgttttta

SEQ ID NO: 370758 - DNA, 12 bp, Artificial Sequence
  Oligonucleotide primer for the detection of SNP TSC0058376
tttataaatttg

SEQ ID NO: 370759 - DNA, 12 bp, Artificial Sequence
  Oligonucleotide primer for the detection of SNP TSC0058377
ataaatatactt

SEQ ID NO: 370760 - DNA, 12 bp, Artificial Sequence
  Oligonucleotide primer for the detection of SNP TSC0058377
tgtatatgtgtt

SEQ ID NO: 370761 - DNA, 12 bp, Artificial Sequence
  Oligonucleotide primer for the detection of SNP TSC0058377
cgtatatgtgtt

SEQ ID NO: 370762 - DNA, 12 bp, Artificial Sequence
  Oligonucleotide primer for the detection of SNP TSC0058378
ttacattaaatt

SEQ ID NO: 370763 - DNA, 12 bp, Artificial Sequence
  Oligonucleotide primer for the detection of SNP TSC0058379
ttccctatctca

SEQ ID NO: 370764 - DNA, 12 bp, Artificial Sequence
  Oligonucleotide primer for the detection of SNP TSC0058379
gatagggtattt

SEQ ID NO: 370765 - DNA, 12 bp, Artificial Sequence
  Oligonucleotide primer for the detection of SNP TSC0058379
ataaaacattta

SEQ ID NO: 370766 - DNA, 12 bp, Artificial Sequence
  Oligonucleotide primer for the detection of SNP TSC0058380
ttcaatcatctt

SEQ ID NO: 370767 - DNA, 12 bp, Artificial Sequence
  Oligonucleotide primer for the detection of SNP TSC0058380
ttcaatcgtctt

SEQ ID NO: 370768 - DNA, 12 bp, Artificial Sequence
  Oligonucleotide primer for the detection of SNP TSC0058380
atgggatgttta

SEQ ID NO: 370769 - DNA, 12 bp, Artificial Sequence
  Oligonucleotide primer for the detection of SNP TSC0058381
aattattcccac

SEQ ID NO: 370770 - DNA, 12 bp, Artificial Sequence
  Oligonucleotide primer for the detection of SNP TSC0058381
ttgtagtataag

SEQ ID NO: 370771 - DNA, 12 bp, Artificial Sequence
  Oligonucleotide primer for the detection of SNP TSC0058382
ttttagtattgg

SEQ ID NO: 370772 - DNA, 12 bp, Artificial Sequence
  Oligonucleotide primer for the detection of SNP TSC0058383
acattttaaata

SEQ ID NO: 370773 - DNA, 12 bp, Artificial Sequence
  Oligonucleotide primer for the detection of SNP TSC0058383
gtaatattgtat

SEQ ID NO: 370774 - DNA, 12 bp, Artificial Sequence
  Oligonucleotide primer for the detection of SNP TSC0058383
gtaatattgtac

SEQ ID NO: 370775 - DNA, 12 bp, Artificial Sequence
  Oligonucleotide primer for the detection of SNP TSC0058383
tatattttgaat

SEQ ID NO: 370776 - DNA, 12 bp, Artificial Sequence
  Oligonucleotide primer for the detection of SNP TSC0058384
caaaaaaataat

SEQ ID NO: 370777 - DNA, 12 bp, Artificial Sequence
  Oligonucleotide primer for the detection of SNP TSC0058384
cgaaaaaataat

SEQ ID NO: 370778 - DNA, 12 bp, Artificial Sequence
  Oligonucleotide primer for the detection of SNP TSC0058384
ttttaatggtta

SEQ ID NO: 370779 - DNA, 12 bp, Artificial Sequence
  Oligonucleotide primer for the detection of SNP TSC0058388
attgttgggatg

SEQ ID NO: 370780 - DNA, 12 bp, Artificial Sequence
  Oligonucleotide primer for the detection of SNP TSC0058390
tatcaacttctt

SEQ ID NO: 370781 - DNA, 12 bp, Artificial Sequence
  Oligonucleotide primer for the detection of SNP TSC0058390
atttgatagaag

SEQ ID NO: 370782 - DNA, 12 bp, Artificial Sequence
  Oligonucleotide primer for the detection of SNP TSC0058391
cacctcccttta

SEQ ID NO: 370783 - DNA, 12 bp, Artificial Sequence
  Oligonucleotide primer for the detection of SNP TSC0058391
aggtagagtgag

SEQ ID NO: 370784 - DNA, 12 bp, Artificial Sequence
  Oligonucleotide primer for the detection of SNP TSC0058392
ttatttcaacct

SEQ ID NO: 370785 - DNA, 12 bp, Artificial Sequence
  Oligonucleotide primer for the detection of SNP TSC0058392
agaagttaaatt

SEQ ID NO: 370786 - DNA, 12 bp, Artificial Sequence
  Oligonucleotide primer for the detection of SNP TSC0058393
ctatctcaccta

SEQ ID NO: 370787 - DNA, 12 bp, Artificial Sequence
  Oligonucleotide primer for the detection of SNP TSC0058393
ctatctcgccta

SEQ ID NO: 370788 - DNA, 12 bp, Artificial Sequence
  Oligonucleotide primer for the detection of SNP TSC0058393
ttaggtataaag

SEQ ID NO: 370789 - DNA, 12 bp, Artificial Sequence
  Oligonucleotide primer for the detection of SNP TSC0058393
tcaaatataaaa

SEQ ID NO: 370790 - DNA, 12 bp, Artificial Sequence
  Oligonucleotide primer for the detection of SNP TSC0058396
attaaaaaattt

SEQ ID NO: 370791 - DNA, 12 bp, Artificial Sequence
  Oligonucleotide primer for the detection of SNP TSC0058397
aactattatctt

SEQ ID NO: 370792 - DNA, 12 bp, Artificial Sequence
  Oligonucleotide primer for the detection of SNP TSC0058397
gaattagaagaa

SEQ ID NO: 370793 - DNA, 12 bp, Artificial Sequence
  Oligonucleotide primer for the detection of SNP TSC0058398
tcgaaacactta

SEQ ID NO: 370794 - DNA, 12 bp, Artificial Sequence
  Oligonucleotide primer for the detection of SNP TSC0058398
ccataaaataaa

SEQ ID NO: 370795 - DNA, 12 bp, Artificial Sequence
  Oligonucleotide primer for the detection of SNP TSC0058398
ttgagatattta

SEQ ID NO: 370796 - DNA, 12 bp, Artificial Sequence
  Oligonucleotide primer for the detection of SNP TSC0058398
tcgagatattta

SEQ ID NO: 370797 - DNA, 12 bp, Artificial Sequence
  Oligonucleotide primer for the detection of SNP TSC0058399
ttggaatgttag

SEQ ID NO: 370798 - DNA, 12 bp, Artificial Sequence
  Oligonucleotide primer for the detection of SNP TSC0058399
taaaatattaaa

SEQ ID NO: 370799 - DNA, 12 bp, Artificial Sequence
  Oligonucleotide primer for the detection of SNP TSC0058399
aattaagttgtt

SEQ ID NO: 370800 - DNA, 12 bp, Artificial Sequence
  Oligonucleotide primer for the detection of SNP TSC0058400
tttattatttag

SEQ ID NO: 370801 - DNA, 12 bp, Artificial Sequence
  Oligonucleotide primer for the detection of SNP TSC0058401
tacaaaaaaacc

SEQ ID NO: 370802 - DNA, 12 bp, Artificial Sequence
  Oligonucleotide primer for the detection of SNP TSC0058401
aagggttgtgta

SEQ ID NO: 370803 - DNA, 12 bp, Artificial Sequence
  Oligonucleotide primer for the detection of SNP TSC0058401
aagggttgcgta

SEQ ID NO: 370804 - DNA, 12 bp, Artificial Sequence
  Oligonucleotide primer for the detection of SNP TSC0058402
tttaccaaaaat

SEQ ID NO: 370805 - DNA, 12 bp, Artificial Sequence
  Oligonucleotide primer for the detection of SNP TSC0058402
aggatatgaagg

SEQ ID NO: 370806 - DNA, 12 bp, Artificial Sequence
  Oligonucleotide primer for the detection of SNP TSC0058404
aaacaacactac

SEQ ID NO: 370807 - DNA, 12 bp, Artificial Sequence
  Oligonucleotide primer for the detection of SNP TSC0058404
aggtttggaata

SEQ ID NO: 370808 - DNA, 12 bp, Artificial Sequence
  Oligonucleotide primer for the detection of SNP TSC0058408
acctattatatc

SEQ ID NO: 370809 - DNA, 12 bp, Artificial Sequence
  Oligonucleotide primer for the detection of SNP TSC0058408
tggataagttga

SEQ ID NO: 370810 - DNA, 12 bp, Artificial Sequence
  Oligonucleotide primer for the detection of SNP TSC0058409
tatttttcttcc

SEQ ID NO: 370811 - DNA, 12 bp, Artificial Sequence
  Oligonucleotide primer for the detection of SNP TSC0058409
taagtagaatta

SEQ ID NO: 370812 - DNA, 12 bp, Artificial Sequence
  Oligonucleotide primer for the detection of SNP TSC0058410
tctaaaattcac

SEQ ID NO: 370813 - DNA, 12 bp, Artificial Sequence
  Oligonucleotide primer for the detection of SNP TSC0058410
ttttgatatgtg

SEQ ID NO: 370814 - DNA, 12 bp, Artificial Sequence
  Oligonucleotide primer for the detection of SNP TSC0058412
ctacctaaatat

SEQ ID NO: 370815 - DNA, 12 bp, Artificial Sequence
  Oligonucleotide primer for the detection of SNP TSC0058413
attttaccctta

SEQ ID NO: 370816 - DNA, 12 bp, Artificial Sequence
  Oligonucleotide primer for the detection of SNP TSC0058413
gtagtttgtgat

SEQ ID NO: 370817 - DNA, 12 bp, Artificial Sequence
  Oligonucleotide primer for the detection of SNP TSC0058413
ataacctataac

SEQ ID NO: 370818 - DNA, 12 bp, Artificial Sequence
  Oligonucleotide primer for the detection of SNP TSC0058414
atcccttaacta

SEQ ID NO: 370819 - DNA, 12 bp, Artificial Sequence
  Oligonucleotide primer for the detection of SNP TSC0058414
taattgttttgt

SEQ ID NO: 370820 - DNA, 12 bp, Artificial Sequence
  Oligonucleotide primer for the detection of SNP TSC0058414
taatcgttttgt

SEQ ID NO: 370821 - DNA, 12 bp, Artificial Sequence
  Oligonucleotide primer for the detection of SNP TSC0058414
taatcaccctat

SEQ ID NO: 370822 - DNA, 12 bp, Artificial Sequence
  Oligonucleotide primer for the detection of SNP TSC0058414
taatcgccctat

SEQ ID NO: 370823 - DNA, 12 bp, Artificial Sequence
  Oligonucleotide primer for the detection of SNP TSC0058414
gttttttggtta

SEQ ID NO: 370824 - DNA, 12 bp, Artificial Sequence
  Oligonucleotide primer for the detection of SNP TSC0058415
taaatagtattt

SEQ ID NO: 370825 - DNA, 12 bp, Artificial Sequence
  Oligonucleotide primer for the detection of SNP TSC0058415
tacaaacaatac

SEQ ID NO: 370826 - DNA, 12 bp, Artificial Sequence
  Oligonucleotide primer for the detection of SNP TSC0058415
taataaaggtat

SEQ ID NO: 370827 - DNA, 12 bp, Artificial Sequence
  Oligonucleotide primer for the detection of SNP TSC0058416
actatttaaaat

SEQ ID NO: 370828 - DNA, 12 bp, Artificial Sequence
  Oligonucleotide primer for the detection of SNP TSC0058417
aacttcctaacc

SEQ ID NO: 370829 - DNA, 12 bp, Artificial Sequence
  Oligonucleotide primer for the detection of SNP TSC0058417
ttggaaaatgta

SEQ ID NO: 370830 - DNA, 12 bp, Artificial Sequence
  Oligonucleotide primer for the detection of SNP TSC0058418
aatctaccttta

SEQ ID NO: 370831 - DNA, 12 bp, Artificial Sequence
  Oligonucleotide primer for the detection of SNP TSC0058418
aaagataatgtg

SEQ ID NO: 370832 - DNA, 12 bp, Artificial Sequence
  Oligonucleotide primer for the detection of SNP TSC0058419
tatttactatct

SEQ ID NO: 370833 - DNA, 12 bp, Artificial Sequence
  Oligonucleotide primer for the detection of SNP TSC0058419
tttatgtaaaga

SEQ ID NO: 370834 - DNA, 12 bp, Artificial Sequence
  Oligonucleotide primer for the detection of SNP TSC0058420
atactcaaataa

SEQ ID NO: 370835 - DNA, 12 bp, Artificial Sequence
  Oligonucleotide primer for the detection of SNP TSC0058420
gtagtaagattt

SEQ ID NO: 370836 - DNA, 12 bp, Artificial Sequence
  Oligonucleotide primer for the detection of SNP TSC0058425
taaaacaaaaca

SEQ ID NO: 370837 - DNA, 12 bp, Artificial Sequence
  Oligonucleotide primer for the detection of SNP TSC0058425
tggtttgatgtt

SEQ ID NO: 370838 - DNA, 12 bp, Artificial Sequence
  Oligonucleotide primer for the detection of SNP TSC0058425
cttaatactaaa

SEQ ID NO: 370839 - DNA, 12 bp, Artificial Sequence
  Oligonucleotide primer for the detection of SNP TSC0058425
tgagataaaata

SEQ ID NO: 370840 - DNA, 12 bp, Artificial Sequence
  Oligonukleotid-Primer
ttaattataatt

SEQ ID NO: 370841 - DNA, 12 bp, Artificial Sequence
  Oligonucleotide primer for the detection of SNP TSC0058426
tagatgtttgta

SEQ ID NO: 370842 - DNA, 12 bp, Artificial Sequence
  Oligonucleotide primer for the detection of SNP TSC0058427
atcaataacaac

SEQ ID NO: 370843 - DNA, 12 bp, Artificial Sequence
  Oligonucleotide primer for the detection of SNP TSC0058427
tttattgagtga

SEQ ID NO: 370844 - DNA, 12 bp, Artificial Sequence
  Oligonukleotid-Primer
attttacaaaac

SEQ ID NO: 370845 - DNA, 12 bp, Artificial Sequence
  Oligonucleotide primer for the detection of SNP TSC0058428
tgttattaagta

SEQ ID NO: 370846 - DNA, 12 bp, Artificial Sequence
  Oligonucleotide primer for the detection of SNP TSC0058432
aataaaacccac

SEQ ID NO: 370847 - DNA, 12 bp, Artificial Sequence
  Oligonucleotide primer for the detection of SNP TSC0058433
tatataggtttt

SEQ ID NO: 370848 - DNA, 12 bp, Artificial Sequence
  Oligonukleotid-Primer
catataaatctt

SEQ ID NO: 370849 - DNA, 12 bp, Artificial Sequence
  Oligonucleotide primer for the detection of SNP TSC0058433
tatataggtgta

SEQ ID NO: 370850 - DNA, 12 bp, Artificial Sequence
  Oligonucleotide primer for the detection of SNP TSC0058434
ctacacatatac

SEQ ID NO: 370851 - DNA, 12 bp, Artificial Sequence
  Oligonucleotide primer for the detection of SNP TSC0058434
ttgtatatgtat

SEQ ID NO: 370852 - DNA, 12 bp, Artificial Sequence
  Oligonucleotide primer for the detection of SNP TSC0058434
ttgtatatgtac

SEQ ID NO: 370853 - DNA, 12 bp, Artificial Sequence
  Oligonucleotide primer for the detection of SNP TSC0058435
aaaataactaat

SEQ ID NO: 370854 - DNA, 12 bp, Artificial Sequence
  Oligonucleotide primer for the detection of SNP TSC0058435
tattaagtttag

SEQ ID NO: 370855 - DNA, 12 bp, Artificial Sequence
  Oligonucleotide primer for the detection of SNP TSC0058436
ttactctaaaaa

SEQ ID NO: 370856 - DNA, 12 bp, Artificial Sequence
  Oligonukleotid-Primer
aaccactttctc

SEQ ID NO: 370857 - DNA, 12 bp, Artificial Sequence
  Oligonucleotide primer for the detection of SNP TSC0005079
atatatttgtta

SEQ ID NO: 370858 - DNA, 12 bp, Artificial Sequence
  Oligonucleotide primer for the detection of SNP TSC0058437
acaactactaac

SEQ ID NO: 370859 - DNA, 12 bp, Artificial Sequence
  Oligonucleotide primer for the detection of SNP TSC0058437
ttaaggattttg

SEQ ID NO: 370860 - DNA, 12 bp, Artificial Sequence
  Oligonucleotide primer for the detection of SNP TSC0058437
ccaaaaactcta

SEQ ID NO: 370861 - DNA, 12 bp, Artificial Sequence
  Oligonucleotide primer for the detection of SNP TSC0058437
atagttgttgat

SEQ ID NO: 370862 - DNA, 12 bp, Artificial Sequence
  Oligonucleotide primer for the detection of SNP TSC0058438
tttctaaccttc

SEQ ID NO: 370863 - DNA, 12 bp, Artificial Sequence
  Oligonucleotide primer for the detection of SNP TSC0058438
aaagaaaggaat

SEQ ID NO: 370864 - DNA, 12 bp, Artificial Sequence
  Oligonucleotide primer for the detection of SNP TSC0058439
acaatatttttc

SEQ ID NO: 370865 - DNA, 12 bp, Artificial Sequence
  Oligonucleotide primer for the detection of SNP TSC0058439
gaaagttttttg

SEQ ID NO: 370866 - DNA, 12 bp, Artificial Sequence
  Oligonucleotide primer for the detection of SNP TSC0058440
aaacatatctct

SEQ ID NO: 370867 - DNA, 12 bp, Artificial Sequence
  Oligonucleotide primer for the detection of SNP TSC0058440
aagatattgtag

SEQ ID NO: 370868 - DNA, 12 bp, Artificial Sequence
  Oligonucleotide primer for the detection of SNP TSC0058440
aaaacattataa

SEQ ID NO: 370869 - DNA, 12 bp, Artificial Sequence
  Oligonucleotide primer for the detection of SNP TSC0058442
ttatatgtttga

SEQ ID NO: 370870 - DNA, 12 bp, Artificial Sequence
  Oligonucleotide primer for the detection of SNP TSC0058443
aactacataatt

SEQ ID NO: 370871 - DNA, 12 bp, Artificial Sequence
  Oligonucleotide primer for the detection of SNP TSC0058443
aactacgtaatt

SEQ ID NO: 370872 - DNA, 12 bp, Artificial Sequence
  Oligonucleotide primer for the detection of SNP TSC0058443
aatgttggtaat

SEQ ID NO: 370873 - DNA, 12 bp, Artificial Sequence
  Oligonucleotide primer for the detection of SNP TSC0058443
aatgtcggtaat

SEQ ID NO: 370874 - DNA, 12 bp, Artificial Sequence
  Oligonucleotide primer for the detection of SNP TSC0058443
agttatgtgatt

SEQ ID NO: 370875 - DNA, 12 bp, Artificial Sequence
  Oligonucleotide primer for the detection of SNP TSC0058443
agttacgtgatt

SEQ ID NO: 370876 - DNA, 12 bp, Artificial Sequence
  Oligonucleotide primer for the detection of SNP TSC0058444
aacaatacacta

SEQ ID NO: 370877 - DNA, 12 bp, Artificial Sequence
  Oligonucleotide primer for the detection of SNP TSC0058444
taaatttttggt

SEQ ID NO: 370878 - DNA, 12 bp, Artificial Sequence
  Oligonucleotide primer for the detection of SNP TSC0058444
taaatctttaat

SEQ ID NO: 370879 - DNA, 12 bp, Artificial Sequence
  Oligonucleotide primer for the detection of SNP TSC0058445
tataagtgtgtg

SEQ ID NO: 370880 - DNA, 12 bp, Artificial Sequence
  Oligonucleotide primer for the detection of SNP TSC0058445
ttttgttaaaat

SEQ ID NO: 370881 - DNA, 12 bp, Artificial Sequence
  Oligonucleotide primer for the detection of SNP TSC0005909
ttccaaaaataa

SEQ ID NO: 370882 - DNA, 12 bp, Artificial Sequence
  Oligonucleotide primer for the detection of SNP TSC0005909
aaattgtttgat

SEQ ID NO: 370883 - DNA, 12 bp, Artificial Sequence
  Oligonucleotide primer for the detection of SNP TSC0005909
caaattatctaa

SEQ ID NO: 370884 - DNA, 12 bp, Artificial Sequence
  Oligonucleotide primer for the detection of SNP TSC0058448
ttatttttaccc

SEQ ID NO: 370885 - DNA, 12 bp, Artificial Sequence
  Oligonucleotide primer for the detection of SNP TSC0058452
atttcacaatct

SEQ ID NO: 370886 - DNA, 12 bp, Artificial Sequence
  Oligonucleotide primer for the detection of SNP TSC0058452
tgtttttagtgg

SEQ ID NO: 370887 - DNA, 12 bp, Artificial Sequence
  Oligonucleotide primer for the detection of SNP TSC0058453
tctataaaatat

SEQ ID NO: 370888 - DNA, 12 bp, Artificial Sequence
  Oligonukleotid-Primer
tcactaaacaat

SEQ ID NO: 370889 - DNA, 12 bp, Artificial Sequence
  Oligonucleotide primer for the detection of SNP TSC0058457
aaaaagtaatgg

SEQ ID NO: 370890 - DNA, 12 bp, Artificial Sequence
  Oligonucleotide primer for the detection of SNP TSC0058458
cataatccaatc

SEQ ID NO: 370891 - DNA, 12 bp, Artificial Sequence
  Oligonucleotide primer for the detection of SNP TSC0058459
gggtagtatata

SEQ ID NO: 370892 - DNA, 12 bp, Artificial Sequence
  Oligonucleotide primer for the detection of SNP TSC0058460
tttaaaaaatac

SEQ ID NO: 370893 - DNA, 12 bp, Artificial Sequence
  Oligonucleotide primer for the detection of SNP TSC0058460
tattatattttt

SEQ ID NO: 370894 - DNA, 12 bp, Artificial Sequence
  Oligonucleotide primer for the detection of SNP TSC0058460
tattatattttc

SEQ ID NO: 370895 - DNA, 12 bp, Artificial Sequence
  Oligonucleotide primer for the detection of SNP TSC0058460
caccacatcttc

SEQ ID NO: 370896 - DNA, 12 bp, Artificial Sequence
  Oligonucleotide primer for the detection of SNP TSC0058460
tttaagaaatgt

SEQ ID NO: 370897 - DNA, 12 bp, Artificial Sequence
  Oligonucleotide primer for the detection of SNP TSC0058460
tttaagaaatgc

SEQ ID NO: 370898 - DNA, 12 bp, Artificial Sequence
  Oligonucleotide primer for the detection of SNP TSC0058463
tttcctacaatt

SEQ ID NO: 370899 - DNA, 12 bp, Artificial Sequence
  Oligonucleotide primer for the detection of SNP TSC0058463
tgatagttttta

SEQ ID NO: 370900 - DNA, 12 bp, Artificial Sequence
  Oligonucleotide primer for the detection of SNP TSC0058465
tcaataataact

SEQ ID NO: 370901 - DNA, 12 bp, Artificial Sequence
  Oligonucleotide primer for the detection of SNP TSC0058465
gtggttagtgtg

SEQ ID NO: 370902 - DNA, 12 bp, Artificial Sequence
  Oligonucleotide primer for the detection of SNP TSC0058465
gtggttagcgtg

SEQ ID NO: 370903 - DNA, 12 bp, Artificial Sequence
  Oligonucleotide primer for the detection of SNP TSC0058466
aaaatatctatc

SEQ ID NO: 370904 - DNA, 12 bp, Artificial Sequence
  Oligonucleotide primer for the detection of SNP TSC0058466
ttacccaaaata

SEQ ID NO: 370905 - DNA, 12 bp, Artificial Sequence
  Oligonucleotide primer for the detection of SNP TSC0058467
gtatatattatt

SEQ ID NO: 370906 - DNA, 12 bp, Artificial Sequence
  Oligonucleotide primer for the detection of SNP TSC0058467
gtatatattatc

SEQ ID NO: 370907 - DNA, 12 bp, Artificial Sequence
  Oligonucleotide primer for the detection of SNP TSC0058467
atacatatcatc

SEQ ID NO: 370908 - DNA, 12 bp, Artificial Sequence
  Oligonucleotide primer for the detection of SNP TSC0058467
aagtttttgagg

SEQ ID NO: 370909 - DNA, 12 bp, Artificial Sequence
  Oligonucleotide primer for the detection of SNP TSC0058468
acccttacctcc

SEQ ID NO: 370910 - DNA, 12 bp, Artificial Sequence
  Oligonucleotide primer for the detection of SNP TSC0058469
cattattcctat

SEQ ID NO: 370911 - DNA, 12 bp, Artificial Sequence
  Oligonucleotide primer for the detection of SNP TSC0058471
tttattataaaa

SEQ ID NO: 370912 - DNA, 12 bp, Artificial Sequence
  Oligonucleotide primer for the detection of SNP TSC0058471
tttaccataaaa

SEQ ID NO: 370913 - DNA, 12 bp, Artificial Sequence
  Oligonucleotide primer for the detection of SNP TSC0058471
tgaatatgttat

SEQ ID NO: 370914 - DNA, 12 bp, Artificial Sequence
  Oligonucleotide primer for the detection of SNP TSC0058475
aatcaacatata

SEQ ID NO: 370915 - DNA, 12 bp, Artificial Sequence
  Oligonucleotide primer for the detection of SNP TSC0058475
gattgaataatg

SEQ ID NO: 370916 - DNA, 12 bp, Artificial Sequence
  Oligonucleotide primer for the detection of SNP TSC0058475
gatcgaataatg

SEQ ID NO: 370917 - DNA, 12 bp, Artificial Sequence
  Oligonucleotide primer for the detection of SNP TSC0058476
acacatttaaaa

SEQ ID NO: 370918 - DNA, 12 bp, Artificial Sequence
  Oligonucleotide primer for the detection of SNP TSC0058476
gatgttttatgt

SEQ ID NO: 370919 - DNA, 12 bp, Artificial Sequence
  Oligonucleotide primer for the detection of SNP TSC0058476
atatctcatata

SEQ ID NO: 370920 - DNA, 12 bp, Artificial Sequence
  Oligonucleotide primer for the detection of SNP TSC0058477
gtttatattaat

SEQ ID NO: 370921 - DNA, 12 bp, Artificial Sequence
  Oligonucleotide primer for the detection of SNP TSC0058477
gtttatattaac

SEQ ID NO: 370922 - DNA, 12 bp, Artificial Sequence
  Oligonucleotide primer for the detection of SNP TSC0058477
tattcacactaa

SEQ ID NO: 370923 - DNA, 12 bp, Artificial Sequence
  Oligonucleotide primer for the detection of SNP TSC0058478
tatgttaagtta

SEQ ID NO: 370924 - DNA, 12 bp, Artificial Sequence
  Oligonucleotide primer for the detection of SNP TSC0058478
tacgttaagtta

SEQ ID NO: 370925 - DNA, 12 bp, Artificial Sequence
  Oligonucleotide primer for the detection of SNP TSC0058478
tacactaaatca

SEQ ID NO: 370926 - DNA, 12 bp, Artificial Sequence
  Oligonucleotide primer for the detection of SNP TSC0058478
tacgctaaatca

SEQ ID NO: 370927 - DNA, 12 bp, Artificial Sequence
  Oligonucleotide primer for the detection of SNP TSC0058478
aaaattgtataa

SEQ ID NO: 370928 - DNA, 12 bp, Artificial Sequence
  Oligonucleotide primer for the detection of SNP TSC0058480
  unsure (5): unknown base
ttagnttgtagg

SEQ ID NO: 370929 - DNA, 12 bp, Artificial Sequence
  Oligonucleotide primer for the detection of SNP TSC0058480
  unsure (5): unknown base
ccaanctacaaa

SEQ ID NO: 370930 - DNA, 12 bp, Artificial Sequence
  Oligonucleotide primer for the detection of SNP TSC0058480
ggagaggaggtt

SEQ ID NO: 370931 - DNA, 12 bp, Artificial Sequence
  Oligonucleotide primer for the detection of SNP TSC0058480
ggagaggaggtc

SEQ ID NO: 370932 - DNA, 12 bp, Artificial Sequence
  Oligonucleotide primer for the detection of SNP TSC0058481
atagagttgggg

SEQ ID NO: 370933 - DNA, 12 bp, Artificial Sequence
  Oligonucleotide primer for the detection of SNP TSC0058482
cttacataataa

SEQ ID NO: 370934 - DNA, 12 bp, Artificial Sequence
  Oligonucleotide primer for the detection of SNP TSC0058482
ttttcctcttac

SEQ ID NO: 370935 - DNA, 12 bp, Artificial Sequence
  Oligonucleotide primer for the detection of SNP TSC0058482
tttatatggtgg

SEQ ID NO: 370936 - DNA, 12 bp, Artificial Sequence
  Oligonucleotide primer for the detection of SNP TSC0058483
aattaaaaatac

SEQ ID NO: 370937 - DNA, 12 bp, Artificial Sequence
  Oligonucleotide primer for the detection of SNP TSC0058483
ttttttgaaagg

SEQ ID NO: 370938 - DNA, 12 bp, Artificial Sequence
  Oligonucleotide primer for the detection of SNP TSC0058483
ttccttaaaaaa

SEQ ID NO: 370939 - DNA, 12 bp, Artificial Sequence
  Oligonucleotide primer for the detection of SNP TSC0058483
ggttaaggatat

SEQ ID NO: 370940 - DNA, 12 bp, Artificial Sequence
  Oligonucleotide primer for the detection of SNP TSC0058484
agtttagtaatt

SEQ ID NO: 370941 - DNA, 12 bp, Artificial Sequence
  Oligonucleotide primer for the detection of SNP TSC0058484
atgttggagggt

SEQ ID NO: 370942 - DNA, 12 bp, Artificial Sequence
  Oligonucleotide primer for the detection of SNP TSC0058485
acaactatataa

SEQ ID NO: 370943 - DNA, 12 bp, Artificial Sequence
  Oligonucleotide primer for the detection of SNP TSC0058485
tatacacataat

SEQ ID NO: 370944 - DNA, 12 bp, Artificial Sequence
  Oligonucleotide primer for the detection of SNP TSC0058485
atagttgtataa

SEQ ID NO: 370945 - DNA, 12 bp, Artificial Sequence
  Oligonucleotide primer for the detection of SNP TSC0058486
tacaaaatttac

SEQ ID NO: 370946 - DNA, 12 bp, Artificial Sequence
  Oligonucleotide primer for the detection of SNP TSC0058486
ttagatatagtt

SEQ ID NO: 370947 - DNA, 12 bp, Artificial Sequence
  Oligonucleotide primer for the detection of SNP TSC0058486
aaatacaattaa

SEQ ID NO: 370948 - DNA, 12 bp, Artificial Sequence
  Oligonucleotide primer for the detection of SNP TSC0058486
tataaagtttat

SEQ ID NO: 370949 - DNA, 12 bp, Artificial Sequence
  Oligonucleotide primer for the detection of SNP TSC0058487
tattaacatata

SEQ ID NO: 370950 - DNA, 12 bp, Artificial Sequence
  Oligonucleotide primer for the detection of SNP TSC0058487
ttggaaaatatt

SEQ ID NO: 370951 - DNA, 12 bp, Artificial Sequence
  Oligonucleotide primer for the detection of SNP TSC0058487
attaatatatat

SEQ ID NO: 370952 - DNA, 12 bp, Artificial Sequence
  Oligonucleotide primer for the detection of SNP TSC0006478
ctccaataactt

SEQ ID NO: 370953 - DNA, 12 bp, Artificial Sequence
  Oligonucleotide primer for the detection of SNP TSC0006478
tgttggtttaga

SEQ ID NO: 370954 - DNA, 12 bp, Artificial Sequence
  Oligonucleotide primer for the detection of SNP TSC0006478
attaacccaaaa

SEQ ID NO: 370955 - DNA, 12 bp, Artificial Sequence
  Oligonucleotide primer for the detection of SNP TSC0006478
ttttaataattt

SEQ ID NO: 370956 - DNA, 12 bp, Artificial Sequence
  Oligonucleotide primer for the detection of SNP TSC0058490
tttaattctata

SEQ ID NO: 370957 - DNA, 12 bp, Artificial Sequence
  Oligonucleotide primer for the detection of SNP TSC0058490
acacccttactt

SEQ ID NO: 370958 - DNA, 12 bp, Artificial Sequence
  Oligonucleotide primer for the detection of SNP TSC0058492
taatcccccaaa

SEQ ID NO: 370959 - DNA, 12 bp, Artificial Sequence
  Oligonucleotide primer for the detection of SNP TSC0058492
gagaaggatatg

SEQ ID NO: 370960 - DNA, 12 bp, Artificial Sequence
  Oligonucleotide primer for the detection of SNP TSC0058495
agatataaggaa

SEQ ID NO: 370961 - DNA, 12 bp, Artificial Sequence
  Oligonucleotide primer for the detection of SNP TSC0009067
atctcatcaaac

SEQ ID NO: 370962 - DNA, 12 bp, Artificial Sequence
  Oligonucleotide primer for the detection of SNP TSC0009067
ttttatatagag

SEQ ID NO: 370963 - DNA, 12 bp, Artificial Sequence
  Oligonucleotide primer for the detection of SNP TSC0009067
tttcacacaaaa

SEQ ID NO: 370964 - DNA, 12 bp, Artificial Sequence
  Oligonucleotide primer for the detection of SNP TSC0009067
attttattagat

SEQ ID NO: 370965 - DNA, 12 bp, Artificial Sequence
  Oligonucleotide primer for the detection of SNP TSC0009068
tggaatatatag

SEQ ID NO: 370966 - DNA, 12 bp, Artificial Sequence
  Oligonucleotide primer for the detection of SNP TSC0058496
ccaacataatac

SEQ ID NO: 370967 - DNA, 12 bp, Artificial Sequence
  Oligonucleotide primer for the detection of SNP TSC0058496
ttattggatggg

SEQ ID NO: 370968 - DNA, 12 bp, Artificial Sequence
  Oligonucleotide primer for the detection of SNP TSC0058497
tggggttaggag

SEQ ID NO: 370969 - DNA, 12 bp, Artificial Sequence
  Oligonucleotide primer for the detection of SNP TSC0058498
ccaacctaccca

SEQ ID NO: 370970 - DNA, 12 bp, Artificial Sequence
  Oligonucleotide primer for the detection of SNP TSC0058498
gaaagttttatt

SEQ ID NO: 370971 - DNA, 12 bp, Artificial Sequence
  Oligonucleotide primer for the detection of SNP TSC0058498
ttagtttgttta

SEQ ID NO: 370972 - DNA, 12 bp, Artificial Sequence
  Oligonucleotide primer for the detection of SNP TSC0006218
taataatacttc

SEQ ID NO: 370973 - DNA, 12 bp, Artificial Sequence
  Oligonucleotide primer for the detection of SNP TSC0006218
ttttcaattttt

SEQ ID NO: 370974 - DNA, 12 bp, Artificial Sequence
  Oligonucleotide primer for the detection of SNP TSC0006218
tagtggtatttt

SEQ ID NO: 370975 - DNA, 12 bp, Artificial Sequence
  Oligonucleotide primer for the detection of SNP TSC0004682
atagtaggtgtt

SEQ ID NO: 370976 - DNA, 12 bp, Artificial Sequence
  Oligonucleotide primer for the detection of SNP TSC0004682
atagtaggcgtt

SEQ ID NO: 370977 - DNA, 12 bp, Artificial Sequence
  Oligonucleotide primer for the detection of SNP TSC0004682
acataacaaaca

SEQ ID NO: 370978 - DNA, 12 bp, Artificial Sequence
  Oligonucleotide primer for the detection of SNP TSC0004682
acataacaaacg

SEQ ID NO: 370979 - DNA, 12 bp, Artificial Sequence
  Oligonucleotide primer for the detection of SNP TSC0004682
taaatatttatg

SEQ ID NO: 370980 - DNA, 12 bp, Artificial Sequence
  Oligonucleotide primer for the detection of SNP TSC0058502
aatatttatcct

SEQ ID NO: 370981 - DNA, 12 bp, Artificial Sequence
  Oligonucleotide primer for the detection of SNP TSC0058502
atctatatatac

SEQ ID NO: 370982 - DNA, 12 bp, Artificial Sequence
  Oligonucleotide primer for the detection of SNP TSC0058503
gttaagattatg

SEQ ID NO: 370983 - DNA, 12 bp, Artificial Sequence
  Oligonucleotide primer for the detection of SNP TSC0058503
gttaagattacg

SEQ ID NO: 370984 - DNA, 12 bp, Artificial Sequence
  Oligonucleotide primer for the detection of SNP TSC0058505
tttccttctcac

SEQ ID NO: 370985 - DNA, 12 bp, Artificial Sequence
  Oligonucleotide primer for the detection of SNP TSC0058505
tttagttttttg

SEQ ID NO: 370986 - DNA, 12 bp, Artificial Sequence
  Oligonucleotide primer for the detection of SNP TSC0058506
tcttcaatctca

SEQ ID NO: 370987 - DNA, 12 bp, Artificial Sequence
  Oligonucleotide primer for the detection of SNP TSC0058506
attttggttgtt

SEQ ID NO: 370988 - DNA, 12 bp, Artificial Sequence
  Oligonucleotide primer for the detection of SNP TSC0058506
taaccttaatta

SEQ ID NO: 370989 - DNA, 12 bp, Artificial Sequence
  Oligonucleotide primer for the detection of SNP TSC0058507
atatttctatat

SEQ ID NO: 370990 - DNA, 12 bp, Artificial Sequence
  Oligonucleotide primer for the detection of SNP TSC0058507
aaagttataagg

SEQ ID NO: 370991 - DNA, 12 bp, Artificial Sequence
  Oligonucleotide primer for the detection of SNP TSC0008514
aaaatcaatttt

SEQ ID NO: 370992 - DNA, 12 bp, Artificial Sequence
  Oligonucleotide primer for the detection of SNP TSC0008514
acatttatcaaa

SEQ ID NO: 370993 - DNA, 12 bp, Artificial Sequence
  Oligonucleotide primer for the detection of SNP TSC0058508
ttttgttttgta

SEQ ID NO: 370994 - DNA, 12 bp, Artificial Sequence
  Oligonucleotide primer for the detection of SNP TSC0058508
ttttgtttcgta

SEQ ID NO: 370995 - DNA, 12 bp, Artificial Sequence
  Oligonucleotide primer for the detection of SNP TSC0058511
ataagattattt

SEQ ID NO: 370996 - DNA, 12 bp, Artificial Sequence
  Oligonucleotide primer for the detection of SNP TSC0058511
caaaactactca

SEQ ID NO: 370997 - DNA, 12 bp, Artificial Sequence
  Oligonucleotide primer for the detection of SNP TSC0058511
ttttattatggt

SEQ ID NO: 370998 - DNA, 12 bp, Artificial Sequence
  Oligonucleotide primer for the detection of SNP TSC0058512
ataacttttctc

SEQ ID NO: 370999 - DNA, 12 bp, Artificial Sequence
  Oligonucleotide primer for the detection of SNP TSC0058512
gaggattatgaa

SEQ ID NO: 371000 - DNA, 12 bp, Artificial Sequence
  Oligonucleotide primer for the detection of SNP TSC0058513
ataaacacctta

SEQ ID NO: 371001 - DNA, 12 bp, Artificial Sequence
  Oligonucleotide primer for the detection of SNP TSC0058513
tgtaatttgaag

SEQ ID NO: 371002 - DNA, 12 bp, Artificial Sequence
  Oligonucleotide primer for the detection of SNP TSC0058513
agtaagtatttt

SEQ ID NO: 371003 - DNA, 12 bp, Artificial Sequence
  Oligonucleotide primer for the detection of SNP TSC0058514
gtgttattttta

SEQ ID NO: 371004 - DNA, 12 bp, Artificial Sequence
  Oligonucleotide primer for the detection of SNP TSC0058515
tttcttttttac

SEQ ID NO: 371005 - DNA, 12 bp, Artificial Sequence
  Oligonucleotide primer for the detection of SNP TSC0058515
gattaaatttta

SEQ ID NO: 371006 - DNA, 12 bp, Artificial Sequence
  Oligonucleotide primer for the detection of SNP TSC0058516
tataattatctc

SEQ ID NO: 371007 - DNA, 12 bp, Artificial Sequence
  Oligonucleotide primer for the detection of SNP TSC0058516
tatttatttggg

SEQ ID NO: 371008 - DNA, 12 bp, Artificial Sequence
  Oligonucleotide primer for the detection of SNP TSC0058517
ttttctttattc

SEQ ID NO: 371009 - DNA, 12 bp, Artificial Sequence
  Oligonucleotide primer for the detection of SNP TSC0058517
tatttaataaaa

SEQ ID NO: 371010 - DNA, 12 bp, Artificial Sequence
  Oligonucleotide primer for the detection of SNP TSC0058518
tactaaacatta

SEQ ID NO: 371011 - DNA, 12 bp, Artificial Sequence
  Oligonucleotide primer for the detection of SNP TSC0058518
aatatgttaggt

SEQ ID NO: 371012 - DNA, 12 bp, Artificial Sequence
  Oligonucleotide primer for the detection of SNP TSC0058518
atattgagtatt

SEQ ID NO: 371013 - DNA, 12 bp, Artificial Sequence
  Oligonucleotide primer for the detection of SNP TSC0000791
cccttaataata

SEQ ID NO: 371014 - DNA, 12 bp, Artificial Sequence
  Oligonucleotide primer for the detection of SNP TSC0000791
atttttgatgat

SEQ ID NO: 371015 - DNA, 12 bp, Artificial Sequence
  Oligonucleotide primer for the detection of SNP TSC0000792
ggatttaaaaat

SEQ ID NO: 371016 - DNA, 12 bp, Artificial Sequence
  Oligonucleotide primer for the detection of SNP TSC0000792
tatagttggata

SEQ ID NO: 371017 - DNA, 12 bp, Artificial Sequence
  Oligonucleotide primer for the detection of SNP TSC0000884
aggtttatagta

SEQ ID NO: 371018 - DNA, 12 bp, Artificial Sequence
  Oligonucleotide primer for the detection of SNP TSC0000884
tttgtttaattc

SEQ ID NO: 371019 - DNA, 12 bp, Artificial Sequence
  Oligonucleotide primer for the detection of SNP TSC0000885
acaaatctaact

SEQ ID NO: 371020 - DNA, 12 bp, Artificial Sequence
  Oligonucleotide primer for the detection of SNP TSC0000885
tgttatgaagta

SEQ ID NO: 371021 - DNA, 12 bp, Artificial Sequence
  Oligonucleotide primer for the detection of SNP TSC0058524
ttaacaaaacac

SEQ ID NO: 371022 - DNA, 12 bp, Artificial Sequence
  Oligonucleotide primer for the detection of SNP TSC0058524
ttggttgttgat

SEQ ID NO: 371023 - DNA, 12 bp, Artificial Sequence
  Oligonucleotide primer for the detection of SNP TSC0058524
ctaactactaat

SEQ ID NO: 371024 - DNA, 12 bp, Artificial Sequence
  Oligonucleotide primer for the detection of SNP TSC0058524
ttggtagagtat

SEQ ID NO: 371025 - DNA, 12 bp, Artificial Sequence
  Oligonucleotide primer for the detection of SNP TSC0058524
ttggtagagtac

SEQ ID NO: 371026 - DNA, 12 bp, Artificial Sequence
  Oligonucleotide primer for the detection of SNP TSC0058525
cttattaacaaa

SEQ ID NO: 371027 - DNA, 12 bp, Artificial Sequence
  Oligonucleotide primer for the detection of SNP TSC0058525
ttgttgatagtg

SEQ ID NO: 371028 - DNA, 12 bp, Artificial Sequence
  Oligonucleotide primer for the detection of SNP TSC0058525
ctactaataata

SEQ ID NO: 371029 - DNA, 12 bp, Artificial Sequence
  Oligonucleotide primer for the detection of SNP TSC0058525
tttattggtaga

SEQ ID NO: 371030 - DNA, 12 bp, Artificial Sequence
  Oligonucleotide primer for the detection of SNP TSC0000452
aatcaacttatt

SEQ ID NO: 371031 - DNA, 12 bp, Artificial Sequence
  Oligonucleotide primer for the detection of SNP TSC0058526
tgagatataaat

SEQ ID NO: 371032 - DNA, 12 bp, Artificial Sequence
  Oligonucleotide primer for the detection of SNP TSC0058526
gaaataaaaagg

SEQ ID NO: 371033 - DNA, 12 bp, Artificial Sequence
  Oligonucleotide primer for the detection of SNP TSC0058529
catccattcaac

SEQ ID NO: 371034 - DNA, 12 bp, Artificial Sequence
  Oligonucleotide primer for the detection of SNP TSC0058529
tgaaatggatag

SEQ ID NO: 371035 - DNA, 12 bp, Artificial Sequence
  Oligonucleotide primer for the detection of SNP TSC0058530
agtaaagtatag

SEQ ID NO: 371036 - DNA, 12 bp, Artificial Sequence
  Oligonucleotide primer for the detection of SNP TSC0058531
aacataactaac

SEQ ID NO: 371037 - DNA, 12 bp, Artificial Sequence
  Oligonucleotide primer for the detection of SNP TSC0058532
tataaattttaa

SEQ ID NO: 371038 - DNA, 12 bp, Artificial Sequence
  Oligonucleotide primer for the detection of SNP TSC0058532
tatgtttaggtt

SEQ ID NO: 371039 - DNA, 12 bp, Artificial Sequence
  Oligonucleotide primer for the detection of SNP TSC0058532
catatttaaatt

SEQ ID NO: 371040 - DNA, 12 bp, Artificial Sequence
  Oligonucleotide primer for the detection of SNP TSC0058533
cacatttaaacc

SEQ ID NO: 371041 - DNA, 12 bp, Artificial Sequence
  Oligonucleotide primer for the detection of SNP TSC0058533
gagttattgttt

SEQ ID NO: 371042 - DNA, 12 bp, Artificial Sequence
  Oligonucleotide primer for the detection of SNP TSC0058533
gagttattgttc

SEQ ID NO: 371043 - DNA, 12 bp, Artificial Sequence
  Oligonucleotide primer for the detection of SNP TSC0058533
aaaccactaccc

SEQ ID NO: 371044 - DNA, 12 bp, Artificial Sequence
  Oligonucleotide primer for the detection of SNP TSC0058533
tatatttaggtt

SEQ ID NO: 371045 - DNA, 12 bp, Artificial Sequence
  Oligonucleotide primer for the detection of SNP TSC0058533
tatatttaggtc

SEQ ID NO: 371046 - DNA, 12 bp, Artificial Sequence
  Oligonucleotide primer for the detection of SNP TSC0058534
ccctaataacct

SEQ ID NO: 371047 - DNA, 12 bp, Artificial Sequence
  Oligonucleotide primer for the detection of SNP TSC0058534
gaggtttttttg

SEQ ID NO: 371048 - DNA, 12 bp, Artificial Sequence
  Oligonucleotide primer for the detection of SNP TSC0058536
caattatccatc

SEQ ID NO: 371049 - DNA, 12 bp, Artificial Sequence
  Oligonucleotide primer for the detection of SNP TSC0058537
atctacccttcc

SEQ ID NO: 371050 - DNA, 12 bp, Artificial Sequence
  Oligonucleotide primer for the detection of SNP TSC0058537
tatggatgtatg

SEQ ID NO: 371051 - DNA, 12 bp, Artificial Sequence
  Oligonucleotide primer for the detection of SNP TSC0058539
gagttgttaata

SEQ ID NO: 371052 - DNA, 12 bp, Artificial Sequence
  Oligonucleotide primer for the detection of SNP TSC0058539
aaattactaaca

SEQ ID NO: 371053 - DNA, 12 bp, Artificial Sequence
  Oligonucleotide primer for the detection of SNP TSC0058540
catcttcaaatt

SEQ ID NO: 371054 - DNA, 12 bp, Artificial Sequence
  Oligonucleotide primer for the detection of SNP TSC0058540
tatttttagatt

SEQ ID NO: 371055 - DNA, 12 bp, Artificial Sequence
  Oligonucleotide primer for the detection of SNP TSC0058541
caatttcacata

SEQ ID NO: 371056 - DNA, 12 bp, Artificial Sequence
  Oligonucleotide primer for the detection of SNP TSC0058541
tgtggatatttt

SEQ ID NO: 371057 - DNA, 12 bp, Artificial Sequence
  Oligonucleotide primer for the detection of SNP TSC0058541
tataaacatttt

SEQ ID NO: 371058 - DNA, 12 bp, Artificial Sequence
  Oligonucleotide primer for the detection of SNP TSC0058543
ttaccttcccta

SEQ ID NO: 371059 - DNA, 12 bp, Artificial Sequence
  Oligonucleotide primer for the detection of SNP TSC0058543
tttgtgtattgt

SEQ ID NO: 371060 - DNA, 12 bp, Artificial Sequence
  Oligonucleotide primer for the detection of SNP TSC0058543
cttatatactac

SEQ ID NO: 371061 - DNA, 12 bp, Artificial Sequence
  Oligonucleotide primer for the detection of SNP TSC0058550
tatatatcaaac

SEQ ID NO: 371062 - DNA, 12 bp, Artificial Sequence
  Oligonucleotide primer for the detection of SNP TSC0058551
atactttactac

SEQ ID NO: 371063 - DNA, 12 bp, Artificial Sequence
  Oligonucleotide primer for the detection of SNP TSC0058554
tcaacaattatc

SEQ ID NO: 371064 - DNA, 12 bp, Artificial Sequence
  Oligonucleotide primer for the detection of SNP TSC0058554
tttaatttttga

SEQ ID NO: 371065 - DNA, 12 bp, Artificial Sequence
  Oligonucleotide primer for the detection of SNP TSC0058554
cttaatttttaa

SEQ ID NO: 371066 - DNA, 12 bp, Artificial Sequence
  Oligonucleotide primer for the detection of SNP TSC0058554
ttaataattatt

SEQ ID NO: 371067 - DNA, 12 bp, Artificial Sequence
  Oligonucleotide primer for the detection of SNP TSC0058557
aaattttatttc

SEQ ID NO: 371068 - DNA, 12 bp, Artificial Sequence
  Oligonucleotide primer for the detection of SNP TSC0058558
aataaattaata

SEQ ID NO: 371069 - DNA, 12 bp, Artificial Sequence
  Oligonucleotide primer for the detection of SNP TSC0058559
tgatgggattat

SEQ ID NO: 371070 - DNA, 12 bp, Artificial Sequence
  Oligonucleotide primer for the detection of SNP TSC0058559
ttaaggaagaat

SEQ ID NO: 371071 - DNA, 12 bp, Artificial Sequence
  Oligonucleotide primer for the detection of SNP TSC0058560
ttctctcctaaa

SEQ ID NO: 371072 - DNA, 12 bp, Artificial Sequence
  Oligonucleotide primer for the detection of SNP TSC0058560
gaaaatatgatt

SEQ ID NO: 371073 - DNA, 12 bp, Artificial Sequence
  Oligonucleotide primer for the detection of SNP TSC0058561
caatcattcatt

SEQ ID NO: 371074 - DNA, 12 bp, Artificial Sequence
  Oligonucleotide primer for the detection of SNP TSC0058561
atatgtattaag

SEQ ID NO: 371075 - DNA, 12 bp, Artificial Sequence
  Oligonucleotide primer for the detection of SNP TSC0058563
aatttaggtttt

SEQ ID NO: 371076 - DNA, 12 bp, Artificial Sequence
  Oligonucleotide primer for the detection of SNP TSC0058563
aacccaaacctc

SEQ ID NO: 371077 - DNA, 12 bp, Artificial Sequence
  Oligonucleotide primer for the detection of SNP TSC0058563
gggggtttggga

SEQ ID NO: 371078 - DNA, 12 bp, Artificial Sequence
  Oligonucleotide primer for the detection of SNP TSC0058564
aactcattatac

SEQ ID NO: 371079 - DNA, 12 bp, Artificial Sequence
  Oligonucleotide primer for the detection of SNP TSC0058564
gaaaaaatttga

SEQ ID NO: 371080 - DNA, 12 bp, Artificial Sequence
  Oligonucleotide primer for the detection of SNP TSC0058564
gaaaaaattcga

SEQ ID NO: 371081 - DNA, 12 bp, Artificial Sequence
  Oligonucleotide primer for the detection of SNP TSC0058565
aattataatgtt

SEQ ID NO: 371082 - DNA, 12 bp, Artificial Sequence
  Oligonucleotide primer for the detection of SNP TSC0058565
aattataacgtt

SEQ ID NO: 371083 - DNA, 12 bp, Artificial Sequence
  Oligonucleotide primer for the detection of SNP TSC0058565
aattataatgtc

SEQ ID NO: 371084 - DNA, 12 bp, Artificial Sequence
  Oligonucleotide primer for the detection of SNP TSC0058565
aattataacgtc

SEQ ID NO: 371085 - DNA, 12 bp, Artificial Sequence
  Oligonucleotide primer for the detection of SNP TSC0058565
aaatcataacat

SEQ ID NO: 371086 - DNA, 12 bp, Artificial Sequence
  Oligonucleotide primer for the detection of SNP TSC0058565
aaatcataacgt

SEQ ID NO: 371087 - DNA, 12 bp, Artificial Sequence
  Oligonucleotide primer for the detection of SNP TSC0058565
atgtaaagaaga

SEQ ID NO: 371088 - DNA, 12 bp, Artificial Sequence
  Oligonucleotide primer for the detection of SNP TSC0058566
ataaattatata

SEQ ID NO: 371089 - DNA, 12 bp, Artificial Sequence
  Oligonucleotide primer for the detection of SNP TSC0058567
  unsure (1): unknown base
nccaaaacctat

SEQ ID NO: 371090 - DNA, 12 bp, Artificial Sequence
  Oligonucleotide primer for the detection of SNP TSC0058567
gagttttaaaag

SEQ ID NO: 371091 - DNA, 12 bp, Artificial Sequence
  Oligonucleotide primer for the detection of SNP TSC0058569
taatacaaaata

SEQ ID NO: 371092 - DNA, 12 bp, Artificial Sequence
  Oligonucleotide primer for the detection of SNP TSC0058569
atgtgttttaat

SEQ ID NO: 371093 - DNA, 12 bp, Artificial Sequence
  Oligonucleotide primer for the detection of SNP TSC0058569
atatattttaac

SEQ ID NO: 371094 - DNA, 12 bp, Artificial Sequence
  Oligonucleotide primer for the detection of SNP TSC0058569
tagtgtaaaata

SEQ ID NO: 371095 - DNA, 12 bp, Artificial Sequence
  Oligonucleotide primer for the detection of SNP TSC0058574
attttttatatc

SEQ ID NO: 371096 - DNA, 12 bp, Artificial Sequence
  Oligonucleotide primer for the detection of SNP TSC0058575
cataataccacc

SEQ ID NO: 371097 - DNA, 12 bp, Artificial Sequence
  Oligonucleotide primer for the detection of SNP TSC0058575
aggaagatagtg

SEQ ID NO: 371098 - DNA, 12 bp, Artificial Sequence
  Oligonucleotide primer for the detection of SNP TSC0058575
tatgatgttatt

SEQ ID NO: 371099 - DNA, 12 bp, Artificial Sequence
  Oligonucleotide primer for the detection of SNP TSC0058575
tatgatgttatc

SEQ ID NO: 371100 - DNA, 12 bp, Artificial Sequence
  Oligonucleotide primer for the detection of SNP TSC0058576
caaatttctcct

SEQ ID NO: 371101 - DNA, 12 bp, Artificial Sequence
  Oligonucleotide primer for the detection of SNP TSC0058576
tggaggtggtga

SEQ ID NO: 371102 - DNA, 12 bp, Artificial Sequence
  Oligonucleotide primer for the detection of SNP TSC0058577
tccctaactatc

SEQ ID NO: 371103 - DNA, 12 bp, Artificial Sequence
  Oligonucleotide primer for the detection of SNP TSC0058577
tgagttggaggg

SEQ ID NO: 371104 - DNA, 12 bp, Artificial Sequence
  Oligonucleotide primer for the detection of SNP TSC0058578
tcaaacccaaac

SEQ ID NO: 371105 - DNA, 12 bp, Artificial Sequence
  Oligonucleotide primer for the detection of SNP TSC0058579
ttaaatatacta

SEQ ID NO: 371106 - DNA, 12 bp, Artificial Sequence
  Oligonucleotide primer for the detection of SNP TSC0058579
ataaactaattc

SEQ ID NO: 371107 - DNA, 12 bp, Artificial Sequence
  Oligonucleotide primer for the detection of SNP TSC0058579
tttaaatgtgtt

SEQ ID NO: 371108 - DNA, 12 bp, Artificial Sequence
  Oligonucleotide primer for the detection of SNP TSC0058580
caactacaaatt

SEQ ID NO: 371109 - DNA, 12 bp, Artificial Sequence
  Oligonucleotide primer for the detection of SNP TSC0058580
tgtgattatata

SEQ ID NO: 371110 - DNA, 12 bp, Artificial Sequence
  Oligonucleotide primer for the detection of SNP TSC0058581
tattatgaatga

SEQ ID NO: 371111 - DNA, 12 bp, Artificial Sequence
  Oligonucleotide primer for the detection of SNP TSC0058581
tattataaataa

SEQ ID NO: 371112 - DNA, 12 bp, Artificial Sequence
  Oligonucleotide primer for the detection of SNP TSC0058582
cctcctcctttc

SEQ ID NO: 371113 - DNA, 12 bp, Artificial Sequence
  Oligonucleotide primer for the detection of SNP TSC0058582
tgttaattaaga

SEQ ID NO: 371114 - DNA, 12 bp, Artificial Sequence
  Oligonucleotide primer for the detection of SNP TSC0058583
acaaaatatatt

SEQ ID NO: 371115 - DNA, 12 bp, Artificial Sequence
  Oligonucleotide primer for the detection of SNP TSC0058584
ttacaaaacact

SEQ ID NO: 371116 - DNA, 12 bp, Artificial Sequence
  Oligonucleotide primer for the detection of SNP TSC0058584
tgaatttatttg

SEQ ID NO: 371117 - DNA, 12 bp, Artificial Sequence
  Oligonucleotide primer for the detection of SNP TSC0058585
tttgttgataga

SEQ ID NO: 371118 - DNA, 12 bp, Artificial Sequence
  Oligonucleotide primer for the detection of SNP TSC0058589
cacaacctaata

SEQ ID NO: 371119 - DNA, 12 bp, Artificial Sequence
  Oligonucleotide primer for the detection of SNP TSC0058589
cacgacctaata

SEQ ID NO: 371120 - DNA, 12 bp, Artificial Sequence
  Oligonucleotide primer for the detection of SNP TSC0058589
ggtgaatagatt

SEQ ID NO: 371121 - DNA, 12 bp, Artificial Sequence
  Oligonucleotide primer for the detection of SNP TSC0058589
ggtgaatagatc

SEQ ID NO: 371122 - DNA, 12 bp, Artificial Sequence
  Oligonucleotide primer for the detection of SNP TSC0058589
aataaacaaacc

SEQ ID NO: 371123 - DNA, 12 bp, Artificial Sequence
  Oligonucleotide primer for the detection of SNP TSC0058589
tgatttggtgtt

SEQ ID NO: 371124 - DNA, 12 bp, Artificial Sequence
  Oligonucleotide primer for the detection of SNP TSC0058589
cgatttggtgtt

SEQ ID NO: 371125 - DNA, 12 bp, Artificial Sequence
  Oligonucleotide primer for the detection of SNP TSC0058592
acgaaaaatacc

SEQ ID NO: 371126 - DNA, 12 bp, Artificial Sequence
  Oligonucleotide primer for the detection of SNP TSC0058592
attaaaaaattg

SEQ ID NO: 371127 - DNA, 12 bp, Artificial Sequence
  Oligonucleotide primer for the detection of SNP TSC0058593
atatccctttta

SEQ ID NO: 371128 - DNA, 12 bp, Artificial Sequence
  Oligonucleotide primer for the detection of SNP TSC0058593
tagattatttat

SEQ ID NO: 371129 - DNA, 12 bp, Artificial Sequence
  Oligonucleotide primer for the detection of SNP TSC0058594
ttagaagtttta

SEQ ID NO: 371130 - DNA, 12 bp, Artificial Sequence
  Oligonucleotide primer for the detection of SNP TSC0058594
tgaaggtagtat

SEQ ID NO: 371131 - DNA, 12 bp, Artificial Sequence
  Oligonucleotide primer for the detection of SNP TSC0058598
atattcattaat

SEQ ID NO: 371132 - DNA, 12 bp, Artificial Sequence
  Oligonucleotide primer for the detection of SNP TSC0058598
atattcgttaat

SEQ ID NO: 371133 - DNA, 12 bp, Artificial Sequence
  Oligonucleotide primer for the detection of SNP TSC0058598
gattatttttaa

SEQ ID NO: 371134 - DNA, 12 bp, Artificial Sequence
  Oligonucleotide primer for the detection of SNP TSC0058599
gatgatgatgat

SEQ ID NO: 371135 - DNA, 12 bp, Artificial Sequence
  Oligonucleotide primer for the detection of SNP TSC0058600
aaagatattttt

SEQ ID NO: 371136 - DNA, 12 bp, Artificial Sequence
  Oligonucleotide primer for the detection of SNP TSC0058600
aaaaacattttc

SEQ ID NO: 371137 - DNA, 12 bp, Artificial Sequence
  Oligonucleotide primer for the detection of SNP TSC0058600
ggggaaaaaaga

SEQ ID NO: 371138 - DNA, 12 bp, Artificial Sequence
  Oligonucleotide primer for the detection of SNP TSC0058601
ttgaagttaaat

SEQ ID NO: 371139 - DNA, 12 bp, Artificial Sequence
  Oligonucleotide primer for the detection of SNP TSC0058601
taaaaccaaata

SEQ ID NO: 371140 - DNA, 12 bp, Artificial Sequence
  Oligonucleotide primer for the detection of SNP TSC0058604
acactactacca

SEQ ID NO: 371141 - DNA, 12 bp, Artificial Sequence
  Oligonucleotide primer for the detection of SNP TSC0058604
aataaatcactt

SEQ ID NO: 371142 - DNA, 12 bp, Artificial Sequence
  Oligonucleotide primer for the detection of SNP TSC0058604
gtattgttatta

SEQ ID NO: 371143 - DNA, 12 bp, Artificial Sequence
  Oligonucleotide primer for the detection of SNP TSC0058605
cttccatataaa

SEQ ID NO: 371144 - DNA, 12 bp, Artificial Sequence
  Oligonucleotide primer for the detection of SNP TSC0058605
cttccgtataaa

SEQ ID NO: 371145 - DNA, 12 bp, Artificial Sequence
  Oligonukleotid-Primer
atatagattatt

SEQ ID NO: 371146 - DNA, 12 bp, Artificial Sequence
  Oligonucleotide primer for the detection of SNP TSC0058605
tatacaaaccac

SEQ ID NO: 371147 - DNA, 12 bp, Artificial Sequence
  Oligonucleotide primer for the detection of SNP TSC0058605
gtttttgtgtag

SEQ ID NO: 371148 - DNA, 12 bp, Artificial Sequence
  Oligonucleotide primer for the detection of SNP TSC0058605
gttttcgtgtag

SEQ ID NO: 371149 - DNA, 12 bp, Artificial Sequence
  Oligonucleotide primer for the detection of SNP TSC0058613
taatgtttaggg

SEQ ID NO: 371150 - DNA, 12 bp, Artificial Sequence
  Oligonucleotide primer for the detection of SNP TSC0058614
attattcattca

SEQ ID NO: 371151 - DNA, 12 bp, Artificial Sequence
  Oligonucleotide primer for the detection of SNP TSC0058614
aagttgttgagt

SEQ ID NO: 371152 - DNA, 12 bp, Artificial Sequence
  Oligonucleotide primer for the detection of SNP TSC0058616
catactaaatat

SEQ ID NO: 371153 - DNA, 12 bp, Artificial Sequence
  Oligonucleotide primer for the detection of SNP TSC0058616
aatatatttaag

SEQ ID NO: 371154 - DNA, 12 bp, Artificial Sequence
  Oligonucleotide primer for the detection of SNP TSC0058620
attacattataa

SEQ ID NO: 371155 - DNA, 12 bp, Artificial Sequence
  Oligonucleotide primer for the detection of SNP TSC0058620
gttacattataa

SEQ ID NO: 371156 - DNA, 12 bp, Artificial Sequence
  Oligonucleotide primer for the detection of SNP TSC0058620
tattataatatt

SEQ ID NO: 371157 - DNA, 12 bp, Artificial Sequence
  Oligonukleotid-Primer
tattataacatc

SEQ ID NO: 371158 - DNA, 12 bp, Artificial Sequence
  Oligonucleotide primer for the detection of SNP TSC0058620
gttatattataa

SEQ ID NO: 371159 - DNA, 12 bp, Artificial Sequence
  Oligonucleotide primer for the detection of SNP TSC0058621
tatttttctcca

SEQ ID NO: 371160 - DNA, 12 bp, Artificial Sequence
  Oligonucleotide primer for the detection of SNP TSC0058621
taatttggtatt

SEQ ID NO: 371161 - DNA, 12 bp, Artificial Sequence
  Oligonucleotide primer for the detection of SNP TSC0058621
taattcggtatt

SEQ ID NO: 371162 - DNA, 12 bp, Artificial Sequence
  Oligonucleotide primer for the detection of SNP TSC0058621
taacccaacatc

SEQ ID NO: 371163 - DNA, 12 bp, Artificial Sequence
  Oligonucleotide primer for the detection of SNP TSC0058621
taacccgacatc

SEQ ID NO: 371164 - DNA, 12 bp, Artificial Sequence
  Oligonucleotide primer for the detection of SNP TSC0004731
ttaatccgcaat

SEQ ID NO: 371165 - DNA, 12 bp, Artificial Sequence
  Oligonukleotid-Primer
ataatactcttc

SEQ ID NO: 371166 - DNA, 12 bp, Artificial Sequence
  Oligonucleotide primer for the detection of SNP TSC0058627
gagttttgaatt

SEQ ID NO: 371167 - DNA, 12 bp, Artificial Sequence
  Oligonucleotide primer for the detection of SNP TSC0058627
aaattctaaatt

SEQ ID NO: 371168 - DNA, 12 bp, Artificial Sequence
  Oligonucleotide primer for the detection of SNP TSC0058627
gtgatgtttttt

SEQ ID NO: 371169 - DNA, 12 bp, Artificial Sequence
  Oligonucleotide primer for the detection of SNP TSC0058628
ttttaactatca

SEQ ID NO: 371170 - DNA, 12 bp, Artificial Sequence
  Oligonucleotide primer for the detection of SNP TSC0058628
agtagatatgat

SEQ ID NO: 371171 - DNA, 12 bp, Artificial Sequence
  Oligonucleotide primer for the detection of SNP TSC0058629
atactttaattt

SEQ ID NO: 371172 - DNA, 12 bp, Artificial Sequence
  Oligonucleotide primer for the detection of SNP TSC0058631
tatttctattat

SEQ ID NO: 371173 - DNA, 12 bp, Artificial Sequence
  Oligonucleotide primer for the detection of SNP TSC0058632
taacttaactta

SEQ ID NO: 371174 - DNA, 12 bp, Artificial Sequence
  Oligonucleotide primer for the detection of SNP TSC0058632
tagttaatttta

SEQ ID NO: 371175 - DNA, 12 bp, Artificial Sequence
  Oligonucleotide primer for the detection of SNP TSC0058632
attaatctcaaa

SEQ ID NO: 371176 - DNA, 12 bp, Artificial Sequence
  Oligonucleotide primer for the detection of SNP TSC0058632
gtagtttgattt

SEQ ID NO: 371177 - DNA, 12 bp, Artificial Sequence
  Oligonukleotid-Primer
ctctactataca

SEQ ID NO: 371178 - DNA, 12 bp, Artificial Sequence
  Oligonucleotide primer for the detection of SNP TSC0058633
catttcccctac

SEQ ID NO: 371179 - DNA, 12 bp, Artificial Sequence
  Oligonucleotide primer for the detection of SNP TSC0058633
  unsure (1): unknown base
nttttgttgtat

SEQ ID NO: 371180 - DNA, 12 bp, Artificial Sequence
  Oligonucleotide primer for the detection of SNP TSC0058636
ttatattacttc

SEQ ID NO: 371181 - DNA, 12 bp, Artificial Sequence
  Oligonucleotide primer for the detection of SNP TSC0058636
ttgtattgtttc

SEQ ID NO: 371182 - DNA, 12 bp, Artificial Sequence
  Oligonucleotide primer for the detection of SNP TSC0058637
taaaacatatta

SEQ ID NO: 371183 - DNA, 12 bp, Artificial Sequence
  Oligonucleotide primer for the detection of SNP TSC0058637
aattaatatgat

SEQ ID NO: 371184 - DNA, 12 bp, Artificial Sequence
  Oligonucleotide primer for the detection of SNP TSC0058637
atcaatataata

SEQ ID NO: 371185 - DNA, 12 bp, Artificial Sequence
  Oligonucleotide primer for the detection of SNP TSC0058637
tgaaatatatta

SEQ ID NO: 371186 - DNA, 12 bp, Artificial Sequence
  Oligonucleotide primer for the detection of SNP TSC0058638
ttatataaatca

SEQ ID NO: 371187 - DNA, 12 bp, Artificial Sequence
  Oligonucleotide primer for the detection of SNP TSC0058638
ttatataaatcg

SEQ ID NO: 371188 - DNA, 12 bp, Artificial Sequence
  Oligonucleotide primer for the detection of SNP TSC0058638
  unsure (3): unknown base
gtntggaagatt

SEQ ID NO: 371189 - DNA, 12 bp, Artificial Sequence
  Oligonucleotide primer for the detection of SNP TSC0058638
  unsure (2): unknown base
tntaaaaaatta

SEQ ID NO: 371190 - DNA, 12 bp, Artificial Sequence
  Oligonucleotide primer for the detection of SNP TSC0058638
tttatatgaatc

SEQ ID NO: 371191 - DNA, 12 bp, Artificial Sequence
  Oligonucleotide primer for the detection of SNP TSC0058639
atatcccaaata

SEQ ID NO: 371192 - DNA, 12 bp, Artificial Sequence
  Oligonucleotide primer for the detection of SNP TSC0058639
attagaatattt

SEQ ID NO: 371193 - DNA, 12 bp, Artificial Sequence
  Oligonucleotide primer for the detection of SNP TSC0058639
aaaatacctaaa

SEQ ID NO: 371194 - DNA, 12 bp, Artificial Sequence
  Oligonucleotide primer for the detection of SNP TSC0058639
atattttagata

SEQ ID NO: 371195 - DNA, 12 bp, Artificial Sequence
  Oligonucleotide primer for the detection of SNP TSC0058640
taactcccctaa

SEQ ID NO: 371196 - DNA, 12 bp, Artificial Sequence
  Oligonucleotide primer for the detection of SNP TSC0058640
agtttagataga

SEQ ID NO: 371197 - DNA, 12 bp, Artificial Sequence
  Oligonucleotide primer for the detection of SNP TSC0058641
catatcactctc

SEQ ID NO: 371198 - DNA, 12 bp, Artificial Sequence
  Oligonucleotide primer for the detection of SNP TSC0058641
tgtagttttgaa

SEQ ID NO: 371199 - DNA, 12 bp, Artificial Sequence
  Oligonucleotide primer for the detection of SNP TSC0058641
tataactctaaa

SEQ ID NO: 371200 - DNA, 12 bp, Artificial Sequence
  Oligonucleotide primer for the detection of SNP TSC0058641
tatgttattttt

SEQ ID NO: 371201 - DNA, 12 bp, Artificial Sequence
  Oligonucleotide primer for the detection of SNP TSC0058644
ctttcaaatctt

SEQ ID NO: 371202 - DNA, 12 bp, Artificial Sequence
  Oligonucleotide primer for the detection of SNP TSC0058645
tccaatctacaa

SEQ ID NO: 371203 - DNA, 12 bp, Artificial Sequence
  Oligonucleotide primer for the detection of SNP TSC0058645
tttgatttatag

SEQ ID NO: 371204 - DNA, 12 bp, Artificial Sequence
  Oligonucleotide primer for the detection of SNP TSC0058645
cttaattcataa

SEQ ID NO: 371205 - DNA, 12 bp, Artificial Sequence
  Oligonucleotide primer for the detection of SNP TSC0058645
atttagtttgta

SEQ ID NO: 371206 - DNA, 12 bp, Artificial Sequence
  Oligonucleotide primer for the detection of SNP TSC0058646
ttgtatttgttt

SEQ ID NO: 371207 - DNA, 12 bp, Artificial Sequence
  Oligonucleotide primer for the detection of SNP TSC0058646
ctatatttaccc

SEQ ID NO: 371208 - DNA, 12 bp, Artificial Sequence
  Oligonucleotide primer for the detection of SNP TSC0058646
tgggagtattta

SEQ ID NO: 371209 - DNA, 12 bp, Artificial Sequence
  Oligonucleotide primer for the detection of SNP TSC0058647
gatagttatata

SEQ ID NO: 371210 - DNA, 12 bp, Artificial Sequence
  Oligonucleotide primer for the detection of SNP TSC0058647
aacaattatata

SEQ ID NO: 371211 - DNA, 12 bp, Artificial Sequence
  Oligonucleotide primer for the detection of SNP TSC0058648
gggtttgatata

SEQ ID NO: 371212 - DNA, 12 bp, Artificial Sequence
  Oligonucleotide primer for the detection of SNP TSC0005863
ccaacctaaaat

SEQ ID NO: 371213 - DNA, 12 bp, Artificial Sequence
  Oligonucleotide primer for the detection of SNP TSC0005863
ccgacctaaaat

SEQ ID NO: 371214 - DNA, 12 bp, Artificial Sequence
  Oligonucleotide primer for the detection of SNP TSC0005863
atactcaaacaa

SEQ ID NO: 371215 - DNA, 12 bp, Artificial Sequence
  Oligonucleotide primer for the detection of SNP TSC0005863
ttgatttaaggt

SEQ ID NO: 371216 - DNA, 12 bp, Artificial Sequence
  Oligonucleotide primer for the detection of SNP TSC0005863
tcgatttaaggt

SEQ ID NO: 371217 - DNA, 12 bp, Artificial Sequence
  Oligonucleotide primer for the detection of SNP TSC0005864
accccaaaattc

SEQ ID NO: 371218 - DNA, 12 bp, Artificial Sequence
  Oligonucleotide primer for the detection of SNP TSC0005864
tattaaaaccta

SEQ ID NO: 371219 - DNA, 12 bp, Artificial Sequence
  Oligonucleotide primer for the detection of SNP TSC0005864
attttaagattt

SEQ ID NO: 371220 - DNA, 12 bp, Artificial Sequence
  Oligonucleotide primer for the detection of SNP TSC0058655
taatctaactac

SEQ ID NO: 371221 - DNA, 12 bp, Artificial Sequence
  Oligonucleotide primer for the detection of SNP TSC0058655
ttagttatataa

SEQ ID NO: 371222 - DNA, 12 bp, Artificial Sequence
  Oligonucleotide primer for the detection of SNP TSC0058658
aatccaaacttt

SEQ ID NO: 371223 - DNA, 12 bp, Artificial Sequence
  Oligonucleotide primer for the detection of SNP TSC0058658
taaatggaataa

SEQ ID NO: 371224 - DNA, 12 bp, Artificial Sequence
  Oligonucleotide primer for the detection of SNP TSC0006335
tacccaaaaatc

SEQ ID NO: 371225 - DNA, 12 bp, Artificial Sequence
  Oligonucleotide primer for the detection of SNP TSC0006335
tacccgaaaatc

SEQ ID NO: 371226 - DNA, 12 bp, Artificial Sequence
  Oligonucleotide primer for the detection of SNP TSC0006335
atttttttttga

SEQ ID NO: 371227 - DNA, 12 bp, Artificial Sequence
  Oligonucleotide primer for the detection of SNP TSC0058661
tgtttgagaata

SEQ ID NO: 371228 - DNA, 12 bp, Artificial Sequence
  Oligonucleotide primer for the detection of SNP TSC0058662
gttggattgtag

SEQ ID NO: 371229 - DNA, 12 bp, Artificial Sequence
  Oligonucleotide primer for the detection of SNP TSC0058662
actaaattacaa

SEQ ID NO: 371230 - DNA, 12 bp, Artificial Sequence
  Oligonucleotide primer for the detection of SNP TSC0058662
tgagattatgtt

SEQ ID NO: 371231 - DNA, 12 bp, Artificial Sequence
  Oligonucleotide primer for the detection of SNP TSC0058663
acaactaaattt

SEQ ID NO: 371232 - DNA, 12 bp, Artificial Sequence
  Oligonucleotide primer for the detection of SNP TSC0058663
tatgaaaattag

SEQ ID NO: 371233 - DNA, 12 bp, Artificial Sequence
  Oligonucleotide primer for the detection of SNP TSC0058664
cttaaacactat

SEQ ID NO: 371234 - DNA, 12 bp, Artificial Sequence
  Oligonucleotide primer for the detection of SNP TSC0058664
ttgaattaggag

SEQ ID NO: 371235 - DNA, 12 bp, Artificial Sequence
  Oligonucleotide primer for the detection of SNP TSC0058665
ttaatacctcca

SEQ ID NO: 371236 - DNA, 12 bp, Artificial Sequence
  Oligonucleotide primer for the detection of SNP TSC0058668
ttatatagtgga

SEQ ID NO: 371237 - DNA, 12 bp, Artificial Sequence
  Oligonucleotide primer for the detection of SNP TSC0058668
tattgttgaggg

SEQ ID NO: 371238 - DNA, 12 bp, Artificial Sequence
  Oligonucleotide primer for the detection of SNP TSC0058669
ctatacaatttt

SEQ ID NO: 371239 - DNA, 12 bp, Artificial Sequence
  Oligonucleotide primer for the detection of SNP TSC0058669
ttggtggtggga

SEQ ID NO: 371240 - DNA, 12 bp, Artificial Sequence
  Oligonucleotide primer for the detection of SNP TSC0058670
tcacctattcat

SEQ ID NO: 371241 - DNA, 12 bp, Artificial Sequence
  Oligonucleotide primer for the detection of SNP TSC0058670
tcacctattcgt

SEQ ID NO: 371242 - DNA, 12 bp, Artificial Sequence
  Oligonucleotide primer for the detection of SNP TSC0058670
taataattataa

SEQ ID NO: 371243 - DNA, 12 bp, Artificial Sequence
  Oligonucleotide primer for the detection of SNP TSC0058670
taataaccataa

SEQ ID NO: 371244 - DNA, 12 bp, Artificial Sequence
  Oligonucleotide primer for the detection of SNP TSC0058671
taaaaatctttc

SEQ ID NO: 371245 - DNA, 12 bp, Artificial Sequence
  Oligonucleotide primer for the detection of SNP TSC0058672
tcaatatctact

SEQ ID NO: 371246 - DNA, 12 bp, Artificial Sequence
  Oligonucleotide primer for the detection of SNP TSC0058672
gtaggttaggaa

SEQ ID NO: 371247 - DNA, 12 bp, Artificial Sequence
  Oligonucleotide primer for the detection of SNP TSC0058675
aaaactaaactc

SEQ ID NO: 371248 - DNA, 12 bp, Artificial Sequence
  Oligonucleotide primer for the detection of SNP TSC0058676
tatctctcaaaa

SEQ ID NO: 371249 - DNA, 12 bp, Artificial Sequence
  Oligonucleotide primer for the detection of SNP TSC0058676
tacacattttta

SEQ ID NO: 371250 - DNA, 12 bp, Artificial Sequence
  Oligonucleotide primer for the detection of SNP TSC0009284
tatatcctatat

SEQ ID NO: 371251 - DNA, 12 bp, Artificial Sequence
  Oligonucleotide primer for the detection of SNP TSC0009284
tttttagtgttg

SEQ ID NO: 371252 - DNA, 12 bp, Artificial Sequence
  Oligonucleotide primer for the detection of SNP TSC0058679
ttaacaataaac

SEQ ID NO: 371253 - DNA, 12 bp, Artificial Sequence
  Oligonucleotide primer for the detection of SNP TSC0058680
actctctaacaa

SEQ ID NO: 371254 - DNA, 12 bp, Artificial Sequence
  Oligonucleotide primer for the detection of SNP TSC0058680
ggaggatatatt

SEQ ID NO: 371255 - DNA, 12 bp, Artificial Sequence
  Oligonucleotide primer for the detection of SNP TSC0058680
ttaaaaaacaca

SEQ ID NO: 371256 - DNA, 12 bp, Artificial Sequence
  Oligonucleotide primer for the detection of SNP TSC0058681
ttgggatgtagt

SEQ ID NO: 371257 - DNA, 12 bp, Artificial Sequence
  Oligonucleotide primer for the detection of SNP TSC0058682
ctaatccccaat

SEQ ID NO: 371258 - DNA, 12 bp, Artificial Sequence
  Oligonucleotide primer for the detection of SNP TSC0058682
aaggagtatgtg

SEQ ID NO: 371259 - DNA, 12 bp, Artificial Sequence
  Oligonucleotide primer for the detection of SNP TSC0058682
ttgatttttagt

SEQ ID NO: 371260 - DNA, 12 bp, Artificial Sequence
  Oligonucleotide primer for the detection of SNP TSC0005885
ggtttatagtta

SEQ ID NO: 371261 - DNA, 12 bp, Artificial Sequence
  Oligonucleotide primer for the detection of SNP TSC0005885
aatccacaatta

SEQ ID NO: 371262 - DNA, 12 bp, Artificial Sequence
  Oligonucleotide primer for the detection of SNP TSC0005885
tggagaggtttt

SEQ ID NO: 371263 - DNA, 12 bp, Artificial Sequence
  Oligonucleotide primer for the detection of SNP TSC0058686
attatatatgag

SEQ ID NO: 371264 - DNA, 12 bp, Artificial Sequence
  Oligonucleotide primer for the detection of SNP TSC0058686
attatatacgag

SEQ ID NO: 371265 - DNA, 12 bp, Artificial Sequence
  Oligonucleotide primer for the detection of SNP TSC0058686
accacacacaaa

SEQ ID NO: 371266 - DNA, 12 bp, Artificial Sequence
  Oligonucleotide primer for the detection of SNP TSC0058686
accacacacgaa

SEQ ID NO: 371267 - DNA, 12 bp, Artificial Sequence
  Oligonucleotide primer for the detection of SNP TSC0058687
caaaattctatc

SEQ ID NO: 371268 - DNA, 12 bp, Artificial Sequence
  Oligonucleotide primer for the detection of SNP TSC0058687
tgttttagagtt

SEQ ID NO: 371269 - DNA, 12 bp, Artificial Sequence
  Oligonucleotide primer for the detection of SNP TSC0058687
tgttttagagtc

SEQ ID NO: 371270 - DNA, 12 bp, Artificial Sequence
  Oligonucleotide primer for the detection of SNP TSC0058687
cctactccaaaa

SEQ ID NO: 371271 - DNA, 12 bp, Artificial Sequence
  Oligonucleotide primer for the detection of SNP TSC0058689
tatccttttata

SEQ ID NO: 371272 - DNA, 12 bp, Artificial Sequence
  Oligonucleotide primer for the detection of SNP TSC0058689
gaaataaggtag

SEQ ID NO: 371273 - DNA, 12 bp, Artificial Sequence
  Oligonucleotide primer for the detection of SNP TSC0006877
ttatgattttaa

SEQ ID NO: 371274 - DNA, 12 bp, Artificial Sequence
  Oligonucleotide primer for the detection of SNP TSC0058690
tactaaactcat

SEQ ID NO: 371275 - DNA, 12 bp, Artificial Sequence
  Oligonucleotide primer for the detection of SNP TSC0058691
aaattccaaaaa

SEQ ID NO: 371276 - DNA, 12 bp, Artificial Sequence
  Oligonucleotide primer for the detection of SNP TSC0058691
ttttgggatatt

SEQ ID NO: 371277 - DNA, 12 bp, Artificial Sequence
  Oligonucleotide primer for the detection of SNP TSC0058691
tcttaaaacacc

SEQ ID NO: 371278 - DNA, 12 bp, Artificial Sequence
  Oligonucleotide primer for the detection of SNP TSC0058691
ggattttaagag

SEQ ID NO: 371279 - DNA, 12 bp, Artificial Sequence
  Oligonucleotide primer for the detection of SNP TSC0058692
ccacacataacc

SEQ ID NO: 371280 - DNA, 12 bp, Artificial Sequence
  Oligonucleotide primer for the detection of SNP TSC0058692
gtttaagttttt

SEQ ID NO: 371281 - DNA, 12 bp, Artificial Sequence
  Oligonucleotide primer for the detection of SNP TSC0058692
acccaaacctcc

SEQ ID NO: 371282 - DNA, 12 bp, Artificial Sequence
  Oligonucleotide primer for the detection of SNP TSC0058692
ttatatatggtt

SEQ ID NO: 371283 - DNA, 12 bp, Artificial Sequence
  Oligonucleotide primer for the detection of SNP TSC0058693
aatcaattacaa

SEQ ID NO: 371284 - DNA, 12 bp, Artificial Sequence
  Oligonucleotide primer for the detection of SNP TSC0058693
ttaaatgtttga

SEQ ID NO: 371285 - DNA, 12 bp, Artificial Sequence
  Oligonucleotide primer for the detection of SNP TSC0058693
agttagttataa

SEQ ID NO: 371286 - DNA, 12 bp, Artificial Sequence
  Oligonucleotide primer for the detection of SNP TSC0058694
aaattctcatta

SEQ ID NO: 371287 - DNA, 12 bp, Artificial Sequence
  Oligonucleotide primer for the detection of SNP TSC0058694
ttagttttgatt

SEQ ID NO: 371288 - DNA, 12 bp, Artificial Sequence
  Oligonucleotide primer for the detection of SNP TSC0058694
ttaatcttaact

SEQ ID NO: 371289 - DNA, 12 bp, Artificial Sequence
  Oligonucleotide primer for the detection of SNP TSC0058695
actaccacaaat

SEQ ID NO: 371290 - DNA, 12 bp, Artificial Sequence
  Oligonucleotide primer for the detection of SNP TSC0058695
gtaagtgtaaag

SEQ ID NO: 371291 - DNA, 12 bp, Artificial Sequence
  Oligonucleotide primer for the detection of SNP TSC0058696
ttctaaatctaa

SEQ ID NO: 371292 - DNA, 12 bp, Artificial Sequence
  Oligonucleotide primer for the detection of SNP TSC0058696
tggaatagggtg

SEQ ID NO: 371293 - DNA, 12 bp, Artificial Sequence
  Oligonucleotide primer for the detection of SNP TSC0058696
ttttaaatttga

SEQ ID NO: 371294 - DNA, 12 bp, Artificial Sequence
  Oligonucleotide primer for the detection of SNP TSC0058699
ataatataatca

SEQ ID NO: 371295 - DNA, 12 bp, Artificial Sequence
  Oligonucleotide primer for the detection of SNP TSC0058699
gtggtgtgatta

SEQ ID NO: 371296 - DNA, 12 bp, Artificial Sequence
  Oligonucleotide primer for the detection of SNP TSC0058701
ccaaaaaacctt

SEQ ID NO: 371297 - DNA, 12 bp, Artificial Sequence
  Oligonucleotide primer for the detection of SNP TSC0058701
aggttggattta

SEQ ID NO: 371298 - DNA, 12 bp, Artificial Sequence
  Oligonucleotide primer for the detection of SNP TSC0058701
aaactaaattca

SEQ ID NO: 371299 - DNA, 12 bp, Artificial Sequence
  Oligonucleotide primer for the detection of SNP TSC0058701
ttaagaagtttt

SEQ ID NO: 371300 - DNA, 12 bp, Artificial Sequence
  Oligonucleotide primer for the detection of SNP TSC0001104
taattatacctc

SEQ ID NO: 371301 - DNA, 12 bp, Artificial Sequence
  Oligonucleotide primer for the detection of SNP TSC0001104
tgttgtatttag

SEQ ID NO: 371302 - DNA, 12 bp, Artificial Sequence
  Oligonucleotide primer for the detection of SNP TSC0058704
atgttgttttta

SEQ ID NO: 371303 - DNA, 12 bp, Artificial Sequence
  Oligonucleotide primer for the detection of SNP TSC0058704
atactattttca

SEQ ID NO: 371304 - DNA, 12 bp, Artificial Sequence
  Oligonucleotide primer for the detection of SNP TSC0058704
ggaaagagtttt

SEQ ID NO: 371305 - DNA, 12 bp, Artificial Sequence
  Oligonucleotide primer for the detection of SNP TSC0058705
gtgtgggtatta

SEQ ID NO: 371306 - DNA, 12 bp, Artificial Sequence
  Oligonucleotide primer for the detection of SNP TSC0058705
atataaacacta

SEQ ID NO: 371307 - DNA, 12 bp, Artificial Sequence
  Oligonucleotide primer for the detection of SNP TSC0058705
agatttaaaggg

SEQ ID NO: 371308 - DNA, 12 bp, Artificial Sequence
  Oligonucleotide primer for the detection of SNP TSC0058708
accaactcaatc

SEQ ID NO: 371309 - DNA, 12 bp, Artificial Sequence
  Oligonucleotide primer for the detection of SNP TSC0058708
atgtgagaagtt

SEQ ID NO: 371310 - DNA, 12 bp, Artificial Sequence
  Oligonucleotide primer for the detection of SNP TSC0058708
atgcgagaagtt

SEQ ID NO: 371311 - DNA, 12 bp, Artificial Sequence
  Oligonucleotide primer for the detection of SNP TSC0058710
aaacacactcac

SEQ ID NO: 371312 - DNA, 12 bp, Artificial Sequence
  Oligonucleotide primer for the detection of SNP TSC0058710
ctattcttataa

SEQ ID NO: 371313 - DNA, 12 bp, Artificial Sequence
  Oligonucleotide primer for the detection of SNP TSC0058710
gagtatatttat

SEQ ID NO: 371314 - DNA, 12 bp, Artificial Sequence
  Oligonucleotide primer for the detection of SNP TSC0058710
gagtatatttac

SEQ ID NO: 371315 - DNA, 12 bp, Artificial Sequence
  Oligonucleotide primer for the detection of SNP TSC0058712
aataaaaaacgc

SEQ ID NO: 371316 - DNA, 12 bp, Artificial Sequence
  Oligonucleotide primer for the detection of SNP TSC0058712
ggggattttgta

SEQ ID NO: 371317 - DNA, 12 bp, Artificial Sequence
  Oligonucleotide primer for the detection of SNP TSC0058713
ccaaaaactttt

SEQ ID NO: 371318 - DNA, 12 bp, Artificial Sequence
  Oligonucleotide primer for the detection of SNP TSC0058714
gagtttttttta

SEQ ID NO: 371319 - DNA, 12 bp, Artificial Sequence
  Oligonucleotide primer for the detection of SNP TSC0058714
aaatcctcttta

SEQ ID NO: 371320 - DNA, 12 bp, Artificial Sequence
  Oligonucleotide primer for the detection of SNP TSC0058714
aatgtattttaa

SEQ ID NO: 371321 - DNA, 12 bp, Artificial Sequence
  Oligonucleotide primer for the detection of SNP TSC0000262
gagtagtgggta

SEQ ID NO: 371322 - DNA, 12 bp, Artificial Sequence
  Oligonucleotide primer for the detection of SNP TSC0000262
gagtagcgggta

SEQ ID NO: 371323 - DNA, 12 bp, Artificial Sequence
  Oligonucleotide primer for the detection of SNP TSC0000263
caccttcccccc

SEQ ID NO: 371324 - DNA, 12 bp, Artificial Sequence
  Oligonucleotide primer for the detection of SNP TSC0000263
ggtggggtgggg

SEQ ID NO: 371325 - DNA, 12 bp, Artificial Sequence
  Oligonucleotide primer for the detection of SNP TSC0058716
attctatcccct

SEQ ID NO: 371326 - DNA, 12 bp, Artificial Sequence
  Oligonucleotide primer for the detection of SNP TSC0058716
ttattaattttg

SEQ ID NO: 371327 - DNA, 12 bp, Artificial Sequence
  Oligonucleotide primer for the detection of SNP TSC0058717
aattctatcccc

SEQ ID NO: 371328 - DNA, 12 bp, Artificial Sequence
  Oligonucleotide primer for the detection of SNP TSC0001143
ccccaccctaaa

SEQ ID NO: 371329 - DNA, 12 bp, Artificial Sequence
  Oligonucleotide primer for the detection of SNP TSC0001143
aagattaatagt

SEQ ID NO: 371330 - DNA, 12 bp, Artificial Sequence
  Oligonucleotide primer for the detection of SNP TSC0001144
actataaacact

SEQ ID NO: 371331 - DNA, 12 bp, Artificial Sequence
  Oligonucleotide primer for the detection of SNP TSC0001144
aagtttgtttga

SEQ ID NO: 371332 - DNA, 12 bp, Artificial Sequence
  Oligonucleotide primer for the detection of SNP TSC0000277
cactattattca

SEQ ID NO: 371333 - DNA, 12 bp, Artificial Sequence
  Oligonucleotide primer for the detection of SNP TSC0000277
tatttagattaa

SEQ ID NO: 371334 - DNA, 12 bp, Artificial Sequence
  Oligonucleotide primer for the detection of SNP TSC0000277
actcaaaccaaa

SEQ ID NO: 371335 - DNA, 12 bp, Artificial Sequence
  Oligonucleotide primer for the detection of SNP TSC0058718
cattttttccct

SEQ ID NO: 371336 - DNA, 12 bp, Artificial Sequence
  Oligonucleotide primer for the detection of SNP TSC0058718
tatttgtttaaa

SEQ ID NO: 371337 - DNA, 12 bp, Artificial Sequence
  Oligonucleotide primer for the detection of SNP TSC0058718
catttactcaaa

SEQ ID NO: 371338 - DNA, 12 bp, Artificial Sequence
  Oligonucleotide primer for the detection of SNP TSC0058721
tccttttcctaa

SEQ ID NO: 371339 - DNA, 12 bp, Artificial Sequence
  Oligonucleotide primer for the detection of SNP TSC0058721
tggattggattt

SEQ ID NO: 371340 - DNA, 12 bp, Artificial Sequence
  Oligonucleotide primer for the detection of SNP TSC0058721
cggattggattt

SEQ ID NO: 371341 - DNA, 12 bp, Artificial Sequence
  Oligonucleotide primer for the detection of SNP TSC0058721
cgaactaaatcc

SEQ ID NO: 371342 - DNA, 12 bp, Artificial Sequence
  Oligonucleotide primer for the detection of SNP TSC0058722
tataaaatttat

SEQ ID NO: 371343 - DNA, 12 bp, Artificial Sequence
  Oligonucleotide primer for the detection of SNP TSC0058722
aaaaaaattgta

SEQ ID NO: 371344 - DNA, 12 bp, Artificial Sequence
  Oligonucleotide primer for the detection of SNP TSC0058722
aaaaaaatcgta

SEQ ID NO: 371345 - DNA, 12 bp, Artificial Sequence
  Oligonucleotide primer for the detection of SNP TSC0058723
cctcatttcaaa

SEQ ID NO: 371346 - DNA, 12 bp, Artificial Sequence
  Oligonucleotide primer for the detection of SNP TSC0058723
ttataggataaa

SEQ ID NO: 371347 - DNA, 12 bp, Artificial Sequence
  Oligonucleotide primer for the detection of SNP TSC0058723
tcacaaaacaaa

SEQ ID NO: 371348 - DNA, 12 bp, Artificial Sequence
  Oligonucleotide primer for the detection of SNP TSC0058724
aaaactattcat

SEQ ID NO: 371349 - DNA, 12 bp, Artificial Sequence
  Oligonucleotide primer for the detection of SNP TSC0058726
tacaaaacgcaa

SEQ ID NO: 371350 - DNA, 12 bp, Artificial Sequence
  Oligonucleotide primer for the detection of SNP TSC0058726
tatgtagttttt

SEQ ID NO: 371351 - DNA, 12 bp, Artificial Sequence
  Oligonucleotide primer for the detection of SNP TSC0058726
catacaatctct

SEQ ID NO: 371352 - DNA, 12 bp, Artificial Sequence
  Oligonucleotide primer for the detection of SNP TSC0058726
tgtagggtgtag

SEQ ID NO: 371353 - DNA, 12 bp, Artificial Sequence
  Oligonucleotide primer for the detection of SNP TSC0058726
tgtagggcgtag

SEQ ID NO: 371354 - DNA, 12 bp, Artificial Sequence
  Oligonucleotide primer for the detection of SNP TSC0058727
caacacccaata

SEQ ID NO: 371355 - DNA, 12 bp, Artificial Sequence
  Oligonucleotide primer for the detection of SNP TSC0058727
gatgttgtgttt

SEQ ID NO: 371356 - DNA, 12 bp, Artificial Sequence
  Oligonucleotide primer for the detection of SNP TSC0058727
gatgttgcgttt

SEQ ID NO: 371357 - DNA, 12 bp, Artificial Sequence
  Oligonucleotide primer for the detection of SNP TSC0058727
ctaaatactacg

SEQ ID NO: 371358 - DNA, 12 bp, Artificial Sequence
  Oligonucleotide primer for the detection of SNP TSC0058727
agtatttagtgt

SEQ ID NO: 371359 - DNA, 12 bp, Artificial Sequence
  Oligonucleotide primer for the detection of SNP TSC0058728
aacaaacttatt

SEQ ID NO: 371360 - DNA, 12 bp, Artificial Sequence
  Oligonucleotide primer for the detection of SNP TSC0058729
agataaaagtgg

SEQ ID NO: 371361 - DNA, 12 bp, Artificial Sequence
  Oligonucleotide primer for the detection of SNP TSC0058729
ttatggaagagt

SEQ ID NO: 371362 - DNA, 12 bp, Artificial Sequence
  Oligonukleotid-Primer
tatcctatctta

SEQ ID NO: 371363 - DNA, 12 bp, Artificial Sequence
  Oligonucleotide primer for the detection of SNP TSC0058730
aagaatttgttg

SEQ ID NO: 371364 - DNA, 12 bp, Artificial Sequence
  Oligonucleotide primer for the detection of SNP TSC0058734
aaatctatataa

SEQ ID NO: 371365 - DNA, 12 bp, Artificial Sequence
  Oligonucleotide primer for the detection of SNP TSC0058734
ttattgaatttt

SEQ ID NO: 371366 - DNA, 12 bp, Artificial Sequence
  Oligonucleotide primer for the detection of SNP TSC0058734
ccattaaatctt

SEQ ID NO: 371367 - DNA, 12 bp, Artificial Sequence
  Oligonucleotide primer for the detection of SNP TSC0058735
tccccaaaacaa

SEQ ID NO: 371368 - DNA, 12 bp, Artificial Sequence
  Oligonucleotide primer for the detection of SNP TSC0058735
tccccgaaacaa

SEQ ID NO: 371369 - DNA, 12 bp, Artificial Sequence
  Oligonucleotide primer for the detection of SNP TSC0058735
gttatatagatt

SEQ ID NO: 371370 - DNA, 12 bp, Artificial Sequence
  Oligonucleotide primer for the detection of SNP TSC0058735
actacataaatt

SEQ ID NO: 371371 - DNA, 12 bp, Artificial Sequence
  Oligonucleotide primer for the detection of SNP TSC0058735
gctacataaatt

SEQ ID NO: 371372 - DNA, 12 bp, Artificial Sequence
  Oligonucleotide primer for the detection of SNP TSC0058735
ttttcgaaataa

SEQ ID NO: 371373 - DNA, 12 bp, Artificial Sequence
  Oligonucleotide primer for the detection of SNP TSC0058736
ttacccctttac

SEQ ID NO: 371374 - DNA, 12 bp, Artificial Sequence
  Oligonucleotide primer for the detection of SNP TSC0058738
tccccattctca

SEQ ID NO: 371375 - DNA, 12 bp, Artificial Sequence
  Oligonucleotide primer for the detection of SNP TSC0058738
ataaggttataa

SEQ ID NO: 371376 - DNA, 12 bp, Artificial Sequence
  Oligonucleotide primer for the detection of SNP TSC0058739
cctaataaataa

SEQ ID NO: 371377 - DNA, 12 bp, Artificial Sequence
  Oligonucleotide primer for the detection of SNP TSC0058739
tttagtagatag

SEQ ID NO: 371378 - DNA, 12 bp, Artificial Sequence
  Oligonucleotide primer for the detection of SNP TSC0058740
tctaatttacct

SEQ ID NO: 371379 - DNA, 12 bp, Artificial Sequence
  Oligonucleotide primer for the detection of SNP TSC0058740
atataaagtaga

SEQ ID NO: 371380 - DNA, 12 bp, Artificial Sequence
  Oligonucleotide primer for the detection of SNP TSC0058741
ggagtgaggatg

SEQ ID NO: 371381 - DNA, 12 bp, Artificial Sequence
  Oligonucleotide primer for the detection of SNP TSC0058743
gaaggttaagta

SEQ ID NO: 371382 - DNA, 12 bp, Artificial Sequence
  Oligonucleotide primer for the detection of SNP TSC0058744
ggtatttatatt

SEQ ID NO: 371383 - DNA, 12 bp, Artificial Sequence
  Oligonucleotide primer for the detection of SNP TSC0058744
aaacatttatat

SEQ ID NO: 371384 - DNA, 12 bp, Artificial Sequence
  Oligonucleotide primer for the detection of SNP TSC0058744
tgtgaagagatt

SEQ ID NO: 371385 - DNA, 12 bp, Artificial Sequence
  Oligonucleotide primer for the detection of SNP TSC0058745
aactctacccca

SEQ ID NO: 371386 - DNA, 12 bp, Artificial Sequence
  Oligonucleotide primer for the detection of SNP TSC0058745
aggtttttttat

SEQ ID NO: 371387 - DNA, 12 bp, Artificial Sequence
  Oligonucleotide primer for the detection of SNP TSC0058745
aaatctcttcac

SEQ ID NO: 371388 - DNA, 12 bp, Artificial Sequence
  Oligonucleotide primer for the detection of SNP TSC0058746
ttctaaaataca

SEQ ID NO: 371389 - DNA, 12 bp, Artificial Sequence
  Oligonucleotide primer for the detection of SNP TSC0058746
cttcactacaaa

SEQ ID NO: 371390 - DNA, 12 bp, Artificial Sequence
  Oligonucleotide primer for the detection of SNP TSC0058747
tcataattcctt

SEQ ID NO: 371391 - DNA, 12 bp, Artificial Sequence
  Oligonucleotide primer for the detection of SNP TSC0058747
tatgggaaaatg

SEQ ID NO: 371392 - DNA, 12 bp, Artificial Sequence
  Oligonucleotide primer for the detection of SNP TSC0058749
tacaacctctac

SEQ ID NO: 371393 - DNA, 12 bp, Artificial Sequence
  Oligonucleotide primer for the detection of SNP TSC0058751
gtttttgatgtt

SEQ ID NO: 371394 - DNA, 12 bp, Artificial Sequence
  Oligonukleotid-Primer
aaaacattaaca

SEQ ID NO: 371395 - DNA, 12 bp, Artificial Sequence
  Oligonucleotide primer for the detection of SNP TSC0058752
gaatggtaaagt

SEQ ID NO: 371396 - DNA, 12 bp, Artificial Sequence
  Oligonucleotide primer for the detection of SNP TSC0058752
taaaatattggt

SEQ ID NO: 371397 - DNA, 12 bp, Artificial Sequence
  Oligonucleotide primer for the detection of SNP TSC0058753
aaatatgttatt

SEQ ID NO: 371398 - DNA, 12 bp, Artificial Sequence
  Oligonucleotide primer for the detection of SNP TSC0058753
tatattattaaa

SEQ ID NO: 371399 - DNA, 12 bp, Artificial Sequence
  Oligonucleotide primer for the detection of SNP TSC0058753
agttgaaattaa

SEQ ID NO: 371400 - DNA, 12 bp, Artificial Sequence
  Oligonucleotide primer for the detection of SNP TSC0058755
attatgtatgtg

SEQ ID NO: 371401 - DNA, 12 bp, Artificial Sequence
  Oligonucleotide primer for the detection of SNP TSC0058755
attacgtatgtg

SEQ ID NO: 371402 - DNA, 12 bp, Artificial Sequence
  Oligonucleotide primer for the detection of SNP TSC0058755
attacatatata

SEQ ID NO: 371403 - DNA, 12 bp, Artificial Sequence
  Oligonucleotide primer for the detection of SNP TSC0058755
attacgtatata

SEQ ID NO: 371404 - DNA, 12 bp, Artificial Sequence
  Oligonucleotide primer for the detection of SNP TSC0058755
agtaaaatgtaa

SEQ ID NO: 371405 - DNA, 12 bp, Artificial Sequence
  Oligonucleotide primer for the detection of SNP TSC0058756
catctacttacc

SEQ ID NO: 371406 - DNA, 12 bp, Artificial Sequence
  Oligonucleotide primer for the detection of SNP TSC0058756
tttgttggtggt

SEQ ID NO: 371407 - DNA, 12 bp, Artificial Sequence
  Oligonucleotide primer for the detection of SNP TSC0058756
tttgtcggtggt

SEQ ID NO: 371408 - DNA, 12 bp, Artificial Sequence
  Oligonucleotide primer for the detection of SNP TSC0058756
tatcaataataa

SEQ ID NO: 371409 - DNA, 12 bp, Artificial Sequence
  Oligonucleotide primer for the detection of SNP TSC0058756
tatcgataataa

SEQ ID NO: 371410 - DNA, 12 bp, Artificial Sequence
  Oligonucleotide primer for the detection of SNP TSC0058757
ttataccacaaa

SEQ ID NO: 371411 - DNA, 12 bp, Artificial Sequence
  Oligonucleotide primer for the detection of SNP TSC0058757
aaaacttaacat

SEQ ID NO: 371412 - DNA, 12 bp, Artificial Sequence
  Oligonucleotide primer for the detection of SNP TSC0058757
tttgtgttataa

SEQ ID NO: 371413 - DNA, 12 bp, Artificial Sequence
  Oligonucleotide primer for the detection of SNP TSC0058758
ataaatattaaa

SEQ ID NO: 371414 - DNA, 12 bp, Artificial Sequence
  Oligonucleotide primer for the detection of SNP TSC0058758
acaaacattaaa

SEQ ID NO: 371415 - DNA, 12 bp, Artificial Sequence
  Oligonucleotide primer for the detection of SNP TSC0058758
ttataaaaattt

SEQ ID NO: 371416 - DNA, 12 bp, Artificial Sequence
  Oligonucleotide primer for the detection of SNP TSC0058759
aaacaacacaat

SEQ ID NO: 371417 - DNA, 12 bp, Artificial Sequence
  Oligonucleotide primer for the detection of SNP TSC0058759
tgtagagatagg

SEQ ID NO: 371418 - DNA, 12 bp, Artificial Sequence
  Oligonucleotide primer for the detection of SNP TSC0058760
taaaccaatttc

SEQ ID NO: 371419 - DNA, 12 bp, Artificial Sequence
  Oligonucleotide primer for the detection of SNP TSC0058760
taaaccgatttc

SEQ ID NO: 371420 - DNA, 12 bp, Artificial Sequence
  Oligonucleotide primer for the detection of SNP TSC0058760
tttggaggtatt

SEQ ID NO: 371421 - DNA, 12 bp, Artificial Sequence
  Oligonucleotide primer for the detection of SNP TSC0058760
tttggaggtatc

SEQ ID NO: 371422 - DNA, 12 bp, Artificial Sequence
  Oligonucleotide primer for the detection of SNP TSC0058760
cctaaaaacatc

SEQ ID NO: 371423 - DNA, 12 bp, Artificial Sequence
  Oligonucleotide primer for the detection of SNP TSC0058760
tgaattgatttt

SEQ ID NO: 371424 - DNA, 12 bp, Artificial Sequence
  Oligonucleotide primer for the detection of SNP TSC0058760
tgaatcgatttt

SEQ ID NO: 371425 - DNA, 12 bp, Artificial Sequence
  Oligonucleotide primer for the detection of SNP TSC0058760
tgaattgatttc

SEQ ID NO: 371426 - DNA, 12 bp, Artificial Sequence
  Oligonucleotide primer for the detection of SNP TSC0058760
tgaatcgatttc

SEQ ID NO: 371427 - DNA, 12 bp, Artificial Sequence
  Oligonucleotide primer for the detection of SNP TSC0058761
tacctcacttaa

SEQ ID NO: 371428 - DNA, 12 bp, Artificial Sequence
  Oligonucleotide primer for the detection of SNP TSC0058761
tacctcgcttaa

SEQ ID NO: 371429 - DNA, 12 bp, Artificial Sequence
  Oligonucleotide primer for the detection of SNP TSC0058761
gatgttggaagg

SEQ ID NO: 371430 - DNA, 12 bp, Artificial Sequence
  Oligonucleotide primer for the detection of SNP TSC0058761
gatgtcggaagg

SEQ ID NO: 371431 - DNA, 12 bp, Artificial Sequence
  Oligonucleotide primer for the detection of SNP TSC0058761
aataccgaaaaa

SEQ ID NO: 371432 - DNA, 12 bp, Artificial Sequence
  Oligonucleotide primer for the detection of SNP TSC0058761
tgtttcgtttgg

SEQ ID NO: 371433 - DNA, 12 bp, Artificial Sequence
  Oligonucleotide primer for the detection of SNP TSC0058762
tttcctttaatt

SEQ ID NO: 371434 - DNA, 12 bp, Artificial Sequence
  Oligonucleotide primer for the detection of SNP TSC0058762
taaaattttaga

SEQ ID NO: 371435 - DNA, 12 bp, Artificial Sequence
  Oligonucleotide primer for the detection of SNP TSC0058763
ttataatgttaa

SEQ ID NO: 371436 - DNA, 12 bp, Artificial Sequence
  Oligonucleotide primer for the detection of SNP TSC0058764
atataaatgatg

SEQ ID NO: 371437 - DNA, 12 bp, Artificial Sequence
  Oligonucleotide primer for the detection of SNP TSC0058767
tatcatcttacc

SEQ ID NO: 371438 - DNA, 12 bp, Artificial Sequence
  Oligonucleotide primer for the detection of SNP TSC0058768
accatatacaac

SEQ ID NO: 371439 - DNA, 12 bp, Artificial Sequence
  Oligonucleotide primer for the detection of SNP TSC0058768
tgaagatattta

SEQ ID NO: 371440 - DNA, 12 bp, Artificial Sequence
  Oligonucleotide primer for the detection of SNP TSC0058772
ctccacaccaat

SEQ ID NO: 371441 - DNA, 12 bp, Artificial Sequence
  Oligonucleotide primer for the detection of SNP TSC0058773
ttcatactattc

SEQ ID NO: 371442 - DNA, 12 bp, Artificial Sequence
  Oligonucleotide primer for the detection of SNP TSC0058775
tataaacataaa

SEQ ID NO: 371443 - DNA, 12 bp, Artificial Sequence
  Oligonucleotide primer for the detection of SNP TSC0058775
tctctatctcat

SEQ ID NO: 371444 - DNA, 12 bp, Artificial Sequence
  Oligonucleotide primer for the detection of SNP TSC0058775
tgtggatataaa

SEQ ID NO: 371445 - DNA, 12 bp, Artificial Sequence
  Oligonucleotide primer for the detection of SNP TSC0058776
aaataaatattc

SEQ ID NO: 371446 - DNA, 12 bp, Artificial Sequence
  Oligonucleotide primer for the detection of SNP TSC0058776
ttggttaggaaa

SEQ ID NO: 371447 - DNA, 12 bp, Artificial Sequence
  Oligonucleotide primer for the detection of SNP TSC0058780
catatcccaaca

SEQ ID NO: 371448 - DNA, 12 bp, Artificial Sequence
  Oligonucleotide primer for the detection of SNP TSC0058780
catatcccaacg

SEQ ID NO: 371449 - DNA, 12 bp, Artificial Sequence
  Oligonucleotide primer for the detection of SNP TSC0058780
atttataagatt

SEQ ID NO: 371450 - DNA, 12 bp, Artificial Sequence
  Oligonucleotide primer for the detection of SNP TSC0058780
atccataaaacc

SEQ ID NO: 371451 - DNA, 12 bp, Artificial Sequence
  Oligonucleotide primer for the detection of SNP TSC0058780
tatattttagtg

SEQ ID NO: 371452 - DNA, 12 bp, Artificial Sequence
  Oligonucleotide primer for the detection of SNP TSC0058780
tatattttagcg

SEQ ID NO: 371453 - DNA, 12 bp, Artificial Sequence
  Oligonucleotide primer for the detection of SNP TSC0058781
tcttaccctact

SEQ ID NO: 371454 - DNA, 12 bp, Artificial Sequence
  Oligonucleotide primer for the detection of SNP TSC0058781
gttgggatatgg

SEQ ID NO: 371455 - DNA, 12 bp, Artificial Sequence
  Oligonucleotide primer for the detection of SNP TSC0058782
ccatatcccaac

SEQ ID NO: 371456 - DNA, 12 bp, Artificial Sequence
  Oligonucleotide primer for the detection of SNP TSC0058782
ataagattatgg

SEQ ID NO: 371457 - DNA, 12 bp, Artificial Sequence
  Oligonucleotide primer for the detection of SNP TSC0058782
ttatattttagc

SEQ ID NO: 371458 - DNA, 12 bp, Artificial Sequence
  Oligonucleotide primer for the detection of SNP TSC0058784
atctattccatt

SEQ ID NO: 371459 - DNA, 12 bp, Artificial Sequence
  Oligonucleotide primer for the detection of SNP TSC0058784
atagataaatgg

SEQ ID NO: 371460 - DNA, 12 bp, Artificial Sequence
  Oligonucleotide primer for the detection of SNP TSC0058786
attcacatcaat

SEQ ID NO: 371461 - DNA, 12 bp, Artificial Sequence
  Oligonucleotide primer for the detection of SNP TSC0058787
taacatcacact

SEQ ID NO: 371462 - DNA, 12 bp, Artificial Sequence
  Oligonucleotide primer for the detection of SNP TSC0058787
ataagattaata

SEQ ID NO: 371463 - DNA, 12 bp, Artificial Sequence
  Oligonucleotide primer for the detection of SNP TSC0058790
cactactccact

SEQ ID NO: 371464 - DNA, 12 bp, Artificial Sequence
  Oligonucleotide primer for the detection of SNP TSC0058790
tgttatttaggg

SEQ ID NO: 371465 - DNA, 12 bp, Artificial Sequence
  Oligonucleotide primer for the detection of SNP TSC0058791
ccactacaccct

SEQ ID NO: 371466 - DNA, 12 bp, Artificial Sequence
  Oligonucleotide primer for the detection of SNP TSC0058792
tggttaggtgtg

SEQ ID NO: 371467 - DNA, 12 bp, Artificial Sequence
  Oligonucleotide primer for the detection of SNP TSC0058792
taaccaaatata

SEQ ID NO: 371468 - DNA, 12 bp, Artificial Sequence
  Oligonucleotide primer for the detection of SNP TSC0058792
taggtatgagtt

SEQ ID NO: 371469 - DNA, 12 bp, Artificial Sequence
  Oligonucleotide primer for the detection of SNP TSC0058794
acaaaataacca

SEQ ID NO: 371470 - DNA, 12 bp, Artificial Sequence
  Oligonucleotide primer for the detection of SNP TSC0058794
gagtttttggat

SEQ ID NO: 371471 - DNA, 12 bp, Artificial Sequence
  Oligonucleotide primer for the detection of SNP TSC0058794
aaacctctaaat

SEQ ID NO: 371472 - DNA, 12 bp, Artificial Sequence
  Oligonucleotide primer for the detection of SNP TSC0058794
gtagaatggtta

SEQ ID NO: 371473 - DNA, 12 bp, Artificial Sequence
  Oligonucleotide primer for the detection of SNP TSC0058796
tagaattaatgg

SEQ ID NO: 371474 - DNA, 12 bp, Artificial Sequence
  Oligonucleotide primer for the detection of SNP TSC0058799
aattccttaatt

SEQ ID NO: 371475 - DNA, 12 bp, Artificial Sequence
  Oligonucleotide primer for the detection of SNP TSC0058799
gggtggagattg

SEQ ID NO: 371476 - DNA, 12 bp, Artificial Sequence
  Oligonucleotide primer for the detection of SNP TSC0058799
gggtggagatcg

SEQ ID NO: 371477 - DNA, 12 bp, Artificial Sequence
  Oligonucleotide primer for the detection of SNP TSC0058799
aaataaaaaccg

SEQ ID NO: 371478 - DNA, 12 bp, Artificial Sequence
  Oligonucleotide primer for the detection of SNP TSC0058799
agttttttgatt

SEQ ID NO: 371479 - DNA, 12 bp, Artificial Sequence
  Oligonucleotide primer for the detection of SNP TSC0058801
tcaataaaaaat

SEQ ID NO: 371480 - DNA, 12 bp, Artificial Sequence
  Oligonucleotide primer for the detection of SNP TSC0058802
atttctctttct

SEQ ID NO: 371481 - DNA, 12 bp, Artificial Sequence
  Oligonucleotide primer for the detection of SNP TSC0058803
ctaacatcaaac

SEQ ID NO: 371482 - DNA, 12 bp, Artificial Sequence
  Oligonucleotide primer for the detection of SNP TSC0058804
ttcatacttttt

SEQ ID NO: 371483 - DNA, 12 bp, Artificial Sequence
  Oligonucleotide primer for the detection of SNP TSC0058804
aagttaggaaat

SEQ ID NO: 371484 - DNA, 12 bp, Artificial Sequence
  Oligonucleotide primer for the detection of SNP TSC0058805
aacaaatctctt

SEQ ID NO: 371485 - DNA, 12 bp, Artificial Sequence
  Oligonucleotide primer for the detection of SNP TSC0058805
aatattttaaga

SEQ ID NO: 371486 - DNA, 12 bp, Artificial Sequence
  Oligonucleotide primer for the detection of SNP TSC0058807
aactaattaatt

SEQ ID NO: 371487 - DNA, 12 bp, Artificial Sequence
  Oligonucleotide primer for the detection of SNP TSC0058807
taaagtatgtta

SEQ ID NO: 371488 - DNA, 12 bp, Artificial Sequence
  Oligonucleotide primer for the detection of SNP TSC0058808
atctattaatac

SEQ ID NO: 371489 - DNA, 12 bp, Artificial Sequence
  Oligonucleotide primer for the detection of SNP TSC0058808
tatgtttaggta

SEQ ID NO: 371490 - DNA, 12 bp, Artificial Sequence
  Oligonucleotide primer for the detection of SNP TSC0058808
tacgtttaggta

SEQ ID NO: 371491 - DNA, 12 bp, Artificial Sequence
  Oligonucleotide primer for the detection of SNP TSC0058813
aaaatagtttgt

SEQ ID NO: 371492 - DNA, 12 bp, Artificial Sequence
  Oligonucleotide primer for the detection of SNP TSC0058813
taaaacaaccta

SEQ ID NO: 371493 - DNA, 12 bp, Artificial Sequence
  Oligonucleotide primer for the detection of SNP TSC0058814
ccaaaaataaat

SEQ ID NO: 371494 - DNA, 12 bp, Artificial Sequence
  Oligonucleotide primer for the detection of SNP TSC0058814
gttaagaattaa

SEQ ID NO: 371495 - DNA, 12 bp, Artificial Sequence
  Oligonucleotide primer for the detection of SNP TSC0058815
aatataatactc

SEQ ID NO: 371496 - DNA, 12 bp, Artificial Sequence
  Oligonucleotide primer for the detection of SNP TSC0058816
ttttttagtaat

SEQ ID NO: 371497 - DNA, 12 bp, Artificial Sequence
  Oligonucleotide primer for the detection of SNP TSC0058817
taaacccttttt

SEQ ID NO: 371498 - DNA, 12 bp, Artificial Sequence
  Oligonucleotide primer for the detection of SNP TSC0058818
accaaaacaatt

SEQ ID NO: 371499 - DNA, 12 bp, Artificial Sequence
  Oligonucleotide primer for the detection of SNP TSC0058819
ttaaattttgta

SEQ ID NO: 371500 - DNA, 12 bp, Artificial Sequence
  Oligonucleotide primer for the detection of SNP TSC0058820
attccataacat

SEQ ID NO: 371501 - DNA, 12 bp, Artificial Sequence
  Oligonucleotide primer for the detection of SNP TSC0058820
tttaattattaa

SEQ ID NO: 371502 - DNA, 12 bp, Artificial Sequence
  Oligonucleotide primer for the detection of SNP TSC0058821
atgagaaattta

SEQ ID NO: 371503 - DNA, 12 bp, Artificial Sequence
  Oligonucleotide primer for the detection of SNP TSC0058822
caaatttcccca

SEQ ID NO: 371504 - DNA, 12 bp, Artificial Sequence
  Oligonucleotide primer for the detection of SNP TSC0058822
tacatttttata

SEQ ID NO: 371505 - DNA, 12 bp, Artificial Sequence
  Oligonucleotide primer for the detection of SNP TSC0058823
ttataactctca

SEQ ID NO: 371506 - DNA, 12 bp, Artificial Sequence
  Oligonucleotide primer for the detection of SNP TSC0058823
ttattttatggt

SEQ ID NO: 371507 - DNA, 12 bp, Artificial Sequence
  Oligonucleotide primer for the detection of SNP TSC0058823
ttattttacggt

SEQ ID NO: 371508 - DNA, 12 bp, Artificial Sequence
  Oligonucleotide primer for the detection of SNP TSC0058823
ttacttcacaat

SEQ ID NO: 371509 - DNA, 12 bp, Artificial Sequence
  Oligonucleotide primer for the detection of SNP TSC0058823
ttacttcacgat

SEQ ID NO: 371510 - DNA, 12 bp, Artificial Sequence
  Oligonucleotide primer for the detection of SNP TSC0058824
aaaaacatctat

SEQ ID NO: 371511 - DNA, 12 bp, Artificial Sequence
  Oligonucleotide primer for the detection of SNP TSC0058824
atatttttgttg

SEQ ID NO: 371512 - DNA, 12 bp, Artificial Sequence
  Oligonucleotide primer for the detection of SNP TSC0004685
tatacaaaaaaa

SEQ ID NO: 371513 - DNA, 12 bp, Artificial Sequence
  Oligonucleotide primer for the detection of SNP TSC0004685
cccttaaactcc

SEQ ID NO: 371514 - DNA, 12 bp, Artificial Sequence
  Oligonucleotide primer for the detection of SNP TSC0004685
tatataaaggag

SEQ ID NO: 371515 - DNA, 12 bp, Artificial Sequence
  Oligonucleotide primer for the detection of SNP TSC0058830
tataatatccct

SEQ ID NO: 371516 - DNA, 12 bp, Artificial Sequence
  Oligonucleotide primer for the detection of SNP TSC0058831
taaattatctaa

SEQ ID NO: 371517 - DNA, 12 bp, Artificial Sequence
  Oligonucleotide primer for the detection of SNP TSC0058831
gttgtttaagtg

SEQ ID NO: 371518 - DNA, 12 bp, Artificial Sequence
  Oligonucleotide primer for the detection of SNP TSC0058831
ttatccaaataa

SEQ ID NO: 371519 - DNA, 12 bp, Artificial Sequence
  Oligonucleotide primer for the detection of SNP TSC0058831
attgtttagttt

SEQ ID NO: 371520 - DNA, 12 bp, Artificial Sequence
  Oligonucleotide primer for the detection of SNP TSC0005982
aactcccataaa

SEQ ID NO: 371521 - DNA, 12 bp, Artificial Sequence
  Oligonucleotide primer for the detection of SNP TSC0005982
tagtaagttttt

SEQ ID NO: 371522 - DNA, 12 bp, Artificial Sequence
  Oligonucleotide primer for the detection of SNP TSC0005982
aataaatcccca

SEQ ID NO: 371523 - DNA, 12 bp, Artificial Sequence
  Oligonucleotide primer for the detection of SNP TSC0005982
agtttttataaa

SEQ ID NO: 371524 - DNA, 12 bp, Artificial Sequence
  Oligonucleotide primer for the detection of SNP TSC0005983
atatataatttc

SEQ ID NO: 371525 - DNA, 12 bp, Artificial Sequence
  Oligonucleotide primer for the detection of SNP TSC0005983
ttttaggtagtg

SEQ ID NO: 371526 - DNA, 12 bp, Artificial Sequence
  Oligonucleotide primer for the detection of SNP TSC0058835
tattaaatctaa

SEQ ID NO: 371527 - DNA, 12 bp, Artificial Sequence
  Oligonucleotide primer for the detection of SNP TSC0058835
tatttaagtaat

SEQ ID NO: 371528 - DNA, 12 bp, Artificial Sequence
  Oligonucleotide primer for the detection of SNP TSC0058838
acaaataactta

SEQ ID NO: 371529 - DNA, 12 bp, Artificial Sequence
  Oligonucleotide primer for the detection of SNP TSC0058838
ataagtggttta

SEQ ID NO: 371530 - DNA, 12 bp, Artificial Sequence
  Oligonucleotide primer for the detection of SNP TSC0058839
tgatgggaggga

SEQ ID NO: 371531 - DNA, 12 bp, Artificial Sequence
  Oligonucleotide primer for the detection of SNP TSC0058839
taaaggggttta

SEQ ID NO: 371532 - DNA, 12 bp, Artificial Sequence
  Oligonucleotide primer for the detection of SNP TSC0058841
tcctaaaaacta

SEQ ID NO: 371533 - DNA, 12 bp, Artificial Sequence
  Oligonucleotide primer for the detection of SNP TSC0058841
taaaataaaact

SEQ ID NO: 371534 - DNA, 12 bp, Artificial Sequence
  Oligonucleotide primer for the detection of SNP TSC0058841
ttttgaaggtta

SEQ ID NO: 371535 - DNA, 12 bp, Artificial Sequence
  Oligonucleotide primer for the detection of SNP TSC0058842
ttaatcaaatat

SEQ ID NO: 371536 - DNA, 12 bp, Artificial Sequence
  Oligonucleotide primer for the detection of SNP TSC0058842
tttgatagaaga

SEQ ID NO: 371537 - DNA, 12 bp, Artificial Sequence
  Oligonucleotide primer for the detection of SNP TSC0058843
aaccataacctt

SEQ ID NO: 371538 - DNA, 12 bp, Artificial Sequence
  Oligonucleotide primer for the detection of SNP TSC0058843
attaggtattat

SEQ ID NO: 371539 - DNA, 12 bp, Artificial Sequence
  Oligonucleotide primer for the detection of SNP TSC0058844
aatctccctaca

SEQ ID NO: 371540 - DNA, 12 bp, Artificial Sequence
  Oligonucleotide primer for the detection of SNP TSC0058844
agtttttttata

SEQ ID NO: 371541 - DNA, 12 bp, Artificial Sequence
  Oligonucleotide primer for the detection of SNP TSC0058845
aaaggagattaa

SEQ ID NO: 371542 - DNA, 12 bp, Artificial Sequence
  Oligonucleotide primer for the detection of SNP TSC0058846
taaaagaaaatg

SEQ ID NO: 371543 - DNA, 12 bp, Artificial Sequence
  Oligonucleotide primer for the detection of SNP TSC0058846
gtggtattgaag

SEQ ID NO: 371544 - DNA, 12 bp, Artificial Sequence
  Oligonucleotide primer for the detection of SNP TSC0058850
aaatataattaa

SEQ ID NO: 371545 - DNA, 12 bp, Artificial Sequence
  Oligonucleotide primer for the detection of SNP TSC0058850
gataaaatagat

SEQ ID NO: 371546 - DNA, 12 bp, Artificial Sequence
  Oligonucleotide primer for the detection of SNP TSC0058850
atatggttggtt

SEQ ID NO: 371547 - DNA, 12 bp, Artificial Sequence
  Oligonucleotide primer for the detection of SNP TSC0058851
tctattaataaa

SEQ ID NO: 371548 - DNA, 12 bp, Artificial Sequence
  Oligonucleotide primer for the detection of SNP TSC0058851
atcattttatta

SEQ ID NO: 371549 - DNA, 12 bp, Artificial Sequence
  Oligonucleotide primer for the detection of SNP TSC0058851
tttattagtaga

SEQ ID NO: 371550 - DNA, 12 bp, Artificial Sequence
  Oligonucleotide primer for the detection of SNP TSC0058852
tcttaatacatt

SEQ ID NO: 371551 - DNA, 12 bp, Artificial Sequence
  Oligonucleotide primer for the detection of SNP TSC0058852
taataaagggat

SEQ ID NO: 371552 - DNA, 12 bp, Artificial Sequence
  Oligonucleotide primer for the detection of SNP TSC0058852
ttttgatatatt

SEQ ID NO: 371553 - DNA, 12 bp, Artificial Sequence
  Oligonucleotide primer for the detection of SNP TSC0058854
ataataactcac

SEQ ID NO: 371554 - DNA, 12 bp, Artificial Sequence
  Oligonucleotide primer for the detection of SNP TSC0058855
ctcaaaatacta

SEQ ID NO: 371555 - DNA, 12 bp, Artificial Sequence
  Oligonucleotide primer for the detection of SNP TSC0058856
atttggaagaaa

SEQ ID NO: 371556 - DNA, 12 bp, Artificial Sequence
  Oligonucleotide primer for the detection of SNP TSC0058856
ataattttattc

SEQ ID NO: 371557 - DNA, 12 bp, Artificial Sequence
  Oligonucleotide primer for the detection of SNP TSC0058858
tagggaggggtt

SEQ ID NO: 371558 - DNA, 12 bp, Artificial Sequence
  Oligonucleotide primer for the detection of SNP TSC0058858
ttaaagagaaaa

SEQ ID NO: 371559 - DNA, 12 bp, Artificial Sequence
  Oligonucleotide primer for the detection of SNP TSC0058859
aatctcaataat

SEQ ID NO: 371560 - DNA, 12 bp, Artificial Sequence
  Oligonucleotide primer for the detection of SNP TSC0058865
tcaatctaatta

SEQ ID NO: 371561 - DNA, 12 bp, Artificial Sequence
  Oligonucleotide primer for the detection of SNP TSC0058865
aaggttttttgt

SEQ ID NO: 371562 - DNA, 12 bp, Artificial Sequence
  Oligonucleotide primer for the detection of SNP TSC0058865
aactttctacaa

SEQ ID NO: 371563 - DNA, 12 bp, Artificial Sequence
  Oligonucleotide primer for the detection of SNP TSC0058865
ttagtttggttg

SEQ ID NO: 371564 - DNA, 12 bp, Artificial Sequence
  Oligonucleotide primer for the detection of SNP TSC0058866
ttaaatttgttt

SEQ ID NO: 371565 - DNA, 12 bp, Artificial Sequence
  Oligonucleotide primer for the detection of SNP TSC0058866
caaacctaccta

SEQ ID NO: 371566 - DNA, 12 bp, Artificial Sequence
  Oligonucleotide primer for the detection of SNP TSC0058866
taattgttttgg

SEQ ID NO: 371567 - DNA, 12 bp, Artificial Sequence
  Oligonucleotide primer for the detection of SNP TSC0058867
tttattttcaac

SEQ ID NO: 371568 - DNA, 12 bp, Artificial Sequence
  Oligonucleotide primer for the detection of SNP TSC0058867
aaatttgtgtat

SEQ ID NO: 371569 - DNA, 12 bp, Artificial Sequence
  Oligonucleotide primer for the detection of SNP TSC0058867
aacctatataca

SEQ ID NO: 371570 - DNA, 12 bp, Artificial Sequence
  Oligonucleotide primer for the detection of SNP TSC0058868
atagatgtagta

SEQ ID NO: 371571 - DNA, 12 bp, Artificial Sequence
  Oligonucleotide primer for the detection of SNP TSC0007688
tataatgaaatg

SEQ ID NO: 371572 - DNA, 12 bp, Artificial Sequence
  Oligonucleotide primer for the detection of SNP TSC0058871
actatctatatc

SEQ ID NO: 371573 - DNA, 12 bp, Artificial Sequence
  Oligonucleotide primer for the detection of SNP TSC0058871
aattgtagttta

SEQ ID NO: 371574 - DNA, 12 bp, Artificial Sequence
  Oligonucleotide primer for the detection of SNP TSC0058871
aactataaccta

SEQ ID NO: 371575 - DNA, 12 bp, Artificial Sequence
  Oligonucleotide primer for the detection of SNP TSC0058872
aaaactataacc

SEQ ID NO: 371576 - DNA, 12 bp, Artificial Sequence
  Oligonucleotide primer for the detection of SNP TSC0058873
acaacctatttt

SEQ ID NO: 371577 - DNA, 12 bp, Artificial Sequence
  Oligonucleotide primer for the detection of SNP TSC0058874
tatttttcactt

SEQ ID NO: 371578 - DNA, 12 bp, Artificial Sequence
  Oligonucleotide primer for the detection of SNP TSC0058874
gattattgtatt

SEQ ID NO: 371579 - DNA, 12 bp, Artificial Sequence
  Oligonucleotide primer for the detection of SNP TSC0058874
gattatcgtatt

SEQ ID NO: 371580 - DNA, 12 bp, Artificial Sequence
  Oligonucleotide primer for the detection of SNP TSC0058874
actaccatacta

SEQ ID NO: 371581 - DNA, 12 bp, Artificial Sequence
  Oligonucleotide primer for the detection of SNP TSC0058874
actaccgtacta

SEQ ID NO: 371582 - DNA, 12 bp, Artificial Sequence
  Oligonucleotide primer for the detection of SNP TSC0058877
ctttcccaacca

SEQ ID NO: 371583 - DNA, 12 bp, Artificial Sequence
  Oligonucleotide primer for the detection of SNP TSC0058877
gtttatagaggg

SEQ ID NO: 371584 - DNA, 12 bp, Artificial Sequence
  Oligonucleotide primer for the detection of SNP TSC0058877
acccataaaaaa

SEQ ID NO: 371585 - DNA, 12 bp, Artificial Sequence
  Oligonucleotide primer for the detection of SNP TSC0058878
tactataccaat

SEQ ID NO: 371586 - DNA, 12 bp, Artificial Sequence
  Oligonucleotide primer for the detection of SNP TSC0058878
ataccaatatta

SEQ ID NO: 371587 - DNA, 12 bp, Artificial Sequence
  Oligonucleotide primer for the detection of SNP TSC0058878
tgttatattagt

SEQ ID NO: 371588 - DNA, 12 bp, Artificial Sequence
  Oligonucleotide primer for the detection of SNP TSC0007968
tatttcaaataa

SEQ ID NO: 371589 - DNA, 12 bp, Artificial Sequence
  Oligonucleotide primer for the detection of SNP TSC0007968
ttgattgttagg

SEQ ID NO: 371590 - DNA, 12 bp, Artificial Sequence
  Oligonucleotide primer for the detection of SNP TSC0007968
ctaattatcaaa

SEQ ID NO: 371591 - DNA, 12 bp, Artificial Sequence
  Oligonucleotide primer for the detection of SNP TSC0058879
gttaaagttaat

SEQ ID NO: 371592 - DNA, 12 bp, Artificial Sequence
  Oligonucleotide primer for the detection of SNP TSC0058879
gttaaagttaac

SEQ ID NO: 371593 - DNA, 12 bp, Artificial Sequence
  Oligonucleotide primer for the detection of SNP TSC0058879
gttaaaattaac

SEQ ID NO: 371594 - DNA, 12 bp, Artificial Sequence
  Oligonucleotide primer for the detection of SNP TSC0058879
ataaaaaaaagt

SEQ ID NO: 371595 - DNA, 12 bp, Artificial Sequence
  Oligonucleotide primer for the detection of SNP TSC0008135
aattttaagtga

SEQ ID NO: 371596 - DNA, 12 bp, Artificial Sequence
  Oligonucleotide primer for the detection of SNP TSC0058880
ggtgttaggtta

SEQ ID NO: 371597 - DNA, 12 bp, Artificial Sequence
  Oligonucleotide primer for the detection of SNP TSC0009230
aagaataagtgg

SEQ ID NO: 371598 - DNA, 12 bp, Artificial Sequence
  Oligonucleotide primer for the detection of SNP TSC0058882
aatttaacaaat

SEQ ID NO: 371599 - DNA, 12 bp, Artificial Sequence
  Oligonucleotide primer for the detection of SNP TSC0058882
taagtttattgg

SEQ ID NO: 371600 - DNA, 12 bp, Artificial Sequence
  Oligonucleotide primer for the detection of SNP TSC0058883
taatttctaaca

SEQ ID NO: 371601 - DNA, 12 bp, Artificial Sequence
  Oligonucleotide primer for the detection of SNP TSC0058883
aagatttttgtt

SEQ ID NO: 371602 - DNA, 12 bp, Artificial Sequence
  Oligonucleotide primer for the detection of SNP TSC0058884
aattaaaccaat

SEQ ID NO: 371603 - DNA, 12 bp, Artificial Sequence
  Oligonucleotide primer for the detection of SNP TSC0058884
tgtagggttatt

SEQ ID NO: 371604 - DNA, 12 bp, Artificial Sequence
  Oligonucleotide primer for the detection of SNP TSC0058884
actataaaatta

SEQ ID NO: 371605 - DNA, 12 bp, Artificial Sequence
  Oligonucleotide primer for the detection of SNP TSC0058885
acccattcccta

SEQ ID NO: 371606 - DNA, 12 bp, Artificial Sequence
  Oligonucleotide primer for the detection of SNP TSC0058885
atattgttgtgt

SEQ ID NO: 371607 - DNA, 12 bp, Artificial Sequence
  Oligonucleotide primer for the detection of SNP TSC0058885
atattattatac

SEQ ID NO: 371608 - DNA, 12 bp, Artificial Sequence
  Oligonucleotide primer for the detection of SNP TSC0058886
aataacaaactt

SEQ ID NO: 371609 - DNA, 12 bp, Artificial Sequence
  Oligonucleotide primer for the detection of SNP TSC0058887
aatttaaaataa

SEQ ID NO: 371610 - DNA, 12 bp, Artificial Sequence
  Oligonucleotide primer for the detection of SNP TSC0058888
tcgaactcctaa

SEQ ID NO: 371611 - DNA, 12 bp, Artificial Sequence
  Oligonucleotide primer for the detection of SNP TSC0058888
ggtgggtggatt

SEQ ID NO: 371612 - DNA, 12 bp, Artificial Sequence
  Oligonucleotide primer for the detection of SNP TSC0058888
tcgaatttttga

SEQ ID NO: 371613 - DNA, 12 bp, Artificial Sequence
  Oligonucleotide primer for the detection of SNP TSC0058890
acatcaacacta

SEQ ID NO: 371614 - DNA, 12 bp, Artificial Sequence
  Oligonucleotide primer for the detection of SNP TSC0058890
taaggttaggta

SEQ ID NO: 371615 - DNA, 12 bp, Artificial Sequence
  Oligonucleotide primer for the detection of SNP TSC0058890
atattagtattg

SEQ ID NO: 371616 - DNA, 12 bp, Artificial Sequence
  Oligonucleotide primer for the detection of SNP TSC0058891
gattttgtggtt

SEQ ID NO: 371617 - DNA, 12 bp, Artificial Sequence
  Oligonucleotide primer for the detection of SNP TSC0058891
aattttataacc

SEQ ID NO: 371618 - DNA, 12 bp, Artificial Sequence
  Oligonucleotide primer for the detection of SNP TSC0058893
accacattcaac

SEQ ID NO: 371619 - DNA, 12 bp, Artificial Sequence
  Oligonucleotide primer for the detection of SNP TSC0058893
gtagtaaagtta

SEQ ID NO: 371620 - DNA, 12 bp, Artificial Sequence
  Oligonucleotide primer for the detection of SNP TSC0004842
ttactacaacct

SEQ ID NO: 371621 - DNA, 12 bp, Artificial Sequence
  Oligonucleotide primer for the detection of SNP TSC0007988
aatcaaatactt

SEQ ID NO: 371622 - DNA, 12 bp, Artificial Sequence
  Oligonucleotide primer for the detection of SNP TSC0058894
attattttcaat

SEQ ID NO: 371623 - DNA, 12 bp, Artificial Sequence
  Oligonucleotide primer for the detection of SNP TSC0058894
aagttgggagga

SEQ ID NO: 371624 - DNA, 12 bp, Artificial Sequence
  Oligonucleotide primer for the detection of SNP TSC0001358
ttaaaagaaaat

SEQ ID NO: 371625 - DNA, 12 bp, Artificial Sequence
  Oligonucleotide primer for the detection of SNP TSC0001358
ataataataaga

SEQ ID NO: 371626 - DNA, 12 bp, Artificial Sequence
  Oligonucleotide primer for the detection of SNP TSC0001145
ggtttagtgtag

SEQ ID NO: 371627 - DNA, 12 bp, Artificial Sequence
  Oligonucleotide primer for the detection of SNP TSC0001145
aatccaatataa

SEQ ID NO: 371628 - DNA, 12 bp, Artificial Sequence
  Oligonucleotide primer for the detection of SNP TSC0001145
gagatttggaat

SEQ ID NO: 371629 - DNA, 12 bp, Artificial Sequence
  Oligonucleotide primer for the detection of SNP TSC0058895
tatcattcatta

SEQ ID NO: 371630 - DNA, 12 bp, Artificial Sequence
  Oligonucleotide primer for the detection of SNP TSC0058897
cttctttaatat

SEQ ID NO: 371631 - DNA, 12 bp, Artificial Sequence
  Oligonucleotide primer for the detection of SNP TSC0058897
attttagaaaag

SEQ ID NO: 371632 - DNA, 12 bp, Artificial Sequence
  Oligonucleotide primer for the detection of SNP TSC0001719
attattacaaaa

SEQ ID NO: 371633 - DNA, 12 bp, Artificial Sequence
  Oligonucleotide primer for the detection of SNP TSC0001719
attattacgaaa

SEQ ID NO: 371634 - DNA, 12 bp, Artificial Sequence
  Oligonucleotide primer for the detection of SNP TSC0001719
ttaatattatgt

SEQ ID NO: 371635 - DNA, 12 bp, Artificial Sequence
  Oligonucleotide primer for the detection of SNP TSC0001719
tcaacattatat

SEQ ID NO: 371636 - DNA, 12 bp, Artificial Sequence
  Oligonucleotide primer for the detection of SNP TSC0001719
tattgttgtgga

SEQ ID NO: 371637 - DNA, 12 bp, Artificial Sequence
  Oligonucleotide primer for the detection of SNP TSC0001719
tattgttgcgga

SEQ ID NO: 371638 - DNA, 12 bp, Artificial Sequence
  Oligonucleotide primer for the detection of SNP TSC0009763
acctcaccaacc

SEQ ID NO: 371639 - DNA, 12 bp, Artificial Sequence
  Oligonucleotide primer for the detection of SNP TSC0009763
acctcgccaacc

SEQ ID NO: 371640 - DNA, 12 bp, Artificial Sequence
  Oligonucleotide primer for the detection of SNP TSC0009763
ttatggttttat

SEQ ID NO: 371641 - DNA, 12 bp, Artificial Sequence
  Oligonucleotide primer for the detection of SNP TSC0009763
ttacggttttat

SEQ ID NO: 371642 - DNA, 12 bp, Artificial Sequence
  Oligonucleotide primer for the detection of SNP TSC0009763
cacgattccaca

SEQ ID NO: 371643 - DNA, 12 bp, Artificial Sequence
  Oligonucleotide primer for the detection of SNP TSC0009763
gttttgttagtt

SEQ ID NO: 371644 - DNA, 12 bp, Artificial Sequence
  Oligonucleotide primer for the detection of SNP TSC0009763
gtttcgttagtt

SEQ ID NO: 371645 - DNA, 12 bp, Artificial Sequence
  Oligonucleotide primer for the detection of SNP TSC0000146
ctctaactatcc

SEQ ID NO: 371646 - DNA, 12 bp, Artificial Sequence
  Oligonucleotide primer for the detection of SNP TSC0000146
taaaggatgtag

SEQ ID NO: 371647 - DNA, 12 bp, Artificial Sequence
  Oligonucleotide primer for the detection of SNP TSC0058899
aactctaacact

SEQ ID NO: 371648 - DNA, 12 bp, Artificial Sequence
  Oligonucleotide primer for the detection of SNP TSC0058899
gaattttaggta

SEQ ID NO: 371649 - DNA, 12 bp, Artificial Sequence
  Oligonucleotide primer for the detection of SNP TSC0058901
ataaaatacata

SEQ ID NO: 371650 - DNA, 12 bp, Artificial Sequence
  Oligonucleotide primer for the detection of SNP TSC0058901
gagttagttgtc

SEQ ID NO: 371651 - DNA, 12 bp, Artificial Sequence
  Oligonucleotide primer for the detection of SNP TSC0058901
ctaaaccaacta

SEQ ID NO: 371652 - DNA, 12 bp, Artificial Sequence
  Oligonucleotide primer for the detection of SNP TSC0058901
gtgggatgtata

SEQ ID NO: 371653 - DNA, 12 bp, Artificial Sequence
  Oligonucleotide primer for the detection of SNP TSC0058902
tttaaaaaacac

SEQ ID NO: 371654 - DNA, 12 bp, Artificial Sequence
  Oligonucleotide primer for the detection of SNP TSC0058902
acaatcccttaa

SEQ ID NO: 371655 - DNA, 12 bp, Artificial Sequence
  Oligonucleotide primer for the detection of SNP TSC0058902
gcaatcccttaa

SEQ ID NO: 371656 - DNA, 12 bp, Artificial Sequence
  Oligonucleotide primer for the detection of SNP TSC0058902
tttgaaaaatat

SEQ ID NO: 371657 - DNA, 12 bp, Artificial Sequence
  Oligonucleotide primer for the detection of SNP TSC0058903
aaaataaacttt

SEQ ID NO: 371658 - DNA, 12 bp, Artificial Sequence
  Oligonucleotide primer for the detection of SNP TSC0001312
taatctttaacc

SEQ ID NO: 371659 - DNA, 12 bp, Artificial Sequence
  Oligonucleotide primer for the detection of SNP TSC0001312
gtatgggtaaag

SEQ ID NO: 371660 - DNA, 12 bp, Artificial Sequence
  Oligonucleotide primer for the detection of SNP TSC0058904
aataacattacc

SEQ ID NO: 371661 - DNA, 12 bp, Artificial Sequence
  Oligonucleotide primer for the detection of SNP TSC0058904
gttgtaggttta

SEQ ID NO: 371662 - DNA, 12 bp, Artificial Sequence
  Oligonucleotide primer for the detection of SNP TSC0001480
ttaggatgttaa

SEQ ID NO: 371663 - DNA, 12 bp, Artificial Sequence
  Oligonucleotide primer for the detection of SNP TSC0001481
aactcttaaaat

SEQ ID NO: 371664 - DNA, 12 bp, Artificial Sequence
  Oligonucleotide primer for the detection of SNP TSC0001481
aaataggagaag

SEQ ID NO: 371665 - DNA, 12 bp, Artificial Sequence
  Oligonucleotide primer for the detection of SNP TSC0001482
ccacttctacac

SEQ ID NO: 371666 - DNA, 12 bp, Artificial Sequence
  Oligonucleotide primer for the detection of SNP TSC0001482
ctaactacaata

SEQ ID NO: 371667 - DNA, 12 bp, Artificial Sequence
  Oligonucleotide primer for the detection of SNP TSC0001482
ttatttttgtat

SEQ ID NO: 371668 - DNA, 12 bp, Artificial Sequence
  Oligonucleotide primer for the detection of SNP TSC0000538
cctcaatatatc

SEQ ID NO: 371669 - DNA, 12 bp, Artificial Sequence
  Oligonucleotide primer for the detection of SNP TSC0000538
ttttattttggg

SEQ ID NO: 371670 - DNA, 12 bp, Artificial Sequence
  Oligonucleotide primer for the detection of SNP TSC0000539
gtatattatttg

SEQ ID NO: 371671 - DNA, 12 bp, Artificial Sequence
  Oligonucleotide primer for the detection of SNP TSC0000540
tataataaacac

SEQ ID NO: 371672 - DNA, 12 bp, Artificial Sequence
  Oligonucleotide primer for the detection of SNP TSC0000540
gtttgttttata

SEQ ID NO: 371673 - DNA, 12 bp, Artificial Sequence
  Oligonucleotide primer for the detection of SNP TSC0058911
tatctatttata

SEQ ID NO: 371674 - DNA, 12 bp, Artificial Sequence
  Oligonucleotide primer for the detection of SNP TSC0058911
tgtttgtttatg

SEQ ID NO: 371675 - DNA, 12 bp, Artificial Sequence
  Oligonucleotide primer for the detection of SNP TSC0058912
cataacacacta

SEQ ID NO: 371676 - DNA, 12 bp, Artificial Sequence
  Oligonucleotide primer for the detection of SNP TSC0058912
cgtaacacacta

SEQ ID NO: 371677 - DNA, 12 bp, Artificial Sequence
  Oligonucleotide primer for the detection of SNP TSC0058912
taaaacctataa

SEQ ID NO: 371678 - DNA, 12 bp, Artificial Sequence
  Oligonucleotide primer for the detection of SNP TSC0058912
tgtagtatattg

SEQ ID NO: 371679 - DNA, 12 bp, Artificial Sequence
  Oligonucleotide primer for the detection of SNP TSC0058912
cgtagtatattg

SEQ ID NO: 371680 - DNA, 12 bp, Artificial Sequence
  Oligonucleotide primer for the detection of SNP TSC0058913
ttacttttaaac

SEQ ID NO: 371681 - DNA, 12 bp, Artificial Sequence
  Oligonucleotide primer for the detection of SNP TSC0058913
aaaatagagata

SEQ ID NO: 371682 - DNA, 12 bp, Artificial Sequence
  Oligonucleotide primer for the detection of SNP TSC0058914
aacctataaaca

SEQ ID NO: 371683 - DNA, 12 bp, Artificial Sequence
  Oligonucleotide primer for the detection of SNP TSC0058914
aaaatgtagtat

SEQ ID NO: 371684 - DNA, 12 bp, Artificial Sequence
  Oligonucleotide primer for the detection of SNP TSC0058914
aaaacgtagtat

SEQ ID NO: 371685 - DNA, 12 bp, Artificial Sequence
  Oligonucleotide primer for the detection of SNP TSC0009681
actaaacacaat

SEQ ID NO: 371686 - DNA, 12 bp, Artificial Sequence
  Oligonucleotide primer for the detection of SNP TSC0009681
actaaacgcaat

SEQ ID NO: 371687 - DNA, 12 bp, Artificial Sequence
  Oligonucleotide primer for the detection of SNP TSC0009681
ttataagtataa

SEQ ID NO: 371688 - DNA, 12 bp, Artificial Sequence
  Oligonucleotide primer for the detection of SNP TSC0009682
cttatctctact

SEQ ID NO: 371689 - DNA, 12 bp, Artificial Sequence
  Oligonucleotide primer for the detection of SNP TSC0058915
ttaaattacaaa

SEQ ID NO: 371690 - DNA, 12 bp, Artificial Sequence
  Oligonucleotide primer for the detection of SNP TSC0058915
ttggattatagg

SEQ ID NO: 371691 - DNA, 12 bp, Artificial Sequence
  Oligonucleotide primer for the detection of SNP TSC0058917
cctacactacct

SEQ ID NO: 371692 - DNA, 12 bp, Artificial Sequence
  Oligonucleotide primer for the detection of SNP TSC0058917
agtgtattttta

SEQ ID NO: 371693 - DNA, 12 bp, Artificial Sequence
  Oligonucleotide primer for the detection of SNP TSC0058918
ccttcccaacac

SEQ ID NO: 371694 - DNA, 12 bp, Artificial Sequence
  Oligonucleotide primer for the detection of SNP TSC0058918
ggaggtattgtg

SEQ ID NO: 371695 - DNA, 12 bp, Artificial Sequence
  Oligonucleotide primer for the detection of SNP TSC0058918
ggaggtatcgtg

SEQ ID NO: 371696 - DNA, 12 bp, Artificial Sequence
  Oligonucleotide primer for the detection of SNP TSC0058918
ggaggtattgcg

SEQ ID NO: 371697 - DNA, 12 bp, Artificial Sequence
  Oligonucleotide primer for the detection of SNP TSC0058918
ggaggtatcgcg

SEQ ID NO: 371698 - DNA, 12 bp, Artificial Sequence
  Oligonucleotide primer for the detection of SNP TSC0001567
aagtttattttg

SEQ ID NO: 371699 - DNA, 12 bp, Artificial Sequence
  Oligonucleotide primer for the detection of SNP TSC0001567
aaactcatttta

SEQ ID NO: 371700 - DNA, 12 bp, Artificial Sequence
  Oligonucleotide primer for the detection of SNP TSC0001567
aaaatgaatttt

SEQ ID NO: 371701 - DNA, 12 bp, Artificial Sequence
  Oligonucleotide primer for the detection of SNP TSC0001568
aattatgaaaga

SEQ ID NO: 371702 - DNA, 12 bp, Artificial Sequence
  Oligonucleotide primer for the detection of SNP TSC0001569
ccttacattaac

SEQ ID NO: 371703 - DNA, 12 bp, Artificial Sequence
  Oligonucleotide primer for the detection of SNP TSC0001569
aaatattttgtg

SEQ ID NO: 371704 - DNA, 12 bp, Artificial Sequence
  Oligonucleotide primer for the detection of SNP TSC0058921
ttgtttgaggtt

SEQ ID NO: 371705 - DNA, 12 bp, Artificial Sequence
  Oligonucleotide primer for the detection of SNP TSC0058921
tacctaaaacca

SEQ ID NO: 371706 - DNA, 12 bp, Artificial Sequence
  Oligonucleotide primer for the detection of SNP TSC0058921
tatgaaatatgg

SEQ ID NO: 371707 - DNA, 12 bp, Artificial Sequence
  Oligonucleotide primer for the detection of SNP TSC0058922
tttagaatgata

SEQ ID NO: 371708 - DNA, 12 bp, Artificial Sequence
  Oligonucleotide primer for the detection of SNP TSC0058922
ttcaaaataata

SEQ ID NO: 371709 - DNA, 12 bp, Artificial Sequence
  Oligonucleotide primer for the detection of SNP TSC0058926
aataatatcctt

SEQ ID NO: 371710 - DNA, 12 bp, Artificial Sequence
  Oligonucleotide primer for the detection of SNP TSC0058927
aatataaatctc

SEQ ID NO: 371711 - DNA, 12 bp, Artificial Sequence
  Oligonucleotide primer for the detection of SNP TSC0058927
tttttagtaagt

SEQ ID NO: 371712 - DNA, 12 bp, Artificial Sequence
  Oligonucleotide primer for the detection of SNP TSC0058927
ccccaacaaata

SEQ ID NO: 371713 - DNA, 12 bp, Artificial Sequence
  Oligonucleotide primer for the detection of SNP TSC0058930
acttacttttta

SEQ ID NO: 371714 - DNA, 12 bp, Artificial Sequence
  Oligonucleotide primer for the detection of SNP TSC0058930
ataaaccctttc

SEQ ID NO: 371715 - DNA, 12 bp, Artificial Sequence
  Oligonucleotide primer for the detection of SNP TSC0058931
cctcttaattat

SEQ ID NO: 371716 - DNA, 12 bp, Artificial Sequence
  Oligonucleotide primer for the detection of SNP TSC0058933
cccaaccccatc

SEQ ID NO: 371717 - DNA, 12 bp, Artificial Sequence
  Oligonucleotide primer for the detection of SNP TSC0058933
tagggaggtaag

SEQ ID NO: 371718 - DNA, 12 bp, Artificial Sequence
  Oligonucleotide primer for the detection of SNP TSC0058934
tcttctctatct

SEQ ID NO: 371719 - DNA, 12 bp, Artificial Sequence
  Oligonucleotide primer for the detection of SNP TSC0058934
taggaatagtgg

SEQ ID NO: 371720 - DNA, 12 bp, Artificial Sequence
  Oligonucleotide primer for the detection of SNP TSC0058938
taaacatttaat

SEQ ID NO: 371721 - DNA, 12 bp, Artificial Sequence
  Oligonucleotide primer for the detection of SNP TSC0058938
ccctactcccca

SEQ ID NO: 371722 - DNA, 12 bp, Artificial Sequence
  Oligonucleotide primer for the detection of SNP TSC0058938
tggatatttggt

SEQ ID NO: 371723 - DNA, 12 bp, Artificial Sequence
  Oligonucleotide primer for the detection of SNP TSC0058943
aataatgtggtg

SEQ ID NO: 371724 - DNA, 12 bp, Artificial Sequence
  Oligonucleotide primer for the detection of SNP TSC0058943
aataacgtggtg

SEQ ID NO: 371725 - DNA, 12 bp, Artificial Sequence
  Oligonucleotide primer for the detection of SNP TSC0058944
ttttgattaagg

SEQ ID NO: 371726 - DNA, 12 bp, Artificial Sequence
  Oligonucleotide primer for the detection of SNP TSC0058944
ccctaaccaaaa

SEQ ID NO: 371727 - DNA, 12 bp, Artificial Sequence
  Oligonucleotide primer for the detection of SNP TSC0058944
gattgatgaatt

SEQ ID NO: 371728 - DNA, 12 bp, Artificial Sequence
  Oligonucleotide primer for the detection of SNP TSC0058945
ttatacaataat

SEQ ID NO: 371729 - DNA, 12 bp, Artificial Sequence
  Oligonucleotide primer for the detection of SNP TSC0058945
ttaattttataa

SEQ ID NO: 371730 - DNA, 12 bp, Artificial Sequence
  Oligonucleotide primer for the detection of SNP TSC0058946
tttatccattac

SEQ ID NO: 371731 - DNA, 12 bp, Artificial Sequence
  Oligonucleotide primer for the detection of SNP TSC0058946
atatgttatttc

SEQ ID NO: 371732 - DNA, 12 bp, Artificial Sequence
  Oligonucleotide primer for the detection of SNP TSC0058946
atacgttatttc

SEQ ID NO: 371733 - DNA, 12 bp, Artificial Sequence
  Oligonucleotide primer for the detection of SNP TSC0058946
aatacattactt

SEQ ID NO: 371734 - DNA, 12 bp, Artificial Sequence
  Oligonucleotide primer for the detection of SNP TSC0058946
aatacgttactt

SEQ ID NO: 371735 - DNA, 12 bp, Artificial Sequence
  Oligonucleotide primer for the detection of SNP TSC0058947
ttaaagaaattg

SEQ ID NO: 371736 - DNA, 12 bp, Artificial Sequence
  Oligonucleotide primer for the detection of SNP TSC0058948
cctcttctccca

SEQ ID NO: 371737 - DNA, 12 bp, Artificial Sequence
  Oligonucleotide primer for the detection of SNP TSC0058948
gagggttgtttt

SEQ ID NO: 371738 - DNA, 12 bp, Artificial Sequence
  Oligonucleotide primer for the detection of SNP TSC0058948
aaaaattattct

SEQ ID NO: 371739 - DNA, 12 bp, Artificial Sequence
  Oligonucleotide primer for the detection of SNP TSC0058949
atatcttccctc

SEQ ID NO: 371740 - DNA, 12 bp, Artificial Sequence
  Oligonucleotide primer for the detection of SNP TSC0058950
tgattttgggta

SEQ ID NO: 371741 - DNA, 12 bp, Artificial Sequence
  Oligonucleotide primer for the detection of SNP TSC0058950
aaccttaaataa

SEQ ID NO: 371742 - DNA, 12 bp, Artificial Sequence
  Oligonucleotide primer for the detection of SNP TSC0058950
ttataagggtgg

SEQ ID NO: 371743 - DNA, 12 bp, Artificial Sequence
  Oligonucleotide primer for the detection of SNP TSC0058951
  unsure (2): unknown base
anctataaaaac

SEQ ID NO: 371744 - DNA, 12 bp, Artificial Sequence
  Oligonucleotide primer for the detection of SNP TSC0058951
ttttggtttagt

SEQ ID NO: 371745 - DNA, 12 bp, Artificial Sequence
  Oligonucleotide primer for the detection of SNP TSC0058951
ttttggtttagc

SEQ ID NO: 371746 - DNA, 12 bp, Artificial Sequence
  Oligonucleotide primer for the detection of SNP TSC0058951
tccctaacccaa

SEQ ID NO: 371747 - DNA, 12 bp, Artificial Sequence
  Oligonucleotide primer for the detection of SNP TSC0058951
  unsure (2): unknown base
gnttgtgaaagt

SEQ ID NO: 371748 - DNA, 12 bp, Artificial Sequence
  Oligonucleotide primer for the detection of SNP TSC0058952
aaatataaaatt

SEQ ID NO: 371749 - DNA, 12 bp, Artificial Sequence
  Oligonucleotide primer for the detection of SNP TSC0058952
gtgtggggattt

SEQ ID NO: 371750 - DNA, 12 bp, Artificial Sequence
  Oligonucleotide primer for the detection of SNP TSC0058952
aaatgtgaggtt

SEQ ID NO: 371751 - DNA, 12 bp, Artificial Sequence
  Oligonucleotide primer for the detection of SNP TSC0058953
taaaaaatctct

SEQ ID NO: 371752 - DNA, 12 bp, Artificial Sequence
  Oligonucleotide primer for the detection of SNP TSC0058953
tgtattgttatg

SEQ ID NO: 371753 - DNA, 12 bp, Artificial Sequence
  Oligonucleotide primer for the detection of SNP TSC0058957
ggagtgtagttg

SEQ ID NO: 371754 - DNA, 12 bp, Artificial Sequence
  Oligonucleotide primer for the detection of SNP TSC0058957
ttggggtatgat

SEQ ID NO: 371755 - DNA, 12 bp, Artificial Sequence
  Oligonucleotide primer for the detection of SNP TSC0058958
ttttttcaaaaa

SEQ ID NO: 371756 - DNA, 12 bp, Artificial Sequence
  Oligonucleotide primer for the detection of SNP TSC0058959
tacaacctcata

SEQ ID NO: 371757 - DNA, 12 bp, Artificial Sequence
  Oligonucleotide primer for the detection of SNP TSC0058959
ttcttaccttaa

SEQ ID NO: 371758 - DNA, 12 bp, Artificial Sequence
  Oligonucleotide primer for the detection of SNP TSC0058959
atagttttatat

SEQ ID NO: 371759 - DNA, 12 bp, Artificial Sequence
  Oligonucleotide primer for the detection of SNP TSC0058960
aagtattgtatt

SEQ ID NO: 371760 - DNA, 12 bp, Artificial Sequence
  Oligonucleotide primer for the detection of SNP TSC0058960
ttaaatattata

SEQ ID NO: 371761 - DNA, 12 bp, Artificial Sequence
  Oligonucleotide primer for the detection of SNP TSC0058960
gtaagaggaaat

SEQ ID NO: 371762 - DNA, 12 bp, Artificial Sequence
  Oligonucleotide primer for the detection of SNP TSC0058960
gtaagaggaaac

SEQ ID NO: 371763 - DNA, 12 bp, Artificial Sequence
  Oligonukleotid-Primer
ataaaacacaac

SEQ ID NO: 371764 - DNA, 12 bp, Artificial Sequence
  Oligonucleotide primer for the detection of SNP TSC0058963
agtgaatttttt

SEQ ID NO: 371765 - DNA, 12 bp, Artificial Sequence
  Oligonucleotide primer for the detection of SNP TSC0058963
caataaaccccc

SEQ ID NO: 371766 - DNA, 12 bp, Artificial Sequence
  Oligonucleotide primer for the detection of SNP TSC0058963
aagttggtagat

SEQ ID NO: 371767 - DNA, 12 bp, Artificial Sequence
  Oligonukleotid-Primer
ataatatcttat

SEQ ID NO: 371768 - DNA, 12 bp, Artificial Sequence
  Oligonucleotide primer for the detection of SNP TSC0058964
tgtagtttgtag

SEQ ID NO: 371769 - DNA, 12 bp, Artificial Sequence
  Oligonucleotide primer for the detection of SNP TSC0058965
aattattataat

SEQ ID NO: 371770 - DNA, 12 bp, Artificial Sequence
  Oligonucleotide primer for the detection of SNP TSC0058966
acaattaaaaat

SEQ ID NO: 371771 - DNA, 12 bp, Artificial Sequence
  Oligonukleotid-Primer
tgaattagttga

SEQ ID NO: 371772 - DNA, 12 bp, Artificial Sequence
  Oligonucleotide primer for the detection of SNP TSC0058969
atcacacacaca

SEQ ID NO: 371773 - DNA, 12 bp, Artificial Sequence
  Oligonucleotide primer for the detection of SNP TSC0058969
gttatatatata

SEQ ID NO: 371774 - DNA, 12 bp, Artificial Sequence
  Oligonucleotide primer for the detection of SNP TSC0058975
cccccccttccc

SEQ ID NO: 371775 - DNA, 12 bp, Artificial Sequence
  Oligonucleotide primer for the detection of SNP TSC0058975
ttttataggtta

SEQ ID NO: 371776 - DNA, 12 bp, Artificial Sequence
  Oligonucleotide primer for the detection of SNP TSC0058976
ccacaacactaa

SEQ ID NO: 371777 - DNA, 12 bp, Artificial Sequence
  Oligonucleotide primer for the detection of SNP TSC0058976
ccatcttattac

SEQ ID NO: 371778 - DNA, 12 bp, Artificial Sequence
  Oligonucleotide primer for the detection of SNP TSC0058977
tataacaaaaat

SEQ ID NO: 371779 - DNA, 12 bp, Artificial Sequence
  Oligonucleotide primer for the detection of SNP TSC0058977
agtgttgtgggg

SEQ ID NO: 371780 - DNA, 12 bp, Artificial Sequence
  Oligonucleotide primer for the detection of SNP TSC0058977
aatactataaaa

SEQ ID NO: 371781 - DNA, 12 bp, Artificial Sequence
  Oligonucleotide primer for the detection of SNP TSC0058977
tgtggtagagat

SEQ ID NO: 371782 - DNA, 12 bp, Artificial Sequence
  Oligonucleotide primer for the detection of SNP TSC0058978
tataaatattat

SEQ ID NO: 371783 - DNA, 12 bp, Artificial Sequence
  Oligonukleotid-Primer
agttttattgtg

SEQ ID NO: 371784 - DNA, 12 bp, Artificial Sequence
  Oligonucleotide primer for the detection of SNP TSC0058981
ttcttctcacat

SEQ ID NO: 371785 - DNA, 12 bp, Artificial Sequence
  Oligonucleotide primer for the detection of SNP TSC0058982
cacattactacc

SEQ ID NO: 371786 - DNA, 12 bp, Artificial Sequence
  Oligonucleotide primer for the detection of SNP TSC0058982
ttttatgttaga

SEQ ID NO: 371787 - DNA, 12 bp, Artificial Sequence
  Oligonukleotid-Primer
tatattgttgtt

SEQ ID NO: 371788 - DNA, 12 bp, Artificial Sequence
  Oligonucleotide primer for the detection of SNP TSC0058985
aagttaaatata

SEQ ID NO: 371789 - DNA, 12 bp, Artificial Sequence
  Oligonucleotide primer for the detection of SNP TSC0058987
tgtaatagtaag

SEQ ID NO: 371790 - DNA, 12 bp, Artificial Sequence
  Oligonucleotide primer for the detection of SNP TSC0058987
tacaataacaaa

SEQ ID NO: 371791 - DNA, 12 bp, Artificial Sequence
  Oligonucleotide primer for the detection of SNP TSC0058988
aatttaacctat

SEQ ID NO: 371792 - DNA, 12 bp, Artificial Sequence
  Oligonucleotide primer for the detection of SNP TSC0058988
gtgttgattaag

SEQ ID NO: 371793 - DNA, 12 bp, Artificial Sequence
  Oligonucleotide primer for the detection of SNP TSC0058989
aaacaatctaca

SEQ ID NO: 371794 - DNA, 12 bp, Artificial Sequence
  Oligonucleotide primer for the detection of SNP TSC0058989
aaacgatctaca

SEQ ID NO: 371795 - DNA, 12 bp, Artificial Sequence
  Oligonucleotide primer for the detection of SNP TSC0058989
atggtattgaat

SEQ ID NO: 371796 - DNA, 12 bp, Artificial Sequence
  Oligonucleotide primer for the detection of SNP TSC0058989
acggtattgaat

SEQ ID NO: 371797 - DNA, 12 bp, Artificial Sequence
  Oligonucleotide primer for the detection of SNP TSC0058989
aacaacattaaa

SEQ ID NO: 371798 - DNA, 12 bp, Artificial Sequence
  Oligonucleotide primer for the detection of SNP TSC0058989
aacgacattaaa

SEQ ID NO: 371799 - DNA, 12 bp, Artificial Sequence
  Oligonukleotid-Primer
aaagcgatttat

SEQ ID NO: 371800 - DNA, 12 bp, Artificial Sequence
  Oligonucleotide primer for the detection of SNP TSC0058990
aaaatccaatat

SEQ ID NO: 371801 - DNA, 12 bp, Artificial Sequence
  Oligonucleotide primer for the detection of SNP TSC0058990
gttagtgggtta

SEQ ID NO: 371802 - DNA, 12 bp, Artificial Sequence
  Oligonucleotide primer for the detection of SNP TSC0058990
accaataaacca

SEQ ID NO: 371803 - DNA, 12 bp, Artificial Sequence
  Oligonucleotide primer for the detection of SNP TSC0058990
agaatttagtat

SEQ ID NO: 371804 - DNA, 12 bp, Artificial Sequence
  Oligonucleotide primer for the detection of SNP TSC0058991
  unsure (1): unknown base
nttaggatttaa

SEQ ID NO: 371805 - DNA, 12 bp, Artificial Sequence
  Oligonucleotide primer for the detection of SNP TSC0058991
  unsure (1): unknown base
nctaaaacttaa

SEQ ID NO: 371806 - DNA, 12 bp, Artificial Sequence
  Oligonucleotide primer for the detection of SNP TSC0058991
taggatattgtt

SEQ ID NO: 371807 - DNA, 12 bp, Artificial Sequence
  Oligonucleotide primer for the detection of SNP TSC0058992
cacatacaaata

SEQ ID NO: 371808 - DNA, 12 bp, Artificial Sequence
  Oligonucleotide primer for the detection of SNP TSC0058992
cacatacgaata

SEQ ID NO: 371809 - DNA, 12 bp, Artificial Sequence
  Oligonucleotide primer for the detection of SNP TSC0058992
taaatactacta

SEQ ID NO: 371810 - DNA, 12 bp, Artificial Sequence
  Oligonucleotide primer for the detection of SNP TSC0058992
tatatgtggata

SEQ ID NO: 371811 - DNA, 12 bp, Artificial Sequence
  Oligonucleotide primer for the detection of SNP TSC0058992
tatatgcggata

SEQ ID NO: 371812 - DNA, 12 bp, Artificial Sequence
  Oligonucleotide primer for the detection of SNP TSC0058993
tttgttttttgg

SEQ ID NO: 371813 - DNA, 12 bp, Artificial Sequence
  Oligonucleotide primer for the detection of SNP TSC0058995
ataaaacacttt

SEQ ID NO: 371814 - DNA, 12 bp, Artificial Sequence
  Oligonucleotide primer for the detection of SNP TSC0058998
acataaaaccta

SEQ ID NO: 371815 - DNA, 12 bp, Artificial Sequence
  Oligonucleotide primer for the detection of SNP TSC0058998
atttaagtattt

SEQ ID NO: 371816 - DNA, 12 bp, Artificial Sequence
  Oligonucleotide primer for the detection of SNP TSC0058999
ggtaatttaatg

SEQ ID NO: 371817 - DNA, 12 bp, Artificial Sequence
  Oligonucleotide primer for the detection of SNP TSC0058999
tgaaaatatgtt

SEQ ID NO: 371818 - DNA, 12 bp, Artificial Sequence
  Oligonucleotide primer for the detection of SNP TSC0059005
aaatctcaaatt

SEQ ID NO: 371819 - DNA, 12 bp, Artificial Sequence
  Oligonucleotide primer for the detection of SNP TSC0059005
agatatttattg

SEQ ID NO: 371820 - DNA, 12 bp, Artificial Sequence
  Oligonucleotide primer for the detection of SNP TSC0059006
actctcccacct

SEQ ID NO: 371821 - DNA, 12 bp, Artificial Sequence
  Oligonucleotide primer for the detection of SNP TSC0059006
ttggtagtggag

SEQ ID NO: 371822 - DNA, 12 bp, Artificial Sequence
  Oligonucleotide primer for the detection of SNP TSC0059007
atccgaaaaact

SEQ ID NO: 371823 - DNA, 12 bp, Artificial Sequence
  Oligonucleotide primer for the detection of SNP TSC0059007
gtttaggaagaa

SEQ ID NO: 371824 - DNA, 12 bp, Artificial Sequence
  Oligonucleotide primer for the detection of SNP TSC0059007
gtttgaagaatt

SEQ ID NO: 371825 - DNA, 12 bp, Artificial Sequence
  Oligonucleotide primer for the detection of SNP TSC0059007
gttcgaagaatt

SEQ ID NO: 371826 - DNA, 12 bp, Artificial Sequence
  Oligonucleotide primer for the detection of SNP TSC0059013
caaaattatact

SEQ ID NO: 371827 - DNA, 12 bp, Artificial Sequence
  Oligonucleotide primer for the detection of SNP TSC0059013
cgaaattatact

SEQ ID NO: 371828 - DNA, 12 bp, Artificial Sequence
  Oligonucleotide primer for the detection of SNP TSC0059013
ggttggagcgta

SEQ ID NO: 371829 - DNA, 12 bp, Artificial Sequence
  Oligonucleotide primer for the detection of SNP TSC0059014
tataatctaaat

SEQ ID NO: 371830 - DNA, 12 bp, Artificial Sequence
  Oligonucleotide primer for the detection of SNP TSC0059018
aataacaacatc

SEQ ID NO: 371831 - DNA, 12 bp, Artificial Sequence
  Oligonucleotide primer for the detection of SNP TSC0059018
cccattaactat

SEQ ID NO: 371832 - DNA, 12 bp, Artificial Sequence
  Oligonucleotide primer for the detection of SNP TSC0059018
gatgataatatt

SEQ ID NO: 371833 - DNA, 12 bp, Artificial Sequence
  Oligonucleotide primer for the detection of SNP TSC0059019
ctcaaacttaaa

SEQ ID NO: 371834 - DNA, 12 bp, Artificial Sequence
  Oligonucleotide primer for the detection of SNP TSC0059019
ggttgtgatttt

SEQ ID NO: 371835 - DNA, 12 bp, Artificial Sequence
  Oligonucleotide primer for the detection of SNP TSC0059019
caactataactc

SEQ ID NO: 371836 - DNA, 12 bp, Artificial Sequence
  Oligonucleotide primer for the detection of SNP TSC0059019
cgactataactc

SEQ ID NO: 371837 - DNA, 12 bp, Artificial Sequence
  Oligonucleotide primer for the detection of SNP TSC0059020
accacatctcaa

SEQ ID NO: 371838 - DNA, 12 bp, Artificial Sequence
  Oligonucleotide primer for the detection of SNP TSC0059020
accacgtctcaa

SEQ ID NO: 371839 - DNA, 12 bp, Artificial Sequence
  Oligonucleotide primer for the detection of SNP TSC0059020
agagtttattgt

SEQ ID NO: 371840 - DNA, 12 bp, Artificial Sequence
  Oligonucleotide primer for the detection of SNP TSC0059020
gttacgttttag

SEQ ID NO: 371841 - DNA, 12 bp, Artificial Sequence
  Oligonucleotide primer for the detection of SNP TSC0059025
atattttaatta

SEQ ID NO: 371842 - DNA, 12 bp, Artificial Sequence
  Oligonucleotide primer for the detection of SNP TSC0059025
taagtattttat

SEQ ID NO: 371843 - DNA, 12 bp, Artificial Sequence
  Oligonucleotide primer for the detection of SNP TSC0059025
ataaatatttta

SEQ ID NO: 371844 - DNA, 12 bp, Artificial Sequence
  Oligonucleotide primer for the detection of SNP TSC0059026
ttataaatatat

SEQ ID NO: 371845 - DNA, 12 bp, Artificial Sequence
  Oligonucleotide primer for the detection of SNP TSC0059026
ctataaatatac

SEQ ID NO: 371846 - DNA, 12 bp, Artificial Sequence
  Oligonucleotide primer for the detection of SNP TSC0059027
ttaagtgtttaa

SEQ ID NO: 371847 - DNA, 12 bp, Artificial Sequence
  Oligonucleotide primer for the detection of SNP TSC0059027
atgagagaatgt

SEQ ID NO: 371848 - DNA, 12 bp, Artificial Sequence
  Oligonucleotide primer for the detection of SNP TSC0059028
gatagagatata

SEQ ID NO: 371849 - DNA, 12 bp, Artificial Sequence
  Oligonucleotide primer for the detection of SNP TSC0059029
ttaaattctaaa

SEQ ID NO: 371850 - DNA, 12 bp, Artificial Sequence
  Oligonucleotide primer for the detection of SNP TSC0059032
acccaccttctc

SEQ ID NO: 371851 - DNA, 12 bp, Artificial Sequence
  Oligonucleotide primer for the detection of SNP TSC0059032
tttagagttggg

SEQ ID NO: 371852 - DNA, 12 bp, Artificial Sequence
  Oligonucleotide primer for the detection of SNP TSC0059034
tcctaatctttt

SEQ ID NO: 371853 - DNA, 12 bp, Artificial Sequence
  Oligonucleotide primer for the detection of SNP TSC0059034
attgtttttagg

SEQ ID NO: 371854 - DNA, 12 bp, Artificial Sequence
  Oligonucleotide primer for the detection of SNP TSC0059038
aacaaccttacc

SEQ ID NO: 371855 - DNA, 12 bp, Artificial Sequence
  Oligonucleotide primer for the detection of SNP TSC0059039
ttaatcaacttt

SEQ ID NO: 371856 - DNA, 12 bp, Artificial Sequence
  Oligonucleotide primer for the detection of SNP TSC0059039
atggaggaaata

SEQ ID NO: 371857 - DNA, 12 bp, Artificial Sequence
  Oligonucleotide primer for the detection of SNP TSC0059040
ttcttaaaataa

SEQ ID NO: 371858 - DNA, 12 bp, Artificial Sequence
  Oligonucleotide primer for the detection of SNP TSC0059040
aatatttagtag

SEQ ID NO: 371859 - DNA, 12 bp, Artificial Sequence
  Oligonucleotide primer for the detection of SNP TSC0059040
tttttttaaagt

SEQ ID NO: 371860 - DNA, 12 bp, Artificial Sequence
  Oligonucleotide primer for the detection of SNP TSC0059041
ataatatatcac

SEQ ID NO: 371861 - DNA, 12 bp, Artificial Sequence
  Oligonucleotide primer for the detection of SNP TSC0059041
atagtaatttag

SEQ ID NO: 371862 - DNA, 12 bp, Artificial Sequence
  Oligonucleotide primer for the detection of SNP TSC0059045
aaaacaaactcc

SEQ ID NO: 371863 - DNA, 12 bp, Artificial Sequence
  Oligonucleotide primer for the detection of SNP TSC0059045
agttgttatata

SEQ ID NO: 371864 - DNA, 12 bp, Artificial Sequence
  Oligonucleotide primer for the detection of SNP TSC0059046
tctaaactcatc

SEQ ID NO: 371865 - DNA, 12 bp, Artificial Sequence
  Oligonucleotide primer for the detection of SNP TSC0059046
ataggattttta

SEQ ID NO: 371866 - DNA, 12 bp, Artificial Sequence
  Oligonucleotide primer for the detection of SNP TSC0059048
cccaaataacta

SEQ ID NO: 371867 - DNA, 12 bp, Artificial Sequence
  Oligonucleotide primer for the detection of SNP TSC0059048
ggattataaaat

SEQ ID NO: 371868 - DNA, 12 bp, Artificial Sequence
  Oligonucleotide primer for the detection of SNP TSC0059048
aaactacaaaac

SEQ ID NO: 371869 - DNA, 12 bp, Artificial Sequence
  Oligonucleotide primer for the detection of SNP TSC0059048
tttaagtagttg

SEQ ID NO: 371870 - DNA, 12 bp, Artificial Sequence
  Oligonucleotide primer for the detection of SNP TSC0005624
ataatttctctt

SEQ ID NO: 371871 - DNA, 12 bp, Artificial Sequence
  Oligonucleotide primer for the detection of SNP TSC0005624
aagttatataag

SEQ ID NO: 371872 - DNA, 12 bp, Artificial Sequence
  Oligonucleotide primer for the detection of SNP TSC0004573
atagagaattag

SEQ ID NO: 371873 - DNA, 12 bp, Artificial Sequence
  Oligonucleotide primer for the detection of SNP TSC0004943
taatcaaaatac

SEQ ID NO: 371874 - DNA, 12 bp, Artificial Sequence
  Oligonucleotide primer for the detection of SNP TSC0004943
atagaaagttga

SEQ ID NO: 371875 - DNA, 12 bp, Artificial Sequence
  Oligonucleotide primer for the detection of SNP TSC0004943
tgattagagtgt

SEQ ID NO: 371876 - DNA, 12 bp, Artificial Sequence
  Oligonucleotide primer for the detection of SNP TSC0059051
aaaaccccgcct

SEQ ID NO: 371877 - DNA, 12 bp, Artificial Sequence
  Oligonucleotide primer for the detection of SNP TSC0059051
tgtggtattagg

SEQ ID NO: 371878 - DNA, 12 bp, Artificial Sequence
  Oligonucleotide primer for the detection of SNP TSC0059051
tataacactaaa

SEQ ID NO: 371879 - DNA, 12 bp, Artificial Sequence
  Oligonucleotide primer for the detection of SNP TSC0059051
agagtttcgttt

SEQ ID NO: 371880 - DNA, 12 bp, Artificial Sequence
  Oligonucleotide primer for the detection of SNP TSC0059052
tcctcactacac

SEQ ID NO: 371881 - DNA, 12 bp, Artificial Sequence
  Oligonucleotide primer for the detection of SNP TSC0059052
ggtggttgtttt

SEQ ID NO: 371882 - DNA, 12 bp, Artificial Sequence
  Oligonucleotide primer for the detection of SNP TSC0059053
ttgtgttttatg

SEQ ID NO: 371883 - DNA, 12 bp, Artificial Sequence
  Oligonucleotide primer for the detection of SNP TSC0059053
tcgtgttttatg

SEQ ID NO: 371884 - DNA, 12 bp, Artificial Sequence
  Oligonucleotide primer for the detection of SNP TSC0059054
attttttgaatt

SEQ ID NO: 371885 - DNA, 12 bp, Artificial Sequence
  Oligonucleotide primer for the detection of SNP TSC0059054
atttcttaaacc

SEQ ID NO: 371886 - DNA, 12 bp, Artificial Sequence
  Oligonucleotide primer for the detection of SNP TSC0059055
caaaaaattcct

SEQ ID NO: 371887 - DNA, 12 bp, Artificial Sequence
  Oligonucleotide primer for the detection of SNP TSC0059056
ccacctaaacta

SEQ ID NO: 371888 - DNA, 12 bp, Artificial Sequence
  Oligonucleotide primer for the detection of SNP TSC0059056
ccgcctaaacta

SEQ ID NO: 371889 - DNA, 12 bp, Artificial Sequence
  Oligonucleotide primer for the detection of SNP TSC0059056
atttgggtttat

SEQ ID NO: 371890 - DNA, 12 bp, Artificial Sequence
  Oligonucleotide primer for the detection of SNP TSC0059056
atttgggtttac

SEQ ID NO: 371891 - DNA, 12 bp, Artificial Sequence
  Oligonucleotide primer for the detection of SNP TSC0059056
acctaaatccac

SEQ ID NO: 371892 - DNA, 12 bp, Artificial Sequence
  Oligonucleotide primer for the detection of SNP TSC0059056
ttgtttgggttg

SEQ ID NO: 371893 - DNA, 12 bp, Artificial Sequence
  Oligonucleotide primer for the detection of SNP TSC0059056
tcgtttgggttg

SEQ ID NO: 371894 - DNA, 12 bp, Artificial Sequence
  Oligonucleotide primer for the detection of SNP TSC0059057
aaataatattat

SEQ ID NO: 371895 - DNA, 12 bp, Artificial Sequence
  Oligonucleotide primer for the detection of SNP TSC0059057
tttagaaaggta

SEQ ID NO: 371896 - DNA, 12 bp, Artificial Sequence
  Oligonucleotide primer for the detection of SNP TSC0059058
aaacaacattca

SEQ ID NO: 371897 - DNA, 12 bp, Artificial Sequence
  Oligonucleotide primer for the detection of SNP TSC0059058
aaacgacattca

SEQ ID NO: 371898 - DNA, 12 bp, Artificial Sequence
  Oligonucleotide primer for the detection of SNP TSC0059058
ggtattgtattt

SEQ ID NO: 371899 - DNA, 12 bp, Artificial Sequence
  Oligonucleotide primer for the detection of SNP TSC0059058
ggtatcgtattt

SEQ ID NO: 371900 - DNA, 12 bp, Artificial Sequence
  Oligonucleotide primer for the detection of SNP TSC0059058
aaatatcatatc

SEQ ID NO: 371901 - DNA, 12 bp, Artificial Sequence
  Oligonucleotide primer for the detection of SNP TSC0059058
aaatatcgtatc

SEQ ID NO: 371902 - DNA, 12 bp, Artificial Sequence
  Oligonucleotide primer for the detection of SNP TSC0059058
gaggtggtattt

SEQ ID NO: 371903 - DNA, 12 bp, Artificial Sequence
  Oligonucleotide primer for the detection of SNP TSC0059058
gaggcggtattt

SEQ ID NO: 371904 - DNA, 12 bp, Artificial Sequence
  Oligonucleotide primer for the detection of SNP TSC0059059
actcaaatattt

SEQ ID NO: 371905 - DNA, 12 bp, Artificial Sequence
  Oligonucleotide primer for the detection of SNP TSC0059059
tttaaagaaagg

SEQ ID NO: 371906 - DNA, 12 bp, Artificial Sequence
  Oligonucleotide primer for the detection of SNP TSC0059060
aataaaaatggt

SEQ ID NO: 371907 - DNA, 12 bp, Artificial Sequence
  Oligonucleotide primer for the detection of SNP TSC0059062
cacccatactat

SEQ ID NO: 371908 - DNA, 12 bp, Artificial Sequence
  Oligonucleotide primer for the detection of SNP TSC0059062
gttatataatgg

SEQ ID NO: 371909 - DNA, 12 bp, Artificial Sequence
  Oligonucleotide primer for the detection of SNP TSC0059063
attgaagttatt

SEQ ID NO: 371910 - DNA, 12 bp, Artificial Sequence
  Oligonucleotide primer for the detection of SNP TSC0059063
tcattaaaatta

SEQ ID NO: 371911 - DNA, 12 bp, Artificial Sequence
  Oligonucleotide primer for the detection of SNP TSC0059063
tataagaaatag

SEQ ID NO: 371912 - DNA, 12 bp, Artificial Sequence
  Oligonucleotide primer for the detection of SNP TSC0059064
attctttattaa

SEQ ID NO: 371913 - DNA, 12 bp, Artificial Sequence
  Oligonucleotide primer for the detection of SNP TSC0059064
aggaggtatttt

SEQ ID NO: 371914 - DNA, 12 bp, Artificial Sequence
  Oligonucleotide primer for the detection of SNP TSC0059064
tacaaaaaatac

SEQ ID NO: 371915 - DNA, 12 bp, Artificial Sequence
  Oligonucleotide primer for the detection of SNP TSC0059065
ataacataaccc

SEQ ID NO: 371916 - DNA, 12 bp, Artificial Sequence
  Oligonucleotide primer for the detection of SNP TSC0059066
tctaatcctctt

SEQ ID NO: 371917 - DNA, 12 bp, Artificial Sequence
  Oligonucleotide primer for the detection of SNP TSC0059067
caataatactac

SEQ ID NO: 371918 - DNA, 12 bp, Artificial Sequence
  Oligonucleotide primer for the detection of SNP TSC0059067
agtattatagga

SEQ ID NO: 371919 - DNA, 12 bp, Artificial Sequence
  Oligonucleotide primer for the detection of SNP TSC0059068
tacccccccccc

SEQ ID NO: 371920 - DNA, 12 bp, Artificial Sequence
  Oligonucleotide primer for the detection of SNP TSC0059069
cacatctctact

SEQ ID NO: 371921 - DNA, 12 bp, Artificial Sequence
  Oligonucleotide primer for the detection of SNP TSC0059069
cgcatctctact

SEQ ID NO: 371922 - DNA, 12 bp, Artificial Sequence
  Oligonucleotide primer for the detection of SNP TSC0059070
tctattataaac

SEQ ID NO: 371923 - DNA, 12 bp, Artificial Sequence
  Oligonucleotide primer for the detection of SNP TSC0059070
tattggtatata

SEQ ID NO: 371924 - DNA, 12 bp, Artificial Sequence
  Oligonucleotide primer for the detection of SNP TSC0008468
tttatccttttt

SEQ ID NO: 371925 - DNA, 12 bp, Artificial Sequence
  Oligonucleotide primer for the detection of SNP TSC0008468
gttagtaatagt

SEQ ID NO: 371926 - DNA, 12 bp, Artificial Sequence
  Oligonucleotide primer for the detection of SNP TSC0004948
aacaatacaata

SEQ ID NO: 371927 - DNA, 12 bp, Artificial Sequence
  Oligonucleotide primer for the detection of SNP TSC0004948
aatagtatagtg

SEQ ID NO: 371928 - DNA, 12 bp, Artificial Sequence
  Oligonucleotide primer for the detection of SNP TSC0059071
attcacccacct

SEQ ID NO: 371929 - DNA, 12 bp, Artificial Sequence
  Oligonucleotide primer for the detection of SNP TSC0059071
tattttgaaagg

SEQ ID NO: 371930 - DNA, 12 bp, Artificial Sequence
  Oligonucleotide primer for the detection of SNP TSC0059072
agagaataaaaa

SEQ ID NO: 371931 - DNA, 12 bp, Artificial Sequence
  Oligonucleotide primer for the detection of SNP TSC0059072
ggaaatataagt

SEQ ID NO: 371932 - DNA, 12 bp, Artificial Sequence
  Oligonucleotide primer for the detection of SNP TSC0059073
taactttctact

SEQ ID NO: 371933 - DNA, 12 bp, Artificial Sequence
  Oligonucleotide primer for the detection of SNP TSC0059073
atatttttataa

SEQ ID NO: 371934 - DNA, 12 bp, Artificial Sequence
  Oligonucleotide primer for the detection of SNP TSC0004636
acctatacccta

SEQ ID NO: 371935 - DNA, 12 bp, Artificial Sequence
  Oligonucleotide primer for the detection of SNP TSC0004636
catctacctaat

SEQ ID NO: 371936 - DNA, 12 bp, Artificial Sequence
  Oligonucleotide primer for the detection of SNP TSC0004611
cataacaacatt

SEQ ID NO: 371937 - DNA, 12 bp, Artificial Sequence
  Oligonucleotide primer for the detection of SNP TSC0004611
tggtttttgtga

SEQ ID NO: 371938 - DNA, 12 bp, Artificial Sequence
  Oligonucleotide primer for the detection of SNP TSC0059074
tactttctcata

SEQ ID NO: 371939 - DNA, 12 bp, Artificial Sequence
  Oligonucleotide primer for the detection of SNP TSC0059074
agattggtgtgg

SEQ ID NO: 371940 - DNA, 12 bp, Artificial Sequence
  Oligonucleotide primer for the detection of SNP TSC0059074
aaattaatataa

SEQ ID NO: 371941 - DNA, 12 bp, Artificial Sequence
  Oligonucleotide primer for the detection of SNP TSC0059075
agaaaaaataaa

SEQ ID NO: 371942 - DNA, 12 bp, Artificial Sequence
  Oligonucleotide primer for the detection of SNP TSC0059076
aacctctataat

SEQ ID NO: 371943 - DNA, 12 bp, Artificial Sequence
  Oligonucleotide primer for the detection of SNP TSC0059077
aagataaatatt

SEQ ID NO: 371944 - DNA, 12 bp, Artificial Sequence
  Oligonucleotide primer for the detection of SNP TSC0059077
aagataaatatc

SEQ ID NO: 371945 - DNA, 12 bp, Artificial Sequence
  Oligonucleotide primer for the detection of SNP TSC0059077
aaaataaacatc

SEQ ID NO: 371946 - DNA, 12 bp, Artificial Sequence
  Oligonucleotide primer for the detection of SNP TSC0059077
ggattggggaag

SEQ ID NO: 371947 - DNA, 12 bp, Artificial Sequence
  Oligonucleotide primer for the detection of SNP TSC0059078
cctacaaacccc

SEQ ID NO: 371948 - DNA, 12 bp, Artificial Sequence
  Oligonucleotide primer for the detection of SNP TSC0059078
tttatggtttta

SEQ ID NO: 371949 - DNA, 12 bp, Artificial Sequence
  Oligonucleotide primer for the detection of SNP TSC0059078
tccataactcta

SEQ ID NO: 371950 - DNA, 12 bp, Artificial Sequence
  Oligonucleotide primer for the detection of SNP TSC0059079
caaaaactcaat

SEQ ID NO: 371951 - DNA, 12 bp, Artificial Sequence
  Oligonucleotide primer for the detection of SNP TSC0059080
caaaaattccat

SEQ ID NO: 371952 - DNA, 12 bp, Artificial Sequence
  Oligonucleotide primer for the detection of SNP TSC0059080
gatagattaata

SEQ ID NO: 371953 - DNA, 12 bp, Artificial Sequence
  Oligonucleotide primer for the detection of SNP TSC0059081
taaattaaaaat

SEQ ID NO: 371954 - DNA, 12 bp, Artificial Sequence
  Oligonucleotide primer for the detection of SNP TSC0059081
gtgtgttagttg

SEQ ID NO: 371955 - DNA, 12 bp, Artificial Sequence
  Oligonucleotide primer for the detection of SNP TSC0059081
gcgtgttagttg

SEQ ID NO: 371956 - DNA, 12 bp, Artificial Sequence
  Oligonucleotide primer for the detection of SNP TSC0059085
aattcctactaa

SEQ ID NO: 371957 - DNA, 12 bp, Artificial Sequence
  Oligonucleotide primer for the detection of SNP TSC0059085
tatttggatata

SEQ ID NO: 371958 - DNA, 12 bp, Artificial Sequence
  Oligonucleotide primer for the detection of SNP TSC0059086
atttttaccata

SEQ ID NO: 371959 - DNA, 12 bp, Artificial Sequence
  Oligonucleotide primer for the detection of SNP TSC0059086
tatgaaagagat

SEQ ID NO: 371960 - DNA, 12 bp, Artificial Sequence
  Oligonucleotide primer for the detection of SNP TSC0059087
tatgtatggtaa

SEQ ID NO: 371961 - DNA, 12 bp, Artificial Sequence
  Oligonucleotide primer for the detection of SNP TSC0059088
taccactatacc

SEQ ID NO: 371962 - DNA, 12 bp, Artificial Sequence
  Oligonucleotide primer for the detection of SNP TSC0059088
tttaagaggtaa

SEQ ID NO: 371963 - DNA, 12 bp, Artificial Sequence
  Oligonucleotide primer for the detection of SNP TSC0059090
aggatatgattt

SEQ ID NO: 371964 - DNA, 12 bp, Artificial Sequence
  Oligonucleotide primer for the detection of SNP TSC0059090
aaaacataatct

SEQ ID NO: 371965 - DNA, 12 bp, Artificial Sequence
  Oligonucleotide primer for the detection of SNP TSC0059091
ctcatttctttt

SEQ ID NO: 371966 - DNA, 12 bp, Artificial Sequence
  Oligonucleotide primer for the detection of SNP TSC0059091
ctcgtttctttt

SEQ ID NO: 371967 - DNA, 12 bp, Artificial Sequence
  Oligonucleotide primer for the detection of SNP TSC0059091
aatattatgtag

SEQ ID NO: 371968 - DNA, 12 bp, Artificial Sequence
  Oligonucleotide primer for the detection of SNP TSC0004836
cctaccttaacc

SEQ ID NO: 371969 - DNA, 12 bp, Artificial Sequence
  Oligonucleotide primer for the detection of SNP TSC0004836
tagtattttggg

SEQ ID NO: 371970 - DNA, 12 bp, Artificial Sequence
  Oligonucleotide primer for the detection of SNP TSC0059092
aaatctttcacc

SEQ ID NO: 371971 - DNA, 12 bp, Artificial Sequence
  Oligonucleotide primer for the detection of SNP TSC0059092
tagttatggtgg

SEQ ID NO: 371972 - DNA, 12 bp, Artificial Sequence
  Oligonucleotide primer for the detection of SNP TSC0059093
atcaacccacct

SEQ ID NO: 371973 - DNA, 12 bp, Artificial Sequence
  Oligonucleotide primer for the detection of SNP TSC0059094
taagtgtaggtt

SEQ ID NO: 371974 - DNA, 12 bp, Artificial Sequence
  Oligonucleotide primer for the detection of SNP TSC0059094
taaaaagtagtt

SEQ ID NO: 371975 - DNA, 12 bp, Artificial Sequence
  Oligonucleotide primer for the detection of SNP TSC0059095
caaataatcaac

SEQ ID NO: 371976 - DNA, 12 bp, Artificial Sequence
  Oligonucleotide primer for the detection of SNP TSC0059095
acccctacctca

SEQ ID NO: 371977 - DNA, 12 bp, Artificial Sequence
  Oligonucleotide primer for the detection of SNP TSC0059095
tagataattagt

SEQ ID NO: 371978 - DNA, 12 bp, Artificial Sequence
  Oligonucleotide primer for the detection of SNP TSC0059097
aatcactatacc

SEQ ID NO: 371979 - DNA, 12 bp, Artificial Sequence
  Oligonucleotide primer for the detection of SNP TSC0059097
aatcgctatacc

SEQ ID NO: 371980 - DNA, 12 bp, Artificial Sequence
  Oligonucleotide primer for the detection of SNP TSC0059097
tagaataaagag

SEQ ID NO: 371981 - DNA, 12 bp, Artificial Sequence
  Oligonucleotide primer for the detection of SNP TSC0059098
caacttattcta

SEQ ID NO: 371982 - DNA, 12 bp, Artificial Sequence
  Oligonucleotide primer for the detection of SNP TSC0059098
attctactacat

SEQ ID NO: 371983 - DNA, 12 bp, Artificial Sequence
  Oligonucleotide primer for the detection of SNP TSC0059099
tcttctttttct

SEQ ID NO: 371984 - DNA, 12 bp, Artificial Sequence
  Oligonucleotide primer for the detection of SNP TSC0059099
atatttattatg

SEQ ID NO: 371985 - DNA, 12 bp, Artificial Sequence
  Oligonucleotide primer for the detection of SNP TSC0059100
tccaatttcaat

SEQ ID NO: 371986 - DNA, 12 bp, Artificial Sequence
  Oligonucleotide primer for the detection of SNP TSC0059100
agttaaagttaa

SEQ ID NO: 371987 - DNA, 12 bp, Artificial Sequence
  Oligonucleotide primer for the detection of SNP TSC0059101
cttaacaaacat

SEQ ID NO: 371988 - DNA, 12 bp, Artificial Sequence
  Oligonucleotide primer for the detection of SNP TSC0059101
gaaatatgttga

SEQ ID NO: 371989 - DNA, 12 bp, Artificial Sequence
  Oligonucleotide primer for the detection of SNP TSC0059101
tttaatagatat

SEQ ID NO: 371990 - DNA, 12 bp, Artificial Sequence
  Oligonucleotide primer for the detection of SNP TSC0059102
accgaaaaaatc

SEQ ID NO: 371991 - DNA, 12 bp, Artificial Sequence
  Oligonucleotide primer for the detection of SNP TSC0059102
ttgatgggattg

SEQ ID NO: 371992 - DNA, 12 bp, Artificial Sequence
  Oligonucleotide primer for the detection of SNP TSC0059102
ttgatgggatcg

SEQ ID NO: 371993 - DNA, 12 bp, Artificial Sequence
  Oligonucleotide primer for the detection of SNP TSC0000793
tcattattattt

SEQ ID NO: 371994 - DNA, 12 bp, Artificial Sequence
  Oligonucleotide primer for the detection of SNP TSC0000793
agaaatgtaaat

SEQ ID NO: 371995 - DNA, 12 bp, Artificial Sequence
  Oligonucleotide primer for the detection of SNP TSC0009990
ttctcaaactaa

SEQ ID NO: 371996 - DNA, 12 bp, Artificial Sequence
  Oligonucleotide primer for the detection of SNP TSC0009990
taattactcctt

SEQ ID NO: 371997 - DNA, 12 bp, Artificial Sequence
  Oligonucleotide primer for the detection of SNP TSC0009990
tttttaaattga

SEQ ID NO: 371998 - DNA, 12 bp, Artificial Sequence
  Oligonucleotide primer for the detection of SNP TSC0059104
accctaatatcc

SEQ ID NO: 371999 - DNA, 12 bp, Artificial Sequence
  Oligonucleotide primer for the detection of SNP TSC0059104
agagaggaagaa

SEQ ID NO: 372000 - DNA, 12 bp, Artificial Sequence
  Oligonucleotide primer for the detection of SNP TSC0059105
ttaccctccctt

SEQ ID NO: 372001 - DNA, 12 bp, Artificial Sequence
  Oligonucleotide primer for the detection of SNP TSC0001330
cattaaatcatc

SEQ ID NO: 372002 - DNA, 12 bp, Artificial Sequence
  Oligonucleotide primer for the detection of SNP TSC0001330
aggaaaattaga

SEQ ID NO: 372003 - DNA, 12 bp, Artificial Sequence
  Oligonucleotide primer for the detection of SNP TSC0000651
catttctataca

SEQ ID NO: 372004 - DNA, 12 bp, Artificial Sequence
  Oligonucleotide primer for the detection of SNP TSC0059106
tctacttaactt

SEQ ID NO: 372005 - DNA, 12 bp, Artificial Sequence
  Oligonucleotide primer for the detection of SNP TSC0001182
aatatatcattc

SEQ ID NO: 372006 - DNA, 12 bp, Artificial Sequence
  Oligonucleotide primer for the detection of SNP TSC0001182
taaatgtgaaag

SEQ ID NO: 372007 - DNA, 12 bp, Artificial Sequence
  Oligonucleotide primer for the detection of SNP TSC0000742
taatttttaaca

SEQ ID NO: 372008 - DNA, 12 bp, Artificial Sequence
  Oligonucleotide primer for the detection of SNP TSC0000742
ttattaacactt

SEQ ID NO: 372009 - DNA, 12 bp, Artificial Sequence
  Oligonucleotide primer for the detection of SNP TSC0000742
tgatttttaata

SEQ ID NO: 372010 - DNA, 12 bp, Artificial Sequence
  Oligonucleotide primer for the detection of SNP TSC0059110
taatcttaaaat

SEQ ID NO: 372011 - DNA, 12 bp, Artificial Sequence
  Oligonucleotide primer for the detection of SNP TSC0059110
ttggaggttggg

SEQ ID NO: 372012 - DNA, 12 bp, Artificial Sequence
  Oligonucleotide primer for the detection of SNP TSC0000433
agtttggttgtg

SEQ ID NO: 372013 - DNA, 12 bp, Artificial Sequence
  Oligonucleotide primer for the detection of SNP TSC0000434
aaataacaaacc

SEQ ID NO: 372014 - DNA, 12 bp, Artificial Sequence
  Oligonucleotide primer for the detection of SNP TSC0000774
ccttcctacctt

SEQ ID NO: 372015 - DNA, 12 bp, Artificial Sequence
  Oligonucleotide primer for the detection of SNP TSC0000774
gaaagaaaggaa

SEQ ID NO: 372016 - DNA, 12 bp, Artificial Sequence
  Oligonucleotide primer for the detection of SNP TSC0001090
gttgtttattgt

SEQ ID NO: 372017 - DNA, 12 bp, Artificial Sequence
  Oligonucleotide primer for the detection of SNP TSC0001090
actacctactac

SEQ ID NO: 372018 - DNA, 12 bp, Artificial Sequence
  Oligonucleotide primer for the detection of SNP TSC0001090
agatatttgtga

SEQ ID NO: 372019 - DNA, 12 bp, Artificial Sequence
  Oligonucleotide primer for the detection of SNP TSC0059116
aaacccttcatt

SEQ ID NO: 372020 - DNA, 12 bp, Artificial Sequence
  Oligonucleotide primer for the detection of SNP TSC0059116
tgtagtaggatg

SEQ ID NO: 372021 - DNA, 12 bp, Artificial Sequence
  Oligonucleotide primer for the detection of SNP TSC0059117
aaaaacctccat

SEQ ID NO: 372022 - DNA, 12 bp, Artificial Sequence
  Oligonucleotide primer for the detection of SNP TSC0059117
ttggtttaggtg

SEQ ID NO: 372023 - DNA, 12 bp, Artificial Sequence
  Oligonucleotide primer for the detection of SNP TSC0000278
atttacataaat

SEQ ID NO: 372024 - DNA, 12 bp, Artificial Sequence
  Oligonucleotide primer for the detection of SNP TSC0000278
tatttttgggtg

SEQ ID NO: 372025 - DNA, 12 bp, Artificial Sequence
  Oligonucleotide primer for the detection of SNP TSC0000278
tatttttgggcg

SEQ ID NO: 372026 - DNA, 12 bp, Artificial Sequence
  Oligonucleotide primer for the detection of SNP TSC0000161
atactaataaca

SEQ ID NO: 372027 - DNA, 12 bp, Artificial Sequence
  Oligonucleotide primer for the detection of SNP TSC0000161
atactaataacg

SEQ ID NO: 372028 - DNA, 12 bp, Artificial Sequence
  Oligonucleotide primer for the detection of SNP TSC0000161
acccatcaacat

SEQ ID NO: 372029 - DNA, 12 bp, Artificial Sequence
  Oligonucleotide primer for the detection of SNP TSC0000161
gtgttagtgatg

SEQ ID NO: 372030 - DNA, 12 bp, Artificial Sequence
  Oligonucleotide primer for the detection of SNP TSC0000161
gtgttagtgacg

SEQ ID NO: 372031 - DNA, 12 bp, Artificial Sequence
  Oligonucleotide primer for the detection of SNP TSC0000919
tctaaactaatc

SEQ ID NO: 372032 - DNA, 12 bp, Artificial Sequence
  Oligonucleotide primer for the detection of SNP TSC0000919
aatttgttaagg

SEQ ID NO: 372033 - DNA, 12 bp, Artificial Sequence
  Oligonucleotide primer for the detection of SNP TSC0059123
ttattataattg

SEQ ID NO: 372034 - DNA, 12 bp, Artificial Sequence
  Oligonucleotide primer for the detection of SNP TSC0059123
ccaccataatta

SEQ ID NO: 372035 - DNA, 12 bp, Artificial Sequence
  Oligonucleotide primer for the detection of SNP TSC0059123
ggtagtatgagg

SEQ ID NO: 372036 - DNA, 12 bp, Artificial Sequence
  Oligonucleotide primer for the detection of SNP TSC0000977
tatgtgtaatat

SEQ ID NO: 372037 - DNA, 12 bp, Artificial Sequence
  Oligonucleotide primer for the detection of SNP TSC0000977
gtttttagtatg

SEQ ID NO: 372038 - DNA, 12 bp, Artificial Sequence
  Oligonucleotide primer for the detection of SNP TSC0000503
caattcccctcc

SEQ ID NO: 372039 - DNA, 12 bp, Artificial Sequence
  Oligonucleotide primer for the detection of SNP TSC0000503
ggtaagagagta

SEQ ID NO: 372040 - DNA, 12 bp, Artificial Sequence
  Oligonucleotide primer for the detection of SNP TSC0000326
acaattctctaa

SEQ ID NO: 372041 - DNA, 12 bp, Artificial Sequence
  Oligonucleotide primer for the detection of SNP TSC0000198
tcatcacaaaat

SEQ ID NO: 372042 - DNA, 12 bp, Artificial Sequence
  Oligonucleotide primer for the detection of SNP TSC0000198
atgtttagtaaa

SEQ ID NO: 372043 - DNA, 12 bp, Artificial Sequence
  Oligonucleotide primer for the detection of SNP TSC0059132
attcctataact

SEQ ID NO: 372044 - DNA, 12 bp, Artificial Sequence
  Oligonucleotide primer for the detection of SNP TSC0059132
ttaagatttttg

SEQ ID NO: 372045 - DNA, 12 bp, Artificial Sequence
  Oligonucleotide primer for the detection of SNP TSC0059133
cccaacaccaaa

SEQ ID NO: 372046 - DNA, 12 bp, Artificial Sequence
  Oligonucleotide primer for the detection of SNP TSC0059133
tgatttaatggg

SEQ ID NO: 372047 - DNA, 12 bp, Artificial Sequence
  Oligonucleotide primer for the detection of SNP TSC0059133
cgatttaatggg

SEQ ID NO: 372048 - DNA, 12 bp, Artificial Sequence
  Oligonucleotide primer for the detection of SNP TSC0059133
caatctaataaa

SEQ ID NO: 372049 - DNA, 12 bp, Artificial Sequence
  Oligonucleotide primer for the detection of SNP TSC0059133
cgatctaataaa

SEQ ID NO: 372050 - DNA, 12 bp, Artificial Sequence
  Oligonucleotide primer for the detection of SNP TSC0059133
ttttagtattag

SEQ ID NO: 372051 - DNA, 12 bp, Artificial Sequence
  Oligonucleotide primer for the detection of SNP TSC0059134
tttactttctat

SEQ ID NO: 372052 - DNA, 12 bp, Artificial Sequence
  Oligonucleotide primer for the detection of SNP TSC0059134
gtgggatgaaga

SEQ ID NO: 372053 - DNA, 12 bp, Artificial Sequence
  Oligonucleotide primer for the detection of SNP TSC0059135
tctaaatctcaa

SEQ ID NO: 372054 - DNA, 12 bp, Artificial Sequence
  Oligonucleotide primer for the detection of SNP TSC0059135
aataagttaaat

SEQ ID NO: 372055 - DNA, 12 bp, Artificial Sequence
  Oligonucleotide primer for the detection of SNP TSC0059137
acataacaaact

SEQ ID NO: 372056 - DNA, 12 bp, Artificial Sequence
  Oligonucleotide primer for the detection of SNP TSC0059137
tagtagtttata

SEQ ID NO: 372057 - DNA, 12 bp, Artificial Sequence
  Oligonucleotide primer for the detection of SNP TSC0059138
taacacttactt

SEQ ID NO: 372058 - DNA, 12 bp, Artificial Sequence
  Oligonucleotide primer for the detection of SNP TSC0059138
aaagtttagata

SEQ ID NO: 372059 - DNA, 12 bp, Artificial Sequence
  Oligonucleotide primer for the detection of SNP TSC0059139
aaaatacacact

SEQ ID NO: 372060 - DNA, 12 bp, Artificial Sequence
  Oligonucleotide primer for the detection of SNP TSC0059139
gtttaaggatta

SEQ ID NO: 372061 - DNA, 12 bp, Artificial Sequence
  Oligonucleotide primer for the detection of SNP TSC0059140
attttctcttcc

SEQ ID NO: 372062 - DNA, 12 bp, Artificial Sequence
  Oligonucleotide primer for the detection of SNP TSC0059142
catatcataata

SEQ ID NO: 372063 - DNA, 12 bp, Artificial Sequence
  Oligonucleotide primer for the detection of SNP TSC0059142
tatgtgataagt

SEQ ID NO: 372064 - DNA, 12 bp, Artificial Sequence
  Oligonucleotide primer for the detection of SNP TSC0059142
catataataaat

SEQ ID NO: 372065 - DNA, 12 bp, Artificial Sequence
  Oligonucleotide primer for the detection of SNP TSC0059142
tatattatgata

SEQ ID NO: 372066 - DNA, 12 bp, Artificial Sequence
  Oligonucleotide primer for the detection of SNP TSC0059143
tggtaatttgag

SEQ ID NO: 372067 - DNA, 12 bp, Artificial Sequence
  Oligonucleotide primer for the detection of SNP TSC0059144
atctaccacata

SEQ ID NO: 372068 - DNA, 12 bp, Artificial Sequence
  Oligonucleotide primer for the detection of SNP TSC0059144
taccaaaactcc

SEQ ID NO: 372069 - DNA, 12 bp, Artificial Sequence
  Oligonucleotide primer for the detection of SNP TSC0059144
atttgttatatg

SEQ ID NO: 372070 - DNA, 12 bp, Artificial Sequence
  Oligonucleotide primer for the detection of SNP TSC0059145
taacatacaacc

SEQ ID NO: 372071 - DNA, 12 bp, Artificial Sequence
  Oligonucleotide primer for the detection of SNP TSC0059145
attaaaacccta

SEQ ID NO: 372072 - DNA, 12 bp, Artificial Sequence
  Oligonucleotide primer for the detection of SNP TSC0059145
tagtatatagtt

SEQ ID NO: 372073 - DNA, 12 bp, Artificial Sequence
  Oligonucleotide primer for the detection of SNP TSC0059152
tggtaattaaga

SEQ ID NO: 372074 - DNA, 12 bp, Artificial Sequence
  Oligonucleotide primer for the detection of SNP TSC0059154
gttaatgttttt

SEQ ID NO: 372075 - DNA, 12 bp, Artificial Sequence
  Oligonucleotide primer for the detection of SNP TSC0059154
agggagagatta

SEQ ID NO: 372076 - DNA, 12 bp, Artificial Sequence
  Oligonucleotide primer for the detection of SNP TSC0059160
tattctaaaaaa

SEQ ID NO: 372077 - DNA, 12 bp, Artificial Sequence
  Oligonucleotide primer for the detection of SNP TSC0059160
aaattttgaaaa

SEQ ID NO: 372078 - DNA, 12 bp, Artificial Sequence
  Oligonucleotide primer for the detection of SNP TSC0059164
ttttattatgaa

SEQ ID NO: 372079 - DNA, 12 bp, Artificial Sequence
  Oligonucleotide primer for the detection of SNP TSC0059165
aatttatgttta

SEQ ID NO: 372080 - DNA, 12 bp, Artificial Sequence
  Oligonucleotide primer for the detection of SNP TSC0059166
ctctcctatacc

SEQ ID NO: 372081 - DNA, 12 bp, Artificial Sequence
  Oligonucleotide primer for the detection of SNP TSC0059166
atagtaaaaatg

SEQ ID NO: 372082 - DNA, 12 bp, Artificial Sequence
  Oligonucleotide primer for the detection of SNP TSC0059167
caaattttaccc

SEQ ID NO: 372083 - DNA, 12 bp, Artificial Sequence
  Oligonucleotide primer for the detection of SNP TSC0059167
tattgtaaattg

SEQ ID NO: 372084 - DNA, 12 bp, Artificial Sequence
  Oligonucleotide primer for the detection of SNP TSC0059170
cttccttaatat

SEQ ID NO: 372085 - DNA, 12 bp, Artificial Sequence
  Oligonucleotide primer for the detection of SNP TSC0059171
attaatatctct

SEQ ID NO: 372086 - DNA, 12 bp, Artificial Sequence
  Oligonucleotide primer for the detection of SNP TSC0059171
tttattagataa

SEQ ID NO: 372087 - DNA, 12 bp, Artificial Sequence
  Oligonucleotide primer for the detection of SNP TSC0059173
gtgatgttagag

SEQ ID NO: 372088 - DNA, 12 bp, Artificial Sequence
  Oligonucleotide primer for the detection of SNP TSC0059174
ccaattaaacat

SEQ ID NO: 372089 - DNA, 12 bp, Artificial Sequence
  Oligonucleotide primer for the detection of SNP TSC0059174
tttagtattaaa

SEQ ID NO: 372090 - DNA, 12 bp, Artificial Sequence
  Oligonucleotide primer for the detection of SNP TSC0059175
ttcctcacttat

SEQ ID NO: 372091 - DNA, 12 bp, Artificial Sequence
  Oligonucleotide primer for the detection of SNP TSC0059175
attccccaaaaa

SEQ ID NO: 372092 - DNA, 12 bp, Artificial Sequence
  Oligonucleotide primer for the detection of SNP TSC0059184
ttgagatgagaa

SEQ ID NO: 372093 - DNA, 12 bp, Artificial Sequence
  Oligonucleotide primer for the detection of SNP TSC0059184
gattaagatttt

SEQ ID NO: 372094 - DNA, 12 bp, Artificial Sequence
  Oligonucleotide primer for the detection of SNP TSC0059185
ctaaaaatacac

SEQ ID NO: 372095 - DNA, 12 bp, Artificial Sequence
  Oligonucleotide primer for the detection of SNP TSC0059185
atttatagtgga

SEQ ID NO: 372096 - DNA, 12 bp, Artificial Sequence
  Oligonucleotide primer for the detection of SNP TSC0059185
atttacaataaa

SEQ ID NO: 372097 - DNA, 12 bp, Artificial Sequence
  Oligonucleotide primer for the detection of SNP TSC0059185
ttagagatgtat

SEQ ID NO: 372098 - DNA, 12 bp, Artificial Sequence
  Oligonucleotide primer for the detection of SNP TSC0059186
tcccctaataaa

SEQ ID NO: 372099 - DNA, 12 bp, Artificial Sequence
  Oligonucleotide primer for the detection of SNP TSC0059186
ttttgtaaagtt

SEQ ID NO: 372100 - DNA, 12 bp, Artificial Sequence
  Oligonucleotide primer for the detection of SNP TSC0059188
acaaatctacat

SEQ ID NO: 372101 - DNA, 12 bp, Artificial Sequence
  Oligonucleotide primer for the detection of SNP TSC0059189
catattaacaac

SEQ ID NO: 372102 - DNA, 12 bp, Artificial Sequence
  Oligonucleotide primer for the detection of SNP TSC0059189
agatatataata

SEQ ID NO: 372103 - DNA, 12 bp, Artificial Sequence
  Oligonucleotide primer for the detection of SNP TSC0059191
accaaaaaccta

SEQ ID NO: 372104 - DNA, 12 bp, Artificial Sequence
  Oligonucleotide primer for the detection of SNP TSC0059191
ccataacaacac

SEQ ID NO: 372105 - DNA, 12 bp, Artificial Sequence
  Oligonucleotide primer for the detection of SNP TSC0059191
gttaaaagttta

SEQ ID NO: 372106 - DNA, 12 bp, Artificial Sequence
  Oligonucleotide primer for the detection of SNP TSC0059193
ccaatcactacc

SEQ ID NO: 372107 - DNA, 12 bp, Artificial Sequence
  Oligonucleotide primer for the detection of SNP TSC0059193
tgtggaaaatta

SEQ ID NO: 372108 - DNA, 12 bp, Artificial Sequence
  Oligonucleotide primer for the detection of SNP TSC0059194
gaaattatatta

SEQ ID NO: 372109 - DNA, 12 bp, Artificial Sequence
  Oligonucleotide primer for the detection of SNP TSC0059194
aaatcatatcaa

SEQ ID NO: 372110 - DNA, 12 bp, Artificial Sequence
  Oligonucleotide primer for the detection of SNP TSC0059194
tttaaggtaaga

SEQ ID NO: 372111 - DNA, 12 bp, Artificial Sequence
  Oligonucleotide primer for the detection of SNP TSC0059197
ttctctcaattt

SEQ ID NO: 372112 - DNA, 12 bp, Artificial Sequence
  Oligonucleotide primer for the detection of SNP TSC0059197
agaggaaataag

SEQ ID NO: 372113 - DNA, 12 bp, Artificial Sequence
  Oligonucleotide primer for the detection of SNP TSC0059200
taatataggagg

SEQ ID NO: 372114 - DNA, 12 bp, Artificial Sequence
  Oligonucleotide primer for the detection of SNP TSC0059205
actattatatac

SEQ ID NO: 372115 - DNA, 12 bp, Artificial Sequence
  Oligonucleotide primer for the detection of SNP TSC0059205
gtaaaagttatg

SEQ ID NO: 372116 - DNA, 12 bp, Artificial Sequence
  Oligonucleotide primer for the detection of SNP TSC0059206
taataatcttta

SEQ ID NO: 372117 - DNA, 12 bp, Artificial Sequence
  Oligonucleotide primer for the detection of SNP TSC0059206
tagtggttttat

SEQ ID NO: 372118 - DNA, 12 bp, Artificial Sequence
  Oligonucleotide primer for the detection of SNP TSC0059206
aataatttcaca

SEQ ID NO: 372119 - DNA, 12 bp, Artificial Sequence
  Oligonucleotide primer for the detection of SNP TSC0059206
ataatttttgtt

SEQ ID NO: 372120 - DNA, 12 bp, Artificial Sequence
  Oligonucleotide primer for the detection of SNP TSC0059210
atatttaatatt

SEQ ID NO: 372121 - DNA, 12 bp, Artificial Sequence
  Oligonucleotide primer for the detection of SNP TSC0059210
tatggttgtatg

SEQ ID NO: 372122 - DNA, 12 bp, Artificial Sequence
  Oligonucleotide primer for the detection of SNP TSC0059213
acccaatctatc

SEQ ID NO: 372123 - DNA, 12 bp, Artificial Sequence
  Oligonucleotide primer for the detection of SNP TSC0059214
aacaattaaaaa

SEQ ID NO: 372124 - DNA, 12 bp, Artificial Sequence
  Oligonucleotide primer for the detection of SNP TSC0059214
atttgtatttta

SEQ ID NO: 372125 - DNA, 12 bp, Artificial Sequence
  Oligonucleotide primer for the detection of SNP TSC0059214
atttacatttca

SEQ ID NO: 372126 - DNA, 12 bp, Artificial Sequence
  Oligonucleotide primer for the detection of SNP TSC0059214
aataattagaaa

SEQ ID NO: 372127 - DNA, 12 bp, Artificial Sequence
  Oligonucleotide primer for the detection of SNP TSC0059221
tttataatcacc

SEQ ID NO: 372128 - DNA, 12 bp, Artificial Sequence
  Oligonucleotide primer for the detection of SNP TSC0059221
aaaatgatattc

SEQ ID NO: 372129 - DNA, 12 bp, Artificial Sequence
  Oligonucleotide primer for the detection of SNP TSC0059221
tttgtaattatt

SEQ ID NO: 372130 - DNA, 12 bp, Artificial Sequence
  Oligonucleotide primer for the detection of SNP TSC0059224
ttaattgttttg

SEQ ID NO: 372131 - DNA, 12 bp, Artificial Sequence
  Oligonucleotide primer for the detection of SNP TSC0059224
ttaatcgttttg

SEQ ID NO: 372132 - DNA, 12 bp, Artificial Sequence
  Oligonucleotide primer for the detection of SNP TSC0059225
aaatccacaata

SEQ ID NO: 372133 - DNA, 12 bp, Artificial Sequence
  Oligonucleotide primer for the detection of SNP TSC0059225
aaatccacgata

SEQ ID NO: 372134 - DNA, 12 bp, Artificial Sequence
  Oligonucleotide primer for the detection of SNP TSC0059225
ttatggtatagt

SEQ ID NO: 372135 - DNA, 12 bp, Artificial Sequence
  Oligonucleotide primer for the detection of SNP TSC0059225
ttacggtatagt

SEQ ID NO: 372136 - DNA, 12 bp, Artificial Sequence
  Oligonucleotide primer for the detection of SNP TSC0059225
ttacaatataat

SEQ ID NO: 372137 - DNA, 12 bp, Artificial Sequence
  Oligonucleotide primer for the detection of SNP TSC0059225
ttacgatataat

SEQ ID NO: 372138 - DNA, 12 bp, Artificial Sequence
  Oligonucleotide primer for the detection of SNP TSC0059225
gagtttatggta

SEQ ID NO: 372139 - DNA, 12 bp, Artificial Sequence
  Oligonucleotide primer for the detection of SNP TSC0059225
gagtttacggta

SEQ ID NO: 372140 - DNA, 12 bp, Artificial Sequence
  Oligonucleotide primer for the detection of SNP TSC0006892
ttatagaaatgt

SEQ ID NO: 372141 - DNA, 12 bp, Artificial Sequence
  Oligonucleotide primer for the detection of SNP TSC0006892
ttacaaaaatac

SEQ ID NO: 372142 - DNA, 12 bp, Artificial Sequence
  Oligonucleotide primer for the detection of SNP TSC0006892
tttgtgtgtgtg

SEQ ID NO: 372143 - DNA, 12 bp, Artificial Sequence
  Oligonucleotide primer for the detection of SNP TSC0009053
cccaaaaccatc

SEQ ID NO: 372144 - DNA, 12 bp, Artificial Sequence
  Oligonucleotide primer for the detection of SNP TSC0009053
cccaaaaccgtc

SEQ ID NO: 372145 - DNA, 12 bp, Artificial Sequence
  Oligonucleotide primer for the detection of SNP TSC0009053
cccgaaaccatc

SEQ ID NO: 372146 - DNA, 12 bp, Artificial Sequence
  Oligonucleotide primer for the detection of SNP TSC0009053
cccgaaaccgtc

SEQ ID NO: 372147 - DNA, 12 bp, Artificial Sequence
  Oligonucleotide primer for the detection of SNP TSC0009053
atgttaattaag

SEQ ID NO: 372148 - DNA, 12 bp, Artificial Sequence
  Oligonucleotide primer for the detection of SNP TSC0009053
acgttaattaag

SEQ ID NO: 372149 - DNA, 12 bp, Artificial Sequence
  Oligonucleotide primer for the detection of SNP TSC0009053
ctaaccaaaaaa

SEQ ID NO: 372150 - DNA, 12 bp, Artificial Sequence
  Oligonucleotide primer for the detection of SNP TSC0009053
tttgaaattgtt

SEQ ID NO: 372151 - DNA, 12 bp, Artificial Sequence
  Oligonucleotide primer for the detection of SNP TSC0009053
ttcgaaattgtt

SEQ ID NO: 372152 - DNA, 12 bp, Artificial Sequence
  Oligonukleotid-Primer
tttgaaatcgtt

SEQ ID NO: 372153 - DNA, 12 bp, Artificial Sequence
  Oligonucleotide primer for the detection of SNP TSC0009053
tttgaaattgtc

SEQ ID NO: 372154 - DNA, 12 bp, Artificial Sequence
  Oligonucleotide primer for the detection of SNP TSC0009053
ttcgaaatcgtt

SEQ ID NO: 372155 - DNA, 12 bp, Artificial Sequence
  Oligonucleotide primer for the detection of SNP TSC0009053
ttcgaaattgtc

SEQ ID NO: 372156 - DNA, 12 bp, Artificial Sequence
  Oligonucleotide primer for the detection of SNP TSC0009053
tttgaaatcgtc

SEQ ID NO: 372157 - DNA, 12 bp, Artificial Sequence
  Oligonucleotide primer for the detection of SNP TSC0009053
ttcgaaatcgtc

SEQ ID NO: 372158 - DNA, 12 bp, Artificial Sequence
  Oligonucleotide primer for the detection of SNP TSC0059226
ttcaatccaaaa

SEQ ID NO: 372159 - DNA, 12 bp, Artificial Sequence
  Oligonucleotide primer for the detection of SNP TSC0059226
gtggaaggaggt

SEQ ID NO: 372160 - DNA, 12 bp, Artificial Sequence
  Oligonucleotide primer for the detection of SNP TSC0059227
taaactcaaaaa

SEQ ID NO: 372161 - DNA, 12 bp, Artificial Sequence
  Oligonucleotide primer for the detection of SNP TSC0059227
tcttatttatat

SEQ ID NO: 372162 - DNA, 12 bp, Artificial Sequence
  Oligonucleotide primer for the detection of SNP TSC0059227
taaatttaaaga

SEQ ID NO: 372163 - DNA, 12 bp, Artificial Sequence
  Oligonucleotide primer for the detection of SNP TSC0059228
caataataaact

SEQ ID NO: 372164 - DNA, 12 bp, Artificial Sequence
  Oligonucleotide primer for the detection of SNP TSC0059229
ctttttaaaatc

SEQ ID NO: 372165 - DNA, 12 bp, Artificial Sequence
  Oligonucleotide primer for the detection of SNP TSC0059229
agtatatgataa

SEQ ID NO: 372166 - DNA, 12 bp, Artificial Sequence
  Oligonucleotide primer for the detection of SNP TSC0059229
ttttttgaaatc

SEQ ID NO: 372167 - DNA, 12 bp, Artificial Sequence
  Oligonucleotide primer for the detection of SNP TSC0059232
atatctaatctt

SEQ ID NO: 372168 - DNA, 12 bp, Artificial Sequence
  Oligonucleotide primer for the detection of SNP TSC0059232
taaaaatgggta

SEQ ID NO: 372169 - DNA, 12 bp, Artificial Sequence
  Oligonucleotide primer for the detection of SNP TSC0059232
atatttggtttt

SEQ ID NO: 372170 - DNA, 12 bp, Artificial Sequence
  Oligonucleotide primer for the detection of SNP TSC0059233
gggtataagatt

SEQ ID NO: 372171 - DNA, 12 bp, Artificial Sequence
  Oligonucleotide primer for the detection of SNP TSC0059233
tggtgagatatt

SEQ ID NO: 372172 - DNA, 12 bp, Artificial Sequence
  Oligonucleotide primer for the detection of SNP TSC0006304
tcttaaattacc

SEQ ID NO: 372173 - DNA, 12 bp, Artificial Sequence
  Oligonucleotide primer for the detection of SNP TSC0006304
aaattaggtttg

SEQ ID NO: 372174 - DNA, 12 bp, Artificial Sequence
  Oligonucleotide primer for the detection of SNP TSC0059243
aattataccact

SEQ ID NO: 372175 - DNA, 12 bp, Artificial Sequence
  Oligonucleotide primer for the detection of SNP TSC0059243
ttaggttggaat

SEQ ID NO: 372176 - DNA, 12 bp, Artificial Sequence
  Oligonucleotide primer for the detection of SNP TSC0059244
accaaaactctc

SEQ ID NO: 372177 - DNA, 12 bp, Artificial Sequence
  Oligonucleotide primer for the detection of SNP TSC0059244
accgaaactctc

SEQ ID NO: 372178 - DNA, 12 bp, Artificial Sequence
  Oligonucleotide primer for the detection of SNP TSC0059244
gtgttgagttag

SEQ ID NO: 372179 - DNA, 12 bp, Artificial Sequence
  Oligonucleotide primer for the detection of SNP TSC0059245
aattatctaata

SEQ ID NO: 372180 - DNA, 12 bp, Artificial Sequence
  Oligonucleotide primer for the detection of SNP TSC0059245
tttatttgattt

SEQ ID NO: 372181 - DNA, 12 bp, Artificial Sequence
  Oligonucleotide primer for the detection of SNP TSC0059245
tcacctaattca

SEQ ID NO: 372182 - DNA, 12 bp, Artificial Sequence
  Oligonucleotide primer for the detection of SNP TSC0059245
ggattgtttgat

SEQ ID NO: 372183 - DNA, 12 bp, Artificial Sequence
  Oligonucleotide primer for the detection of SNP TSC0059252
aaactacaatcc

SEQ ID NO: 372184 - DNA, 12 bp, Artificial Sequence
  Oligonucleotide primer for the detection of SNP TSC0059252
ggtaggtttatg

SEQ ID NO: 372185 - DNA, 12 bp, Artificial Sequence
  Oligonucleotide primer for the detection of SNP TSC0059252
ggtaggtttacg

SEQ ID NO: 372186 - DNA, 12 bp, Artificial Sequence
  Oligonucleotide primer for the detection of SNP TSC0059258
ttaattatatga

SEQ ID NO: 372187 - DNA, 12 bp, Artificial Sequence
  Oligonucleotide primer for the detection of SNP TSC0059258
tcaaccacataa

SEQ ID NO: 372188 - DNA, 12 bp, Artificial Sequence
  Oligonucleotide primer for the detection of SNP TSC0059258
aatataggatgt

SEQ ID NO: 372189 - DNA, 12 bp, Artificial Sequence
  Oligonucleotide primer for the detection of SNP TSC0059258
aatataggatgc

SEQ ID NO: 372190 - DNA, 12 bp, Artificial Sequence
  Oligonucleotide primer for the detection of SNP TSC0059259
acaactataaac

SEQ ID NO: 372191 - DNA, 12 bp, Artificial Sequence
  Oligonucleotide primer for the detection of SNP TSC0059260
ccaaactaccct

SEQ ID NO: 372192 - DNA, 12 bp, Artificial Sequence
  Oligonucleotide primer for the detection of SNP TSC0059260
attaaggtataa

SEQ ID NO: 372193 - DNA, 12 bp, Artificial Sequence
  Oligonucleotide primer for the detection of SNP TSC0059261
taattccaaaat

SEQ ID NO: 372194 - DNA, 12 bp, Artificial Sequence
  Oligonucleotide primer for the detection of SNP TSC0059262
catttaatcaaa

SEQ ID NO: 372195 - DNA, 12 bp, Artificial Sequence
  Oligonucleotide primer for the detection of SNP TSC0059263
tctattttctac

SEQ ID NO: 372196 - DNA, 12 bp, Artificial Sequence
  Oligonucleotide primer for the detection of SNP TSC0059264
tttgtttgttga

SEQ ID NO: 372197 - DNA, 12 bp, Artificial Sequence
  Oligonucleotide primer for the detection of SNP TSC0059264
ttcgtttgttga

SEQ ID NO: 372198 - DNA, 12 bp, Artificial Sequence
  Oligonucleotide primer for the detection of SNP TSC0059264
tccatttattaa

SEQ ID NO: 372199 - DNA, 12 bp, Artificial Sequence
  Oligonucleotide primer for the detection of SNP TSC0059264
tccgtttattaa

SEQ ID NO: 372200 - DNA, 12 bp, Artificial Sequence
  Oligonucleotide primer for the detection of SNP TSC0059264
aagggtagtttt

SEQ ID NO: 372201 - DNA, 12 bp, Artificial Sequence
  Oligonucleotide primer for the detection of SNP TSC0059265
attcaaaaattc

SEQ ID NO: 372202 - DNA, 12 bp, Artificial Sequence
  Oligonucleotide primer for the detection of SNP TSC0059267
taaacacacata

SEQ ID NO: 372203 - DNA, 12 bp, Artificial Sequence
  Oligonucleotide primer for the detection of SNP TSC0059267
gtgtaaggtgtg

SEQ ID NO: 372204 - DNA, 12 bp, Artificial Sequence
  Oligonucleotide primer for the detection of SNP TSC0059267
ggatatatatat

SEQ ID NO: 372205 - DNA, 12 bp, Artificial Sequence
  Oligonucleotide primer for the detection of SNP TSC0059268
aattttttttca

SEQ ID NO: 372206 - DNA, 12 bp, Artificial Sequence
  Oligonucleotide primer for the detection of SNP TSC0059268
tagataatttgt

SEQ ID NO: 372207 - DNA, 12 bp, Artificial Sequence
  Oligonucleotide primer for the detection of SNP TSC0059268
taaataacttat

SEQ ID NO: 372208 - DNA, 12 bp, Artificial Sequence
  Oligonucleotide primer for the detection of SNP TSC0059272
acataaatttat

SEQ ID NO: 372209 - DNA, 12 bp, Artificial Sequence
  Oligonucleotide primer for the detection of SNP TSC0059272
agggttataaga

SEQ ID NO: 372210 - DNA, 12 bp, Artificial Sequence
  Oligonucleotide primer for the detection of SNP TSC0059273
aaggttttgtat

SEQ ID NO: 372211 - DNA, 12 bp, Artificial Sequence
  Oligonucleotide primer for the detection of SNP TSC0059273
aaaattctatat

SEQ ID NO: 372212 - DNA, 12 bp, Artificial Sequence
  Oligonucleotide primer for the detection of SNP TSC0059273
atagagtagggg

SEQ ID NO: 372213 - DNA, 12 bp, Artificial Sequence
  Oligonucleotide primer for the detection of SNP TSC0059274
taataatagata

SEQ ID NO: 372214 - DNA, 12 bp, Artificial Sequence
  Oligonucleotide primer for the detection of SNP TSC0059275
gtatatatatta

SEQ ID NO: 372215 - DNA, 12 bp, Artificial Sequence
  Oligonucleotide primer for the detection of SNP TSC0059276
cctatctatact

SEQ ID NO: 372216 - DNA, 12 bp, Artificial Sequence
  Oligonucleotide primer for the detection of SNP TSC0059276
agttgatttttg

SEQ ID NO: 372217 - DNA, 12 bp, Artificial Sequence
  Oligonucleotide primer for the detection of SNP TSC0059277
ataaaccctatc

SEQ ID NO: 372218 - DNA, 12 bp, Artificial Sequence
  Oligonucleotide primer for the detection of SNP TSC0059277
tgtgtttttagt

SEQ ID NO: 372219 - DNA, 12 bp, Artificial Sequence
  Oligonucleotide primer for the detection of SNP TSC0059277
taaattttgttt

SEQ ID NO: 372220 - DNA, 12 bp, Artificial Sequence
  Oligonucleotide primer for the detection of SNP TSC0059278
cgataactcaca

SEQ ID NO: 372221 - DNA, 12 bp, Artificial Sequence
  Oligonucleotide primer for the detection of SNP TSC0059278
cggtggtttata

SEQ ID NO: 372222 - DNA, 12 bp, Artificial Sequence
  Oligonucleotide primer for the detection of SNP TSC0006527
ttatctattttc

SEQ ID NO: 372223 - DNA, 12 bp, Artificial Sequence
  Oligonucleotide primer for the detection of SNP TSC0006527
gtaattatttaa

SEQ ID NO: 372224 - DNA, 12 bp, Artificial Sequence
  Oligonucleotide primer for the detection of SNP TSC0059279
ctcaattcttta

SEQ ID NO: 372225 - DNA, 12 bp, Artificial Sequence
  Oligonucleotide primer for the detection of SNP TSC0059279
tttttggatttc

SEQ ID NO: 372226 - DNA, 12 bp, Artificial Sequence
  Oligonucleotide primer for the detection of SNP TSC0059279
acttttcttaaa

SEQ ID NO: 372227 - DNA, 12 bp, Artificial Sequence
  Oligonucleotide primer for the detection of SNP TSC0000705
ttaggagttgga

SEQ ID NO: 372228 - DNA, 12 bp, Artificial Sequence
  Oligonucleotide primer for the detection of SNP TSC0000707
aaatcataccac

SEQ ID NO: 372229 - DNA, 12 bp, Artificial Sequence
  Oligonucleotide primer for the detection of SNP TSC0000966
aaaataaaacac

SEQ ID NO: 372230 - DNA, 12 bp, Artificial Sequence
  Oligonucleotide primer for the detection of SNP TSC0000966
tttggttaggtg

SEQ ID NO: 372231 - DNA, 12 bp, Artificial Sequence
  Oligonucleotide primer for the detection of SNP TSC0000966
tttggttaggcg

SEQ ID NO: 372232 - DNA, 12 bp, Artificial Sequence
  Oligonucleotide primer for the detection of SNP TSC0000966
tctaaccaaaca

SEQ ID NO: 372233 - DNA, 12 bp, Artificial Sequence
  Oligonucleotide primer for the detection of SNP TSC0000966
tctaaccaaacg

SEQ ID NO: 372234 - DNA, 12 bp, Artificial Sequence
  Oligonucleotide primer for the detection of SNP TSC0000966
gggatgaggtat

SEQ ID NO: 372235 - DNA, 12 bp, Artificial Sequence
  Oligonucleotide primer for the detection of SNP TSC0000967
acttctacctcc

SEQ ID NO: 372236 - DNA, 12 bp, Artificial Sequence
  Oligonucleotide primer for the detection of SNP TSC0001688
attctaaactat

SEQ ID NO: 372237 - DNA, 12 bp, Artificial Sequence
  Oligonucleotide primer for the detection of SNP TSC0001688
atggtgtttata

SEQ ID NO: 372238 - DNA, 12 bp, Artificial Sequence
  Oligonucleotide primer for the detection of SNP TSC0001690
caactcctatat

SEQ ID NO: 372239 - DNA, 12 bp, Artificial Sequence
  Oligonucleotide primer for the detection of SNP TSC0001690
acctattttttt

SEQ ID NO: 372240 - DNA, 12 bp, Artificial Sequence
  Oligonucleotide primer for the detection of SNP TSC0001690
tagtttttgtat

SEQ ID NO: 372241 - DNA, 12 bp, Artificial Sequence
  Oligonucleotide primer for the detection of SNP TSC0001118
tcaaaattaaat

SEQ ID NO: 372242 - DNA, 12 bp, Artificial Sequence
  Oligonucleotide primer for the detection of SNP TSC0059280
ataaatttattt

SEQ ID NO: 372243 - DNA, 12 bp, Artificial Sequence
  Oligonucleotide primer for the detection of SNP TSC0059280
acaaacccaccc

SEQ ID NO: 372244 - DNA, 12 bp, Artificial Sequence
  Oligonucleotide primer for the detection of SNP TSC0059280
tagggagaaaga

SEQ ID NO: 372245 - DNA, 12 bp, Artificial Sequence
  Oligonucleotide primer for the detection of SNP TSC0059281
ccctaaacactc

SEQ ID NO: 372246 - DNA, 12 bp, Artificial Sequence
  Oligonucleotide primer for the detection of SNP TSC0059281
tttgggatttga

SEQ ID NO: 372247 - DNA, 12 bp, Artificial Sequence
  Oligonucleotide primer for the detection of SNP TSC0059282
agttattatatt

SEQ ID NO: 372248 - DNA, 12 bp, Artificial Sequence
  Oligonucleotide primer for the detection of SNP TSC0059282
ttaagaagagga

SEQ ID NO: 372249 - DNA, 12 bp, Artificial Sequence
  Oligonucleotide primer for the detection of SNP TSC0000702
tctaaatacccc

SEQ ID NO: 372250 - DNA, 12 bp, Artificial Sequence
  Oligonucleotide primer for the detection of SNP TSC0059283
accaaccaatca

SEQ ID NO: 372251 - DNA, 12 bp, Artificial Sequence
  Oligonucleotide primer for the detection of SNP TSC0059283
gttaattagtta

SEQ ID NO: 372252 - DNA, 12 bp, Artificial Sequence
  Oligonucleotide primer for the detection of SNP TSC0059284
gctaaaataaaa

SEQ ID NO: 372253 - DNA, 12 bp, Artificial Sequence
  Oligonucleotide primer for the detection of SNP TSC0059284
aaaaaaagaaat

SEQ ID NO: 372254 - DNA, 12 bp, Artificial Sequence
  Oligonucleotide primer for the detection of SNP TSC0059284
ggaataaaattt

SEQ ID NO: 372255 - DNA, 12 bp, Artificial Sequence
  Oligonucleotide primer for the detection of SNP TSC0000239
cattcataaaaa

SEQ ID NO: 372256 - DNA, 12 bp, Artificial Sequence
  Oligonucleotide primer for the detection of SNP TSC0000239
ttatgggggtag

SEQ ID NO: 372257 - DNA, 12 bp, Artificial Sequence
  Oligonucleotide primer for the detection of SNP TSC0000239
attatttatgag

SEQ ID NO: 372258 - DNA, 12 bp, Artificial Sequence
  Oligonucleotide primer for the detection of SNP TSC0000240
ttcataaattac

SEQ ID NO: 372259 - DNA, 12 bp, Artificial Sequence
  Oligonucleotide primer for the detection of SNP TSC0000240
tattttagattg

SEQ ID NO: 372260 - DNA, 12 bp, Artificial Sequence
  Oligonucleotide primer for the detection of SNP TSC0001486
ctactacaaaat

SEQ ID NO: 372261 - DNA, 12 bp, Artificial Sequence
  Oligonucleotide primer for the detection of SNP TSC0001486
tttgtaaattta

SEQ ID NO: 372262 - DNA, 12 bp, Artificial Sequence
  Oligonucleotide primer for the detection of SNP TSC0059287
actcactcctct

SEQ ID NO: 372263 - DNA, 12 bp, Artificial Sequence
  Oligonucleotide primer for the detection of SNP TSC0059287
gttaaaggaaga

SEQ ID NO: 372264 - DNA, 12 bp, Artificial Sequence
  Oligonucleotide primer for the detection of SNP TSC0001091
aaacactccctc

SEQ ID NO: 372265 - DNA, 12 bp, Artificial Sequence
  Oligonucleotide primer for the detection of SNP TSC0001091
ggttaaagaaaa

SEQ ID NO: 372266 - DNA, 12 bp, Artificial Sequence
  Oligonucleotide primer for the detection of SNP TSC0000681
tcctctaaaatt

SEQ ID NO: 372267 - DNA, 12 bp, Artificial Sequence
  Oligonucleotide primer for the detection of SNP TSC0000681
ttttgttggaga

SEQ ID NO: 372268 - DNA, 12 bp, Artificial Sequence
  Oligonucleotide primer for the detection of SNP TSC0001466
taaaatattcaa

SEQ ID NO: 372269 - DNA, 12 bp, Artificial Sequence
  Oligonucleotide primer for the detection of SNP TSC0001466
ccaaataaacat

SEQ ID NO: 372270 - DNA, 12 bp, Artificial Sequence
  Oligonucleotide primer for the detection of SNP TSC0001466
ggagtatttagt

SEQ ID NO: 372271 - DNA, 12 bp, Artificial Sequence
  Oligonucleotide primer for the detection of SNP TSC0000438
ataaaacattac

SEQ ID NO: 372272 - DNA, 12 bp, Artificial Sequence
  Oligonucleotide primer for the detection of SNP TSC0000438
ataaaacgttac

SEQ ID NO: 372273 - DNA, 12 bp, Artificial Sequence
  Oligonucleotide primer for the detection of SNP TSC0000438
ttccttttataa

SEQ ID NO: 372274 - DNA, 12 bp, Artificial Sequence
  Oligonucleotide primer for the detection of SNP TSC0000438
atagaatgttat

SEQ ID NO: 372275 - DNA, 12 bp, Artificial Sequence
  Oligonucleotide primer for the detection of SNP TSC0000438
atagaacgttat

SEQ ID NO: 372276 - DNA, 12 bp, Artificial Sequence
  Oligonucleotide primer for the detection of SNP TSC0059290
ccacccacacct

SEQ ID NO: 372277 - DNA, 12 bp, Artificial Sequence
  Oligonucleotide primer for the detection of SNP TSC0059290
atattgagaagg

SEQ ID NO: 372278 - DNA, 12 bp, Artificial Sequence
  Oligonucleotide primer for the detection of SNP TSC0059291
accctaaacata

SEQ ID NO: 372279 - DNA, 12 bp, Artificial Sequence
  Oligonucleotide primer for the detection of SNP TSC0059291
cacacttcatac

SEQ ID NO: 372280 - DNA, 12 bp, Artificial Sequence
  Oligonucleotide primer for the detection of SNP TSC0059291
gttttaggtata

SEQ ID NO: 372281 - DNA, 12 bp, Artificial Sequence
  Oligonucleotide primer for the detection of SNP TSC0000641
attccaaaatcc

SEQ ID NO: 372282 - DNA, 12 bp, Artificial Sequence
  Oligonucleotide primer for the detection of SNP TSC0000641
aggtatttattg

SEQ ID NO: 372283 - DNA, 12 bp, Artificial Sequence
  Oligonucleotide primer for the detection of SNP TSC0000641
aaacatccacta

SEQ ID NO: 372284 - DNA, 12 bp, Artificial Sequence
  Oligonucleotide primer for the detection of SNP TSC0000641
attttaagattc

SEQ ID NO: 372285 - DNA, 12 bp, Artificial Sequence
  Oligonucleotide primer for the detection of SNP TSC0000642
acataacttttt

SEQ ID NO: 372286 - DNA, 12 bp, Artificial Sequence
  Oligonucleotide primer for the detection of SNP TSC0000642
ataattaaatat

SEQ ID NO: 372287 - DNA, 12 bp, Artificial Sequence
  Oligonucleotide primer for the detection of SNP TSC0000973
ataaaactcacc

SEQ ID NO: 372288 - DNA, 12 bp, Artificial Sequence
  Oligonucleotide primer for the detection of SNP TSC0000973
ggtggtttgggg

SEQ ID NO: 372289 - DNA, 12 bp, Artificial Sequence
  Oligonucleotide primer for the detection of SNP TSC0059293
tatatacttacc

SEQ ID NO: 372290 - DNA, 12 bp, Artificial Sequence
  Oligonucleotide primer for the detection of SNP TSC0059293
ctaccaacctca

SEQ ID NO: 372291 - DNA, 12 bp, Artificial Sequence
  Oligonucleotide primer for the detection of SNP TSC0059294
atttatacaaaa

SEQ ID NO: 372292 - DNA, 12 bp, Artificial Sequence
  Oligonucleotide primer for the detection of SNP TSC0059294
tttatttagtgt

SEQ ID NO: 372293 - DNA, 12 bp, Artificial Sequence
  Oligonucleotide primer for the detection of SNP TSC0059294
tctatccaatac

SEQ ID NO: 372294 - DNA, 12 bp, Artificial Sequence
  Oligonucleotide primer for the detection of SNP TSC0059294
atttatgtaggg

SEQ ID NO: 372295 - DNA, 12 bp, Artificial Sequence
  Oligonucleotide primer for the detection of SNP TSC0059297
attttttttctc

SEQ ID NO: 372296 - DNA, 12 bp, Artificial Sequence
  Oligonucleotide primer for the detection of SNP TSC0059297
gttagttaggga

SEQ ID NO: 372297 - DNA, 12 bp, Artificial Sequence
  Oligonucleotide primer for the detection of SNP TSC0059298
acaaataacata

SEQ ID NO: 372298 - DNA, 12 bp, Artificial Sequence
  Oligonucleotide primer for the detection of SNP TSC0059298
tacaaaatctca

SEQ ID NO: 372299 - DNA, 12 bp, Artificial Sequence
  Oligonucleotide primer for the detection of SNP TSC0059298
atagatggtata

SEQ ID NO: 372300 - DNA, 12 bp, Artificial Sequence
  Oligonucleotide primer for the detection of SNP TSC0059302
ttttacattccc

SEQ ID NO: 372301 - DNA, 12 bp, Artificial Sequence
  Oligonucleotide primer for the detection of SNP TSC0059302
tatttattgttg

SEQ ID NO: 372302 - DNA, 12 bp, Artificial Sequence
  Oligonucleotide primer for the detection of SNP TSC0059303
aataaaaatctt

SEQ ID NO: 372303 - DNA, 12 bp, Artificial Sequence
  Oligonucleotide primer for the detection of SNP TSC0059303
tataagagaata

SEQ ID NO: 372304 - DNA, 12 bp, Artificial Sequence
  Oligonucleotide primer for the detection of SNP TSC0059304
taacctcatatt

SEQ ID NO: 372305 - DNA, 12 bp, Artificial Sequence
  Oligonucleotide primer for the detection of SNP TSC0059304
gtattaatatta

SEQ ID NO: 372306 - DNA, 12 bp, Artificial Sequence
  Oligonucleotide primer for the detection of SNP TSC0059304
tgattttatgtt

SEQ ID NO: 372307 - DNA, 12 bp, Artificial Sequence
  Oligonucleotide primer for the detection of SNP TSC0059305
ctttaaaaaatc

SEQ ID NO: 372308 - DNA, 12 bp, Artificial Sequence
  Oligonucleotide primer for the detection of SNP TSC0059305
agaatatggtta

SEQ ID NO: 372309 - DNA, 12 bp, Artificial Sequence
  Oligonucleotide primer for the detection of SNP TSC0059306
ataactcaaaat

SEQ ID NO: 372310 - DNA, 12 bp, Artificial Sequence
  Oligonucleotide primer for the detection of SNP TSC0059306
gtggtttagaat

SEQ ID NO: 372311 - DNA, 12 bp, Artificial Sequence
  Oligonucleotide primer for the detection of SNP TSC0059307
ataattgttttt

SEQ ID NO: 372312 - DNA, 12 bp, Artificial Sequence
  Oligonucleotide primer for the detection of SNP TSC0059307
taacaactattc

SEQ ID NO: 372313 - DNA, 12 bp, Artificial Sequence
  Oligonucleotide primer for the detection of SNP TSC0059307
taggatttagag

SEQ ID NO: 372314 - DNA, 12 bp, Artificial Sequence
  Oligonucleotide primer for the detection of SNP TSC0059308
acaataaccaca

SEQ ID NO: 372315 - DNA, 12 bp, Artificial Sequence
  Oligonucleotide primer for the detection of SNP TSC0059308
acccaccctcac

SEQ ID NO: 372316 - DNA, 12 bp, Artificial Sequence
  Oligonucleotide primer for the detection of SNP TSC0059308
aatagtagttat

SEQ ID NO: 372317 - DNA, 12 bp, Artificial Sequence
  Oligonucleotide primer for the detection of SNP TSC0059314
aaaccataataa

SEQ ID NO: 372318 - DNA, 12 bp, Artificial Sequence
  Oligonucleotide primer for the detection of SNP TSC0059314
gagagagaaata

SEQ ID NO: 372319 - DNA, 12 bp, Artificial Sequence
  Oligonucleotide primer for the detection of SNP TSC0059314
gaattatggtgg

SEQ ID NO: 372320 - DNA, 12 bp, Artificial Sequence
  Oligonucleotide primer for the detection of SNP TSC0059315
tttacttaaaaa

SEQ ID NO: 372321 - DNA, 12 bp, Artificial Sequence
  Oligonucleotide primer for the detection of SNP TSC0059315
ggataaatttta

SEQ ID NO: 372322 - DNA, 12 bp, Artificial Sequence
  Oligonucleotide primer for the detection of SNP TSC0059315
aaataaacctta

SEQ ID NO: 372323 - DNA, 12 bp, Artificial Sequence
  Oligonucleotide primer for the detection of SNP TSC0059315
ttgtttagaagc

SEQ ID NO: 372324 - DNA, 12 bp, Artificial Sequence
  Oligonucleotide primer for the detection of SNP TSC0059316
ttcaataaaatc

SEQ ID NO: 372325 - DNA, 12 bp, Artificial Sequence
  Oligonucleotide primer for the detection of SNP TSC0059317
aataggatttga

SEQ ID NO: 372326 - DNA, 12 bp, Artificial Sequence
  Oligonucleotide primer for the detection of SNP TSC0059318
ccctataacccc

SEQ ID NO: 372327 - DNA, 12 bp, Artificial Sequence
  Oligonucleotide primer for the detection of SNP TSC0059318
gatgaggagtta

SEQ ID NO: 372328 - DNA, 12 bp, Artificial Sequence
  Oligonucleotide primer for the detection of SNP TSC0059318
ttttgtagtttt

SEQ ID NO: 372329 - DNA, 12 bp, Artificial Sequence
  Oligonucleotide primer for the detection of SNP TSC0059319
aaactctcactc

SEQ ID NO: 372330 - DNA, 12 bp, Artificial Sequence
  Oligonucleotide primer for the detection of SNP TSC0059322
attttatctact

SEQ ID NO: 372331 - DNA, 12 bp, Artificial Sequence
  Oligonucleotide primer for the detection of SNP TSC0059322
agttttggtaag

SEQ ID NO: 372332 - DNA, 12 bp, Artificial Sequence
  Oligonucleotide primer for the detection of SNP TSC0059323
agagtttttaga

SEQ ID NO: 372333 - DNA, 12 bp, Artificial Sequence
  Oligonucleotide primer for the detection of SNP TSC0059324
aacaattccccc

SEQ ID NO: 372334 - DNA, 12 bp, Artificial Sequence
  Oligonucleotide primer for the detection of SNP TSC0059324
aacgattccccc

SEQ ID NO: 372335 - DNA, 12 bp, Artificial Sequence
  Oligonucleotide primer for the detection of SNP TSC0059324
ttctaaaaactc

SEQ ID NO: 372336 - DNA, 12 bp, Artificial Sequence
  Oligonucleotide primer for the detection of SNP TSC0059324
aatgattttttt

SEQ ID NO: 372337 - DNA, 12 bp, Artificial Sequence
  Oligonucleotide primer for the detection of SNP TSC0059324
aacgattttttt

SEQ ID NO: 372338 - DNA, 12 bp, Artificial Sequence
  Oligonucleotide primer for the detection of SNP TSC0059324
aatgattttttc

SEQ ID NO: 372339 - DNA, 12 bp, Artificial Sequence
  Oligonucleotide primer for the detection of SNP TSC0059324
aacgattttttc

SEQ ID NO: 372340 - DNA, 12 bp, Artificial Sequence
  Oligonucleotide primer for the detection of SNP TSC0059325
ttttgggggaat

SEQ ID NO: 372341 - DNA, 12 bp, Artificial Sequence
  Oligonucleotide primer for the detection of SNP TSC0059325
tttcgggggaat

SEQ ID NO: 372342 - DNA, 12 bp, Artificial Sequence
  Oligonucleotide primer for the detection of SNP TSC0059325
tctcgaaaaaat

SEQ ID NO: 372343 - DNA, 12 bp, Artificial Sequence
  Oligonucleotide primer for the detection of SNP TSC0059325
gagtttttagaa

SEQ ID NO: 372344 - DNA, 12 bp, Artificial Sequence
  Oligonucleotide primer for the detection of SNP TSC0059327
aaacatcccaca

SEQ ID NO: 372345 - DNA, 12 bp, Artificial Sequence
  Oligonucleotide primer for the detection of SNP TSC0059327
aagtttgtataa

SEQ ID NO: 372346 - DNA, 12 bp, Artificial Sequence
  Oligonucleotide primer for the detection of SNP TSC0059327
aaatctacataa

SEQ ID NO: 372347 - DNA, 12 bp, Artificial Sequence
  Oligonucleotide primer for the detection of SNP TSC0059327
gaggtattttat

SEQ ID NO: 372348 - DNA, 12 bp, Artificial Sequence
  Oligonucleotide primer for the detection of SNP TSC0059328
actaacctttct

SEQ ID NO: 372349 - DNA, 12 bp, Artificial Sequence
  Oligonucleotide primer for the detection of SNP TSC0059328
gagaaagggaat

SEQ ID NO: 372350 - DNA, 12 bp, Artificial Sequence
  Oligonucleotide primer for the detection of SNP TSC0059329
accctcttacat

SEQ ID NO: 372351 - DNA, 12 bp, Artificial Sequence
  Oligonucleotide primer for the detection of SNP TSC0059329
ggtatgggtaaa

SEQ ID NO: 372352 - DNA, 12 bp, Artificial Sequence
  Oligonucleotide primer for the detection of SNP TSC0059330
ataataagatta

SEQ ID NO: 372353 - DNA, 12 bp, Artificial Sequence
  Oligonucleotide primer for the detection of SNP TSC0059331
ataatagttgtt

SEQ ID NO: 372354 - DNA, 12 bp, Artificial Sequence
  Oligonucleotide primer for the detection of SNP TSC0059331
acaacaactact

SEQ ID NO: 372355 - DNA, 12 bp, Artificial Sequence
  Oligonucleotide primer for the detection of SNP TSC0059331
aatgtaataaga

SEQ ID NO: 372356 - DNA, 12 bp, Artificial Sequence
  Oligonucleotide primer for the detection of SNP TSC0059334
tcactatctctc

SEQ ID NO: 372357 - DNA, 12 bp, Artificial Sequence
  Oligonucleotide primer for the detection of SNP TSC0059334
tcgctatctctc

SEQ ID NO: 372358 - DNA, 12 bp, Artificial Sequence
  Oligonucleotide primer for the detection of SNP TSC0059334
aaataaggaagg

SEQ ID NO: 372359 - DNA, 12 bp, Artificial Sequence
  Oligonucleotide primer for the detection of SNP TSC0059334
tcgttgtttttt

SEQ ID NO: 372360 - DNA, 12 bp, Artificial Sequence
  Oligonucleotide primer for the detection of SNP TSC0059339
aattactacaat

SEQ ID NO: 372361 - DNA, 12 bp, Artificial Sequence
  Oligonucleotide primer for the detection of SNP TSC0059339
gattactacaat

SEQ ID NO: 372362 - DNA, 12 bp, Artificial Sequence
  Oligonucleotide primer for the detection of SNP TSC0059339
tatatggatgaa

SEQ ID NO: 372363 - DNA, 12 bp, Artificial Sequence
  Oligonucleotide primer for the detection of SNP TSC0059339
gttattgtaatt

SEQ ID NO: 372364 - DNA, 12 bp, Artificial Sequence
  Oligonucleotide primer for the detection of SNP TSC0059341
ggaagtatggta

SEQ ID NO: 372365 - DNA, 12 bp, Artificial Sequence
  Oligonucleotide primer for the detection of SNP TSC0059342
ctattttcttct

SEQ ID NO: 372366 - DNA, 12 bp, Artificial Sequence
  Oligonucleotide primer for the detection of SNP TSC0059342
tatttttttcga

SEQ ID NO: 372367 - DNA, 12 bp, Artificial Sequence
  Oligonucleotide primer for the detection of SNP TSC0059342
tatccccctcaa

SEQ ID NO: 372368 - DNA, 12 bp, Artificial Sequence
  Oligonucleotide primer for the detection of SNP TSC0059342
tatccccctcga

SEQ ID NO: 372369 - DNA, 12 bp, Artificial Sequence
  Oligonucleotide primer for the detection of SNP TSC0059343
tactcaacattt

SEQ ID NO: 372370 - DNA, 12 bp, Artificial Sequence
  Oligonucleotide primer for the detection of SNP TSC0059343
aaataatggatg

SEQ ID NO: 372371 - DNA, 12 bp, Artificial Sequence
  Oligonucleotide primer for the detection of SNP TSC0059345
tttcccaactca

SEQ ID NO: 372372 - DNA, 12 bp, Artificial Sequence
  Oligonucleotide primer for the detection of SNP TSC0059345
tttcccgactca

SEQ ID NO: 372373 - DNA, 12 bp, Artificial Sequence
  Oligonucleotide primer for the detection of SNP TSC0059345
tttcctaaaacc

SEQ ID NO: 372374 - DNA, 12 bp, Artificial Sequence
  Oligonucleotide primer for the detection of SNP TSC0059351
aaattgtttagg

SEQ ID NO: 372375 - DNA, 12 bp, Artificial Sequence
  Oligonucleotide primer for the detection of SNP TSC0059354
taagattatgtt

SEQ ID NO: 372376 - DNA, 12 bp, Artificial Sequence
  Oligonucleotide primer for the detection of SNP TSC0059354
taagattacgtt

SEQ ID NO: 372377 - DNA, 12 bp, Artificial Sequence
  Oligonucleotide primer for the detection of SNP TSC0059355
tctcatatatct

SEQ ID NO: 372378 - DNA, 12 bp, Artificial Sequence
  Oligonucleotide primer for the detection of SNP TSC0059355
taagagtggagg

SEQ ID NO: 372379 - DNA, 12 bp, Artificial Sequence
  Oligonucleotide primer for the detection of SNP TSC0059356
caaacttcaaaa

SEQ ID NO: 372380 - DNA, 12 bp, Artificial Sequence
  Oligonucleotide primer for the detection of SNP TSC0059356
caaacttcgaaa

SEQ ID NO: 372381 - DNA, 12 bp, Artificial Sequence
  Oligonucleotide primer for the detection of SNP TSC0059356
gtatatgtaaaa

SEQ ID NO: 372382 - DNA, 12 bp, Artificial Sequence
  Oligonucleotide primer for the detection of SNP TSC0059356
atatatacaaaa

SEQ ID NO: 372383 - DNA, 12 bp, Artificial Sequence
  Oligonucleotide primer for the detection of SNP TSC0059356
tttagattttgg

SEQ ID NO: 372384 - DNA, 12 bp, Artificial Sequence
  Oligonucleotide primer for the detection of SNP TSC0059356
tttagatttcgg

SEQ ID NO: 372385 - DNA, 12 bp, Artificial Sequence
  Oligonucleotide primer for the detection of SNP TSC0059359
aaaaaaaaaagt

SEQ ID NO: 372386 - DNA, 12 bp, Artificial Sequence
  Oligonucleotide primer for the detection of SNP TSC0059359
gtattaaagatg

SEQ ID NO: 372387 - DNA, 12 bp, Artificial Sequence
  Oligonucleotide primer for the detection of SNP TSC0059360
atttaaatacat

SEQ ID NO: 372388 - DNA, 12 bp, Artificial Sequence
  Oligonucleotide primer for the detection of SNP TSC0059360
gtagatttgtta

SEQ ID NO: 372389 - DNA, 12 bp, Artificial Sequence
  Oligonucleotide primer for the detection of SNP TSC0059362
aattttttgatg

SEQ ID NO: 372390 - DNA, 12 bp, Artificial Sequence
  Oligonucleotide primer for the detection of SNP TSC0059363
tatcaacaaatt

SEQ ID NO: 372391 - DNA, 12 bp, Artificial Sequence
  Oligonucleotide primer for the detection of SNP TSC0059363
tgggtgtattag

SEQ ID NO: 372392 - DNA, 12 bp, Artificial Sequence
  Oligonucleotide primer for the detection of SNP TSC0059363
tattagtaggtt

SEQ ID NO: 372393 - DNA, 12 bp, Artificial Sequence
  Oligonucleotide primer for the detection of SNP TSC0059365
aacaaataaact

SEQ ID NO: 372394 - DNA, 12 bp, Artificial Sequence
  Oligonucleotide primer for the detection of SNP TSC0059365
agtaaattttgt

SEQ ID NO: 372395 - DNA, 12 bp, Artificial Sequence
  Oligonucleotide primer for the detection of SNP TSC0059366
aaatgatgttta

SEQ ID NO: 372396 - DNA, 12 bp, Artificial Sequence
  Oligonucleotide primer for the detection of SNP TSC0059366
tatttgtgtaga

SEQ ID NO: 372397 - DNA, 12 bp, Artificial Sequence
  Oligonucleotide primer for the detection of SNP TSC0059367
attaaactctat

SEQ ID NO: 372398 - DNA, 12 bp, Artificial Sequence
  Oligonucleotide primer for the detection of SNP TSC0059367
tgatgtttaaat

SEQ ID NO: 372399 - DNA, 12 bp, Artificial Sequence
  Oligonucleotide primer for the detection of SNP TSC0059367
taatacttaaac

SEQ ID NO: 372400 - DNA, 12 bp, Artificial Sequence
  Oligonucleotide primer for the detection of SNP TSC0059367
ttaaattttatc

SEQ ID NO: 372401 - DNA, 12 bp, Artificial Sequence
  Oligonucleotide primer for the detection of SNP TSC0059368
tcaatatcactc

SEQ ID NO: 372402 - DNA, 12 bp, Artificial Sequence
  Oligonucleotide primer for the detection of SNP TSC0059368
ttagtaaatttt

SEQ ID NO: 372403 - DNA, 12 bp, Artificial Sequence
  Oligonucleotide primer for the detection of SNP TSC0059368
caacaaacccta

SEQ ID NO: 372404 - DNA, 12 bp, Artificial Sequence
  Oligonucleotide primer for the detection of SNP TSC0059371
aggtaagaataa

SEQ ID NO: 372405 - DNA, 12 bp, Artificial Sequence
  Oligonucleotide primer for the detection of SNP TSC0059372
attattctccaa

SEQ ID NO: 372406 - DNA, 12 bp, Artificial Sequence
  Oligonucleotide primer for the detection of SNP TSC0059372
atcactctccaa

SEQ ID NO: 372407 - DNA, 12 bp, Artificial Sequence
  Oligonucleotide primer for the detection of SNP TSC0059372
atcgctctccaa

SEQ ID NO: 372408 - DNA, 12 bp, Artificial Sequence
  Oligonucleotide primer for the detection of SNP TSC0059377
tacttacactca

SEQ ID NO: 372409 - DNA, 12 bp, Artificial Sequence
  Oligonucleotide primer for the detection of SNP TSC0059377
atttttatatag

SEQ ID NO: 372410 - DNA, 12 bp, Artificial Sequence
  Oligonucleotide primer for the detection of SNP TSC0059379
catttctaccac

SEQ ID NO: 372411 - DNA, 12 bp, Artificial Sequence
  Oligonucleotide primer for the detection of SNP TSC0059379
attttttggaag

SEQ ID NO: 372412 - DNA, 12 bp, Artificial Sequence
  Oligonucleotide primer for the detection of SNP TSC0059380
aatattaactac

SEQ ID NO: 372413 - DNA, 12 bp, Artificial Sequence
  Oligonucleotide primer for the detection of SNP TSC0059380
tgttattattaa

SEQ ID NO: 372414 - DNA, 12 bp, Artificial Sequence
  Oligonucleotide primer for the detection of SNP TSC0059381
agttgatgtgga

SEQ ID NO: 372415 - DNA, 12 bp, Artificial Sequence
  Oligonucleotide primer for the detection of SNP TSC0059381
gttagtggtttt

SEQ ID NO: 372416 - DNA, 12 bp, Artificial Sequence
  Oligonucleotide primer for the detection of SNP TSC0059382
ttatgttttatt

SEQ ID NO: 372417 - DNA, 12 bp, Artificial Sequence
  Oligonucleotide primer for the detection of SNP TSC0059383
taggattattat

SEQ ID NO: 372418 - DNA, 12 bp, Artificial Sequence
  Oligonucleotide primer for the detection of SNP TSC0059383
aaaatcattata

SEQ ID NO: 372419 - DNA, 12 bp, Artificial Sequence
  Oligonucleotide primer for the detection of SNP TSC0059384
tcaactttctac

SEQ ID NO: 372420 - DNA, 12 bp, Artificial Sequence
  Oligonucleotide primer for the detection of SNP TSC0059384
ttatgtatagaa

SEQ ID NO: 372421 - DNA, 12 bp, Artificial Sequence
  Oligonucleotide primer for the detection of SNP TSC0059388
ctctccctaacc

SEQ ID NO: 372422 - DNA, 12 bp, Artificial Sequence
  Oligonucleotide primer for the detection of SNP TSC0059388
tgttggtaagtg

SEQ ID NO: 372423 - DNA, 12 bp, Artificial Sequence
  Oligonucleotide primer for the detection of SNP TSC0059388
tattaacaaata

SEQ ID NO: 372424 - DNA, 12 bp, Artificial Sequence
  Oligonucleotide primer for the detection of SNP TSC0010229
ttgataattagt

SEQ ID NO: 372425 - DNA, 12 bp, Artificial Sequence
  Oligonucleotide primer for the detection of SNP TSC0010229
ctaataattaat

SEQ ID NO: 372426 - DNA, 12 bp, Artificial Sequence
  Oligonucleotide primer for the detection of SNP TSC0010229
gaaaatgtttaa

SEQ ID NO: 372427 - DNA, 12 bp, Artificial Sequence
  Oligonucleotide primer for the detection of SNP TSC0010230
ataccactttac

SEQ ID NO: 372428 - DNA, 12 bp, Artificial Sequence
  Oligonucleotide primer for the detection of SNP TSC0010230
tatttttattgg

SEQ ID NO: 372429 - DNA, 12 bp, Artificial Sequence
  Oligonucleotide primer for the detection of SNP TSC0010230
cattcttactaa

SEQ ID NO: 372430 - DNA, 12 bp, Artificial Sequence
  Oligonucleotide primer for the detection of SNP TSC0010230
atattattttat

SEQ ID NO: 372431 - DNA, 12 bp, Artificial Sequence
  Oligonucleotide primer for the detection of SNP TSC0010230
atattattttac

SEQ ID NO: 372432 - DNA, 12 bp, Artificial Sequence
  Oligonucleotide primer for the detection of SNP TSC0010231
tagtaagaatgg

SEQ ID NO: 372433 - DNA, 12 bp, Artificial Sequence
  Oligonucleotide primer for the detection of SNP TSC0059389
tagtttttaaat

SEQ ID NO: 372434 - DNA, 12 bp, Artificial Sequence
  Oligonucleotide primer for the detection of SNP TSC0059389
caatttttaaat

SEQ ID NO: 372435 - DNA, 12 bp, Artificial Sequence
  Oligonucleotide primer for the detection of SNP TSC0059389
ataagtaattta

SEQ ID NO: 372436 - DNA, 12 bp, Artificial Sequence
  Oligonucleotide primer for the detection of SNP TSC0059393
actactctctcc

SEQ ID NO: 372437 - DNA, 12 bp, Artificial Sequence
  Oligonucleotide primer for the detection of SNP TSC0059393
aaattttatgaa

SEQ ID NO: 372438 - DNA, 12 bp, Artificial Sequence
  Oligonucleotide primer for the detection of SNP TSC0059393
aaaccttataaa

SEQ ID NO: 372439 - DNA, 12 bp, Artificial Sequence
  Oligonucleotide primer for the detection of SNP TSC0059394
catcttcatact

SEQ ID NO: 372440 - DNA, 12 bp, Artificial Sequence
  Oligonucleotide primer for the detection of SNP TSC0059395
tgtaaattgatt

SEQ ID NO: 372441 - DNA, 12 bp, Artificial Sequence
  Oligonucleotide primer for the detection of SNP TSC0059395
attacaaattaa

SEQ ID NO: 372442 - DNA, 12 bp, Artificial Sequence
  Oligonucleotide primer for the detection of SNP TSC0059395
gagtagggtatg

SEQ ID NO: 372443 - DNA, 12 bp, Artificial Sequence
  Oligonucleotide primer for the detection of SNP TSC0059396
caacaatcttac

SEQ ID NO: 372444 - DNA, 12 bp, Artificial Sequence
  Oligonucleotide primer for the detection of SNP TSC0059396
atgattgtatat

SEQ ID NO: 372445 - DNA, 12 bp, Artificial Sequence
  Oligonukleotid-Primer
ataactatatac

SEQ ID NO: 372446 - DNA, 12 bp, Artificial Sequence
  Oligonucleotide primer for the detection of SNP TSC0059397
gggattatagat

SEQ ID NO: 372447 - DNA, 12 bp, Artificial Sequence
  Oligonucleotide primer for the detection of SNP TSC0059397
aaaactacaaat

SEQ ID NO: 372448 - DNA, 12 bp, Artificial Sequence
  Oligonucleotide primer for the detection of SNP TSC0059397
ggtggggtggta

SEQ ID NO: 372449 - DNA, 12 bp, Artificial Sequence
  Oligonukleotid-Primer
ttttaccatttt

SEQ ID NO: 372450 - DNA, 12 bp, Artificial Sequence
  Oligonucleotide primer for the detection of SNP TSC0059399
atacctaaaatc

SEQ ID NO: 372451 - DNA, 12 bp, Artificial Sequence
  Oligonucleotide primer for the detection of SNP TSC0059399
tttagagtgttg

SEQ ID NO: 372452 - DNA, 12 bp, Artificial Sequence
  Oligonucleotide primer for the detection of SNP TSC0059400
caaaaatatccc

SEQ ID NO: 372453 - DNA, 12 bp, Artificial Sequence
  Oligonukleotid-Primer
tctctttcaaac

SEQ ID NO: 372454 - DNA, 12 bp, Artificial Sequence
  Oligonucleotide primer for the detection of SNP TSC0059401
ccctcatattcc

SEQ ID NO: 372455 - DNA, 12 bp, Artificial Sequence
  Oligonucleotide primer for the detection of SNP TSC0059401
cttcaaatcaca

SEQ ID NO: 372456 - DNA, 12 bp, Artificial Sequence
  Oligonucleotide primer for the detection of SNP TSC0059402
tgggttattaag

SEQ ID NO: 372457 - DNA, 12 bp, Artificial Sequence
  Oligonucleotide primer for the detection of SNP TSC0059404
ttattatcattt

SEQ ID NO: 372458 - DNA, 12 bp, Artificial Sequence
  Oligonucleotide primer for the detection of SNP TSC0059405
agttgttatatt

SEQ ID NO: 372459 - DNA, 12 bp, Artificial Sequence
  Oligonucleotide primer for the detection of SNP TSC0059405
atttattagaag

SEQ ID NO: 372460 - DNA, 12 bp, Artificial Sequence
  Oligonucleotide primer for the detection of SNP TSC0059406
tccccttttaaa

SEQ ID NO: 372461 - DNA, 12 bp, Artificial Sequence
  Oligonucleotide primer for the detection of SNP TSC0059408
caaaattaacaa

SEQ ID NO: 372462 - DNA, 12 bp, Artificial Sequence
  Oligonucleotide primer for the detection of SNP TSC0059408
taaaatctacca

SEQ ID NO: 372463 - DNA, 12 bp, Artificial Sequence
  Oligonucleotide primer for the detection of SNP TSC0059408
tagaattagtag

SEQ ID NO: 372464 - DNA, 12 bp, Artificial Sequence
  Oligonucleotide primer for the detection of SNP TSC0059409
ggattatgggtg

SEQ ID NO: 372465 - DNA, 12 bp, Artificial Sequence
  Oligonucleotide primer for the detection of SNP TSC0059409
ggattatgggcg

SEQ ID NO: 372466 - DNA, 12 bp, Artificial Sequence
  Oligonucleotide primer for the detection of SNP TSC0059410
cccacaaaatcc

SEQ ID NO: 372467 - DNA, 12 bp, Artificial Sequence
  Oligonucleotide primer for the detection of SNP TSC0059410
tatgtgtgggga

SEQ ID NO: 372468 - DNA, 12 bp, Artificial Sequence
  Oligonucleotide primer for the detection of SNP TSC0059411
ccaacttatttt

SEQ ID NO: 372469 - DNA, 12 bp, Artificial Sequence
  Oligonucleotide primer for the detection of SNP TSC0059411
gagtttgtaaaa

SEQ ID NO: 372470 - DNA, 12 bp, Artificial Sequence
  Oligonucleotide primer for the detection of SNP TSC0059412
ataatctctttt

SEQ ID NO: 372471 - DNA, 12 bp, Artificial Sequence
  Oligonucleotide primer for the detection of SNP TSC0059412
gtgagatatgaa

SEQ ID NO: 372472 - DNA, 12 bp, Artificial Sequence
  Oligonucleotide primer for the detection of SNP TSC0059413
agaggggaagag

SEQ ID NO: 372473 - DNA, 12 bp, Artificial Sequence
  Oligonucleotide primer for the detection of SNP TSC0059413
taagtttttatt

SEQ ID NO: 372474 - DNA, 12 bp, Artificial Sequence
  Oligonucleotide primer for the detection of SNP TSC0059413
taagtttttatc

SEQ ID NO: 372475 - DNA, 12 bp, Artificial Sequence
  Oligonucleotide primer for the detection of SNP TSC0059414
accataacaccc

SEQ ID NO: 372476 - DNA, 12 bp, Artificial Sequence
  Oligonucleotide primer for the detection of SNP TSC0059414
accataacgccc

SEQ ID NO: 372477 - DNA, 12 bp, Artificial Sequence
  Oligonukleotid-Primer
attagttgtaaa

SEQ ID NO: 372478 - DNA, 12 bp, Artificial Sequence
  Oligonucleotide primer for the detection of SNP TSC0059414
atcaactacaaa

SEQ ID NO: 372479 - DNA, 12 bp, Artificial Sequence
  Oligonucleotide primer for the detection of SNP TSC0059414
attatgatgttt

SEQ ID NO: 372480 - DNA, 12 bp, Artificial Sequence
  Oligonucleotide primer for the detection of SNP TSC0059414
attatgacgttt

SEQ ID NO: 372481 - DNA, 12 bp, Artificial Sequence
  Oligonucleotide primer for the detection of SNP TSC0059415
taaattttacaa

SEQ ID NO: 372482 - DNA, 12 bp, Artificial Sequence
  Oligonucleotide primer for the detection of SNP TSC0059415
tttaatattagt

SEQ ID NO: 372483 - DNA, 12 bp, Artificial Sequence
  Oligonucleotide primer for the detection of SNP TSC0059415
cttaacactaat

SEQ ID NO: 372484 - DNA, 12 bp, Artificial Sequence
  Oligonucleotide primer for the detection of SNP TSC0059416
ttttaggaggta

SEQ ID NO: 372485 - DNA, 12 bp, Artificial Sequence
  Oligonucleotide primer for the detection of SNP TSC0059417
tccccaaacccc

SEQ ID NO: 372486 - DNA, 12 bp, Artificial Sequence
  Oligonucleotide primer for the detection of SNP TSC0059417
gaaaggaagaga

SEQ ID NO: 372487 - DNA, 12 bp, Artificial Sequence
  Oligonucleotide primer for the detection of SNP TSC0059418
cccaaccaccca

SEQ ID NO: 372488 - DNA, 12 bp, Artificial Sequence
  Oligonucleotide primer for the detection of SNP TSC0059418
cccgaccaccca

SEQ ID NO: 372489 - DNA, 12 bp, Artificial Sequence
  Oligonucleotide primer for the detection of SNP TSC0059418
ttcggttattta

SEQ ID NO: 372490 - DNA, 12 bp, Artificial Sequence
  Oligonucleotide primer for the detection of SNP TSC0059419
aattttggaaag

SEQ ID NO: 372491 - DNA, 12 bp, Artificial Sequence
  Oligonucleotide primer for the detection of SNP TSC0059419
ttggtagggatt

SEQ ID NO: 372492 - DNA, 12 bp, Artificial Sequence
  Oligonucleotide primer for the detection of SNP TSC0059420
ctctaaacaaaa

SEQ ID NO: 372493 - DNA, 12 bp, Artificial Sequence
  Oligonucleotide primer for the detection of SNP TSC0059420
agggagtgggtg

SEQ ID NO: 372494 - DNA, 12 bp, Artificial Sequence
  Oligonucleotide primer for the detection of SNP TSC0059420
agggagtgggcg

SEQ ID NO: 372495 - DNA, 12 bp, Artificial Sequence
  Oligonucleotide primer for the detection of SNP TSC0059420
tttgggtaggat

SEQ ID NO: 372496 - DNA, 12 bp, Artificial Sequence
  Oligonucleotide primer for the detection of SNP TSC0059421
aatatccttcct

SEQ ID NO: 372497 - DNA, 12 bp, Artificial Sequence
  Oligonucleotide primer for the detection of SNP TSC0059421
actcccaaccta

SEQ ID NO: 372498 - DNA, 12 bp, Artificial Sequence
  Oligonucleotide primer for the detection of SNP TSC0059422
tagagttttgag

SEQ ID NO: 372499 - DNA, 12 bp, Artificial Sequence
  Oligonucleotide primer for the detection of SNP TSC0059423
acccactaaaac

SEQ ID NO: 372500 - DNA, 12 bp, Artificial Sequence
  Oligonucleotide primer for the detection of SNP TSC0059423
gggatgggggga

SEQ ID NO: 372501 - DNA, 12 bp, Artificial Sequence
  Oligonucleotide primer for the detection of SNP TSC0059424
caaatatatata

SEQ ID NO: 372502 - DNA, 12 bp, Artificial Sequence
  Oligonucleotide primer for the detection of SNP TSC0059424
cccccatcccca

SEQ ID NO: 372503 - DNA, 12 bp, Artificial Sequence
  Oligonucleotide primer for the detection of SNP TSC0059424
taggtgtgtgtg

SEQ ID NO: 372504 - DNA, 12 bp, Artificial Sequence
  Oligonucleotide primer for the detection of SNP TSC0059425
atatcacttcac

SEQ ID NO: 372505 - DNA, 12 bp, Artificial Sequence
  Oligonucleotide primer for the detection of SNP TSC0059425
aactccatccta

SEQ ID NO: 372506 - DNA, 12 bp, Artificial Sequence
  Oligonucleotide primer for the detection of SNP TSC0059426
tttacatttctc

SEQ ID NO: 372507 - DNA, 12 bp, Artificial Sequence
  Oligonucleotide primer for the detection of SNP TSC0059426
catcactaacca

SEQ ID NO: 372508 - DNA, 12 bp, Artificial Sequence
  Oligonucleotide primer for the detection of SNP TSC0059427
tattattttcat

SEQ ID NO: 372509 - DNA, 12 bp, Artificial Sequence
  Oligonucleotide primer for the detection of SNP TSC0059427
agaatattatga

SEQ ID NO: 372510 - DNA, 12 bp, Artificial Sequence
  Oligonucleotide primer for the detection of SNP TSC0059428
tatttttcctta

SEQ ID NO: 372511 - DNA, 12 bp, Artificial Sequence
  Oligonucleotide primer for the detection of SNP TSC0059428
attattgaaaat

SEQ ID NO: 372512 - DNA, 12 bp, Artificial Sequence
  Oligonucleotide primer for the detection of SNP TSC0059433
tacttaaaaacc

SEQ ID NO: 372513 - DNA, 12 bp, Artificial Sequence
  Oligonucleotide primer for the detection of SNP TSC0059434
caaaacaattat

SEQ ID NO: 372514 - DNA, 12 bp, Artificial Sequence
  Oligonucleotide primer for the detection of SNP TSC0059434
ggttttgaaatg

SEQ ID NO: 372515 - DNA, 12 bp, Artificial Sequence
  Oligonucleotide primer for the detection of SNP TSC0059437
aaactatctcac

SEQ ID NO: 372516 - DNA, 12 bp, Artificial Sequence
  Oligonucleotide primer for the detection of SNP TSC0059437
tgttgtggtatg

SEQ ID NO: 372517 - DNA, 12 bp, Artificial Sequence
  Oligonucleotide primer for the detection of SNP TSC0059438
taaaactaatta

SEQ ID NO: 372518 - DNA, 12 bp, Artificial Sequence
  Oligonucleotide primer for the detection of SNP TSC0059438
tgtatttatttt

SEQ ID NO: 372519 - DNA, 12 bp, Artificial Sequence
  Oligonucleotide primer for the detection of SNP TSC0059438
ctacacccactc

SEQ ID NO: 372520 - DNA, 12 bp, Artificial Sequence
  Oligonucleotide primer for the detection of SNP TSC0059438
tgggattggttg

SEQ ID NO: 372521 - DNA, 12 bp, Artificial Sequence
  Oligonucleotide primer for the detection of SNP TSC0059439
tttccaaattaa

SEQ ID NO: 372522 - DNA, 12 bp, Artificial Sequence
  Oligonucleotide primer for the detection of SNP TSC0059439
taaaaataaagg

SEQ ID NO: 372523 - DNA, 12 bp, Artificial Sequence
  Oligonucleotide primer for the detection of SNP TSC0059440
tataaaaataca

SEQ ID NO: 372524 - DNA, 12 bp, Artificial Sequence
  Oligonucleotide primer for the detection of SNP TSC0059440
actaacaaaatc

SEQ ID NO: 372525 - DNA, 12 bp, Artificial Sequence
  Oligonucleotide primer for the detection of SNP TSC0059440
gtgtgaaaatat

SEQ ID NO: 372526 - DNA, 12 bp, Artificial Sequence
  Oligonucleotide primer for the detection of SNP TSC0059441
tgggatattaat

SEQ ID NO: 372527 - DNA, 12 bp, Artificial Sequence
  Oligonucleotide primer for the detection of SNP TSC0059441
ctaaaacattaa

SEQ ID NO: 372528 - DNA, 12 bp, Artificial Sequence
  Oligonucleotide primer for the detection of SNP TSC0059441
gtatttgaagtg

SEQ ID NO: 372529 - DNA, 12 bp, Artificial Sequence
  Oligonucleotide primer for the detection of SNP TSC0059442
actataaactct

SEQ ID NO: 372530 - DNA, 12 bp, Artificial Sequence
  Oligonucleotide primer for the detection of SNP TSC0059442
tagagtgaataa

SEQ ID NO: 372531 - DNA, 12 bp, Artificial Sequence
  Oligonucleotide primer for the detection of SNP TSC0059445
ttcatctcaaat

SEQ ID NO: 372532 - DNA, 12 bp, Artificial Sequence
  Oligonucleotide primer for the detection of SNP TSC0059445
attggaatatta

SEQ ID NO: 372533 - DNA, 12 bp, Artificial Sequence
  Oligonucleotide primer for the detection of SNP TSC0059448
tccatatcttca

SEQ ID NO: 372534 - DNA, 12 bp, Artificial Sequence
  Oligonucleotide primer for the detection of SNP TSC0059448
taaagatgaaat

SEQ ID NO: 372535 - DNA, 12 bp, Artificial Sequence
  Oligonucleotide primer for the detection of SNP TSC0059450
tcttacctacca

SEQ ID NO: 372536 - DNA, 12 bp, Artificial Sequence
  Oligonucleotide primer for the detection of SNP TSC0059450
tcttacctaccg

SEQ ID NO: 372537 - DNA, 12 bp, Artificial Sequence
  Oligonucleotide primer for the detection of SNP TSC0059450
gttttggtttat

SEQ ID NO: 372538 - DNA, 12 bp, Artificial Sequence
  Oligonucleotide primer for the detection of SNP TSC0059450
atcctaacttac

SEQ ID NO: 372539 - DNA, 12 bp, Artificial Sequence
  Oligonucleotide primer for the detection of SNP TSC0059450
ttttgtttgttg

SEQ ID NO: 372540 - DNA, 12 bp, Artificial Sequence
  Oligonucleotide primer for the detection of SNP TSC0059450
ttttgtttgtcg

SEQ ID NO: 372541 - DNA, 12 bp, Artificial Sequence
  Oligonucleotide primer for the detection of SNP TSC0059452
agaattttgagg

SEQ ID NO: 372542 - DNA, 12 bp, Artificial Sequence
  Oligonucleotide primer for the detection of SNP TSC0059455
ataaacccacat

SEQ ID NO: 372543 - DNA, 12 bp, Artificial Sequence
  Oligonucleotide primer for the detection of SNP TSC0059455
taaggaggtaga

SEQ ID NO: 372544 - DNA, 12 bp, Artificial Sequence
  Oligonucleotide primer for the detection of SNP TSC0059456
aacctaaaattc

SEQ ID NO: 372545 - DNA, 12 bp, Artificial Sequence
  Oligonucleotide primer for the detection of SNP TSC0059456
ggaggtattggg

SEQ ID NO: 372546 - DNA, 12 bp, Artificial Sequence
  Oligonucleotide primer for the detection of SNP TSC0059457
ttatatccattt

SEQ ID NO: 372547 - DNA, 12 bp, Artificial Sequence
  Oligonucleotide primer for the detection of SNP TSC0059459
ttttaaagttta

SEQ ID NO: 372548 - DNA, 12 bp, Artificial Sequence
  Oligonucleotide primer for the detection of SNP TSC0059462
tctctaataaaa

SEQ ID NO: 372549 - DNA, 12 bp, Artificial Sequence
  Oligonucleotide primer for the detection of SNP TSC0059462
tgttagtatgtt

SEQ ID NO: 372550 - DNA, 12 bp, Artificial Sequence
  Oligonucleotide primer for the detection of SNP TSC0059462
taccaatatatt

SEQ ID NO: 372551 - DNA, 12 bp, Artificial Sequence
  Oligonucleotide primer for the detection of SNP TSC0059462
tttttgatgaag

SEQ ID NO: 372552 - DNA, 12 bp, Artificial Sequence
  Oligonucleotide primer for the detection of SNP TSC0059463
ggtttttaagaa

SEQ ID NO: 372553 - DNA, 12 bp, Artificial Sequence
  Oligonucleotide primer for the detection of SNP TSC0059463
aatcttcaaaaa

SEQ ID NO: 372554 - DNA, 12 bp, Artificial Sequence
  Oligonucleotide primer for the detection of SNP TSC0059464
caatcccttcca

SEQ ID NO: 372555 - DNA, 12 bp, Artificial Sequence
  Oligonucleotide primer for the detection of SNP TSC0059464
aagtttaatggt

SEQ ID NO: 372556 - DNA, 12 bp, Artificial Sequence
  Oligonucleotide primer for the detection of SNP TSC0059464
aaattcaataac

SEQ ID NO: 372557 - DNA, 12 bp, Artificial Sequence
  Oligonucleotide primer for the detection of SNP TSC0059465
aatgaattagga

SEQ ID NO: 372558 - DNA, 12 bp, Artificial Sequence
  Oligonucleotide primer for the detection of SNP TSC0059467
gtgaaattttgt

SEQ ID NO: 372559 - DNA, 12 bp, Artificial Sequence
  Oligonucleotide primer for the detection of SNP TSC0059467
gtgaaatttcgt

SEQ ID NO: 372560 - DNA, 12 bp, Artificial Sequence
  Oligonucleotide primer for the detection of SNP TSC0059467
gtgaaattttgc

SEQ ID NO: 372561 - DNA, 12 bp, Artificial Sequence
  Oligonucleotide primer for the detection of SNP TSC0059467
gtgaaatttcgc

SEQ ID NO: 372562 - DNA, 12 bp, Artificial Sequence
  Oligonucleotide primer for the detection of SNP TSC0059467
ataaaaccccac

SEQ ID NO: 372563 - DNA, 12 bp, Artificial Sequence
  Oligonucleotide primer for the detection of SNP TSC0059467
ataaaaccccgc

SEQ ID NO: 372564 - DNA, 12 bp, Artificial Sequence
  Oligonucleotide primer for the detection of SNP TSC0059467
attttttagtag

SEQ ID NO: 372565 - DNA, 12 bp, Artificial Sequence
  Oligonucleotide primer for the detection of SNP TSC0059468
cacacacaaatt

SEQ ID NO: 372566 - DNA, 12 bp, Artificial Sequence
  Oligonucleotide primer for the detection of SNP TSC0059469
actacaaatatc

SEQ ID NO: 372567 - DNA, 12 bp, Artificial Sequence
  Oligonucleotide primer for the detection of SNP TSC0059470
atagtgttttga

SEQ ID NO: 372568 - DNA, 12 bp, Artificial Sequence
  Oligonucleotide primer for the detection of SNP TSC0059470
atagcgttttga

SEQ ID NO: 372569 - DNA, 12 bp, Artificial Sequence
  Oligonucleotide primer for the detection of SNP TSC0059472
ttcttatacata

SEQ ID NO: 372570 - DNA, 12 bp, Artificial Sequence
  Oligonucleotide primer for the detection of SNP TSC0059472
ttgtaaggtatt

SEQ ID NO: 372571 - DNA, 12 bp, Artificial Sequence
  Oligonucleotide primer for the detection of SNP TSC0059472
tcgtaaggtatt

SEQ ID NO: 372572 - DNA, 12 bp, Artificial Sequence
  Oligonucleotide primer for the detection of SNP TSC0059472
cataaaacatca

SEQ ID NO: 372573 - DNA, 12 bp, Artificial Sequence
  Oligonucleotide primer for the detection of SNP TSC0059472
cgtaaaacatca

SEQ ID NO: 372574 - DNA, 12 bp, Artificial Sequence
  Oligonucleotide primer for the detection of SNP TSC0059475
ctccctattctc

SEQ ID NO: 372575 - DNA, 12 bp, Artificial Sequence
  Oligonucleotide primer for the detection of SNP TSC0059475
gtttggtagggt

SEQ ID NO: 372576 - DNA, 12 bp, Artificial Sequence
  Oligonucleotide primer for the detection of SNP TSC0059477
atctctaatatc

SEQ ID NO: 372577 - DNA, 12 bp, Artificial Sequence
  Oligonucleotide primer for the detection of SNP TSC0059477
tggggttatgag

SEQ ID NO: 372578 - DNA, 12 bp, Artificial Sequence
  Oligonucleotide primer for the detection of SNP TSC0059478
catctccaataa

SEQ ID NO: 372579 - DNA, 12 bp, Artificial Sequence
  Oligonucleotide primer for the detection of SNP TSC0059478
atttgataggtg

SEQ ID NO: 372580 - DNA, 12 bp, Artificial Sequence
  Oligonucleotide primer for the detection of SNP TSC0059481
ctaacctcccac

SEQ ID NO: 372581 - DNA, 12 bp, Artificial Sequence
  Oligonucleotide primer for the detection of SNP TSC0059481
ctaacctcccgc

SEQ ID NO: 372582 - DNA, 12 bp, Artificial Sequence
  Oligonucleotide primer for the detection of SNP TSC0059481
tgtttgttttat

SEQ ID NO: 372583 - DNA, 12 bp, Artificial Sequence
  Oligonucleotide primer for the detection of SNP TSC0059481
ctacctacctca

SEQ ID NO: 372584 - DNA, 12 bp, Artificial Sequence
  Oligonucleotide primer for the detection of SNP TSC0059481
ttggtttttcgt

SEQ ID NO: 372585 - DNA, 12 bp, Artificial Sequence
  Oligonucleotide primer for the detection of SNP TSC0059481
ttggtttttcgc

SEQ ID NO: 372586 - DNA, 12 bp, Artificial Sequence
  Oligonucleotide primer for the detection of SNP TSC0059486
aactctatttat

SEQ ID NO: 372587 - DNA, 12 bp, Artificial Sequence
  Oligonucleotide primer for the detection of SNP TSC0059486
taagttaataaa

SEQ ID NO: 372588 - DNA, 12 bp, Artificial Sequence
  Oligonucleotide primer for the detection of SNP TSC0059488
actataatttac

SEQ ID NO: 372589 - DNA, 12 bp, Artificial Sequence
  Oligonucleotide primer for the detection of SNP TSC0059490
gaagataaatta

SEQ ID NO: 372590 - DNA, 12 bp, Artificial Sequence
  Oligonucleotide primer for the detection of SNP TSC0059491
atttttaaaatc

SEQ ID NO: 372591 - DNA, 12 bp, Artificial Sequence
  Oligonucleotide primer for the detection of SNP TSC0059491
agaaggatattg

SEQ ID NO: 372592 - DNA, 12 bp, Artificial Sequence
  Oligonucleotide primer for the detection of SNP TSC0059492
tctatataaaat

SEQ ID NO: 372593 - DNA, 12 bp, Artificial Sequence
  Oligonucleotide primer for the detection of SNP TSC0059494
atactatctcat

SEQ ID NO: 372594 - DNA, 12 bp, Artificial Sequence
  Oligonucleotide primer for the detection of SNP TSC0059494
aaattttatata

SEQ ID NO: 372595 - DNA, 12 bp, Artificial Sequence
  Oligonucleotide primer for the detection of SNP TSC0059495
aaatattaaatt

SEQ ID NO: 372596 - DNA, 12 bp, Artificial Sequence
  Oligonucleotide primer for the detection of SNP TSC0059495
ttgttgatgagt

SEQ ID NO: 372597 - DNA, 12 bp, Artificial Sequence
  Oligonucleotide primer for the detection of SNP TSC0059495
tctactaataaa

SEQ ID NO: 372598 - DNA, 12 bp, Artificial Sequence
  Oligonucleotide primer for the detection of SNP TSC0059495
aagtgttggatt

SEQ ID NO: 372599 - DNA, 12 bp, Artificial Sequence
  Oligonucleotide primer for the detection of SNP TSC0059496
aaacaaccccac

SEQ ID NO: 372600 - DNA, 12 bp, Artificial Sequence
  Oligonucleotide primer for the detection of SNP TSC0059496
aaacaaccccgc

SEQ ID NO: 372601 - DNA, 12 bp, Artificial Sequence
  Oligonucleotide primer for the detection of SNP TSC0059496
aaacgaccccac

SEQ ID NO: 372602 - DNA, 12 bp, Artificial Sequence
  Oligonucleotide primer for the detection of SNP TSC0059496
aaacgaccccgc

SEQ ID NO: 372603 - DNA, 12 bp, Artificial Sequence
  Oligonucleotide primer for the detection of SNP TSC0059496
gtaggcgggtga

SEQ ID NO: 372604 - DNA, 12 bp, Artificial Sequence
  Oligonucleotide primer for the detection of SNP TSC0059496
gtaggtgggcga

SEQ ID NO: 372605 - DNA, 12 bp, Artificial Sequence
  Oligonucleotide primer for the detection of SNP TSC0059496
gtaggcgggcga

SEQ ID NO: 372606 - DNA, 12 bp, Artificial Sequence
  Oligonucleotide primer for the detection of SNP TSC0059497
tatctatcttta

SEQ ID NO: 372607 - DNA, 12 bp, Artificial Sequence
  Oligonucleotide primer for the detection of SNP TSC0059497
taaaaaacttca

SEQ ID NO: 372608 - DNA, 12 bp, Artificial Sequence
  Oligonucleotide primer for the detection of SNP TSC0059498
atcttactatca

SEQ ID NO: 372609 - DNA, 12 bp, Artificial Sequence
  Oligonucleotide primer for the detection of SNP TSC0059498
caaatatatatt

SEQ ID NO: 372610 - DNA, 12 bp, Artificial Sequence
  Oligonucleotide primer for the detection of SNP TSC0059499
ataaaacccccc

SEQ ID NO: 372611 - DNA, 12 bp, Artificial Sequence
  Oligonucleotide primer for the detection of SNP TSC0059499
ggtttttgaatg

SEQ ID NO: 372612 - DNA, 12 bp, Artificial Sequence
  Oligonucleotide primer for the detection of SNP TSC0059500
acttcatttttt

SEQ ID NO: 372613 - DNA, 12 bp, Artificial Sequence
  Oligonucleotide primer for the detection of SNP TSC0059500
acttacaaattt

SEQ ID NO: 372614 - DNA, 12 bp, Artificial Sequence
  Oligonucleotide primer for the detection of SNP TSC0059501
aactatctctac

SEQ ID NO: 372615 - DNA, 12 bp, Artificial Sequence
  Oligonucleotide primer for the detection of SNP TSC0059501
cgttttatgtat

SEQ ID NO: 372616 - DNA, 12 bp, Artificial Sequence
  Oligonucleotide primer for the detection of SNP TSC0059501
actccatataca

SEQ ID NO: 372617 - DNA, 12 bp, Artificial Sequence
  Oligonucleotide primer for the detection of SNP TSC0059501
gctccatataca

SEQ ID NO: 372618 - DNA, 12 bp, Artificial Sequence
  Oligonucleotide primer for the detection of SNP TSC0059502
ttaccctactct

SEQ ID NO: 372619 - DNA, 12 bp, Artificial Sequence
  Oligonucleotide primer for the detection of SNP TSC0059502
ttatggggtatt

SEQ ID NO: 372620 - DNA, 12 bp, Artificial Sequence
  Oligonucleotide primer for the detection of SNP TSC0059502
ttacggggtatt

SEQ ID NO: 372621 - DNA, 12 bp, Artificial Sequence
  Oligonucleotide primer for the detection of SNP TSC0059502
cacaaaacatta

SEQ ID NO: 372622 - DNA, 12 bp, Artificial Sequence
  Oligonucleotide primer for the detection of SNP TSC0059502
cacgaaacatta

SEQ ID NO: 372623 - DNA, 12 bp, Artificial Sequence
  Oligonucleotide primer for the detection of SNP TSC0059502
tgttttattttc

SEQ ID NO: 372624 - DNA, 12 bp, Artificial Sequence
  Oligonucleotide primer for the detection of SNP TSC0059503
aaaaacacttat

SEQ ID NO: 372625 - DNA, 12 bp, Artificial Sequence
  Oligonucleotide primer for the detection of SNP TSC0059503
ttattttattag

SEQ ID NO: 372626 - DNA, 12 bp, Artificial Sequence
  Oligonucleotide primer for the detection of SNP TSC0059505
taagatttttag

SEQ ID NO: 372627 - DNA, 12 bp, Artificial Sequence
  Oligonucleotide primer for the detection of SNP TSC0059505
caaaatttccaa

SEQ ID NO: 372628 - DNA, 12 bp, Artificial Sequence
  Oligonucleotide primer for the detection of SNP TSC0059505
ataggagatagt

SEQ ID NO: 372629 - DNA, 12 bp, Artificial Sequence
  Oligonucleotide primer for the detection of SNP TSC0059506
ctaaatttacac

SEQ ID NO: 372630 - DNA, 12 bp, Artificial Sequence
  Oligonucleotide primer for the detection of SNP TSC0059506
atttgtttaata

SEQ ID NO: 372631 - DNA, 12 bp, Artificial Sequence
  Oligonucleotide primer for the detection of SNP TSC0059507
accaccatactc

SEQ ID NO: 372632 - DNA, 12 bp, Artificial Sequence
  Oligonucleotide primer for the detection of SNP TSC0059509
ccaaccattttt

SEQ ID NO: 372633 - DNA, 12 bp, Artificial Sequence
  Oligonucleotide primer for the detection of SNP TSC0059509
agagtaaagaag

SEQ ID NO: 372634 - DNA, 12 bp, Artificial Sequence
  Oligonucleotide primer for the detection of SNP TSC0059511
acctaaaaactc

SEQ ID NO: 372635 - DNA, 12 bp, Artificial Sequence
  Oligonucleotide primer for the detection of SNP TSC0059511
ttaggtggtatg

SEQ ID NO: 372636 - DNA, 12 bp, Artificial Sequence
  Oligonucleotide primer for the detection of SNP TSC0059511
tcaaataacata

SEQ ID NO: 372637 - DNA, 12 bp, Artificial Sequence
  Oligonucleotide primer for the detection of SNP TSC0059512
acttattaaata

SEQ ID NO: 372638 - DNA, 12 bp, Artificial Sequence
  Oligonucleotide primer for the detection of SNP TSC0059512
tttagagatgtg

SEQ ID NO: 372639 - DNA, 12 bp, Artificial Sequence
  Oligonucleotide primer for the detection of SNP TSC0059513
agattatagaga

SEQ ID NO: 372640 - DNA, 12 bp, Artificial Sequence
  Oligonucleotide primer for the detection of SNP TSC0059513
tgaataggaagg

SEQ ID NO: 372641 - DNA, 12 bp, Artificial Sequence
  Oligonucleotide primer for the detection of SNP TSC0059514
catacacactta

SEQ ID NO: 372642 - DNA, 12 bp, Artificial Sequence
  Oligonucleotide primer for the detection of SNP TSC0059514
catacacgctta

SEQ ID NO: 372643 - DNA, 12 bp, Artificial Sequence
  Oligonucleotide primer for the detection of SNP TSC0059514
ccacatttcacc

SEQ ID NO: 372644 - DNA, 12 bp, Artificial Sequence
  Oligonucleotide primer for the detection of SNP TSC0059514
gtatgtatgttt

SEQ ID NO: 372645 - DNA, 12 bp, Artificial Sequence
  Oligonucleotide primer for the detection of SNP TSC0059514
gtatgtacgttt

SEQ ID NO: 372646 - DNA, 12 bp, Artificial Sequence
  Oligonucleotide primer for the detection of SNP TSC0059515
agagttgaatga

SEQ ID NO: 372647 - DNA, 12 bp, Artificial Sequence
  Oligonucleotide primer for the detection of SNP TSC0059516
ctacatacacgc

SEQ ID NO: 372648 - DNA, 12 bp, Artificial Sequence
  Oligonucleotide primer for the detection of SNP TSC0059519
atattaataaac

SEQ ID NO: 372649 - DNA, 12 bp, Artificial Sequence
  Oligonucleotide primer for the detection of SNP TSC0059519
ttttgggatgtg

SEQ ID NO: 372650 - DNA, 12 bp, Artificial Sequence
  Oligonucleotide primer for the detection of SNP TSC0059519
cttaaaatataa

SEQ ID NO: 372651 - DNA, 12 bp, Artificial Sequence
  Oligonucleotide primer for the detection of SNP TSC0059519
atgttgatggat

SEQ ID NO: 372652 - DNA, 12 bp, Artificial Sequence
  Oligonucleotide primer for the detection of SNP TSC0059520
gttttgtagttg

SEQ ID NO: 372653 - DNA, 12 bp, Artificial Sequence
  Oligonucleotide primer for the detection of SNP TSC0059520
gtttcgtagttg

SEQ ID NO: 372654 - DNA, 12 bp, Artificial Sequence
  Oligonucleotide primer for the detection of SNP TSC0059521
ttatggttgggt

SEQ ID NO: 372655 - DNA, 12 bp, Artificial Sequence
  Oligonucleotide primer for the detection of SNP TSC0059521
ttatggtcgggt

SEQ ID NO: 372656 - DNA, 12 bp, Artificial Sequence
  Oligonucleotide primer for the detection of SNP TSC0059521
ttataaccaaac

SEQ ID NO: 372657 - DNA, 12 bp, Artificial Sequence
  Oligonucleotide primer for the detection of SNP TSC0059521
ttataaccgaac

SEQ ID NO: 372658 - DNA, 12 bp, Artificial Sequence
  Oligonucleotide primer for the detection of SNP TSC0059522
ctatacaaccaa

SEQ ID NO: 372659 - DNA, 12 bp, Artificial Sequence
  Oligonucleotide primer for the detection of SNP TSC0059522
ttgtgtaattaa

SEQ ID NO: 372660 - DNA, 12 bp, Artificial Sequence
  Oligonucleotide primer for the detection of SNP TSC0059526
taatcactaaaa

SEQ ID NO: 372661 - DNA, 12 bp, Artificial Sequence
  Oligonucleotide primer for the detection of SNP TSC0059526
ttcctccctaca

SEQ ID NO: 372662 - DNA, 12 bp, Artificial Sequence
  Oligonucleotide primer for the detection of SNP TSC0059526
ttggttattggg

SEQ ID NO: 372663 - DNA, 12 bp, Artificial Sequence
  Oligonucleotide primer for the detection of SNP TSC0059527
ttgttgaattta

SEQ ID NO: 372664 - DNA, 12 bp, Artificial Sequence
  Oligonucleotide primer for the detection of SNP TSC0059528
attttcctttat

SEQ ID NO: 372665 - DNA, 12 bp, Artificial Sequence
  Oligonucleotide primer for the detection of SNP TSC0059529
tattatagttaa

SEQ ID NO: 372666 - DNA, 12 bp, Artificial Sequence
  Oligonucleotide primer for the detection of SNP TSC0059530
gatttaaattta

SEQ ID NO: 372667 - DNA, 12 bp, Artificial Sequence
  Oligonucleotide primer for the detection of SNP TSC0059530
aacttaaatcta

SEQ ID NO: 372668 - DNA, 12 bp, Artificial Sequence
  Oligonucleotide primer for the detection of SNP TSC0059537
ttatcaaatact

SEQ ID NO: 372669 - DNA, 12 bp, Artificial Sequence
  Oligonucleotide primer for the detection of SNP TSC0059537
gtaattatatag

SEQ ID NO: 372670 - DNA, 12 bp, Artificial Sequence
  Oligonucleotide primer for the detection of SNP TSC0059539
atactcataatt

SEQ ID NO: 372671 - DNA, 12 bp, Artificial Sequence
  Oligonucleotide primer for the detection of SNP TSC0059539
taaggagaattg

SEQ ID NO: 372672 - DNA, 12 bp, Artificial Sequence
  Oligonucleotide primer for the detection of SNP TSC0059540
atagaagtattt

SEQ ID NO: 372673 - DNA, 12 bp, Artificial Sequence
  Oligonucleotide primer for the detection of SNP TSC0059540
acacaaaaacac

SEQ ID NO: 372674 - DNA, 12 bp, Artificial Sequence
  Oligonucleotide primer for the detection of SNP TSC0059543
gttgtattgaat

SEQ ID NO: 372675 - DNA, 12 bp, Artificial Sequence
  Oligonucleotide primer for the detection of SNP TSC0059543
ttatattaaata

SEQ ID NO: 372676 - DNA, 12 bp, Artificial Sequence
  Oligonucleotide primer for the detection of SNP TSC0059543
aggaaaggtgta

SEQ ID NO: 372677 - DNA, 12 bp, Artificial Sequence
  Oligonucleotide primer for the detection of SNP TSC0059545
ttatattactta

SEQ ID NO: 372678 - DNA, 12 bp, Artificial Sequence
  Oligonucleotide primer for the detection of SNP TSC0059545
aatttgaggatt

SEQ ID NO: 372679 - DNA, 12 bp, Artificial Sequence
  Oligonucleotide primer for the detection of SNP TSC0059545
aacttaaaaact

SEQ ID NO: 372680 - DNA, 12 bp, Artificial Sequence
  Oligonucleotide primer for the detection of SNP TSC0059545
ttgtgttattta

SEQ ID NO: 372681 - DNA, 12 bp, Artificial Sequence
  Oligonucleotide primer for the detection of SNP TSC0059546
aatgtatattat

SEQ ID NO: 372682 - DNA, 12 bp, Artificial Sequence
  Oligonucleotide primer for the detection of SNP TSC0059546
aatacatactat

SEQ ID NO: 372683 - DNA, 12 bp, Artificial Sequence
  Oligonucleotide primer for the detection of SNP TSC0059548
ccctcctataac

SEQ ID NO: 372684 - DNA, 12 bp, Artificial Sequence
  Oligonucleotide primer for the detection of SNP TSC0059551
ttccaactaatt

SEQ ID NO: 372685 - DNA, 12 bp, Artificial Sequence
  Oligonucleotide primer for the detection of SNP TSC0059551
atttaaatgtta

SEQ ID NO: 372686 - DNA, 12 bp, Artificial Sequence
  Oligonucleotide primer for the detection of SNP TSC0059556
agaaagtatata

SEQ ID NO: 372687 - DNA, 12 bp, Artificial Sequence
  Oligonucleotide primer for the detection of SNP TSC0059557
caaatctataca

SEQ ID NO: 372688 - DNA, 12 bp, Artificial Sequence
  Oligonucleotide primer for the detection of SNP TSC0059557
ttgattttatat

SEQ ID NO: 372689 - DNA, 12 bp, Artificial Sequence
  Oligonucleotide primer for the detection of SNP TSC0059557
ttaactctatat

SEQ ID NO: 372690 - DNA, 12 bp, Artificial Sequence
  Oligonucleotide primer for the detection of SNP TSC0059557
taagtttgtgta

SEQ ID NO: 372691 - DNA, 12 bp, Artificial Sequence
  Oligonucleotide primer for the detection of SNP TSC0059558
tttcatatcaca

SEQ ID NO: 372692 - DNA, 12 bp, Artificial Sequence
  Oligonucleotide primer for the detection of SNP TSC0059558
aatcctataaaa

SEQ ID NO: 372693 - DNA, 12 bp, Artificial Sequence
  Oligonucleotide primer for the detection of SNP TSC0059559
ttcaccctccct

SEQ ID NO: 372694 - DNA, 12 bp, Artificial Sequence
  Oligonucleotide primer for the detection of SNP TSC0059559
ttcgccctccct

SEQ ID NO: 372695 - DNA, 12 bp, Artificial Sequence
  Oligonucleotide primer for the detection of SNP TSC0059560
tacacttaatcc

SEQ ID NO: 372696 - DNA, 12 bp, Artificial Sequence
  Oligonucleotide primer for the detection of SNP TSC0059560
tacgcttaatcc

SEQ ID NO: 372697 - DNA, 12 bp, Artificial Sequence
  Oligonucleotide primer for the detection of SNP TSC0059560
tgattttttaaa

SEQ ID NO: 372698 - DNA, 12 bp, Artificial Sequence
  Oligonucleotide primer for the detection of SNP TSC0059562
tataaccaaata

SEQ ID NO: 372699 - DNA, 12 bp, Artificial Sequence
  Oligonucleotide primer for the detection of SNP TSC0059562
attattttccac

SEQ ID NO: 372700 - DNA, 12 bp, Artificial Sequence
  Oligonucleotide primer for the detection of SNP TSC0059562
tgtagttaaata

SEQ ID NO: 372701 - DNA, 12 bp, Artificial Sequence
  Oligonucleotide primer for the detection of SNP TSC0059564
atatataggtgt

SEQ ID NO: 372702 - DNA, 12 bp, Artificial Sequence
  Oligonucleotide primer for the detection of SNP TSC0059564
acatacaaatac

SEQ ID NO: 372703 - DNA, 12 bp, Artificial Sequence
  Oligonucleotide primer for the detection of SNP TSC0059568
ggagttggttta

SEQ ID NO: 372704 - DNA, 12 bp, Artificial Sequence
  Oligonucleotide primer for the detection of SNP TSC0059569
tcccccactacc

SEQ ID NO: 372705 - DNA, 12 bp, Artificial Sequence
  Oligonucleotide primer for the detection of SNP TSC0059569
tcccccgctacc

SEQ ID NO: 372706 - DNA, 12 bp, Artificial Sequence
  Oligonucleotide primer for the detection of SNP TSC0059569
tggagaggatga

SEQ ID NO: 372707 - DNA, 12 bp, Artificial Sequence
  Oligonucleotide primer for the detection of SNP TSC0059570
ttttatcttctc

SEQ ID NO: 372708 - DNA, 12 bp, Artificial Sequence
  Oligonucleotide primer for the detection of SNP TSC0059570
tagaggatgtaa

SEQ ID NO: 372709 - DNA, 12 bp, Artificial Sequence
  Oligonucleotide primer for the detection of SNP TSC0059571
acacacatctcc

SEQ ID NO: 372710 - DNA, 12 bp, Artificial Sequence
  Oligonucleotide primer for the detection of SNP TSC0059571
tggattataggg

SEQ ID NO: 372711 - DNA, 12 bp, Artificial Sequence
  Oligonucleotide primer for the detection of SNP TSC0059571
cggattataggg

SEQ ID NO: 372712 - DNA, 12 bp, Artificial Sequence
  Oligonucleotide primer for the detection of SNP TSC0059572
attggaagatag

SEQ ID NO: 372713 - DNA, 12 bp, Artificial Sequence
  Oligonucleotide primer for the detection of SNP TSC0059575
ctcaccactatc

SEQ ID NO: 372714 - DNA, 12 bp, Artificial Sequence
  Oligonucleotide primer for the detection of SNP TSC0059575
gtgtgagtataa

SEQ ID NO: 372715 - DNA, 12 bp, Artificial Sequence
  Oligonucleotide primer for the detection of SNP TSC0059576
aaacactaaccc

SEQ ID NO: 372716 - DNA, 12 bp, Artificial Sequence
  Oligonucleotide primer for the detection of SNP TSC0059576
aaacgctaaccc

SEQ ID NO: 372717 - DNA, 12 bp, Artificial Sequence
  Oligonucleotide primer for the detection of SNP TSC0059576
ttgtatagttta

SEQ ID NO: 372718 - DNA, 12 bp, Artificial Sequence
  Oligonucleotide primer for the detection of SNP TSC0059577
cttacacacact

SEQ ID NO: 372719 - DNA, 12 bp, Artificial Sequence
  Oligonucleotide primer for the detection of SNP TSC0059577
cttacacacgct

SEQ ID NO: 372720 - DNA, 12 bp, Artificial Sequence
  Oligonucleotide primer for the detection of SNP TSC0059577
cttacgcacact

SEQ ID NO: 372721 - DNA, 12 bp, Artificial Sequence
  Oligonucleotide primer for the detection of SNP TSC0059577
cttacgcacgct

SEQ ID NO: 372722 - DNA, 12 bp, Artificial Sequence
  Oligonucleotide primer for the detection of SNP TSC0059577
ggagggtttggg

SEQ ID NO: 372723 - DNA, 12 bp, Artificial Sequence
  Oligonucleotide primer for the detection of SNP TSC0059578
tgtttttataag

SEQ ID NO: 372724 - DNA, 12 bp, Artificial Sequence
  Oligonucleotide primer for the detection of SNP TSC0059579
aactttcaaaca

SEQ ID NO: 372725 - DNA, 12 bp, Artificial Sequence
  Oligonucleotide primer for the detection of SNP TSC0059579
tccttaaactct

SEQ ID NO: 372726 - DNA, 12 bp, Artificial Sequence
  Oligonucleotide primer for the detection of SNP TSC0059580
atctccaataac

SEQ ID NO: 372727 - DNA, 12 bp, Artificial Sequence
  Oligonucleotide primer for the detection of SNP TSC0059580
agtgtttgtaga

SEQ ID NO: 372728 - DNA, 12 bp, Artificial Sequence
  Oligonucleotide primer for the detection of SNP TSC0059581
acctcttattct

SEQ ID NO: 372729 - DNA, 12 bp, Artificial Sequence
  Oligonucleotide primer for the detection of SNP TSC0059581
attcctacctta

SEQ ID NO: 372730 - DNA, 12 bp, Artificial Sequence
  Oligonucleotide primer for the detection of SNP TSC0059583
aacaaactcaaa

SEQ ID NO: 372731 - DNA, 12 bp, Artificial Sequence
  Oligonucleotide primer for the detection of SNP TSC0059583
ctccctcatctc

SEQ ID NO: 372732 - DNA, 12 bp, Artificial Sequence
  Oligonucleotide primer for the detection of SNP TSC0059583
ttgaatagattt

SEQ ID NO: 372733 - DNA, 12 bp, Artificial Sequence
  Oligonucleotide primer for the detection of SNP TSC0059585
atgttatttatt

SEQ ID NO: 372734 - DNA, 12 bp, Artificial Sequence
  Oligonucleotide primer for the detection of SNP TSC0059585
taccacttatca

SEQ ID NO: 372735 - DNA, 12 bp, Artificial Sequence
  Oligonucleotide primer for the detection of SNP TSC0059585
aattgtttaaat

SEQ ID NO: 372736 - DNA, 12 bp, Artificial Sequence
  Oligonucleotide primer for the detection of SNP TSC0059586
ttcaccaaaacc

SEQ ID NO: 372737 - DNA, 12 bp, Artificial Sequence
  Oligonucleotide primer for the detection of SNP TSC0059586
tggtagaggagg

SEQ ID NO: 372738 - DNA, 12 bp, Artificial Sequence
  Oligonucleotide primer for the detection of SNP TSC0059587
acttaccatcaa

SEQ ID NO: 372739 - DNA, 12 bp, Artificial Sequence
  Oligonucleotide primer for the detection of SNP TSC0059587
tgtagaggtata

SEQ ID NO: 372740 - DNA, 12 bp, Artificial Sequence
  Oligonucleotide primer for the detection of SNP TSC0059587
tacaaaaacaca

SEQ ID NO: 372741 - DNA, 12 bp, Artificial Sequence
  Oligonucleotide primer for the detection of SNP TSC0059587
gtttgttattag

SEQ ID NO: 372742 - DNA, 12 bp, Artificial Sequence
  Oligonucleotide primer for the detection of SNP TSC0059588
ctataaaacaac

SEQ ID NO: 372743 - DNA, 12 bp, Artificial Sequence
  Oligonucleotide primer for the detection of SNP TSC0059588
tttttattcggg

SEQ ID NO: 372744 - DNA, 12 bp, Artificial Sequence
  Oligonucleotide primer for the detection of SNP TSC0059589
gataataagtgt

SEQ ID NO: 372745 - DNA, 12 bp, Artificial Sequence
  Oligonucleotide primer for the detection of SNP TSC0059591
attactctttct

SEQ ID NO: 372746 - DNA, 12 bp, Artificial Sequence
  Oligonucleotide primer for the detection of SNP TSC0059591
gttactctttct

SEQ ID NO: 372747 - DNA, 12 bp, Artificial Sequence
  Oligonucleotide primer for the detection of SNP TSC0059591
aaatttagaatt

SEQ ID NO: 372748 - DNA, 12 bp, Artificial Sequence
  Oligonucleotide primer for the detection of SNP TSC0059592
atataggtttag

SEQ ID NO: 372749 - DNA, 12 bp, Artificial Sequence
  Oligonucleotide primer for the detection of SNP TSC0059593
tttaactaaaac

SEQ ID NO: 372750 - DNA, 12 bp, Artificial Sequence
  Oligonucleotide primer for the detection of SNP TSC0059595
tctccttattac

SEQ ID NO: 372751 - DNA, 12 bp, Artificial Sequence
  Oligonucleotide primer for the detection of SNP TSC0059595
gtaaaatattag

SEQ ID NO: 372752 - DNA, 12 bp, Artificial Sequence
  Oligonucleotide primer for the detection of SNP TSC0059596
atgggaagaaag

SEQ ID NO: 372753 - DNA, 12 bp, Artificial Sequence
  Oligonucleotide primer for the detection of SNP TSC0059597
tattaaatatat

SEQ ID NO: 372754 - DNA, 12 bp, Artificial Sequence
  Oligonucleotide primer for the detection of SNP TSC0059597
ataaatgaaaaa

SEQ ID NO: 372755 - DNA, 12 bp, Artificial Sequence
  Oligonucleotide primer for the detection of SNP TSC0059597
tattaaatatgt

SEQ ID NO: 372756 - DNA, 12 bp, Artificial Sequence
  Oligonucleotide primer for the detection of SNP TSC0059598
ttttctaaaatt

SEQ ID NO: 372757 - DNA, 12 bp, Artificial Sequence
  Oligonucleotide primer for the detection of SNP TSC0059598
atgaagtttata

SEQ ID NO: 372758 - DNA, 12 bp, Artificial Sequence
  Oligonucleotide primer for the detection of SNP TSC0059599
gtgtggtagttt

SEQ ID NO: 372759 - DNA, 12 bp, Artificial Sequence
  Oligonucleotide primer for the detection of SNP TSC0059599
gcgtggtagttt

SEQ ID NO: 372760 - DNA, 12 bp, Artificial Sequence
  Oligonucleotide primer for the detection of SNP TSC0059601
ctccacctccta

SEQ ID NO: 372761 - DNA, 12 bp, Artificial Sequence
  Oligonucleotide primer for the detection of SNP TSC0059606
agtggaatagaa

SEQ ID NO: 372762 - DNA, 12 bp, Artificial Sequence
  Oligonucleotide primer for the detection of SNP TSC0059607
tttatttaatag

SEQ ID NO: 372763 - DNA, 12 bp, Artificial Sequence
  Oligonucleotide primer for the detection of SNP TSC0059608
acttttctaaat

SEQ ID NO: 372764 - DNA, 12 bp, Artificial Sequence
  Oligonucleotide primer for the detection of SNP TSC0059608
gggagtaaatag

SEQ ID NO: 372765 - DNA, 12 bp, Artificial Sequence
  Oligonucleotide primer for the detection of SNP TSC0059609
aaatcttttctt

SEQ ID NO: 372766 - DNA, 12 bp, Artificial Sequence
  Oligonucleotide primer for the detection of SNP TSC0059609
ttaagaaattta

SEQ ID NO: 372767 - DNA, 12 bp, Artificial Sequence
  Oligonucleotide primer for the detection of SNP TSC0059610
taatttcacaac

SEQ ID NO: 372768 - DNA, 12 bp, Artificial Sequence
  Oligonucleotide primer for the detection of SNP TSC0059610
gtattaaattaa

SEQ ID NO: 372769 - DNA, 12 bp, Artificial Sequence
  Oligonucleotide primer for the detection of SNP TSC0059612
aaacaatattta

SEQ ID NO: 372770 - DNA, 12 bp, Artificial Sequence
  Oligonucleotide primer for the detection of SNP TSC0059612
atgtagttatta

SEQ ID NO: 372771 - DNA, 12 bp, Artificial Sequence
  Oligonucleotide primer for the detection of SNP TSC0059612
atataattatca

SEQ ID NO: 372772 - DNA, 12 bp, Artificial Sequence
  Oligonucleotide primer for the detection of SNP TSC0059612
aaggtaatattt

SEQ ID NO: 372773 - DNA, 12 bp, Artificial Sequence
  Oligonucleotide primer for the detection of SNP TSC0059614
aaccaaactcca

SEQ ID NO: 372774 - DNA, 12 bp, Artificial Sequence
  Oligonucleotide primer for the detection of SNP TSC0059614
tgtttataatat

SEQ ID NO: 372775 - DNA, 12 bp, Artificial Sequence
  Oligonucleotide primer for the detection of SNP TSC0059614
tacttataatat

SEQ ID NO: 372776 - DNA, 12 bp, Artificial Sequence
  Oligonucleotide primer for the detection of SNP TSC0059615
atcatcttcctt

SEQ ID NO: 372777 - DNA, 12 bp, Artificial Sequence
  Oligonucleotide primer for the detection of SNP TSC0059615
gtttaaaaaaaa

SEQ ID NO: 372778 - DNA, 12 bp, Artificial Sequence
  Oligonucleotide primer for the detection of SNP TSC0059617
tacaataaaacc

SEQ ID NO: 372779 - DNA, 12 bp, Artificial Sequence
  Oligonucleotide primer for the detection of SNP TSC0059617
agttttattgta

SEQ ID NO: 372780 - DNA, 12 bp, Artificial Sequence
  Oligonucleotide primer for the detection of SNP TSC0059621
ataataacacat

SEQ ID NO: 372781 - DNA, 12 bp, Artificial Sequence
  Oligonucleotide primer for the detection of SNP TSC0059621
ataataacacgt

SEQ ID NO: 372782 - DNA, 12 bp, Artificial Sequence
  Oligonucleotide primer for the detection of SNP TSC0059623
cctctctttcct

SEQ ID NO: 372783 - DNA, 12 bp, Artificial Sequence
  Oligonucleotide primer for the detection of SNP TSC0059623
gtaggtagagaa

SEQ ID NO: 372784 - DNA, 12 bp, Artificial Sequence
  Oligonucleotide primer for the detection of SNP TSC0059630
accattaaactt

SEQ ID NO: 372785 - DNA, 12 bp, Artificial Sequence
  Oligonucleotide primer for the detection of SNP TSC0059630
tggtaattagga

SEQ ID NO: 372786 - DNA, 12 bp, Artificial Sequence
  Oligonucleotide primer for the detection of SNP TSC0059631
ccttacttaact

SEQ ID NO: 372787 - DNA, 12 bp, Artificial Sequence
  Oligonucleotide primer for the detection of SNP TSC0059632
tataaaaccaaa

SEQ ID NO: 372788 - DNA, 12 bp, Artificial Sequence
  Oligonucleotide primer for the detection of SNP TSC0059632
gggttgtataat

SEQ ID NO: 372789 - DNA, 12 bp, Artificial Sequence
  Oligonucleotide primer for the detection of SNP TSC0059632
gggttgtataac

SEQ ID NO: 372790 - DNA, 12 bp, Artificial Sequence
  Oligonucleotide primer for the detection of SNP TSC0059632
taaactacacaa

SEQ ID NO: 372791 - DNA, 12 bp, Artificial Sequence
  Oligonucleotide primer for the detection of SNP TSC0059632
gatataggatta

SEQ ID NO: 372792 - DNA, 12 bp, Artificial Sequence
  Oligonucleotide primer for the detection of SNP TSC0059635
ttcacatatact

SEQ ID NO: 372793 - DNA, 12 bp, Artificial Sequence
  Oligonucleotide primer for the detection of SNP TSC0059635
ataaagtatttg

SEQ ID NO: 372794 - DNA, 12 bp, Artificial Sequence
  Oligonucleotide primer for the detection of SNP TSC0059635
tttatatgtgtt

SEQ ID NO: 372795 - DNA, 12 bp, Artificial Sequence
  Oligonucleotide primer for the detection of SNP TSC0059639
tcccaaattcaa

SEQ ID NO: 372796 - DNA, 12 bp, Artificial Sequence
  Oligonucleotide primer for the detection of SNP TSC0059639
tcccgaattcaa

SEQ ID NO: 372797 - DNA, 12 bp, Artificial Sequence
  Oligonucleotide primer for the detection of SNP TSC0059639
gtaggagaattt

SEQ ID NO: 372798 - DNA, 12 bp, Artificial Sequence
  Oligonucleotide primer for the detection of SNP TSC0059646
taaacctctaac

SEQ ID NO: 372799 - DNA, 12 bp, Artificial Sequence
  Oligonucleotide primer for the detection of SNP TSC0059646
tttcactttctt

SEQ ID NO: 372800 - DNA, 12 bp, Artificial Sequence
  Oligonucleotide primer for the detection of SNP TSC0059647
ctattttctata

SEQ ID NO: 372801 - DNA, 12 bp, Artificial Sequence
  Oligonucleotide primer for the detection of SNP TSC0059647
aaatttctattt

SEQ ID NO: 372802 - DNA, 12 bp, Artificial Sequence
  Oligonucleotide primer for the detection of SNP TSC0059648
attatctaaaat

SEQ ID NO: 372803 - DNA, 12 bp, Artificial Sequence
  Oligonucleotide primer for the detection of SNP TSC0059648
aaaccaccaacc

SEQ ID NO: 372804 - DNA, 12 bp, Artificial Sequence
  Oligonucleotide primer for the detection of SNP TSC0059648
gttgtttgaaat

SEQ ID NO: 372805 - DNA, 12 bp, Artificial Sequence
  Oligonucleotide primer for the detection of SNP TSC0059649
tattattaaaag

SEQ ID NO: 372806 - DNA, 12 bp, Artificial Sequence
  Oligonucleotide primer for the detection of SNP TSC0059649
cattattaaaaa

SEQ ID NO: 372807 - DNA, 12 bp, Artificial Sequence
  Oligonucleotide primer for the detection of SNP TSC0059649
aggatatatttt

SEQ ID NO: 372808 - DNA, 12 bp, Artificial Sequence
  Oligonucleotide primer for the detection of SNP TSC0059655
tacatatatact

SEQ ID NO: 372809 - DNA, 12 bp, Artificial Sequence
  Oligonucleotide primer for the detection of SNP TSC0059655
taaatttatgtg

SEQ ID NO: 372810 - DNA, 12 bp, Artificial Sequence
  Oligonucleotide primer for the detection of SNP TSC0059656
ggtttgtaattt

SEQ ID NO: 372811 - DNA, 12 bp, Artificial Sequence
  Oligonucleotide primer for the detection of SNP TSC0059656
aacctataatcc

SEQ ID NO: 372812 - DNA, 12 bp, Artificial Sequence
  Oligonucleotide primer for the detection of SNP TSC0059657
ttatgaaaagaa

SEQ ID NO: 372813 - DNA, 12 bp, Artificial Sequence
  Oligonucleotide primer for the detection of SNP TSC0059660
ctccatcaacta

SEQ ID NO: 372814 - DNA, 12 bp, Artificial Sequence
  Oligonucleotide primer for the detection of SNP TSC0059660
atttttgaatat

SEQ ID NO: 372815 - DNA, 12 bp, Artificial Sequence
  Oligonucleotide primer for the detection of SNP TSC0059660
tctttaaacaca

SEQ ID NO: 372816 - DNA, 12 bp, Artificial Sequence
  Oligonucleotide primer for the detection of SNP TSC0059661
tccataccaatt

SEQ ID NO: 372817 - DNA, 12 bp, Artificial Sequence
  Oligonucleotide primer for the detection of SNP TSC0059661
aaattaatgtag

SEQ ID NO: 372818 - DNA, 12 bp, Artificial Sequence
  Oligonucleotide primer for the detection of SNP TSC0059661
aaattaacgtag

SEQ ID NO: 372819 - DNA, 12 bp, Artificial Sequence
  Oligonucleotide primer for the detection of SNP TSC0059661
aaactaacgcaa

SEQ ID NO: 372820 - DNA, 12 bp, Artificial Sequence
  Oligonucleotide primer for the detection of SNP TSC0059662
atctcaaaaaac

SEQ ID NO: 372821 - DNA, 12 bp, Artificial Sequence
  Oligonucleotide primer for the detection of SNP TSC0059662
gtagggaatttt

SEQ ID NO: 372822 - DNA, 12 bp, Artificial Sequence
  Oligonucleotide primer for the detection of SNP TSC0059662
acaaaaaatctt

SEQ ID NO: 372823 - DNA, 12 bp, Artificial Sequence
  Oligonucleotide primer for the detection of SNP TSC0059664
ctacaaactcat

SEQ ID NO: 372824 - DNA, 12 bp, Artificial Sequence
  Oligonucleotide primer for the detection of SNP TSC0059664
ctacaaactcgt

SEQ ID NO: 372825 - DNA, 12 bp, Artificial Sequence
  Oligonucleotide primer for the detection of SNP TSC0059664
attaggttgtta

SEQ ID NO: 372826 - DNA, 12 bp, Artificial Sequence
  Oligonucleotide primer for the detection of SNP TSC0059664
atcaaactatta

SEQ ID NO: 372827 - DNA, 12 bp, Artificial Sequence
  Oligonucleotide primer for the detection of SNP TSC0059664
ttataagtttgt

SEQ ID NO: 372828 - DNA, 12 bp, Artificial Sequence
  Oligonucleotide primer for the detection of SNP TSC0059664
ttataagttcgt

SEQ ID NO: 372829 - DNA, 12 bp, Artificial Sequence
  Oligonucleotide primer for the detection of SNP TSC0059665
catataaaatat

SEQ ID NO: 372830 - DNA, 12 bp, Artificial Sequence
  Oligonucleotide primer for the detection of SNP TSC0059665
ttagtttaagta

SEQ ID NO: 372831 - DNA, 12 bp, Artificial Sequence
  Oligonucleotide primer for the detection of SNP TSC0059666
cttatataaaaa

SEQ ID NO: 372832 - DNA, 12 bp, Artificial Sequence
  Oligonucleotide primer for the detection of SNP TSC0059666
agtggataggag

SEQ ID NO: 372833 - DNA, 12 bp, Artificial Sequence
  Oligonucleotide primer for the detection of SNP TSC0059666
ttttttgtatgg

SEQ ID NO: 372834 - DNA, 12 bp, Artificial Sequence
  Oligonucleotide primer for the detection of SNP TSC0059669
cctcccaatatt

SEQ ID NO: 372835 - DNA, 12 bp, Artificial Sequence
  Oligonucleotide primer for the detection of SNP TSC0059669
gaattatttata

SEQ ID NO: 372836 - DNA, 12 bp, Artificial Sequence
  Oligonucleotide primer for the detection of SNP TSC0059670
acccaatctttt

SEQ ID NO: 372837 - DNA, 12 bp, Artificial Sequence
  Oligonucleotide primer for the detection of SNP TSC0059670
gttagtatttta

SEQ ID NO: 372838 - DNA, 12 bp, Artificial Sequence
  Oligonucleotide primer for the detection of SNP TSC0059671
aaaacactctta

SEQ ID NO: 372839 - DNA, 12 bp, Artificial Sequence
  Oligonucleotide primer for the detection of SNP TSC0059671
tttgagtatggt

SEQ ID NO: 372840 - DNA, 12 bp, Artificial Sequence
  Oligonucleotide primer for the detection of SNP TSC0059672
tcacttaaaatc

SEQ ID NO: 372841 - DNA, 12 bp, Artificial Sequence
  Oligonucleotide primer for the detection of SNP TSC0059675
ctaacaaaacaa

SEQ ID NO: 372842 - DNA, 12 bp, Artificial Sequence
  Oligonucleotide primer for the detection of SNP TSC0059675
ctaacaaaacga

SEQ ID NO: 372843 - DNA, 12 bp, Artificial Sequence
  Oligonucleotide primer for the detection of SNP TSC0059675
taagattagtgt

SEQ ID NO: 372844 - DNA, 12 bp, Artificial Sequence
  Oligonucleotide primer for the detection of SNP TSC0059675
taagattagcgt

SEQ ID NO: 372845 - DNA, 12 bp, Artificial Sequence
  Oligonucleotide primer for the detection of SNP TSC0059675
caaaaccaacac

SEQ ID NO: 372846 - DNA, 12 bp, Artificial Sequence
  Oligonucleotide primer for the detection of SNP TSC0059675
caaaaccaacgc

SEQ ID NO: 372847 - DNA, 12 bp, Artificial Sequence
  Oligonucleotide primer for the detection of SNP TSC0059675
ttggtaagatgg

SEQ ID NO: 372848 - DNA, 12 bp, Artificial Sequence
  Oligonucleotide primer for the detection of SNP TSC0059675
ttggtaagacgg

SEQ ID NO: 372849 - DNA, 12 bp, Artificial Sequence
  Oligonucleotide primer for the detection of SNP TSC0059677
cccaaaatccca

SEQ ID NO: 372850 - DNA, 12 bp, Artificial Sequence
  Oligonucleotide primer for the detection of SNP TSC0059677
tccaacttcccc

SEQ ID NO: 372851 - DNA, 12 bp, Artificial Sequence
  Oligonucleotide primer for the detection of SNP TSC0059686
tacctaccttta

SEQ ID NO: 372852 - DNA, 12 bp, Artificial Sequence
  Oligonucleotide primer for the detection of SNP TSC0059686
aaagagagagag

SEQ ID NO: 372853 - DNA, 12 bp, Artificial Sequence
  Oligonucleotide primer for the detection of SNP TSC0059688
aaacctacctac

SEQ ID NO: 372854 - DNA, 12 bp, Artificial Sequence
  Oligonucleotide primer for the detection of SNP TSC0059688
agagaaagaaat

SEQ ID NO: 372855 - DNA, 12 bp, Artificial Sequence
  Oligonucleotide primer for the detection of SNP TSC0059688
agatttatttat

SEQ ID NO: 372856 - DNA, 12 bp, Artificial Sequence
  Oligonucleotide primer for the detection of SNP TSC0059689
tttctttctttc

SEQ ID NO: 372857 - DNA, 12 bp, Artificial Sequence
  Oligonucleotide primer for the detection of SNP TSC0059693
aacctataatat

SEQ ID NO: 372858 - DNA, 12 bp, Artificial Sequence
  Oligonucleotide primer for the detection of SNP TSC0059693
aaaattaataga

SEQ ID NO: 372859 - DNA, 12 bp, Artificial Sequence
  Oligonucleotide primer for the detection of SNP TSC0059693
ggtttatagtgt

SEQ ID NO: 372860 - DNA, 12 bp, Artificial Sequence
  Oligonucleotide primer for the detection of SNP TSC0059694
acccattacact

SEQ ID NO: 372861 - DNA, 12 bp, Artificial Sequence
  Oligonucleotide primer for the detection of SNP TSC0059694
acccgttacact

SEQ ID NO: 372862 - DNA, 12 bp, Artificial Sequence
  Oligonucleotide primer for the detection of SNP TSC0059694
aggaggttgtgg

SEQ ID NO: 372863 - DNA, 12 bp, Artificial Sequence
  Oligonucleotide primer for the detection of SNP TSC0059695
tatcaacaatta

SEQ ID NO: 372864 - DNA, 12 bp, Artificial Sequence
  Oligonucleotide primer for the detection of SNP TSC0059695
agtattattgtt

SEQ ID NO: 372865 - DNA, 12 bp, Artificial Sequence
  Oligonucleotide primer for the detection of SNP TSC0059695
catcactattaa

SEQ ID NO: 372866 - DNA, 12 bp, Artificial Sequence
  Oligonucleotide primer for the detection of SNP TSC0059696
tttcaatcacta

SEQ ID NO: 372867 - DNA, 12 bp, Artificial Sequence
  Oligonucleotide primer for the detection of SNP TSC0059696
ggatgaagtttt

SEQ ID NO: 372868 - DNA, 12 bp, Artificial Sequence
  Oligonucleotide primer for the detection of SNP TSC0059697
tctttctcttcc

SEQ ID NO: 372869 - DNA, 12 bp, Artificial Sequence
  Oligonucleotide primer for the detection of SNP TSC0059697
ttggtatgttta

SEQ ID NO: 372870 - DNA, 12 bp, Artificial Sequence
  Oligonucleotide primer for the detection of SNP TSC0059698
taaaacgccaaa

SEQ ID NO: 372871 - DNA, 12 bp, Artificial Sequence
  Oligonucleotide primer for the detection of SNP TSC0059698
ttatacctacta

SEQ ID NO: 372872 - DNA, 12 bp, Artificial Sequence
  Oligonucleotide primer for the detection of SNP TSC0059698
tgagatgttagg

SEQ ID NO: 372873 - DNA, 12 bp, Artificial Sequence
  Oligonucleotide primer for the detection of SNP TSC0059698
tgagacgttagg

SEQ ID NO: 372874 - DNA, 12 bp, Artificial Sequence
  Oligonucleotide primer for the detection of SNP TSC0059700
aaattacttcac

SEQ ID NO: 372875 - DNA, 12 bp, Artificial Sequence
  Oligonucleotide primer for the detection of SNP TSC0059700
gggttatagaga

SEQ ID NO: 372876 - DNA, 12 bp, Artificial Sequence
  Oligonucleotide primer for the detection of SNP TSC0059701
aatatctatcac

SEQ ID NO: 372877 - DNA, 12 bp, Artificial Sequence
  Oligonucleotide primer for the detection of SNP TSC0059702
atacattaaaac

SEQ ID NO: 372878 - DNA, 12 bp, Artificial Sequence
  Oligonucleotide primer for the detection of SNP TSC0059702
atggtgtgtaag

SEQ ID NO: 372879 - DNA, 12 bp, Artificial Sequence
  Oligonucleotide primer for the detection of SNP TSC0059702
acggtgtgtaag

SEQ ID NO: 372880 - DNA, 12 bp, Artificial Sequence
  Oligonucleotide primer for the detection of SNP TSC0059702
atggtgcgtaag

SEQ ID NO: 372881 - DNA, 12 bp, Artificial Sequence
  Oligonucleotide primer for the detection of SNP TSC0059702
acggtgcgtaag

SEQ ID NO: 372882 - DNA, 12 bp, Artificial Sequence
  Oligonucleotide primer for the detection of SNP TSC0059704
cctctccaactc

SEQ ID NO: 372883 - DNA, 12 bp, Artificial Sequence
  Oligonucleotide primer for the detection of SNP TSC0059704
gaagtagttatt

SEQ ID NO: 372884 - DNA, 12 bp, Artificial Sequence
  Oligonucleotide primer for the detection of SNP TSC0059704
aaacaatcatca

SEQ ID NO: 372885 - DNA, 12 bp, Artificial Sequence
  Oligonucleotide primer for the detection of SNP TSC0059705
atctactactta

SEQ ID NO: 372886 - DNA, 12 bp, Artificial Sequence
  Oligonucleotide primer for the detection of SNP TSC0059705
ttctatatctta

SEQ ID NO: 372887 - DNA, 12 bp, Artificial Sequence
  Oligonucleotide primer for the detection of SNP TSC0059705
agtttattgttt

SEQ ID NO: 372888 - DNA, 12 bp, Artificial Sequence
  Oligonucleotide primer for the detection of SNP TSC0059706
caaaaaaacaat

SEQ ID NO: 372889 - DNA, 12 bp, Artificial Sequence
  Oligonucleotide primer for the detection of SNP TSC0059707
acatacaaccta

SEQ ID NO: 372890 - DNA, 12 bp, Artificial Sequence
  Oligonucleotide primer for the detection of SNP TSC0059707
acgtacaaccta

SEQ ID NO: 372891 - DNA, 12 bp, Artificial Sequence
  Oligonucleotide primer for the detection of SNP TSC0059707
tatgtgaaggat

SEQ ID NO: 372892 - DNA, 12 bp, Artificial Sequence
  Oligonucleotide primer for the detection of SNP TSC0059707
aatgtgtagttt

SEQ ID NO: 372893 - DNA, 12 bp, Artificial Sequence
  Oligonucleotide primer for the detection of SNP TSC0059707
aacgtgtagttt

SEQ ID NO: 372894 - DNA, 12 bp, Artificial Sequence
  Oligonukleotid-Primer
cataacaattac

SEQ ID NO: 372895 - DNA, 12 bp, Artificial Sequence
  Oligonucleotide primer for the detection of SNP TSC0059708
tagtttatagtg

SEQ ID NO: 372896 - DNA, 12 bp, Artificial Sequence
  Oligonucleotide primer for the detection of SNP TSC0059713
ctaatataaaaa

SEQ ID NO: 372897 - DNA, 12 bp, Artificial Sequence
  Oligonucleotide primer for the detection of SNP TSC0059713
ttagtgtgagaa

SEQ ID NO: 372898 - DNA, 12 bp, Artificial Sequence
  Oligonukleotid-Primer
tataataactta

SEQ ID NO: 372899 - DNA, 12 bp, Artificial Sequence
  Oligonucleotide primer for the detection of SNP TSC0059714
tattgggattat

SEQ ID NO: 372900 - DNA, 12 bp, Artificial Sequence
  Oligonucleotide primer for the detection of SNP TSC0059719
tataactaatct

SEQ ID NO: 372901 - DNA, 12 bp, Artificial Sequence
  Oligonucleotide primer for the detection of SNP TSC0059722
taaacattaatt

SEQ ID NO: 372902 - DNA, 12 bp, Artificial Sequence
  Oligonucleotide primer for the detection of SNP TSC0059722
ttttaagtaaga

SEQ ID NO: 372903 - DNA, 12 bp, Artificial Sequence
  Oligonucleotide primer for the detection of SNP TSC0059722
tcctaaacaaaa

SEQ ID NO: 372904 - DNA, 12 bp, Artificial Sequence
  Oligonucleotide primer for the detection of SNP TSC0059722
tggatattaatt

SEQ ID NO: 372905 - DNA, 12 bp, Artificial Sequence
  Oligonucleotide primer for the detection of SNP TSC0059724
caacactataat

SEQ ID NO: 372906 - DNA, 12 bp, Artificial Sequence
  Oligonucleotide primer for the detection of SNP TSC0059724
caacgctataat

SEQ ID NO: 372907 - DNA, 12 bp, Artificial Sequence
  Oligonucleotide primer for the detection of SNP TSC0059724
gaatttcaaaaa

SEQ ID NO: 372908 - DNA, 12 bp, Artificial Sequence
  Oligonucleotide primer for the detection of SNP TSC0059724
agtgttatgatt

SEQ ID NO: 372909 - DNA, 12 bp, Artificial Sequence
  Oligonucleotide primer for the detection of SNP TSC0059724
agcgttatgatt

SEQ ID NO: 372910 - DNA, 12 bp, Artificial Sequence
  Oligonucleotide primer for the detection of SNP TSC0059726
cctatataatat

SEQ ID NO: 372911 - DNA, 12 bp, Artificial Sequence
  Oligonucleotide primer for the detection of SNP TSC0059726
tccattttcccc

SEQ ID NO: 372912 - DNA, 12 bp, Artificial Sequence
  Oligonucleotide primer for the detection of SNP TSC0059726
tttatatggtgt

SEQ ID NO: 372913 - DNA, 12 bp, Artificial Sequence
  Oligonucleotide primer for the detection of SNP TSC0059727
cataattatata

SEQ ID NO: 372914 - DNA, 12 bp, Artificial Sequence
  Oligonucleotide primer for the detection of SNP TSC0059727
cgtaattatata

SEQ ID NO: 372915 - DNA, 12 bp, Artificial Sequence
  Oligonucleotide primer for the detection of SNP TSC0059727
ttggggtaagtt

SEQ ID NO: 372916 - DNA, 12 bp, Artificial Sequence
  Oligonucleotide primer for the detection of SNP TSC0059727
taaaacaaacta

SEQ ID NO: 372917 - DNA, 12 bp, Artificial Sequence
  Oligonucleotide primer for the detection of SNP TSC0059727
tgtggttatgta

SEQ ID NO: 372918 - DNA, 12 bp, Artificial Sequence
  Oligonucleotide primer for the detection of SNP TSC0059727
cgtggttatgta

SEQ ID NO: 372919 - DNA, 12 bp, Artificial Sequence
  Oligonucleotide primer for the detection of SNP TSC0059728
tatctctattat

SEQ ID NO: 372920 - DNA, 12 bp, Artificial Sequence
  Oligonucleotide primer for the detection of SNP TSC0059728
tattggttgata

SEQ ID NO: 372921 - DNA, 12 bp, Artificial Sequence
  Oligonucleotide primer for the detection of SNP TSC0059729
atacttaaaata

SEQ ID NO: 372922 - DNA, 12 bp, Artificial Sequence
  Oligonucleotide primer for the detection of SNP TSC0059729
tatgtttgaaat

SEQ ID NO: 372923 - DNA, 12 bp, Artificial Sequence
  Oligonucleotide primer for the detection of SNP TSC0059730
cttaccccaaaa

SEQ ID NO: 372924 - DNA, 12 bp, Artificial Sequence
  Oligonucleotide primer for the detection of SNP TSC0059730
actatatactca

SEQ ID NO: 372925 - DNA, 12 bp, Artificial Sequence
  Oligonucleotide primer for the detection of SNP TSC0059730
tttgttttaaga

SEQ ID NO: 372926 - DNA, 12 bp, Artificial Sequence
  Oligonucleotide primer for the detection of SNP TSC0059731
gttgaaaaaata

SEQ ID NO: 372927 - DNA, 12 bp, Artificial Sequence
  Oligonucleotide primer for the detection of SNP TSC0059732
ataaacccactt

SEQ ID NO: 372928 - DNA, 12 bp, Artificial Sequence
  Oligonucleotide primer for the detection of SNP TSC0059732
ggatttgtgtga

SEQ ID NO: 372929 - DNA, 12 bp, Artificial Sequence
  Oligonucleotide primer for the detection of SNP TSC0059733
attcccctcata

SEQ ID NO: 372930 - DNA, 12 bp, Artificial Sequence
  Oligonucleotide primer for the detection of SNP TSC0059733
ggagaagggtgt

SEQ ID NO: 372931 - DNA, 12 bp, Artificial Sequence
  Oligonucleotide primer for the detection of SNP TSC0059734
ttgtgatagaat

SEQ ID NO: 372932 - DNA, 12 bp, Artificial Sequence
  Oligonucleotide primer for the detection of SNP TSC0059734
ctataataaaac

SEQ ID NO: 372933 - DNA, 12 bp, Artificial Sequence
  Oligonucleotide primer for the detection of SNP TSC0059734
gggatagagagg

SEQ ID NO: 372934 - DNA, 12 bp, Artificial Sequence
  Oligonucleotide primer for the detection of SNP TSC0059737
ttttaataaatt

SEQ ID NO: 372935 - DNA, 12 bp, Artificial Sequence
  Oligonucleotide primer for the detection of SNP TSC0059737
tcttaacaaatt

SEQ ID NO: 372936 - DNA, 12 bp, Artificial Sequence
  Oligonucleotide primer for the detection of SNP TSC0059737
aaagaaatatga

SEQ ID NO: 372937 - DNA, 12 bp, Artificial Sequence
  Oligonucleotide primer for the detection of SNP TSC0059738
tgaaagatatta

SEQ ID NO: 372938 - DNA, 12 bp, Artificial Sequence
  Oligonucleotide primer for the detection of SNP TSC0059740
atttctaatcac

SEQ ID NO: 372939 - DNA, 12 bp, Artificial Sequence
  Oligonucleotide primer for the detection of SNP TSC0059740
aataaagtaaaa

SEQ ID NO: 372940 - DNA, 12 bp, Artificial Sequence
  Oligonucleotide primer for the detection of SNP TSC0059741
tcatcttacaaa

SEQ ID NO: 372941 - DNA, 12 bp, Artificial Sequence
  Oligonucleotide primer for the detection of SNP TSC0059741
aagagttttatt

SEQ ID NO: 372942 - DNA, 12 bp, Artificial Sequence
  Oligonucleotide primer for the detection of SNP TSC0059742
tataatacaata

SEQ ID NO: 372943 - DNA, 12 bp, Artificial Sequence
  Oligonucleotide primer for the detection of SNP TSC0059742
tttatgttatgt

SEQ ID NO: 372944 - DNA, 12 bp, Artificial Sequence
  Oligonucleotide primer for the detection of SNP TSC0059743
attttcccaaaa

SEQ ID NO: 372945 - DNA, 12 bp, Artificial Sequence
  Oligonucleotide primer for the detection of SNP TSC0059743
ctatctaaacta

SEQ ID NO: 372946 - DNA, 12 bp, Artificial Sequence
  Oligonukleotid-Primer
gtttttttaggg

SEQ ID NO: 372947 - DNA, 12 bp, Artificial Sequence
  Oligonucleotide primer for the detection of SNP TSC0059744
tcttacataatt

SEQ ID NO: 372948 - DNA, 12 bp, Artificial Sequence
  Oligonucleotide primer for the detection of SNP TSC0059745
atatctattttc

SEQ ID NO: 372949 - DNA, 12 bp, Artificial Sequence
  Oligonucleotide primer for the detection of SNP TSC0059745
tgtgatgtttta

SEQ ID NO: 372950 - DNA, 12 bp, Artificial Sequence
  Oligonucleotide primer for the detection of SNP TSC0059746
attgtttttttg

SEQ ID NO: 372951 - DNA, 12 bp, Artificial Sequence
  Oligonucleotide primer for the detection of SNP TSC0059746
ctaccttcctaa

SEQ ID NO: 372952 - DNA, 12 bp, Artificial Sequence
  Oligonucleotide primer for the detection of SNP TSC0059746
ttaggaaaaggg

SEQ ID NO: 372953 - DNA, 12 bp, Artificial Sequence
  Oligonucleotide primer for the detection of SNP TSC0059747
acaactaccttc

SEQ ID NO: 372954 - DNA, 12 bp, Artificial Sequence
  Oligonukleotid-Primer
gaaaagggttta

SEQ ID NO: 372955 - DNA, 12 bp, Artificial Sequence
  Oligonucleotide primer for the detection of SNP TSC0059748
atttggggtgtt

SEQ ID NO: 372956 - DNA, 12 bp, Artificial Sequence
  Oligonucleotide primer for the detection of SNP TSC0059748
attcggggtgtt

SEQ ID NO: 372957 - DNA, 12 bp, Artificial Sequence
  Oligonucleotide primer for the detection of SNP TSC0059748
acccgaaatatc

SEQ ID NO: 372958 - DNA, 12 bp, Artificial Sequence
  Oligonucleotide primer for the detection of SNP TSC0059748
aagggttatagt

SEQ ID NO: 372959 - DNA, 12 bp, Artificial Sequence
  Oligonucleotide primer for the detection of SNP TSC0059748
aagggttatagc

SEQ ID NO: 372960 - DNA, 12 bp, Artificial Sequence
  Oligonucleotide primer for the detection of SNP TSC0059749
aaaaacactctt

SEQ ID NO: 372961 - DNA, 12 bp, Artificial Sequence
  Oligonucleotide primer for the detection of SNP TSC0059749
ttatttggggtg

SEQ ID NO: 372962 - DNA, 12 bp, Artificial Sequence
  Oligonucleotide primer for the detection of SNP TSC0059749
ttattcggggtg

SEQ ID NO: 372963 - DNA, 12 bp, Artificial Sequence
  Oligonucleotide primer for the detection of SNP TSC0059750
caaaaattttct

SEQ ID NO: 372964 - DNA, 12 bp, Artificial Sequence
  Oligonucleotide primer for the detection of SNP TSC0059750
ttttatatgtaa

SEQ ID NO: 372965 - DNA, 12 bp, Artificial Sequence
  Oligonucleotide primer for the detection of SNP TSC0059752
tttgagatatat

SEQ ID NO: 372966 - DNA, 12 bp, Artificial Sequence
  Oligonucleotide primer for the detection of SNP TSC0059752
tctaaaacacat

SEQ ID NO: 372967 - DNA, 12 bp, Artificial Sequence
  Oligonucleotide primer for the detection of SNP TSC0059752
aagagatagaga

SEQ ID NO: 372968 - DNA, 12 bp, Artificial Sequence
  Oligonucleotide primer for the detection of SNP TSC0059753
caattttctttt

SEQ ID NO: 372969 - DNA, 12 bp, Artificial Sequence
  Oligonucleotide primer for the detection of SNP TSC0059753
cgattttctttt

SEQ ID NO: 372970 - DNA, 12 bp, Artificial Sequence
  Oligonucleotide primer for the detection of SNP TSC0059753
ttttataaagga

SEQ ID NO: 372971 - DNA, 12 bp, Artificial Sequence
  Oligonucleotide primer for the detection of SNP TSC0059755
aaattataatcc

SEQ ID NO: 372972 - DNA, 12 bp, Artificial Sequence
  Oligonucleotide primer for the detection of SNP TSC0059755
cttcaacaccta

SEQ ID NO: 372973 - DNA, 12 bp, Artificial Sequence
  Oligonucleotide primer for the detection of SNP TSC0059757
cttaaaattacc

SEQ ID NO: 372974 - DNA, 12 bp, Artificial Sequence
  Oligonucleotide primer for the detection of SNP TSC0059757
gaattttgaaga

SEQ ID NO: 372975 - DNA, 12 bp, Artificial Sequence
  Oligonucleotide primer for the detection of SNP TSC0059759
gggaatggttag

SEQ ID NO: 372976 - DNA, 12 bp, Artificial Sequence
  Oligonucleotide primer for the detection of SNP TSC0059760
tctcacaaacat

SEQ ID NO: 372977 - DNA, 12 bp, Artificial Sequence
  Oligonucleotide primer for the detection of SNP TSC0059760
tcttcctatcta

SEQ ID NO: 372978 - DNA, 12 bp, Artificial Sequence
  Oligonucleotide primer for the detection of SNP TSC0059761
tagggggtagat

SEQ ID NO: 372979 - DNA, 12 bp, Artificial Sequence
  Oligonucleotide primer for the detection of SNP TSC0059761
taggaaatagga

SEQ ID NO: 372980 - DNA, 12 bp, Artificial Sequence
  Oligonucleotide primer for the detection of SNP TSC0059762
atctacctcaac

SEQ ID NO: 372981 - DNA, 12 bp, Artificial Sequence
  Oligonucleotide primer for the detection of SNP TSC0059762
gtctacctcaac

SEQ ID NO: 372982 - DNA, 12 bp, Artificial Sequence
  Oligonucleotide primer for the detection of SNP TSC0059762
atggtttgtgtg

SEQ ID NO: 372983 - DNA, 12 bp, Artificial Sequence
  Oligonucleotide primer for the detection of SNP TSC0059763
tcacctctcaac

SEQ ID NO: 372984 - DNA, 12 bp, Artificial Sequence
  Oligonucleotide primer for the detection of SNP TSC0059763
gtttagtgaatg

SEQ ID NO: 372985 - DNA, 12 bp, Artificial Sequence
  Oligonucleotide primer for the detection of SNP TSC0059764
atccaaataaac

SEQ ID NO: 372986 - DNA, 12 bp, Artificial Sequence
  Oligonucleotide primer for the detection of SNP TSC0059764
ttgattatattg

SEQ ID NO: 372987 - DNA, 12 bp, Artificial Sequence
  Oligonucleotide primer for the detection of SNP TSC0059764
ttgattatatcg

SEQ ID NO: 372988 - DNA, 12 bp, Artificial Sequence
  Oligonucleotide primer for the detection of SNP TSC0059765
gttttaaaatta

SEQ ID NO: 372989 - DNA, 12 bp, Artificial Sequence
  Oligonucleotide primer for the detection of SNP TSC0059766
ttatttcttaaa

SEQ ID NO: 372990 - DNA, 12 bp, Artificial Sequence
  Oligonucleotide primer for the detection of SNP TSC0059769
atccctatcatt

SEQ ID NO: 372991 - DNA, 12 bp, Artificial Sequence
  Oligonucleotide primer for the detection of SNP TSC0059769
tatagttaagta

SEQ ID NO: 372992 - DNA, 12 bp, Artificial Sequence
  Oligonucleotide primer for the detection of SNP TSC0059769
tacaattaaata

SEQ ID NO: 372993 - DNA, 12 bp, Artificial Sequence
  Oligonucleotide primer for the detection of SNP TSC0059770
aatatccctaca

SEQ ID NO: 372994 - DNA, 12 bp, Artificial Sequence
  Oligonucleotide primer for the detection of SNP TSC0059770
gtatttttaggt

SEQ ID NO: 372995 - DNA, 12 bp, Artificial Sequence
  Oligonucleotide primer for the detection of SNP TSC0059770
catccctaaata

SEQ ID NO: 372996 - DNA, 12 bp, Artificial Sequence
  Oligonucleotide primer for the detection of SNP TSC0059772
atttatatactt

SEQ ID NO: 372997 - DNA, 12 bp, Artificial Sequence
  Oligonucleotide primer for the detection of SNP TSC0059773
aatctcaaacgt

SEQ ID NO: 372998 - DNA, 12 bp, Artificial Sequence
  Oligonucleotide primer for the detection of SNP TSC0059773
aatctcgaacat

SEQ ID NO: 372999 - DNA, 12 bp, Artificial Sequence
  Oligonucleotide primer for the detection of SNP TSC0059773
aatctcgaacgt

SEQ ID NO: 373000 - DNA, 12 bp, Artificial Sequence
  Oligonucleotide primer for the detection of SNP TSC0059773
tattggatggtg

SEQ ID NO: 373001 - DNA, 12 bp, Artificial Sequence
  Oligonucleotide primer for the detection of SNP TSC0059774
ttctaacctcca

SEQ ID NO: 373002 - DNA, 12 bp, Artificial Sequence
  Oligonucleotide primer for the detection of SNP TSC0059776
accgaacataat

SEQ ID NO: 373003 - DNA, 12 bp, Artificial Sequence
  Oligonucleotide primer for the detection of SNP TSC0059776
gttgggtatggt

SEQ ID NO: 373004 - DNA, 12 bp, Artificial Sequence
  Oligonucleotide primer for the detection of SNP TSC0059776
gtcgggtatggt

SEQ ID NO: 373005 - DNA, 12 bp, Artificial Sequence
  Oligonucleotide primer for the detection of SNP TSC0059781
atcttataatat

SEQ ID NO: 373006 - DNA, 12 bp, Artificial Sequence
  Oligonucleotide primer for the detection of SNP TSC0059781
atgttaagggga

SEQ ID NO: 373007 - DNA, 12 bp, Artificial Sequence
  Oligonucleotide primer for the detection of SNP TSC0059782
tttaatcccctc

SEQ ID NO: 373008 - DNA, 12 bp, Artificial Sequence
  Oligonucleotide primer for the detection of SNP TSC0059784
tcaaacatttat

SEQ ID NO: 373009 - DNA, 12 bp, Artificial Sequence
  Oligonucleotide primer for the detection of SNP TSC0059784
taggtaagttga

SEQ ID NO: 373010 - DNA, 12 bp, Artificial Sequence
  Oligonucleotide primer for the detection of SNP TSC0059785
ttttcaaacaac

SEQ ID NO: 373011 - DNA, 12 bp, Artificial Sequence
  Oligonucleotide primer for the detection of SNP TSC0059785
aaatttttataa

SEQ ID NO: 373012 - DNA, 12 bp, Artificial Sequence
  Oligonucleotide primer for the detection of SNP TSC0059786
tataactatata

SEQ ID NO: 373013 - DNA, 12 bp, Artificial Sequence
  Oligonucleotide primer for the detection of SNP TSC0059786
ttgggggagatt

SEQ ID NO: 373014 - DNA, 12 bp, Artificial Sequence
  Oligonucleotide primer for the detection of SNP TSC0059786
tgtagttgtatg

SEQ ID NO: 373015 - DNA, 12 bp, Artificial Sequence
  Oligonucleotide primer for the detection of SNP TSC0059787
ctcataataaca

SEQ ID NO: 373016 - DNA, 12 bp, Artificial Sequence
  Oligonucleotide primer for the detection of SNP TSC0059787
tacctctaaatt

SEQ ID NO: 373017 - DNA, 12 bp, Artificial Sequence
  Oligonucleotide primer for the detection of SNP TSC0059787
tttataatagta

SEQ ID NO: 373018 - DNA, 12 bp, Artificial Sequence
  Oligonucleotide primer for the detection of SNP TSC0059788
tttttacaacca

SEQ ID NO: 373019 - DNA, 12 bp, Artificial Sequence
  Oligonucleotide primer for the detection of SNP TSC0059788
aagaatttttat

SEQ ID NO: 373020 - DNA, 12 bp, Artificial Sequence
  Oligonucleotide primer for the detection of SNP TSC0059788
aaaaatcctcac

SEQ ID NO: 373021 - DNA, 12 bp, Artificial Sequence
  Oligonucleotide primer for the detection of SNP TSC0059789
attatttaaaat

SEQ ID NO: 373022 - DNA, 12 bp, Artificial Sequence
  Oligonucleotide primer for the detection of SNP TSC0059789
tgatagagcgag

SEQ ID NO: 373023 - DNA, 12 bp, Artificial Sequence
  Oligonucleotide primer for the detection of SNP TSC0059794
aaatcatattct

SEQ ID NO: 373024 - DNA, 12 bp, Artificial Sequence
  Oligonucleotide primer for the detection of SNP TSC0059797
gtgtttataaag

SEQ ID NO: 373025 - DNA, 12 bp, Artificial Sequence
  Oligonucleotide primer for the detection of SNP TSC0059798
taatacttacaa

SEQ ID NO: 373026 - DNA, 12 bp, Artificial Sequence
  Oligonucleotide primer for the detection of SNP TSC0059798
ttattgtgtaat

SEQ ID NO: 373027 - DNA, 12 bp, Artificial Sequence
  Oligonucleotide primer for the detection of SNP TSC0059798
ctactatataac

SEQ ID NO: 373028 - DNA, 12 bp, Artificial Sequence
  Oligonucleotide primer for the detection of SNP TSC0059798
tagtatttatag

SEQ ID NO: 373029 - DNA, 12 bp, Artificial Sequence
  Oligonucleotide primer for the detection of SNP TSC0059799
ttccactttact

SEQ ID NO: 373030 - DNA, 12 bp, Artificial Sequence
  Oligonucleotide primer for the detection of SNP TSC0059800
ataaatatacta

SEQ ID NO: 373031 - DNA, 12 bp, Artificial Sequence
  Oligonucleotide primer for the detection of SNP TSC0059800
tatttcttcata

SEQ ID NO: 373032 - DNA, 12 bp, Artificial Sequence
  Oligonucleotide primer for the detection of SNP TSC0059800
ggtgaatatatt

SEQ ID NO: 373033 - DNA, 12 bp, Artificial Sequence
  Oligonucleotide primer for the detection of SNP TSC0059803
tcttcttccaat

SEQ ID NO: 373034 - DNA, 12 bp, Artificial Sequence
  Oligonucleotide primer for the detection of SNP TSC0059803
ggtttttttggg

SEQ ID NO: 373035 - DNA, 12 bp, Artificial Sequence
  Oligonucleotide primer for the detection of SNP TSC0059803
aatttccctaaa

SEQ ID NO: 373036 - DNA, 12 bp, Artificial Sequence
  Oligonucleotide primer for the detection of SNP TSC0059804
atttactcatat

SEQ ID NO: 373037 - DNA, 12 bp, Artificial Sequence
  Oligonucleotide primer for the detection of SNP TSC0059804
ttaggaatttag

SEQ ID NO: 373038 - DNA, 12 bp, Artificial Sequence
  Oligonucleotide primer for the detection of SNP TSC0059805
taatctaatatt

SEQ ID NO: 373039 - DNA, 12 bp, Artificial Sequence
  Oligonucleotide primer for the detection of SNP TSC0059805
aatgaagtggaa

SEQ ID NO: 373040 - DNA, 12 bp, Artificial Sequence
  Oligonucleotide primer for the detection of SNP TSC0059806
cactctataaac

SEQ ID NO: 373041 - DNA, 12 bp, Artificial Sequence
  Oligonucleotide primer for the detection of SNP TSC0059806
cgctctataaac

SEQ ID NO: 373042 - DNA, 12 bp, Artificial Sequence
  Oligonucleotide primer for the detection of SNP TSC0059807
aaactcctaact

SEQ ID NO: 373043 - DNA, 12 bp, Artificial Sequence
  Oligonucleotide primer for the detection of SNP TSC0059808
ttttttctatac

SEQ ID NO: 373044 - DNA, 12 bp, Artificial Sequence
  Oligonucleotide primer for the detection of SNP TSC0059808
tagttaggagtt

SEQ ID NO: 373045 - DNA, 12 bp, Artificial Sequence
  Oligonucleotide primer for the detection of SNP TSC0059808
taatcaaaaact

SEQ ID NO: 373046 - DNA, 12 bp, Artificial Sequence
  Oligonucleotide primer for the detection of SNP TSC0059814
aagtaattgata

SEQ ID NO: 373047 - DNA, 12 bp, Artificial Sequence
  Oligonucleotide primer for the detection of SNP TSC0059815
tttaaacctaat

SEQ ID NO: 373048 - DNA, 12 bp, Artificial Sequence
  Oligonucleotide primer for the detection of SNP TSC0059815
ggttggagagta

SEQ ID NO: 373049 - DNA, 12 bp, Artificial Sequence
  Oligonucleotide primer for the detection of SNP TSC0059817
caataccaaaca

SEQ ID NO: 373050 - DNA, 12 bp, Artificial Sequence
  Oligonucleotide primer for the detection of SNP TSC0059817
ttttgggttgtg

SEQ ID NO: 373051 - DNA, 12 bp, Artificial Sequence
  Oligonucleotide primer for the detection of SNP TSC0059817
taatattaaata

SEQ ID NO: 373052 - DNA, 12 bp, Artificial Sequence
  Oligonucleotide primer for the detection of SNP TSC0059818
taaatataactt

SEQ ID NO: 373053 - DNA, 12 bp, Artificial Sequence
  Oligonucleotide primer for the detection of SNP TSC0059819
taacaaaaaaca

SEQ ID NO: 373054 - DNA, 12 bp, Artificial Sequence
  Oligonucleotide primer for the detection of SNP TSC0059819
gaaggaaattgt

SEQ ID NO: 373055 - DNA, 12 bp, Artificial Sequence
  Oligonucleotide primer for the detection of SNP TSC0059819
tagtaagagata

SEQ ID NO: 373056 - DNA, 12 bp, Artificial Sequence
  Oligonucleotide primer for the detection of SNP TSC0059820
attataccctta

SEQ ID NO: 373057 - DNA, 12 bp, Artificial Sequence
  Oligonucleotide primer for the detection of SNP TSC0059820
ttattaaattgt

SEQ ID NO: 373058 - DNA, 12 bp, Artificial Sequence
  Oligonucleotide primer for the detection of SNP TSC0059820
ttattaaattgc

SEQ ID NO: 373059 - DNA, 12 bp, Artificial Sequence
  Oligonucleotide primer for the detection of SNP TSC0059820
ctattaaattac

SEQ ID NO: 373060 - DNA, 12 bp, Artificial Sequence
  Oligonucleotide primer for the detection of SNP TSC0059823
ctattacaataa

SEQ ID NO: 373061 - DNA, 12 bp, Artificial Sequence
  Oligonucleotide primer for the detection of SNP TSC0059823
aagtttttattt

SEQ ID NO: 373062 - DNA, 12 bp, Artificial Sequence
  Oligonucleotide primer for the detection of SNP TSC0059823
acctttattcaa

SEQ ID NO: 373063 - DNA, 12 bp, Artificial Sequence
  Oligonucleotide primer for the detection of SNP TSC0059823
tattgtaatagt

SEQ ID NO: 373064 - DNA, 12 bp, Artificial Sequence
  Oligonucleotide primer for the detection of SNP TSC0059824
ttataaagttag

SEQ ID NO: 373065 - DNA, 12 bp, Artificial Sequence
  Oligonucleotide primer for the detection of SNP TSC0059825
acttcatacaaa

SEQ ID NO: 373066 - DNA, 12 bp, Artificial Sequence
  Oligonucleotide primer for the detection of SNP TSC0059825
ataatttggtag

SEQ ID NO: 373067 - DNA, 12 bp, Artificial Sequence
  Oligonucleotide primer for the detection of SNP TSC0059825
acaatttaacaa

SEQ ID NO: 373068 - DNA, 12 bp, Artificial Sequence
  Oligonucleotide primer for the detection of SNP TSC0059825
attttatgtaaa

SEQ ID NO: 373069 - DNA, 12 bp, Artificial Sequence
  Oligonucleotide primer for the detection of SNP TSC0059826
tgtaaatttgtt

SEQ ID NO: 373070 - DNA, 12 bp, Artificial Sequence
  Oligonucleotide primer for the detection of SNP TSC0059827
ttaaccatttta

SEQ ID NO: 373071 - DNA, 12 bp, Artificial Sequence
  Oligonucleotide primer for the detection of SNP TSC0059827
gttgatggaagt

SEQ ID NO: 373072 - DNA, 12 bp, Artificial Sequence
  Oligonucleotide primer for the detection of SNP TSC0059827
gtcgatggaagt

SEQ ID NO: 373073 - DNA, 12 bp, Artificial Sequence
  Oligonucleotide primer for the detection of SNP TSC0059827
tatcaataaaaa

SEQ ID NO: 373074 - DNA, 12 bp, Artificial Sequence
  Oligonucleotide primer for the detection of SNP TSC0059827
tatcgataaaaa

SEQ ID NO: 373075 - DNA, 12 bp, Artificial Sequence
  Oligonucleotide primer for the detection of SNP TSC0059828
attttacggtta

SEQ ID NO: 373076 - DNA, 12 bp, Artificial Sequence
  Oligonucleotide primer for the detection of SNP TSC0059830
caccatctcact

SEQ ID NO: 373077 - DNA, 12 bp, Artificial Sequence
  Oligonucleotide primer for the detection of SNP TSC0059830
caccgtctcact

SEQ ID NO: 373078 - DNA, 12 bp, Artificial Sequence
  Oligonucleotide primer for the detection of SNP TSC0059831
tatttgattatt

SEQ ID NO: 373079 - DNA, 12 bp, Artificial Sequence
  Oligonucleotide primer for the detection of SNP TSC0059831
tatctaactatc

SEQ ID NO: 373080 - DNA, 12 bp, Artificial Sequence
  Oligonucleotide primer for the detection of SNP TSC0059831
tttatgtagtta

SEQ ID NO: 373081 - DNA, 12 bp, Artificial Sequence
  Oligonucleotide primer for the detection of SNP TSC0059832
actataattata

SEQ ID NO: 373082 - DNA, 12 bp, Artificial Sequence
  Oligonucleotide primer for the detection of SNP TSC0059832
attatagttata

SEQ ID NO: 373083 - DNA, 12 bp, Artificial Sequence
  Oligonucleotide primer for the detection of SNP TSC0059833
atataaatttct

SEQ ID NO: 373084 - DNA, 12 bp, Artificial Sequence
  Oligonucleotide primer for the detection of SNP TSC0059833
ttataagtggag

SEQ ID NO: 373085 - DNA, 12 bp, Artificial Sequence
  Oligonucleotide primer for the detection of SNP TSC0059834
attacaattaac

SEQ ID NO: 373086 - DNA, 12 bp, Artificial Sequence
  Oligonucleotide primer for the detection of SNP TSC0059834
gtggtggtataa

SEQ ID NO: 373087 - DNA, 12 bp, Artificial Sequence
  Oligonucleotide primer for the detection of SNP TSC0059835
ataaaattaatt

SEQ ID NO: 373088 - DNA, 12 bp, Artificial Sequence
  Oligonucleotide primer for the detection of SNP TSC0059835
gttgaatatttg

SEQ ID NO: 373089 - DNA, 12 bp, Artificial Sequence
  Oligonucleotide primer for the detection of SNP TSC0059836
taaataaatcaa

SEQ ID NO: 373090 - DNA, 12 bp, Artificial Sequence
  Oligonucleotide primer for the detection of SNP TSC0059836
tgattggagaaa

SEQ ID NO: 373091 - DNA, 12 bp, Artificial Sequence
  Oligonucleotide primer for the detection of SNP TSC0059836
tgggtgaattag

SEQ ID NO: 373092 - DNA, 12 bp, Artificial Sequence
  Oligonucleotide primer for the detection of SNP TSC0059837
gattttagatgt

SEQ ID NO: 373093 - DNA, 12 bp, Artificial Sequence
  Oligonucleotide primer for the detection of SNP TSC0059837
tttgataaagtt

SEQ ID NO: 373094 - DNA, 12 bp, Artificial Sequence
  Oligonucleotide primer for the detection of SNP TSC0059838
actatatcctta

SEQ ID NO: 373095 - DNA, 12 bp, Artificial Sequence
  Oligonucleotide primer for the detection of SNP TSC0059838
gtgaaaggtatt

SEQ ID NO: 373096 - DNA, 12 bp, Artificial Sequence
  Oligonucleotide primer for the detection of SNP TSC0059839
aaatcaaacccc

SEQ ID NO: 373097 - DNA, 12 bp, Artificial Sequence
  Oligonucleotide primer for the detection of SNP TSC0059839
gtgggagtgaag

SEQ ID NO: 373098 - DNA, 12 bp, Artificial Sequence
  Oligonucleotide primer for the detection of SNP TSC0059839
aaattagatttt

SEQ ID NO: 373099 - DNA, 12 bp, Artificial Sequence
  Oligonucleotide primer for the detection of SNP TSC0059839
aaattagatttc

SEQ ID NO: 373100 - DNA, 12 bp, Artificial Sequence
  Oligonucleotide primer for the detection of SNP TSC0059843
tttctaaaactt

SEQ ID NO: 373101 - DNA, 12 bp, Artificial Sequence
  Oligonucleotide primer for the detection of SNP TSC0059845
ataacccatatc

SEQ ID NO: 373102 - DNA, 12 bp, Artificial Sequence
  Oligonucleotide primer for the detection of SNP TSC0059845
gagattatataa

SEQ ID NO: 373103 - DNA, 12 bp, Artificial Sequence
  Oligonucleotide primer for the detection of SNP TSC0059846
cataaaataata

SEQ ID NO: 373104 - DNA, 12 bp, Artificial Sequence
  Oligonucleotide primer for the detection of SNP TSC0059846
taatggtgatga

SEQ ID NO: 373105 - DNA, 12 bp, Artificial Sequence
  Oligonucleotide primer for the detection of SNP TSC0059846
taacggtgatga

SEQ ID NO: 373106 - DNA, 12 bp, Artificial Sequence
  Oligonucleotide primer for the detection of SNP TSC0059846
aacgataataaa

SEQ ID NO: 373107 - DNA, 12 bp, Artificial Sequence
  Oligonucleotide primer for the detection of SNP TSC0059846
tatgaggtgata

SEQ ID NO: 373108 - DNA, 12 bp, Artificial Sequence
  Oligonucleotide primer for the detection of SNP TSC0059847
tctttccttcca

SEQ ID NO: 373109 - DNA, 12 bp, Artificial Sequence
  Oligonucleotide primer for the detection of SNP TSC0059849
ataaatattcct

SEQ ID NO: 373110 - DNA, 12 bp, Artificial Sequence
  Oligonucleotide primer for the detection of SNP TSC0059849
aagaggatgaaa

SEQ ID NO: 373111 - DNA, 12 bp, Artificial Sequence
  Oligonucleotide primer for the detection of SNP TSC0059850
accaccacgcct

SEQ ID NO: 373112 - DNA, 12 bp, Artificial Sequence
  Oligonucleotide primer for the detection of SNP TSC0059850
accaccgcacct

SEQ ID NO: 373113 - DNA, 12 bp, Artificial Sequence
  Oligonucleotide primer for the detection of SNP TSC0059850
accaccgcgcct

SEQ ID NO: 373114 - DNA, 12 bp, Artificial Sequence
  Oligonucleotide primer for the detection of SNP TSC0059850
ggtttttagttg

SEQ ID NO: 373115 - DNA, 12 bp, Artificial Sequence
  Oligonucleotide primer for the detection of SNP TSC0059850
ggtttttagtcg

SEQ ID NO: 373116 - DNA, 12 bp, Artificial Sequence
  Oligonucleotide primer for the detection of SNP TSC0009304
accctccattct

SEQ ID NO: 373117 - DNA, 12 bp, Artificial Sequence
  Oligonucleotide primer for the detection of SNP TSC0009304
taaagatgggga

SEQ ID NO: 373118 - DNA, 12 bp, Artificial Sequence
  Oligonucleotide primer for the detection of SNP TSC0059854
tcaattctttat

SEQ ID NO: 373119 - DNA, 12 bp, Artificial Sequence
  Oligonucleotide primer for the detection of SNP TSC0059854
aaattttacgga

SEQ ID NO: 373120 - DNA, 12 bp, Artificial Sequence
  Oligonucleotide primer for the detection of SNP TSC0059856
acacactcaaaa

SEQ ID NO: 373121 - DNA, 12 bp, Artificial Sequence
  Oligonucleotide primer for the detection of SNP TSC0059856
tgttcgtttttg

SEQ ID NO: 373122 - DNA, 12 bp, Artificial Sequence
  Oligonucleotide primer for the detection of SNP TSC0059856
tactcatctcta

SEQ ID NO: 373123 - DNA, 12 bp, Artificial Sequence
  Oligonucleotide primer for the detection of SNP TSC0059856
tactcgtctcta

SEQ ID NO: 373124 - DNA, 12 bp, Artificial Sequence
  Oligonucleotide primer for the detection of SNP TSC0059858
taaattaatata

SEQ ID NO: 373125 - DNA, 12 bp, Artificial Sequence
  Oligonucleotide primer for the detection of SNP TSC0059858
gagataaatttt

SEQ ID NO: 373126 - DNA, 12 bp, Artificial Sequence
  Oligonucleotide primer for the detection of SNP TSC0059858
tagattggtgta

SEQ ID NO: 373127 - DNA, 12 bp, Artificial Sequence
  Oligonucleotide primer for the detection of SNP TSC0059859
caaattcccctt

SEQ ID NO: 373128 - DNA, 12 bp, Artificial Sequence
  Oligonucleotide primer for the detection of SNP TSC0059859
tttaggtagtga

SEQ ID NO: 373129 - DNA, 12 bp, Artificial Sequence
  Oligonucleotide primer for the detection of SNP TSC0059860
aaaatgttgttg

SEQ ID NO: 373130 - DNA, 12 bp, Artificial Sequence
  Oligonucleotide primer for the detection of SNP TSC0059861
tctaaatcataa

SEQ ID NO: 373131 - DNA, 12 bp, Artificial Sequence
  Oligonucleotide primer for the detection of SNP TSC0059868
aaaaattacttt

SEQ ID NO: 373132 - DNA, 12 bp, Artificial Sequence
  Oligonucleotide primer for the detection of SNP TSC0059868
ggtaaatgataa

SEQ ID NO: 373133 - DNA, 12 bp, Artificial Sequence
  Oligonucleotide primer for the detection of SNP TSC0059869
ttattaaataaa

SEQ ID NO: 373134 - DNA, 12 bp, Artificial Sequence
  Oligonucleotide primer for the detection of SNP TSC0059869
aagattgttatt

SEQ ID NO: 373135 - DNA, 12 bp, Artificial Sequence
  Oligonucleotide primer for the detection of SNP TSC0059869
ttattgaataaa

SEQ ID NO: 373136 - DNA, 12 bp, Artificial Sequence
  Oligonucleotide primer for the detection of SNP TSC0059870
tgttgatatatt

SEQ ID NO: 373137 - DNA, 12 bp, Artificial Sequence
  Oligonucleotide primer for the detection of SNP TSC0059870
tataatggaaag

SEQ ID NO: 373138 - DNA, 12 bp, Artificial Sequence
  Oligonucleotide primer for the detection of SNP TSC0059871
gaatgtgttttc

SEQ ID NO: 373139 - DNA, 12 bp, Artificial Sequence
  Oligonucleotide primer for the detection of SNP TSC0059871
aaatatatcctc

SEQ ID NO: 373140 - DNA, 12 bp, Artificial Sequence
  Oligonucleotide primer for the detection of SNP TSC0059877
ttaacctccccc

SEQ ID NO: 373141 - DNA, 12 bp, Artificial Sequence
  Oligonucleotide primer for the detection of SNP TSC0059877
ggatattggggt

SEQ ID NO: 373142 - DNA, 12 bp, Artificial Sequence
  Oligonucleotide primer for the detection of SNP TSC0059879
aaaacacatcaa

SEQ ID NO: 373143 - DNA, 12 bp, Artificial Sequence
  Oligonucleotide primer for the detection of SNP TSC0059879
aaaacacatcga

SEQ ID NO: 373144 - DNA, 12 bp, Artificial Sequence
  Oligonucleotide primer for the detection of SNP TSC0059879
gggtttttttgt

SEQ ID NO: 373145 - DNA, 12 bp, Artificial Sequence
  Oligonucleotide primer for the detection of SNP TSC0059879
aaactcccctat

SEQ ID NO: 373146 - DNA, 12 bp, Artificial Sequence
  Oligonucleotide primer for the detection of SNP TSC0059879
agaatatattga

SEQ ID NO: 373147 - DNA, 12 bp, Artificial Sequence
  Oligonucleotide primer for the detection of SNP TSC0059879
agaatatatcga

SEQ ID NO: 373148 - DNA, 12 bp, Artificial Sequence
  Oligonucleotide primer for the detection of SNP TSC0059880
ttcaccataaca

SEQ ID NO: 373149 - DNA, 12 bp, Artificial Sequence
  Oligonucleotide primer for the detection of SNP TSC0059880
ggaagtttaata

SEQ ID NO: 373150 - DNA, 12 bp, Artificial Sequence
  Oligonucleotide primer for the detection of SNP TSC0059881
ttactataacaa

SEQ ID NO: 373151 - DNA, 12 bp, Artificial Sequence
  Oligonucleotide primer for the detection of SNP TSC0059881
acctctttaatt

SEQ ID NO: 373152 - DNA, 12 bp, Artificial Sequence
  Oligonucleotide primer for the detection of SNP TSC0059881
ttgttgtaataa

SEQ ID NO: 373153 - DNA, 12 bp, Artificial Sequence
  Oligonucleotide primer for the detection of SNP TSC0059882
aattattactat

SEQ ID NO: 373154 - DNA, 12 bp, Artificial Sequence
  Oligonucleotide primer for the detection of SNP TSC0059882
tacgaaaattgt

SEQ ID NO: 373155 - DNA, 12 bp, Artificial Sequence
  Oligonucleotide primer for the detection of SNP TSC0059882
tacaaaaattat

SEQ ID NO: 373156 - DNA, 12 bp, Artificial Sequence
  Oligonucleotide primer for the detection of SNP TSC0059882
tacgaaaattat

SEQ ID NO: 373157 - DNA, 12 bp, Artificial Sequence
  Oligonucleotide primer for the detection of SNP TSC0059882
agttgttgttgt

SEQ ID NO: 373158 - DNA, 12 bp, Artificial Sequence
  Oligonucleotide primer for the detection of SNP TSC0005865
atattcctccct

SEQ ID NO: 373159 - DNA, 12 bp, Artificial Sequence
  Oligonucleotide primer for the detection of SNP TSC0005865
tataaagaaggg

SEQ ID NO: 373160 - DNA, 12 bp, Artificial Sequence
  Oligonucleotide primer for the detection of SNP TSC0005866
actcctcacctc

SEQ ID NO: 373161 - DNA, 12 bp, Artificial Sequence
  Oligonucleotide primer for the detection of SNP TSC0005866
gaaaaataagtg

SEQ ID NO: 373162 - DNA, 12 bp, Artificial Sequence
  Oligonucleotide primer for the detection of SNP TSC0005866
attttttatttc

SEQ ID NO: 373163 - DNA, 12 bp, Artificial Sequence
  Oligonucleotide primer for the detection of SNP TSC0059883
ggttttagaggg

SEQ ID NO: 373164 - DNA, 12 bp, Artificial Sequence
  Oligonucleotide primer for the detection of SNP TSC0059886
caaaataccccc

SEQ ID NO: 373165 - DNA, 12 bp, Artificial Sequence
  Oligonucleotide primer for the detection of SNP TSC0059886
aaattagaatat

SEQ ID NO: 373166 - DNA, 12 bp, Artificial Sequence
  Oligonucleotide primer for the detection of SNP TSC0059887
caactccatcca

SEQ ID NO: 373167 - DNA, 12 bp, Artificial Sequence
  Oligonucleotide primer for the detection of SNP TSC0059887
gttttttgtggt

SEQ ID NO: 373168 - DNA, 12 bp, Artificial Sequence
  Oligonucleotide primer for the detection of SNP TSC0059887
gttttttgcggt

SEQ ID NO: 373169 - DNA, 12 bp, Artificial Sequence
  Oligonucleotide primer for the detection of SNP TSC0059887
accctttacaac

SEQ ID NO: 373170 - DNA, 12 bp, Artificial Sequence
  Oligonucleotide primer for the detection of SNP TSC0059887
accctttacgac

SEQ ID NO: 373171 - DNA, 12 bp, Artificial Sequence
  Oligonucleotide primer for the detection of SNP TSC0059888
aaaggtatatat

SEQ ID NO: 373172 - DNA, 12 bp, Artificial Sequence
  Oligonucleotide primer for the detection of SNP TSC0059889
gtaaagggtttt

SEQ ID NO: 373173 - DNA, 12 bp, Artificial Sequence
  Oligonucleotide primer for the detection of SNP TSC0059889
ggatttggtagg

SEQ ID NO: 373174 - DNA, 12 bp, Artificial Sequence
  Oligonucleotide primer for the detection of SNP TSC0009601
ttcatcctttaa

SEQ ID NO: 373175 - DNA, 12 bp, Artificial Sequence
  Oligonucleotide primer for the detection of SNP TSC0009601
tttttaatttgt

SEQ ID NO: 373176 - DNA, 12 bp, Artificial Sequence
  Oligonucleotide primer for the detection of SNP TSC0009601
tttcaatctata

SEQ ID NO: 373177 - DNA, 12 bp, Artificial Sequence
  Oligonucleotide primer for the detection of SNP TSC0009601
tattttttgatt

SEQ ID NO: 373178 - DNA, 12 bp, Artificial Sequence
  Oligonucleotide primer for the detection of SNP TSC0059890
aggtttgtgaga

SEQ ID NO: 373179 - DNA, 12 bp, Artificial Sequence
  Oligonucleotide primer for the detection of SNP TSC0059890
aggatagtaatg

SEQ ID NO: 373180 - DNA, 12 bp, Artificial Sequence
  Oligonucleotide primer for the detection of SNP TSC0059891
atctaaatattt

SEQ ID NO: 373181 - DNA, 12 bp, Artificial Sequence
  Oligonucleotide primer for the detection of SNP TSC0059894
taaactcaactt

SEQ ID NO: 373182 - DNA, 12 bp, Artificial Sequence
  Oligonucleotide primer for the detection of SNP TSC0059894
tgtgggtattta

SEQ ID NO: 373183 - DNA, 12 bp, Artificial Sequence
  Oligonucleotide primer for the detection of SNP TSC0059894
cgtgggtattta

SEQ ID NO: 373184 - DNA, 12 bp, Artificial Sequence
  Oligonucleotide primer for the detection of SNP TSC0059895
aatgtaagttat

SEQ ID NO: 373185 - DNA, 12 bp, Artificial Sequence
  Oligonucleotide primer for the detection of SNP TSC0059895
atacaaattata

SEQ ID NO: 373186 - DNA, 12 bp, Artificial Sequence
  Oligonucleotide primer for the detection of SNP TSC0059895
atgtttagtaga

SEQ ID NO: 373187 - DNA, 12 bp, Artificial Sequence
  Oligonucleotide primer for the detection of SNP TSC0059896
agatatttagtg

SEQ ID NO: 373188 - DNA, 12 bp, Artificial Sequence
  Oligonucleotide primer for the detection of SNP TSC0059897
gaggtggaagtt

SEQ ID NO: 373189 - DNA, 12 bp, Artificial Sequence
  Oligonucleotide primer for the detection of SNP TSC0059898
aatataatctta

SEQ ID NO: 373190 - DNA, 12 bp, Artificial Sequence
  Oligonucleotide primer for the detection of SNP TSC0059898
cctcttaattaa

SEQ ID NO: 373191 - DNA, 12 bp, Artificial Sequence
  Oligonucleotide primer for the detection of SNP TSC0059898
aaatatagtttt

SEQ ID NO: 373192 - DNA, 12 bp, Artificial Sequence
  Oligonucleotide primer for the detection of SNP TSC0059899
ttaaataatagg

SEQ ID NO: 373193 - DNA, 12 bp, Artificial Sequence
  Oligonucleotide primer for the detection of SNP TSC0059901
taatactaaacc

SEQ ID NO: 373194 - DNA, 12 bp, Artificial Sequence
  Oligonucleotide primer for the detection of SNP TSC0059901
aggattttttga

SEQ ID NO: 373195 - DNA, 12 bp, Artificial Sequence
  Oligonucleotide primer for the detection of SNP TSC0059902
tcctataaaaac

SEQ ID NO: 373196 - DNA, 12 bp, Artificial Sequence
  Oligonucleotide primer for the detection of SNP TSC0059902
gggtttttagga

SEQ ID NO: 373197 - DNA, 12 bp, Artificial Sequence
  Oligonucleotide primer for the detection of SNP TSC0059903
acccaaccataa

SEQ ID NO: 373198 - DNA, 12 bp, Artificial Sequence
  Oligonucleotide primer for the detection of SNP TSC0059903
atggtaaatatt

SEQ ID NO: 373199 - DNA, 12 bp, Artificial Sequence
  Oligonucleotide primer for the detection of SNP TSC0059903
ataacaaacatt

SEQ ID NO: 373200 - DNA, 12 bp, Artificial Sequence
  Oligonucleotide primer for the detection of SNP TSC0059903
atttagttataa

SEQ ID NO: 373201 - DNA, 12 bp, Artificial Sequence
  Oligonucleotide primer for the detection of SNP TSC0059904
actttcaatcac

SEQ ID NO: 373202 - DNA, 12 bp, Artificial Sequence
  Oligonucleotide primer for the detection of SNP TSC0059904
ttttattgatag

SEQ ID NO: 373203 - DNA, 12 bp, Artificial Sequence
  Oligonucleotide primer for the detection of SNP TSC0059904
ttccattaacaa

SEQ ID NO: 373204 - DNA, 12 bp, Artificial Sequence
  Oligonucleotide primer for the detection of SNP TSC0059904
gtttttaattat

SEQ ID NO: 373205 - DNA, 12 bp, Artificial Sequence
  Oligonucleotide primer for the detection of SNP TSC0059906
tctctttactta

SEQ ID NO: 373206 - DNA, 12 bp, Artificial Sequence
  Oligonucleotide primer for the detection of SNP TSC0059906
gtataaatttgt

SEQ ID NO: 373207 - DNA, 12 bp, Artificial Sequence
  Oligonucleotide primer for the detection of SNP TSC0059907
acaaccaatatc

SEQ ID NO: 373208 - DNA, 12 bp, Artificial Sequence
  Oligonucleotide primer for the detection of SNP TSC0059908
tattcttttatt

SEQ ID NO: 373209 - DNA, 12 bp, Artificial Sequence
  Oligonucleotide primer for the detection of SNP TSC0059908
gaaaaataataa

SEQ ID NO: 373210 - DNA, 12 bp, Artificial Sequence
  Oligonucleotide primer for the detection of SNP TSC0059909
ttatagaatttt

SEQ ID NO: 373211 - DNA, 12 bp, Artificial Sequence
  Oligonucleotide primer for the detection of SNP TSC0059909
ttattgtaaaat

SEQ ID NO: 373212 - DNA, 12 bp, Artificial Sequence
  Oligonucleotide primer for the detection of SNP TSC0059910
atttaaaaccta

SEQ ID NO: 373213 - DNA, 12 bp, Artificial Sequence
  Oligonucleotide primer for the detection of SNP TSC0059910
ttgatgttagta

SEQ ID NO: 373214 - DNA, 12 bp, Artificial Sequence
  Oligonucleotide primer for the detection of SNP TSC0059910
ttgacgttagta

SEQ ID NO: 373215 - DNA, 12 bp, Artificial Sequence
  Oligonucleotide primer for the detection of SNP TSC0059910
ctaacattaata

SEQ ID NO: 373216 - DNA, 12 bp, Artificial Sequence
  Oligonucleotide primer for the detection of SNP TSC0059910
ctaacgttaata

SEQ ID NO: 373217 - DNA, 12 bp, Artificial Sequence
  Oligonucleotide primer for the detection of SNP TSC0059913
acataactactt

SEQ ID NO: 373218 - DNA, 12 bp, Artificial Sequence
  Oligonucleotide primer for the detection of SNP TSC0059913
agggaagttagg

SEQ ID NO: 373219 - DNA, 12 bp, Artificial Sequence
  Oligonucleotide primer for the detection of SNP TSC0059913
atatagttgttt

SEQ ID NO: 373220 - DNA, 12 bp, Artificial Sequence
  Oligonucleotide primer for the detection of SNP TSC0059916
accaataacttc

SEQ ID NO: 373221 - DNA, 12 bp, Artificial Sequence
  Oligonucleotide primer for the detection of SNP TSC0059916
accgataacttc

SEQ ID NO: 373222 - DNA, 12 bp, Artificial Sequence
  Oligonucleotide primer for the detection of SNP TSC0059916
agtttattattg

SEQ ID NO: 373223 - DNA, 12 bp, Artificial Sequence
  Oligonucleotide primer for the detection of SNP TSC0059916
catcattaaaaa

SEQ ID NO: 373224 - DNA, 12 bp, Artificial Sequence
  Oligonucleotide primer for the detection of SNP TSC0059916
gttgatagtttt

SEQ ID NO: 373225 - DNA, 12 bp, Artificial Sequence
  Oligonucleotide primer for the detection of SNP TSC0059916
gtcgatagtttt

SEQ ID NO: 373226 - DNA, 12 bp, Artificial Sequence
  Oligonucleotide primer for the detection of SNP TSC0059916
gttgatagtttc

SEQ ID NO: 373227 - DNA, 12 bp, Artificial Sequence
  Oligonucleotide primer for the detection of SNP TSC0059916
gtcgatagtttc

SEQ ID NO: 373228 - DNA, 12 bp, Artificial Sequence
  Oligonucleotide primer for the detection of SNP TSC0059917
ctaactctaaaa

SEQ ID NO: 373229 - DNA, 12 bp, Artificial Sequence
  Oligonucleotide primer for the detection of SNP TSC0059917
atttgttggttt

SEQ ID NO: 373230 - DNA, 12 bp, Artificial Sequence
  Oligonucleotide primer for the detection of SNP TSC0059917
attcgttggttt

SEQ ID NO: 373231 - DNA, 12 bp, Artificial Sequence
  Oligonucleotide primer for the detection of SNP TSC0059917
atttgtcggttt

SEQ ID NO: 373232 - DNA, 12 bp, Artificial Sequence
  Oligonucleotide primer for the detection of SNP TSC0059917
attcgtcggttt

SEQ ID NO: 373233 - DNA, 12 bp, Artificial Sequence
  Oligonucleotide primer for the detection of SNP TSC0059917
acccaccaaccc

SEQ ID NO: 373234 - DNA, 12 bp, Artificial Sequence
  Oligonucleotide primer for the detection of SNP TSC0059917
acccaccgaccc

SEQ ID NO: 373235 - DNA, 12 bp, Artificial Sequence
  Oligonucleotide primer for the detection of SNP TSC0059917
acccgccaaccc

SEQ ID NO: 373236 - DNA, 12 bp, Artificial Sequence
  Oligonucleotide primer for the detection of SNP TSC0059917
acccgccgaccc

SEQ ID NO: 373237 - DNA, 12 bp, Artificial Sequence
  Oligonucleotide primer for the detection of SNP TSC0059917
ttgattttgaag

SEQ ID NO: 373238 - DNA, 12 bp, Artificial Sequence
  Oligonucleotide primer for the detection of SNP TSC0059919
tctttcaaaaaa

SEQ ID NO: 373239 - DNA, 12 bp, Artificial Sequence
  Oligonucleotide primer for the detection of SNP TSC0059919
aggtattatatt

SEQ ID NO: 373240 - DNA, 12 bp, Artificial Sequence
  Oligonucleotide primer for the detection of SNP TSC0059919
aaacaccacact

SEQ ID NO: 373241 - DNA, 12 bp, Artificial Sequence
  Oligonucleotide primer for the detection of SNP TSC0059920
ttttattatcta

SEQ ID NO: 373242 - DNA, 12 bp, Artificial Sequence
  Oligonucleotide primer for the detection of SNP TSC0059920
agtaataaatat

SEQ ID NO: 373243 - DNA, 12 bp, Artificial Sequence
  Oligonucleotide primer for the detection of SNP TSC0059921
attaatttaaaa

SEQ ID NO: 373244 - DNA, 12 bp, Artificial Sequence
  Oligonucleotide primer for the detection of SNP TSC0059921
aaaagttagaaa

SEQ ID NO: 373245 - DNA, 12 bp, Artificial Sequence
  Oligonucleotide primer for the detection of SNP TSC0059921
gttaatttgaga

SEQ ID NO: 373246 - DNA, 12 bp, Artificial Sequence
  Oligonucleotide primer for the detection of SNP TSC0059922
tattgtagtttt

SEQ ID NO: 373247 - DNA, 12 bp, Artificial Sequence
  Oligonucleotide primer for the detection of SNP TSC0059922
attacaacttta

SEQ ID NO: 373248 - DNA, 12 bp, Artificial Sequence
  Oligonucleotide primer for the detection of SNP TSC0059925
aaggaagtaagg

SEQ ID NO: 373249 - DNA, 12 bp, Artificial Sequence
  Oligonucleotide primer for the detection of SNP TSC0059925
agaagaagattt

SEQ ID NO: 373250 - DNA, 12 bp, Artificial Sequence
  Oligonucleotide primer for the detection of SNP TSC0059926
ttcttaaaacat

SEQ ID NO: 373251 - DNA, 12 bp, Artificial Sequence
  Oligonucleotide primer for the detection of SNP TSC0059926
tgttttatttgg

SEQ ID NO: 373252 - DNA, 12 bp, Artificial Sequence
  Oligonucleotide primer for the detection of SNP TSC0059927
aactctatctca

SEQ ID NO: 373253 - DNA, 12 bp, Artificial Sequence
  Oligonucleotide primer for the detection of SNP TSC0059928
atttttataaac

SEQ ID NO: 373254 - DNA, 12 bp, Artificial Sequence
  Oligonucleotide primer for the detection of SNP TSC0059928
tatgaataataa

SEQ ID NO: 373255 - DNA, 12 bp, Artificial Sequence
  Oligonucleotide primer for the detection of SNP TSC0059929
aatcttccctat

SEQ ID NO: 373256 - DNA, 12 bp, Artificial Sequence
  Oligonucleotide primer for the detection of SNP TSC0059929
gatcttccctat

SEQ ID NO: 373257 - DNA, 12 bp, Artificial Sequence
  Oligonucleotide primer for the detection of SNP TSC0059929
acttacttataa

SEQ ID NO: 373258 - DNA, 12 bp, Artificial Sequence
  Oligonucleotide primer for the detection of SNP TSC0059929
gattttttttgt

SEQ ID NO: 373259 - DNA, 12 bp, Artificial Sequence
  Oligonucleotide primer for the detection of SNP TSC0059932
taaaatacaatt

SEQ ID NO: 373260 - DNA, 12 bp, Artificial Sequence
  Oligonucleotide primer for the detection of SNP TSC0059932
ttttaggtatta

SEQ ID NO: 373261 - DNA, 12 bp, Artificial Sequence
  Oligonucleotide primer for the detection of SNP TSC0059932
tcctaaacacta

SEQ ID NO: 373262 - DNA, 12 bp, Artificial Sequence
  Oligonucleotide primer for the detection of SNP TSC0059932
tggaatgtaatt

SEQ ID NO: 373263 - DNA, 12 bp, Artificial Sequence
  Oligonucleotide primer for the detection of SNP TSC0059933
attataggttga

SEQ ID NO: 373264 - DNA, 12 bp, Artificial Sequence
  Oligonucleotide primer for the detection of SNP TSC0059935
gattgtaggatg

SEQ ID NO: 373265 - DNA, 12 bp, Artificial Sequence
  Oligonucleotide primer for the detection of SNP TSC0059936
aatatcaccatc

SEQ ID NO: 373266 - DNA, 12 bp, Artificial Sequence
  Oligonucleotide primer for the detection of SNP TSC0059938
tcttaattaatc

SEQ ID NO: 373267 - DNA, 12 bp, Artificial Sequence
  Oligonucleotide primer for the detection of SNP TSC0059938
atatattggagg

SEQ ID NO: 373268 - DNA, 12 bp, Artificial Sequence
  Oligonucleotide primer for the detection of SNP TSC0059938
atatatcggagg

SEQ ID NO: 373269 - DNA, 12 bp, Artificial Sequence
  Oligonucleotide primer for the detection of SNP TSC0059938
atacaccaaaaa

SEQ ID NO: 373270 - DNA, 12 bp, Artificial Sequence
  Oligonucleotide primer for the detection of SNP TSC0059938
atacaccgaaaa

SEQ ID NO: 373271 - DNA, 12 bp, Artificial Sequence
  Oligonucleotide primer for the detection of SNP TSC0059938
ttgattagtttt

SEQ ID NO: 373272 - DNA, 12 bp, Artificial Sequence
  Oligonucleotide primer for the detection of SNP TSC0059940
aataaaaattta

SEQ ID NO: 373273 - DNA, 12 bp, Artificial Sequence
  Oligonucleotide primer for the detection of SNP TSC0059940
ctcaattcctct

SEQ ID NO: 373274 - DNA, 12 bp, Artificial Sequence
  Oligonucleotide primer for the detection of SNP TSC0059940
ctcgattcctct

SEQ ID NO: 373275 - DNA, 12 bp, Artificial Sequence
  Oligonucleotide primer for the detection of SNP TSC0059940
ggtgaagattta

SEQ ID NO: 373276 - DNA, 12 bp, Artificial Sequence
  Oligonucleotide primer for the detection of SNP TSC0059941
cattcttactac

SEQ ID NO: 373277 - DNA, 12 bp, Artificial Sequence
  Oligonucleotide primer for the detection of SNP TSC0059941
atgtaatgtttg

SEQ ID NO: 373278 - DNA, 12 bp, Artificial Sequence
  Oligonucleotide primer for the detection of SNP TSC0059943
taaacataacta

SEQ ID NO: 373279 - DNA, 12 bp, Artificial Sequence
  Oligonucleotide primer for the detection of SNP TSC0059943
attaaagggatt

SEQ ID NO: 373280 - DNA, 12 bp, Artificial Sequence
  Oligonucleotide primer for the detection of SNP TSC0059943
attaaaaaaacc

SEQ ID NO: 373281 - DNA, 12 bp, Artificial Sequence
  Oligonucleotide primer for the detection of SNP TSC0059943
tgaatatgattg

SEQ ID NO: 373282 - DNA, 12 bp, Artificial Sequence
  Oligonucleotide primer for the detection of SNP TSC0059944
tatagaaataaa

SEQ ID NO: 373283 - DNA, 12 bp, Artificial Sequence
  Oligonucleotide primer for the detection of SNP TSC0059944
tgtttatgtatg

SEQ ID NO: 373284 - DNA, 12 bp, Artificial Sequence
  Oligonucleotide primer for the detection of SNP TSC0059945
aatatcctttcc

SEQ ID NO: 373285 - DNA, 12 bp, Artificial Sequence
  Oligonucleotide primer for the detection of SNP TSC0059945
agataaataatg

SEQ ID NO: 373286 - DNA, 12 bp, Artificial Sequence
  Oligonucleotide primer for the detection of SNP TSC0059945
aaacaaacaata

SEQ ID NO: 373287 - DNA, 12 bp, Artificial Sequence
  Oligonucleotide primer for the detection of SNP TSC0059948
caatatttattt

SEQ ID NO: 373288 - DNA, 12 bp, Artificial Sequence
  Oligonucleotide primer for the detection of SNP TSC0059948
tgtgggtaaata

SEQ ID NO: 373289 - DNA, 12 bp, Artificial Sequence
  Oligonucleotide primer for the detection of SNP TSC0059950
ttgatattagga

SEQ ID NO: 373290 - DNA, 12 bp, Artificial Sequence
  Oligonucleotide primer for the detection of SNP TSC0059951
tatttactacta

SEQ ID NO: 373291 - DNA, 12 bp, Artificial Sequence
  Oligonucleotide primer for the detection of SNP TSC0059951
attaaattaaat

SEQ ID NO: 373292 - DNA, 12 bp, Artificial Sequence
  Oligonucleotide primer for the detection of SNP TSC0059951
tatcaaatcaaa

SEQ ID NO: 373293 - DNA, 12 bp, Artificial Sequence
  Oligonucleotide primer for the detection of SNP TSC0059951
tatttgttgttg

SEQ ID NO: 373294 - DNA, 12 bp, Artificial Sequence
  Oligonucleotide primer for the detection of SNP TSC0059952
ataaacggttta

SEQ ID NO: 373295 - DNA, 12 bp, Artificial Sequence
  Oligonucleotide primer for the detection of SNP TSC0059957
gagagggtagga

SEQ ID NO: 373296 - DNA, 12 bp, Artificial Sequence
  Oligonucleotide primer for the detection of SNP TSC0059958
tcacttattttc

SEQ ID NO: 373297 - DNA, 12 bp, Artificial Sequence
  Oligonucleotide primer for the detection of SNP TSC0059958
aattttaattaa

SEQ ID NO: 373298 - DNA, 12 bp, Artificial Sequence
  Oligonucleotide primer for the detection of SNP TSC0059959
ttcaatacctac

SEQ ID NO: 373299 - DNA, 12 bp, Artificial Sequence
  Oligonucleotide primer for the detection of SNP TSC0059959
tctattaataca

SEQ ID NO: 373300 - DNA, 12 bp, Artificial Sequence
  Oligonucleotide primer for the detection of SNP TSC0059959
ttaatgtttgtt

SEQ ID NO: 373301 - DNA, 12 bp, Artificial Sequence
  Oligonucleotide primer for the detection of SNP TSC0059960
tataaacattta

SEQ ID NO: 373302 - DNA, 12 bp, Artificial Sequence
  Oligonucleotide primer for the detection of SNP TSC0059960
ggtattgaaaat

SEQ ID NO: 373303 - DNA, 12 bp, Artificial Sequence
  Oligonucleotide primer for the detection of SNP TSC0059960
ggtattgaaaac

SEQ ID NO: 373304 - DNA, 12 bp, Artificial Sequence
  Oligonucleotide primer for the detection of SNP TSC0059960
ttgtgggtattt

SEQ ID NO: 373305 - DNA, 12 bp, Artificial Sequence
  Oligonucleotide primer for the detection of SNP TSC0059961
tttgatagattt

SEQ ID NO: 373306 - DNA, 12 bp, Artificial Sequence
  Oligonucleotide primer for the detection of SNP TSC0059961
tttgatagattc

SEQ ID NO: 373307 - DNA, 12 bp, Artificial Sequence
  Oligonucleotide primer for the detection of SNP TSC0059961
ttttaacaaact

SEQ ID NO: 373308 - DNA, 12 bp, Artificial Sequence
  Oligonucleotide primer for the detection of SNP TSC0059961
tttaaaaaatga

SEQ ID NO: 373309 - DNA, 12 bp, Artificial Sequence
  Oligonucleotide primer for the detection of SNP TSC0059967
tttttcttctcc

SEQ ID NO: 373310 - DNA, 12 bp, Artificial Sequence
  Oligonucleotide primer for the detection of SNP TSC0059967
atagtaaatgta

SEQ ID NO: 373311 - DNA, 12 bp, Artificial Sequence
  Oligonucleotide primer for the detection of SNP TSC0059968
tagttattaagg

SEQ ID NO: 373312 - DNA, 12 bp, Artificial Sequence
  Oligonucleotide primer for the detection of SNP TSC0059968
actactaaaaaa

SEQ ID NO: 373313 - DNA, 12 bp, Artificial Sequence
  Oligonucleotide primer for the detection of SNP TSC0059971
ctcttaacacat

SEQ ID NO: 373314 - DNA, 12 bp, Artificial Sequence
  Oligonucleotide primer for the detection of SNP TSC0059971
agaaggtggaga

SEQ ID NO: 373315 - DNA, 12 bp, Artificial Sequence
  Oligonucleotide primer for the detection of SNP TSC0059971
tttttgatatat

SEQ ID NO: 373316 - DNA, 12 bp, Artificial Sequence
  Oligonucleotide primer for the detection of SNP TSC0059972
attatactaaat

SEQ ID NO: 373317 - DNA, 12 bp, Artificial Sequence
  Oligonucleotide primer for the detection of SNP TSC0059973
ttaatcaaaata

SEQ ID NO: 373318 - DNA, 12 bp, Artificial Sequence
  Oligonucleotide primer for the detection of SNP TSC0059973
tttatggagaat

SEQ ID NO: 373319 - DNA, 12 bp, Artificial Sequence
  Oligonucleotide primer for the detection of SNP TSC0059973
ctcataaaaaat

SEQ ID NO: 373320 - DNA, 12 bp, Artificial Sequence
  Oligonucleotide primer for the detection of SNP TSC0059973
gttgattaaaat

SEQ ID NO: 373321 - DNA, 12 bp, Artificial Sequence
  Oligonucleotide primer for the detection of SNP TSC0059974
ttcaattaatcc

SEQ ID NO: 373322 - DNA, 12 bp, Artificial Sequence
  Oligonucleotide primer for the detection of SNP TSC0059975
tacaaaacactt

SEQ ID NO: 373323 - DNA, 12 bp, Artificial Sequence
  Oligonucleotide primer for the detection of SNP TSC0059977
ccatatctatta

SEQ ID NO: 373324 - DNA, 12 bp, Artificial Sequence
  Oligonucleotide primer for the detection of SNP TSC0059977
attatgttgggt

SEQ ID NO: 373325 - DNA, 12 bp, Artificial Sequence
  Oligonucleotide primer for the detection of SNP TSC0059977
actatactaaat

SEQ ID NO: 373326 - DNA, 12 bp, Artificial Sequence
  Oligonucleotide primer for the detection of SNP TSC0059982
taacactactaa

SEQ ID NO: 373327 - DNA, 12 bp, Artificial Sequence
  Oligonucleotide primer for the detection of SNP TSC0059982
aactatataatc

SEQ ID NO: 373328 - DNA, 12 bp, Artificial Sequence
  Oligonucleotide primer for the detection of SNP TSC0059982
taatattattag

SEQ ID NO: 373329 - DNA, 12 bp, Artificial Sequence
  Oligonucleotide primer for the detection of SNP TSC0059983
ctaacctcaaaa

SEQ ID NO: 373330 - DNA, 12 bp, Artificial Sequence
  Oligonucleotide primer for the detection of SNP TSC0059983
tcctccaaaatc

SEQ ID NO: 373331 - DNA, 12 bp, Artificial Sequence
  Oligonucleotide primer for the detection of SNP TSC0059983
ttgattttaaaa

SEQ ID NO: 373332 - DNA, 12 bp, Artificial Sequence
  Oligonucleotide primer for the detection of SNP TSC0059985
aacttttttccc

SEQ ID NO: 373333 - DNA, 12 bp, Artificial Sequence
  Oligonucleotide primer for the detection of SNP TSC0059985
aagatataattg

SEQ ID NO: 373334 - DNA, 12 bp, Artificial Sequence
  Oligonucleotide primer for the detection of SNP TSC0059987
ctactttaccta

SEQ ID NO: 373335 - DNA, 12 bp, Artificial Sequence
  Oligonucleotide primer for the detection of SNP TSC0059987
ttgttatttgag

SEQ ID NO: 373336 - DNA, 12 bp, Artificial Sequence
  Oligonucleotide primer for the detection of SNP TSC0059989
ttaattatcaca

SEQ ID NO: 373337 - DNA, 12 bp, Artificial Sequence
  Oligonucleotide primer for the detection of SNP TSC0059989
ttattgaagtgt

SEQ ID NO: 373338 - DNA, 12 bp, Artificial Sequence
  Oligonucleotide primer for the detection of SNP TSC0059989
ttattaaaatac

SEQ ID NO: 373339 - DNA, 12 bp, Artificial Sequence
  Oligonucleotide primer for the detection of SNP TSC0059989
tttgattattat

SEQ ID NO: 373340 - DNA, 12 bp, Artificial Sequence
  Oligonucleotide primer for the detection of SNP TSC0059990
tcaaacctacta

SEQ ID NO: 373341 - DNA, 12 bp, Artificial Sequence
  Oligonucleotide primer for the detection of SNP TSC0059990
tagatttattat

SEQ ID NO: 373342 - DNA, 12 bp, Artificial Sequence
  Oligonucleotide primer for the detection of SNP TSC0059991
ttattttcttat

SEQ ID NO: 373343 - DNA, 12 bp, Artificial Sequence
  Oligonucleotide primer for the detection of SNP TSC0059991
aataaattgaaa

SEQ ID NO: 373344 - DNA, 12 bp, Artificial Sequence
  Oligonucleotide primer for the detection of SNP TSC0059992
ggggaaagttaa

SEQ ID NO: 373345 - DNA, 12 bp, Artificial Sequence
  Oligonucleotide primer for the detection of SNP TSC0059995
aactctaaaaca

SEQ ID NO: 373346 - DNA, 12 bp, Artificial Sequence
  Oligonucleotide primer for the detection of SNP TSC0059995
tttgaagttagt

SEQ ID NO: 373347 - DNA, 12 bp, Artificial Sequence
  Oligonucleotide primer for the detection of SNP TSC0059995
acctaaaaccaa

SEQ ID NO: 373348 - DNA, 12 bp, Artificial Sequence
  Oligonucleotide primer for the detection of SNP TSC0059995
gattttgagata

SEQ ID NO: 373349 - DNA, 12 bp, Artificial Sequence
  Oligonucleotide primer for the detection of SNP TSC0059996
ataagtttttta

SEQ ID NO: 373350 - DNA, 12 bp, Artificial Sequence
  Oligonucleotide primer for the detection of SNP TSC0059996
ataaattcctca

SEQ ID NO: 373351 - DNA, 12 bp, Artificial Sequence
  Oligonucleotide primer for the detection of SNP TSC0059996
tgatgtggtttt

SEQ ID NO: 373352 - DNA, 12 bp, Artificial Sequence
  Oligonucleotide primer for the detection of SNP TSC0059997
attttacattta

SEQ ID NO: 373353 - DNA, 12 bp, Artificial Sequence
  Oligonucleotide primer for the detection of SNP TSC0059997
ttttactcttca

SEQ ID NO: 373354 - DNA, 12 bp, Artificial Sequence
  Oligonucleotide primer for the detection of SNP TSC0059999
attacaaaaaca

SEQ ID NO: 373355 - DNA, 12 bp, Artificial Sequence
  Oligonucleotide primer for the detection of SNP TSC0059999
attacgaaaaca

SEQ ID NO: 373356 - DNA, 12 bp, Artificial Sequence
  Oligonucleotide primer for the detection of SNP TSC0059999
gtagatttagaa

SEQ ID NO: 373357 - DNA, 12 bp, Artificial Sequence
  Oligonucleotide primer for the detection of SNP TSC0059999
attgtggagata

SEQ ID NO: 373358 - DNA, 12 bp, Artificial Sequence
  Oligonucleotide primer for the detection of SNP TSC0059999
attgcggagata

SEQ ID NO: 373359 - DNA, 12 bp, Artificial Sequence
  Oligonucleotide primer for the detection of SNP TSC0060002
gaatgttgtttt

SEQ ID NO: 373360 - DNA, 12 bp, Artificial Sequence
  Oligonucleotide primer for the detection of SNP TSC0060002
aaatactatttc

SEQ ID NO: 373361 - DNA, 12 bp, Artificial Sequence
  Oligonucleotide primer for the detection of SNP TSC0060015
ggtaataagaat

SEQ ID NO: 373362 - DNA, 12 bp, Artificial Sequence
  Oligonucleotide primer for the detection of SNP TSC0060022
aataatctctac

SEQ ID NO: 373363 - DNA, 12 bp, Artificial Sequence
  Oligonucleotide primer for the detection of SNP TSC0060022
tttggagtgggt

SEQ ID NO: 373364 - DNA, 12 bp, Artificial Sequence
  Oligonucleotide primer for the detection of SNP TSC0060022
aatgatttttgt

SEQ ID NO: 373365 - DNA, 12 bp, Artificial Sequence
  Oligonucleotide primer for the detection of SNP TSC0060023
tatgttgatttt

SEQ ID NO: 373366 - DNA, 12 bp, Artificial Sequence
  Oligonucleotide primer for the detection of SNP TSC0060023
catactaattct

SEQ ID NO: 373367 - DNA, 12 bp, Artificial Sequence
  Oligonucleotide primer for the detection of SNP TSC0060023
agtattttgaag

SEQ ID NO: 373368 - DNA, 12 bp, Artificial Sequence
  Oligonucleotide primer for the detection of SNP TSC0060024
acaactctctaa

SEQ ID NO: 373369 - DNA, 12 bp, Artificial Sequence
  Oligonucleotide primer for the detection of SNP TSC0060024
gatgtagttgtt

SEQ ID NO: 373370 - DNA, 12 bp, Artificial Sequence
  Oligonucleotide primer for the detection of SNP TSC0060024
aatacaactatc

SEQ ID NO: 373371 - DNA, 12 bp, Artificial Sequence
  Oligonucleotide primer for the detection of SNP TSC0008587
actcttctttta

SEQ ID NO: 373372 - DNA, 12 bp, Artificial Sequence
  Oligonukleotid-Primer
aaaggaatattt

SEQ ID NO: 373373 - DNA, 12 bp, Artificial Sequence
  Oligonucleotide primer for the detection of SNP TSC0008588
ctatatacaata

SEQ ID NO: 373374 - DNA, 12 bp, Artificial Sequence
  Oligonucleotide primer for the detection of SNP TSC0008588
aattaacactac

SEQ ID NO: 373375 - DNA, 12 bp, Artificial Sequence
  Oligonucleotide primer for the detection of SNP TSC0008588
attgtgtatagt

SEQ ID NO: 373376 - DNA, 12 bp, Artificial Sequence
  Oligonukleotid-Primer
cacacaaaaaca

SEQ ID NO: 373377 - DNA, 12 bp, Artificial Sequence
  Oligonucleotide primer for the detection of SNP TSC0060031
ttatatgtgtag

SEQ ID NO: 373378 - DNA, 12 bp, Artificial Sequence
  Oligonucleotide primer for the detection of SNP TSC0060031
ccatatatacaa

SEQ ID NO: 373379 - DNA, 12 bp, Artificial Sequence
  Oligonucleotide primer for the detection of SNP TSC0060031
tatatagaaata

SEQ ID NO: 373380 - DNA, 12 bp, Artificial Sequence
  Oligonucleotide primer for the detection of SNP TSC0060032
ttggtttttggt

SEQ ID NO: 373381 - DNA, 12 bp, Artificial Sequence
  Oligonucleotide primer for the detection of SNP TSC0060032
cctaacctctaa

SEQ ID NO: 373382 - DNA, 12 bp, Artificial Sequence
  Oligonucleotide primer for the detection of SNP TSC0060032
gtagattggtgg

SEQ ID NO: 373383 - DNA, 12 bp, Artificial Sequence
  Oligonucleotide primer for the detection of SNP TSC0060035
ttttaagtttta

SEQ ID NO: 373384 - DNA, 12 bp, Artificial Sequence
  Oligonucleotide primer for the detection of SNP TSC0060036
aaactttttcaa

SEQ ID NO: 373385 - DNA, 12 bp, Artificial Sequence
  Oligonucleotide primer for the detection of SNP TSC0060036
ataatttctcta

SEQ ID NO: 373386 - DNA, 12 bp, Artificial Sequence
  Oligonucleotide primer for the detection of SNP TSC0060037
cttccacaaatc

SEQ ID NO: 373387 - DNA, 12 bp, Artificial Sequence
  Oligonucleotide primer for the detection of SNP TSC0060037
aaaggtaattgg

SEQ ID NO: 373388 - DNA, 12 bp, Artificial Sequence
  Oligonucleotide primer for the detection of SNP TSC0060037
aaaaacaactaa

SEQ ID NO: 373389 - DNA, 12 bp, Artificial Sequence
  Oligonucleotide primer for the detection of SNP TSC0060037
tttttataggtc

SEQ ID NO: 373390 - DNA, 12 bp, Artificial Sequence
  Oligonucleotide primer for the detection of SNP TSC0060038
ccacataataaa

SEQ ID NO: 373391 - DNA, 12 bp, Artificial Sequence
  Oligonucleotide primer for the detection of SNP TSC0060038
ccgcataataaa

SEQ ID NO: 373392 - DNA, 12 bp, Artificial Sequence
  Oligonucleotide primer for the detection of SNP TSC0060038
atgtgtttgaat

SEQ ID NO: 373393 - DNA, 12 bp, Artificial Sequence
  Oligonucleotide primer for the detection of SNP TSC0060038
atatacctaaac

SEQ ID NO: 373394 - DNA, 12 bp, Artificial Sequence
  Oligonucleotide primer for the detection of SNP TSC0060038
ttgtatggtggg

SEQ ID NO: 373395 - DNA, 12 bp, Artificial Sequence
  Oligonucleotide primer for the detection of SNP TSC0060038
tcgtatggtggg

SEQ ID NO: 373396 - DNA, 12 bp, Artificial Sequence
  Oligonucleotide primer for the detection of SNP TSC0060039
attaatttcctt

SEQ ID NO: 373397 - DNA, 12 bp, Artificial Sequence
  Oligonucleotide primer for the detection of SNP TSC0060041
catctataaaat

SEQ ID NO: 373398 - DNA, 12 bp, Artificial Sequence
  Oligonucleotide primer for the detection of SNP TSC0060041
tatttatgagat

SEQ ID NO: 373399 - DNA, 12 bp, Artificial Sequence
  Oligonucleotide primer for the detection of SNP TSC0060047
ggagaaggaaat

SEQ ID NO: 373400 - DNA, 12 bp, Artificial Sequence
  Oligonucleotide primer for the detection of SNP TSC0060048
acccccactcca

SEQ ID NO: 373401 - DNA, 12 bp, Artificial Sequence
  Oligonucleotide primer for the detection of SNP TSC0060048
acccccgctcca

SEQ ID NO: 373402 - DNA, 12 bp, Artificial Sequence
  Oligonucleotide primer for the detection of SNP TSC0060048
gcccccactcca

SEQ ID NO: 373403 - DNA, 12 bp, Artificial Sequence
  Oligonucleotide primer for the detection of SNP TSC0060048
gcccccgctcca

SEQ ID NO: 373404 - DNA, 12 bp, Artificial Sequence
  Oligonucleotide primer for the detection of SNP TSC0060048
tttggataaatt

SEQ ID NO: 373405 - DNA, 12 bp, Artificial Sequence
  Oligonucleotide primer for the detection of SNP TSC0060048
ttcggataaatt

SEQ ID NO: 373406 - DNA, 12 bp, Artificial Sequence
  Oligonucleotide primer for the detection of SNP TSC0060048
tccaaataaatt

SEQ ID NO: 373407 - DNA, 12 bp, Artificial Sequence
  Oligonucleotide primer for the detection of SNP TSC0060048
tccgaataaatt

SEQ ID NO: 373408 - DNA, 12 bp, Artificial Sequence
  Oligonucleotide primer for the detection of SNP TSC0060048
gttttcgtttta

SEQ ID NO: 373409 - DNA, 12 bp, Artificial Sequence
  Oligonucleotide primer for the detection of SNP TSC0060050
cctcctctcaca

SEQ ID NO: 373410 - DNA, 12 bp, Artificial Sequence
  Oligonucleotide primer for the detection of SNP TSC0060050
agttgaaagatt

SEQ ID NO: 373411 - DNA, 12 bp, Artificial Sequence
  Oligonucleotide primer for the detection of SNP TSC0010698
ttcatttttcat

SEQ ID NO: 373412 - DNA, 12 bp, Artificial Sequence
  Oligonucleotide primer for the detection of SNP TSC0010699
atttccactatc

SEQ ID NO: 373413 - DNA, 12 bp, Artificial Sequence
  Oligonucleotide primer for the detection of SNP TSC0010699
tttgaaaggatt

SEQ ID NO: 373414 - DNA, 12 bp, Artificial Sequence
  Oligonucleotide primer for the detection of SNP TSC0060052
gaaaggtagata

SEQ ID NO: 373415 - DNA, 12 bp, Artificial Sequence
  Oligonucleotide primer for the detection of SNP TSC0060057
attatttaattg

SEQ ID NO: 373416 - DNA, 12 bp, Artificial Sequence
  Oligonucleotide primer for the detection of SNP TSC0060060
ttttaggggaga

SEQ ID NO: 373417 - DNA, 12 bp, Artificial Sequence
  Oligonucleotide primer for the detection of SNP TSC0060062
accttaaactcc

SEQ ID NO: 373418 - DNA, 12 bp, Artificial Sequence
  Oligonucleotide primer for the detection of SNP TSC0060062
gaatggtttgag

SEQ ID NO: 373419 - DNA, 12 bp, Artificial Sequence
  Oligonucleotide primer for the detection of SNP TSC0060063
caaccatttata

SEQ ID NO: 373420 - DNA, 12 bp, Artificial Sequence
  Oligonucleotide primer for the detection of SNP TSC0060063
agtatattgtga

SEQ ID NO: 373421 - DNA, 12 bp, Artificial Sequence
  Oligonucleotide primer for the detection of SNP TSC0060064
catcatatatat

SEQ ID NO: 373422 - DNA, 12 bp, Artificial Sequence
  Oligonucleotide primer for the detection of SNP TSC0060065
cttataaatatc

SEQ ID NO: 373423 - DNA, 12 bp, Artificial Sequence
  Oligonucleotide primer for the detection of SNP TSC0060065
tttttttatgga

SEQ ID NO: 373424 - DNA, 12 bp, Artificial Sequence
  Oligonucleotide primer for the detection of SNP TSC0060067
atatataataat

SEQ ID NO: 373425 - DNA, 12 bp, Artificial Sequence
  Oligonucleotide primer for the detection of SNP TSC0060067
gtgtatagtggt

SEQ ID NO: 373426 - DNA, 12 bp, Artificial Sequence
  Oligonucleotide primer for the detection of SNP TSC0060068
cttccacccatc

SEQ ID NO: 373427 - DNA, 12 bp, Artificial Sequence
  Oligonucleotide primer for the detection of SNP TSC0060068
gtaaaagaaaag

SEQ ID NO: 373428 - DNA, 12 bp, Artificial Sequence
  Oligonucleotide primer for the detection of SNP TSC0060069
agatattaaaga

SEQ ID NO: 373429 - DNA, 12 bp, Artificial Sequence
  Oligonucleotide primer for the detection of SNP TSC0060072
aaatcacctaaa

SEQ ID NO: 373430 - DNA, 12 bp, Artificial Sequence
  Oligonucleotide primer for the detection of SNP TSC0060072
atgaatttttga

SEQ ID NO: 373431 - DNA, 12 bp, Artificial Sequence
  Oligonucleotide primer for the detection of SNP TSC0060073
ttcccctattcc

SEQ ID NO: 373432 - DNA, 12 bp, Artificial Sequence
  Oligonucleotide primer for the detection of SNP TSC0060074
gtaatagagaga

SEQ ID NO: 373433 - DNA, 12 bp, Artificial Sequence
  Oligonucleotide primer for the detection of SNP TSC0060076
ataactttattt

SEQ ID NO: 373434 - DNA, 12 bp, Artificial Sequence
  Oligonucleotide primer for the detection of SNP TSC0060076
ttgagaagagtt

SEQ ID NO: 373435 - DNA, 12 bp, Artificial Sequence
  Oligonucleotide primer for the detection of SNP TSC0060079
ttccaatatata

SEQ ID NO: 373436 - DNA, 12 bp, Artificial Sequence
  Oligonucleotide primer for the detection of SNP TSC0060079
tacctatctata

SEQ ID NO: 373437 - DNA, 12 bp, Artificial Sequence
  Oligonucleotide primer for the detection of SNP TSC0060080
aattcaaaaacc

SEQ ID NO: 373438 - DNA, 12 bp, Artificial Sequence
  Oligonucleotide primer for the detection of SNP TSC0060080
taaatgataata

SEQ ID NO: 373439 - DNA, 12 bp, Artificial Sequence
  Oligonucleotide primer for the detection of SNP TSC0060085
aaccaaaataat

SEQ ID NO: 373440 - DNA, 12 bp, Artificial Sequence
  Oligonucleotide primer for the detection of SNP TSC0060085
aaccgaaataat

SEQ ID NO: 373441 - DNA, 12 bp, Artificial Sequence
  Oligonucleotide primer for the detection of SNP TSC0060086
tttaaaactctt

SEQ ID NO: 373442 - DNA, 12 bp, Artificial Sequence
  Oligonucleotide primer for the detection of SNP TSC0060086
atgtagattgta

SEQ ID NO: 373443 - DNA, 12 bp, Artificial Sequence
  Oligonucleotide primer for the detection of SNP TSC0060088
aacttccaaaaa

SEQ ID NO: 373444 - DNA, 12 bp, Artificial Sequence
  Oligonucleotide primer for the detection of SNP TSC0060088
aaagtgattttt

SEQ ID NO: 373445 - DNA, 12 bp, Artificial Sequence
  Oligonucleotide primer for the detection of SNP TSC0060088
aaataaccccta

SEQ ID NO: 373446 - DNA, 12 bp, Artificial Sequence
  Oligonucleotide primer for the detection of SNP TSC0060088
agtttttagagg

SEQ ID NO: 373447 - DNA, 12 bp, Artificial Sequence
  Oligonucleotide primer for the detection of SNP TSC0060089
aataaaatgtta

SEQ ID NO: 373448 - DNA, 12 bp, Artificial Sequence
  Oligonucleotide primer for the detection of SNP TSC0060089
aacaaaatacta

SEQ ID NO: 373449 - DNA, 12 bp, Artificial Sequence
  Oligonucleotide primer for the detection of SNP TSC0060089
tggattaagttt

SEQ ID NO: 373450 - DNA, 12 bp, Artificial Sequence
  Oligonucleotide primer for the detection of SNP TSC0060094
ctcttacttaaa

SEQ ID NO: 373451 - DNA, 12 bp, Artificial Sequence
  Oligonucleotide primer for the detection of SNP TSC0060094
ctaaaaattttt

SEQ ID NO: 373452 - DNA, 12 bp, Artificial Sequence
  Oligonucleotide primer for the detection of SNP TSC0060095
aatatagataat

SEQ ID NO: 373453 - DNA, 12 bp, Artificial Sequence
  Oligonucleotide primer for the detection of SNP TSC0060095
aatataaataac

SEQ ID NO: 373454 - DNA, 12 bp, Artificial Sequence
  Oligonucleotide primer for the detection of SNP TSC0060095
atgggaatggta

SEQ ID NO: 373455 - DNA, 12 bp, Artificial Sequence
  Oligonucleotide primer for the detection of SNP TSC0060096
tggttttgagta

SEQ ID NO: 373456 - DNA, 12 bp, Artificial Sequence
  Oligonucleotide primer for the detection of SNP TSC0060096
agattaaaaaaa

SEQ ID NO: 373457 - DNA, 12 bp, Artificial Sequence
  Oligonucleotide primer for the detection of SNP TSC0060097
atatttattcaa

SEQ ID NO: 373458 - DNA, 12 bp, Artificial Sequence
  Oligonucleotide primer for the detection of SNP TSC0060097
gtatttattcaa

SEQ ID NO: 373459 - DNA, 12 bp, Artificial Sequence
  Oligonucleotide primer for the detection of SNP TSC0060097
taataagtattt

SEQ ID NO: 373460 - DNA, 12 bp, Artificial Sequence
  Oligonucleotide primer for the detection of SNP TSC0060101
ttaaggttaaaa

SEQ ID NO: 373461 - DNA, 12 bp, Artificial Sequence
  Oligonucleotide primer for the detection of SNP TSC0060102
ttctatttctat

SEQ ID NO: 373462 - DNA, 12 bp, Artificial Sequence
  Oligonucleotide primer for the detection of SNP TSC0060103
caatatttaact

SEQ ID NO: 373463 - DNA, 12 bp, Artificial Sequence
  Oligonucleotide primer for the detection of SNP TSC0060103
agttattgttgg

SEQ ID NO: 373464 - DNA, 12 bp, Artificial Sequence
  Oligonucleotide primer for the detection of SNP TSC0060103
agttatcgttgg

SEQ ID NO: 373465 - DNA, 12 bp, Artificial Sequence
  Oligonucleotide primer for the detection of SNP TSC0060104
gttagtagttaa

SEQ ID NO: 373466 - DNA, 12 bp, Artificial Sequence
  Oligonucleotide primer for the detection of SNP TSC0060104
actaataaccaa

SEQ ID NO: 373467 - DNA, 12 bp, Artificial Sequence
  Oligonucleotide primer for the detection of SNP TSC0060104
ggtggaagttat

SEQ ID NO: 373468 - DNA, 12 bp, Artificial Sequence
  Oligonucleotide primer for the detection of SNP TSC0006786
catttataccct

SEQ ID NO: 373469 - DNA, 12 bp, Artificial Sequence
  Oligonucleotide primer for the detection of SNP TSC0006786
tttagttatata

SEQ ID NO: 373470 - DNA, 12 bp, Artificial Sequence
  Oligonucleotide primer for the detection of SNP TSC0006787
aggtttttgtaa

SEQ ID NO: 373471 - DNA, 12 bp, Artificial Sequence
  Oligonucleotide primer for the detection of SNP TSC0006787
aaactcctataa

SEQ ID NO: 373472 - DNA, 12 bp, Artificial Sequence
  Oligonucleotide primer for the detection of SNP TSC0006787
agtttgtattat

SEQ ID NO: 373473 - DNA, 12 bp, Artificial Sequence
  Oligonucleotide primer for the detection of SNP TSC0060106
atcaccctctaa

SEQ ID NO: 373474 - DNA, 12 bp, Artificial Sequence
  Oligonucleotide primer for the detection of SNP TSC0060108
ggtaatgttaat

SEQ ID NO: 373475 - DNA, 12 bp, Artificial Sequence
  Oligonucleotide primer for the detection of SNP TSC0060108
aacaataccaat

SEQ ID NO: 373476 - DNA, 12 bp, Artificial Sequence
  Oligonucleotide primer for the detection of SNP TSC0060108
ggagtagggtaa

SEQ ID NO: 373477 - DNA, 12 bp, Artificial Sequence
  Oligonucleotide primer for the detection of SNP TSC0060109
aaacaacgaaaa

SEQ ID NO: 373478 - DNA, 12 bp, Artificial Sequence
  Oligonucleotide primer for the detection of SNP TSC0060109
gtttttatttac

SEQ ID NO: 373479 - DNA, 12 bp, Artificial Sequence
  Oligonucleotide primer for the detection of SNP TSC0060109
cacccttactca

SEQ ID NO: 373480 - DNA, 12 bp, Artificial Sequence
  Oligonukleotid-Primer
cgcccttactca

SEQ ID NO: 373481 - DNA, 12 bp, Artificial Sequence
  Oligonucleotide primer for the detection of SNP TSC0060109
gagagatagtga

SEQ ID NO: 373482 - DNA, 12 bp, Artificial Sequence
  Oligonucleotide primer for the detection of SNP TSC0060109
gagagatagcga

SEQ ID NO: 373483 - DNA, 12 bp, Artificial Sequence
  Oligonucleotide primer for the detection of SNP TSC0060110
ctatcttaccca

SEQ ID NO: 373484 - DNA, 12 bp, Artificial Sequence
  Oligonucleotide primer for the detection of SNP TSC0060110
agaataaggaga

SEQ ID NO: 373485 - DNA, 12 bp, Artificial Sequence
  Oligonucleotide primer for the detection of SNP TSC0060111
aaaaccatctac

SEQ ID NO: 373486 - DNA, 12 bp, Artificial Sequence
  Oligonucleotide primer for the detection of SNP TSC0060111
gtaaagagtgta

SEQ ID NO: 373487 - DNA, 12 bp, Artificial Sequence
  Oligonucleotide primer for the detection of SNP TSC0060116
cctaactaactt

SEQ ID NO: 373488 - DNA, 12 bp, Artificial Sequence
  Oligonucleotide primer for the detection of SNP TSC0060116
atatgttttaga

SEQ ID NO: 373489 - DNA, 12 bp, Artificial Sequence
  Oligonucleotide primer for the detection of SNP TSC0060116
atacgttttaga

SEQ ID NO: 373490 - DNA, 12 bp, Artificial Sequence
  Oligonucleotide primer for the detection of SNP TSC0060117
tataaatatacc

SEQ ID NO: 373491 - DNA, 12 bp, Artificial Sequence
  Oligonucleotide primer for the detection of SNP TSC0060117
tttggtgtggtg

SEQ ID NO: 373492 - DNA, 12 bp, Artificial Sequence
  Oligonucleotide primer for the detection of SNP TSC0060117
tttggcgtggtg

SEQ ID NO: 373493 - DNA, 12 bp, Artificial Sequence
  Oligonucleotide primer for the detection of SNP TSC0060118
tttaatactctc

SEQ ID NO: 373494 - DNA, 12 bp, Artificial Sequence
  Oligonucleotide primer for the detection of SNP TSC0060118
gatgtaaattta

SEQ ID NO: 373495 - DNA, 12 bp, Artificial Sequence
  Oligonucleotide primer for the detection of SNP TSC0060119
caataccaacct

SEQ ID NO: 373496 - DNA, 12 bp, Artificial Sequence
  Oligonucleotide primer for the detection of SNP TSC0060119
tggaagttgttg

SEQ ID NO: 373497 - DNA, 12 bp, Artificial Sequence
  Oligonucleotide primer for the detection of SNP TSC0060120
ctaatacacccc

SEQ ID NO: 373498 - DNA, 12 bp, Artificial Sequence
  Oligonucleotide primer for the detection of SNP TSC0060123
atcataatacat

SEQ ID NO: 373499 - DNA, 12 bp, Artificial Sequence
  Oligonucleotide primer for the detection of SNP TSC0060123
ggaaaatttata

SEQ ID NO: 373500 - DNA, 12 bp, Artificial Sequence
  Oligonucleotide primer for the detection of SNP TSC0060125
gttagatggata

SEQ ID NO: 373501 - DNA, 12 bp, Artificial Sequence
  Oligonucleotide primer for the detection of SNP TSC0060126
acacactaaaac

SEQ ID NO: 373502 - DNA, 12 bp, Artificial Sequence
  Oligonucleotide primer for the detection of SNP TSC0060126
acgcactaaaac

SEQ ID NO: 373503 - DNA, 12 bp, Artificial Sequence
  Oligonucleotide primer for the detection of SNP TSC0060126
atttgagagtag

SEQ ID NO: 373504 - DNA, 12 bp, Artificial Sequence
  Oligonucleotide primer for the detection of SNP TSC0060127
acactattattt

SEQ ID NO: 373505 - DNA, 12 bp, Artificial Sequence
  Oligonucleotide primer for the detection of SNP TSC0060127
tagaaaattttg

SEQ ID NO: 373506 - DNA, 12 bp, Artificial Sequence
  Oligonucleotide primer for the detection of SNP TSC0060128
cctaatccaatc

SEQ ID NO: 373507 - DNA, 12 bp, Artificial Sequence
  Oligonucleotide primer for the detection of SNP TSC0060129
caatctcaaatc

SEQ ID NO: 373508 - DNA, 12 bp, Artificial Sequence
  Oligonucleotide primer for the detection of SNP TSC0060129
ttatcaaccttc

SEQ ID NO: 373509 - DNA, 12 bp, Artificial Sequence
  Oligonucleotide primer for the detection of SNP TSC0060129
taattttaagtt

SEQ ID NO: 373510 - DNA, 12 bp, Artificial Sequence
  Oligonucleotide primer for the detection of SNP TSC0060130
aaaaattatctc

SEQ ID NO: 373511 - DNA, 12 bp, Artificial Sequence
  Oligonucleotide primer for the detection of SNP TSC0060130
ataaaaagtaag

SEQ ID NO: 373512 - DNA, 12 bp, Artificial Sequence
  Oligonucleotide primer for the detection of SNP TSC0060131
acaaaacaaata

SEQ ID NO: 373513 - DNA, 12 bp, Artificial Sequence
  Oligonucleotide primer for the detection of SNP TSC0060131
tagggattagta

SEQ ID NO: 373514 - DNA, 12 bp, Artificial Sequence
  Oligonucleotide primer for the detection of SNP TSC0060131
gataaggtagat

SEQ ID NO: 373515 - DNA, 12 bp, Artificial Sequence
  Oligonucleotide primer for the detection of SNP TSC0060132
aaaattatatat

SEQ ID NO: 373516 - DNA, 12 bp, Artificial Sequence
  Oligonucleotide primer for the detection of SNP TSC0060132
tatatgtaatta

SEQ ID NO: 373517 - DNA, 12 bp, Artificial Sequence
  Oligonucleotide primer for the detection of SNP TSC0060133
ccatcaataacc

SEQ ID NO: 373518 - DNA, 12 bp, Artificial Sequence
  Oligonucleotide primer for the detection of SNP TSC0060134
cgtttggtttta

SEQ ID NO: 373519 - DNA, 12 bp, Artificial Sequence
  Oligonucleotide primer for the detection of SNP TSC0060135
gttaatagtttt

SEQ ID NO: 373520 - DNA, 12 bp, Artificial Sequence
  Oligonucleotide primer for the detection of SNP TSC0060135
acaatcccaaaa

SEQ ID NO: 373521 - DNA, 12 bp, Artificial Sequence
  Oligonucleotide primer for the detection of SNP TSC0060135
taggtaatattt

SEQ ID NO: 373522 - DNA, 12 bp, Artificial Sequence
  Oligonucleotide primer for the detection of SNP TSC0060136
aatacaaatatc

SEQ ID NO: 373523 - DNA, 12 bp, Artificial Sequence
  Oligonucleotide primer for the detection of SNP TSC0060137
tttacctaaaac

SEQ ID NO: 373524 - DNA, 12 bp, Artificial Sequence
  Oligonucleotide primer for the detection of SNP TSC0060137
aatattaaataa

SEQ ID NO: 373525 - DNA, 12 bp, Artificial Sequence
  Oligonucleotide primer for the detection of SNP TSC0060142
acctcaaccacc

SEQ ID NO: 373526 - DNA, 12 bp, Artificial Sequence
  Oligonucleotide primer for the detection of SNP TSC0060147
tttcttaatcaa

SEQ ID NO: 373527 - DNA, 12 bp, Artificial Sequence
  Oligonucleotide primer for the detection of SNP TSC0060147
agaggatatagt

SEQ ID NO: 373528 - DNA, 12 bp, Artificial Sequence
  Oligonucleotide primer for the detection of SNP TSC0060147
ttttttagttaa

SEQ ID NO: 373529 - DNA, 12 bp, Artificial Sequence
  Oligonucleotide primer for the detection of SNP TSC0060148
caactatttctt

SEQ ID NO: 373530 - DNA, 12 bp, Artificial Sequence
  Oligonucleotide primer for the detection of SNP TSC0060148
agttttagggag

SEQ ID NO: 373531 - DNA, 12 bp, Artificial Sequence
  Oligonucleotide primer for the detection of SNP TSC0060150
aggacgtatatt

SEQ ID NO: 373532 - DNA, 12 bp, Artificial Sequence
  Oligonucleotide primer for the detection of SNP TSC0060150
aaacgtatatta

SEQ ID NO: 373533 - DNA, 12 bp, Artificial Sequence
  Oligonucleotide primer for the detection of SNP TSC0060150
aaaattttaatt

SEQ ID NO: 373534 - DNA, 12 bp, Artificial Sequence
  Oligonucleotide primer for the detection of SNP TSC0060151
caacaataaatt

SEQ ID NO: 373535 - DNA, 12 bp, Artificial Sequence
  Oligonucleotide primer for the detection of SNP TSC0060151
gatgattgatta

SEQ ID NO: 373536 - DNA, 12 bp, Artificial Sequence
  Oligonucleotide primer for the detection of SNP TSC0060159
ctcattcccttt

SEQ ID NO: 373537 - DNA, 12 bp, Artificial Sequence
  Oligonucleotide primer for the detection of SNP TSC0060159
aggaggaaaaag

SEQ ID NO: 373538 - DNA, 12 bp, Artificial Sequence
  Oligonucleotide primer for the detection of SNP TSC0060160
tctaaccactat

SEQ ID NO: 373539 - DNA, 12 bp, Artificial Sequence
  Oligonucleotide primer for the detection of SNP TSC0060160
gaagtggtaaga

SEQ ID NO: 373540 - DNA, 12 bp, Artificial Sequence
  Oligonucleotide primer for the detection of SNP TSC0060161
ataactcacctt

SEQ ID NO: 373541 - DNA, 12 bp, Artificial Sequence
  Oligonucleotide primer for the detection of SNP TSC0060161
tgaaatgggtat

SEQ ID NO: 373542 - DNA, 12 bp, Artificial Sequence
  Oligonucleotide primer for the detection of SNP TSC0060161
taaaataaatac

SEQ ID NO: 373543 - DNA, 12 bp, Artificial Sequence
  Oligonucleotide primer for the detection of SNP TSC0060161
gtggtttatttt

SEQ ID NO: 373544 - DNA, 12 bp, Artificial Sequence
  Oligonucleotide primer for the detection of SNP TSC0060162
aaaccatactcc

SEQ ID NO: 373545 - DNA, 12 bp, Artificial Sequence
  Oligonucleotide primer for the detection of SNP TSC0060162
ggaaatgtaaag

SEQ ID NO: 373546 - DNA, 12 bp, Artificial Sequence
  Oligonucleotide primer for the detection of SNP TSC0060164
cgtaaaataaac

SEQ ID NO: 373547 - DNA, 12 bp, Artificial Sequence
  Oligonucleotide primer for the detection of SNP TSC0060164
gaaaatatattg

SEQ ID NO: 373548 - DNA, 12 bp, Artificial Sequence
  Oligonucleotide primer for the detection of SNP TSC0060165
atattaaaaaac

SEQ ID NO: 373549 - DNA, 12 bp, Artificial Sequence
  Oligonucleotide primer for the detection of SNP TSC0060165
ttgattaaggtt

SEQ ID NO: 373550 - DNA, 12 bp, Artificial Sequence
  Oligonucleotide primer for the detection of SNP TSC0060165
tgttggagaatt

SEQ ID NO: 373551 - DNA, 12 bp, Artificial Sequence
  Oligonucleotide primer for the detection of SNP TSC0060166
attctcataatt

SEQ ID NO: 373552 - DNA, 12 bp, Artificial Sequence
  Oligonucleotide primer for the detection of SNP TSC0060166
gtaggaatttta

SEQ ID NO: 373553 - DNA, 12 bp, Artificial Sequence
  Oligonucleotide primer for the detection of SNP TSC0060166
ataaaaatttca

SEQ ID NO: 373554 - DNA, 12 bp, Artificial Sequence
  Oligonucleotide primer for the detection of SNP TSC0060167
cacaacttcctc

SEQ ID NO: 373555 - DNA, 12 bp, Artificial Sequence
  Oligonucleotide primer for the detection of SNP TSC0060167
aatttataagtg

SEQ ID NO: 373556 - DNA, 12 bp, Artificial Sequence
  Oligonucleotide primer for the detection of SNP TSC0060168
accacaattaaa

SEQ ID NO: 373557 - DNA, 12 bp, Artificial Sequence
  Oligonucleotide primer for the detection of SNP TSC0060168
gccacaattaaa

SEQ ID NO: 373558 - DNA, 12 bp, Artificial Sequence
  Oligonucleotide primer for the detection of SNP TSC0060168
acatattcaata

SEQ ID NO: 373559 - DNA, 12 bp, Artificial Sequence
  Oligonucleotide primer for the detection of SNP TSC0060168
tgttataattga

SEQ ID NO: 373560 - DNA, 12 bp, Artificial Sequence
  Oligonucleotide primer for the detection of SNP TSC0060168
cgttataattga

SEQ ID NO: 373561 - DNA, 12 bp, Artificial Sequence
  Oligonucleotide primer for the detection of SNP TSC0060170
cctaacaactcc

SEQ ID NO: 373562 - DNA, 12 bp, Artificial Sequence
  Oligonucleotide primer for the detection of SNP TSC0060170
tggagttagatg

SEQ ID NO: 373563 - DNA, 12 bp, Artificial Sequence
  Oligonucleotide primer for the detection of SNP TSC0060176
tagtatatataa

SEQ ID NO: 373564 - DNA, 12 bp, Artificial Sequence
  Oligonukleotid-Primer
catcaaaaaccc

SEQ ID NO: 373565 - DNA, 12 bp, Artificial Sequence
  Oligonucleotide primer for the detection of SNP TSC0060177
catcgaaaaccc

SEQ ID NO: 373566 - DNA, 12 bp, Artificial Sequence
  Oligonucleotide primer for the detection of SNP TSC0060177
tttagagtttag

SEQ ID NO: 373567 - DNA, 12 bp, Artificial Sequence
  Oligonucleotide primer for the detection of SNP TSC0060177
ctcaaaactcaa

SEQ ID NO: 373568 - DNA, 12 bp, Artificial Sequence
  Oligonucleotide primer for the detection of SNP TSC0060177
tattgggagttt

SEQ ID NO: 373569 - DNA, 12 bp, Artificial Sequence
  Oligonucleotide primer for the detection of SNP TSC0060177
tatcgggagttt

SEQ ID NO: 373570 - DNA, 12 bp, Artificial Sequence
  Oligonucleotide primer for the detection of SNP TSC0060178
tattataacaat

SEQ ID NO: 373571 - DNA, 12 bp, Artificial Sequence
  Oligonucleotide primer for the detection of SNP TSC0060178
tttggataaggt

SEQ ID NO: 373572 - DNA, 12 bp, Artificial Sequence
  Oligonucleotide primer for the detection of SNP TSC0060178
tgttatggtagt

SEQ ID NO: 373573 - DNA, 12 bp, Artificial Sequence
  Oligonucleotide primer for the detection of SNP TSC0060179
tacatacaaata

SEQ ID NO: 373574 - DNA, 12 bp, Artificial Sequence
  Oligonucleotide primer for the detection of SNP TSC0060179
tcctcttttttc

SEQ ID NO: 373575 - DNA, 12 bp, Artificial Sequence
  Oligonucleotide primer for the detection of SNP TSC0060179
ttgtatataggt

SEQ ID NO: 373576 - DNA, 12 bp, Artificial Sequence
  Oligonucleotide primer for the detection of SNP TSC0060181
gggtagttttta

SEQ ID NO: 373577 - DNA, 12 bp, Artificial Sequence
  Oligonucleotide primer for the detection of SNP TSC0060182
acaacccaataa

SEQ ID NO: 373578 - DNA, 12 bp, Artificial Sequence
  Oligonucleotide primer for the detection of SNP TSC0060182
acaacccgataa

SEQ ID NO: 373579 - DNA, 12 bp, Artificial Sequence
  Oligonucleotide primer for the detection of SNP TSC0060182
ggaaagtataag

SEQ ID NO: 373580 - DNA, 12 bp, Artificial Sequence
  Oligonucleotide primer for the detection of SNP TSC0060182
tgtagtttggtg

SEQ ID NO: 373581 - DNA, 12 bp, Artificial Sequence
  Oligonucleotide primer for the detection of SNP TSC0060182
tgtagttcggtg

SEQ ID NO: 373582 - DNA, 12 bp, Artificial Sequence
  Oligonucleotide primer for the detection of SNP TSC0060183
aactacaaccca

SEQ ID NO: 373583 - DNA, 12 bp, Artificial Sequence
  Oligonucleotide primer for the detection of SNP TSC0060183
aactacaacccg

SEQ ID NO: 373584 - DNA, 12 bp, Artificial Sequence
  Oligonucleotide primer for the detection of SNP TSC0060183
aagtataaggtt

SEQ ID NO: 373585 - DNA, 12 bp, Artificial Sequence
  Oligonucleotide primer for the detection of SNP TSC0060183
aatacaaaatca

SEQ ID NO: 373586 - DNA, 12 bp, Artificial Sequence
  Oligonucleotide primer for the detection of SNP TSC0060183
agttgtagttcg

SEQ ID NO: 373587 - DNA, 12 bp, Artificial Sequence
  Oligonucleotide primer for the detection of SNP TSC0060184
tctttattttaa

SEQ ID NO: 373588 - DNA, 12 bp, Artificial Sequence
  Oligonucleotide primer for the detection of SNP TSC0060184
ttagaggtattt

SEQ ID NO: 373589 - DNA, 12 bp, Artificial Sequence
  Oligonucleotide primer for the detection of SNP TSC0060187
caaaaaaatatt

SEQ ID NO: 373590 - DNA, 12 bp, Artificial Sequence
  Oligonucleotide primer for the detection of SNP TSC0060187
ttattaagggta

SEQ ID NO: 373591 - DNA, 12 bp, Artificial Sequence
  Oligonucleotide primer for the detection of SNP TSC0060188
tataaaaacata

SEQ ID NO: 373592 - DNA, 12 bp, Artificial Sequence
  Oligonucleotide primer for the detection of SNP TSC0060188
ataaatagattt

SEQ ID NO: 373593 - DNA, 12 bp, Artificial Sequence
  Oligonucleotide primer for the detection of SNP TSC0060188
ataaacaaatcc

SEQ ID NO: 373594 - DNA, 12 bp, Artificial Sequence
  Oligonucleotide primer for the detection of SNP TSC0060188
tgtgagagtatg

SEQ ID NO: 373595 - DNA, 12 bp, Artificial Sequence
  Oligonucleotide primer for the detection of SNP TSC0060192
ctttaacctttt

SEQ ID NO: 373596 - DNA, 12 bp, Artificial Sequence
  Oligonucleotide primer for the detection of SNP TSC0060192
tgaatgggtttg

SEQ ID NO: 373597 - DNA, 12 bp, Artificial Sequence
  Oligonucleotide primer for the detection of SNP TSC0060194
ggtaaattatta

SEQ ID NO: 373598 - DNA, 12 bp, Artificial Sequence
  Oligonucleotide primer for the detection of SNP TSC0060195
aaattatcctat

SEQ ID NO: 373599 - DNA, 12 bp, Artificial Sequence
  Oligonucleotide primer for the detection of SNP TSC0060196
taaatttaaaca

SEQ ID NO: 373600 - DNA, 12 bp, Artificial Sequence
  Oligonucleotide primer for the detection of SNP TSC0060196
aaaaacaaaccc

SEQ ID NO: 373601 - DNA, 12 bp, Artificial Sequence
  Oligonucleotide primer for the detection of SNP TSC0060196
gtgaatttaagt

SEQ ID NO: 373602 - DNA, 12 bp, Artificial Sequence
  Oligonucleotide primer for the detection of SNP TSC0060197
caaacccttcat

SEQ ID NO: 373603 - DNA, 12 bp, Artificial Sequence
  Oligonucleotide primer for the detection of SNP TSC0060197
tatataaattta

SEQ ID NO: 373604 - DNA, 12 bp, Artificial Sequence
  Oligonucleotide primer for the detection of SNP TSC0060199
tactaacttaac

SEQ ID NO: 373605 - DNA, 12 bp, Artificial Sequence
  Oligonucleotide primer for the detection of SNP TSC0060199
ttttaaataaga

SEQ ID NO: 373606 - DNA, 12 bp, Artificial Sequence
  Oligonucleotide primer for the detection of SNP TSC0060200
tactcctttttc

SEQ ID NO: 373607 - DNA, 12 bp, Artificial Sequence
  Oligonucleotide primer for the detection of SNP TSC0060200
gtagtaaggata

SEQ ID NO: 373608 - DNA, 12 bp, Artificial Sequence
  Oligonucleotide primer for the detection of SNP TSC0060201
tcatacaacata

SEQ ID NO: 373609 - DNA, 12 bp, Artificial Sequence
  Oligonucleotide primer for the detection of SNP TSC0060201
ataattttgtag

SEQ ID NO: 373610 - DNA, 12 bp, Artificial Sequence
  Oligonucleotide primer for the detection of SNP TSC0060201
acaaccttataa

SEQ ID NO: 373611 - DNA, 12 bp, Artificial Sequence
  Oligonucleotide primer for the detection of SNP TSC0060202
taggtattatta

SEQ ID NO: 373612 - DNA, 12 bp, Artificial Sequence
  Oligonucleotide primer for the detection of SNP TSC0060202
taaatactatta

SEQ ID NO: 373613 - DNA, 12 bp, Artificial Sequence
  Oligonucleotide primer for the detection of SNP TSC0060202
taaagtggataa

SEQ ID NO: 373614 - DNA, 12 bp, Artificial Sequence
  Oligonucleotide primer for the detection of SNP TSC0060205
tcttttaaaaaa

SEQ ID NO: 373615 - DNA, 12 bp, Artificial Sequence
  Oligonucleotide primer for the detection of SNP TSC0060206
ctttataatttt

SEQ ID NO: 373616 - DNA, 12 bp, Artificial Sequence
  Oligonucleotide primer for the detection of SNP TSC0060206
agagaaatgaaa

SEQ ID NO: 373617 - DNA, 12 bp, Artificial Sequence
  Oligonucleotide primer for the detection of SNP TSC0060209
cccttatacatt

SEQ ID NO: 373618 - DNA, 12 bp, Artificial Sequence
  Oligonucleotide primer for the detection of SNP TSC0060210
tgtattgtgtga

SEQ ID NO: 373619 - DNA, 12 bp, Artificial Sequence
  Oligonucleotide primer for the detection of SNP TSC0060210
acattatataaa

SEQ ID NO: 373620 - DNA, 12 bp, Artificial Sequence
  Oligonucleotide primer for the detection of SNP TSC0060210
agtgaaaaggta

SEQ ID NO: 373621 - DNA, 12 bp, Artificial Sequence
  Oligonucleotide primer for the detection of SNP TSC0060213
ctctaccatatc

SEQ ID NO: 373622 - DNA, 12 bp, Artificial Sequence
  Oligonucleotide primer for the detection of SNP TSC0060213
aataaaagttat

SEQ ID NO: 373623 - DNA, 12 bp, Artificial Sequence
  Oligonucleotide primer for the detection of SNP TSC0060213
ttttgttatgtt

SEQ ID NO: 373624 - DNA, 12 bp, Artificial Sequence
  Oligonucleotide primer for the detection of SNP TSC0060213
ttttgttatgtc

SEQ ID NO: 373625 - DNA, 12 bp, Artificial Sequence
  Oligonucleotide primer for the detection of SNP TSC0060214
gttatatggttt

SEQ ID NO: 373626 - DNA, 12 bp, Artificial Sequence
  Oligonucleotide primer for the detection of SNP TSC0060214
attatataattt

SEQ ID NO: 373627 - DNA, 12 bp, Artificial Sequence
  Oligonucleotide primer for the detection of SNP TSC0060214
gagatatagaga

SEQ ID NO: 373628 - DNA, 12 bp, Artificial Sequence
  Oligonucleotide primer for the detection of SNP TSC0060215
acattctacaat

SEQ ID NO: 373629 - DNA, 12 bp, Artificial Sequence
  Oligonucleotide primer for the detection of SNP TSC0060216
tgaaatattata

SEQ ID NO: 373630 - DNA, 12 bp, Artificial Sequence
  Oligonucleotide primer for the detection of SNP TSC0060216
aaaacaccacaa

SEQ ID NO: 373631 - DNA, 12 bp, Artificial Sequence
  Oligonucleotide primer for the detection of SNP TSC0060219
atttagaaaatt

SEQ ID NO: 373632 - DNA, 12 bp, Artificial Sequence
  Oligonucleotide primer for the detection of SNP TSC0060220
ctatcacaaacc

SEQ ID NO: 373633 - DNA, 12 bp, Artificial Sequence
  Oligonucleotide primer for the detection of SNP TSC0060221
tattcatacaat

SEQ ID NO: 373634 - DNA, 12 bp, Artificial Sequence
  Oligonucleotide primer for the detection of SNP TSC0060221
taaatgatattt

SEQ ID NO: 373635 - DNA, 12 bp, Artificial Sequence
  Oligonucleotide primer for the detection of SNP TSC0060221
tgtttatataat

SEQ ID NO: 373636 - DNA, 12 bp, Artificial Sequence
  Oligonucleotide primer for the detection of SNP TSC0060224
ttacaccctaaa

SEQ ID NO: 373637 - DNA, 12 bp, Artificial Sequence
  Oligonucleotide primer for the detection of SNP TSC0060224
ttagtgtatgat

SEQ ID NO: 373638 - DNA, 12 bp, Artificial Sequence
  Oligonucleotide primer for the detection of SNP TSC0060224
ccaatatataat

SEQ ID NO: 373639 - DNA, 12 bp, Artificial Sequence
  Oligonucleotide primer for the detection of SNP TSC0060225
ttttagggtgta

SEQ ID NO: 373640 - DNA, 12 bp, Artificial Sequence
  Oligonucleotide primer for the detection of SNP TSC0060226
agaatagtatag

SEQ ID NO: 373641 - DNA, 12 bp, Artificial Sequence
  Oligonucleotide primer for the detection of SNP TSC0060227
gttgtgaaggga

SEQ ID NO: 373642 - DNA, 12 bp, Artificial Sequence
  Oligonucleotide primer for the detection of SNP TSC0060228
taatctcctaca

SEQ ID NO: 373643 - DNA, 12 bp, Artificial Sequence
  Oligonucleotide primer for the detection of SNP TSC0060228
tgttaggttatt

SEQ ID NO: 373644 - DNA, 12 bp, Artificial Sequence
  Oligonucleotide primer for the detection of SNP TSC0060228
tctattaaatca

SEQ ID NO: 373645 - DNA, 12 bp, Artificial Sequence
  Oligonucleotide primer for the detection of SNP TSC0060228
aattttttatac

SEQ ID NO: 373646 - DNA, 12 bp, Artificial Sequence
  Oligonucleotide primer for the detection of SNP TSC0060229
accctcaaccct

SEQ ID NO: 373647 - DNA, 12 bp, Artificial Sequence
  Oligonucleotide primer for the detection of SNP TSC0060229
gaaggagggaaa

SEQ ID NO: 373648 - DNA, 12 bp, Artificial Sequence
  Oligonucleotide primer for the detection of SNP TSC0060232
aattataccaac

SEQ ID NO: 373649 - DNA, 12 bp, Artificial Sequence
  Oligonucleotide primer for the detection of SNP TSC0060232
attggttgttgg

SEQ ID NO: 373650 - DNA, 12 bp, Artificial Sequence
  Oligonucleotide primer for the detection of SNP TSC0060233
tataccctatac

SEQ ID NO: 373651 - DNA, 12 bp, Artificial Sequence
  Oligonucleotide primer for the detection of SNP TSC0060239
tttaagaaatag

SEQ ID NO: 373652 - DNA, 12 bp, Artificial Sequence
  Oligonucleotide primer for the detection of SNP TSC0060242
tcccttaactcc

SEQ ID NO: 373653 - DNA, 12 bp, Artificial Sequence
  Oligonucleotide primer for the detection of SNP TSC0060242
gtagagattatg

SEQ ID NO: 373654 - DNA, 12 bp, Artificial Sequence
  Oligonucleotide primer for the detection of SNP TSC0060246
attaccatatat

SEQ ID NO: 373655 - DNA, 12 bp, Artificial Sequence
  Oligonucleotide primer for the detection of SNP TSC0060249
tcactaaactaa

SEQ ID NO: 373656 - DNA, 12 bp, Artificial Sequence
  Oligonucleotide primer for the detection of SNP TSC0060249
agtggagagttt

SEQ ID NO: 373657 - DNA, 12 bp, Artificial Sequence
  Oligonucleotide primer for the detection of SNP TSC0060250
aactcacaaaaa

SEQ ID NO: 373658 - DNA, 12 bp, Artificial Sequence
  Oligonucleotide primer for the detection of SNP TSC0060250
aactcgcaaaaa

SEQ ID NO: 373659 - DNA, 12 bp, Artificial Sequence
  Oligonucleotide primer for the detection of SNP TSC0060250
aactaatccacc

SEQ ID NO: 373660 - DNA, 12 bp, Artificial Sequence
  Oligonucleotide primer for the detection of SNP TSC0060250
tggtttgtaagg

SEQ ID NO: 373661 - DNA, 12 bp, Artificial Sequence
  Oligonucleotide primer for the detection of SNP TSC0060250
tggttcgtaagg

SEQ ID NO: 373662 - DNA, 12 bp, Artificial Sequence
  Oligonucleotide primer for the detection of SNP TSC0060251
tcaaaaactaca

SEQ ID NO: 373663 - DNA, 12 bp, Artificial Sequence
  Oligonucleotide primer for the detection of SNP TSC0060251
tgtaatttaggg

SEQ ID NO: 373664 - DNA, 12 bp, Artificial Sequence
  Oligonucleotide primer for the detection of SNP TSC0060252
aaacccctaact

SEQ ID NO: 373665 - DNA, 12 bp, Artificial Sequence
  Oligonucleotide primer for the detection of SNP TSC0060252
aagtatttgtgg

SEQ ID NO: 373666 - DNA, 12 bp, Artificial Sequence
  Oligonucleotide primer for the detection of SNP TSC0060254
tctactttacaa

SEQ ID NO: 373667 - DNA, 12 bp, Artificial Sequence
  Oligonucleotide primer for the detection of SNP TSC0060254
gaaggaatgtat

SEQ ID NO: 373668 - DNA, 12 bp, Artificial Sequence
  Oligonucleotide primer for the detection of SNP TSC0060257
ataacacttata

SEQ ID NO: 373669 - DNA, 12 bp, Artificial Sequence
  Oligonucleotide primer for the detection of SNP TSC0060257
agtaatatttat

SEQ ID NO: 373670 - DNA, 12 bp, Artificial Sequence
  Oligonucleotide primer for the detection of SNP TSC0010321
tttgttgataat

SEQ ID NO: 373671 - DNA, 12 bp, Artificial Sequence
  Oligonucleotide primer for the detection of SNP TSC0010321
tctattaacaac

SEQ ID NO: 373672 - DNA, 12 bp, Artificial Sequence
  Oligonucleotide primer for the detection of SNP TSC0010321
aaatttaggaat

SEQ ID NO: 373673 - DNA, 12 bp, Artificial Sequence
  Oligonucleotide primer for the detection of SNP TSC0010322
cacctatccact

SEQ ID NO: 373674 - DNA, 12 bp, Artificial Sequence
  Oligonucleotide primer for the detection of SNP TSC0010322
ggaaatttagta

SEQ ID NO: 373675 - DNA, 12 bp, Artificial Sequence
  Oligonucleotide primer for the detection of SNP TSC0010323
ccctaattattc

SEQ ID NO: 373676 - DNA, 12 bp, Artificial Sequence
  Oligonucleotide primer for the detection of SNP TSC0010323
tggaggataatg

SEQ ID NO: 373677 - DNA, 12 bp, Artificial Sequence
  Oligonucleotide primer for the detection of SNP TSC0010324
tccacaaaccct

SEQ ID NO: 373678 - DNA, 12 bp, Artificial Sequence
  Oligonucleotide primer for the detection of SNP TSC0010324
gtttttattgtg

SEQ ID NO: 373679 - DNA, 12 bp, Artificial Sequence
  Oligonucleotide primer for the detection of SNP TSC0060261
ccaccaaactaa

SEQ ID NO: 373680 - DNA, 12 bp, Artificial Sequence
  Oligonucleotide primer for the detection of SNP TSC0060261
ttgaaggtaggg

SEQ ID NO: 373681 - DNA, 12 bp, Artificial Sequence
  Oligonucleotide primer for the detection of SNP TSC0060261
ttattaggttgg

SEQ ID NO: 373682 - DNA, 12 bp, Artificial Sequence
  Oligonucleotide primer for the detection of SNP TSC0008909
tacctcaaaaat

SEQ ID NO: 373683 - DNA, 12 bp, Artificial Sequence
  Oligonucleotide primer for the detection of SNP TSC0008909
taatggttggta

SEQ ID NO: 373684 - DNA, 12 bp, Artificial Sequence
  Oligonucleotide primer for the detection of SNP TSC0008909
taataactaata

SEQ ID NO: 373685 - DNA, 12 bp, Artificial Sequence
  Oligonucleotide primer for the detection of SNP TSC0008909
tattttagaaat

SEQ ID NO: 373686 - DNA, 12 bp, Artificial Sequence
  Oligonucleotide primer for the detection of SNP TSC0060264
atattttccaat

SEQ ID NO: 373687 - DNA, 12 bp, Artificial Sequence
  Oligonucleotide primer for the detection of SNP TSC0060264
aataaaagtaaa

SEQ ID NO: 373688 - DNA, 12 bp, Artificial Sequence
  Oligonucleotide primer for the detection of SNP TSC0060269
ttaaacatcttc

SEQ ID NO: 373689 - DNA, 12 bp, Artificial Sequence
  Oligonucleotide primer for the detection of SNP TSC0060269
tgttaatagttg

SEQ ID NO: 373690 - DNA, 12 bp, Artificial Sequence
  Oligonucleotide primer for the detection of SNP TSC0060269
cgttaatagttg

SEQ ID NO: 373691 - DNA, 12 bp, Artificial Sequence
  Oligonucleotide primer for the detection of SNP TSC0060269
cgtcaataacta

SEQ ID NO: 373692 - DNA, 12 bp, Artificial Sequence
  Oligonucleotide primer for the detection of SNP TSC0060270
aatctttctaaa

SEQ ID NO: 373693 - DNA, 12 bp, Artificial Sequence
  Oligonucleotide primer for the detection of SNP TSC0060270
ttagaaattttt

SEQ ID NO: 373694 - DNA, 12 bp, Artificial Sequence
  Oligonucleotide primer for the detection of SNP TSC0060270
ttagaaattttc

SEQ ID NO: 373695 - DNA, 12 bp, Artificial Sequence
  Oligonucleotide primer for the detection of SNP TSC0060270
tttaaaaactct

SEQ ID NO: 373696 - DNA, 12 bp, Artificial Sequence
  Oligonucleotide primer for the detection of SNP TSC0010783
ttttccaataaa

SEQ ID NO: 373697 - DNA, 12 bp, Artificial Sequence
  Oligonucleotide primer for the detection of SNP TSC0010783
aaccatatcata

SEQ ID NO: 373698 - DNA, 12 bp, Artificial Sequence
  Oligonucleotide primer for the detection of SNP TSC0010784
accaatataatt

SEQ ID NO: 373699 - DNA, 12 bp, Artificial Sequence
  Oligonucleotide primer for the detection of SNP TSC0010784
ttattggaaaat

SEQ ID NO: 373700 - DNA, 12 bp, Artificial Sequence
  Oligonucleotide primer for the detection of SNP TSC0010784
gttaatatagtt

SEQ ID NO: 373701 - DNA, 12 bp, Artificial Sequence
  Oligonucleotide primer for the detection of SNP TSC0060275
atattggtaagt

SEQ ID NO: 373702 - DNA, 12 bp, Artificial Sequence
  Oligonucleotide primer for the detection of SNP TSC0060275
atattaacaaac

SEQ ID NO: 373703 - DNA, 12 bp, Artificial Sequence
  Oligonucleotide primer for the detection of SNP TSC0060275
ttgtggtgagtt

SEQ ID NO: 373704 - DNA, 12 bp, Artificial Sequence
  Oligonucleotide primer for the detection of SNP TSC0060275
ttgtggtgagtc

SEQ ID NO: 373705 - DNA, 12 bp, Artificial Sequence
  Oligonucleotide primer for the detection of SNP TSC0060276
ccctcatttact

SEQ ID NO: 373706 - DNA, 12 bp, Artificial Sequence
  Oligonucleotide primer for the detection of SNP TSC0060276
ccctcgtttact

SEQ ID NO: 373707 - DNA, 12 bp, Artificial Sequence
  Oligonucleotide primer for the detection of SNP TSC0060276
ttaatgaaataa

SEQ ID NO: 373708 - DNA, 12 bp, Artificial Sequence
  Oligonucleotide primer for the detection of SNP TSC0060279
tatctccaaaac

SEQ ID NO: 373709 - DNA, 12 bp, Artificial Sequence
  Oligonucleotide primer for the detection of SNP TSC0060279
ttttagaatttt

SEQ ID NO: 373710 - DNA, 12 bp, Artificial Sequence
  Oligonucleotide primer for the detection of SNP TSC0060283
tatttataaccc

SEQ ID NO: 373711 - DNA, 12 bp, Artificial Sequence
  Oligonucleotide primer for the detection of SNP TSC0060283
atatataaaatg

SEQ ID NO: 373712 - DNA, 12 bp, Artificial Sequence
  Oligonucleotide primer for the detection of SNP TSC0060284
ttttaaaactca

SEQ ID NO: 373713 - DNA, 12 bp, Artificial Sequence
  Oligonucleotide primer for the detection of SNP TSC0060284
tctttcttatta

SEQ ID NO: 373714 - DNA, 12 bp, Artificial Sequence
  Oligonucleotide primer for the detection of SNP TSC0060286
ctaatcatatat

SEQ ID NO: 373715 - DNA, 12 bp, Artificial Sequence
  Oligonucleotide primer for the detection of SNP TSC0060286
attgaaggttaa

SEQ ID NO: 373716 - DNA, 12 bp, Artificial Sequence
  Oligonucleotide primer for the detection of SNP TSC0060287
aaagtgtagatt

SEQ ID NO: 373717 - DNA, 12 bp, Artificial Sequence
  Oligonucleotide primer for the detection of SNP TSC0060287
aaagtgtagatc

SEQ ID NO: 373718 - DNA, 12 bp, Artificial Sequence
  Oligonucleotide primer for the detection of SNP TSC0060287
agtttttgaggg

SEQ ID NO: 373719 - DNA, 12 bp, Artificial Sequence
  Oligonucleotide primer for the detection of SNP TSC0060289
tgaaggtaatgt

SEQ ID NO: 373720 - DNA, 12 bp, Artificial Sequence
  Oligonucleotide primer for the detection of SNP TSC0060289
ttaagagattga

SEQ ID NO: 373721 - DNA, 12 bp, Artificial Sequence
  Oligonucleotide primer for the detection of SNP TSC0010532
ccaaactttttt

SEQ ID NO: 373722 - DNA, 12 bp, Artificial Sequence
  Oligonucleotide primer for the detection of SNP TSC0010532
ttcccacacaca

SEQ ID NO: 373723 - DNA, 12 bp, Artificial Sequence
  Oligonucleotide primer for the detection of SNP TSC0060290
aacataaactac

SEQ ID NO: 373724 - DNA, 12 bp, Artificial Sequence
  Oligonucleotide primer for the detection of SNP TSC0060290
aacgtaaactac

SEQ ID NO: 373725 - DNA, 12 bp, Artificial Sequence
  Oligonucleotide primer for the detection of SNP TSC0060290
aggagaaagggg

SEQ ID NO: 373726 - DNA, 12 bp, Artificial Sequence
  Oligonucleotide primer for the detection of SNP TSC0060291
ctaaacacacat

SEQ ID NO: 373727 - DNA, 12 bp, Artificial Sequence
  Oligonucleotide primer for the detection of SNP TSC0060291
tatgtttagaaa

SEQ ID NO: 373728 - DNA, 12 bp, Artificial Sequence
  Oligonucleotide primer for the detection of SNP TSC0060292
tcatttactttc

SEQ ID NO: 373729 - DNA, 12 bp, Artificial Sequence
  Oligonucleotide primer for the detection of SNP TSC0060292
gtatttatatag

SEQ ID NO: 373730 - DNA, 12 bp, Artificial Sequence
  Oligonucleotide primer for the detection of SNP TSC0060292
atatctatataa

SEQ ID NO: 373731 - DNA, 12 bp, Artificial Sequence
  Oligonucleotide primer for the detection of SNP TSC0060293
tatttctatttt

SEQ ID NO: 373732 - DNA, 12 bp, Artificial Sequence
  Oligonucleotide primer for the detection of SNP TSC0060293
tgtgggtatgta

SEQ ID NO: 373733 - DNA, 12 bp, Artificial Sequence
  Oligonucleotide primer for the detection of SNP TSC0060294
tttttagagatg

SEQ ID NO: 373734 - DNA, 12 bp, Artificial Sequence
  Oligonucleotide primer for the detection of SNP TSC0060295
caaaccatcctc

SEQ ID NO: 373735 - DNA, 12 bp, Artificial Sequence
  Oligonucleotide primer for the detection of SNP TSC0060295
gaggtggaggta

SEQ ID NO: 373736 - DNA, 12 bp, Artificial Sequence
  Oligonucleotide primer for the detection of SNP TSC0060295
gaggcggaggta

SEQ ID NO: 373737 - DNA, 12 bp, Artificial Sequence
  Oligonucleotide primer for the detection of SNP TSC0060296
atttcaattaaa

SEQ ID NO: 373738 - DNA, 12 bp, Artificial Sequence
  Oligonucleotide primer for the detection of SNP TSC0060296
taatcattacta

SEQ ID NO: 373739 - DNA, 12 bp, Artificial Sequence
  Oligonucleotide primer for the detection of SNP TSC0060296
attttagttaag

SEQ ID NO: 373740 - DNA, 12 bp, Artificial Sequence
  Oligonucleotide primer for the detection of SNP TSC0060297
ttcaaaaacaat

SEQ ID NO: 373741 - DNA, 12 bp, Artificial Sequence
  Oligonucleotide primer for the detection of SNP TSC0060298
aaccattatcta

SEQ ID NO: 373742 - DNA, 12 bp, Artificial Sequence
  Oligonucleotide primer for the detection of SNP TSC0060298
ttagatgtttat

SEQ ID NO: 373743 - DNA, 12 bp, Artificial Sequence
  Oligonucleotide primer for the detection of SNP TSC0060298
ccaaatacccac

SEQ ID NO: 373744 - DNA, 12 bp, Artificial Sequence
  Oligonucleotide primer for the detection of SNP TSC0060299
accaataaatcc

SEQ ID NO: 373745 - DNA, 12 bp, Artificial Sequence
  Oligonucleotide primer for the detection of SNP TSC0060300
gggttattagga

SEQ ID NO: 373746 - DNA, 12 bp, Artificial Sequence
  Oligonucleotide primer for the detection of SNP TSC0060300
tgttatgagtat

SEQ ID NO: 373747 - DNA, 12 bp, Artificial Sequence
  Oligonucleotide primer for the detection of SNP TSC0060301
aacaacaatact

SEQ ID NO: 373748 - DNA, 12 bp, Artificial Sequence
  Oligonucleotide primer for the detection of SNP TSC0060301
aacgacaatact

SEQ ID NO: 373749 - DNA, 12 bp, Artificial Sequence
  Oligonucleotide primer for the detection of SNP TSC0060301
ttaattccccta

SEQ ID NO: 373750 - DNA, 12 bp, Artificial Sequence
  Oligonucleotide primer for the detection of SNP TSC0060301
ggtgatagtgtt

SEQ ID NO: 373751 - DNA, 12 bp, Artificial Sequence
  Oligonucleotide primer for the detection of SNP TSC0060301
ggcgatagtgtt

SEQ ID NO: 373752 - DNA, 12 bp, Artificial Sequence
  Oligonucleotide primer for the detection of SNP TSC0060302
gggagattagta

SEQ ID NO: 373753 - DNA, 12 bp, Artificial Sequence
  Oligonucleotide primer for the detection of SNP TSC0060302
agtttatagatt

SEQ ID NO: 373754 - DNA, 12 bp, Artificial Sequence
  Oligonucleotide primer for the detection of SNP TSC0060303
ctttaaatacat

SEQ ID NO: 373755 - DNA, 12 bp, Artificial Sequence
  Oligonucleotide primer for the detection of SNP TSC0060304
atttaaatacac

SEQ ID NO: 373756 - DNA, 12 bp, Artificial Sequence
  Oligonucleotide primer for the detection of SNP TSC0060304
tgatgttattaa

SEQ ID NO: 373757 - DNA, 12 bp, Artificial Sequence
  Oligonucleotide primer for the detection of SNP TSC0060304
taatattatcaa

SEQ ID NO: 373758 - DNA, 12 bp, Artificial Sequence
  Oligonucleotide primer for the detection of SNP TSC0060304
gtttaaatatat

SEQ ID NO: 373759 - DNA, 12 bp, Artificial Sequence
  Oligonucleotide primer for the detection of SNP TSC0007034
agaaagatttaa

SEQ ID NO: 373760 - DNA, 12 bp, Artificial Sequence
  Oligonucleotide primer for the detection of SNP TSC0007035
taatcaaaaatt

SEQ ID NO: 373761 - DNA, 12 bp, Artificial Sequence
  Oligonucleotide primer for the detection of SNP TSC0007035
tgtttttgaaga

SEQ ID NO: 373762 - DNA, 12 bp, Artificial Sequence
  Oligonucleotide primer for the detection of SNP TSC0007035
tgttttcgaaga

SEQ ID NO: 373763 - DNA, 12 bp, Artificial Sequence
  Oligonucleotide primer for the detection of SNP TSC0060306
caaaaacttttt

SEQ ID NO: 373764 - DNA, 12 bp, Artificial Sequence
  Oligonucleotide primer for the detection of SNP TSC0060307
cttattttaaat

SEQ ID NO: 373765 - DNA, 12 bp, Artificial Sequence
  Oligonucleotide primer for the detection of SNP TSC0060307
ataggtgaaaga

SEQ ID NO: 373766 - DNA, 12 bp, Artificial Sequence
  Oligonucleotide primer for the detection of SNP TSC0060308
acaacaacaaat

SEQ ID NO: 373767 - DNA, 12 bp, Artificial Sequence
  Oligonucleotide primer for the detection of SNP TSC0060310
tatacccccttc

SEQ ID NO: 373768 - DNA, 12 bp, Artificial Sequence
  Oligonucleotide primer for the detection of SNP TSC0060310
aagtatattatg

SEQ ID NO: 373769 - DNA, 12 bp, Artificial Sequence
  Oligonucleotide primer for the detection of SNP TSC0060311
atatatacacct

SEQ ID NO: 373770 - DNA, 12 bp, Artificial Sequence
  Oligonucleotide primer for the detection of SNP TSC0060311
tgtgggtatata

SEQ ID NO: 373771 - DNA, 12 bp, Artificial Sequence
  Oligonucleotide primer for the detection of SNP TSC0060313
aaaatactttac

SEQ ID NO: 373772 - DNA, 12 bp, Artificial Sequence
  Oligonucleotide primer for the detection of SNP TSC0060313
gaatttatataa

SEQ ID NO: 373773 - DNA, 12 bp, Artificial Sequence
  Oligonucleotide primer for the detection of SNP TSC0060314
tttaaaaaaact

SEQ ID NO: 373774 - DNA, 12 bp, Artificial Sequence
  Oligonucleotide primer for the detection of SNP TSC0060315
tttccacaacac

SEQ ID NO: 373775 - DNA, 12 bp, Artificial Sequence
  Oligonucleotide primer for the detection of SNP TSC0060315
tttccgcaacac

SEQ ID NO: 373776 - DNA, 12 bp, Artificial Sequence
  Oligonucleotide primer for the detection of SNP TSC0060315
ttttgtagtatt

SEQ ID NO: 373777 - DNA, 12 bp, Artificial Sequence
  Oligonucleotide primer for the detection of SNP TSC0060315
tttcgtagtatt

SEQ ID NO: 373778 - DNA, 12 bp, Artificial Sequence
  Oligonucleotide primer for the detection of SNP TSC0060316
caaattttaata

SEQ ID NO: 373779 - DNA, 12 bp, Artificial Sequence
  Oligonucleotide primer for the detection of SNP TSC0060316
cgaattttaata

SEQ ID NO: 373780 - DNA, 12 bp, Artificial Sequence
  Oligonucleotide primer for the detection of SNP TSC0060316
aacctcctatca

SEQ ID NO: 373781 - DNA, 12 bp, Artificial Sequence
  Oligonucleotide primer for the detection of SNP TSC0060316
gtgaattttggt

SEQ ID NO: 373782 - DNA, 12 bp, Artificial Sequence
  Oligonucleotide primer for the detection of SNP TSC0060316
gcgaattttggt

SEQ ID NO: 373783 - DNA, 12 bp, Artificial Sequence
  Oligonucleotide primer for the detection of SNP TSC0060317
atacataaatta

SEQ ID NO: 373784 - DNA, 12 bp, Artificial Sequence
  Oligonucleotide primer for the detection of SNP TSC0060317
tagaatttgtgt

SEQ ID NO: 373785 - DNA, 12 bp, Artificial Sequence
  Oligonucleotide primer for the detection of SNP TSC0060317
tgtgtataggtt

SEQ ID NO: 373786 - DNA, 12 bp, Artificial Sequence
  Oligonucleotide primer for the detection of SNP TSC0060318
atctctttctct

SEQ ID NO: 373787 - DNA, 12 bp, Artificial Sequence
  Oligonucleotide primer for the detection of SNP TSC0060318
attatttaagta

SEQ ID NO: 373788 - DNA, 12 bp, Artificial Sequence
  Oligonucleotide primer for the detection of SNP TSC0060319
caataataatct

SEQ ID NO: 373789 - DNA, 12 bp, Artificial Sequence
  Oligonucleotide primer for the detection of SNP TSC0060319
ctatttatttta

SEQ ID NO: 373790 - DNA, 12 bp, Artificial Sequence
  Oligonucleotide primer for the detection of SNP TSC0060319
taataatgattt

SEQ ID NO: 373791 - DNA, 12 bp, Artificial Sequence
  Oligonucleotide primer for the detection of SNP TSC0060321
aacttaatcaaa

SEQ ID NO: 373792 - DNA, 12 bp, Artificial Sequence
  Oligonucleotide primer for the detection of SNP TSC0060321
tttccctacttt

SEQ ID NO: 373793 - DNA, 12 bp, Artificial Sequence
  Oligonucleotide primer for the detection of SNP TSC0060321
ttggtttaatta

SEQ ID NO: 373794 - DNA, 12 bp, Artificial Sequence
  Oligonucleotide primer for the detection of SNP TSC0060322
taaaccacctct

SEQ ID NO: 373795 - DNA, 12 bp, Artificial Sequence
  Oligonucleotide primer for the detection of SNP TSC0060322
ttatttgttatg

SEQ ID NO: 373796 - DNA, 12 bp, Artificial Sequence
  Oligonucleotide primer for the detection of SNP TSC0060323
catttaaattta

SEQ ID NO: 373797 - DNA, 12 bp, Artificial Sequence
  Oligonucleotide primer for the detection of SNP TSC0060323
ggagtgtataat

SEQ ID NO: 373798 - DNA, 12 bp, Artificial Sequence
  Oligonucleotide primer for the detection of SNP TSC0060324
ttactcatcact

SEQ ID NO: 373799 - DNA, 12 bp, Artificial Sequence
  Oligonucleotide primer for the detection of SNP TSC0060324
atatatttttag

SEQ ID NO: 373800 - DNA, 12 bp, Artificial Sequence
  Oligonucleotide primer for the detection of SNP TSC0060326
aaaaatgaagtg

SEQ ID NO: 373801 - DNA, 12 bp, Artificial Sequence
  Oligonucleotide primer for the detection of SNP TSC0060326
agggatgttttt

SEQ ID NO: 373802 - DNA, 12 bp, Artificial Sequence
  Oligonucleotide primer for the detection of SNP TSC0060328
aaacctatacta

SEQ ID NO: 373803 - DNA, 12 bp, Artificial Sequence
  Oligonucleotide primer for the detection of SNP TSC0060328
aaggtagagata

SEQ ID NO: 373804 - DNA, 12 bp, Artificial Sequence
  Oligonucleotide primer for the detection of SNP TSC0060329
attggaatttgt

SEQ ID NO: 373805 - DNA, 12 bp, Artificial Sequence
  Oligonucleotide primer for the detection of SNP TSC0060329
gaaaaaaatatt

SEQ ID NO: 373806 - DNA, 12 bp, Artificial Sequence
  Oligonucleotide primer for the detection of SNP TSC0060333
aacaacacacac

SEQ ID NO: 373807 - DNA, 12 bp, Artificial Sequence
  Oligonucleotide primer for the detection of SNP TSC0060333
aacaacacgcac

SEQ ID NO: 373808 - DNA, 12 bp, Artificial Sequence
  Oligonucleotide primer for the detection of SNP TSC0060333
aacaacgcacac

SEQ ID NO: 373809 - DNA, 12 bp, Artificial Sequence
  Oligonukleotid-Primer
aacaacgcgcac

SEQ ID NO: 373810 - DNA, 12 bp, Artificial Sequence
  Oligonucleotide primer for the detection of SNP TSC0060333
agttgattttgt

SEQ ID NO: 373811 - DNA, 12 bp, Artificial Sequence
  Oligonucleotide primer for the detection of SNP TSC0060333
agttgattttgc

SEQ ID NO: 373812 - DNA, 12 bp, Artificial Sequence
  Oligonucleotide primer for the detection of SNP TSC0060333
aaactaatccta

SEQ ID NO: 373813 - DNA, 12 bp, Artificial Sequence
  Oligonucleotide primer for the detection of SNP TSC0060333
gaactaatccta

SEQ ID NO: 373814 - DNA, 12 bp, Artificial Sequence
  Oligonucleotide primer for the detection of SNP TSC0060333
agtagtgtgtat

SEQ ID NO: 373815 - DNA, 12 bp, Artificial Sequence
  Oligonucleotide primer for the detection of SNP TSC0060333
agtagcgtgtat

SEQ ID NO: 373816 - DNA, 12 bp, Artificial Sequence
  Oligonucleotide primer for the detection of SNP TSC0060333
agtagtgcgtat

SEQ ID NO: 373817 - DNA, 12 bp, Artificial Sequence
  Oligonucleotide primer for the detection of SNP TSC0060333
agtagcgcgtat

SEQ ID NO: 373818 - DNA, 12 bp, Artificial Sequence
  Oligonucleotide primer for the detection of SNP TSC0060335
acattaaatact

SEQ ID NO: 373819 - DNA, 12 bp, Artificial Sequence
  Oligonucleotide primer for the detection of SNP TSC0060335
ttagtaatttaa

SEQ ID NO: 373820 - DNA, 12 bp, Artificial Sequence
  Oligonucleotide primer for the detection of SNP TSC0060336
atttgatttatg

SEQ ID NO: 373821 - DNA, 12 bp, Artificial Sequence
  Oligonucleotide primer for the detection of SNP TSC0060337
taaggtggatat

SEQ ID NO: 373822 - DNA, 12 bp, Artificial Sequence
  Oligonucleotide primer for the detection of SNP TSC0060342
gaagttagataa

SEQ ID NO: 373823 - DNA, 12 bp, Artificial Sequence
  Oligonucleotide primer for the detection of SNP TSC0060342
gaagagaagttg

SEQ ID NO: 373824 - DNA, 12 bp, Artificial Sequence
  Oligonucleotide primer for the detection of SNP TSC0060344
actaaataattt

SEQ ID NO: 373825 - DNA, 12 bp, Artificial Sequence
  Oligonucleotide primer for the detection of SNP TSC0060347
ttcctcataaaa

SEQ ID NO: 373826 - DNA, 12 bp, Artificial Sequence
  Oligonucleotide primer for the detection of SNP TSC0060347
ttagaatattta

SEQ ID NO: 373827 - DNA, 12 bp, Artificial Sequence
  Oligonucleotide primer for the detection of SNP TSC0060347
tcaaaacactca

SEQ ID NO: 373828 - DNA, 12 bp, Artificial Sequence
  Oligonucleotide primer for the detection of SNP TSC0060347
tttttataagat

SEQ ID NO: 373829 - DNA, 12 bp, Artificial Sequence
  Oligonukleotid-Primer
aataatacaacc

SEQ ID NO: 373830 - DNA, 12 bp, Artificial Sequence
  Oligonucleotide primer for the detection of SNP TSC0060351
cctctataatca

SEQ ID NO: 373831 - DNA, 12 bp, Artificial Sequence
  Oligonucleotide primer for the detection of SNP TSC0060351
aggaagaggtat

SEQ ID NO: 373832 - DNA, 12 bp, Artificial Sequence
  Oligonucleotide primer for the detection of SNP TSC0060351
tttttgtggtta

SEQ ID NO: 373833 - DNA, 12 bp, Artificial Sequence
  Oligonukleotid-Primer
cccttaacttat

SEQ ID NO: 373834 - DNA, 12 bp, Artificial Sequence
  Oligonucleotide primer for the detection of SNP TSC0060352
gggaatgatgtg

SEQ ID NO: 373835 - DNA, 12 bp, Artificial Sequence
  Oligonucleotide primer for the detection of SNP TSC0060353
tttttttctact

SEQ ID NO: 373836 - DNA, 12 bp, Artificial Sequence
  Oligonucleotide primer for the detection of SNP TSC0060355
tttttaagtttg

SEQ ID NO: 373837 - DNA, 12 bp, Artificial Sequence
  Oligonukleotid-Primer
tttttaaatcta

SEQ ID NO: 373838 - DNA, 12 bp, Artificial Sequence
  Oligonucleotide primer for the detection of SNP TSC0060355
aaaatgaataat

SEQ ID NO: 373839 - DNA, 12 bp, Artificial Sequence
  Oligonucleotide primer for the detection of SNP TSC0060356
cttaaaaaataa

SEQ ID NO: 373840 - DNA, 12 bp, Artificial Sequence
  Oligonucleotide primer for the detection of SNP TSC0060356
ggagtgaaaaat

SEQ ID NO: 373841 - DNA, 12 bp, Artificial Sequence
  Oligonucleotide primer for the detection of SNP TSC0060356
tttagaaagtag

SEQ ID NO: 373842 - DNA, 12 bp, Artificial Sequence
  Oligonucleotide primer for the detection of SNP TSC0060357
aattataaaatc

SEQ ID NO: 373843 - DNA, 12 bp, Artificial Sequence
  Oligonucleotide primer for the detection of SNP TSC0060357
gtaaagtaaata

SEQ ID NO: 373844 - DNA, 12 bp, Artificial Sequence
  Oligonucleotide primer for the detection of SNP TSC0060359
caataactaacc

SEQ ID NO: 373845 - DNA, 12 bp, Artificial Sequence
  Oligonucleotide primer for the detection of SNP TSC0060359
tggttattataa

SEQ ID NO: 373846 - DNA, 12 bp, Artificial Sequence
  Oligonucleotide primer for the detection of SNP TSC0060360
caactaccaccc

SEQ ID NO: 373847 - DNA, 12 bp, Artificial Sequence
  Oligonucleotide primer for the detection of SNP TSC0060360
gggagggtgtgt

SEQ ID NO: 373848 - DNA, 12 bp, Artificial Sequence
  Oligonucleotide primer for the detection of SNP TSC0060360
gggagggtgcgt

SEQ ID NO: 373849 - DNA, 12 bp, Artificial Sequence
  Oligonucleotide primer for the detection of SNP TSC0060360
aaaaaatacgca

SEQ ID NO: 373850 - DNA, 12 bp, Artificial Sequence
  Oligonucleotide primer for the detection of SNP TSC0060360
taattgttattt

SEQ ID NO: 373851 - DNA, 12 bp, Artificial Sequence
  Oligonucleotide primer for the detection of SNP TSC0060360
taattgttattc

SEQ ID NO: 373852 - DNA, 12 bp, Artificial Sequence
  Oligonucleotide primer for the detection of SNP TSC0008403
tataaaaatacg

SEQ ID NO: 373853 - DNA, 12 bp, Artificial Sequence
  Oligonucleotide primer for the detection of SNP TSC0008403
aataagttaagt

SEQ ID NO: 373854 - DNA, 12 bp, Artificial Sequence
  Oligonucleotide primer for the detection of SNP TSC0008403
tgtgagagtacg

SEQ ID NO: 373855 - DNA, 12 bp, Artificial Sequence
  Oligonucleotide primer for the detection of SNP TSC0008404
taatatatataa

SEQ ID NO: 373856 - DNA, 12 bp, Artificial Sequence
  Oligonucleotide primer for the detection of SNP TSC0008404
tatttaaaatat

SEQ ID NO: 373857 - DNA, 12 bp, Artificial Sequence
  Oligonucleotide primer for the detection of SNP TSC0008404
ggtatatataat

SEQ ID NO: 373858 - DNA, 12 bp, Artificial Sequence
  Oligonucleotide primer for the detection of SNP TSC0008404
ggtatatataac

SEQ ID NO: 373859 - DNA, 12 bp, Artificial Sequence
  Oligonucleotide primer for the detection of SNP TSC0060362
caatctcctcaa

SEQ ID NO: 373860 - DNA, 12 bp, Artificial Sequence
  Oligonucleotide primer for the detection of SNP TSC0060362
gagattagttgt

SEQ ID NO: 373861 - DNA, 12 bp, Artificial Sequence
  Oligonucleotide primer for the detection of SNP TSC0060362
aaaattaactac

SEQ ID NO: 373862 - DNA, 12 bp, Artificial Sequence
  Oligonucleotide primer for the detection of SNP TSC0060363
ctatatactttt

SEQ ID NO: 373863 - DNA, 12 bp, Artificial Sequence
  Oligonucleotide primer for the detection of SNP TSC0060365
tatatatgaaat

SEQ ID NO: 373864 - DNA, 12 bp, Artificial Sequence
  Oligonucleotide primer for the detection of SNP TSC0060366
ataataacaatc

SEQ ID NO: 373865 - DNA, 12 bp, Artificial Sequence
  Oligonucleotide primer for the detection of SNP TSC0060366
gattgttgaaga

SEQ ID NO: 373866 - DNA, 12 bp, Artificial Sequence
  Oligonucleotide primer for the detection of SNP TSC0060368
aaaacaatctac

SEQ ID NO: 373867 - DNA, 12 bp, Artificial Sequence
  Oligonucleotide primer for the detection of SNP TSC0060368
ttttataagttg

SEQ ID NO: 373868 - DNA, 12 bp, Artificial Sequence
  Oligonucleotide primer for the detection of SNP TSC0060368
cctcacaaatta

SEQ ID NO: 373869 - DNA, 12 bp, Artificial Sequence
  Oligonucleotide primer for the detection of SNP TSC0060368
ggaatagtttgt

SEQ ID NO: 373870 - DNA, 12 bp, Artificial Sequence
  Oligonucleotide primer for the detection of SNP TSC0060369
taccatacaatc

SEQ ID NO: 373871 - DNA, 12 bp, Artificial Sequence
  Oligonucleotide primer for the detection of SNP TSC0060369
tttaaaatttac

SEQ ID NO: 373872 - DNA, 12 bp, Artificial Sequence
  Oligonucleotide primer for the detection of SNP TSC0060369
tttaaaatctac

SEQ ID NO: 373873 - DNA, 12 bp, Artificial Sequence
  Oligonucleotide primer for the detection of SNP TSC0060369
tattatataatt

SEQ ID NO: 373874 - DNA, 12 bp, Artificial Sequence
  Oligonucleotide primer for the detection of SNP TSC0060369
tattatataatc

SEQ ID NO: 373875 - DNA, 12 bp, Artificial Sequence
  Oligonucleotide primer for the detection of SNP TSC0060370
acacacctcaat

SEQ ID NO: 373876 - DNA, 12 bp, Artificial Sequence
  Oligonucleotide primer for the detection of SNP TSC0060370
acgcacctcaat

SEQ ID NO: 373877 - DNA, 12 bp, Artificial Sequence
  Oligonucleotide primer for the detection of SNP TSC0060370
tcatacacataa

SEQ ID NO: 373878 - DNA, 12 bp, Artificial Sequence
  Oligonucleotide primer for the detection of SNP TSC0060370
gtgtattttagt

SEQ ID NO: 373879 - DNA, 12 bp, Artificial Sequence
  Oligonucleotide primer for the detection of SNP TSC0060370
gcgtattttagt

SEQ ID NO: 373880 - DNA, 12 bp, Artificial Sequence
  Oligonucleotide primer for the detection of SNP TSC0060371
ttaactctcaac

SEQ ID NO: 373881 - DNA, 12 bp, Artificial Sequence
  Oligonucleotide primer for the detection of SNP TSC0060371
ctttaactacta

SEQ ID NO: 373882 - DNA, 12 bp, Artificial Sequence
  Oligonucleotide primer for the detection of SNP TSC0060373
aaaccaatatca

SEQ ID NO: 373883 - DNA, 12 bp, Artificial Sequence
  Oligonucleotide primer for the detection of SNP TSC0060374
tcaattttctat

SEQ ID NO: 373884 - DNA, 12 bp, Artificial Sequence
  Oligonucleotide primer for the detection of SNP TSC0060375
tcaaacctacat

SEQ ID NO: 373885 - DNA, 12 bp, Artificial Sequence
  Oligonucleotide primer for the detection of SNP TSC0060375
gtgttttttgaa

SEQ ID NO: 373886 - DNA, 12 bp, Artificial Sequence
  Oligonucleotide primer for the detection of SNP TSC0060375
ataccccttaaa

SEQ ID NO: 373887 - DNA, 12 bp, Artificial Sequence
  Oligonucleotide primer for the detection of SNP TSC0060375
gtaccccttaaa

SEQ ID NO: 373888 - DNA, 12 bp, Artificial Sequence
  Oligonucleotide primer for the detection of SNP TSC0060375
ttaaatttgtat

SEQ ID NO: 373889 - DNA, 12 bp, Artificial Sequence
  Oligonucleotide primer for the detection of SNP TSC0060377
ataacttccctt

SEQ ID NO: 373890 - DNA, 12 bp, Artificial Sequence
  Oligonucleotide primer for the detection of SNP TSC0060377
aatattggagta

SEQ ID NO: 373891 - DNA, 12 bp, Artificial Sequence
  Oligonucleotide primer for the detection of SNP TSC0060378
ccccccacctat

SEQ ID NO: 373892 - DNA, 12 bp, Artificial Sequence
  Oligonucleotide primer for the detection of SNP TSC0060378
atattttttatg

SEQ ID NO: 373893 - DNA, 12 bp, Artificial Sequence
  Oligonucleotide primer for the detection of SNP TSC0060378
atattttttacg

SEQ ID NO: 373894 - DNA, 12 bp, Artificial Sequence
  Oligonucleotide primer for the detection of SNP TSC0060379
aaaacccaaaat

SEQ ID NO: 373895 - DNA, 12 bp, Artificial Sequence
  Oligonucleotide primer for the detection of SNP TSC0060379
aaaacccgaaat

SEQ ID NO: 373896 - DNA, 12 bp, Artificial Sequence
  Oligonucleotide primer for the detection of SNP TSC0060379
taggggttttta

SEQ ID NO: 373897 - DNA, 12 bp, Artificial Sequence
  Oligonucleotide primer for the detection of SNP TSC0060379
caaaaatcccca

SEQ ID NO: 373898 - DNA, 12 bp, Artificial Sequence
  Oligonucleotide primer for the detection of SNP TSC0060379
ggagtttggggt

SEQ ID NO: 373899 - DNA, 12 bp, Artificial Sequence
  Oligonucleotide primer for the detection of SNP TSC0060379
ggagttcggggt

SEQ ID NO: 373900 - DNA, 12 bp, Artificial Sequence
  Oligonucleotide primer for the detection of SNP TSC0060380
aactttataaat

SEQ ID NO: 373901 - DNA, 12 bp, Artificial Sequence
  Oligonucleotide primer for the detection of SNP TSC0060381
aaacttctaccc

SEQ ID NO: 373902 - DNA, 12 bp, Artificial Sequence
  Oligonucleotide primer for the detection of SNP TSC0060381
tttgatttttat

SEQ ID NO: 373903 - DNA, 12 bp, Artificial Sequence
  Oligonucleotide primer for the detection of SNP TSC0060381
ttcgatttttat

SEQ ID NO: 373904 - DNA, 12 bp, Artificial Sequence
  Oligonucleotide primer for the detection of SNP TSC0060381
tcaattctcata

SEQ ID NO: 373905 - DNA, 12 bp, Artificial Sequence
  Oligonucleotide primer for the detection of SNP TSC0060381
tcgattctcata

SEQ ID NO: 373906 - DNA, 12 bp, Artificial Sequence
  Oligonucleotide primer for the detection of SNP TSC0060381
gggtttttgttt

SEQ ID NO: 373907 - DNA, 12 bp, Artificial Sequence
  Oligonucleotide primer for the detection of SNP TSC0060381
gggtttttgttc

SEQ ID NO: 373908 - DNA, 12 bp, Artificial Sequence
  Oligonucleotide primer for the detection of SNP TSC0060382
taagaatagtta

SEQ ID NO: 373909 - DNA, 12 bp, Artificial Sequence
  Oligonucleotide primer for the detection of SNP TSC0060382
gtttagaagagt

SEQ ID NO: 373910 - DNA, 12 bp, Artificial Sequence
  Oligonucleotide primer for the detection of SNP TSC0060383
actcacacttac

SEQ ID NO: 373911 - DNA, 12 bp, Artificial Sequence
  Oligonucleotide primer for the detection of SNP TSC0060383
gataaaaagtaa

SEQ ID NO: 373912 - DNA, 12 bp, Artificial Sequence
  Oligonucleotide primer for the detection of SNP TSC0060384
tatatttaacca

SEQ ID NO: 373913 - DNA, 12 bp, Artificial Sequence
  Oligonucleotide primer for the detection of SNP TSC0060384
cccctctaaata

SEQ ID NO: 373914 - DNA, 12 bp, Artificial Sequence
  Oligonucleotide primer for the detection of SNP TSC0060385
caaatataatca

SEQ ID NO: 373915 - DNA, 12 bp, Artificial Sequence
  Oligonucleotide primer for the detection of SNP TSC0060385
tagaattaaatt

SEQ ID NO: 373916 - DNA, 12 bp, Artificial Sequence
  Oligonucleotide primer for the detection of SNP TSC0060385
aacaaaactaaa

SEQ ID NO: 373917 - DNA, 12 bp, Artificial Sequence
  Oligonucleotide primer for the detection of SNP TSC0060385
atagatataatt

SEQ ID NO: 373918 - DNA, 12 bp, Artificial Sequence
  Oligonucleotide primer for the detection of SNP TSC0060386
catacacataac

SEQ ID NO: 373919 - DNA, 12 bp, Artificial Sequence
  Oligonucleotide primer for the detection of SNP TSC0060387
tttgataatgta

SEQ ID NO: 373920 - DNA, 12 bp, Artificial Sequence
  Oligonucleotide primer for the detection of SNP TSC0060387
cttaataatata

SEQ ID NO: 373921 - DNA, 12 bp, Artificial Sequence
  Oligonucleotide primer for the detection of SNP TSC0060387
atggaattaatt

SEQ ID NO: 373922 - DNA, 12 bp, Artificial Sequence
  Oligonucleotide primer for the detection of SNP TSC0060388
agttttgtttat

SEQ ID NO: 373923 - DNA, 12 bp, Artificial Sequence
  Oligonucleotide primer for the detection of SNP TSC0060388
tatgatttatta

SEQ ID NO: 373924 - DNA, 12 bp, Artificial Sequence
  Oligonucleotide primer for the detection of SNP TSC0060389
tattttctatcc

SEQ ID NO: 373925 - DNA, 12 bp, Artificial Sequence
  Oligonucleotide primer for the detection of SNP TSC0060389
agttggagtaga

SEQ ID NO: 373926 - DNA, 12 bp, Artificial Sequence
  Oligonucleotide primer for the detection of SNP TSC0060394
ctcctcctcttc

SEQ ID NO: 373927 - DNA, 12 bp, Artificial Sequence
  Oligonucleotide primer for the detection of SNP TSC0060394
ttaagaaggagg

SEQ ID NO: 373928 - DNA, 12 bp, Artificial Sequence
  Oligonucleotide primer for the detection of SNP TSC0060395
tgatgttattag

SEQ ID NO: 373929 - DNA, 12 bp, Artificial Sequence
  Oligonucleotide primer for the detection of SNP TSC0060395
taataccaccaa

SEQ ID NO: 373930 - DNA, 12 bp, Artificial Sequence
  Oligonucleotide primer for the detection of SNP TSC0060395
tataattggaga

SEQ ID NO: 373931 - DNA, 12 bp, Artificial Sequence
  Oligonucleotide primer for the detection of SNP TSC0060396
aaaaacgactac

SEQ ID NO: 373932 - DNA, 12 bp, Artificial Sequence
  Oligonucleotide primer for the detection of SNP TSC0060396
taattgtgataa

SEQ ID NO: 373933 - DNA, 12 bp, Artificial Sequence
  Oligonucleotide primer for the detection of SNP TSC0060397
cacctcctctcc

SEQ ID NO: 373934 - DNA, 12 bp, Artificial Sequence
  Oligonucleotide primer for the detection of SNP TSC0060397
cgcctcctctcc

SEQ ID NO: 373935 - DNA, 12 bp, Artificial Sequence
  Oligonucleotide primer for the detection of SNP TSC0060397
ttaattgttata

SEQ ID NO: 373936 - DNA, 12 bp, Artificial Sequence
  Oligonucleotide primer for the detection of SNP TSC0060403
aagggattagaa

SEQ ID NO: 373937 - DNA, 12 bp, Artificial Sequence
  Oligonucleotide primer for the detection of SNP TSC0060403
gtatttgtagga

SEQ ID NO: 373938 - DNA, 12 bp, Artificial Sequence
  Oligonucleotide primer for the detection of SNP TSC0060404
atatcaactacc

SEQ ID NO: 373939 - DNA, 12 bp, Artificial Sequence
  Oligonucleotide primer for the detection of SNP TSC0060404
atatcgactacc

SEQ ID NO: 373940 - DNA, 12 bp, Artificial Sequence
  Oligonucleotide primer for the detection of SNP TSC0060404
tgtaggtgttaa

SEQ ID NO: 373941 - DNA, 12 bp, Artificial Sequence
  Oligonucleotide primer for the detection of SNP TSC0060410
cctacctctatc

SEQ ID NO: 373942 - DNA, 12 bp, Artificial Sequence
  Oligonucleotide primer for the detection of SNP TSC0060410
aggagtatttta

SEQ ID NO: 373943 - DNA, 12 bp, Artificial Sequence
  Oligonucleotide primer for the detection of SNP TSC0060410
aaaaacatctta

SEQ ID NO: 373944 - DNA, 12 bp, Artificial Sequence
  Oligonucleotide primer for the detection of SNP TSC0060411
taatcttacaat

SEQ ID NO: 373945 - DNA, 12 bp, Artificial Sequence
  Oligonucleotide primer for the detection of SNP TSC0060411
gtttgattgaaa

SEQ ID NO: 373946 - DNA, 12 bp, Artificial Sequence
  Oligonucleotide primer for the detection of SNP TSC0060411
atttaactaaaa

SEQ ID NO: 373947 - DNA, 12 bp, Artificial Sequence
  Oligonucleotide primer for the detection of SNP TSC0060412
ttttggttatag

SEQ ID NO: 373948 - DNA, 12 bp, Artificial Sequence
  Oligonucleotide primer for the detection of SNP TSC0060412
ctctaattataa

SEQ ID NO: 373949 - DNA, 12 bp, Artificial Sequence
  Oligonucleotide primer for the detection of SNP TSC0060412
aagaaatggatt

SEQ ID NO: 373950 - DNA, 12 bp, Artificial Sequence
  Oligonucleotide primer for the detection of SNP TSC0060413
taaaattctatt

SEQ ID NO: 373951 - DNA, 12 bp, Artificial Sequence
  Oligonucleotide primer for the detection of SNP TSC0060413
attgagattgta

SEQ ID NO: 373952 - DNA, 12 bp, Artificial Sequence
  Oligonucleotide primer for the detection of SNP TSC0060414
ttcttcttacaa

SEQ ID NO: 373953 - DNA, 12 bp, Artificial Sequence
  Oligonucleotide primer for the detection of SNP TSC0060414
gattaatatata

SEQ ID NO: 373954 - DNA, 12 bp, Artificial Sequence
  Oligonucleotide primer for the detection of SNP TSC0060416
aataccatattt

SEQ ID NO: 373955 - DNA, 12 bp, Artificial Sequence
  Oligonucleotide primer for the detection of SNP TSC0060416
aataccgtattt

SEQ ID NO: 373956 - DNA, 12 bp, Artificial Sequence
  Oligonucleotide primer for the detection of SNP TSC0005445
tcaaaaaaatat

SEQ ID NO: 373957 - DNA, 12 bp, Artificial Sequence
  Oligonucleotide primer for the detection of SNP TSC0060422
ttataaaaaaac

SEQ ID NO: 373958 - DNA, 12 bp, Artificial Sequence
  Oligonucleotide primer for the detection of SNP TSC0060422
agtgaaaaaaag

SEQ ID NO: 373959 - DNA, 12 bp, Artificial Sequence
  Oligonucleotide primer for the detection of SNP TSC0060422
ttgtaaaaagat

SEQ ID NO: 373960 - DNA, 12 bp, Artificial Sequence
  Oligonucleotide primer for the detection of SNP TSC0060423
tttatttttctt

SEQ ID NO: 373961 - DNA, 12 bp, Artificial Sequence
  Oligonucleotide primer for the detection of SNP TSC0060423
aaaatttttaag

SEQ ID NO: 373962 - DNA, 12 bp, Artificial Sequence
  Oligonucleotide primer for the detection of SNP TSC0060424
tatttaaataaa

SEQ ID NO: 373963 - DNA, 12 bp, Artificial Sequence
  Oligonucleotide primer for the detection of SNP TSC0060424
ataggtgtattt

SEQ ID NO: 373964 - DNA, 12 bp, Artificial Sequence
  Oligonucleotide primer for the detection of SNP TSC0060424
ataggcgtattt

SEQ ID NO: 373965 - DNA, 12 bp, Artificial Sequence
  Oligonucleotide primer for the detection of SNP TSC0060424
ataaacatactt

SEQ ID NO: 373966 - DNA, 12 bp, Artificial Sequence
  Oligonucleotide primer for the detection of SNP TSC0060424
ataaacgtactt

SEQ ID NO: 373967 - DNA, 12 bp, Artificial Sequence
  Oligonucleotide primer for the detection of SNP TSC0060425
tgttttgataaa

SEQ ID NO: 373968 - DNA, 12 bp, Artificial Sequence
  Oligonucleotide primer for the detection of SNP TSC0060425
taccttaacaaa

SEQ ID NO: 373969 - DNA, 12 bp, Artificial Sequence
  Oligonucleotide primer for the detection of SNP TSC0060425
agtgatgtatat

SEQ ID NO: 373970 - DNA, 12 bp, Artificial Sequence
  Oligonucleotide primer for the detection of SNP TSC0060426
acgtaaaactat

SEQ ID NO: 373971 - DNA, 12 bp, Artificial Sequence
  Oligonucleotide primer for the detection of SNP TSC0060426
aaggtattaaag

SEQ ID NO: 373972 - DNA, 12 bp, Artificial Sequence
  Oligonucleotide primer for the detection of SNP TSC0060426
aaaacaccaaaa

SEQ ID NO: 373973 - DNA, 12 bp, Artificial Sequence
  Oligonucleotide primer for the detection of SNP TSC0060426
atgtggggttgt

SEQ ID NO: 373974 - DNA, 12 bp, Artificial Sequence
  Oligonucleotide primer for the detection of SNP TSC0060426
acgtggggttgt

SEQ ID NO: 373975 - DNA, 12 bp, Artificial Sequence
  Oligonucleotide primer for the detection of SNP TSC0060431
cattcttaaaat

SEQ ID NO: 373976 - DNA, 12 bp, Artificial Sequence
  Oligonucleotide primer for the detection of SNP TSC0060431
tggtattgtttt

SEQ ID NO: 373977 - DNA, 12 bp, Artificial Sequence
  Oligonucleotide primer for the detection of SNP TSC0060432
aaaaacaataat

SEQ ID NO: 373978 - DNA, 12 bp, Artificial Sequence
  Oligonucleotide primer for the detection of SNP TSC0060433
aaaatcatcctt

SEQ ID NO: 373979 - DNA, 12 bp, Artificial Sequence
  Oligonucleotide primer for the detection of SNP TSC0060433
tttatttaaatg

SEQ ID NO: 373980 - DNA, 12 bp, Artificial Sequence
  Oligonucleotide primer for the detection of SNP TSC0060435
ccacatctacta

SEQ ID NO: 373981 - DNA, 12 bp, Artificial Sequence
  Oligonucleotide primer for the detection of SNP TSC0060435
tagaaagaattt

SEQ ID NO: 373982 - DNA, 12 bp, Artificial Sequence
  Oligonucleotide primer for the detection of SNP TSC0060436
aaacttaaattc

SEQ ID NO: 373983 - DNA, 12 bp, Artificial Sequence
  Oligonucleotide primer for the detection of SNP TSC0060438
caataattatca

SEQ ID NO: 373984 - DNA, 12 bp, Artificial Sequence
  Oligonucleotide primer for the detection of SNP TSC0060438
ttaatagataat

SEQ ID NO: 373985 - DNA, 12 bp, Artificial Sequence
  Oligonucleotide primer for the detection of SNP TSC0060439
accaaacaaaac

SEQ ID NO: 373986 - DNA, 12 bp, Artificial Sequence
  Oligonucleotide primer for the detection of SNP TSC0060439
gtttttgaatat

SEQ ID NO: 373987 - DNA, 12 bp, Artificial Sequence
  Oligonucleotide primer for the detection of SNP TSC0060439
cccttaaatata

SEQ ID NO: 373988 - DNA, 12 bp, Artificial Sequence
  Oligonucleotide primer for the detection of SNP TSC0060439
gttaaataggat

SEQ ID NO: 373989 - DNA, 12 bp, Artificial Sequence
  Oligonucleotide primer for the detection of SNP TSC0060440
tactaaccccta

SEQ ID NO: 373990 - DNA, 12 bp, Artificial Sequence
  Oligonucleotide primer for the detection of SNP TSC0060440
atttggggaaat

SEQ ID NO: 373991 - DNA, 12 bp, Artificial Sequence
  Oligonucleotide primer for the detection of SNP TSC0060440
tgttgatttttg

SEQ ID NO: 373992 - DNA, 12 bp, Artificial Sequence
  Oligonucleotide primer for the detection of SNP TSC0060441
atcaaatatttt

SEQ ID NO: 373993 - DNA, 12 bp, Artificial Sequence
  Oligonucleotide primer for the detection of SNP TSC0060441
aatagatgtata

SEQ ID NO: 373994 - DNA, 12 bp, Artificial Sequence
  Oligonucleotide primer for the detection of SNP TSC0007004
cacaattattac

SEQ ID NO: 373995 - DNA, 12 bp, Artificial Sequence
  Oligonucleotide primer for the detection of SNP TSC0007004
atagatgaaaat

SEQ ID NO: 373996 - DNA, 12 bp, Artificial Sequence
  Oligonucleotide primer for the detection of SNP TSC0007004
taattattgttt

SEQ ID NO: 373997 - DNA, 12 bp, Artificial Sequence
  Oligonucleotide primer for the detection of SNP TSC0010671
ctcaaccaaaac

SEQ ID NO: 373998 - DNA, 12 bp, Artificial Sequence
  Oligonucleotide primer for the detection of SNP TSC0060444
gttgaaaggtat

SEQ ID NO: 373999 - DNA, 12 bp, Artificial Sequence
  Oligonucleotide primer for the detection of SNP TSC0060444
attaaaaaatat

SEQ ID NO: 374000 - DNA, 12 bp, Artificial Sequence
  Oligonucleotide primer for the detection of SNP TSC0060445
ccacaatacaat

SEQ ID NO: 374001 - DNA, 12 bp, Artificial Sequence
  Oligonucleotide primer for the detection of SNP TSC0060445
tttgtaagagaa

SEQ ID NO: 374002 - DNA, 12 bp, Artificial Sequence
  Oligonukleotid-Primer
tctataaaaaaa

SEQ ID NO: 374003 - DNA, 12 bp, Artificial Sequence
  Oligonucleotide primer for the detection of SNP TSC0060445
ttatagtataat

SEQ ID NO: 374004 - DNA, 12 bp, Artificial Sequence
  Oligonucleotide primer for the detection of SNP TSC0060446
atcaatataaca

SEQ ID NO: 374005 - DNA, 12 bp, Artificial Sequence
  Oligonucleotide primer for the detection of SNP TSC0060446
tgtggattatgt

SEQ ID NO: 374006 - DNA, 12 bp, Artificial Sequence
  Oligonucleotide primer for the detection of SNP TSC0060446
tgtggattatgc

SEQ ID NO: 374007 - DNA, 12 bp, Artificial Sequence
  Oligonucleotide primer for the detection of SNP TSC0060446
atataaatcata

SEQ ID NO: 374008 - DNA, 12 bp, Artificial Sequence
  Oligonucleotide primer for the detection of SNP TSC0060446
attaatatgata

SEQ ID NO: 374009 - DNA, 12 bp, Artificial Sequence
  Oligonucleotide primer for the detection of SNP TSC0060448
tttttctatttc

SEQ ID NO: 374010 - DNA, 12 bp, Artificial Sequence
  Oligonucleotide primer for the detection of SNP TSC0060448
gtgggaggagag

SEQ ID NO: 374011 - DNA, 12 bp, Artificial Sequence
  Oligonucleotide primer for the detection of SNP TSC0060449
ataataatctcc

SEQ ID NO: 374012 - DNA, 12 bp, Artificial Sequence
  Oligonucleotide primer for the detection of SNP TSC0060450
gagttgttatta

SEQ ID NO: 374013 - DNA, 12 bp, Artificial Sequence
  Oligonucleotide primer for the detection of SNP TSC0008714
aactacaattca

SEQ ID NO: 374014 - DNA, 12 bp, Artificial Sequence
  Oligonucleotide primer for the detection of SNP TSC0008714
ctcaaatctcat

SEQ ID NO: 374015 - DNA, 12 bp, Artificial Sequence
  Oligonucleotide primer for the detection of SNP TSC0008715
ttctcataaata

SEQ ID NO: 374016 - DNA, 12 bp, Artificial Sequence
  Oligonucleotide primer for the detection of SNP TSC0008715
gatggtattaaa

SEQ ID NO: 374017 - DNA, 12 bp, Artificial Sequence
  Oligonucleotide primer for the detection of SNP TSC0008715
tttttatgaatg

SEQ ID NO: 374018 - DNA, 12 bp, Artificial Sequence
  Oligonucleotide primer for the detection of SNP TSC0060451
atattacatctc

SEQ ID NO: 374019 - DNA, 12 bp, Artificial Sequence
  Oligonucleotide primer for the detection of SNP TSC0060451
gttttaatagta

SEQ ID NO: 374020 - DNA, 12 bp, Artificial Sequence
  Oligonucleotide primer for the detection of SNP TSC0060452
cattaaaaaaac

SEQ ID NO: 374021 - DNA, 12 bp, Artificial Sequence
  Oligonucleotide primer for the detection of SNP TSC0060452
tttaatattatg

SEQ ID NO: 374022 - DNA, 12 bp, Artificial Sequence
  Oligonucleotide primer for the detection of SNP TSC0060453
tactcccaccat

SEQ ID NO: 374023 - DNA, 12 bp, Artificial Sequence
  Oligonucleotide primer for the detection of SNP TSC0060453
aggttaggaatt

SEQ ID NO: 374024 - DNA, 12 bp, Artificial Sequence
  Oligonucleotide primer for the detection of SNP TSC0060454
accacacaaata

SEQ ID NO: 374025 - DNA, 12 bp, Artificial Sequence
  Oligonucleotide primer for the detection of SNP TSC0060454
tttgattaatta

SEQ ID NO: 374026 - DNA, 12 bp, Artificial Sequence
  Oligonukleotid-Primer
actaacaaaaat

SEQ ID NO: 374027 - DNA, 12 bp, Artificial Sequence
  Oligonucleotide primer for the detection of SNP TSC0060457
attgatagaagt

SEQ ID NO: 374028 - DNA, 12 bp, Artificial Sequence
  Oligonucleotide primer for the detection of SNP TSC0007436
aaaccacttctc

SEQ ID NO: 374029 - DNA, 12 bp, Artificial Sequence
  Oligonucleotide primer for the detection of SNP TSC0007436
ttgttttgttaa

SEQ ID NO: 374030 - DNA, 12 bp, Artificial Sequence
  Oligonukleotid-Primer
aaatatcaataa

SEQ ID NO: 374031 - DNA, 12 bp, Artificial Sequence
  Oligonucleotide primer for the detection of SNP TSC0010878
ttaagttagatg

SEQ ID NO: 374032 - DNA, 12 bp, Artificial Sequence
  Oligonucleotide primer for the detection of SNP TSC0010878
ttaaattaaata

SEQ ID NO: 374033 - DNA, 12 bp, Artificial Sequence
  Oligonucleotide primer for the detection of SNP TSC0010878
agatgttagtag

SEQ ID NO: 374034 - DNA, 12 bp, Artificial Sequence
  Oligonucleotide primer for the detection of SNP TSC0010879
ttttgtaaaagt

SEQ ID NO: 374035 - DNA, 12 bp, Artificial Sequence
  Oligonucleotide primer for the detection of SNP TSC0010879
tgggaagtttgt

SEQ ID NO: 374036 - DNA, 12 bp, Artificial Sequence
  Oligonucleotide primer for the detection of SNP TSC0060458
tataaaacctac

SEQ ID NO: 374037 - DNA, 12 bp, Artificial Sequence
  Oligonucleotide primer for the detection of SNP TSC0060458
tttatttggtgg

SEQ ID NO: 374038 - DNA, 12 bp, Artificial Sequence
  Oligonucleotide primer for the detection of SNP TSC0060459
caattatcttac

SEQ ID NO: 374039 - DNA, 12 bp, Artificial Sequence
  Oligonucleotide primer for the detection of SNP TSC0010827
ttttggtatata

SEQ ID NO: 374040 - DNA, 12 bp, Artificial Sequence
  Oligonucleotide primer for the detection of SNP TSC0060460
aattaataattc

SEQ ID NO: 374041 - DNA, 12 bp, Artificial Sequence
  Oligonucleotide primer for the detection of SNP TSC0060460
ggggttatggta

SEQ ID NO: 374042 - DNA, 12 bp, Artificial Sequence
  Oligonukleotid-Primer
tcctccacctca

SEQ ID NO: 374043 - DNA, 12 bp, Artificial Sequence
  Oligonucleotide primer for the detection of SNP TSC0060461
ttgaggaaatgt

SEQ ID NO: 374044 - DNA, 12 bp, Artificial Sequence
  Oligonucleotide primer for the detection of SNP TSC0060461
ttaaaaaaatac

SEQ ID NO: 374045 - DNA, 12 bp, Artificial Sequence
  Oligonucleotide primer for the detection of SNP TSC0060463
taagttagaatt

SEQ ID NO: 374046 - DNA, 12 bp, Artificial Sequence
  Oligonucleotide primer for the detection of SNP TSC0060463
attggttgagga

SEQ ID NO: 374047 - DNA, 12 bp, Artificial Sequence
  Oligonucleotide primer for the detection of SNP TSC0060465
ttactaattttc

SEQ ID NO: 374048 - DNA, 12 bp, Artificial Sequence
  Oligonucleotide primer for the detection of SNP TSC0060465
ttgggtgttaaa

SEQ ID NO: 374049 - DNA, 12 bp, Artificial Sequence
  Oligonucleotide primer for the detection of SNP TSC0060466
acatactatcca

SEQ ID NO: 374050 - DNA, 12 bp, Artificial Sequence
  Oligonucleotide primer for the detection of SNP TSC0060466
tgagagaagata

SEQ ID NO: 374051 - DNA, 12 bp, Artificial Sequence
  Oligonucleotide primer for the detection of SNP TSC0060466
gtatattattta

SEQ ID NO: 374052 - DNA, 12 bp, Artificial Sequence
  Oligonucleotide primer for the detection of SNP TSC0060467
ctcacttttaac

SEQ ID NO: 374053 - DNA, 12 bp, Artificial Sequence
  Oligonucleotide primer for the detection of SNP TSC0060467
ttaatttagaaa

SEQ ID NO: 374054 - DNA, 12 bp, Artificial Sequence
  Oligonucleotide primer for the detection of SNP TSC0060468
aactaccttaac

SEQ ID NO: 374055 - DNA, 12 bp, Artificial Sequence
  Oligonucleotide primer for the detection of SNP TSC0060468
taatatgaaatt

SEQ ID NO: 374056 - DNA, 12 bp, Artificial Sequence
  Oligonucleotide primer for the detection of SNP TSC0060468
cacaacataaaa

SEQ ID NO: 374057 - DNA, 12 bp, Artificial Sequence
  Oligonucleotide primer for the detection of SNP TSC0060468
gttgttttgatt

SEQ ID NO: 374058 - DNA, 12 bp, Artificial Sequence
  Oligonucleotide primer for the detection of SNP TSC0060469
aataattctata

SEQ ID NO: 374059 - DNA, 12 bp, Artificial Sequence
  Oligonucleotide primer for the detection of SNP TSC0060469
ggaaattttttc

SEQ ID NO: 374060 - DNA, 12 bp, Artificial Sequence
  Oligonucleotide primer for the detection of SNP TSC0060469
aatggttttata

SEQ ID NO: 374061 - DNA, 12 bp, Artificial Sequence
  Oligonucleotide primer for the detection of SNP TSC0060470
actactaaataa

SEQ ID NO: 374062 - DNA, 12 bp, Artificial Sequence
  Oligonucleotide primer for the detection of SNP TSC0060470
atggaattatta

SEQ ID NO: 374063 - DNA, 12 bp, Artificial Sequence
  Oligonucleotide primer for the detection of SNP TSC0060471
caacaaacttta

SEQ ID NO: 374064 - DNA, 12 bp, Artificial Sequence
  Oligonucleotide primer for the detection of SNP TSC0060471
caacgaacttta

SEQ ID NO: 374065 - DNA, 12 bp, Artificial Sequence
  Oligonucleotide primer for the detection of SNP TSC0060471
tattttaaaaga

SEQ ID NO: 374066 - DNA, 12 bp, Artificial Sequence
  Oligonucleotide primer for the detection of SNP TSC0060472
tataacaaactt

SEQ ID NO: 374067 - DNA, 12 bp, Artificial Sequence
  Oligonucleotide primer for the detection of SNP TSC0060472
atttaagtatta

SEQ ID NO: 374068 - DNA, 12 bp, Artificial Sequence
  Oligonucleotide primer for the detection of SNP TSC0060473
caaaaaatcaac

SEQ ID NO: 374069 - DNA, 12 bp, Artificial Sequence
  Oligonucleotide primer for the detection of SNP TSC0060473
atgggggtggat

SEQ ID NO: 374070 - DNA, 12 bp, Artificial Sequence
  Oligonucleotide primer for the detection of SNP TSC0060473
acgggggtggat

SEQ ID NO: 374071 - DNA, 12 bp, Artificial Sequence
  Oligonucleotide primer for the detection of SNP TSC0060473
acgaaaataaac

SEQ ID NO: 374072 - DNA, 12 bp, Artificial Sequence
  Oligonucleotide primer for the detection of SNP TSC0060473
taggagattaat

SEQ ID NO: 374073 - DNA, 12 bp, Artificial Sequence
  Oligonucleotide primer for the detection of SNP TSC0060474
aatctctaattc

SEQ ID NO: 374074 - DNA, 12 bp, Artificial Sequence
  Oligonucleotide primer for the detection of SNP TSC0060474
tatttgagttta

SEQ ID NO: 374075 - DNA, 12 bp, Artificial Sequence
  Oligonucleotide primer for the detection of SNP TSC0060476
acctacctaaat

SEQ ID NO: 374076 - DNA, 12 bp, Artificial Sequence
  Oligonucleotide primer for the detection of SNP TSC0060476
agtttgtaaatg

SEQ ID NO: 374077 - DNA, 12 bp, Artificial Sequence
  Oligonucleotide primer for the detection of SNP TSC0060478
caactacaaaac

SEQ ID NO: 374078 - DNA, 12 bp, Artificial Sequence
  Oligonucleotide primer for the detection of SNP TSC0060478
caactacgaaac

SEQ ID NO: 374079 - DNA, 12 bp, Artificial Sequence
  Oligonucleotide primer for the detection of SNP TSC0060478
cgactacaaaac

SEQ ID NO: 374080 - DNA, 12 bp, Artificial Sequence
  Oligonucleotide primer for the detection of SNP TSC0060478
cgactacgaaac

SEQ ID NO: 374081 - DNA, 12 bp, Artificial Sequence
  Oligonucleotide primer for the detection of SNP TSC0060478
gggttttggtag

SEQ ID NO: 374082 - DNA, 12 bp, Artificial Sequence
  Oligonucleotide primer for the detection of SNP TSC0060479
tgtagttttcgt

SEQ ID NO: 374083 - DNA, 12 bp, Artificial Sequence
  Oligonucleotide primer for the detection of SNP TSC0060483
tatcccctaact

SEQ ID NO: 374084 - DNA, 12 bp, Artificial Sequence
  Oligonucleotide primer for the detection of SNP TSC0060483
aggttgtgtagg

SEQ ID NO: 374085 - DNA, 12 bp, Artificial Sequence
  Oligonucleotide primer for the detection of SNP TSC0060484
actataaaatct

SEQ ID NO: 374086 - DNA, 12 bp, Artificial Sequence
  Oligonucleotide primer for the detection of SNP TSC0060485
agtttttttgtg

SEQ ID NO: 374087 - DNA, 12 bp, Artificial Sequence
  Oligonucleotide primer for the detection of SNP TSC0060485
agttttttcgtg

SEQ ID NO: 374088 - DNA, 12 bp, Artificial Sequence
  Oligonucleotide primer for the detection of SNP TSC0060485
aaccctctcata

SEQ ID NO: 374089 - DNA, 12 bp, Artificial Sequence
  Oligonucleotide primer for the detection of SNP TSC0060485
aaccctctcgta

SEQ ID NO: 374090 - DNA, 12 bp, Artificial Sequence
  Oligonucleotide primer for the detection of SNP TSC0060485
gagaaattattt

SEQ ID NO: 374091 - DNA, 12 bp, Artificial Sequence
  Oligonucleotide primer for the detection of SNP TSC0060486
tcccctaactcc

SEQ ID NO: 374092 - DNA, 12 bp, Artificial Sequence
  Oligonucleotide primer for the detection of SNP TSC0060486
ttgaggttgtgt

SEQ ID NO: 374093 - DNA, 12 bp, Artificial Sequence
  Oligonucleotide primer for the detection of SNP TSC0060487
gggtttatatat

SEQ ID NO: 374094 - DNA, 12 bp, Artificial Sequence
  Oligonucleotide primer for the detection of SNP TSC0060488
cgaactcctaac

SEQ ID NO: 374095 - DNA, 12 bp, Artificial Sequence
  Oligonucleotide primer for the detection of SNP TSC0060489
aacctaccacat

SEQ ID NO: 374096 - DNA, 12 bp, Artificial Sequence
  Oligonucleotide primer for the detection of SNP TSC0060489
aaagaaataggt

SEQ ID NO: 374097 - DNA, 12 bp, Artificial Sequence
  Oligonucleotide primer for the detection of SNP TSC0060490
tagggatagtat

SEQ ID NO: 374098 - DNA, 12 bp, Artificial Sequence
  Oligonucleotide primer for the detection of SNP TSC0060490
aggttaattaac

SEQ ID NO: 374099 - DNA, 12 bp, Artificial Sequence
  Oligonucleotide primer for the detection of SNP TSC0060493
actatctaaccc

SEQ ID NO: 374100 - DNA, 12 bp, Artificial Sequence
  Oligonucleotide primer for the detection of SNP TSC0060493
aagtaggggaag

SEQ ID NO: 374101 - DNA, 12 bp, Artificial Sequence
  Oligonucleotide primer for the detection of SNP TSC0060494
atattttcaaat

SEQ ID NO: 374102 - DNA, 12 bp, Artificial Sequence
  Oligonucleotide primer for the detection of SNP TSC0060494
tagtatgattta

SEQ ID NO: 374103 - DNA, 12 bp, Artificial Sequence
  Oligonucleotide primer for the detection of SNP TSC0060495
tccaccatctcc

SEQ ID NO: 374104 - DNA, 12 bp, Artificial Sequence
  Oligonucleotide primer for the detection of SNP TSC0060495
gtatagttgtag

SEQ ID NO: 374105 - DNA, 12 bp, Artificial Sequence
  Oligonucleotide primer for the detection of SNP TSC0060496
tttagatattga

SEQ ID NO: 374106 - DNA, 12 bp, Artificial Sequence
  Oligonucleotide primer for the detection of SNP TSC0060498
  unsure (5): unknown base
ttttntgattat

SEQ ID NO: 374107 - DNA, 12 bp, Artificial Sequence
  Oligonucleotide primer for the detection of SNP TSC0060498
  unsure (5): unknown base
cttcntaaccac

SEQ ID NO: 374108 - DNA, 12 bp, Artificial Sequence
  Oligonucleotide primer for the detection of SNP TSC0060498
gatggaaaggag

SEQ ID NO: 374109 - DNA, 12 bp, Artificial Sequence
  Oligonucleotide primer for the detection of SNP TSC0060500
aacaaattataa

SEQ ID NO: 374110 - DNA, 12 bp, Artificial Sequence
  Oligonucleotide primer for the detection of SNP TSC0060500
taaaaaatctaa

SEQ ID NO: 374111 - DNA, 12 bp, Artificial Sequence
  Oligonucleotide primer for the detection of SNP TSC0060500
ataaattgtgat

SEQ ID NO: 374112 - DNA, 12 bp, Artificial Sequence
  Oligonucleotide primer for the detection of SNP TSC0060502
tacaataacctc

SEQ ID NO: 374113 - DNA, 12 bp, Artificial Sequence
  Oligonucleotide primer for the detection of SNP TSC0060502
gtgtgtagttta

SEQ ID NO: 374114 - DNA, 12 bp, Artificial Sequence
  Oligonucleotide primer for the detection of SNP TSC0060502
gtgcgtagttta

SEQ ID NO: 374115 - DNA, 12 bp, Artificial Sequence
  Oligonucleotide primer for the detection of SNP TSC0060503
aaactcctaaac

SEQ ID NO: 374116 - DNA, 12 bp, Artificial Sequence
  Oligonucleotide primer for the detection of SNP TSC0060503
ggtggatggttt

SEQ ID NO: 374117 - DNA, 12 bp, Artificial Sequence
  Oligonucleotide primer for the detection of SNP TSC0060507
aaggtgtaagat

SEQ ID NO: 374118 - DNA, 12 bp, Artificial Sequence
  Oligonucleotide primer for the detection of SNP TSC0060507
aatttaaatttg

SEQ ID NO: 374119 - DNA, 12 bp, Artificial Sequence
  Oligonucleotide primer for the detection of SNP TSC0060510
acataaactacc

SEQ ID NO: 374120 - DNA, 12 bp, Artificial Sequence
  Oligonucleotide primer for the detection of SNP TSC0060510
ttttgggttggg

SEQ ID NO: 374121 - DNA, 12 bp, Artificial Sequence
  Oligonucleotide primer for the detection of SNP TSC0060513
aaaattacttcc

SEQ ID NO: 374122 - DNA, 12 bp, Artificial Sequence
  Oligonucleotide primer for the detection of SNP TSC0060514
aattcaaaataa

SEQ ID NO: 374123 - DNA, 12 bp, Artificial Sequence
  Oligonucleotide primer for the detection of SNP TSC0060514
agttgattgtat

SEQ ID NO: 374124 - DNA, 12 bp, Artificial Sequence
  Oligonucleotide primer for the detection of SNP TSC0060514
gatttaaagtga

SEQ ID NO: 374125 - DNA, 12 bp, Artificial Sequence
  Oligonucleotide primer for the detection of SNP TSC0060516
atttccataccc

SEQ ID NO: 374126 - DNA, 12 bp, Artificial Sequence
  Oligonucleotide primer for the detection of SNP TSC0060516
taataaaagaaa

SEQ ID NO: 374127 - DNA, 12 bp, Artificial Sequence
  Oligonucleotide primer for the detection of SNP TSC0060517
cattaaatcata

SEQ ID NO: 374128 - DNA, 12 bp, Artificial Sequence
  Oligonucleotide primer for the detection of SNP TSC0060517
cgttaaatcata

SEQ ID NO: 374129 - DNA, 12 bp, Artificial Sequence
  Oligonucleotide primer for the detection of SNP TSC0060517
gttagattatgt

SEQ ID NO: 374130 - DNA, 12 bp, Artificial Sequence
  Oligonucleotide primer for the detection of SNP TSC0060518
  unsure (1): unknown base
ntaaacaaatta

SEQ ID NO: 374131 - DNA, 12 bp, Artificial Sequence
  Oligonucleotide primer for the detection of SNP TSC0060518
attaatcttcta

SEQ ID NO: 374132 - DNA, 12 bp, Artificial Sequence
  Oligonucleotide primer for the detection of SNP TSC0060518
  unsure (1): unknown base
ntgaataagttg

SEQ ID NO: 374133 - DNA, 12 bp, Artificial Sequence
  Oligonucleotide primer for the detection of SNP TSC0060521
attttaattaat

SEQ ID NO: 374134 - DNA, 12 bp, Artificial Sequence
  Oligonucleotide primer for the detection of SNP TSC0060522
taatttaattaa

SEQ ID NO: 374135 - DNA, 12 bp, Artificial Sequence
  Oligonucleotide primer for the detection of SNP TSC0060522
tttataaatata

SEQ ID NO: 374136 - DNA, 12 bp, Artificial Sequence
  Oligonucleotide primer for the detection of SNP TSC0060522
tttacaaataca

SEQ ID NO: 374137 - DNA, 12 bp, Artificial Sequence
  Oligonucleotide primer for the detection of SNP TSC0060522
taatttgattga

SEQ ID NO: 374138 - DNA, 12 bp, Artificial Sequence
  Oligonucleotide primer for the detection of SNP TSC0060524
tatgtatttgtg

SEQ ID NO: 374139 - DNA, 12 bp, Artificial Sequence
  Oligonucleotide primer for the detection of SNP TSC0060525
caaattaattcc

SEQ ID NO: 374140 - DNA, 12 bp, Artificial Sequence
  Oligonucleotide primer for the detection of SNP TSC0060525
gaaagtgattta

SEQ ID NO: 374141 - DNA, 12 bp, Artificial Sequence
  Oligonucleotide primer for the detection of SNP TSC0060526
ggtagatttagt

SEQ ID NO: 374142 - DNA, 12 bp, Artificial Sequence
  Oligonucleotide primer for the detection of SNP TSC0060527
aatcatattcaa

SEQ ID NO: 374143 - DNA, 12 bp, Artificial Sequence
  Oligonucleotide primer for the detection of SNP TSC0060527
aatcgtattcaa

SEQ ID NO: 374144 - DNA, 12 bp, Artificial Sequence
  Oligonucleotide primer for the detection of SNP TSC0060527
ctttttataaat

SEQ ID NO: 374145 - DNA, 12 bp, Artificial Sequence
  Oligonucleotide primer for the detection of SNP TSC0060527
gattgtgtttaa

SEQ ID NO: 374146 - DNA, 12 bp, Artificial Sequence
  Oligonucleotide primer for the detection of SNP TSC0060527
gatcgtgtttaa

SEQ ID NO: 374147 - DNA, 12 bp, Artificial Sequence
  Oligonucleotide primer for the detection of SNP TSC0060534
aaactcgtaaat

SEQ ID NO: 374148 - DNA, 12 bp, Artificial Sequence
  Oligonucleotide primer for the detection of SNP TSC0060534
atttgaatttga

SEQ ID NO: 374149 - DNA, 12 bp, Artificial Sequence
  Oligonucleotide primer for the detection of SNP TSC0060535
attaattataac

SEQ ID NO: 374150 - DNA, 12 bp, Artificial Sequence
  Oligonucleotide primer for the detection of SNP TSC0060535
tttatgatattg

SEQ ID NO: 374151 - DNA, 12 bp, Artificial Sequence
  Oligonucleotide primer for the detection of SNP TSC0060535
cctataacatta

SEQ ID NO: 374152 - DNA, 12 bp, Artificial Sequence
  Oligonucleotide primer for the detection of SNP TSC0060535
attggttatggt

SEQ ID NO: 374153 - DNA, 12 bp, Artificial Sequence
  Oligonucleotide primer for the detection of SNP TSC0060536
ttaaattttgtt

SEQ ID NO: 374154 - DNA, 12 bp, Artificial Sequence
  Oligonucleotide primer for the detection of SNP TSC0060536
ttaaattctatc

SEQ ID NO: 374155 - DNA, 12 bp, Artificial Sequence
  Oligonucleotide primer for the detection of SNP TSC0060536
aaagatgtgaag

SEQ ID NO: 374156 - DNA, 12 bp, Artificial Sequence
  Oligonucleotide primer for the detection of SNP TSC0060537
tgagaatataaa

SEQ ID NO: 374157 - DNA, 12 bp, Artificial Sequence
  Oligonucleotide primer for the detection of SNP TSC0060538
aacattctacat

SEQ ID NO: 374158 - DNA, 12 bp, Artificial Sequence
  Oligonucleotide primer for the detection of SNP TSC0060538
aacattctacgt

SEQ ID NO: 374159 - DNA, 12 bp, Artificial Sequence
  Oligonucleotide primer for the detection of SNP TSC0060538
aaccttttcttc

SEQ ID NO: 374160 - DNA, 12 bp, Artificial Sequence
  Oligonucleotide primer for the detection of SNP TSC0060538
gtattttatgtt

SEQ ID NO: 374161 - DNA, 12 bp, Artificial Sequence
  Oligonucleotide primer for the detection of SNP TSC0060538
gtattttacgtt

SEQ ID NO: 374162 - DNA, 12 bp, Artificial Sequence
  Oligonucleotide primer for the detection of SNP TSC0060538
gtattttatgtc

SEQ ID NO: 374163 - DNA, 12 bp, Artificial Sequence
  Oligonucleotide primer for the detection of SNP TSC0060538
gtattttacgtc

SEQ ID NO: 374164 - DNA, 12 bp, Artificial Sequence
  Oligonucleotide primer for the detection of SNP TSC0060543
tgtgtatgtgtg

SEQ ID NO: 374165 - DNA, 12 bp, Artificial Sequence
  Oligonucleotide primer for the detection of SNP TSC0060544
acacctatttta

SEQ ID NO: 374166 - DNA, 12 bp, Artificial Sequence
  Oligonucleotide primer for the detection of SNP TSC0060544
tattcaaccacc

SEQ ID NO: 374167 - DNA, 12 bp, Artificial Sequence
  Oligonucleotide primer for the detection of SNP TSC0060546
ctatactaaatc

SEQ ID NO: 374168 - DNA, 12 bp, Artificial Sequence
  Oligonucleotide primer for the detection of SNP TSC0060546
ttgatggtaaag

SEQ ID NO: 374169 - DNA, 12 bp, Artificial Sequence
  Oligonucleotide primer for the detection of SNP TSC0060546
ttgtgttaagtt

SEQ ID NO: 374170 - DNA, 12 bp, Artificial Sequence
  Oligonucleotide primer for the detection of SNP TSC0060550
ataatctctacc

SEQ ID NO: 374171 - DNA, 12 bp, Artificial Sequence
  Oligonucleotide primer for the detection of SNP TSC0060550
ggtatatggtta

SEQ ID NO: 374172 - DNA, 12 bp, Artificial Sequence
  Oligonucleotide primer for the detection of SNP TSC0060551
tttagttaatag

SEQ ID NO: 374173 - DNA, 12 bp, Artificial Sequence
  Oligonucleotide primer for the detection of SNP TSC0060552
ataaggttagta

SEQ ID NO: 374174 - DNA, 12 bp, Artificial Sequence
  Oligonucleotide primer for the detection of SNP TSC0060553
ctcatattactt

SEQ ID NO: 374175 - DNA, 12 bp, Artificial Sequence
  Oligonucleotide primer for the detection of SNP TSC0060553
attaaaatttga

SEQ ID NO: 374176 - DNA, 12 bp, Artificial Sequence
  Oligonucleotide primer for the detection of SNP TSC0060553
tttatgttgttt

SEQ ID NO: 374177 - DNA, 12 bp, Artificial Sequence
  Oligonucleotide primer for the detection of SNP TSC0060554
ctaacaccctct

SEQ ID NO: 374178 - DNA, 12 bp, Artificial Sequence
  Oligonucleotide primer for the detection of SNP TSC0060554
tttgaagttatg

SEQ ID NO: 374179 - DNA, 12 bp, Artificial Sequence
  Oligonucleotide primer for the detection of SNP TSC0060555
tgtagtttttat

SEQ ID NO: 374180 - DNA, 12 bp, Artificial Sequence
  Oligonucleotide primer for the detection of SNP TSC0060555
atataacctcta

SEQ ID NO: 374181 - DNA, 12 bp, Artificial Sequence
  Oligonucleotide primer for the detection of SNP TSC0060555
gtttaaggttag

SEQ ID NO: 374182 - DNA, 12 bp, Artificial Sequence
  Oligonucleotide primer for the detection of SNP TSC0060556
taactaatctca

SEQ ID NO: 374183 - DNA, 12 bp, Artificial Sequence
  Oligonucleotide primer for the detection of SNP TSC0060556
taactaatctcg

SEQ ID NO: 374184 - DNA, 12 bp, Artificial Sequence
  Oligonucleotide primer for the detection of SNP TSC0060556
gaggtgaggagt

SEQ ID NO: 374185 - DNA, 12 bp, Artificial Sequence
  Oligonucleotide primer for the detection of SNP TSC0060557
attaaaatttcc

SEQ ID NO: 374186 - DNA, 12 bp, Artificial Sequence
  Oligonucleotide primer for the detection of SNP TSC0060557
atagggattagg

SEQ ID NO: 374187 - DNA, 12 bp, Artificial Sequence
  Oligonucleotide primer for the detection of SNP TSC0060558
agaaaataaaga

SEQ ID NO: 374188 - DNA, 12 bp, Artificial Sequence
  Oligonucleotide primer for the detection of SNP TSC0060561
caaacgtaaact

SEQ ID NO: 374189 - DNA, 12 bp, Artificial Sequence
  Oligonucleotide primer for the detection of SNP TSC0060561
tggttaggcgtg

SEQ ID NO: 374190 - DNA, 12 bp, Artificial Sequence
  Oligonucleotide primer for the detection of SNP TSC0060561
tggttaggtgcg

SEQ ID NO: 374191 - DNA, 12 bp, Artificial Sequence
  Oligonucleotide primer for the detection of SNP TSC0060561
tggttaggcgcg

SEQ ID NO: 374192 - DNA, 12 bp, Artificial Sequence
  Oligonucleotide primer for the detection of SNP TSC0060562
gaggtatgagaa

SEQ ID NO: 374193 - DNA, 12 bp, Artificial Sequence
  Oligonucleotide primer for the detection of SNP TSC0060563
aaaactaaccca

SEQ ID NO: 374194 - DNA, 12 bp, Artificial Sequence
  Oligonucleotide primer for the detection of SNP TSC0060563
tatatgtgttta

SEQ ID NO: 374195 - DNA, 12 bp, Artificial Sequence
  Oligonucleotide primer for the detection of SNP TSC0060564
gtagttatttgg

SEQ ID NO: 374196 - DNA, 12 bp, Artificial Sequence
  Oligonucleotide primer for the detection of SNP TSC0060565
ttatggaaaaat

SEQ ID NO: 374197 - DNA, 12 bp, Artificial Sequence
  Oligonucleotide primer for the detection of SNP TSC0060565
tcataaaaaaac

SEQ ID NO: 374198 - DNA, 12 bp, Artificial Sequence
  Oligonucleotide primer for the detection of SNP TSC0060565
tagtagagacgg

SEQ ID NO: 374199 - DNA, 12 bp, Artificial Sequence
  Oligonucleotide primer for the detection of SNP TSC0060566
gtttcttttttt

SEQ ID NO: 374200 - DNA, 12 bp, Artificial Sequence
  Oligonucleotide primer for the detection of SNP TSC0060567
ctaaaattatcc

SEQ ID NO: 374201 - DNA, 12 bp, Artificial Sequence
  Oligonucleotide primer for the detection of SNP TSC0060568
actaaaaaatat

SEQ ID NO: 374202 - DNA, 12 bp, Artificial Sequence
  Oligonucleotide primer for the detection of SNP TSC0060568
aagaaaaaagag

SEQ ID NO: 374203 - DNA, 12 bp, Artificial Sequence
  Oligonucleotide primer for the detection of SNP TSC0060569
acatatctattt

SEQ ID NO: 374204 - DNA, 12 bp, Artificial Sequence
  Oligonucleotide primer for the detection of SNP TSC0060569
attgaaatataa

SEQ ID NO: 374205 - DNA, 12 bp, Artificial Sequence
  Oligonucleotide primer for the detection of SNP TSC0060571
ttaacctttacc

SEQ ID NO: 374206 - DNA, 12 bp, Artificial Sequence
  Oligonucleotide primer for the detection of SNP TSC0060571
ttttagaatttg

SEQ ID NO: 374207 - DNA, 12 bp, Artificial Sequence
  Oligonucleotide primer for the detection of SNP TSC0060571
ttttagaattcg

SEQ ID NO: 374208 - DNA, 12 bp, Artificial Sequence
  Oligonucleotide primer for the detection of SNP TSC0060576
ataaaaccatca

SEQ ID NO: 374209 - DNA, 12 bp, Artificial Sequence
  Oligonucleotide primer for the detection of SNP TSC0060576
ccaatcttaatt

SEQ ID NO: 374210 - DNA, 12 bp, Artificial Sequence
  Oligonucleotide primer for the detection of SNP TSC0060576
gtgagattatta

SEQ ID NO: 374211 - DNA, 12 bp, Artificial Sequence
  Oligonucleotide primer for the detection of SNP TSC0060577
aattttttggtt

SEQ ID NO: 374212 - DNA, 12 bp, Artificial Sequence
  Oligonucleotide primer for the detection of SNP TSC0060577
aaccccctaact

SEQ ID NO: 374213 - DNA, 12 bp, Artificial Sequence
  Oligonucleotide primer for the detection of SNP TSC0060577
tttgtgggagag

SEQ ID NO: 374214 - DNA, 12 bp, Artificial Sequence
  Oligonucleotide primer for the detection of SNP TSC0060578
aatcactataaa

SEQ ID NO: 374215 - DNA, 12 bp, Artificial Sequence
  Oligonucleotide primer for the detection of SNP TSC0060578
gtgataaaagaa

SEQ ID NO: 374216 - DNA, 12 bp, Artificial Sequence
  Oligonucleotide primer for the detection of SNP TSC0060578
agttattatgaa

SEQ ID NO: 374217 - DNA, 12 bp, Artificial Sequence
  Oligonucleotide primer for the detection of SNP TSC0060581
attttaaatcac

SEQ ID NO: 374218 - DNA, 12 bp, Artificial Sequence
  Oligonucleotide primer for the detection of SNP TSC0060581
gatggtgagaaa

SEQ ID NO: 374219 - DNA, 12 bp, Artificial Sequence
  Oligonucleotide primer for the detection of SNP TSC0060582
aatttttaacat

SEQ ID NO: 374220 - DNA, 12 bp, Artificial Sequence
  Oligonucleotide primer for the detection of SNP TSC0060582
attgttagttga

SEQ ID NO: 374221 - DNA, 12 bp, Artificial Sequence
  Oligonucleotide primer for the detection of SNP TSC0060583
ttcctcttatca

SEQ ID NO: 374222 - DNA, 12 bp, Artificial Sequence
  Oligonucleotide primer for the detection of SNP TSC0060583
ttcctcttatcg

SEQ ID NO: 374223 - DNA, 12 bp, Artificial Sequence
  Oligonucleotide primer for the detection of SNP TSC0060583
gtaatttaaaag

SEQ ID NO: 374224 - DNA, 12 bp, Artificial Sequence
  Oligonucleotide primer for the detection of SNP TSC0060584
caccataattat

SEQ ID NO: 374225 - DNA, 12 bp, Artificial Sequence
  Oligonucleotide primer for the detection of SNP TSC0060585
ggaatagtgagt

SEQ ID NO: 374226 - DNA, 12 bp, Artificial Sequence
  Oligonucleotide primer for the detection of SNP TSC0060585
agaggtttaatt

SEQ ID NO: 374227 - DNA, 12 bp, Artificial Sequence
  Oligonucleotide primer for the detection of SNP TSC0060586
actaatctccct

SEQ ID NO: 374228 - DNA, 12 bp, Artificial Sequence
  Oligonucleotide primer for the detection of SNP TSC0060586
ggttaagaggaa

SEQ ID NO: 374229 - DNA, 12 bp, Artificial Sequence
  Oligonucleotide primer for the detection of SNP TSC0060587
aaactcacccac

SEQ ID NO: 374230 - DNA, 12 bp, Artificial Sequence
  Oligonucleotide primer for the detection of SNP TSC0060587
agatagtgaaga

SEQ ID NO: 374231 - DNA, 12 bp, Artificial Sequence
  Oligonucleotide primer for the detection of SNP TSC0060594
ataatactcctc

SEQ ID NO: 374232 - DNA, 12 bp, Artificial Sequence
  Oligonucleotide primer for the detection of SNP TSC0060594
ttggaaaagtat

SEQ ID NO: 374233 - DNA, 12 bp, Artificial Sequence
  Oligonucleotide primer for the detection of SNP TSC0060595
atagagagagag

SEQ ID NO: 374234 - DNA, 12 bp, Artificial Sequence
  Oligonucleotide primer for the detection of SNP TSC0005648
cttcctcaacct

SEQ ID NO: 374235 - DNA, 12 bp, Artificial Sequence
  Oligonucleotide primer for the detection of SNP TSC0005648
cttcctcgacct

SEQ ID NO: 374236 - DNA, 12 bp, Artificial Sequence
  Oligonucleotide primer for the detection of SNP TSC0060603
caactttttccc

SEQ ID NO: 374237 - DNA, 12 bp, Artificial Sequence
  Oligonucleotide primer for the detection of SNP TSC0060603
atattatattga

SEQ ID NO: 374238 - DNA, 12 bp, Artificial Sequence
  Oligonucleotide primer for the detection of SNP TSC0060604
aattcaaatcca

SEQ ID NO: 374239 - DNA, 12 bp, Artificial Sequence
  Oligonucleotide primer for the detection of SNP TSC0060604
tattaagtggaa

SEQ ID NO: 374240 - DNA, 12 bp, Artificial Sequence
  Oligonucleotide primer for the detection of SNP TSC0060604
atttaaatttat

SEQ ID NO: 374241 - DNA, 12 bp, Artificial Sequence
  Oligonucleotide primer for the detection of SNP TSC0009359
tacttctttcaa

SEQ ID NO: 374242 - DNA, 12 bp, Artificial Sequence
  Oligonucleotide primer for the detection of SNP TSC0009359
tatataaatccc

SEQ ID NO: 374243 - DNA, 12 bp, Artificial Sequence
  Oligonucleotide primer for the detection of SNP TSC0009360
atctactaaata

SEQ ID NO: 374244 - DNA, 12 bp, Artificial Sequence
  Oligonucleotide primer for the detection of SNP TSC0009360
attaaggaattt

SEQ ID NO: 374245 - DNA, 12 bp, Artificial Sequence
  Oligonucleotide primer for the detection of SNP TSC0009360
gtttgttgaatg

SEQ ID NO: 374246 - DNA, 12 bp, Artificial Sequence
  Oligonucleotide primer for the detection of SNP TSC0060605
ctttactaatta

SEQ ID NO: 374247 - DNA, 12 bp, Artificial Sequence
  Oligonucleotide primer for the detection of SNP TSC0060605
atatgatatttt

SEQ ID NO: 374248 - DNA, 12 bp, Artificial Sequence
  Oligonucleotide primer for the detection of SNP TSC0060605
atataatatttc

SEQ ID NO: 374249 - DNA, 12 bp, Artificial Sequence
  Oligonucleotide primer for the detection of SNP TSC0060607
agataatgtatg

SEQ ID NO: 374250 - DNA, 12 bp, Artificial Sequence
  Oligonucleotide primer for the detection of SNP TSC0060607
aaataatacata

SEQ ID NO: 374251 - DNA, 12 bp, Artificial Sequence
  Oligonucleotide primer for the detection of SNP TSC0060608
taaattctccac

SEQ ID NO: 374252 - DNA, 12 bp, Artificial Sequence
  Oligonucleotide primer for the detection of SNP TSC0060608
agtgatgatgaa

SEQ ID NO: 374253 - DNA, 12 bp, Artificial Sequence
  Oligonucleotide primer for the detection of SNP TSC0060610
attgattttaat

SEQ ID NO: 374254 - DNA, 12 bp, Artificial Sequence
  Oligonucleotide primer for the detection of SNP TSC0060610
actaaccccaat

SEQ ID NO: 374255 - DNA, 12 bp, Artificial Sequence
  Oligonucleotide primer for the detection of SNP TSC0060610
atttaagtatga

SEQ ID NO: 374256 - DNA, 12 bp, Artificial Sequence
  Oligonucleotide primer for the detection of SNP TSC0060612
tccacctaaaat

SEQ ID NO: 374257 - DNA, 12 bp, Artificial Sequence
  Oligonucleotide primer for the detection of SNP TSC0060612
gggtataaagat

SEQ ID NO: 374258 - DNA, 12 bp, Artificial Sequence
  Oligonucleotide primer for the detection of SNP TSC0060612
aaacacaaaaac

SEQ ID NO: 374259 - DNA, 12 bp, Artificial Sequence
  Oligonucleotide primer for the detection of SNP TSC0060612
tttatttggaat

SEQ ID NO: 374260 - DNA, 12 bp, Artificial Sequence
  Oligonucleotide primer for the detection of SNP TSC0060613
ataattcctttt

SEQ ID NO: 374261 - DNA, 12 bp, Artificial Sequence
  Oligonucleotide primer for the detection of SNP TSC0060613
ttaataatgtta

SEQ ID NO: 374262 - DNA, 12 bp, Artificial Sequence
  Oligonucleotide primer for the detection of SNP TSC0060613
tcaacaatatta

SEQ ID NO: 374263 - DNA, 12 bp, Artificial Sequence
  Oligonucleotide primer for the detection of SNP TSC0060614
tactcttctttc

SEQ ID NO: 374264 - DNA, 12 bp, Artificial Sequence
  Oligonucleotide primer for the detection of SNP TSC0060614
ttagggtggtgg

SEQ ID NO: 374265 - DNA, 12 bp, Artificial Sequence
  Oligonucleotide primer for the detection of SNP TSC0060615
ctttataatttc

SEQ ID NO: 374266 - DNA, 12 bp, Artificial Sequence
  Oligonucleotide primer for the detection of SNP TSC0060615
aaagaagagtag

SEQ ID NO: 374267 - DNA, 12 bp, Artificial Sequence
  Oligonucleotide primer for the detection of SNP TSC0060616
aaataaattcac

SEQ ID NO: 374268 - DNA, 12 bp, Artificial Sequence
  Oligonucleotide primer for the detection of SNP TSC0060616
tttttaagaata

SEQ ID NO: 374269 - DNA, 12 bp, Artificial Sequence
  Oligonucleotide primer for the detection of SNP TSC0060617
ctttctcatacc

SEQ ID NO: 374270 - DNA, 12 bp, Artificial Sequence
  Oligonucleotide primer for the detection of SNP TSC0060617
ctttctcgtacc

SEQ ID NO: 374271 - DNA, 12 bp, Artificial Sequence
  Oligonucleotide primer for the detection of SNP TSC0060617
gggagttttagg

SEQ ID NO: 374272 - DNA, 12 bp, Artificial Sequence
  Oligonucleotide primer for the detection of SNP TSC0060618
  unsure (2): unknown base
antaataaacaa

SEQ ID NO: 374273 - DNA, 12 bp, Artificial Sequence
  Oligonucleotide primer for the detection of SNP TSC0060618
atctcctattaa

SEQ ID NO: 374274 - DNA, 12 bp, Artificial Sequence
  Oligonucleotide primer for the detection of SNP TSC0060618
  unsure (4): unknown base
tagntaataggt

SEQ ID NO: 374275 - DNA, 12 bp, Artificial Sequence
  Oligonucleotide primer for the detection of SNP TSC0060620
ccaaattattct

SEQ ID NO: 374276 - DNA, 12 bp, Artificial Sequence
  Oligonucleotide primer for the detection of SNP TSC0060620
aatttataagga

SEQ ID NO: 374277 - DNA, 12 bp, Artificial Sequence
  Oligonucleotide primer for the detection of SNP TSC0007675
ttatccaatcct

SEQ ID NO: 374278 - DNA, 12 bp, Artificial Sequence
  Oligonucleotide primer for the detection of SNP TSC0007675
gaggtatataat

SEQ ID NO: 374279 - DNA, 12 bp, Artificial Sequence
  Oligonucleotide primer for the detection of SNP TSC0007675
aaaacatacaat

SEQ ID NO: 374280 - DNA, 12 bp, Artificial Sequence
  Oligonucleotide primer for the detection of SNP TSC0060623
cctcccaaaatt

SEQ ID NO: 374281 - DNA, 12 bp, Artificial Sequence
  Oligonucleotide primer for the detection of SNP TSC0060624
aaaccttttaca

SEQ ID NO: 374282 - DNA, 12 bp, Artificial Sequence
  Oligonucleotide primer for the detection of SNP TSC0005362
tagaatttgtaa

SEQ ID NO: 374283 - DNA, 12 bp, Artificial Sequence
  Oligonucleotide primer for the detection of SNP TSC0004739
tctcctttccac

SEQ ID NO: 374284 - DNA, 12 bp, Artificial Sequence
  Oligonucleotide primer for the detection of SNP TSC0004739
tggtttgtgggg

SEQ ID NO: 374285 - DNA, 12 bp, Artificial Sequence
  Oligonucleotide primer for the detection of SNP TSC0004739
tggtttgcgggg

SEQ ID NO: 374286 - DNA, 12 bp, Artificial Sequence
  Oligonucleotide primer for the detection of SNP TSC0004740
actcaacacaca

SEQ ID NO: 374287 - DNA, 12 bp, Artificial Sequence
  Oligonucleotide primer for the detection of SNP TSC0004740
gtgataaatagt

SEQ ID NO: 374288 - DNA, 12 bp, Artificial Sequence
  Oligonucleotide primer for the detection of SNP TSC0004741
cctaaaatcatc

SEQ ID NO: 374289 - DNA, 12 bp, Artificial Sequence
  Oligonucleotide primer for the detection of SNP TSC0004741
gaatttttgaaa

SEQ ID NO: 374290 - DNA, 12 bp, Artificial Sequence
  Oligonucleotide primer for the detection of SNP TSC0060625
aaatttttatcc

SEQ ID NO: 374291 - DNA, 12 bp, Artificial Sequence
  Oligonucleotide primer for the detection of SNP TSC0060625
ttttataggaga

SEQ ID NO: 374292 - DNA, 12 bp, Artificial Sequence
  Oligonucleotide primer for the detection of SNP TSC0060625
tctcataaaaaa

SEQ ID NO: 374293 - DNA, 12 bp, Artificial Sequence
  Oligonucleotide primer for the detection of SNP TSC0060625
agatttttgttt

SEQ ID NO: 374294 - DNA, 12 bp, Artificial Sequence
  Oligonucleotide primer for the detection of SNP TSC0060626
ccttaaattaaa

SEQ ID NO: 374295 - DNA, 12 bp, Artificial Sequence
  Oligonucleotide primer for the detection of SNP TSC0060626
cttctccaaaac

SEQ ID NO: 374296 - DNA, 12 bp, Artificial Sequence
  Oligonucleotide primer for the detection of SNP TSC0060626
aattttaagttg

SEQ ID NO: 374297 - DNA, 12 bp, Artificial Sequence
  Oligonucleotide primer for the detection of SNP TSC0060627
aataccttcctt

SEQ ID NO: 374298 - DNA, 12 bp, Artificial Sequence
  Oligonucleotide primer for the detection of SNP TSC0060627
aattgtagaagg

SEQ ID NO: 374299 - DNA, 12 bp, Artificial Sequence
  Oligonucleotide primer for the detection of SNP TSC0060628
ttctctaaaaaa

SEQ ID NO: 374300 - DNA, 12 bp, Artificial Sequence
  Oligonucleotide primer for the detection of SNP TSC0060628
ttttagtagtga

SEQ ID NO: 374301 - DNA, 12 bp, Artificial Sequence
  Oligonucleotide primer for the detection of SNP TSC0060629
aataaaattatt

SEQ ID NO: 374302 - DNA, 12 bp, Artificial Sequence
  Oligonucleotide primer for the detection of SNP TSC0060629
aagtttgggata

SEQ ID NO: 374303 - DNA, 12 bp, Artificial Sequence
  Oligonucleotide primer for the detection of SNP TSC0060631
ccattaaaatat

SEQ ID NO: 374304 - DNA, 12 bp, Artificial Sequence
  Oligonucleotide primer for the detection of SNP TSC0060631
taagttttttaa

SEQ ID NO: 374305 - DNA, 12 bp, Artificial Sequence
  Oligonucleotide primer for the detection of SNP TSC0060632
aatttcattttt

SEQ ID NO: 374306 - DNA, 12 bp, Artificial Sequence
  Oligonucleotide primer for the detection of SNP TSC0060633
ttatctccaaaa

SEQ ID NO: 374307 - DNA, 12 bp, Artificial Sequence
  Oligonucleotide primer for the detection of SNP TSC0060633
tttaattaagag

SEQ ID NO: 374308 - DNA, 12 bp, Artificial Sequence
  Oligonucleotide primer for the detection of SNP TSC0060633
ttgtttttaggg

SEQ ID NO: 374309 - DNA, 12 bp, Artificial Sequence
  Oligonucleotide primer for the detection of SNP TSC0060634
ttaaaatatcac

SEQ ID NO: 374310 - DNA, 12 bp, Artificial Sequence
  Oligonucleotide primer for the detection of SNP TSC0060634
ttgtttgttaaa

SEQ ID NO: 374311 - DNA, 12 bp, Artificial Sequence
  Oligonucleotide primer for the detection of SNP TSC0060636
acaccacacttc

SEQ ID NO: 374312 - DNA, 12 bp, Artificial Sequence
  Oligonucleotide primer for the detection of SNP TSC0060636
gaaggtagtatg

SEQ ID NO: 374313 - DNA, 12 bp, Artificial Sequence
  Oligonucleotide primer for the detection of SNP TSC0060637
ctaatttattca

SEQ ID NO: 374314 - DNA, 12 bp, Artificial Sequence
  Oligonucleotide primer for the detection of SNP TSC0060637
tacccactcacc

SEQ ID NO: 374315 - DNA, 12 bp, Artificial Sequence
  Oligonucleotide primer for the detection of SNP TSC0060638
aataaattcaat

SEQ ID NO: 374316 - DNA, 12 bp, Artificial Sequence
  Oligonucleotide primer for the detection of SNP TSC0060638
agtagtagtgag

SEQ ID NO: 374317 - DNA, 12 bp, Artificial Sequence
  Oligonucleotide primer for the detection of SNP TSC0060639
acttaattattc

SEQ ID NO: 374318 - DNA, 12 bp, Artificial Sequence
  Oligonucleotide primer for the detection of SNP TSC0060639
gaatagagagtg

SEQ ID NO: 374319 - DNA, 12 bp, Artificial Sequence
  Oligonucleotide primer for the detection of SNP TSC0060640
tactcactataa

SEQ ID NO: 374320 - DNA, 12 bp, Artificial Sequence
  Oligonucleotide primer for the detection of SNP TSC0060640
aaactatctcca

SEQ ID NO: 374321 - DNA, 12 bp, Artificial Sequence
  Oligonucleotide primer for the detection of SNP TSC0060641
cactttatccaa

SEQ ID NO: 374322 - DNA, 12 bp, Artificial Sequence
  Oligonucleotide primer for the detection of SNP TSC0060641
tggttatgtgat

SEQ ID NO: 374323 - DNA, 12 bp, Artificial Sequence
  Oligonucleotide primer for the detection of SNP TSC0060641
tggttatgtgac

SEQ ID NO: 374324 - DNA, 12 bp, Artificial Sequence
  Oligonucleotide primer for the detection of SNP TSC0060641
ctaactatataa

SEQ ID NO: 374325 - DNA, 12 bp, Artificial Sequence
  Oligonucleotide primer for the detection of SNP TSC0060642
tcatttataatt

SEQ ID NO: 374326 - DNA, 12 bp, Artificial Sequence
  Oligonucleotide primer for the detection of SNP TSC0060642
aatttatttata

SEQ ID NO: 374327 - DNA, 12 bp, Artificial Sequence
  Oligonucleotide primer for the detection of SNP TSC0060643
tctataaatcca

SEQ ID NO: 374328 - DNA, 12 bp, Artificial Sequence
  Oligonucleotide primer for the detection of SNP TSC0060643
aatgatgagagt

SEQ ID NO: 374329 - DNA, 12 bp, Artificial Sequence
  Oligonucleotide primer for the detection of SNP TSC0060643
ttatgggtttat

SEQ ID NO: 374330 - DNA, 12 bp, Artificial Sequence
  Oligonucleotide primer for the detection of SNP TSC0060644
aacctaataccc

SEQ ID NO: 374331 - DNA, 12 bp, Artificial Sequence
  Oligonucleotide primer for the detection of SNP TSC0060644
gaaaagtaatta

SEQ ID NO: 374332 - DNA, 12 bp, Artificial Sequence
  Oligonucleotide primer for the detection of SNP TSC0005619
aaaaattcccca

SEQ ID NO: 374333 - DNA, 12 bp, Artificial Sequence
  Oligonucleotide primer for the detection of SNP TSC0005619
taggagttggag

SEQ ID NO: 374334 - DNA, 12 bp, Artificial Sequence
  Oligonucleotide primer for the detection of SNP TSC0060645
ttatatgatata

SEQ ID NO: 374335 - DNA, 12 bp, Artificial Sequence
  Oligonucleotide primer for the detection of SNP TSC0060645
cacataacacaa

SEQ ID NO: 374336 - DNA, 12 bp, Artificial Sequence
  Oligonucleotide primer for the detection of SNP TSC0060645
aagggtttagaa

SEQ ID NO: 374337 - DNA, 12 bp, Artificial Sequence
  Oligonucleotide primer for the detection of SNP TSC0060646
tcaccaaccttc

SEQ ID NO: 374338 - DNA, 12 bp, Artificial Sequence
  Oligonucleotide primer for the detection of SNP TSC0060646
gatttttaaatt

SEQ ID NO: 374339 - DNA, 12 bp, Artificial Sequence
  Oligonucleotide primer for the detection of SNP TSC0060646
atccccaaacca

SEQ ID NO: 374340 - DNA, 12 bp, Artificial Sequence
  Oligonucleotide primer for the detection of SNP TSC0060646
ttattagttttc

SEQ ID NO: 374341 - DNA, 12 bp, Artificial Sequence
  Oligonucleotide primer for the detection of SNP TSC0060647
caattcccattc

SEQ ID NO: 374342 - DNA, 12 bp, Artificial Sequence
  Oligonucleotide primer for the detection of SNP TSC0060647
tgttggtgttta

SEQ ID NO: 374343 - DNA, 12 bp, Artificial Sequence
  Oligonucleotide primer for the detection of SNP TSC0060648
taggattaaatt

SEQ ID NO: 374344 - DNA, 12 bp, Artificial Sequence
  Oligonucleotide primer for the detection of SNP TSC0060648
tcaaaattaaac

SEQ ID NO: 374345 - DNA, 12 bp, Artificial Sequence
  Oligonucleotide primer for the detection of SNP TSC0060648
tgaggatatttg

SEQ ID NO: 374346 - DNA, 12 bp, Artificial Sequence
  Oligonucleotide primer for the detection of SNP TSC0060649
agaatttgatat

SEQ ID NO: 374347 - DNA, 12 bp, Artificial Sequence
  Oligonucleotide primer for the detection of SNP TSC0060649
aaatctaatata

SEQ ID NO: 374348 - DNA, 12 bp, Artificial Sequence
  Oligonucleotide primer for the detection of SNP TSC0060649
aatttgagagaa

SEQ ID NO: 374349 - DNA, 12 bp, Artificial Sequence
  Oligonucleotide primer for the detection of SNP TSC0060653
aatttcaaaaca

SEQ ID NO: 374350 - DNA, 12 bp, Artificial Sequence
  Oligonucleotide primer for the detection of SNP TSC0060653
tattatagtaat

SEQ ID NO: 374351 - DNA, 12 bp, Artificial Sequence
  Oligonucleotide primer for the detection of SNP TSC0060653
taccataataat

SEQ ID NO: 374352 - DNA, 12 bp, Artificial Sequence
  Oligonucleotide primer for the detection of SNP TSC0010361
tctacttaatat

SEQ ID NO: 374353 - DNA, 12 bp, Artificial Sequence
  Oligonucleotide primer for the detection of SNP TSC0010361
ttgagattttga

SEQ ID NO: 374354 - DNA, 12 bp, Artificial Sequence
  Oligonucleotide primer for the detection of SNP TSC0060654
ctactatcacct

SEQ ID NO: 374355 - DNA, 12 bp, Artificial Sequence
  Oligonucleotide primer for the detection of SNP TSC0060654
ggaatgttagga

SEQ ID NO: 374356 - DNA, 12 bp, Artificial Sequence
  Oligonucleotide primer for the detection of SNP TSC0060654
ggaacgttagga

SEQ ID NO: 374357 - DNA, 12 bp, Artificial Sequence
  Oligonucleotide primer for the detection of SNP TSC0060655
tttattcacttc

SEQ ID NO: 374358 - DNA, 12 bp, Artificial Sequence
  Oligonucleotide primer for the detection of SNP TSC0060655
aatagtagaaag

SEQ ID NO: 374359 - DNA, 12 bp, Artificial Sequence
  Oligonucleotide primer for the detection of SNP TSC0009045
tcactaaaaacc

SEQ ID NO: 374360 - DNA, 12 bp, Artificial Sequence
  Oligonucleotide primer for the detection of SNP TSC0009045
ggtagatagggg

SEQ ID NO: 374361 - DNA, 12 bp, Artificial Sequence
  Oligonucleotide primer for the detection of SNP TSC0009045
ttattggggatt

SEQ ID NO: 374362 - DNA, 12 bp, Artificial Sequence
  Oligonucleotide primer for the detection of SNP TSC0009045
ttattggggatc

SEQ ID NO: 374363 - DNA, 12 bp, Artificial Sequence
  Oligonucleotide primer for the detection of SNP TSC0009046
aatccacaaacc

SEQ ID NO: 374364 - DNA, 12 bp, Artificial Sequence
  Oligonucleotide primer for the detection of SNP TSC0009046
aatccacgaacc

SEQ ID NO: 374365 - DNA, 12 bp, Artificial Sequence
  Oligonucleotide primer for the detection of SNP TSC0009046
gagaggttttta

SEQ ID NO: 374366 - DNA, 12 bp, Artificial Sequence
  Oligonucleotide primer for the detection of SNP TSC0060656
aaccacaaacta

SEQ ID NO: 374367 - DNA, 12 bp, Artificial Sequence
  Oligonucleotide primer for the detection of SNP TSC0060656
aagatttaattg

SEQ ID NO: 374368 - DNA, 12 bp, Artificial Sequence
  Oligonucleotide primer for the detection of SNP TSC0060657
ccaccacatttc

SEQ ID NO: 374369 - DNA, 12 bp, Artificial Sequence
  Oligonucleotide primer for the detection of SNP TSC0060657
agaggttttgta

SEQ ID NO: 374370 - DNA, 12 bp, Artificial Sequence
  Oligonucleotide primer for the detection of SNP TSC0060658
tataattacaat

SEQ ID NO: 374371 - DNA, 12 bp, Artificial Sequence
  Oligonucleotide primer for the detection of SNP TSC0060658
ttaattagagag

SEQ ID NO: 374372 - DNA, 12 bp, Artificial Sequence
  Oligonucleotide primer for the detection of SNP TSC0060659
catatattttat

SEQ ID NO: 374373 - DNA, 12 bp, Artificial Sequence
  Oligonucleotide primer for the detection of SNP TSC0060659
gagatattttta

SEQ ID NO: 374374 - DNA, 12 bp, Artificial Sequence
  Oligonucleotide primer for the detection of SNP TSC0060659
aaaacaccctca

SEQ ID NO: 374375 - DNA, 12 bp, Artificial Sequence
  Oligonucleotide primer for the detection of SNP TSC0060660
actaatatacat

SEQ ID NO: 374376 - DNA, 12 bp, Artificial Sequence
  Oligonucleotide primer for the detection of SNP TSC0060660
gttagaaattaa

SEQ ID NO: 374377 - DNA, 12 bp, Artificial Sequence
  Oligonucleotide primer for the detection of SNP TSC0010771
aacatccaaaac

SEQ ID NO: 374378 - DNA, 12 bp, Artificial Sequence
  Oligonucleotide primer for the detection of SNP TSC0010771
cccatatcaata

SEQ ID NO: 374379 - DNA, 12 bp, Artificial Sequence
  Oligonucleotide primer for the detection of SNP TSC0010771
agtatttaaagt

SEQ ID NO: 374380 - DNA, 12 bp, Artificial Sequence
  Oligonucleotide primer for the detection of SNP TSC0060661
tatgttggttag

SEQ ID NO: 374381 - DNA, 12 bp, Artificial Sequence
  Oligonucleotide primer for the detection of SNP TSC0060663
caatcaattccc

SEQ ID NO: 374382 - DNA, 12 bp, Artificial Sequence
  Oligonucleotide primer for the detection of SNP TSC0060663
agagtttaggat

SEQ ID NO: 374383 - DNA, 12 bp, Artificial Sequence
  Oligonucleotide primer for the detection of SNP TSC0060663
agagtttaggac

SEQ ID NO: 374384 - DNA, 12 bp, Artificial Sequence
  Oligonucleotide primer for the detection of SNP TSC0060666
attaccctaaaa

SEQ ID NO: 374385 - DNA, 12 bp, Artificial Sequence
  Oligonucleotide primer for the detection of SNP TSC0060666
ggaaaaattttg

SEQ ID NO: 374386 - DNA, 12 bp, Artificial Sequence
  Oligonucleotide primer for the detection of SNP TSC0060666
aaaaaatcctaa

SEQ ID NO: 374387 - DNA, 12 bp, Artificial Sequence
  Oligonucleotide primer for the detection of SNP TSC0060666
gattgttttggg

SEQ ID NO: 374388 - DNA, 12 bp, Artificial Sequence
  Oligonucleotide primer for the detection of SNP TSC0060667
tctatatcaatt

SEQ ID NO: 374389 - DNA, 12 bp, Artificial Sequence
  Oligonucleotide primer for the detection of SNP TSC0060667
aaagttagatat

SEQ ID NO: 374390 - DNA, 12 bp, Artificial Sequence
  Oligonucleotide primer for the detection of SNP TSC0008176
acctataaaaac

SEQ ID NO: 374391 - DNA, 12 bp, Artificial Sequence
  Oligonucleotide primer for the detection of SNP TSC0008176
tagggatagtta

SEQ ID NO: 374392 - DNA, 12 bp, Artificial Sequence
  Oligonucleotide primer for the detection of SNP TSC0008177
ctttaaattaaa

SEQ ID NO: 374393 - DNA, 12 bp, Artificial Sequence
  Oligonucleotide primer for the detection of SNP TSC0008177
gtagatagggtt

SEQ ID NO: 374394 - DNA, 12 bp, Artificial Sequence
  Oligonucleotide primer for the detection of SNP TSC0010880
ttttatactatt

SEQ ID NO: 374395 - DNA, 12 bp, Artificial Sequence
  Oligonucleotide primer for the detection of SNP TSC0010880
gatgtttagtta

SEQ ID NO: 374396 - DNA, 12 bp, Artificial Sequence
  Oligonucleotide primer for the detection of SNP TSC0010881
ttcaactcaaac

SEQ ID NO: 374397 - DNA, 12 bp, Artificial Sequence
  Oligonucleotide primer for the detection of SNP TSC0010882
taatattcttaa

SEQ ID NO: 374398 - DNA, 12 bp, Artificial Sequence
  Oligonucleotide primer for the detection of SNP TSC0010882
tatagttagtat

SEQ ID NO: 374399 - DNA, 12 bp, Artificial Sequence
  Oligonucleotide primer for the detection of SNP TSC0010882
tacaatcaacat

SEQ ID NO: 374400 - DNA, 12 bp, Artificial Sequence
  Oligonucleotide primer for the detection of SNP TSC0060670
taaaataaaatc

SEQ ID NO: 374401 - DNA, 12 bp, Artificial Sequence
  Oligonucleotide primer for the detection of SNP TSC0060670
atgtagatggta

SEQ ID NO: 374402 - DNA, 12 bp, Artificial Sequence
  Oligonucleotide primer for the detection of SNP TSC0060671
cttctactcaca

SEQ ID NO: 374403 - DNA, 12 bp, Artificial Sequence
  Oligonucleotide primer for the detection of SNP TSC0060671
aaatttaaatgt

SEQ ID NO: 374404 - DNA, 12 bp, Artificial Sequence
  Oligonucleotide primer for the detection of SNP TSC0060672
atttaatattgg

SEQ ID NO: 374405 - DNA, 12 bp, Artificial Sequence
  Oligonucleotide primer for the detection of SNP TSC0060673
tacaaaaaatca

SEQ ID NO: 374406 - DNA, 12 bp, Artificial Sequence
  Oligonucleotide primer for the detection of SNP TSC0060673
atttaatttgat

SEQ ID NO: 374407 - DNA, 12 bp, Artificial Sequence
  Oligonucleotide primer for the detection of SNP TSC0060673
tctaacctaata

SEQ ID NO: 374408 - DNA, 12 bp, Artificial Sequence
  Oligonucleotide primer for the detection of SNP TSC0060673
aggagattattt

SEQ ID NO: 374409 - DNA, 12 bp, Artificial Sequence
  Oligonucleotide primer for the detection of SNP TSC0060674
ttataggtagag

SEQ ID NO: 374410 - DNA, 12 bp, Artificial Sequence
  Oligonucleotide primer for the detection of SNP TSC0060677
tttatatattaa

SEQ ID NO: 374411 - DNA, 12 bp, Artificial Sequence
  Oligonucleotide primer for the detection of SNP TSC0060677
tggagtagatat

SEQ ID NO: 374412 - DNA, 12 bp, Artificial Sequence
  Oligonucleotide primer for the detection of SNP TSC0060678
tatccaataata

SEQ ID NO: 374413 - DNA, 12 bp, Artificial Sequence
  Oligonucleotide primer for the detection of SNP TSC0060678
ttggtagttaaa

SEQ ID NO: 374414 - DNA, 12 bp, Artificial Sequence
  Oligonucleotide primer for the detection of SNP TSC0060680
ccaatacaccta

SEQ ID NO: 374415 - DNA, 12 bp, Artificial Sequence
  Oligonucleotide primer for the detection of SNP TSC0060680
aaaagagatttt

SEQ ID NO: 374416 - DNA, 12 bp, Artificial Sequence
  Oligonucleotide primer for the detection of SNP TSC0060680
aaaaaaatttca

SEQ ID NO: 374417 - DNA, 12 bp, Artificial Sequence
  Oligonucleotide primer for the detection of SNP TSC0060680
ttaatgtattta

SEQ ID NO: 374418 - DNA, 12 bp, Artificial Sequence
  Oligonucleotide primer for the detection of SNP TSC0060681
tacaaataaaac

SEQ ID NO: 374419 - DNA, 12 bp, Artificial Sequence
  Oligonucleotide primer for the detection of SNP TSC0060681
ttattttgagcg

SEQ ID NO: 374420 - DNA, 12 bp, Artificial Sequence
  Oligonucleotide primer for the detection of SNP TSC0060682
aactctcctcca

SEQ ID NO: 374421 - DNA, 12 bp, Artificial Sequence
  Oligonucleotide primer for the detection of SNP TSC0060682
attggaatatgg

SEQ ID NO: 374422 - DNA, 12 bp, Artificial Sequence
  Oligonucleotide primer for the detection of SNP TSC0060683
tacactcatatt

SEQ ID NO: 374423 - DNA, 12 bp, Artificial Sequence
  Oligonucleotide primer for the detection of SNP TSC0060684
ttggatattagt

SEQ ID NO: 374424 - DNA, 12 bp, Artificial Sequence
  Oligonucleotide primer for the detection of SNP TSC0060684
tcggatattagt

SEQ ID NO: 374425 - DNA, 12 bp, Artificial Sequence
  Oligonucleotide primer for the detection of SNP TSC0060684
tccgaatatcaa

SEQ ID NO: 374426 - DNA, 12 bp, Artificial Sequence
  Oligonucleotide primer for the detection of SNP TSC0060684
aaaagtttagtt

SEQ ID NO: 374427 - DNA, 12 bp, Artificial Sequence
  Oligonucleotide primer for the detection of SNP TSC0060685
agtttgtaatta

SEQ ID NO: 374428 - DNA, 12 bp, Artificial Sequence
  Oligonucleotide primer for the detection of SNP TSC0060685
aacctataatta

SEQ ID NO: 374429 - DNA, 12 bp, Artificial Sequence
  Oligonucleotide primer for the detection of SNP TSC0060686
aaaagtaatatg

SEQ ID NO: 374430 - DNA, 12 bp, Artificial Sequence
  Oligonucleotide primer for the detection of SNP TSC0060687
gtttattatttg

SEQ ID NO: 374431 - DNA, 12 bp, Artificial Sequence
  Oligonucleotide primer for the detection of SNP TSC0060689
tgtaaaataaaa

SEQ ID NO: 374432 - DNA, 12 bp, Artificial Sequence
  Oligonucleotide primer for the detection of SNP TSC0060689
gagattgttgtt

SEQ ID NO: 374433 - DNA, 12 bp, Artificial Sequence
  Oligonucleotide primer for the detection of SNP TSC0060690
aaattataattt

SEQ ID NO: 374434 - DNA, 12 bp, Artificial Sequence
  Oligonucleotide primer for the detection of SNP TSC0060690
aatgaggatatg

SEQ ID NO: 374435 - DNA, 12 bp, Artificial Sequence
  Oligonucleotide primer for the detection of SNP TSC0060690
aaattgtgattt

SEQ ID NO: 374436 - DNA, 12 bp, Artificial Sequence
  Oligonucleotide primer for the detection of SNP TSC0060696
aacacaacaaac

SEQ ID NO: 374437 - DNA, 12 bp, Artificial Sequence
  Oligonucleotide primer for the detection of SNP TSC0060696
aacgcaacaaac

SEQ ID NO: 374438 - DNA, 12 bp, Artificial Sequence
  Oligonucleotide primer for the detection of SNP TSC0060696
tgtttaggagag

SEQ ID NO: 374439 - DNA, 12 bp, Artificial Sequence
  Oligonucleotide primer for the detection of SNP TSC0060697
ctcacctcccta

SEQ ID NO: 374440 - DNA, 12 bp, Artificial Sequence
  Oligonucleotide primer for the detection of SNP TSC0060697
ctcgcctcccta

SEQ ID NO: 374441 - DNA, 12 bp, Artificial Sequence
  Oligonucleotide primer for the detection of SNP TSC0060697
taatgagggttt

SEQ ID NO: 374442 - DNA, 12 bp, Artificial Sequence
  Oligonucleotide primer for the detection of SNP TSC0060698
ttttaagtgaat

SEQ ID NO: 374443 - DNA, 12 bp, Artificial Sequence
  Oligonucleotide primer for the detection of SNP TSC0060704
ccaaaatcaata

SEQ ID NO: 374444 - DNA, 12 bp, Artificial Sequence
  Oligonucleotide primer for the detection of SNP TSC0060704
ccgaaatcaata

SEQ ID NO: 374445 - DNA, 12 bp, Artificial Sequence
  Oligonucleotide primer for the detection of SNP TSC0060704
actttaaaccta

SEQ ID NO: 374446 - DNA, 12 bp, Artificial Sequence
  Oligonucleotide primer for the detection of SNP TSC0060704
ttgggattaata

SEQ ID NO: 374447 - DNA, 12 bp, Artificial Sequence
  Oligonucleotide primer for the detection of SNP TSC0060704
tcgggattaata

SEQ ID NO: 374448 - DNA, 12 bp, Artificial Sequence
  Oligonucleotide primer for the detection of SNP TSC0060709
acaatttcttct

SEQ ID NO: 374449 - DNA, 12 bp, Artificial Sequence
  Oligonucleotide primer for the detection of SNP TSC0060709
attatatgtata

SEQ ID NO: 374450 - DNA, 12 bp, Artificial Sequence
  Oligonucleotide primer for the detection of SNP TSC0060712
tcgaattaatac

SEQ ID NO: 374451 - DNA, 12 bp, Artificial Sequence
  Oligonucleotide primer for the detection of SNP TSC0060714
taacataccact

SEQ ID NO: 374452 - DNA, 12 bp, Artificial Sequence
  Oligonucleotide primer for the detection of SNP TSC0060714
taacgtaccact

SEQ ID NO: 374453 - DNA, 12 bp, Artificial Sequence
  Oligonucleotide primer for the detection of SNP TSC0060714
tttagattggag

SEQ ID NO: 374454 - DNA, 12 bp, Artificial Sequence
  Oligonucleotide primer for the detection of SNP TSC0060715
atagatatttta

SEQ ID NO: 374455 - DNA, 12 bp, Artificial Sequence
  Oligonucleotide primer for the detection of SNP TSC0060717
tagagatttttt

SEQ ID NO: 374456 - DNA, 12 bp, Artificial Sequence
  Oligonucleotide primer for the detection of SNP TSC0060717
acaaaaactctc

SEQ ID NO: 374457 - DNA, 12 bp, Artificial Sequence
  Oligonucleotide primer for the detection of SNP TSC0060717
ggggagagaggt

SEQ ID NO: 374458 - DNA, 12 bp, Artificial Sequence
  Oligonucleotide primer for the detection of SNP TSC0060718
ttgattatttgt

SEQ ID NO: 374459 - DNA, 12 bp, Artificial Sequence
  Oligonucleotide primer for the detection of SNP TSC0060718
ctaatcacctac

SEQ ID NO: 374460 - DNA, 12 bp, Artificial Sequence
  Oligonucleotide primer for the detection of SNP TSC0060718
agataggatagg

SEQ ID NO: 374461 - DNA, 12 bp, Artificial Sequence
  Oligonucleotide primer for the detection of SNP TSC0060719
ccatccaaaccc

SEQ ID NO: 374462 - DNA, 12 bp, Artificial Sequence
  Oligonucleotide primer for the detection of SNP TSC0060719
tttggtaaaggt

SEQ ID NO: 374463 - DNA, 12 bp, Artificial Sequence
  Oligonucleotide primer for the detection of SNP TSC0060719
ttatttaggttc

SEQ ID NO: 374464 - DNA, 12 bp, Artificial Sequence
  Oligonucleotide primer for the detection of SNP TSC0060720
ttcaatcttatt

SEQ ID NO: 374465 - DNA, 12 bp, Artificial Sequence
  Oligonucleotide primer for the detection of SNP TSC0060720
tgtgtaatttag

SEQ ID NO: 374466 - DNA, 12 bp, Artificial Sequence
  Oligonucleotide primer for the detection of SNP TSC0060721
acaacattctat

SEQ ID NO: 374467 - DNA, 12 bp, Artificial Sequence
  Oligonucleotide primer for the detection of SNP TSC0060722
ttaaggggaatg

SEQ ID NO: 374468 - DNA, 12 bp, Artificial Sequence
  Oligonucleotide primer for the detection of SNP TSC0060724
aatcaaattcaa

SEQ ID NO: 374469 - DNA, 12 bp, Artificial Sequence
  Oligonucleotide primer for the detection of SNP TSC0060724
tcataaaattca

SEQ ID NO: 374470 - DNA, 12 bp, Artificial Sequence
  Oligonucleotide primer for the detection of SNP TSC0060724
ggttaaatttag

SEQ ID NO: 374471 - DNA, 12 bp, Artificial Sequence
  Oligonucleotide primer for the detection of SNP TSC0060726
aagatagaggaa

SEQ ID NO: 374472 - DNA, 12 bp, Artificial Sequence
  Oligonucleotide primer for the detection of SNP TSC0060727
caactacaaact

SEQ ID NO: 374473 - DNA, 12 bp, Artificial Sequence
  Oligonucleotide primer for the detection of SNP TSC0060727
tggtagaagtgt

SEQ ID NO: 374474 - DNA, 12 bp, Artificial Sequence
  Oligonucleotide primer for the detection of SNP TSC0060727
agttgtagattt

SEQ ID NO: 374475 - DNA, 12 bp, Artificial Sequence
  Oligonucleotide primer for the detection of SNP TSC0060727
agttgtagattc

SEQ ID NO: 374476 - DNA, 12 bp, Artificial Sequence
  Oligonucleotide primer for the detection of SNP TSC0060728
tttcattataca

SEQ ID NO: 374477 - DNA, 12 bp, Artificial Sequence
  Oligonucleotide primer for the detection of SNP TSC0060728
tttcgttataca

SEQ ID NO: 374478 - DNA, 12 bp, Artificial Sequence
  Oligonucleotide primer for the detection of SNP TSC0060728
gatggtttttat

SEQ ID NO: 374479 - DNA, 12 bp, Artificial Sequence
  Oligonucleotide primer for the detection of SNP TSC0060728
aaataattttca

SEQ ID NO: 374480 - DNA, 12 bp, Artificial Sequence
  Oligonucleotide primer for the detection of SNP TSC0060728
tttgttgtgtat

SEQ ID NO: 374481 - DNA, 12 bp, Artificial Sequence
  Oligonucleotide primer for the detection of SNP TSC0060728
ttcgttgtgtat

SEQ ID NO: 374482 - DNA, 12 bp, Artificial Sequence
  Oligonucleotide primer for the detection of SNP TSC0060729
ctataaatatat

SEQ ID NO: 374483 - DNA, 12 bp, Artificial Sequence
  Oligonucleotide primer for the detection of SNP TSC0060729
agtatatataga

SEQ ID NO: 374484 - DNA, 12 bp, Artificial Sequence
  Oligonucleotide primer for the detection of SNP TSC0060729
aacacacataaa

SEQ ID NO: 374485 - DNA, 12 bp, Artificial Sequence
  Oligonucleotide primer for the detection of SNP TSC0060729
ttataggtatat

SEQ ID NO: 374486 - DNA, 12 bp, Artificial Sequence
  Oligonucleotide primer for the detection of SNP TSC0060730
ctaaattttcaa

SEQ ID NO: 374487 - DNA, 12 bp, Artificial Sequence
  Oligonukleotid-Primer
tgatttaatttg

SEQ ID NO: 374488 - DNA, 12 bp, Artificial Sequence
  Oligonucleotide primer for the detection of SNP TSC0060731
taatatttcaaa

SEQ ID NO: 374489 - DNA, 12 bp, Artificial Sequence
  Oligonucleotide primer for the detection of SNP TSC0060731
atataagggagt

SEQ ID NO: 374490 - DNA, 12 bp, Artificial Sequence
  Oligonucleotide primer for the detection of SNP TSC0060731
tagtattttagg

SEQ ID NO: 374491 - DNA, 12 bp, Artificial Sequence
  Oligonukleotid-Primer
cccctttccctc

SEQ ID NO: 374492 - DNA, 12 bp, Artificial Sequence
  Oligonucleotide primer for the detection of SNP TSC0060737
agaggagttttg

SEQ ID NO: 374493 - DNA, 12 bp, Artificial Sequence
  Oligonucleotide primer for the detection of SNP TSC0060737
agaggagtttcg

SEQ ID NO: 374494 - DNA, 12 bp, Artificial Sequence
  Oligonucleotide primer for the detection of SNP TSC0060738
aatacaaacacc

SEQ ID NO: 374495 - DNA, 12 bp, Artificial Sequence
  Oligonucleotide primer for the detection of SNP TSC0060738
aatacgaacacc

SEQ ID NO: 374496 - DNA, 12 bp, Artificial Sequence
  Oligonucleotide primer for the detection of SNP TSC0060738
ttatggggtaag

SEQ ID NO: 374497 - DNA, 12 bp, Artificial Sequence
  Oligonucleotide primer for the detection of SNP TSC0060739
ccacaataaatt

SEQ ID NO: 374498 - DNA, 12 bp, Artificial Sequence
  Oligonucleotide primer for the detection of SNP TSC0060739
aatgagagagaa

SEQ ID NO: 374499 - DNA, 12 bp, Artificial Sequence
  Oligonucleotide primer for the detection of SNP TSC0060741
caacaaaatacc

SEQ ID NO: 374500 - DNA, 12 bp, Artificial Sequence
  Oligonucleotide primer for the detection of SNP TSC0060741
taagttattttg

SEQ ID NO: 374501 - DNA, 12 bp, Artificial Sequence
  Oligonucleotide primer for the detection of SNP TSC0060746
ggggaaaattgt

SEQ ID NO: 374502 - DNA, 12 bp, Artificial Sequence
  Oligonucleotide primer for the detection of SNP TSC0060746
gaaatagttaga

SEQ ID NO: 374503 - DNA, 12 bp, Artificial Sequence
  Oligonucleotide primer for the detection of SNP TSC0060748
ttaagtataagt

SEQ ID NO: 374504 - DNA, 12 bp, Artificial Sequence
  Oligonucleotide primer for the detection of SNP TSC0060748
ccaaatataaac

SEQ ID NO: 374505 - DNA, 12 bp, Artificial Sequence
  Oligonucleotide primer for the detection of SNP TSC0060748
atggaggaggga

SEQ ID NO: 374506 - DNA, 12 bp, Artificial Sequence
  Oligonucleotide primer for the detection of SNP TSC0060749
acttctttccta

SEQ ID NO: 374507 - DNA, 12 bp, Artificial Sequence
  Oligonucleotide primer for the detection of SNP TSC0060749
tttgggatgatt

SEQ ID NO: 374508 - DNA, 12 bp, Artificial Sequence
  Oligonucleotide primer for the detection of SNP TSC0060749
tttgggacgatt

SEQ ID NO: 374509 - DNA, 12 bp, Artificial Sequence
  Oligonucleotide primer for the detection of SNP TSC0060749
tctaaaacaatc

SEQ ID NO: 374510 - DNA, 12 bp, Artificial Sequence
  Oligonucleotide primer for the detection of SNP TSC0060749
tctaaaacgatc

SEQ ID NO: 374511 - DNA, 12 bp, Artificial Sequence
  Oligonucleotide primer for the detection of SNP TSC0060755
ataaaaacgcaa

SEQ ID NO: 374512 - DNA, 12 bp, Artificial Sequence
  Oligonucleotide primer for the detection of SNP TSC0060755
ccccacccctac

SEQ ID NO: 374513 - DNA, 12 bp, Artificial Sequence
  Oligonucleotide primer for the detection of SNP TSC0060755
ccccgcccctac

SEQ ID NO: 374514 - DNA, 12 bp, Artificial Sequence
  Oligonucleotide primer for the detection of SNP TSC0060755
gtagaggtgtag

SEQ ID NO: 374515 - DNA, 12 bp, Artificial Sequence
  Oligonucleotide primer for the detection of SNP TSC0060755
gtagaggcgtag

SEQ ID NO: 374516 - DNA, 12 bp, Artificial Sequence
  Oligonucleotide primer for the detection of SNP TSC0060756
tttgtggattaa

SEQ ID NO: 374517 - DNA, 12 bp, Artificial Sequence
  Oligonucleotide primer for the detection of SNP TSC0060756
cctataaaccaa

SEQ ID NO: 374518 - DNA, 12 bp, Artificial Sequence
  Oligonucleotide primer for the detection of SNP TSC0060756
ggggatggtttt

SEQ ID NO: 374519 - DNA, 12 bp, Artificial Sequence
  Oligonucleotide primer for the detection of SNP TSC0060760
taccttaaatac

SEQ ID NO: 374520 - DNA, 12 bp, Artificial Sequence
  Oligonucleotide primer for the detection of SNP TSC0060760
aaattatatttg

SEQ ID NO: 374521 - DNA, 12 bp, Artificial Sequence
  Oligonucleotide primer for the detection of SNP TSC0060760
tgttttgagtgt

SEQ ID NO: 374522 - DNA, 12 bp, Artificial Sequence
  Oligonucleotide primer for the detection of SNP TSC0060762
ccaacaaaataa

SEQ ID NO: 374523 - DNA, 12 bp, Artificial Sequence
  Oligonucleotide primer for the detection of SNP TSC0060762
aatatagatttt

SEQ ID NO: 374524 - DNA, 12 bp, Artificial Sequence
  Oligonucleotide primer for the detection of SNP TSC0060762
aacacaaatttt

SEQ ID NO: 374525 - DNA, 12 bp, Artificial Sequence
  Oligonucleotide primer for the detection of SNP TSC0060762
tagtagggtaat

SEQ ID NO: 374526 - DNA, 12 bp, Artificial Sequence
  Oligonucleotide primer for the detection of SNP TSC0060763
ttgattttgttg

SEQ ID NO: 374527 - DNA, 12 bp, Artificial Sequence
  Oligonucleotide primer for the detection of SNP TSC0060764
atttattatcaa

SEQ ID NO: 374528 - DNA, 12 bp, Artificial Sequence
  Oligonucleotide primer for the detection of SNP TSC0060764
gagtggtattat

SEQ ID NO: 374529 - DNA, 12 bp, Artificial Sequence
  Oligonucleotide primer for the detection of SNP TSC0005351
tttaacaaattt

SEQ ID NO: 374530 - DNA, 12 bp, Artificial Sequence
  Oligonucleotide primer for the detection of SNP TSC0005351
ttaatagttaaa

SEQ ID NO: 374531 - DNA, 12 bp, Artificial Sequence
  Oligonucleotide primer for the detection of SNP TSC0005352
tctatctatctt

SEQ ID NO: 374532 - DNA, 12 bp, Artificial Sequence
  Oligonucleotide primer for the detection of SNP TSC0005352
aatttgaattta

SEQ ID NO: 374533 - DNA, 12 bp, Artificial Sequence
  Oligonucleotide primer for the detection of SNP TSC0005352
aatctaaaccta

SEQ ID NO: 374534 - DNA, 12 bp, Artificial Sequence
  Oligonucleotide primer for the detection of SNP TSC0005606
aacaacaaaaat

SEQ ID NO: 374535 - DNA, 12 bp, Artificial Sequence
  Oligonucleotide primer for the detection of SNP TSC0005606
ataatttgatta

SEQ ID NO: 374536 - DNA, 12 bp, Artificial Sequence
  Oligonucleotide primer for the detection of SNP TSC0060767
atatcaaaacat

SEQ ID NO: 374537 - DNA, 12 bp, Artificial Sequence
  Oligonucleotide primer for the detection of SNP TSC0060767
  unsure (4): unknown base
ggtnatatattg

SEQ ID NO: 374538 - DNA, 12 bp, Artificial Sequence
  Oligonucleotide primer for the detection of SNP TSC0060768
actcaaatcttt

SEQ ID NO: 374539 - DNA, 12 bp, Artificial Sequence
  Oligonucleotide primer for the detection of SNP TSC0060768
gctcaaatcttt

SEQ ID NO: 374540 - DNA, 12 bp, Artificial Sequence
  Oligonucleotide primer for the detection of SNP TSC0060768
ttttaggaataa

SEQ ID NO: 374541 - DNA, 12 bp, Artificial Sequence
  Oligonucleotide primer for the detection of SNP TSC0060770
acactacccatc

SEQ ID NO: 374542 - DNA, 12 bp, Artificial Sequence
  Oligonucleotide primer for the detection of SNP TSC0060770
ttataggtggtg

SEQ ID NO: 374543 - DNA, 12 bp, Artificial Sequence
  Oligonucleotide primer for the detection of SNP TSC0060770
ccacaaataata

SEQ ID NO: 374544 - DNA, 12 bp, Artificial Sequence
  Oligonucleotide primer for the detection of SNP TSC0060770
atattgtttatc

SEQ ID NO: 374545 - DNA, 12 bp, Artificial Sequence
  Oligonucleotide primer for the detection of SNP TSC0060771
ccaaaaccctcc

SEQ ID NO: 374546 - DNA, 12 bp, Artificial Sequence
  Oligonucleotide primer for the detection of SNP TSC0060772
cattttttattc

SEQ ID NO: 374547 - DNA, 12 bp, Artificial Sequence
  Oligonucleotide primer for the detection of SNP TSC0060773
tttgggttttgt

SEQ ID NO: 374548 - DNA, 12 bp, Artificial Sequence
  Oligonucleotide primer for the detection of SNP TSC0060773
ctttaaacccta

SEQ ID NO: 374549 - DNA, 12 bp, Artificial Sequence
  Oligonucleotide primer for the detection of SNP TSC0060773
tgggaattaaag

SEQ ID NO: 374550 - DNA, 12 bp, Artificial Sequence
  Oligonucleotide primer for the detection of SNP TSC0060775
taaaatacaaca

SEQ ID NO: 374551 - DNA, 12 bp, Artificial Sequence
  Oligonucleotide primer for the detection of SNP TSC0060775
gtagttatgtgt

SEQ ID NO: 374552 - DNA, 12 bp, Artificial Sequence
  Oligonucleotide primer for the detection of SNP TSC0006684
ttatggtaagta

SEQ ID NO: 374553 - DNA, 12 bp, Artificial Sequence
  Oligonucleotide primer for the detection of SNP TSC0006684
taagatagtttt

SEQ ID NO: 374554 - DNA, 12 bp, Artificial Sequence
  Oligonucleotide primer for the detection of SNP TSC0007192
ttcctaacctta

SEQ ID NO: 374555 - DNA, 12 bp, Artificial Sequence
  Oligonucleotide primer for the detection of SNP TSC0007192
ttttttggttac

SEQ ID NO: 374556 - DNA, 12 bp, Artificial Sequence
  Oligonucleotide primer for the detection of SNP TSC0060777
acttacacctac

SEQ ID NO: 374557 - DNA, 12 bp, Artificial Sequence
  Oligonucleotide primer for the detection of SNP TSC0060777
acttacgcctac

SEQ ID NO: 374558 - DNA, 12 bp, Artificial Sequence
  Oligonucleotide primer for the detection of SNP TSC0060778
tcttcctacact

SEQ ID NO: 374559 - DNA, 12 bp, Artificial Sequence
  Oligonucleotide primer for the detection of SNP TSC0060778
tttggaattaaa

SEQ ID NO: 374560 - DNA, 12 bp, Artificial Sequence
  Oligonucleotide primer for the detection of SNP TSC0060779
ttttaaaatcaa

SEQ ID NO: 374561 - DNA, 12 bp, Artificial Sequence
  Oligonucleotide primer for the detection of SNP TSC0060779
ttttaaaatcga

SEQ ID NO: 374562 - DNA, 12 bp, Artificial Sequence
  Oligonucleotide primer for the detection of SNP TSC0060779
tatgattttatt

SEQ ID NO: 374563 - DNA, 12 bp, Artificial Sequence
  Oligonucleotide primer for the detection of SNP TSC0060779
cataactttacc

SEQ ID NO: 374564 - DNA, 12 bp, Artificial Sequence
  Oligonucleotide primer for the detection of SNP TSC0060779
ttttgagattga

SEQ ID NO: 374565 - DNA, 12 bp, Artificial Sequence
  Oligonucleotide primer for the detection of SNP TSC0060779
ttttgagatcga

SEQ ID NO: 374566 - DNA, 12 bp, Artificial Sequence
  Oligonucleotide primer for the detection of SNP TSC0060781
gagtatgattgt

SEQ ID NO: 374567 - DNA, 12 bp, Artificial Sequence
  Oligonucleotide primer for the detection of SNP TSC0060781
gagtacgattgt

SEQ ID NO: 374568 - DNA, 12 bp, Artificial Sequence
  Oligonucleotide primer for the detection of SNP TSC0060781
aaaacacaatta

SEQ ID NO: 374569 - DNA, 12 bp, Artificial Sequence
  Oligonucleotide primer for the detection of SNP TSC0060781
aaaacacgatta

SEQ ID NO: 374570 - DNA, 12 bp, Artificial Sequence
  Oligonucleotide primer for the detection of SNP TSC0060781
tgataaaattaa

SEQ ID NO: 374571 - DNA, 12 bp, Artificial Sequence
  Oligonucleotide primer for the detection of SNP TSC0060782
tgggtgagtttt

SEQ ID NO: 374572 - DNA, 12 bp, Artificial Sequence
  Oligonucleotide primer for the detection of SNP TSC0060782
taaataaattcc

SEQ ID NO: 374573 - DNA, 12 bp, Artificial Sequence
  Oligonucleotide primer for the detection of SNP TSC0060782
gatgtggagtaa

SEQ ID NO: 374574 - DNA, 12 bp, Artificial Sequence
  Oligonucleotide primer for the detection of SNP TSC0006074
cttctcaaataa

SEQ ID NO: 374575 - DNA, 12 bp, Artificial Sequence
  Oligonucleotide primer for the detection of SNP TSC0006074
ataaaaatgatt

SEQ ID NO: 374576 - DNA, 12 bp, Artificial Sequence
  Oligonucleotide primer for the detection of SNP TSC0006074
ttttttaagtaa

SEQ ID NO: 374577 - DNA, 12 bp, Artificial Sequence
  Oligonucleotide primer for the detection of SNP TSC0006075
cattattctact

SEQ ID NO: 374578 - DNA, 12 bp, Artificial Sequence
  Oligonucleotide primer for the detection of SNP TSC0006075
gagaaatgaaag

SEQ ID NO: 374579 - DNA, 12 bp, Artificial Sequence
  Oligonucleotide primer for the detection of SNP TSC0006076
caaattatcatc

SEQ ID NO: 374580 - DNA, 12 bp, Artificial Sequence
  Oligonucleotide primer for the detection of SNP TSC0006076
aaatataattgg

SEQ ID NO: 374581 - DNA, 12 bp, Artificial Sequence
  Oligonucleotide primer for the detection of SNP TSC0060783
aatttattattc

SEQ ID NO: 374582 - DNA, 12 bp, Artificial Sequence
  Oligonucleotide primer for the detection of SNP TSC0060783
tgtttagtaaat

SEQ ID NO: 374583 - DNA, 12 bp, Artificial Sequence
  Oligonucleotide primer for the detection of SNP TSC0060783
tactcaataaat

SEQ ID NO: 374584 - DNA, 12 bp, Artificial Sequence
  Oligonucleotide primer for the detection of SNP TSC0060783
agtttattattt

SEQ ID NO: 374585 - DNA, 12 bp, Artificial Sequence
  Oligonucleotide primer for the detection of SNP TSC0060785
cttaaaaatcta

SEQ ID NO: 374586 - DNA, 12 bp, Artificial Sequence
  Oligonucleotide primer for the detection of SNP TSC0060785
ttttgatttatt

SEQ ID NO: 374587 - DNA, 12 bp, Artificial Sequence
  Oligonucleotide primer for the detection of SNP TSC0060785
ttttaatctacc

SEQ ID NO: 374588 - DNA, 12 bp, Artificial Sequence
  Oligonucleotide primer for the detection of SNP TSC0060785
tttgagagttta

SEQ ID NO: 374589 - DNA, 12 bp, Artificial Sequence
  Oligonucleotide primer for the detection of SNP TSC0060787
tgtgtttgtagt

SEQ ID NO: 374590 - DNA, 12 bp, Artificial Sequence
  Oligonucleotide primer for the detection of SNP TSC0060787
aagatttgagta

SEQ ID NO: 374591 - DNA, 12 bp, Artificial Sequence
  Oligonucleotide primer for the detection of SNP TSC0060788
taaaatggagat

SEQ ID NO: 374592 - DNA, 12 bp, Artificial Sequence
  Oligonucleotide primer for the detection of SNP TSC0060789
atcccttcctaa

SEQ ID NO: 374593 - DNA, 12 bp, Artificial Sequence
  Oligonucleotide primer for the detection of SNP TSC0060795
aaacgtaaataa

SEQ ID NO: 374594 - DNA, 12 bp, Artificial Sequence
  Oligonucleotide primer for the detection of SNP TSC0060795
gaggttattttt

SEQ ID NO: 374595 - DNA, 12 bp, Artificial Sequence
  Oligonucleotide primer for the detection of SNP TSC0060795
aaaatcaccctc

SEQ ID NO: 374596 - DNA, 12 bp, Artificial Sequence
  Oligonucleotide primer for the detection of SNP TSC0060795
ttaggtgtagat

SEQ ID NO: 374597 - DNA, 12 bp, Artificial Sequence
  Oligonucleotide primer for the detection of SNP TSC0060795
ttaggcgtagat

SEQ ID NO: 374598 - DNA, 12 bp, Artificial Sequence
  Oligonucleotide primer for the detection of SNP TSC0060796
atcacaataaac

SEQ ID NO: 374599 - DNA, 12 bp, Artificial Sequence
  Oligonucleotide primer for the detection of SNP TSC0060796
atcgcaataaac

SEQ ID NO: 374600 - DNA, 12 bp, Artificial Sequence
  Oligonucleotide primer for the detection of SNP TSC0060796
gtcacaataaac

SEQ ID NO: 374601 - DNA, 12 bp, Artificial Sequence
  Oligonucleotide primer for the detection of SNP TSC0060796
gtcgcaataaac

SEQ ID NO: 374602 - DNA, 12 bp, Artificial Sequence
  Oligonucleotide primer for the detection of SNP TSC0060796
catcctatacta

SEQ ID NO: 374603 - DNA, 12 bp, Artificial Sequence
  Oligonucleotide primer for the detection of SNP TSC0060796
gttgtagtggat

SEQ ID NO: 374604 - DNA, 12 bp, Artificial Sequence
  Oligonucleotide primer for the detection of SNP TSC0060796
gtcgtagtggat

SEQ ID NO: 374605 - DNA, 12 bp, Artificial Sequence
  Oligonucleotide primer for the detection of SNP TSC0060796
gttgtagtggac

SEQ ID NO: 374606 - DNA, 12 bp, Artificial Sequence
  Oligonucleotide primer for the detection of SNP TSC0060796
gtcgtagtggac

SEQ ID NO: 374607 - DNA, 12 bp, Artificial Sequence
  Oligonucleotide primer for the detection of SNP TSC0060797
atgtttggaatt

SEQ ID NO: 374608 - DNA, 12 bp, Artificial Sequence
  Oligonucleotide primer for the detection of SNP TSC0060797
ggaaaggagaga

SEQ ID NO: 374609 - DNA, 12 bp, Artificial Sequence
  Oligonucleotide primer for the detection of SNP TSC0060798
aagaatttttag

SEQ ID NO: 374610 - DNA, 12 bp, Artificial Sequence
  Oligonucleotide primer for the detection of SNP TSC0060800
ctacaaaccatt

SEQ ID NO: 374611 - DNA, 12 bp, Artificial Sequence
  Oligonucleotide primer for the detection of SNP TSC0060800
ttataggttatt

SEQ ID NO: 374612 - DNA, 12 bp, Artificial Sequence
  Oligonucleotide primer for the detection of SNP TSC0060801
atactcactctt

SEQ ID NO: 374613 - DNA, 12 bp, Artificial Sequence
  Oligonucleotide primer for the detection of SNP TSC0060801
ggaatgagagta

SEQ ID NO: 374614 - DNA, 12 bp, Artificial Sequence
  Oligonucleotide primer for the detection of SNP TSC0060802
ctcattttatcc

SEQ ID NO: 374615 - DNA, 12 bp, Artificial Sequence
  Oligonucleotide primer for the detection of SNP TSC0060802
aaagaagtgaaa

SEQ ID NO: 374616 - DNA, 12 bp, Artificial Sequence
  Oligonucleotide primer for the detection of SNP TSC0060803
tgtttatattta

SEQ ID NO: 374617 - DNA, 12 bp, Artificial Sequence
  Oligonucleotide primer for the detection of SNP TSC0060806
attcgttgattt

SEQ ID NO: 374618 - DNA, 12 bp, Artificial Sequence
  Oligonucleotide primer for the detection of SNP TSC0060806
attcattaattt

SEQ ID NO: 374619 - DNA, 12 bp, Artificial Sequence
  Oligonucleotide primer for the detection of SNP TSC0060806
attcgttaattt

SEQ ID NO: 374620 - DNA, 12 bp, Artificial Sequence
  Oligonucleotide primer for the detection of SNP TSC0060808
aaataaccgaaa

SEQ ID NO: 374621 - DNA, 12 bp, Artificial Sequence
  Oligonucleotide primer for the detection of SNP TSC0060808
tgaaatgtgtta

SEQ ID NO: 374622 - DNA, 12 bp, Artificial Sequence
  Oligonucleotide primer for the detection of SNP TSC0060808
taaaatatatta

SEQ ID NO: 374623 - DNA, 12 bp, Artificial Sequence
  Oligonucleotide primer for the detection of SNP TSC0060808
aagtagttgaaa

SEQ ID NO: 374624 - DNA, 12 bp, Artificial Sequence
  Oligonucleotide primer for the detection of SNP TSC0060808
aagtagtcgaaa

SEQ ID NO: 374625 - DNA, 12 bp, Artificial Sequence
  Oligonucleotide primer for the detection of SNP TSC0060809
cttccatctaaa

SEQ ID NO: 374626 - DNA, 12 bp, Artificial Sequence
  Oligonucleotide primer for the detection of SNP TSC0060809
ttgttaatttta

SEQ ID NO: 374627 - DNA, 12 bp, Artificial Sequence
  Oligonucleotide primer for the detection of SNP TSC0060809
ctaccaacctta

SEQ ID NO: 374628 - DNA, 12 bp, Artificial Sequence
  Oligonucleotide primer for the detection of SNP TSC0060810
atgtgttatttt

SEQ ID NO: 374629 - DNA, 12 bp, Artificial Sequence
  Oligonucleotide primer for the detection of SNP TSC0060810
gtagaaaagtag

SEQ ID NO: 374630 - DNA, 12 bp, Artificial Sequence
  Oligonucleotide primer for the detection of SNP TSC0060812
attataggagtt

SEQ ID NO: 374631 - DNA, 12 bp, Artificial Sequence
  Oligonucleotide primer for the detection of SNP TSC0060816
actaattattta

SEQ ID NO: 374632 - DNA, 12 bp, Artificial Sequence
  Oligonucleotide primer for the detection of SNP TSC0060816
attttagagatt

SEQ ID NO: 374633 - DNA, 12 bp, Artificial Sequence
  Oligonucleotide primer for the detection of SNP TSC0007221
attgttgtgtag

SEQ ID NO: 374634 - DNA, 12 bp, Artificial Sequence
  Oligonucleotide primer for the detection of SNP TSC0007221
attattatataa

SEQ ID NO: 374635 - DNA, 12 bp, Artificial Sequence
  Oligonucleotide primer for the detection of SNP TSC0007221
atggatggtaat

SEQ ID NO: 374636 - DNA, 12 bp, Artificial Sequence
  Oligonucleotide primer for the detection of SNP TSC0060817
aaacacaattca

SEQ ID NO: 374637 - DNA, 12 bp, Artificial Sequence
  Oligonucleotide primer for the detection of SNP TSC0060817
tatcatatctta

SEQ ID NO: 374638 - DNA, 12 bp, Artificial Sequence
  Oligonucleotide primer for the detection of SNP TSC0060817
aagtataattta

SEQ ID NO: 374639 - DNA, 12 bp, Artificial Sequence
  Oligonucleotide primer for the detection of SNP TSC0060818
caacctatcatt

SEQ ID NO: 374640 - DNA, 12 bp, Artificial Sequence
  Oligonucleotide primer for the detection of SNP TSC0060818
gttaggtgagtg

SEQ ID NO: 374641 - DNA, 12 bp, Artificial Sequence
  Oligonucleotide primer for the detection of SNP TSC0060819
aattatactatt

SEQ ID NO: 374642 - DNA, 12 bp, Artificial Sequence
  Oligonucleotide primer for the detection of SNP TSC0060819
caacctcaaaat

SEQ ID NO: 374643 - DNA, 12 bp, Artificial Sequence
  Oligonucleotide primer for the detection of SNP TSC0060821
cattcccttata

SEQ ID NO: 374644 - DNA, 12 bp, Artificial Sequence
  Oligonucleotide primer for the detection of SNP TSC0060821
attggtatattt

SEQ ID NO: 374645 - DNA, 12 bp, Artificial Sequence
  Oligonucleotide primer for the detection of SNP TSC0060821
attaacacattc

SEQ ID NO: 374646 - DNA, 12 bp, Artificial Sequence
  Oligonucleotide primer for the detection of SNP TSC0010219
attttctcttac

SEQ ID NO: 374647 - DNA, 12 bp, Artificial Sequence
  Oligonucleotide primer for the detection of SNP TSC0010220
ggtattagtaat

SEQ ID NO: 374648 - DNA, 12 bp, Artificial Sequence
  Oligonucleotide primer for the detection of SNP TSC0010220
aacattaataat

SEQ ID NO: 374649 - DNA, 12 bp, Artificial Sequence
  Oligonucleotide primer for the detection of SNP TSC0010220
taatagataatg

SEQ ID NO: 374650 - DNA, 12 bp, Artificial Sequence
  Oligonucleotide primer for the detection of SNP TSC0060825
aagtgtataatt

SEQ ID NO: 374651 - DNA, 12 bp, Artificial Sequence
  Oligonucleotide primer for the detection of SNP TSC0060825
aatacacaatca

SEQ ID NO: 374652 - DNA, 12 bp, Artificial Sequence
  Oligonucleotide primer for the detection of SNP TSC0060825
gtgggatgaggt

SEQ ID NO: 374653 - DNA, 12 bp, Artificial Sequence
  Oligonucleotide primer for the detection of SNP TSC0060826
tacgtatatata

SEQ ID NO: 374654 - DNA, 12 bp, Artificial Sequence
  Oligonucleotide primer for the detection of SNP TSC0060826
tacgtgtgtgtg

SEQ ID NO: 374655 - DNA, 12 bp, Artificial Sequence
  Oligonucleotide primer for the detection of SNP TSC0060827
ataggaaatata

SEQ ID NO: 374656 - DNA, 12 bp, Artificial Sequence
  Oligonucleotide primer for the detection of SNP TSC0060827
tggaaatgttta

SEQ ID NO: 374657 - DNA, 12 bp, Artificial Sequence
  Oligonucleotide primer for the detection of SNP TSC0060828
gtgatgggaaaa

SEQ ID NO: 374658 - DNA, 12 bp, Artificial Sequence
  Oligonucleotide primer for the detection of SNP TSC0060828
gcgatgggaaaa

SEQ ID NO: 374659 - DNA, 12 bp, Artificial Sequence
  Oligonucleotide primer for the detection of SNP TSC0060829
aaaacctaaact

SEQ ID NO: 374660 - DNA, 12 bp, Artificial Sequence
  Oligonucleotide primer for the detection of SNP TSC0060829
taaaggtaatag

SEQ ID NO: 374661 - DNA, 12 bp, Artificial Sequence
  Oligonucleotide primer for the detection of SNP TSC0060831
ttatctaatata

SEQ ID NO: 374662 - DNA, 12 bp, Artificial Sequence
  Oligonucleotide primer for the detection of SNP TSC0060831
tataaatgtttt

SEQ ID NO: 374663 - DNA, 12 bp, Artificial Sequence
  Oligonucleotide primer for the detection of SNP TSC0060831
ttgtttggtatg

SEQ ID NO: 374664 - DNA, 12 bp, Artificial Sequence
  Oligonucleotide primer for the detection of SNP TSC0060832
tcttaaactcta

SEQ ID NO: 374665 - DNA, 12 bp, Artificial Sequence
  Oligonucleotide primer for the detection of SNP TSC0060832
gtttgaaatagt

SEQ ID NO: 374666 - DNA, 12 bp, Artificial Sequence
  Oligonucleotide primer for the detection of SNP TSC0060832
atttaaaacaat

SEQ ID NO: 374667 - DNA, 12 bp, Artificial Sequence
  Oligonucleotide primer for the detection of SNP TSC0060832
ttttgagttttg

SEQ ID NO: 374668 - DNA, 12 bp, Artificial Sequence
  Oligonucleotide primer for the detection of SNP TSC0060834
atacaaactcat

SEQ ID NO: 374669 - DNA, 12 bp, Artificial Sequence
  Oligonucleotide primer for the detection of SNP TSC0060834
gaatttaaaatg

SEQ ID NO: 374670 - DNA, 12 bp, Artificial Sequence
  Oligonucleotide primer for the detection of SNP TSC0060835
ttccaccctatt

SEQ ID NO: 374671 - DNA, 12 bp, Artificial Sequence
  Oligonucleotide primer for the detection of SNP TSC0060835
tgattgttaaat

SEQ ID NO: 374672 - DNA, 12 bp, Artificial Sequence
  Oligonukleotid-Primer
taattattaaat

SEQ ID NO: 374673 - DNA, 12 bp, Artificial Sequence
  Oligonucleotide primer for the detection of SNP TSC0060838
cactacaaacct

SEQ ID NO: 374674 - DNA, 12 bp, Artificial Sequence
  Oligonucleotide primer for the detection of SNP TSC0060838
agttaggaattt

SEQ ID NO: 374675 - DNA, 12 bp, Artificial Sequence
  Oligonucleotide primer for the detection of SNP TSC0060838
attgtagatttt

SEQ ID NO: 374676 - DNA, 12 bp, Artificial Sequence
  Oligonucleotide primer for the detection of SNP TSC0060838
attgtagatttc

SEQ ID NO: 374677 - DNA, 12 bp, Artificial Sequence
  Oligonucleotide primer for the detection of SNP TSC0010191
aaaaatcattaa

SEQ ID NO: 374678 - DNA, 12 bp, Artificial Sequence
  Oligonucleotide primer for the detection of SNP TSC0060839
aaatcaaacatc

SEQ ID NO: 374679 - DNA, 12 bp, Artificial Sequence
  Oligonucleotide primer for the detection of SNP TSC0060839
taagtggatatg

SEQ ID NO: 374680 - DNA, 12 bp, Artificial Sequence
  Oligonukleotid-Primer
attcctatttct

SEQ ID NO: 374681 - DNA, 12 bp, Artificial Sequence
  Oligonucleotide primer for the detection of SNP TSC0060840
ggttataaaatg

SEQ ID NO: 374682 - DNA, 12 bp, Artificial Sequence
  Oligonucleotide primer for the detection of SNP TSC0060840
ggttataaaacg

SEQ ID NO: 374683 - DNA, 12 bp, Artificial Sequence
  Oligonucleotide primer for the detection of SNP TSC0060840
aactataaaaca

SEQ ID NO: 374684 - DNA, 12 bp, Artificial Sequence
  Oligonucleotide primer for the detection of SNP TSC0060840
aactataaaacg

SEQ ID NO: 374685 - DNA, 12 bp, Artificial Sequence
  Oligonucleotide primer for the detection of SNP TSC0060841
taatctccaccc

SEQ ID NO: 374686 - DNA, 12 bp, Artificial Sequence
  Oligonucleotide primer for the detection of SNP TSC0060842
gatttttttaat

SEQ ID NO: 374687 - DNA, 12 bp, Artificial Sequence
  Oligonucleotide primer for the detection of SNP TSC0060842
aacttccttaac

SEQ ID NO: 374688 - DNA, 12 bp, Artificial Sequence
  Oligonucleotide primer for the detection of SNP TSC0060842
ttagtggtagag

SEQ ID NO: 374689 - DNA, 12 bp, Artificial Sequence
  Oligonucleotide primer for the detection of SNP TSC0060843
caaacccacaaa

SEQ ID NO: 374690 - DNA, 12 bp, Artificial Sequence
  Oligonucleotide primer for the detection of SNP TSC0060843
tttgaagggata

SEQ ID NO: 374691 - DNA, 12 bp, Artificial Sequence
  Oligonucleotide primer for the detection of SNP TSC0060843
ttaggtttataa

SEQ ID NO: 374692 - DNA, 12 bp, Artificial Sequence
  Oligonucleotide primer for the detection of SNP TSC0060844
taatcctacaaa

SEQ ID NO: 374693 - DNA, 12 bp, Artificial Sequence
  Oligonucleotide primer for the detection of SNP TSC0060844
gtgagtaaaagt

SEQ ID NO: 374694 - DNA, 12 bp, Artificial Sequence
  Oligonucleotide primer for the detection of SNP TSC0060844
agttttataaat

SEQ ID NO: 374695 - DNA, 12 bp, Artificial Sequence
  Oligonucleotide primer for the detection of SNP TSC0009204
cacataattaat

SEQ ID NO: 374696 - DNA, 12 bp, Artificial Sequence
  Oligonucleotide primer for the detection of SNP TSC0009204
gtatttgtttta

SEQ ID NO: 374697 - DNA, 12 bp, Artificial Sequence
  Oligonucleotide primer for the detection of SNP TSC0060846
gataggaagtat

SEQ ID NO: 374698 - DNA, 12 bp, Artificial Sequence
  Oligonucleotide primer for the detection of SNP TSC0060846
gaataaagggtt

SEQ ID NO: 374699 - DNA, 12 bp, Artificial Sequence
  Oligonucleotide primer for the detection of SNP TSC0060846
gaataaagggtc

SEQ ID NO: 374700 - DNA, 12 bp, Artificial Sequence
  Oligonucleotide primer for the detection of SNP TSC0060848
agaataaagaaa

SEQ ID NO: 374701 - DNA, 12 bp, Artificial Sequence
  Oligonucleotide primer for the detection of SNP TSC0060849
tactctttctac

SEQ ID NO: 374702 - DNA, 12 bp, Artificial Sequence
  Oligonucleotide primer for the detection of SNP TSC0010652
ttccacaaatta

SEQ ID NO: 374703 - DNA, 12 bp, Artificial Sequence
  Oligonucleotide primer for the detection of SNP TSC0010653
atacaccaacaa

SEQ ID NO: 374704 - DNA, 12 bp, Artificial Sequence
  Oligonucleotide primer for the detection of SNP TSC0010653
gggtttggattt

SEQ ID NO: 374705 - DNA, 12 bp, Artificial Sequence
  Oligonucleotide primer for the detection of SNP TSC0010653
ctaaatttaaat

SEQ ID NO: 374706 - DNA, 12 bp, Artificial Sequence
  Oligonucleotide primer for the detection of SNP TSC0010653
gtgtattaataa

SEQ ID NO: 374707 - DNA, 12 bp, Artificial Sequence
  Oligonucleotide primer for the detection of SNP TSC0060851
tttttttattct

SEQ ID NO: 374708 - DNA, 12 bp, Artificial Sequence
  Oligonucleotide primer for the detection of SNP TSC0060851
tttgatagagat

SEQ ID NO: 374709 - DNA, 12 bp, Artificial Sequence
  Oligonucleotide primer for the detection of SNP TSC0060852
tttggtaattta

SEQ ID NO: 374710 - DNA, 12 bp, Artificial Sequence
  Oligonucleotide primer for the detection of SNP TSC0060856
acctacaaaaac

SEQ ID NO: 374711 - DNA, 12 bp, Artificial Sequence
  Oligonucleotide primer for the detection of SNP TSC0060856
acctacgaaaac

SEQ ID NO: 374712 - DNA, 12 bp, Artificial Sequence
  Oligonucleotide primer for the detection of SNP TSC0060856
tttggtttagag

SEQ ID NO: 374713 - DNA, 12 bp, Artificial Sequence
  Oligonucleotide primer for the detection of SNP TSC0060857
ctctctctactt

SEQ ID NO: 374714 - DNA, 12 bp, Artificial Sequence
  Oligonucleotide primer for the detection of SNP TSC0005535
taaaatgagaga

SEQ ID NO: 374715 - DNA, 12 bp, Artificial Sequence
  Oligonucleotide primer for the detection of SNP TSC0005535
ttagtaagtata

SEQ ID NO: 374716 - DNA, 12 bp, Artificial Sequence
  Oligonucleotide primer for the detection of SNP TSC0060858
tacaaaattaac

SEQ ID NO: 374717 - DNA, 12 bp, Artificial Sequence
  Oligonucleotide primer for the detection of SNP TSC0060858
tgcgttattata

SEQ ID NO: 374718 - DNA, 12 bp, Artificial Sequence
  Oligonucleotide primer for the detection of SNP TSC0060858
tacgccaccaca

SEQ ID NO: 374719 - DNA, 12 bp, Artificial Sequence
  Oligonucleotide primer for the detection of SNP TSC0060858
tataaaattagt

SEQ ID NO: 374720 - DNA, 12 bp, Artificial Sequence
  Oligonucleotide primer for the detection of SNP TSC0060859
caaccaaaataa

SEQ ID NO: 374721 - DNA, 12 bp, Artificial Sequence
  Oligonucleotide primer for the detection of SNP TSC0060859
caaccgaaataa

SEQ ID NO: 374722 - DNA, 12 bp, Artificial Sequence
  Oligonucleotide primer for the detection of SNP TSC0060859
aatgagttaggt

SEQ ID NO: 374723 - DNA, 12 bp, Artificial Sequence
  Oligonucleotide primer for the detection of SNP TSC0060859
atagttgaggtg

SEQ ID NO: 374724 - DNA, 12 bp, Artificial Sequence
  Oligonucleotide primer for the detection of SNP TSC0060859
atagtcgaggtg

SEQ ID NO: 374725 - DNA, 12 bp, Artificial Sequence
  Oligonucleotide primer for the detection of SNP TSC0060860
taaacaaactaa

SEQ ID NO: 374726 - DNA, 12 bp, Artificial Sequence
  Oligonucleotide primer for the detection of SNP TSC0060860
acctcactaatc

SEQ ID NO: 374727 - DNA, 12 bp, Artificial Sequence
  Oligonucleotide primer for the detection of SNP TSC0060860
gtgagtaaattg

SEQ ID NO: 374728 - DNA, 12 bp, Artificial Sequence
  Oligonucleotide primer for the detection of SNP TSC0060863
attcactaaaca

SEQ ID NO: 374729 - DNA, 12 bp, Artificial Sequence
  Oligonucleotide primer for the detection of SNP TSC0060863
tggtggtataat

SEQ ID NO: 374730 - DNA, 12 bp, Artificial Sequence
  Oligonucleotide primer for the detection of SNP TSC0060863
tttattaagtat

SEQ ID NO: 374731 - DNA, 12 bp, Artificial Sequence
  Oligonucleotide primer for the detection of SNP TSC0060864
atttatctctca

SEQ ID NO: 374732 - DNA, 12 bp, Artificial Sequence
  Oligonucleotide primer for the detection of SNP TSC0060864
taggttataggt

SEQ ID NO: 374733 - DNA, 12 bp, Artificial Sequence
  Oligonucleotide primer for the detection of SNP TSC0060864
caaatcacaaat

SEQ ID NO: 374734 - DNA, 12 bp, Artificial Sequence
  Oligonucleotide primer for the detection of SNP TSC0060866
catcctcaaata

SEQ ID NO: 374735 - DNA, 12 bp, Artificial Sequence
  Oligonucleotide primer for the detection of SNP TSC0060866
gttgttaggaag

SEQ ID NO: 374736 - DNA, 12 bp, Artificial Sequence
  Oligonucleotide primer for the detection of SNP TSC0060866
tatttttaagta

SEQ ID NO: 374737 - DNA, 12 bp, Artificial Sequence
  Oligonucleotide primer for the detection of SNP TSC0060867
taaatctacaaa

SEQ ID NO: 374738 - DNA, 12 bp, Artificial Sequence
  Oligonucleotide primer for the detection of SNP TSC0060867
ataggtattatg

SEQ ID NO: 374739 - DNA, 12 bp, Artificial Sequence
  Oligonucleotide primer for the detection of SNP TSC0060867
caaacactataa

SEQ ID NO: 374740 - DNA, 12 bp, Artificial Sequence
  Oligonucleotide primer for the detection of SNP TSC0060867
ttggatttatag

SEQ ID NO: 374741 - DNA, 12 bp, Artificial Sequence
  Oligonucleotide primer for the detection of SNP TSC0060868
aatttcacaaat

SEQ ID NO: 374742 - DNA, 12 bp, Artificial Sequence
  Oligonucleotide primer for the detection of SNP TSC0060868
tatatataggta

SEQ ID NO: 374743 - DNA, 12 bp, Artificial Sequence
  Oligonucleotide primer for the detection of SNP TSC0060869
tcctattacatt

SEQ ID NO: 374744 - DNA, 12 bp, Artificial Sequence
  Oligonucleotide primer for the detection of SNP TSC0060869
aaattatagaga

SEQ ID NO: 374745 - DNA, 12 bp, Artificial Sequence
  Oligonucleotide primer for the detection of SNP TSC0060870
tcaaattttata

SEQ ID NO: 374746 - DNA, 12 bp, Artificial Sequence
  Oligonucleotide primer for the detection of SNP TSC0060870
aagattttagag

SEQ ID NO: 374747 - DNA, 12 bp, Artificial Sequence
  Oligonucleotide primer for the detection of SNP TSC0060870
aaatcccaaaaa

SEQ ID NO: 374748 - DNA, 12 bp, Artificial Sequence
  Oligonucleotide primer for the detection of SNP TSC0060871
cattcaataaat

SEQ ID NO: 374749 - DNA, 12 bp, Artificial Sequence
  Oligonucleotide primer for the detection of SNP TSC0060871
agtaatgaatta

SEQ ID NO: 374750 - DNA, 12 bp, Artificial Sequence
  Oligonucleotide primer for the detection of SNP TSC0060872
cttccaccatat

SEQ ID NO: 374751 - DNA, 12 bp, Artificial Sequence
  Oligonucleotide primer for the detection of SNP TSC0060872
gaagtttaggaa

SEQ ID NO: 374752 - DNA, 12 bp, Artificial Sequence
  Oligonucleotide primer for the detection of SNP TSC0060873
ttcttcttccaa

SEQ ID NO: 374753 - DNA, 12 bp, Artificial Sequence
  Oligonucleotide primer for the detection of SNP TSC0060873
ttgaattatatt

SEQ ID NO: 374754 - DNA, 12 bp, Artificial Sequence
  Oligonucleotide primer for the detection of SNP TSC0060873
cctaaatcacac

SEQ ID NO: 374755 - DNA, 12 bp, Artificial Sequence
  Oligonucleotide primer for the detection of SNP TSC0060874
caaatacacatt

SEQ ID NO: 374756 - DNA, 12 bp, Artificial Sequence
  Oligonucleotide primer for the detection of SNP TSC0060874
tgtaataaaggg

SEQ ID NO: 374757 - DNA, 12 bp, Artificial Sequence
  Oligonucleotide primer for the detection of SNP TSC0010444
tccaattaaacc

SEQ ID NO: 374758 - DNA, 12 bp, Artificial Sequence
  Oligonucleotide primer for the detection of SNP TSC0010444
tttttgttaatg

SEQ ID NO: 374759 - DNA, 12 bp, Artificial Sequence
  Oligonucleotide primer for the detection of SNP TSC0010445
tatggtttttat

SEQ ID NO: 374760 - DNA, 12 bp, Artificial Sequence
  Oligonucleotide primer for the detection of SNP TSC0010445
cataacctctat

SEQ ID NO: 374761 - DNA, 12 bp, Artificial Sequence
  Oligonucleotide primer for the detection of SNP TSC0010445
ataggtgaggag

SEQ ID NO: 374762 - DNA, 12 bp, Artificial Sequence
  Oligonucleotide primer for the detection of SNP TSC0010445
ataggcgaggag

SEQ ID NO: 374763 - DNA, 12 bp, Artificial Sequence
  Oligonucleotide primer for the detection of SNP TSC0010446
atattccaaacc

SEQ ID NO: 374764 - DNA, 12 bp, Artificial Sequence
  Oligonucleotide primer for the detection of SNP TSC0010446
actaaaacacaa

SEQ ID NO: 374765 - DNA, 12 bp, Artificial Sequence
  Oligonucleotide primer for the detection of SNP TSC0060877
aggatatgtttt

SEQ ID NO: 374766 - DNA, 12 bp, Artificial Sequence
  Oligonucleotide primer for the detection of SNP TSC0060877
aaaacatacctc

SEQ ID NO: 374767 - DNA, 12 bp, Artificial Sequence
  Oligonucleotide primer for the detection of SNP TSC0060877
ttaattttggag

SEQ ID NO: 374768 - DNA, 12 bp, Artificial Sequence
  Oligonucleotide primer for the detection of SNP TSC0060878
atggttatgtat

SEQ ID NO: 374769 - DNA, 12 bp, Artificial Sequence
  Oligonucleotide primer for the detection of SNP TSC0060878
acggttatgtat

SEQ ID NO: 374770 - DNA, 12 bp, Artificial Sequence
  Oligonucleotide primer for the detection of SNP TSC0060878
acaatcatatac

SEQ ID NO: 374771 - DNA, 12 bp, Artificial Sequence
  Oligonucleotide primer for the detection of SNP TSC0060878
acgatcatatac

SEQ ID NO: 374772 - DNA, 12 bp, Artificial Sequence
  Oligonucleotide primer for the detection of SNP TSC0060879
aataacctaaca

SEQ ID NO: 374773 - DNA, 12 bp, Artificial Sequence
  Oligonucleotide primer for the detection of SNP TSC0060879
attttttattgc

SEQ ID NO: 374774 - DNA, 12 bp, Artificial Sequence
  Oligonucleotide primer for the detection of SNP TSC0060879
aattctttacta

SEQ ID NO: 374775 - DNA, 12 bp, Artificial Sequence
  Oligonucleotide primer for the detection of SNP TSC0060879
gatgatttaata

SEQ ID NO: 374776 - DNA, 12 bp, Artificial Sequence
  Oligonucleotide primer for the detection of SNP TSC0060880
atattctttttt

SEQ ID NO: 374777 - DNA, 12 bp, Artificial Sequence
  Oligonucleotide primer for the detection of SNP TSC0060881
aggaagtaagat

SEQ ID NO: 374778 - DNA, 12 bp, Artificial Sequence
  Oligonucleotide primer for the detection of SNP TSC0060881
tgggattatgaa

SEQ ID NO: 374779 - DNA, 12 bp, Artificial Sequence
  Oligonucleotide primer for the detection of SNP TSC0060882
acatttaacatc

SEQ ID NO: 374780 - DNA, 12 bp, Artificial Sequence
  Oligonucleotide primer for the detection of SNP TSC0060882
tgttaggttatc

SEQ ID NO: 374781 - DNA, 12 bp, Artificial Sequence
  Oligonucleotide primer for the detection of SNP TSC0060882
ttattaaatcat

SEQ ID NO: 374782 - DNA, 12 bp, Artificial Sequence
  Oligonucleotide primer for the detection of SNP TSC0060883
tagatttttgaa

SEQ ID NO: 374783 - DNA, 12 bp, Artificial Sequence
  Oligonucleotide primer for the detection of SNP TSC0060884
gtggattgtatt

SEQ ID NO: 374784 - DNA, 12 bp, Artificial Sequence
  Oligonucleotide primer for the detection of SNP TSC0060884
aattaaggagga

SEQ ID NO: 374785 - DNA, 12 bp, Artificial Sequence
  Oligonucleotide primer for the detection of SNP TSC0060885
actttcccacct

SEQ ID NO: 374786 - DNA, 12 bp, Artificial Sequence
  Oligonucleotide primer for the detection of SNP TSC0060885
ttttggagattg

SEQ ID NO: 374787 - DNA, 12 bp, Artificial Sequence
  Oligonucleotide primer for the detection of SNP TSC0060887
gtgttgaaaggt

SEQ ID NO: 374788 - DNA, 12 bp, Artificial Sequence
  Oligonucleotide primer for the detection of SNP TSC0060887
ggaagaagttta

SEQ ID NO: 374789 - DNA, 12 bp, Artificial Sequence
  Oligonucleotide primer for the detection of SNP TSC0060889
acctaaactctc

SEQ ID NO: 374790 - DNA, 12 bp, Artificial Sequence
  Oligonucleotide primer for the detection of SNP TSC0060889
taagagttgttt

SEQ ID NO: 374791 - DNA, 12 bp, Artificial Sequence
  Oligonucleotide primer for the detection of SNP TSC0060891
attaaagaaaga

SEQ ID NO: 374792 - DNA, 12 bp, Artificial Sequence
  Oligonucleotide primer for the detection of SNP TSC0060892
ttatacctcaaa

SEQ ID NO: 374793 - DNA, 12 bp, Artificial Sequence
  Oligonucleotide primer for the detection of SNP TSC0060892
cacaaataccct

SEQ ID NO: 374794 - DNA, 12 bp, Artificial Sequence
  Oligonucleotide primer for the detection of SNP TSC0060895
gaaattagagaa

SEQ ID NO: 374795 - DNA, 12 bp, Artificial Sequence
  Oligonucleotide primer for the detection of SNP TSC0060895
ttaaaggaaaag

SEQ ID NO: 374796 - DNA, 12 bp, Artificial Sequence
  Oligonucleotide primer for the detection of SNP TSC0060896
atatactcaacc

SEQ ID NO: 374797 - DNA, 12 bp, Artificial Sequence
  Oligonucleotide primer for the detection of SNP TSC0060896
tatgttgttaaa

SEQ ID NO: 374798 - DNA, 12 bp, Artificial Sequence
  Oligonucleotide primer for the detection of SNP TSC0060897
ggtttgtattat

SEQ ID NO: 374799 - DNA, 12 bp, Artificial Sequence
  Oligonucleotide primer for the detection of SNP TSC0060897
attttatagttt

SEQ ID NO: 374800 - DNA, 12 bp, Artificial Sequence
  Oligonucleotide primer for the detection of SNP TSC0060898
actttatttatc

SEQ ID NO: 374801 - DNA, 12 bp, Artificial Sequence
  Oligonucleotide primer for the detection of SNP TSC0060898
agaaatagataa

SEQ ID NO: 374802 - DNA, 12 bp, Artificial Sequence
  Oligonucleotide primer for the detection of SNP TSC0060899
ttataaccccaa

SEQ ID NO: 374803 - DNA, 12 bp, Artificial Sequence
  Oligonucleotide primer for the detection of SNP TSC0060899
gtgagaattttt

SEQ ID NO: 374804 - DNA, 12 bp, Artificial Sequence
  Oligonucleotide primer for the detection of SNP TSC0060899
aataaaaatctc

SEQ ID NO: 374805 - DNA, 12 bp, Artificial Sequence
  Oligonucleotide primer for the detection of SNP TSC0060899
tgtggttttaac

SEQ ID NO: 374806 - DNA, 12 bp, Artificial Sequence
  Oligonucleotide primer for the detection of SNP TSC0060900
tggattttatat

SEQ ID NO: 374807 - DNA, 12 bp, Artificial Sequence
  Oligonucleotide primer for the detection of SNP TSC0060902
ttataaatacaa

SEQ ID NO: 374808 - DNA, 12 bp, Artificial Sequence
  Oligonucleotide primer for the detection of SNP TSC0060902
tttggttataga

SEQ ID NO: 374809 - DNA, 12 bp, Artificial Sequence
  Oligonucleotide primer for the detection of SNP TSC0060902
attatgaatata

SEQ ID NO: 374810 - DNA, 12 bp, Artificial Sequence
  Oligonucleotide primer for the detection of SNP TSC0060909
ctaaataccaac

SEQ ID NO: 374811 - DNA, 12 bp, Artificial Sequence
  Oligonucleotide primer for the detection of SNP TSC0060909
ggattttggaaa

SEQ ID NO: 374812 - DNA, 12 bp, Artificial Sequence
  Oligonucleotide primer for the detection of SNP TSC0060910
tataaccatacc

SEQ ID NO: 374813 - DNA, 12 bp, Artificial Sequence
  Oligonucleotide primer for the detection of SNP TSC0060910
tataaccgtacc

SEQ ID NO: 374814 - DNA, 12 bp, Artificial Sequence
  Oligonucleotide primer for the detection of SNP TSC0060910
tgtgattgtgtt

SEQ ID NO: 374815 - DNA, 12 bp, Artificial Sequence
  Oligonucleotide primer for the detection of SNP TSC0060910
tgtgatcgtgtt

SEQ ID NO: 374816 - DNA, 12 bp, Artificial Sequence
  Oligonucleotide primer for the detection of SNP TSC0060911
actaaatcccac

SEQ ID NO: 374817 - DNA, 12 bp, Artificial Sequence
  Oligonucleotide primer for the detection of SNP TSC0060912
aataatagttat

SEQ ID NO: 374818 - DNA, 12 bp, Artificial Sequence
  Oligonucleotide primer for the detection of SNP TSC0060912
aataataatcat

SEQ ID NO: 374819 - DNA, 12 bp, Artificial Sequence
  Oligonucleotide primer for the detection of SNP TSC0060912
taggtttaggag

SEQ ID NO: 374820 - DNA, 12 bp, Artificial Sequence
  Oligonucleotide primer for the detection of SNP TSC0060913
aaaactccattc

SEQ ID NO: 374821 - DNA, 12 bp, Artificial Sequence
  Oligonucleotide primer for the detection of SNP TSC0060913
ttgttgtttttg

SEQ ID NO: 374822 - DNA, 12 bp, Artificial Sequence
  Oligonucleotide primer for the detection of SNP TSC0060913
ttattattccta

SEQ ID NO: 374823 - DNA, 12 bp, Artificial Sequence
  Oligonucleotide primer for the detection of SNP TSC0060913
aagattttattt

SEQ ID NO: 374824 - DNA, 12 bp, Artificial Sequence
  Oligonucleotide primer for the detection of SNP TSC0060917
tatatattttct

SEQ ID NO: 374825 - DNA, 12 bp, Artificial Sequence
  Oligonucleotide primer for the detection of SNP TSC0060917
aagaatttatta

SEQ ID NO: 374826 - DNA, 12 bp, Artificial Sequence
  Oligonucleotide primer for the detection of SNP TSC0060917
aaaaattcatca

SEQ ID NO: 374827 - DNA, 12 bp, Artificial Sequence
  Oligonucleotide primer for the detection of SNP TSC0060917
gtatattttttt

SEQ ID NO: 374828 - DNA, 12 bp, Artificial Sequence
  Oligonucleotide primer for the detection of SNP TSC0060918
cctatccatatt

SEQ ID NO: 374829 - DNA, 12 bp, Artificial Sequence
  Oligonucleotide primer for the detection of SNP TSC0060920
tatatggaggta

SEQ ID NO: 374830 - DNA, 12 bp, Artificial Sequence
  Oligonucleotide primer for the detection of SNP TSC0060920
tacataaaaata

SEQ ID NO: 374831 - DNA, 12 bp, Artificial Sequence
  Oligonucleotide primer for the detection of SNP TSC0060920
atgagaaagggg

SEQ ID NO: 374832 - DNA, 12 bp, Artificial Sequence
  Oligonucleotide primer for the detection of SNP TSC0060920
acgagaaagggg

SEQ ID NO: 374833 - DNA, 12 bp, Artificial Sequence
  Oligonucleotide primer for the detection of SNP TSC0060921
aataaccccttt

SEQ ID NO: 374834 - DNA, 12 bp, Artificial Sequence
  Oligonucleotide primer for the detection of SNP TSC0060921
tttcctttcaaa

SEQ ID NO: 374835 - DNA, 12 bp, Artificial Sequence
  Oligonucleotide primer for the detection of SNP TSC0060921
ggtggttttttt

SEQ ID NO: 374836 - DNA, 12 bp, Artificial Sequence
  Oligonucleotide primer for the detection of SNP TSC0060922
aatgatgtttaa

SEQ ID NO: 374837 - DNA, 12 bp, Artificial Sequence
  Oligonucleotide primer for the detection of SNP TSC0060923
cctcctccctaa

SEQ ID NO: 374838 - DNA, 12 bp, Artificial Sequence
  Oligonucleotide primer for the detection of SNP TSC0060923
agaaatttgtag

SEQ ID NO: 374839 - DNA, 12 bp, Artificial Sequence
  Oligonucleotide primer for the detection of SNP TSC0060923
aaaaatttacaa

SEQ ID NO: 374840 - DNA, 12 bp, Artificial Sequence
  Oligonucleotide primer for the detection of SNP TSC0060924
acttcctaatat

SEQ ID NO: 374841 - DNA, 12 bp, Artificial Sequence
  Oligonucleotide primer for the detection of SNP TSC0060925
acataataaaat

SEQ ID NO: 374842 - DNA, 12 bp, Artificial Sequence
  Oligonucleotide primer for the detection of SNP TSC0060925
tgatttggagtg

SEQ ID NO: 374843 - DNA, 12 bp, Artificial Sequence
  Oligonucleotide primer for the detection of SNP TSC0060925
cgatttggagtg

SEQ ID NO: 374844 - DNA, 12 bp, Artificial Sequence
  Oligonucleotide primer for the detection of SNP TSC0060925
tgatttggagcg

SEQ ID NO: 374845 - DNA, 12 bp, Artificial Sequence
  Oligonucleotide primer for the detection of SNP TSC0060925
cgatttggagcg

SEQ ID NO: 374846 - DNA, 12 bp, Artificial Sequence
  Oligonucleotide primer for the detection of SNP TSC0060926
cacttccacaaa

SEQ ID NO: 374847 - DNA, 12 bp, Artificial Sequence
  Oligonucleotide primer for the detection of SNP TSC0060926
gtgatttttaat

SEQ ID NO: 374848 - DNA, 12 bp, Artificial Sequence
  Oligonucleotide primer for the detection of SNP TSC0060926
ataatttttaac

SEQ ID NO: 374849 - DNA, 12 bp, Artificial Sequence
  Oligonucleotide primer for the detection of SNP TSC0060931
aaaatttccaat

SEQ ID NO: 374850 - DNA, 12 bp, Artificial Sequence
  Oligonucleotide primer for the detection of SNP TSC0060931
tgataatttaag

SEQ ID NO: 374851 - DNA, 12 bp, Artificial Sequence
  Oligonucleotide primer for the detection of SNP TSC0060935
ttatttgttagt

SEQ ID NO: 374852 - DNA, 12 bp, Artificial Sequence
  Oligonucleotide primer for the detection of SNP TSC0060935
cacttaccaaca

SEQ ID NO: 374853 - DNA, 12 bp, Artificial Sequence
  Oligonucleotide primer for the detection of SNP TSC0060935
agggatttaggt

SEQ ID NO: 374854 - DNA, 12 bp, Artificial Sequence
  Oligonucleotide primer for the detection of SNP TSC0060938
ctaaattaactt

SEQ ID NO: 374855 - DNA, 12 bp, Artificial Sequence
  Oligonucleotide primer for the detection of SNP TSC0060938
tatgagatggaa

SEQ ID NO: 374856 - DNA, 12 bp, Artificial Sequence
  Oligonucleotide primer for the detection of SNP TSC0060939
aaacatttaaac

SEQ ID NO: 374857 - DNA, 12 bp, Artificial Sequence
  Oligonucleotide primer for the detection of SNP TSC0060939
caattttctcta

SEQ ID NO: 374858 - DNA, 12 bp, Artificial Sequence
  Oligonucleotide primer for the detection of SNP TSC0060939
ggatatttgagt

SEQ ID NO: 374859 - DNA, 12 bp, Artificial Sequence
  Oligonucleotide primer for the detection of SNP TSC0060940
tccaccccactc

SEQ ID NO: 374860 - DNA, 12 bp, Artificial Sequence
  Oligonucleotide primer for the detection of SNP TSC0060940
tgttgaatttgg

SEQ ID NO: 374861 - DNA, 12 bp, Artificial Sequence
  Oligonucleotide primer for the detection of SNP TSC0060940
tgtcgaatttgg

SEQ ID NO: 374862 - DNA, 12 bp, Artificial Sequence
  Oligonucleotide primer for the detection of SNP TSC0060941
aatagtgttttg

SEQ ID NO: 374863 - DNA, 12 bp, Artificial Sequence
  Oligonucleotide primer for the detection of SNP TSC0060941
taatattctaaa

SEQ ID NO: 374864 - DNA, 12 bp, Artificial Sequence
  Oligonucleotide primer for the detection of SNP TSC0060941
tatattatggtg

SEQ ID NO: 374865 - DNA, 12 bp, Artificial Sequence
  Oligonucleotide primer for the detection of SNP TSC0060942
aaacaatcttac

SEQ ID NO: 374866 - DNA, 12 bp, Artificial Sequence
  Oligonucleotide primer for the detection of SNP TSC0060942
tctccttaatta

SEQ ID NO: 374867 - DNA, 12 bp, Artificial Sequence
  Oligonucleotide primer for the detection of SNP TSC0060942
aagtagttttat

SEQ ID NO: 374868 - DNA, 12 bp, Artificial Sequence
  Oligonucleotide primer for the detection of SNP TSC0060944
aaggagtaggta

SEQ ID NO: 374869 - DNA, 12 bp, Artificial Sequence
  Oligonucleotide primer for the detection of SNP TSC0060945
gtagttttagta

SEQ ID NO: 374870 - DNA, 12 bp, Artificial Sequence
  Oligonucleotide primer for the detection of SNP TSC0060945
aataaaaagaaa

SEQ ID NO: 374871 - DNA, 12 bp, Artificial Sequence
  Oligonucleotide primer for the detection of SNP TSC0060946
aaacattaacaa

SEQ ID NO: 374872 - DNA, 12 bp, Artificial Sequence
  Oligonucleotide primer for the detection of SNP TSC0060946
acatctccctca

SEQ ID NO: 374873 - DNA, 12 bp, Artificial Sequence
  Oligonucleotide primer for the detection of SNP TSC0060946
aggtattagtaa

SEQ ID NO: 374874 - DNA, 12 bp, Artificial Sequence
  Oligonucleotide primer for the detection of SNP TSC0060947
aaaacctaacat

SEQ ID NO: 374875 - DNA, 12 bp, Artificial Sequence
  Oligonucleotide primer for the detection of SNP TSC0060949
acattacaattt

SEQ ID NO: 374876 - DNA, 12 bp, Artificial Sequence
  Oligonucleotide primer for the detection of SNP TSC0060949
tatagtgaaata

SEQ ID NO: 374877 - DNA, 12 bp, Artificial Sequence
  Oligonucleotide primer for the detection of SNP TSC0060950
ttaaattttcta

SEQ ID NO: 374878 - DNA, 12 bp, Artificial Sequence
  Oligonucleotide primer for the detection of SNP TSC0060950
ttattttataaa

SEQ ID NO: 374879 - DNA, 12 bp, Artificial Sequence
  Oligonucleotide primer for the detection of SNP TSC0060951
tttagtaatggt

SEQ ID NO: 374880 - DNA, 12 bp, Artificial Sequence
  Oligonucleotide primer for the detection of SNP TSC0060951
tctaataataat

SEQ ID NO: 374881 - DNA, 12 bp, Artificial Sequence
  Oligonucleotide primer for the detection of SNP TSC0060951
tgaaaaaaagtt

SEQ ID NO: 374882 - DNA, 12 bp, Artificial Sequence
  Oligonucleotide primer for the detection of SNP TSC0060952
tatttctccata

SEQ ID NO: 374883 - DNA, 12 bp, Artificial Sequence
  Oligonucleotide primer for the detection of SNP TSC0060953
aatttttccatt

SEQ ID NO: 374884 - DNA, 12 bp, Artificial Sequence
  Oligonucleotide primer for the detection of SNP TSC0060953
gagagtttttaa

SEQ ID NO: 374885 - DNA, 12 bp, Artificial Sequence
  Oligonucleotide primer for the detection of SNP TSC0060956
agtttttcgagt

SEQ ID NO: 374886 - DNA, 12 bp, Artificial Sequence
  Oligonucleotide primer for the detection of SNP TSC0060956
aacctcccgaat

SEQ ID NO: 374887 - DNA, 12 bp, Artificial Sequence
  Oligonucleotide primer for the detection of SNP TSC0060957
accactaattta

SEQ ID NO: 374888 - DNA, 12 bp, Artificial Sequence
  Oligonucleotide primer for the detection of SNP TSC0060957
gttattgattta

SEQ ID NO: 374889 - DNA, 12 bp, Artificial Sequence
  Oligonucleotide primer for the detection of SNP TSC0060960
aaccataataac

SEQ ID NO: 374890 - DNA, 12 bp, Artificial Sequence
  Oligonucleotide primer for the detection of SNP TSC0060960
aaccgtaataac

SEQ ID NO: 374891 - DNA, 12 bp, Artificial Sequence
  Oligonucleotide primer for the detection of SNP TSC0060960
ccaccaccccca

SEQ ID NO: 374892 - DNA, 12 bp, Artificial Sequence
  Oligonucleotide primer for the detection of SNP TSC0060960
agttgtgatggt

SEQ ID NO: 374893 - DNA, 12 bp, Artificial Sequence
  Oligonucleotide primer for the detection of SNP TSC0060960
agtcgtgatggt

SEQ ID NO: 374894 - DNA, 12 bp, Artificial Sequence
  Oligonucleotide primer for the detection of SNP TSC0060960
agttgtgatggc

SEQ ID NO: 374895 - DNA, 12 bp, Artificial Sequence
  Oligonucleotide primer for the detection of SNP TSC0060960
agtcgtgatggc

SEQ ID NO: 374896 - DNA, 12 bp, Artificial Sequence
  Oligonucleotide primer for the detection of SNP TSC0060961
acatataaaact

SEQ ID NO: 374897 - DNA, 12 bp, Artificial Sequence
  Oligonucleotide primer for the detection of SNP TSC0060961
tattctccccaa

SEQ ID NO: 374898 - DNA, 12 bp, Artificial Sequence
  Oligonucleotide primer for the detection of SNP TSC0060961
tatgtgaggttt

SEQ ID NO: 374899 - DNA, 12 bp, Artificial Sequence
  Oligonucleotide primer for the detection of SNP TSC0060961
tatgtgaggttc

SEQ ID NO: 374900 - DNA, 12 bp, Artificial Sequence
  Oligonucleotide primer for the detection of SNP TSC0060962
acaaactacctc

SEQ ID NO: 374901 - DNA, 12 bp, Artificial Sequence
  Oligonucleotide primer for the detection of SNP TSC0060962
aaagaggagtga

SEQ ID NO: 374902 - DNA, 12 bp, Artificial Sequence
  Oligonucleotide primer for the detection of SNP TSC0060965
aattattattcc

SEQ ID NO: 374903 - DNA, 12 bp, Artificial Sequence
  Oligonucleotide primer for the detection of SNP TSC0060967
cactactcaata

SEQ ID NO: 374904 - DNA, 12 bp, Artificial Sequence
  Oligonucleotide primer for the detection of SNP TSC0060967
tgaaatgaaatt

SEQ ID NO: 374905 - DNA, 12 bp, Artificial Sequence
  Oligonucleotide primer for the detection of SNP TSC0060967
tgaaatgaaatc

SEQ ID NO: 374906 - DNA, 12 bp, Artificial Sequence
  Oligonucleotide primer for the detection of SNP TSC0060967
gtattgtttagt

SEQ ID NO: 374907 - DNA, 12 bp, Artificial Sequence
  Oligonucleotide primer for the detection of SNP TSC0060968
tctcaatcttaa

SEQ ID NO: 374908 - DNA, 12 bp, Artificial Sequence
  Oligonucleotide primer for the detection of SNP TSC0060968
aaggataagaat

SEQ ID NO: 374909 - DNA, 12 bp, Artificial Sequence
  Oligonucleotide primer for the detection of SNP TSC0060969
ataatactatcc

SEQ ID NO: 374910 - DNA, 12 bp, Artificial Sequence
  Oligonucleotide primer for the detection of SNP TSC0060971
caaataacatct

SEQ ID NO: 374911 - DNA, 12 bp, Artificial Sequence
  Oligonucleotide primer for the detection of SNP TSC0060971
caaataacgtct

SEQ ID NO: 374912 - DNA, 12 bp, Artificial Sequence
  Oligonucleotide primer for the detection of SNP TSC0060971
ttggtatttatg

SEQ ID NO: 374913 - DNA, 12 bp, Artificial Sequence
  Oligonucleotide primer for the detection of SNP TSC0060977
aacaactattat

SEQ ID NO: 374914 - DNA, 12 bp, Artificial Sequence
  Oligonucleotide primer for the detection of SNP TSC0060977
ttggttatgata

SEQ ID NO: 374915 - DNA, 12 bp, Artificial Sequence
  Oligonucleotide primer for the detection of SNP TSC0060978
agggtggtagaa

SEQ ID NO: 374916 - DNA, 12 bp, Artificial Sequence
  Oligonucleotide primer for the detection of SNP TSC0060979
gaaatggggata

SEQ ID NO: 374917 - DNA, 12 bp, Artificial Sequence
  Oligonucleotide primer for the detection of SNP TSC0060980
aaccaatattca

SEQ ID NO: 374918 - DNA, 12 bp, Artificial Sequence
  Oligonucleotide primer for the detection of SNP TSC0060980
ttgatatttatt

SEQ ID NO: 374919 - DNA, 12 bp, Artificial Sequence
  Oligonucleotide primer for the detection of SNP TSC0060981
atattaacttat

SEQ ID NO: 374920 - DNA, 12 bp, Artificial Sequence
  Oligonucleotide primer for the detection of SNP TSC0060982
aattcattttca

SEQ ID NO: 374921 - DNA, 12 bp, Artificial Sequence
  Oligonucleotide primer for the detection of SNP TSC0060982
gaattataaaaa

SEQ ID NO: 374922 - DNA, 12 bp, Artificial Sequence
  Oligonucleotide primer for the detection of SNP TSC0060983
tgattttatagt

SEQ ID NO: 374923 - DNA, 12 bp, Artificial Sequence
  Oligonucleotide primer for the detection of SNP TSC0060983
cgattttatagt

SEQ ID NO: 374924 - DNA, 12 bp, Artificial Sequence
  Oligonucleotide primer for the detection of SNP TSC0060983
ccgactctataa

SEQ ID NO: 374925 - DNA, 12 bp, Artificial Sequence
  Oligonucleotide primer for the detection of SNP TSC0060983
ttgtatgttttt

SEQ ID NO: 374926 - DNA, 12 bp, Artificial Sequence
  Oligonucleotide primer for the detection of SNP TSC0060983
ttgtatgttttc

SEQ ID NO: 374927 - DNA, 12 bp, Artificial Sequence
  Oligonucleotide primer for the detection of SNP TSC0060985
ttatagatattt

SEQ ID NO: 374928 - DNA, 12 bp, Artificial Sequence
  Oligonucleotide primer for the detection of SNP TSC0060985
ctacaaacactt

SEQ ID NO: 374929 - DNA, 12 bp, Artificial Sequence
  Oligonukleotid-Primer
tttggagagata

SEQ ID NO: 374930 - DNA, 12 bp, Artificial Sequence
  Oligonucleotide primer for the detection of SNP TSC0060986
atacttcaataa

SEQ ID NO: 374931 - DNA, 12 bp, Artificial Sequence
  Oligonucleotide primer for the detection of SNP TSC0060986
ggggggaaaggt

SEQ ID NO: 374932 - DNA, 12 bp, Artificial Sequence
  Oligonucleotide primer for the detection of SNP TSC0060987
tctacctttccc

SEQ ID NO: 374933 - DNA, 12 bp, Artificial Sequence
  Oligonukleotid-Primer
ggttgaattagg

SEQ ID NO: 374934 - DNA, 12 bp, Artificial Sequence
  Oligonucleotide primer for the detection of SNP TSC0060989
aaaaccatctct

SEQ ID NO: 374935 - DNA, 12 bp, Artificial Sequence
  Oligonucleotide primer for the detection of SNP TSC0060990
ttcaaatcttca

SEQ ID NO: 374936 - DNA, 12 bp, Artificial Sequence
  Oligonucleotide primer for the detection of SNP TSC0060990
taagagagttag

SEQ ID NO: 374937 - DNA, 12 bp, Artificial Sequence
  Oligonucleotide primer for the detection of SNP TSC0060993
atatactatttt

SEQ ID NO: 374938 - DNA, 12 bp, Artificial Sequence
  Oligonucleotide primer for the detection of SNP TSC0060993
tgaaaaaagtta

SEQ ID NO: 374939 - DNA, 12 bp, Artificial Sequence
  Oligonucleotide primer for the detection of SNP TSC0060995
tactcaatctaa

SEQ ID NO: 374940 - DNA, 12 bp, Artificial Sequence
  Oligonucleotide primer for the detection of SNP TSC0060995
ggtatttagatt

SEQ ID NO: 374941 - DNA, 12 bp, Artificial Sequence
  Oligonucleotide primer for the detection of SNP TSC0060995
tgtttagtttga

SEQ ID NO: 374942 - DNA, 12 bp, Artificial Sequence
  Oligonucleotide primer for the detection of SNP TSC0060996
tctacaatacat

SEQ ID NO: 374943 - DNA, 12 bp, Artificial Sequence
  Oligonucleotide primer for the detection of SNP TSC0060996
tgttgtgggggg

SEQ ID NO: 374944 - DNA, 12 bp, Artificial Sequence
  Oligonucleotide primer for the detection of SNP TSC0060997
taaatcctttcc

SEQ ID NO: 374945 - DNA, 12 bp, Artificial Sequence
  Oligonucleotide primer for the detection of SNP TSC0060997
tgttggtattta

SEQ ID NO: 374946 - DNA, 12 bp, Artificial Sequence
  Oligonucleotide primer for the detection of SNP TSC0060998
aatcaaaaaatt

SEQ ID NO: 374947 - DNA, 12 bp, Artificial Sequence
  Oligonucleotide primer for the detection of SNP TSC0060998
gattaaaaaatt

SEQ ID NO: 374948 - DNA, 12 bp, Artificial Sequence
  Oligonucleotide primer for the detection of SNP TSC0060999
ctaaaacctaat

SEQ ID NO: 374949 - DNA, 12 bp, Artificial Sequence
  Oligonucleotide primer for the detection of SNP TSC0060999
gaaagtatttaa

SEQ ID NO: 374950 - DNA, 12 bp, Artificial Sequence
  Oligonucleotide primer for the detection of SNP TSC0061000
aaaaatccttaa

SEQ ID NO: 374951 - DNA, 12 bp, Artificial Sequence
  Oligonucleotide primer for the detection of SNP TSC0061001
caaatttatata

SEQ ID NO: 374952 - DNA, 12 bp, Artificial Sequence
  Oligonucleotide primer for the detection of SNP TSC0061001
aagtgttgaaag

SEQ ID NO: 374953 - DNA, 12 bp, Artificial Sequence
  Oligonucleotide primer for the detection of SNP TSC0061001
taggtttatgtg

SEQ ID NO: 374954 - DNA, 12 bp, Artificial Sequence
  Oligonucleotide primer for the detection of SNP TSC0061009
tccatacctcta

SEQ ID NO: 374955 - DNA, 12 bp, Artificial Sequence
  Oligonucleotide primer for the detection of SNP TSC0061009
gaagaattattt

SEQ ID NO: 374956 - DNA, 12 bp, Artificial Sequence
  Oligonucleotide primer for the detection of SNP TSC0061009
gaagaattattc

SEQ ID NO: 374957 - DNA, 12 bp, Artificial Sequence
  Oligonucleotide primer for the detection of SNP TSC0061010
cccttcaaaatc

SEQ ID NO: 374958 - DNA, 12 bp, Artificial Sequence
  Oligonucleotide primer for the detection of SNP TSC0061010
tccttatcttaa

SEQ ID NO: 374959 - DNA, 12 bp, Artificial Sequence
  Oligonucleotide primer for the detection of SNP TSC0061011
tacccaaaaaat

SEQ ID NO: 374960 - DNA, 12 bp, Artificial Sequence
  Oligonucleotide primer for the detection of SNP TSC0061011
gggttagggatg

SEQ ID NO: 374961 - DNA, 12 bp, Artificial Sequence
  Oligonucleotide primer for the detection of SNP TSC0061011
tatttagggggt

SEQ ID NO: 374962 - DNA, 12 bp, Artificial Sequence
  Oligonucleotide primer for the detection of SNP TSC0061012
taaacaatttct

SEQ ID NO: 374963 - DNA, 12 bp, Artificial Sequence
  Oligonucleotide primer for the detection of SNP TSC0061012
ttggatgtttgt

SEQ ID NO: 374964 - DNA, 12 bp, Artificial Sequence
  Oligonucleotide primer for the detection of SNP TSC0007304
aaaatcttttct

SEQ ID NO: 374965 - DNA, 12 bp, Artificial Sequence
  Oligonucleotide primer for the detection of SNP TSC0007304
tattttggaata

SEQ ID NO: 374966 - DNA, 12 bp, Artificial Sequence
  Oligonucleotide primer for the detection of SNP TSC0007305
gaaggattttaa

SEQ ID NO: 374967 - DNA, 12 bp, Artificial Sequence
  Oligonucleotide primer for the detection of SNP TSC0007305
taaggaaaatat

SEQ ID NO: 374968 - DNA, 12 bp, Artificial Sequence
  Oligonucleotide primer for the detection of SNP TSC0007306
acaacaacttct

SEQ ID NO: 374969 - DNA, 12 bp, Artificial Sequence
  Oligonucleotide primer for the detection of SNP TSC0007306
gattttatgtag

SEQ ID NO: 374970 - DNA, 12 bp, Artificial Sequence
  Oligonucleotide primer for the detection of SNP TSC0007395
aaataacacttc

SEQ ID NO: 374971 - DNA, 12 bp, Artificial Sequence
  Oligonucleotide primer for the detection of SNP TSC0007395
gagatggtttta

SEQ ID NO: 374972 - DNA, 12 bp, Artificial Sequence
  Oligonucleotide primer for the detection of SNP TSC0007395
aaaataactcta

SEQ ID NO: 374973 - DNA, 12 bp, Artificial Sequence
  Oligonukleotid-Primer
gagtaatatttt

SEQ ID NO: 374974 - DNA, 12 bp, Artificial Sequence
  Oligonucleotide primer for the detection of SNP TSC0061013
ccatcacaaccc

SEQ ID NO: 374975 - DNA, 12 bp, Artificial Sequence
  Oligonucleotide primer for the detection of SNP TSC0061013
ccgtcacaaccc

SEQ ID NO: 374976 - DNA, 12 bp, Artificial Sequence
  Oligonucleotide primer for the detection of SNP TSC0061013
cttatctaaaaa

SEQ ID NO: 374977 - DNA, 12 bp, Artificial Sequence
  Oligonucleotide primer for the detection of SNP TSC0061013
tcgttataattt

SEQ ID NO: 374978 - DNA, 12 bp, Artificial Sequence
  Oligonucleotide primer for the detection of SNP TSC0061014
aaatatttatgg

SEQ ID NO: 374979 - DNA, 12 bp, Artificial Sequence
  Oligonucleotide primer for the detection of SNP TSC0006175
cattcaactctt

SEQ ID NO: 374980 - DNA, 12 bp, Artificial Sequence
  Oligonucleotide primer for the detection of SNP TSC0006175
ttttaaagtagt

SEQ ID NO: 374981 - DNA, 12 bp, Artificial Sequence
  Oligonucleotide primer for the detection of SNP TSC0006175
ctccaaaataac

SEQ ID NO: 374982 - DNA, 12 bp, Artificial Sequence
  Oligonucleotide primer for the detection of SNP TSC0061022
ttataagtattt

SEQ ID NO: 374983 - DNA, 12 bp, Artificial Sequence
  Oligonucleotide primer for the detection of SNP TSC0061022
cacaaacattta

SEQ ID NO: 374984 - DNA, 12 bp, Artificial Sequence
  Oligonucleotide primer for the detection of SNP TSC0061023
atgatgggggag

SEQ ID NO: 374985 - DNA, 12 bp, Artificial Sequence
  Oligonukleotid-Primer
accgcttaaatt

SEQ ID NO: 374986 - DNA, 12 bp, Artificial Sequence
  Oligonucleotide primer for the detection of SNP TSC0061024
agtataaggaaa

SEQ ID NO: 374987 - DNA, 12 bp, Artificial Sequence
  Oligonucleotide primer for the detection of SNP TSC0061025
agtagtttatgt

SEQ ID NO: 374988 - DNA, 12 bp, Artificial Sequence
  Oligonucleotide primer for the detection of SNP TSC0061025
acaatctataca

SEQ ID NO: 374989 - DNA, 12 bp, Artificial Sequence
  Oligonucleotide primer for the detection of SNP TSC0061025
atgaattttatg

SEQ ID NO: 374990 - DNA, 12 bp, Artificial Sequence
  Oligonucleotide primer for the detection of SNP TSC0061026
acataaatatct

SEQ ID NO: 374991 - DNA, 12 bp, Artificial Sequence
  Oligonucleotide primer for the detection of SNP TSC0061026
gtgtatagattg

SEQ ID NO: 374992 - DNA, 12 bp, Artificial Sequence
  Oligonucleotide primer for the detection of SNP TSC0061027
ttatttgatttc

SEQ ID NO: 374993 - DNA, 12 bp, Artificial Sequence
  Oligonucleotide primer for the detection of SNP TSC0061027
ttatctaacccc

SEQ ID NO: 374994 - DNA, 12 bp, Artificial Sequence
  Oligonucleotide primer for the detection of SNP TSC0061027
gaggttttatat

SEQ ID NO: 374995 - DNA, 12 bp, Artificial Sequence
  Oligonucleotide primer for the detection of SNP TSC0061027
gaggttttatac

SEQ ID NO: 374996 - DNA, 12 bp, Artificial Sequence
  Oligonucleotide primer for the detection of SNP TSC0061028
aatacaaatcaa

SEQ ID NO: 374997 - DNA, 12 bp, Artificial Sequence
  Oligonucleotide primer for the detection of SNP TSC0061028
ataccacttctc

SEQ ID NO: 374998 - DNA, 12 bp, Artificial Sequence
  Oligonucleotide primer for the detection of SNP TSC0061028
aatataagttag

SEQ ID NO: 374999 - DNA, 12 bp, Artificial Sequence
  Oligonucleotide primer for the detection of SNP TSC0061029
ccataaaaaacc

SEQ ID NO: 375000 - DNA, 12 bp, Artificial Sequence
  Oligonucleotide primer for the detection of SNP TSC0061029
ccgtaaaaaacc

SEQ ID NO: 375001 - DNA, 12 bp, Artificial Sequence
  Oligonucleotide primer for the detection of SNP TSC0061029
gttataatgtta

SEQ ID NO: 375002 - DNA, 12 bp, Artificial Sequence
  Oligonucleotide primer for the detection of SNP TSC0061030
ttctaactttaa

SEQ ID NO: 375003 - DNA, 12 bp, Artificial Sequence
  Oligonucleotide primer for the detection of SNP TSC0061030
agaaattaatat

SEQ ID NO: 375004 - DNA, 12 bp, Artificial Sequence
  Oligonucleotide primer for the detection of SNP TSC0061031
ttttatataggt

SEQ ID NO: 375005 - DNA, 12 bp, Artificial Sequence
  Oligonucleotide primer for the detection of SNP TSC0061031
ccctacataaat

SEQ ID NO: 375006 - DNA, 12 bp, Artificial Sequence
  Oligonucleotide primer for the detection of SNP TSC0061031
taatgagaagtg

SEQ ID NO: 375007 - DNA, 12 bp, Artificial Sequence
  Oligonucleotide primer for the detection of SNP TSC0061032
tgaaagttagtg

SEQ ID NO: 375008 - DNA, 12 bp, Artificial Sequence
  Oligonucleotide primer for the detection of SNP TSC0061033
taccatactaat

SEQ ID NO: 375009 - DNA, 12 bp, Artificial Sequence
  Oligonucleotide primer for the detection of SNP TSC0061033
atgggtgtagta

SEQ ID NO: 375010 - DNA, 12 bp, Artificial Sequence
  Oligonucleotide primer for the detection of SNP TSC0061033
ataaatacaaca

SEQ ID NO: 375011 - DNA, 12 bp, Artificial Sequence
  Oligonucleotide primer for the detection of SNP TSC0061033
tgttatgttggt

SEQ ID NO: 375012 - DNA, 12 bp, Artificial Sequence
  Oligonucleotide primer for the detection of SNP TSC0061034
atcatcttaccc

SEQ ID NO: 375013 - DNA, 12 bp, Artificial Sequence
  Oligonucleotide primer for the detection of SNP TSC0061034
atcgtcttaccc

SEQ ID NO: 375014 - DNA, 12 bp, Artificial Sequence
  Oligonucleotide primer for the detection of SNP TSC0061035
tttactaaacac

SEQ ID NO: 375015 - DNA, 12 bp, Artificial Sequence
  Oligonucleotide primer for the detection of SNP TSC0061035
taaatattcatc

SEQ ID NO: 375016 - DNA, 12 bp, Artificial Sequence
  Oligonucleotide primer for the detection of SNP TSC0061035
tttattgagtac

SEQ ID NO: 375017 - DNA, 12 bp, Artificial Sequence
  Oligonucleotide primer for the detection of SNP TSC0061036
atactaaaccaa

SEQ ID NO: 375018 - DNA, 12 bp, Artificial Sequence
  Oligonucleotide primer for the detection of SNP TSC0061036
ggggtgtattat

SEQ ID NO: 375019 - DNA, 12 bp, Artificial Sequence
  Oligonucleotide primer for the detection of SNP TSC0061036
aaaatacattat

SEQ ID NO: 375020 - DNA, 12 bp, Artificial Sequence
  Oligonucleotide primer for the detection of SNP TSC0061036
attaggttaatt

SEQ ID NO: 375021 - DNA, 12 bp, Artificial Sequence
  Oligonucleotide primer for the detection of SNP TSC0061038
ctaccacatcca

SEQ ID NO: 375022 - DNA, 12 bp, Artificial Sequence
  Oligonucleotide primer for the detection of SNP TSC0061039
aatatggagtgt

SEQ ID NO: 375023 - DNA, 12 bp, Artificial Sequence
  Oligonucleotide primer for the detection of SNP TSC0061039
aacataaaatac

SEQ ID NO: 375024 - DNA, 12 bp, Artificial Sequence
  Oligonucleotide primer for the detection of SNP TSC0061039
aagtggttatga

SEQ ID NO: 375025 - DNA, 12 bp, Artificial Sequence
  Oligonucleotide primer for the detection of SNP TSC0006998
atcctccaacat

SEQ ID NO: 375026 - DNA, 12 bp, Artificial Sequence
  Oligonucleotide primer for the detection of SNP TSC0006999
tccctataaacc

SEQ ID NO: 375027 - DNA, 12 bp, Artificial Sequence
  Oligonucleotide primer for the detection of SNP TSC0006999
ttggaattggga

SEQ ID NO: 375028 - DNA, 12 bp, Artificial Sequence
  Oligonucleotide primer for the detection of SNP TSC0061040
attataggttat

SEQ ID NO: 375029 - DNA, 12 bp, Artificial Sequence
  Oligonucleotide primer for the detection of SNP TSC0061040
attataaactat

SEQ ID NO: 375030 - DNA, 12 bp, Artificial Sequence
  Oligonucleotide primer for the detection of SNP TSC0061040
gaatgttatgtg

SEQ ID NO: 375031 - DNA, 12 bp, Artificial Sequence
  Oligonucleotide primer for the detection of SNP TSC0005736
gagaatgatttt

SEQ ID NO: 375032 - DNA, 12 bp, Artificial Sequence
  Oligonucleotide primer for the detection of SNP TSC0061041
cttattacacac

SEQ ID NO: 375033 - DNA, 12 bp, Artificial Sequence
  Oligonucleotide primer for the detection of SNP TSC0061041
tttaggggaatt

SEQ ID NO: 375034 - DNA, 12 bp, Artificial Sequence
  Oligonucleotide primer for the detection of SNP TSC0061042
actcccctcaaa

SEQ ID NO: 375035 - DNA, 12 bp, Artificial Sequence
  Oligonucleotide primer for the detection of SNP TSC0061042
tttggaggatgt

SEQ ID NO: 375036 - DNA, 12 bp, Artificial Sequence
  Oligonucleotide primer for the detection of SNP TSC0061043
tgtatttgaggg

SEQ ID NO: 375037 - DNA, 12 bp, Artificial Sequence
  Oligonucleotide primer for the detection of SNP TSC0061043
ttatgggatatt

SEQ ID NO: 375038 - DNA, 12 bp, Artificial Sequence
  Oligonucleotide primer for the detection of SNP TSC0061044
acaaaataccac

SEQ ID NO: 375039 - DNA, 12 bp, Artificial Sequence
  Oligonucleotide primer for the detection of SNP TSC0061044
ttgatattgatg

SEQ ID NO: 375040 - DNA, 12 bp, Artificial Sequence
  Oligonucleotide primer for the detection of SNP TSC0061044
ttgatatcgatg

SEQ ID NO: 375041 - DNA, 12 bp, Artificial Sequence
  Oligonucleotide primer for the detection of SNP TSC0061045
attatttgtttc

SEQ ID NO: 375042 - DNA, 12 bp, Artificial Sequence
  Oligonucleotide primer for the detection of SNP TSC0061045
tatcatctacct

SEQ ID NO: 375043 - DNA, 12 bp, Artificial Sequence
  Oligonucleotide primer for the detection of SNP TSC0061045
tttgagggattt

SEQ ID NO: 375044 - DNA, 12 bp, Artificial Sequence
  Oligonucleotide primer for the detection of SNP TSC0061046
aaccaacccctc

SEQ ID NO: 375045 - DNA, 12 bp, Artificial Sequence
  Oligonucleotide primer for the detection of SNP TSC0061046
aggatgaggaag

SEQ ID NO: 375046 - DNA, 12 bp, Artificial Sequence
  Oligonucleotide primer for the detection of SNP TSC0061047
aacccttaaaca

SEQ ID NO: 375047 - DNA, 12 bp, Artificial Sequence
  Oligonucleotide primer for the detection of SNP TSC0061047
tttaattttgag

SEQ ID NO: 375048 - DNA, 12 bp, Artificial Sequence
  Oligonucleotide primer for the detection of SNP TSC0061047
tttaatttcgag

SEQ ID NO: 375049 - DNA, 12 bp, Artificial Sequence
  Oligonucleotide primer for the detection of SNP TSC0061047
cccaaccccaaa

SEQ ID NO: 375050 - DNA, 12 bp, Artificial Sequence
  Oligonucleotide primer for the detection of SNP TSC0061047
cccaaccccgaa

SEQ ID NO: 375051 - DNA, 12 bp, Artificial Sequence
  Oligonucleotide primer for the detection of SNP TSC0061047
gatttttgaata

SEQ ID NO: 375052 - DNA, 12 bp, Artificial Sequence
  Oligonucleotide primer for the detection of SNP TSC0010687
tttgtaaagtaa

SEQ ID NO: 375053 - DNA, 12 bp, Artificial Sequence
  Oligonucleotide primer for the detection of SNP TSC0010687
tctacaaaacaa

SEQ ID NO: 375054 - DNA, 12 bp, Artificial Sequence
  Oligonucleotide primer for the detection of SNP TSC0005958
attccaaaataa

SEQ ID NO: 375055 - DNA, 12 bp, Artificial Sequence
  Oligonucleotide primer for the detection of SNP TSC0005958
caaaaattcctc

SEQ ID NO: 375056 - DNA, 12 bp, Artificial Sequence
  Oligonucleotide primer for the detection of SNP TSC0005958
attttagagtga

SEQ ID NO: 375057 - DNA, 12 bp, Artificial Sequence
  Oligonucleotide primer for the detection of SNP TSC0061049
taaacccgaaaa

SEQ ID NO: 375058 - DNA, 12 bp, Artificial Sequence
  Oligonucleotide primer for the detection of SNP TSC0061049
ttgtaattttta

SEQ ID NO: 375059 - DNA, 12 bp, Artificial Sequence
  Oligonucleotide primer for the detection of SNP TSC0061049
tgaatttggaag

SEQ ID NO: 375060 - DNA, 12 bp, Artificial Sequence
  Oligonucleotide primer for the detection of SNP TSC0061049
tgaattcggaag

SEQ ID NO: 375061 - DNA, 12 bp, Artificial Sequence
  Oligonucleotide primer for the detection of SNP TSC0061050
ccttccgaattc

SEQ ID NO: 375062 - DNA, 12 bp, Artificial Sequence
  Oligonucleotide primer for the detection of SNP TSC0061051
tgaatgtgggtt

SEQ ID NO: 375063 - DNA, 12 bp, Artificial Sequence
  Oligonucleotide primer for the detection of SNP TSC0061051
gtatagttttgt

SEQ ID NO: 375064 - DNA, 12 bp, Artificial Sequence
  Oligonucleotide primer for the detection of SNP TSC0061052
taaaaatcatta

SEQ ID NO: 375065 - DNA, 12 bp, Artificial Sequence
  Oligonucleotide primer for the detection of SNP TSC0061052
aatattctcaac

SEQ ID NO: 375066 - DNA, 12 bp, Artificial Sequence
  Oligonucleotide primer for the detection of SNP TSC0061052
taaaaattattg

SEQ ID NO: 375067 - DNA, 12 bp, Artificial Sequence
  Oligonucleotide primer for the detection of SNP TSC0007546
acacctctataa

SEQ ID NO: 375068 - DNA, 12 bp, Artificial Sequence
  Oligonucleotide primer for the detection of SNP TSC0007546
gggtttaagagg

SEQ ID NO: 375069 - DNA, 12 bp, Artificial Sequence
  Oligonucleotide primer for the detection of SNP TSC0061053
ttaaatacatta

SEQ ID NO: 375070 - DNA, 12 bp, Artificial Sequence
  Oligonucleotide primer for the detection of SNP TSC0061053
ttgtgaggattt

SEQ ID NO: 375071 - DNA, 12 bp, Artificial Sequence
  Oligonucleotide primer for the detection of SNP TSC0005273
ccaccctaacct

SEQ ID NO: 375072 - DNA, 12 bp, Artificial Sequence
  Oligonucleotide primer for the detection of SNP TSC0005273
gtagggggtggg

SEQ ID NO: 375073 - DNA, 12 bp, Artificial Sequence
  Oligonucleotide primer for the detection of SNP TSC0061054
tactttctaaca

SEQ ID NO: 375074 - DNA, 12 bp, Artificial Sequence
  Oligonucleotide primer for the detection of SNP TSC0061054
ataagtgagaaa

SEQ ID NO: 375075 - DNA, 12 bp, Artificial Sequence
  Oligonucleotide primer for the detection of SNP TSC0061055
acctcctatatc

SEQ ID NO: 375076 - DNA, 12 bp, Artificial Sequence
  Oligonucleotide primer for the detection of SNP TSC0061056
caaatatatctt

SEQ ID NO: 375077 - DNA, 12 bp, Artificial Sequence
  Oligonucleotide primer for the detection of SNP TSC0061056
ttattttgttga

SEQ ID NO: 375078 - DNA, 12 bp, Artificial Sequence
  Oligonucleotide primer for the detection of SNP TSC0061057
tctaccttcatt

SEQ ID NO: 375079 - DNA, 12 bp, Artificial Sequence
  Oligonucleotide primer for the detection of SNP TSC0061057
aaatttatgtta

SEQ ID NO: 375080 - DNA, 12 bp, Artificial Sequence
  Oligonucleotide primer for the detection of SNP TSC0061058
tctaaaccaata

SEQ ID NO: 375081 - DNA, 12 bp, Artificial Sequence
  Oligonucleotide primer for the detection of SNP TSC0061058
tttttttatatc

SEQ ID NO: 375082 - DNA, 12 bp, Artificial Sequence
  Oligonucleotide primer for the detection of SNP TSC0061058
tctttccctaca

SEQ ID NO: 375083 - DNA, 12 bp, Artificial Sequence
  Oligonucleotide primer for the detection of SNP TSC0061060
aaacaaaccttt

SEQ ID NO: 375084 - DNA, 12 bp, Artificial Sequence
  Oligonucleotide primer for the detection of SNP TSC0061060
ggattaatatgg

SEQ ID NO: 375085 - DNA, 12 bp, Artificial Sequence
  Oligonucleotide primer for the detection of SNP TSC0061061
aaatataaacgc

SEQ ID NO: 375086 - DNA, 12 bp, Artificial Sequence
  Oligonucleotide primer for the detection of SNP TSC0061061
ttgagagttggg

SEQ ID NO: 375087 - DNA, 12 bp, Artificial Sequence
  Oligonucleotide primer for the detection of SNP TSC0061061
aggtgtggatgt

SEQ ID NO: 375088 - DNA, 12 bp, Artificial Sequence
  Oligonucleotide primer for the detection of SNP TSC0061061
aggtgtggacgt

SEQ ID NO: 375089 - DNA, 12 bp, Artificial Sequence
  Oligonucleotide primer for the detection of SNP TSC0061062
tacaaacaactc

SEQ ID NO: 375090 - DNA, 12 bp, Artificial Sequence
  Oligonucleotide primer for the detection of SNP TSC0061066
atctaaccaaca

SEQ ID NO: 375091 - DNA, 12 bp, Artificial Sequence
  Oligonucleotide primer for the detection of SNP TSC0061066
atgaggttttat

SEQ ID NO: 375092 - DNA, 12 bp, Artificial Sequence
  Oligonucleotide primer for the detection of SNP TSC0061066
acgaggttttat

SEQ ID NO: 375093 - DNA, 12 bp, Artificial Sequence
  Oligonucleotide primer for the detection of SNP TSC0061066
atgaggttttac

SEQ ID NO: 375094 - DNA, 12 bp, Artificial Sequence
  Oligonucleotide primer for the detection of SNP TSC0061066
acgaggttttac

SEQ ID NO: 375095 - DNA, 12 bp, Artificial Sequence
  Oligonucleotide primer for the detection of SNP TSC0061066
tttgattaatat

SEQ ID NO: 375096 - DNA, 12 bp, Artificial Sequence
  Oligonucleotide primer for the detection of SNP TSC0061067
tcatctcaaact

SEQ ID NO: 375097 - DNA, 12 bp, Artificial Sequence
  Oligonucleotide primer for the detection of SNP TSC0061067
tcatctcgaact

SEQ ID NO: 375098 - DNA, 12 bp, Artificial Sequence
  Oligonucleotide primer for the detection of SNP TSC0061067
agttgagattta

SEQ ID NO: 375099 - DNA, 12 bp, Artificial Sequence
  Oligonucleotide primer for the detection of SNP TSC0061068
ttctataccaac

SEQ ID NO: 375100 - DNA, 12 bp, Artificial Sequence
  Oligonucleotide primer for the detection of SNP TSC0061068
aggggggaaaat

SEQ ID NO: 375101 - DNA, 12 bp, Artificial Sequence
  Oligonucleotide primer for the detection of SNP TSC0061068
ttttgtgttaat

SEQ ID NO: 375102 - DNA, 12 bp, Artificial Sequence
  Oligonucleotide primer for the detection of SNP TSC0061068
ttttgtgttaac

SEQ ID NO: 375103 - DNA, 12 bp, Artificial Sequence
  Oligonucleotide primer for the detection of SNP TSC0061069
taatgttatagg

SEQ ID NO: 375104 - DNA, 12 bp, Artificial Sequence
  Oligonucleotide primer for the detection of SNP TSC0061069
taatactacaaa

SEQ ID NO: 375105 - DNA, 12 bp, Artificial Sequence
  Oligonucleotide primer for the detection of SNP TSC0061069
tatttattagat

SEQ ID NO: 375106 - DNA, 12 bp, Artificial Sequence
  Oligonucleotide primer for the detection of SNP TSC0061070
ataccccaaata

SEQ ID NO: 375107 - DNA, 12 bp, Artificial Sequence
  Oligonucleotide primer for the detection of SNP TSC0061070
atataattagtt

SEQ ID NO: 375108 - DNA, 12 bp, Artificial Sequence
  Oligonucleotide primer for the detection of SNP TSC0061070
acataattaatt

SEQ ID NO: 375109 - DNA, 12 bp, Artificial Sequence
  Oligonucleotide primer for the detection of SNP TSC0061070
gatgttttaaat

SEQ ID NO: 375110 - DNA, 12 bp, Artificial Sequence
  Oligonucleotide primer for the detection of SNP TSC0061073
aataccttacca

SEQ ID NO: 375111 - DNA, 12 bp, Artificial Sequence
  Oligonucleotide primer for the detection of SNP TSC0061073
ttagagaggttt

SEQ ID NO: 375112 - DNA, 12 bp, Artificial Sequence
  Oligonucleotide primer for the detection of SNP TSC0061073
aatgttttgtta

SEQ ID NO: 375113 - DNA, 12 bp, Artificial Sequence
  Oligonucleotide primer for the detection of SNP TSC0008143
aacaattccata

SEQ ID NO: 375114 - DNA, 12 bp, Artificial Sequence
  Oligonucleotide primer for the detection of SNP TSC0008143
acctccctaacc

SEQ ID NO: 375115 - DNA, 12 bp, Artificial Sequence
  Oligonucleotide primer for the detection of SNP TSC0008143
gatagttttatg

SEQ ID NO: 375116 - DNA, 12 bp, Artificial Sequence
  Oligonucleotide primer for the detection of SNP TSC0061074
aaatgttaaggg

SEQ ID NO: 375117 - DNA, 12 bp, Artificial Sequence
  Oligonucleotide primer for the detection of SNP TSC0061075
tctaaaaaattt

SEQ ID NO: 375118 - DNA, 12 bp, Artificial Sequence
  Oligonucleotide primer for the detection of SNP TSC0061076
ctccaaatttca

SEQ ID NO: 375119 - DNA, 12 bp, Artificial Sequence
  Oligonucleotide primer for the detection of SNP TSC0061076
ttctatcacttt

SEQ ID NO: 375120 - DNA, 12 bp, Artificial Sequence
  Oligonucleotide primer for the detection of SNP TSC0061077
gagttaattttg

SEQ ID NO: 375121 - DNA, 12 bp, Artificial Sequence
  Oligonucleotide primer for the detection of SNP TSC0061078
gtgagtattata

SEQ ID NO: 375122 - DNA, 12 bp, Artificial Sequence
  Oligonucleotide primer for the detection of SNP TSC0061079
ttactaaacctt

SEQ ID NO: 375123 - DNA, 12 bp, Artificial Sequence
  Oligonucleotide primer for the detection of SNP TSC0061079
ggaagttgtata

SEQ ID NO: 375124 - DNA, 12 bp, Artificial Sequence
  Oligonucleotide primer for the detection of SNP TSC0061079
aaaaactacaca

SEQ ID NO: 375125 - DNA, 12 bp, Artificial Sequence
  Oligonucleotide primer for the detection of SNP TSC0061079
ttgttgggtttt

SEQ ID NO: 375126 - DNA, 12 bp, Artificial Sequence
  Oligonucleotide primer for the detection of SNP TSC0061080
cacaatattaca

SEQ ID NO: 375127 - DNA, 12 bp, Artificial Sequence
  Oligonucleotide primer for the detection of SNP TSC0061080
aggatagatttt

SEQ ID NO: 375128 - DNA, 12 bp, Artificial Sequence
  Oligonucleotide primer for the detection of SNP TSC0061080
ataaatttcaaa

SEQ ID NO: 375129 - DNA, 12 bp, Artificial Sequence
  Oligonucleotide primer for the detection of SNP TSC0061080
gtataatgttgt

SEQ ID NO: 375130 - DNA, 12 bp, Artificial Sequence
  Oligonucleotide primer for the detection of SNP TSC0005550
cccttaccctac

SEQ ID NO: 375131 - DNA, 12 bp, Artificial Sequence
  Oligonucleotide primer for the detection of SNP TSC0005550
ttttaggatttg

SEQ ID NO: 375132 - DNA, 12 bp, Artificial Sequence
  Oligonucleotide primer for the detection of SNP TSC0061081
attataaacaaa

SEQ ID NO: 375133 - DNA, 12 bp, Artificial Sequence
  Oligonucleotide primer for the detection of SNP TSC0061081
ataatagaaatg

SEQ ID NO: 375134 - DNA, 12 bp, Artificial Sequence
  Oligonucleotide primer for the detection of SNP TSC0061081
aattgtgagtaa

SEQ ID NO: 375135 - DNA, 12 bp, Artificial Sequence
  Oligonucleotide primer for the detection of SNP TSC0061083
caacaaatataa

SEQ ID NO: 375136 - DNA, 12 bp, Artificial Sequence
  Oligonucleotide primer for the detection of SNP TSC0061083
acatcctcctat

SEQ ID NO: 375137 - DNA, 12 bp, Artificial Sequence
  Oligonucleotide primer for the detection of SNP TSC0061083
ttaataaatgta

SEQ ID NO: 375138 - DNA, 12 bp, Artificial Sequence
  Oligonucleotide primer for the detection of SNP TSC0005239
ttctattaaatt

SEQ ID NO: 375139 - DNA, 12 bp, Artificial Sequence
  Oligonucleotide primer for the detection of SNP TSC0005239
ccaatttcttta

SEQ ID NO: 375140 - DNA, 12 bp, Artificial Sequence
  Oligonucleotide primer for the detection of SNP TSC0005239
ttttgttgagtt

SEQ ID NO: 375141 - DNA, 12 bp, Artificial Sequence
  Oligonucleotide primer for the detection of SNP TSC0061086
ctctatctaccc

SEQ ID NO: 375142 - DNA, 12 bp, Artificial Sequence
  Oligonucleotide primer for the detection of SNP TSC0061087
tatttcctaaaa

SEQ ID NO: 375143 - DNA, 12 bp, Artificial Sequence
  Oligonucleotide primer for the detection of SNP TSC0061087
gaagggaagtag

SEQ ID NO: 375144 - DNA, 12 bp, Artificial Sequence
  Oligonucleotide primer for the detection of SNP TSC0061088
attaaaaataac

SEQ ID NO: 375145 - DNA, 12 bp, Artificial Sequence
  Oligonucleotide primer for the detection of SNP TSC0061088
ttaagattgtta

SEQ ID NO: 375146 - DNA, 12 bp, Artificial Sequence
  Oligonucleotide primer for the detection of SNP TSC0005536
ctctaaataacc

SEQ ID NO: 375147 - DNA, 12 bp, Artificial Sequence
  Oligonucleotide primer for the detection of SNP TSC0005536
cacccactacta

SEQ ID NO: 375148 - DNA, 12 bp, Artificial Sequence
  Oligonucleotide primer for the detection of SNP TSC0005536
ttttgggtgatt

SEQ ID NO: 375149 - DNA, 12 bp, Artificial Sequence
  Oligonucleotide primer for the detection of SNP TSC0005537
aactacaaaaac

SEQ ID NO: 375150 - DNA, 12 bp, Artificial Sequence
  Oligonucleotide primer for the detection of SNP TSC0005537
attgagagtttg

SEQ ID NO: 375151 - DNA, 12 bp, Artificial Sequence
  Oligonucleotide primer for the detection of SNP TSC0005538
ctcctccaccac

SEQ ID NO: 375152 - DNA, 12 bp, Artificial Sequence
  Oligonucleotide primer for the detection of SNP TSC0008672
caaatataacct

SEQ ID NO: 375153 - DNA, 12 bp, Artificial Sequence
  Oligonucleotide primer for the detection of SNP TSC0008672
ttaagttaggat

SEQ ID NO: 375154 - DNA, 12 bp, Artificial Sequence
  Oligonucleotide primer for the detection of SNP TSC0008672
atcaaattaaaa

SEQ ID NO: 375155 - DNA, 12 bp, Artificial Sequence
  Oligonucleotide primer for the detection of SNP TSC0008672
taagtatagttt

SEQ ID NO: 375156 - DNA, 12 bp, Artificial Sequence
  Oligonucleotide primer for the detection of SNP TSC0061093
acctaaatccct

SEQ ID NO: 375157 - DNA, 12 bp, Artificial Sequence
  Oligonucleotide primer for the detection of SNP TSC0061093
gaattgtgtgtg

SEQ ID NO: 375158 - DNA, 12 bp, Artificial Sequence
  Oligonucleotide primer for the detection of SNP TSC0061093
aaactatatata

SEQ ID NO: 375159 - DNA, 12 bp, Artificial Sequence
  Oligonucleotide primer for the detection of SNP TSC0061094
tatggtgagttg

SEQ ID NO: 375160 - DNA, 12 bp, Artificial Sequence
  Oligonucleotide primer for the detection of SNP TSC0061095
attttttgttat

SEQ ID NO: 375161 - DNA, 12 bp, Artificial Sequence
  Oligonucleotide primer for the detection of SNP TSC0061095
atctcctatcat

SEQ ID NO: 375162 - DNA, 12 bp, Artificial Sequence
  Oligonucleotide primer for the detection of SNP TSC0061095
agaataaggtga

SEQ ID NO: 375163 - DNA, 12 bp, Artificial Sequence
  Oligonucleotide primer for the detection of SNP TSC0061096
tttggaaaaaat

SEQ ID NO: 375164 - DNA, 12 bp, Artificial Sequence
  Oligonucleotide primer for the detection of SNP TSC0061096
aataaaaaaaga

SEQ ID NO: 375165 - DNA, 12 bp, Artificial Sequence
  Oligonucleotide primer for the detection of SNP TSC0061097
aaacactttctc

SEQ ID NO: 375166 - DNA, 12 bp, Artificial Sequence
  Oligonucleotide primer for the detection of SNP TSC0061098
tattctataata

SEQ ID NO: 375167 - DNA, 12 bp, Artificial Sequence
  Oligonucleotide primer for the detection of SNP TSC0061098
tttaaagtttat

SEQ ID NO: 375168 - DNA, 12 bp, Artificial Sequence
  Oligonucleotide primer for the detection of SNP TSC0061098
cccaaaattcac

SEQ ID NO: 375169 - DNA, 12 bp, Artificial Sequence
  Oligonucleotide primer for the detection of SNP TSC0061098
tattttatgatg

SEQ ID NO: 375170 - DNA, 12 bp, Artificial Sequence
  Oligonucleotide primer for the detection of SNP TSC0061102
taacaaacaacc

SEQ ID NO: 375171 - DNA, 12 bp, Artificial Sequence
  Oligonucleotide primer for the detection of SNP TSC0061102
taacaaacgacc

SEQ ID NO: 375172 - DNA, 12 bp, Artificial Sequence
  Oligonucleotide primer for the detection of SNP TSC0061102
ctttctactata

SEQ ID NO: 375173 - DNA, 12 bp, Artificial Sequence
  Oligonucleotide primer for the detection of SNP TSC0061102
tgataagtggtt

SEQ ID NO: 375174 - DNA, 12 bp, Artificial Sequence
  Oligonukleotid-Primer
tgataagcggtt

SEQ ID NO: 375175 - DNA, 12 bp, Artificial Sequence
  Oligonucleotide primer for the detection of SNP TSC0061103
gagtatagataa

SEQ ID NO: 375176 - DNA, 12 bp, Artificial Sequence
  Oligonucleotide primer for the detection of SNP TSC0061106
ccaaaaattcac

SEQ ID NO: 375177 - DNA, 12 bp, Artificial Sequence
  Oligonucleotide primer for the detection of SNP TSC0061111
tcctataatctc

SEQ ID NO: 375178 - DNA, 12 bp, Artificial Sequence
  Oligonucleotide primer for the detection of SNP TSC0061111
agatagagttag

SEQ ID NO: 375179 - DNA, 12 bp, Artificial Sequence
  Oligonucleotide primer for the detection of SNP TSC0061112
accaaccaaacc

SEQ ID NO: 375180 - DNA, 12 bp, Artificial Sequence
  Oligonucleotide primer for the detection of SNP TSC0061113
atactacatata

SEQ ID NO: 375181 - DNA, 12 bp, Artificial Sequence
  Oligonucleotide primer for the detection of SNP TSC0061113
ttggaagtataa

SEQ ID NO: 375182 - DNA, 12 bp, Artificial Sequence
  Oligonucleotide primer for the detection of SNP TSC0061113
ttaaaaacataa

SEQ ID NO: 375183 - DNA, 12 bp, Artificial Sequence
  Oligonucleotide primer for the detection of SNP TSC0061113
tgtgttgtatgt

SEQ ID NO: 375184 - DNA, 12 bp, Artificial Sequence
  Oligonucleotide primer for the detection of SNP TSC0061114
tcttaatatttc

SEQ ID NO: 375185 - DNA, 12 bp, Artificial Sequence
  Oligonucleotide primer for the detection of SNP TSC0061114
attggaaagata

SEQ ID NO: 375186 - DNA, 12 bp, Artificial Sequence
  Oligonucleotide primer for the detection of SNP TSC0061115
taaaacataaaa

SEQ ID NO: 375187 - DNA, 12 bp, Artificial Sequence
  Oligonucleotide primer for the detection of SNP TSC0061116
ccatccaacaaa

SEQ ID NO: 375188 - DNA, 12 bp, Artificial Sequence
  Oligonucleotide primer for the detection of SNP TSC0061116
cataaatcctcc

SEQ ID NO: 375189 - DNA, 12 bp, Artificial Sequence
  Oligonucleotide primer for the detection of SNP TSC0061118
aaacaaaaaccc

SEQ ID NO: 375190 - DNA, 12 bp, Artificial Sequence
  Oligonucleotide primer for the detection of SNP TSC0061118
tggttatttaaa

SEQ ID NO: 375191 - DNA, 12 bp, Artificial Sequence
  Oligonucleotide primer for the detection of SNP TSC0061119
actactaacttt

SEQ ID NO: 375192 - DNA, 12 bp, Artificial Sequence
  Oligonucleotide primer for the detection of SNP TSC0061119
aaagttattgta

SEQ ID NO: 375193 - DNA, 12 bp, Artificial Sequence
  Oligonucleotide primer for the detection of SNP TSC0061121
tcaaacctattt

SEQ ID NO: 375194 - DNA, 12 bp, Artificial Sequence
  Oligonucleotide primer for the detection of SNP TSC0061121
agttttatatta

SEQ ID NO: 375195 - DNA, 12 bp, Artificial Sequence
  Oligonucleotide primer for the detection of SNP TSC0061122
acgcctaaaaat

SEQ ID NO: 375196 - DNA, 12 bp, Artificial Sequence
  Oligonucleotide primer for the detection of SNP TSC0061122
tagggttgttta

SEQ ID NO: 375197 - DNA, 12 bp, Artificial Sequence
  Oligonucleotide primer for the detection of SNP TSC0061123
cacttccatacc

SEQ ID NO: 375198 - DNA, 12 bp, Artificial Sequence
  Oligonucleotide primer for the detection of SNP TSC0061123
cacttccgtacc

SEQ ID NO: 375199 - DNA, 12 bp, Artificial Sequence
  Oligonucleotide primer for the detection of SNP TSC0061123
cgcttccatacc

SEQ ID NO: 375200 - DNA, 12 bp, Artificial Sequence
  Oligonucleotide primer for the detection of SNP TSC0061123
cgcttccgtacc

SEQ ID NO: 375201 - DNA, 12 bp, Artificial Sequence
  Oligonucleotide primer for the detection of SNP TSC0061123
ttaaaaatagga

SEQ ID NO: 375202 - DNA, 12 bp, Artificial Sequence
  Oligonukleotid-Primer
cataaaaaacaa

SEQ ID NO: 375203 - DNA, 12 bp, Artificial Sequence
  Oligonucleotide primer for the detection of SNP TSC0061124
cgtaaaaaacaa

SEQ ID NO: 375204 - DNA, 12 bp, Artificial Sequence
  Oligonucleotide primer for the detection of SNP TSC0061124
gtgtttttgggt

SEQ ID NO: 375205 - DNA, 12 bp, Artificial Sequence
  Oligonucleotide primer for the detection of SNP TSC0061124
atacctctaaac

SEQ ID NO: 375206 - DNA, 12 bp, Artificial Sequence
  Oligonucleotide primer for the detection of SNP TSC0061124
tgtggggaataa

SEQ ID NO: 375207 - DNA, 12 bp, Artificial Sequence
  Oligonucleotide primer for the detection of SNP TSC0061124
cgtggggaataa

SEQ ID NO: 375208 - DNA, 12 bp, Artificial Sequence
  Oligonucleotide primer for the detection of SNP TSC0061125
aaacaaacataa

SEQ ID NO: 375209 - DNA, 12 bp, Artificial Sequence
  Oligonucleotide primer for the detection of SNP TSC0061125
aaacaaacgtaa

SEQ ID NO: 375210 - DNA, 12 bp, Artificial Sequence
  Oligonucleotide primer for the detection of SNP TSC0061125
gggtcgttgttt

SEQ ID NO: 375211 - DNA, 12 bp, Artificial Sequence
  Oligonucleotide primer for the detection of SNP TSC0061125
aaaccattattc

SEQ ID NO: 375212 - DNA, 12 bp, Artificial Sequence
  Oligonucleotide primer for the detection of SNP TSC0061125
aaaccgttattc

SEQ ID NO: 375213 - DNA, 12 bp, Artificial Sequence
  Oligonucleotide primer for the detection of SNP TSC0061125
agataagtgtgg

SEQ ID NO: 375214 - DNA, 12 bp, Artificial Sequence
  Oligonucleotide primer for the detection of SNP TSC0061125
agataagcgtgg

SEQ ID NO: 375215 - DNA, 12 bp, Artificial Sequence
  Oligonucleotide primer for the detection of SNP TSC0061127
aatttaacttcc

SEQ ID NO: 375216 - DNA, 12 bp, Artificial Sequence
  Oligonucleotide primer for the detection of SNP TSC0061127
ttttaaaaaaag

SEQ ID NO: 375217 - DNA, 12 bp, Artificial Sequence
  Oligonucleotide primer for the detection of SNP TSC0061128
aaccaattaata

SEQ ID NO: 375218 - DNA, 12 bp, Artificial Sequence
  Oligonucleotide primer for the detection of SNP TSC0061128
aattagaaatat

SEQ ID NO: 375219 - DNA, 12 bp, Artificial Sequence
  Oligonucleotide primer for the detection of SNP TSC0061131
ggtagtaagaga

SEQ ID NO: 375220 - DNA, 12 bp, Artificial Sequence
  Oligonucleotide primer for the detection of SNP TSC0061132
taacaatattaa

SEQ ID NO: 375221 - DNA, 12 bp, Artificial Sequence
  Oligonucleotide primer for the detection of SNP TSC0061132
ttatagatgtaa

SEQ ID NO: 375222 - DNA, 12 bp, Artificial Sequence
  Oligonucleotide primer for the detection of SNP TSC0061133
atacccccacaa

SEQ ID NO: 375223 - DNA, 12 bp, Artificial Sequence
  Oligonucleotide primer for the detection of SNP TSC0061133
atacccccgcaa

SEQ ID NO: 375224 - DNA, 12 bp, Artificial Sequence
  Oligonucleotide primer for the detection of SNP TSC0061133
aagaaagaattt

SEQ ID NO: 375225 - DNA, 12 bp, Artificial Sequence
  Oligonucleotide primer for the detection of SNP TSC0061134
tatattttcgag

SEQ ID NO: 375226 - DNA, 12 bp, Artificial Sequence
  Oligonucleotide primer for the detection of SNP TSC0061134
catacttccaaa

SEQ ID NO: 375227 - DNA, 12 bp, Artificial Sequence
  Oligonucleotide primer for the detection of SNP TSC0061134
catacttccgaa

SEQ ID NO: 375228 - DNA, 12 bp, Artificial Sequence
  Oligonucleotide primer for the detection of SNP TSC0061134
agggatgtaaga

SEQ ID NO: 375229 - DNA, 12 bp, Artificial Sequence
  Oligonucleotide primer for the detection of SNP TSC0061135
tggaggaggtta

SEQ ID NO: 375230 - DNA, 12 bp, Artificial Sequence
  Oligonucleotide primer for the detection of SNP TSC0061136
tcacaaatatta

SEQ ID NO: 375231 - DNA, 12 bp, Artificial Sequence
  Oligonucleotide primer for the detection of SNP TSC0061136
tcgcaaatatta

SEQ ID NO: 375232 - DNA, 12 bp, Artificial Sequence
  Oligonucleotide primer for the detection of SNP TSC0061136
ttttaatatgta

SEQ ID NO: 375233 - DNA, 12 bp, Artificial Sequence
  Oligonucleotide primer for the detection of SNP TSC0061136
cttcaatatata

SEQ ID NO: 375234 - DNA, 12 bp, Artificial Sequence
  Oligonucleotide primer for the detection of SNP TSC0061136
tcgtaaatattg

SEQ ID NO: 375235 - DNA, 12 bp, Artificial Sequence
  Oligonucleotide primer for the detection of SNP TSC0061138
cccatatattca

SEQ ID NO: 375236 - DNA, 12 bp, Artificial Sequence
  Oligonucleotide primer for the detection of SNP TSC0061138
agagttatgtgt

SEQ ID NO: 375237 - DNA, 12 bp, Artificial Sequence
  Oligonucleotide primer for the detection of SNP TSC0061138
taaaaccatata

SEQ ID NO: 375238 - DNA, 12 bp, Artificial Sequence
  Oligonucleotide primer for the detection of SNP TSC0061138
ttttatgtgttt

SEQ ID NO: 375239 - DNA, 12 bp, Artificial Sequence
  Oligonucleotide primer for the detection of SNP TSC0061139
accattccaccc

SEQ ID NO: 375240 - DNA, 12 bp, Artificial Sequence
  Oligonucleotide primer for the detection of SNP TSC0061139
gtgtgataggta

SEQ ID NO: 375241 - DNA, 12 bp, Artificial Sequence
  Oligonucleotide primer for the detection of SNP TSC0061140
acatcaccttct

SEQ ID NO: 375242 - DNA, 12 bp, Artificial Sequence
  Oligonucleotide primer for the detection of SNP TSC0061140
ggaaagttttag

SEQ ID NO: 375243 - DNA, 12 bp, Artificial Sequence
  Oligonucleotide primer for the detection of SNP TSC0061142
atacaaacaaac

SEQ ID NO: 375244 - DNA, 12 bp, Artificial Sequence
  Oligonucleotide primer for the detection of SNP TSC0061142
tatatggtttga

SEQ ID NO: 375245 - DNA, 12 bp, Artificial Sequence
  Oligonucleotide primer for the detection of SNP TSC0061143
aaaactttatat

SEQ ID NO: 375246 - DNA, 12 bp, Artificial Sequence
  Oligonucleotide primer for the detection of SNP TSC0061143
tatttggtgtaa

SEQ ID NO: 375247 - DNA, 12 bp, Artificial Sequence
  Oligonucleotide primer for the detection of SNP TSC0061144
aatctaaaatac

SEQ ID NO: 375248 - DNA, 12 bp, Artificial Sequence
  Oligonucleotide primer for the detection of SNP TSC0061144
aaggagtgttga

SEQ ID NO: 375249 - DNA, 12 bp, Artificial Sequence
  Oligonucleotide primer for the detection of SNP TSC0061145
aatgtttttatg

SEQ ID NO: 375250 - DNA, 12 bp, Artificial Sequence
  Oligonucleotide primer for the detection of SNP TSC0061146
catatttaatat

SEQ ID NO: 375251 - DNA, 12 bp, Artificial Sequence
  Oligonucleotide primer for the detection of SNP TSC0061147
catattctatca

SEQ ID NO: 375252 - DNA, 12 bp, Artificial Sequence
  Oligonucleotide primer for the detection of SNP TSC0061147
agtatttaatat

SEQ ID NO: 375253 - DNA, 12 bp, Artificial Sequence
  Oligonucleotide primer for the detection of SNP TSC0061147
acacccaatata

SEQ ID NO: 375254 - DNA, 12 bp, Artificial Sequence
  Oligonucleotide primer for the detection of SNP TSC0061148
ctatacaatcta

SEQ ID NO: 375255 - DNA, 12 bp, Artificial Sequence
  Oligonucleotide primer for the detection of SNP TSC0061148
gtaaaaatgatt

SEQ ID NO: 375256 - DNA, 12 bp, Artificial Sequence
  Oligonucleotide primer for the detection of SNP TSC0061149
aatatcactcta

SEQ ID NO: 375257 - DNA, 12 bp, Artificial Sequence
  Oligonucleotide primer for the detection of SNP TSC0061151
cacatacataca

SEQ ID NO: 375258 - DNA, 12 bp, Artificial Sequence
  Oligonucleotide primer for the detection of SNP TSC0061151
aatatggattgt

SEQ ID NO: 375259 - DNA, 12 bp, Artificial Sequence
  Oligonucleotide primer for the detection of SNP TSC0061157
tctctatatcca

SEQ ID NO: 375260 - DNA, 12 bp, Artificial Sequence
  Oligonucleotide primer for the detection of SNP TSC0061157
taaaggataaat

SEQ ID NO: 375261 - DNA, 12 bp, Artificial Sequence
  Oligonucleotide primer for the detection of SNP TSC0061159
ggtgagtgtttg

SEQ ID NO: 375262 - DNA, 12 bp, Artificial Sequence
  Oligonucleotide primer for the detection of SNP TSC0061160
ttcaattctaaa

SEQ ID NO: 375263 - DNA, 12 bp, Artificial Sequence
  Oligonucleotide primer for the detection of SNP TSC0061164
ttaatcttacat

SEQ ID NO: 375264 - DNA, 12 bp, Artificial Sequence
  Oligonucleotide primer for the detection of SNP TSC0061164
ttaatcttacgt

SEQ ID NO: 375265 - DNA, 12 bp, Artificial Sequence
  Oligonucleotide primer for the detection of SNP TSC0061164
gttaaaaattga

SEQ ID NO: 375266 - DNA, 12 bp, Artificial Sequence
  Oligonucleotide primer for the detection of SNP TSC0061165
actaaaccacta

SEQ ID NO: 375267 - DNA, 12 bp, Artificial Sequence
  Oligonucleotide primer for the detection of SNP TSC0061168
aatacatttttc

SEQ ID NO: 375268 - DNA, 12 bp, Artificial Sequence
  Oligonucleotide primer for the detection of SNP TSC0061168
gatacatttttc

SEQ ID NO: 375269 - DNA, 12 bp, Artificial Sequence
  Oligonucleotide primer for the detection of SNP TSC0061168
tattaagtaata

SEQ ID NO: 375270 - DNA, 12 bp, Artificial Sequence
  Oligonucleotide primer for the detection of SNP TSC0061168
gatatatttttt

SEQ ID NO: 375271 - DNA, 12 bp, Artificial Sequence
  Oligonucleotide primer for the detection of SNP TSC0061169
aattttacccct

SEQ ID NO: 375272 - DNA, 12 bp, Artificial Sequence
  Oligonucleotide primer for the detection of SNP TSC0061169
atgtggatgtga

SEQ ID NO: 375273 - DNA, 12 bp, Artificial Sequence
  Oligonucleotide primer for the detection of SNP TSC0061169
acgtggatgtga

SEQ ID NO: 375274 - DNA, 12 bp, Artificial Sequence
  Oligonucleotide primer for the detection of SNP TSC0061170
aaataataacat

SEQ ID NO: 375275 - DNA, 12 bp, Artificial Sequence
  Oligonucleotide primer for the detection of SNP TSC0061170
atttctacccta

SEQ ID NO: 375276 - DNA, 12 bp, Artificial Sequence
  Oligonucleotide primer for the detection of SNP TSC0061170
aagtggtggtat

SEQ ID NO: 375277 - DNA, 12 bp, Artificial Sequence
  Oligonucleotide primer for the detection of SNP TSC0061177
aacatttaattc

SEQ ID NO: 375278 - DNA, 12 bp, Artificial Sequence
  Oligonucleotide primer for the detection of SNP TSC0061177
aacgtttaattc

SEQ ID NO: 375279 - DNA, 12 bp, Artificial Sequence
  Oligonucleotide primer for the detection of SNP TSC0061177
tagttgttgaag

SEQ ID NO: 375280 - DNA, 12 bp, Artificial Sequence
  Oligonucleotide primer for the detection of SNP TSC0061177
tagttgtcgaag

SEQ ID NO: 375281 - DNA, 12 bp, Artificial Sequence
  Oligonucleotide primer for the detection of SNP TSC0000856
aaaatctaactt

SEQ ID NO: 375282 - DNA, 12 bp, Artificial Sequence
  Oligonucleotide primer for the detection of SNP TSC0000856
gtttattgaggg

SEQ ID NO: 375283 - DNA, 12 bp, Artificial Sequence
  Oligonucleotide primer for the detection of SNP TSC0000856
agaatttgattt

SEQ ID NO: 375284 - DNA, 12 bp, Artificial Sequence
  Oligonucleotide primer for the detection of SNP TSC0061178
tatttctaaata

SEQ ID NO: 375285 - DNA, 12 bp, Artificial Sequence
  Oligonucleotide primer for the detection of SNP TSC0061178
aaacatcactca

SEQ ID NO: 375286 - DNA, 12 bp, Artificial Sequence
  Oligonucleotide primer for the detection of SNP TSC0061178
gtttttgagtgt

SEQ ID NO: 375287 - DNA, 12 bp, Artificial Sequence
  Oligonucleotide primer for the detection of SNP TSC0061179
caccaactacaa

SEQ ID NO: 375288 - DNA, 12 bp, Artificial Sequence
  Oligonucleotide primer for the detection of SNP TSC0061179
ttaaggatattg

SEQ ID NO: 375289 - DNA, 12 bp, Artificial Sequence
  Oligonucleotide primer for the detection of SNP TSC0061179
tattaattgtaa

SEQ ID NO: 375290 - DNA, 12 bp, Artificial Sequence
  Oligonucleotide primer for the detection of SNP TSC0061180
attcaatcaatt

SEQ ID NO: 375291 - DNA, 12 bp, Artificial Sequence
  Oligonucleotide primer for the detection of SNP TSC0061180
attcaatcgatt

SEQ ID NO: 375292 - DNA, 12 bp, Artificial Sequence
  Oligonucleotide primer for the detection of SNP TSC0061181
atctctttcctt

SEQ ID NO: 375293 - DNA, 12 bp, Artificial Sequence
  Oligonucleotide primer for the detection of SNP TSC0061182
tattaatctcct

SEQ ID NO: 375294 - DNA, 12 bp, Artificial Sequence
  Oligonucleotide primer for the detection of SNP TSC0061182
gagggagatgta

SEQ ID NO: 375295 - DNA, 12 bp, Artificial Sequence
  Oligonucleotide primer for the detection of SNP TSC0061184
tctctcttactc

SEQ ID NO: 375296 - DNA, 12 bp, Artificial Sequence
  Oligonucleotide primer for the detection of SNP TSC0061184
tatggtgagaat

SEQ ID NO: 375297 - DNA, 12 bp, Artificial Sequence
  Oligonucleotide primer for the detection of SNP TSC0061188
aactattaacta

SEQ ID NO: 375298 - DNA, 12 bp, Artificial Sequence
  Oligonucleotide primer for the detection of SNP TSC0061188
catcccctactt

SEQ ID NO: 375299 - DNA, 12 bp, Artificial Sequence
  Oligonucleotide primer for the detection of SNP TSC0061188
cgtcccctactt

SEQ ID NO: 375300 - DNA, 12 bp, Artificial Sequence
  Oligonucleotide primer for the detection of SNP TSC0061188
taattgttaatt

SEQ ID NO: 375301 - DNA, 12 bp, Artificial Sequence
  Oligonucleotide primer for the detection of SNP TSC0061191
aaattacacttt

SEQ ID NO: 375302 - DNA, 12 bp, Artificial Sequence
  Oligonucleotide primer for the detection of SNP TSC0061191
atttgagggtat

SEQ ID NO: 375303 - DNA, 12 bp, Artificial Sequence
  Oligonucleotide primer for the detection of SNP TSC0061191
atttaaaaacat

SEQ ID NO: 375304 - DNA, 12 bp, Artificial Sequence
  Oligonucleotide primer for the detection of SNP TSC0061192
tcaaatctccct

SEQ ID NO: 375305 - DNA, 12 bp, Artificial Sequence
  Oligonucleotide primer for the detection of SNP TSC0061193
tacctaccccat

SEQ ID NO: 375306 - DNA, 12 bp, Artificial Sequence
  Oligonucleotide primer for the detection of SNP TSC0061193
tcacaaacatta

SEQ ID NO: 375307 - DNA, 12 bp, Artificial Sequence
  Oligonucleotide primer for the detection of SNP TSC0061194
gtgtaatggtat

SEQ ID NO: 375308 - DNA, 12 bp, Artificial Sequence
  Oligonucleotide primer for the detection of SNP TSC0061194
atgagttaagat

SEQ ID NO: 375309 - DNA, 12 bp, Artificial Sequence
  Oligonucleotide primer for the detection of SNP TSC0061195
taatattatatc

SEQ ID NO: 375310 - DNA, 12 bp, Artificial Sequence
  Oligonucleotide primer for the detection of SNP TSC0061195
ataaatgaagta

SEQ ID NO: 375311 - DNA, 12 bp, Artificial Sequence
  Oligonucleotide primer for the detection of SNP TSC0061195
ataaacgaagta

SEQ ID NO: 375312 - DNA, 12 bp, Artificial Sequence
  Oligonucleotide primer for the detection of SNP TSC0061196
aacttccaaaat

SEQ ID NO: 375313 - DNA, 12 bp, Artificial Sequence
  Oligonucleotide primer for the detection of SNP TSC0061196
tttttaagtgta

SEQ ID NO: 375314 - DNA, 12 bp, Artificial Sequence
  Oligonucleotide primer for the detection of SNP TSC0061197
atgtgatggaaa

SEQ ID NO: 375315 - DNA, 12 bp, Artificial Sequence
  Oligonucleotide primer for the detection of SNP TSC0061197
acgtgatggaaa

SEQ ID NO: 375316 - DNA, 12 bp, Artificial Sequence
  Oligonucleotide primer for the detection of SNP TSC0061199
agtagaattttt

SEQ ID NO: 375317 - DNA, 12 bp, Artificial Sequence
  Oligonucleotide primer for the detection of SNP TSC0061199
aataaaattccc

SEQ ID NO: 375318 - DNA, 12 bp, Artificial Sequence
  Oligonucleotide primer for the detection of SNP TSC0061199
gtatagttgtga

SEQ ID NO: 375319 - DNA, 12 bp, Artificial Sequence
  Oligonucleotide primer for the detection of SNP TSC0061200
catattaccaaa

SEQ ID NO: 375320 - DNA, 12 bp, Artificial Sequence
  Oligonucleotide primer for the detection of SNP TSC0061200
tattggtaaggt

SEQ ID NO: 375321 - DNA, 12 bp, Artificial Sequence
  Oligonucleotide primer for the detection of SNP TSC0061200
tatcggtaaggt

SEQ ID NO: 375322 - DNA, 12 bp, Artificial Sequence
  Oligonucleotide primer for the detection of SNP TSC0061200
caccaataaaat

SEQ ID NO: 375323 - DNA, 12 bp, Artificial Sequence
  Oligonucleotide primer for the detection of SNP TSC0061200
caccgataaaat

SEQ ID NO: 375324 - DNA, 12 bp, Artificial Sequence
  Oligonucleotide primer for the detection of SNP TSC0061200
atattgttaggt

SEQ ID NO: 375325 - DNA, 12 bp, Artificial Sequence
  Oligonucleotide primer for the detection of SNP TSC0061201
ccttcccactaa

SEQ ID NO: 375326 - DNA, 12 bp, Artificial Sequence
  Oligonucleotide primer for the detection of SNP TSC0061201
tagggttggagt

SEQ ID NO: 375327 - DNA, 12 bp, Artificial Sequence
  Oligonucleotide primer for the detection of SNP TSC0061202
aataaaccaatt

SEQ ID NO: 375328 - DNA, 12 bp, Artificial Sequence
  Oligonucleotide primer for the detection of SNP TSC0061202
aaaagttgaaaa

SEQ ID NO: 375329 - DNA, 12 bp, Artificial Sequence
  Oligonucleotide primer for the detection of SNP TSC0061202
gatgaattaatt

SEQ ID NO: 375330 - DNA, 12 bp, Artificial Sequence
  Oligonucleotide primer for the detection of SNP TSC0061203
aactcattcaat

SEQ ID NO: 375331 - DNA, 12 bp, Artificial Sequence
  Oligonucleotide primer for the detection of SNP TSC0061203
gttttggttaga

SEQ ID NO: 375332 - DNA, 12 bp, Artificial Sequence
  Oligonucleotide primer for the detection of SNP TSC0061203
gtttcggttaga

SEQ ID NO: 375333 - DNA, 12 bp, Artificial Sequence
  Oligonucleotide primer for the detection of SNP TSC0061204
ttaattgtggta

SEQ ID NO: 375334 - DNA, 12 bp, Artificial Sequence
  Oligonucleotide primer for the detection of SNP TSC0008732
tattattacgtt

SEQ ID NO: 375335 - DNA, 12 bp, Artificial Sequence
  Oligonucleotide primer for the detection of SNP TSC0008732
caccactacacc

SEQ ID NO: 375336 - DNA, 12 bp, Artificial Sequence
  Oligonucleotide primer for the detection of SNP TSC0008732
caccactacgcc

SEQ ID NO: 375337 - DNA, 12 bp, Artificial Sequence
  Oligonucleotide primer for the detection of SNP TSC0061206
gttggaattagt

SEQ ID NO: 375338 - DNA, 12 bp, Artificial Sequence
  Oligonucleotide primer for the detection of SNP TSC0061207
tttatgcgaatt

SEQ ID NO: 375339 - DNA, 12 bp, Artificial Sequence
  Oligonucleotide primer for the detection of SNP TSC0061207
ttatacgaatta

SEQ ID NO: 375340 - DNA, 12 bp, Artificial Sequence
  Oligonucleotide primer for the detection of SNP TSC0061207
attttaagaaaa

SEQ ID NO: 375341 - DNA, 12 bp, Artificial Sequence
  Oligonucleotide primer for the detection of SNP TSC0061211
caaattcaaaca

SEQ ID NO: 375342 - DNA, 12 bp, Artificial Sequence
  Oligonucleotide primer for the detection of SNP TSC0061211
aatgttttatag

SEQ ID NO: 375343 - DNA, 12 bp, Artificial Sequence
  Oligonucleotide primer for the detection of SNP TSC0061211
tagatttagata

SEQ ID NO: 375344 - DNA, 12 bp, Artificial Sequence
  Oligonucleotide primer for the detection of SNP TSC0061212
aatccacacaaa

SEQ ID NO: 375345 - DNA, 12 bp, Artificial Sequence
  Oligonucleotide primer for the detection of SNP TSC0061212
taggtaagaaag

SEQ ID NO: 375346 - DNA, 12 bp, Artificial Sequence
  Oligonucleotide primer for the detection of SNP TSC0061212
taatttatatag

SEQ ID NO: 375347 - DNA, 12 bp, Artificial Sequence
  Oligonucleotide primer for the detection of SNP TSC0061213
taatttaacaaa

SEQ ID NO: 375348 - DNA, 12 bp, Artificial Sequence
  Oligonucleotide primer for the detection of SNP TSC0061213
gggttgaattgg

SEQ ID NO: 375349 - DNA, 12 bp, Artificial Sequence
  Oligonucleotide primer for the detection of SNP TSC0061213
ttgatttaatag

SEQ ID NO: 375350 - DNA, 12 bp, Artificial Sequence
  Oligonucleotide primer for the detection of SNP TSC0010309
aattactaaatt

SEQ ID NO: 375351 - DNA, 12 bp, Artificial Sequence
  Oligonucleotide primer for the detection of SNP TSC0010309
gttaaattgata

SEQ ID NO: 375352 - DNA, 12 bp, Artificial Sequence
  Oligonucleotide primer for the detection of SNP TSC0007062
tcctaaattaaa

SEQ ID NO: 375353 - DNA, 12 bp, Artificial Sequence
  Oligonucleotide primer for the detection of SNP TSC0007062
gttaagtaatag

SEQ ID NO: 375354 - DNA, 12 bp, Artificial Sequence
  Oligonucleotide primer for the detection of SNP TSC0007062
tgggttagattt

SEQ ID NO: 375355 - DNA, 12 bp, Artificial Sequence
  Oligonucleotide primer for the detection of SNP TSC0007064
tgtttaaatgat

SEQ ID NO: 375356 - DNA, 12 bp, Artificial Sequence
  Oligonucleotide primer for the detection of SNP TSC0007064
acttaaataaca

SEQ ID NO: 375357 - DNA, 12 bp, Artificial Sequence
  Oligonucleotide primer for the detection of SNP TSC0007064
atagttgaaaag

SEQ ID NO: 375358 - DNA, 12 bp, Artificial Sequence
  Oligonucleotide primer for the detection of SNP TSC0061216
agtttagggttg

SEQ ID NO: 375359 - DNA, 12 bp, Artificial Sequence
  Oligonucleotide primer for the detection of SNP TSC0005976
tcaatattcaat

SEQ ID NO: 375360 - DNA, 12 bp, Artificial Sequence
  Oligonucleotide primer for the detection of SNP TSC0005976
ggattatattaa

SEQ ID NO: 375361 - DNA, 12 bp, Artificial Sequence
  Oligonucleotide primer for the detection of SNP TSC0061217
tattataacaac

SEQ ID NO: 375362 - DNA, 12 bp, Artificial Sequence
  Oligonucleotide primer for the detection of SNP TSC0061218
tacatcatcctt

SEQ ID NO: 375363 - DNA, 12 bp, Artificial Sequence
  Oligonucleotide primer for the detection of SNP TSC0005667
tttttaaaatct

SEQ ID NO: 375364 - DNA, 12 bp, Artificial Sequence
  Oligonucleotide primer for the detection of SNP TSC0005667
tatatagttttg

SEQ ID NO: 375365 - DNA, 12 bp, Artificial Sequence
  Oligonucleotide primer for the detection of SNP TSC0005668
tgagaagtttgt

SEQ ID NO: 375366 - DNA, 12 bp, Artificial Sequence
  Oligonucleotide primer for the detection of SNP TSC0005668
tttatatttaag

SEQ ID NO: 375367 - DNA, 12 bp, Artificial Sequence
  Oligonucleotide primer for the detection of SNP TSC0005669
taagagatagat

SEQ ID NO: 375368 - DNA, 12 bp, Artificial Sequence
  Oligonucleotide primer for the detection of SNP TSC0061219
ttgttaataaga

SEQ ID NO: 375369 - DNA, 12 bp, Artificial Sequence
  Oligonucleotide primer for the detection of SNP TSC0061219
taccaacaaaaa

SEQ ID NO: 375370 - DNA, 12 bp, Artificial Sequence
  Oligonucleotide primer for the detection of SNP TSC0061219
agaatttagggt

SEQ ID NO: 375371 - DNA, 12 bp, Artificial Sequence
  Oligonucleotide primer for the detection of SNP TSC0061219
agaatttagggc

SEQ ID NO: 375372 - DNA, 12 bp, Artificial Sequence
  Oligonucleotide primer for the detection of SNP TSC0061221
taaatattacct

SEQ ID NO: 375373 - DNA, 12 bp, Artificial Sequence
  Oligonucleotide primer for the detection of SNP TSC0061223
ttaattcaattt

SEQ ID NO: 375374 - DNA, 12 bp, Artificial Sequence
  Oligonucleotide primer for the detection of SNP TSC0061223
gtatttaaaagg

SEQ ID NO: 375375 - DNA, 12 bp, Artificial Sequence
  Oligonucleotide primer for the detection of SNP TSC0061224
tctacatatcct

SEQ ID NO: 375376 - DNA, 12 bp, Artificial Sequence
  Oligonucleotide primer for the detection of SNP TSC0061224
aacgtagggtaa

SEQ ID NO: 375377 - DNA, 12 bp, Artificial Sequence
  Oligonucleotide primer for the detection of SNP TSC0061224
acgtaaaacaaa

SEQ ID NO: 375378 - DNA, 12 bp, Artificial Sequence
  Oligonucleotide primer for the detection of SNP TSC0061224
tttgtatgtttt

SEQ ID NO: 375379 - DNA, 12 bp, Artificial Sequence
  Oligonucleotide primer for the detection of SNP TSC0061225
ttatatattatt

SEQ ID NO: 375380 - DNA, 12 bp, Artificial Sequence
  Oligonucleotide primer for the detection of SNP TSC0061225
actcacatacta

SEQ ID NO: 375381 - DNA, 12 bp, Artificial Sequence
  Oligonucleotide primer for the detection of SNP TSC0061225
tagggttggagg

SEQ ID NO: 375382 - DNA, 12 bp, Artificial Sequence
  Oligonucleotide primer for the detection of SNP TSC0061226
aatcaacaactt

SEQ ID NO: 375383 - DNA, 12 bp, Artificial Sequence
  Oligonucleotide primer for the detection of SNP TSC0061226
aatgagattgtt

SEQ ID NO: 375384 - DNA, 12 bp, Artificial Sequence
  Oligonucleotide primer for the detection of SNP TSC0061227
atatatcactaa

SEQ ID NO: 375385 - DNA, 12 bp, Artificial Sequence
  Oligonucleotide primer for the detection of SNP TSC0061227
gaaagttgttga

SEQ ID NO: 375386 - DNA, 12 bp, Artificial Sequence
  Oligonucleotide primer for the detection of SNP TSC0061227
aaaaactactaa

SEQ ID NO: 375387 - DNA, 12 bp, Artificial Sequence
  Oligonucleotide primer for the detection of SNP TSC0061227
aaatgtgttatt

SEQ ID NO: 375388 - DNA, 12 bp, Artificial Sequence
  Oligonucleotide primer for the detection of SNP TSC0061229
ctatatataaat

SEQ ID NO: 375389 - DNA, 12 bp, Artificial Sequence
  Oligonucleotide primer for the detection of SNP TSC0061229
tttagatgaatg

SEQ ID NO: 375390 - DNA, 12 bp, Artificial Sequence
  Oligonucleotide primer for the detection of SNP TSC0061229
tttaaataaata

SEQ ID NO: 375391 - DNA, 12 bp, Artificial Sequence
  Oligonucleotide primer for the detection of SNP TSC0061229
ttatgtgtaaat

SEQ ID NO: 375392 - DNA, 12 bp, Artificial Sequence
  Oligonucleotide primer for the detection of SNP TSC0061230
cctaaaaattat

SEQ ID NO: 375393 - DNA, 12 bp, Artificial Sequence
  Oligonucleotide primer for the detection of SNP TSC0061230
agggatttttta

SEQ ID NO: 375394 - DNA, 12 bp, Artificial Sequence
  Oligonucleotide primer for the detection of SNP TSC0061230
aaaaatttccca

SEQ ID NO: 375395 - DNA, 12 bp, Artificial Sequence
  Oligonucleotide primer for the detection of SNP TSC0061230
tttgaaaattat

SEQ ID NO: 375396 - DNA, 12 bp, Artificial Sequence
  Oligonucleotide primer for the detection of SNP TSC0061231
ctaatatctcaa

SEQ ID NO: 375397 - DNA, 12 bp, Artificial Sequence
  Oligonucleotide primer for the detection of SNP TSC0061231
gattgagaaagt

SEQ ID NO: 375398 - DNA, 12 bp, Artificial Sequence
  Oligonucleotide primer for the detection of SNP TSC0061231
ttgatgttttag

SEQ ID NO: 375399 - DNA, 12 bp, Artificial Sequence
  Oligonucleotide primer for the detection of SNP TSC0061232
tcattctaaaac

SEQ ID NO: 375400 - DNA, 12 bp, Artificial Sequence
  Oligonucleotide primer for the detection of SNP TSC0061232
aatttgaggaga

SEQ ID NO: 375401 - DNA, 12 bp, Artificial Sequence
  Oligonucleotide primer for the detection of SNP TSC0061232
aattcgaggaga

SEQ ID NO: 375402 - DNA, 12 bp, Artificial Sequence
  Oligonucleotide primer for the detection of SNP TSC0061232
ttattttgaggt

SEQ ID NO: 375403 - DNA, 12 bp, Artificial Sequence
  Oligonukleotid-Primer
caataataacat

SEQ ID NO: 375404 - DNA, 12 bp, Artificial Sequence
  Oligonucleotide primer for the detection of SNP TSC0061233
aatattgtatga

SEQ ID NO: 375405 - DNA, 12 bp, Artificial Sequence
  Oligonucleotide primer for the detection of SNP TSC0061233
aatattgtacga

SEQ ID NO: 375406 - DNA, 12 bp, Artificial Sequence
  Oligonucleotide primer for the detection of SNP TSC0061233
aatactacacaa

SEQ ID NO: 375407 - DNA, 12 bp, Artificial Sequence
  Oligonucleotide primer for the detection of SNP TSC0061233
aatactacacga

SEQ ID NO: 375408 - DNA, 12 bp, Artificial Sequence
  Oligonucleotide primer for the detection of SNP TSC0061233
tagtggtgatat

SEQ ID NO: 375409 - DNA, 12 bp, Artificial Sequence
  Oligonucleotide primer for the detection of SNP TSC0061234
caacaaacaaaa

SEQ ID NO: 375410 - DNA, 12 bp, Artificial Sequence
  Oligonucleotide primer for the detection of SNP TSC0061234
actcatcttccc

SEQ ID NO: 375411 - DNA, 12 bp, Artificial Sequence
  Oligonucleotide primer for the detection of SNP TSC0061234
tagtaaataaaa

SEQ ID NO: 375412 - DNA, 12 bp, Artificial Sequence
  Oligonucleotide primer for the detection of SNP TSC0061235
taaattaccctc

SEQ ID NO: 375413 - DNA, 12 bp, Artificial Sequence
  Oligonucleotide primer for the detection of SNP TSC0061235
aggtaggtggga

SEQ ID NO: 375414 - DNA, 12 bp, Artificial Sequence
  Oligonucleotide primer for the detection of SNP TSC0061236
atcaaaaatcac

SEQ ID NO: 375415 - DNA, 12 bp, Artificial Sequence
  Oligonucleotide primer for the detection of SNP TSC0061236
ttgaagaggtgg

SEQ ID NO: 375416 - DNA, 12 bp, Artificial Sequence
  Oligonucleotide primer for the detection of SNP TSC0061236
attaggaattat

SEQ ID NO: 375417 - DNA, 12 bp, Artificial Sequence
  Oligonucleotide primer for the detection of SNP TSC0061237
ccaacaaatctc

SEQ ID NO: 375418 - DNA, 12 bp, Artificial Sequence
  Oligonucleotide primer for the detection of SNP TSC0061237
gggagaaatagg

SEQ ID NO: 375419 - DNA, 12 bp, Artificial Sequence
  Oligonucleotide primer for the detection of SNP TSC0061240
ttatttaatatc

SEQ ID NO: 375420 - DNA, 12 bp, Artificial Sequence
  Oligonucleotide primer for the detection of SNP TSC0061240
atggtgggaaag

SEQ ID NO: 375421 - DNA, 12 bp, Artificial Sequence
  Oligonucleotide primer for the detection of SNP TSC0061240
ttatttagtgtt

SEQ ID NO: 375422 - DNA, 12 bp, Artificial Sequence
  Oligonucleotide primer for the detection of SNP TSC0061241
gtttattgagtg

SEQ ID NO: 375423 - DNA, 12 bp, Artificial Sequence
  Oligonucleotide primer for the detection of SNP TSC0061242
tcccaaaaacct

SEQ ID NO: 375424 - DNA, 12 bp, Artificial Sequence
  Oligonucleotide primer for the detection of SNP TSC0061242
tttgttgtatag

SEQ ID NO: 375425 - DNA, 12 bp, Artificial Sequence
  Oligonucleotide primer for the detection of SNP TSC0061243
taatttatattc

SEQ ID NO: 375426 - DNA, 12 bp, Artificial Sequence
  Oligonucleotide primer for the detection of SNP TSC0061244
tctttattcttt

SEQ ID NO: 375427 - DNA, 12 bp, Artificial Sequence
  Oligonucleotide primer for the detection of SNP TSC0061244
agagaaataaaa

SEQ ID NO: 375428 - DNA, 12 bp, Artificial Sequence
  Oligonucleotide primer for the detection of SNP TSC0061245
taatcctcaaaa

SEQ ID NO: 375429 - DNA, 12 bp, Artificial Sequence
  Oligonucleotide primer for the detection of SNP TSC0061245
taatcctcgaaa

SEQ ID NO: 375430 - DNA, 12 bp, Artificial Sequence
  Oligonucleotide primer for the detection of SNP TSC0061245
ttgtaagaaagt

SEQ ID NO: 375431 - DNA, 12 bp, Artificial Sequence
  Oligonucleotide primer for the detection of SNP TSC0061245
tgatttttgaaa

SEQ ID NO: 375432 - DNA, 12 bp, Artificial Sequence
  Oligonucleotide primer for the detection of SNP TSC0061245
tgattttcgaaa

SEQ ID NO: 375433 - DNA, 12 bp, Artificial Sequence
  Oligonucleotide primer for the detection of SNP TSC0061246
cattaaaaacat

SEQ ID NO: 375434 - DNA, 12 bp, Artificial Sequence
  Oligonucleotide primer for the detection of SNP TSC0061246
cattaaaaacgt

SEQ ID NO: 375435 - DNA, 12 bp, Artificial Sequence
  Oligonucleotide primer for the detection of SNP TSC0061246
aaagattagttg

SEQ ID NO: 375436 - DNA, 12 bp, Artificial Sequence
  Oligonucleotide primer for the detection of SNP TSC0061246
aaagattagtcg

SEQ ID NO: 375437 - DNA, 12 bp, Artificial Sequence
  Oligonucleotide primer for the detection of SNP TSC0061247
tcactcatatca

SEQ ID NO: 375438 - DNA, 12 bp, Artificial Sequence
  Oligonucleotide primer for the detection of SNP TSC0061247
tttacatctcaa

SEQ ID NO: 375439 - DNA, 12 bp, Artificial Sequence
  Oligonucleotide primer for the detection of SNP TSC0061248
aacaacaacaat

SEQ ID NO: 375440 - DNA, 12 bp, Artificial Sequence
  Oligonucleotide primer for the detection of SNP TSC0061249
ggtggaaaaaaa

SEQ ID NO: 375441 - DNA, 12 bp, Artificial Sequence
  Oligonucleotide primer for the detection of SNP TSC0061249
aagatgatgggg

SEQ ID NO: 375442 - DNA, 12 bp, Artificial Sequence
  Oligonucleotide primer for the detection of SNP TSC0061250
aaacaaccccaa

SEQ ID NO: 375443 - DNA, 12 bp, Artificial Sequence
  Oligonucleotide primer for the detection of SNP TSC0061250
aaacaaccccga

SEQ ID NO: 375444 - DNA, 12 bp, Artificial Sequence
  Oligonucleotide primer for the detection of SNP TSC0061250
gtttatgggttt

SEQ ID NO: 375445 - DNA, 12 bp, Artificial Sequence
  Oligonucleotide primer for the detection of SNP TSC0061250
acttataaattc

SEQ ID NO: 375446 - DNA, 12 bp, Artificial Sequence
  Oligonucleotide primer for the detection of SNP TSC0061250
ggatagttttga

SEQ ID NO: 375447 - DNA, 12 bp, Artificial Sequence
  Oligonucleotide primer for the detection of SNP TSC0061250
ggatagtttcga

SEQ ID NO: 375448 - DNA, 12 bp, Artificial Sequence
  Oligonucleotide primer for the detection of SNP TSC0061251
acaaatacttaa

SEQ ID NO: 375449 - DNA, 12 bp, Artificial Sequence
  Oligonucleotide primer for the detection of SNP TSC0061251
acgaatacttaa

SEQ ID NO: 375450 - DNA, 12 bp, Artificial Sequence
  Oligonucleotide primer for the detection of SNP TSC0061251
tattgggagtaa

SEQ ID NO: 375451 - DNA, 12 bp, Artificial Sequence
  Oligonucleotide primer for the detection of SNP TSC0061251
atgaatatttgg

SEQ ID NO: 375452 - DNA, 12 bp, Artificial Sequence
  Oligonucleotide primer for the detection of SNP TSC0061251
acgaatatttgg

SEQ ID NO: 375453 - DNA, 12 bp, Artificial Sequence
  Oligonucleotide primer for the detection of SNP TSC0061253
tcataaatccta

SEQ ID NO: 375454 - DNA, 12 bp, Artificial Sequence
  Oligonucleotide primer for the detection of SNP TSC0061253
attatagaattt

SEQ ID NO: 375455 - DNA, 12 bp, Artificial Sequence
  Oligonucleotide primer for the detection of SNP TSC0061253
atcataaaattc

SEQ ID NO: 375456 - DNA, 12 bp, Artificial Sequence
  Oligonucleotide primer for the detection of SNP TSC0061254
aacaaaatatat

SEQ ID NO: 375457 - DNA, 12 bp, Artificial Sequence
  Oligonucleotide primer for the detection of SNP TSC0061255
atagaattagta

SEQ ID NO: 375458 - DNA, 12 bp, Artificial Sequence
  Oligonucleotide primer for the detection of SNP TSC0061255
acaaaactaaca

SEQ ID NO: 375459 - DNA, 12 bp, Artificial Sequence
  Oligonucleotide primer for the detection of SNP TSC0061255
aaatgaatgatt

SEQ ID NO: 375460 - DNA, 12 bp, Artificial Sequence
  Oligonucleotide primer for the detection of SNP TSC0061257
ttatatttccac

SEQ ID NO: 375461 - DNA, 12 bp, Artificial Sequence
  Oligonucleotide primer for the detection of SNP TSC0061259
taatgattttgg

SEQ ID NO: 375462 - DNA, 12 bp, Artificial Sequence
  Oligonucleotide primer for the detection of SNP TSC0061263
agaggagagggt

SEQ ID NO: 375463 - DNA, 12 bp, Artificial Sequence
  Oligonucleotide primer for the detection of SNP TSC0061263
ggggttggtaag

SEQ ID NO: 375464 - DNA, 12 bp, Artificial Sequence
  Oligonucleotide primer for the detection of SNP TSC0061264
aacttccactca

SEQ ID NO: 375465 - DNA, 12 bp, Artificial Sequence
  Oligonucleotide primer for the detection of SNP TSC0061264
gtaggttagggt

SEQ ID NO: 375466 - DNA, 12 bp, Artificial Sequence
  Oligonucleotide primer for the detection of SNP TSC0061267
acttttcatttt

SEQ ID NO: 375467 - DNA, 12 bp, Artificial Sequence
  Oligonucleotide primer for the detection of SNP TSC0061267
tattttaggtag

SEQ ID NO: 375468 - DNA, 12 bp, Artificial Sequence
  Oligonucleotide primer for the detection of SNP TSC0061269
atctaattaatc

SEQ ID NO: 375469 - DNA, 12 bp, Artificial Sequence
  Oligonucleotide primer for the detection of SNP TSC0061269
aaaagatttttt

SEQ ID NO: 375470 - DNA, 12 bp, Artificial Sequence
  Oligonucleotide primer for the detection of SNP TSC0061269
aaaaatccttta

SEQ ID NO: 375471 - DNA, 12 bp, Artificial Sequence
  Oligonucleotide primer for the detection of SNP TSC0061270
tttatctatatt

SEQ ID NO: 375472 - DNA, 12 bp, Artificial Sequence
  Oligonucleotide primer for the detection of SNP TSC0061271
tagtaaatattg

SEQ ID NO: 375473 - DNA, 12 bp, Artificial Sequence
  Oligonucleotide primer for the detection of SNP TSC0061271
caataaacatta

SEQ ID NO: 375474 - DNA, 12 bp, Artificial Sequence
  Oligonucleotide primer for the detection of SNP TSC0061272
atccttaaaact

SEQ ID NO: 375475 - DNA, 12 bp, Artificial Sequence
  Oligonucleotide primer for the detection of SNP TSC0061272
tttaaaaatata

SEQ ID NO: 375476 - DNA, 12 bp, Artificial Sequence
  Oligonucleotide primer for the detection of SNP TSC0061275
attcaatatact

SEQ ID NO: 375477 - DNA, 12 bp, Artificial Sequence
  Oligonucleotide primer for the detection of SNP TSC0061275
aatgtttgaaaa

SEQ ID NO: 375478 - DNA, 12 bp, Artificial Sequence
  Oligonucleotide primer for the detection of SNP TSC0061275
atttaatatgtt

SEQ ID NO: 375479 - DNA, 12 bp, Artificial Sequence
  Oligonucleotide primer for the detection of SNP TSC0061280
ctaactaaattc

SEQ ID NO: 375480 - DNA, 12 bp, Artificial Sequence
  Oligonucleotide primer for the detection of SNP TSC0061280
agtaatataggg

SEQ ID NO: 375481 - DNA, 12 bp, Artificial Sequence
  Oligonucleotide primer for the detection of SNP TSC0061280
ttggttgaattt

SEQ ID NO: 375482 - DNA, 12 bp, Artificial Sequence
  Oligonucleotide primer for the detection of SNP TSC0061281
ggtaatttgttt

SEQ ID NO: 375483 - DNA, 12 bp, Artificial Sequence
  Oligonucleotide primer for the detection of SNP TSC0061281
atatttaggtag

SEQ ID NO: 375484 - DNA, 12 bp, Artificial Sequence
  Oligonucleotide primer for the detection of SNP TSC0061285
ataataaccaca

SEQ ID NO: 375485 - DNA, 12 bp, Artificial Sequence
  Oligonucleotide primer for the detection of SNP TSC0061285
tgaagggttgtg

SEQ ID NO: 375486 - DNA, 12 bp, Artificial Sequence
  Oligonucleotide primer for the detection of SNP TSC0061285
gtgatgattata

SEQ ID NO: 375487 - DNA, 12 bp, Artificial Sequence
  Oligonucleotide primer for the detection of SNP TSC0061286
tgaattttattt

SEQ ID NO: 375488 - DNA, 12 bp, Artificial Sequence
  Oligonucleotide primer for the detection of SNP TSC0061286
taaactttaccc

SEQ ID NO: 375489 - DNA, 12 bp, Artificial Sequence
  Oligonucleotide primer for the detection of SNP TSC0061286
tagagatggaga

SEQ ID NO: 375490 - DNA, 12 bp, Artificial Sequence
  Oligonucleotide primer for the detection of SNP TSC0061287
atatttgtagta

SEQ ID NO: 375491 - DNA, 12 bp, Artificial Sequence
  Oligonucleotide primer for the detection of SNP TSC0061287
atatttataata

SEQ ID NO: 375492 - DNA, 12 bp, Artificial Sequence
  Oligonucleotide primer for the detection of SNP TSC0061287
atatatgttatt

SEQ ID NO: 375493 - DNA, 12 bp, Artificial Sequence
  Oligonucleotide primer for the detection of SNP TSC0061288
aaaacattattt

SEQ ID NO: 375494 - DNA, 12 bp, Artificial Sequence
  Oligonucleotide primer for the detection of SNP TSC0061288
attaaattagaa

SEQ ID NO: 375495 - DNA, 12 bp, Artificial Sequence
  Oligonucleotide primer for the detection of SNP TSC0061291
taaaaacttact

SEQ ID NO: 375496 - DNA, 12 bp, Artificial Sequence
  Oligonucleotide primer for the detection of SNP TSC0061291
tttggtattgta

SEQ ID NO: 375497 - DNA, 12 bp, Artificial Sequence
  Oligonucleotide primer for the detection of SNP TSC0061293
tactacaccttc

SEQ ID NO: 375498 - DNA, 12 bp, Artificial Sequence
  Oligonucleotide primer for the detection of SNP TSC0061293
tgatttaaggaa

SEQ ID NO: 375499 - DNA, 12 bp, Artificial Sequence
  Oligonucleotide primer for the detection of SNP TSC0061294
cctaaatactca

SEQ ID NO: 375500 - DNA, 12 bp, Artificial Sequence
  Oligonucleotide primer for the detection of SNP TSC0061294
tgtgtttgtttt

SEQ ID NO: 375501 - DNA, 12 bp, Artificial Sequence
  Oligonucleotide primer for the detection of SNP TSC0061294
tgtgttcgtttt

SEQ ID NO: 375502 - DNA, 12 bp, Artificial Sequence
  Oligonucleotide primer for the detection of SNP TSC0061294
tgtgtttgtttc

SEQ ID NO: 375503 - DNA, 12 bp, Artificial Sequence
  Oligonucleotide primer for the detection of SNP TSC0061294
tgtgttcgtttc

SEQ ID NO: 375504 - DNA, 12 bp, Artificial Sequence
  Oligonucleotide primer for the detection of SNP TSC0061294
tatacccacttc

SEQ ID NO: 375505 - DNA, 12 bp, Artificial Sequence
  Oligonucleotide primer for the detection of SNP TSC0061294
tatacccgcttc

SEQ ID NO: 375506 - DNA, 12 bp, Artificial Sequence
  Oligonucleotide primer for the detection of SNP TSC0061295
caaaaaacaatc

SEQ ID NO: 375507 - DNA, 12 bp, Artificial Sequence
  Oligonucleotide primer for the detection of SNP TSC0061295
cgaaaaacaatc

SEQ ID NO: 375508 - DNA, 12 bp, Artificial Sequence
  Oligonucleotide primer for the detection of SNP TSC0061295
gggttgagttaa

SEQ ID NO: 375509 - DNA, 12 bp, Artificial Sequence
  Oligonucleotide primer for the detection of SNP TSC0061295
aaactaaaccaa

SEQ ID NO: 375510 - DNA, 12 bp, Artificial Sequence
  Oligonucleotide primer for the detection of SNP TSC0061295
tgaaagataatt

SEQ ID NO: 375511 - DNA, 12 bp, Artificial Sequence
  Oligonucleotide primer for the detection of SNP TSC0061295
cgaaagataatt

SEQ ID NO: 375512 - DNA, 12 bp, Artificial Sequence
  Oligonucleotide primer for the detection of SNP TSC0061296
atatcccataaa

SEQ ID NO: 375513 - DNA, 12 bp, Artificial Sequence
  Oligonucleotide primer for the detection of SNP TSC0061296
atatcccgtaaa

SEQ ID NO: 375514 - DNA, 12 bp, Artificial Sequence
  Oligonucleotide primer for the detection of SNP TSC0061296
tgaatggttttt

SEQ ID NO: 375515 - DNA, 12 bp, Artificial Sequence
  Oligonucleotide primer for the detection of SNP TSC0061296
tttatgttttgt

SEQ ID NO: 375516 - DNA, 12 bp, Artificial Sequence
  Oligonucleotide primer for the detection of SNP TSC0061296
tttatgtttcgt

SEQ ID NO: 375517 - DNA, 12 bp, Artificial Sequence
  Oligonucleotide primer for the detection of SNP TSC0061297
tttctatcccac

SEQ ID NO: 375518 - DNA, 12 bp, Artificial Sequence
  Oligonucleotide primer for the detection of SNP TSC0061298
tggttagagtat

SEQ ID NO: 375519 - DNA, 12 bp, Artificial Sequence
  Oligonucleotide primer for the detection of SNP TSC0061298
taactaaaatac

SEQ ID NO: 375520 - DNA, 12 bp, Artificial Sequence
  Oligonucleotide primer for the detection of SNP TSC0061298
aaaaagtaaaaa

SEQ ID NO: 375521 - DNA, 12 bp, Artificial Sequence
  Oligonucleotide primer for the detection of SNP TSC0061299
atctaccttctt

SEQ ID NO: 375522 - DNA, 12 bp, Artificial Sequence
  Oligonucleotide primer for the detection of SNP TSC0061299
ttgaaaggtgga

SEQ ID NO: 375523 - DNA, 12 bp, Artificial Sequence
  Oligonucleotide primer for the detection of SNP TSC0061301
ttaccattaaaa

SEQ ID NO: 375524 - DNA, 12 bp, Artificial Sequence
  Oligonucleotide primer for the detection of SNP TSC0061301
ttcctttcctct

SEQ ID NO: 375525 - DNA, 12 bp, Artificial Sequence
  Oligonucleotide primer for the detection of SNP TSC0061301
ttgttattagaa

SEQ ID NO: 375526 - DNA, 12 bp, Artificial Sequence
  Oligonucleotide primer for the detection of SNP TSC0061306
aaatgtttttta

SEQ ID NO: 375527 - DNA, 12 bp, Artificial Sequence
  Oligonucleotide primer for the detection of SNP TSC0061306
aaacgtttttta

SEQ ID NO: 375528 - DNA, 12 bp, Artificial Sequence
  Oligonucleotide primer for the detection of SNP TSC0061306
aaacacctttta

SEQ ID NO: 375529 - DNA, 12 bp, Artificial Sequence
  Oligonucleotide primer for the detection of SNP TSC0061306
aaacgcctttta

SEQ ID NO: 375530 - DNA, 12 bp, Artificial Sequence
  Oligonucleotide primer for the detection of SNP TSC0061310
aaaccgaaaacc

SEQ ID NO: 375531 - DNA, 12 bp, Artificial Sequence
  Oligonucleotide primer for the detection of SNP TSC0061310
ctctactctata

SEQ ID NO: 375532 - DNA, 12 bp, Artificial Sequence
  Oligonucleotide primer for the detection of SNP TSC0061310
aagttgagggtt

SEQ ID NO: 375533 - DNA, 12 bp, Artificial Sequence
  Oligonucleotide primer for the detection of SNP TSC0061310
aagtcgagggtt

SEQ ID NO: 375534 - DNA, 12 bp, Artificial Sequence
  Oligonucleotide primer for the detection of SNP TSC0061311
atcctcataacc

SEQ ID NO: 375535 - DNA, 12 bp, Artificial Sequence
  Oligonucleotide primer for the detection of SNP TSC0061311
tggtttaattta

SEQ ID NO: 375536 - DNA, 12 bp, Artificial Sequence
  Oligonucleotide primer for the detection of SNP TSC0061312
aaaaccaaaact

SEQ ID NO: 375537 - DNA, 12 bp, Artificial Sequence
  Oligonucleotide primer for the detection of SNP TSC0061313
atgtaagagtta

SEQ ID NO: 375538 - DNA, 12 bp, Artificial Sequence
  Oligonucleotide primer for the detection of SNP TSC0061314
cactatttttat

SEQ ID NO: 375539 - DNA, 12 bp, Artificial Sequence
  Oligonucleotide primer for the detection of SNP TSC0061317
taccttccccat

SEQ ID NO: 375540 - DNA, 12 bp, Artificial Sequence
  Oligonucleotide primer for the detection of SNP TSC0061318
tttattaggagt

SEQ ID NO: 375541 - DNA, 12 bp, Artificial Sequence
  Oligonucleotide primer for the detection of SNP TSC0061318
tcaccaaaaata

SEQ ID NO: 375542 - DNA, 12 bp, Artificial Sequence
  Oligonucleotide primer for the detection of SNP TSC0061318
ttaagatggaat

SEQ ID NO: 375543 - DNA, 12 bp, Artificial Sequence
  Oligonucleotide primer for the detection of SNP TSC0061319
ctctaatataat

SEQ ID NO: 375544 - DNA, 12 bp, Artificial Sequence
  Oligonucleotide primer for the detection of SNP TSC0061319
gatatagagtta

SEQ ID NO: 375545 - DNA, 12 bp, Artificial Sequence
  Oligonucleotide primer for the detection of SNP TSC0061320
cataaaaatcta

SEQ ID NO: 375546 - DNA, 12 bp, Artificial Sequence
  Oligonucleotide primer for the detection of SNP TSC0061320
tatggaggtttg

SEQ ID NO: 375547 - DNA, 12 bp, Artificial Sequence
  Oligonucleotide primer for the detection of SNP TSC0061321
taaactctaccc

SEQ ID NO: 375548 - DNA, 12 bp, Artificial Sequence
  Oligonucleotide primer for the detection of SNP TSC0061321
gggtagatttta

SEQ ID NO: 375549 - DNA, 12 bp, Artificial Sequence
  Oligonucleotide primer for the detection of SNP TSC0061325
acctaaattcta

SEQ ID NO: 375550 - DNA, 12 bp, Artificial Sequence
  Oligonucleotide primer for the detection of SNP TSC0061325
ttaaaaaaacct

SEQ ID NO: 375551 - DNA, 12 bp, Artificial Sequence
  Oligonucleotide primer for the detection of SNP TSC0061326
atataaatttat

SEQ ID NO: 375552 - DNA, 12 bp, Artificial Sequence
  Oligonucleotide primer for the detection of SNP TSC0061326
atttgtgatgaa

SEQ ID NO: 375553 - DNA, 12 bp, Artificial Sequence
  Oligonucleotide primer for the detection of SNP TSC0006761
ttgtcgttatgt

SEQ ID NO: 375554 - DNA, 12 bp, Artificial Sequence
  Oligonucleotide primer for the detection of SNP TSC0006761
ctaccactatat

SEQ ID NO: 375555 - DNA, 12 bp, Artificial Sequence
  Oligonucleotide primer for the detection of SNP TSC0006761
ctaccgctatat

SEQ ID NO: 375556 - DNA, 12 bp, Artificial Sequence
  Oligonucleotide primer for the detection of SNP TSC0006762
ataatcataact

SEQ ID NO: 375557 - DNA, 12 bp, Artificial Sequence
  Oligonucleotide primer for the detection of SNP TSC0006762
ttaatgttgtag

SEQ ID NO: 375558 - DNA, 12 bp, Artificial Sequence
  Oligonucleotide primer for the detection of SNP TSC0006762
ttaacgttgtag

SEQ ID NO: 375559 - DNA, 12 bp, Artificial Sequence
  Oligonucleotide primer for the detection of SNP TSC0061330
tatatgttgttg

SEQ ID NO: 375560 - DNA, 12 bp, Artificial Sequence
  Oligonucleotide primer for the detection of SNP TSC0061330
tatacgttgttg

SEQ ID NO: 375561 - DNA, 12 bp, Artificial Sequence
  Oligonucleotide primer for the detection of SNP TSC0061334
atcctaaatttt

SEQ ID NO: 375562 - DNA, 12 bp, Artificial Sequence
  Oligonucleotide primer for the detection of SNP TSC0061334
aattggaggtag

SEQ ID NO: 375563 - DNA, 12 bp, Artificial Sequence
  Oligonucleotide primer for the detection of SNP TSC0061335
ttggtggagtta

SEQ ID NO: 375564 - DNA, 12 bp, Artificial Sequence
  Oligonucleotide primer for the detection of SNP TSC0061335
tcggtggagtta

SEQ ID NO: 375565 - DNA, 12 bp, Artificial Sequence
  Oligonucleotide primer for the detection of SNP TSC0061335
ataaaaccaaaa

SEQ ID NO: 375566 - DNA, 12 bp, Artificial Sequence
  Oligonucleotide primer for the detection of SNP TSC0061335
taatggtaaagg

SEQ ID NO: 375567 - DNA, 12 bp, Artificial Sequence
  Oligonucleotide primer for the detection of SNP TSC0061336
ccttaacccaaa

SEQ ID NO: 375568 - DNA, 12 bp, Artificial Sequence
  Oligonucleotide primer for the detection of SNP TSC0061336
gagagtaagggt

SEQ ID NO: 375569 - DNA, 12 bp, Artificial Sequence
  Oligonucleotide primer for the detection of SNP TSC0061336
ttttagtttaag

SEQ ID NO: 375570 - DNA, 12 bp, Artificial Sequence
  Oligonucleotide primer for the detection of SNP TSC0061337
aaataacaaatt

SEQ ID NO: 375571 - DNA, 12 bp, Artificial Sequence
  Oligonucleotide primer for the detection of SNP TSC0061337
aatagagtgttg

SEQ ID NO: 375572 - DNA, 12 bp, Artificial Sequence
  Oligonucleotide primer for the detection of SNP TSC0061338
cacaatccccca

SEQ ID NO: 375573 - DNA, 12 bp, Artificial Sequence
  Oligonucleotide primer for the detection of SNP TSC0061338
taattctttatt

SEQ ID NO: 375574 - DNA, 12 bp, Artificial Sequence
  Oligonucleotide primer for the detection of SNP TSC0061339
ttaaattaaaaa

SEQ ID NO: 375575 - DNA, 12 bp, Artificial Sequence
  Oligonucleotide primer for the detection of SNP TSC0061339
ctatttcataaa

SEQ ID NO: 375576 - DNA, 12 bp, Artificial Sequence
  Oligonucleotide primer for the detection of SNP TSC0061339
ctatttcgtaaa

SEQ ID NO: 375577 - DNA, 12 bp, Artificial Sequence
  Oligonucleotide primer for the detection of SNP TSC0061339
ttggattaaaag

SEQ ID NO: 375578 - DNA, 12 bp, Artificial Sequence
  Oligonucleotide primer for the detection of SNP TSC0061340
attttatgatat

SEQ ID NO: 375579 - DNA, 12 bp, Artificial Sequence
  Oligonucleotide primer for the detection of SNP TSC0061340
taaaagtatagg

SEQ ID NO: 375580 - DNA, 12 bp, Artificial Sequence
  Oligonucleotide primer for the detection of SNP TSC0061341
attcaaattcat

SEQ ID NO: 375581 - DNA, 12 bp, Artificial Sequence
  Oligonucleotide primer for the detection of SNP TSC0061341
gaattaaataag

SEQ ID NO: 375582 - DNA, 12 bp, Artificial Sequence
  Oligonucleotide primer for the detection of SNP TSC0061342
tttaggtagtta

SEQ ID NO: 375583 - DNA, 12 bp, Artificial Sequence
  Oligonucleotide primer for the detection of SNP TSC0061342
tctaaacaacca

SEQ ID NO: 375584 - DNA, 12 bp, Artificial Sequence
  Oligonucleotide primer for the detection of SNP TSC0061344
ctaaaacaacaa

SEQ ID NO: 375585 - DNA, 12 bp, Artificial Sequence
  Oligonucleotide primer for the detection of SNP TSC0061344
tatgaatatgat

SEQ ID NO: 375586 - DNA, 12 bp, Artificial Sequence
  Oligonucleotide primer for the detection of SNP TSC0061344
tatgaatacgat

SEQ ID NO: 375587 - DNA, 12 bp, Artificial Sequence
  Oligonucleotide primer for the detection of SNP TSC0061344
tataaatacaat

SEQ ID NO: 375588 - DNA, 12 bp, Artificial Sequence
  Oligonucleotide primer for the detection of SNP TSC0061344
tataaatacgat

SEQ ID NO: 375589 - DNA, 12 bp, Artificial Sequence
  Oligonucleotide primer for the detection of SNP TSC0061344
ttgaagtaatag

SEQ ID NO: 375590 - DNA, 12 bp, Artificial Sequence
  Oligonucleotide primer for the detection of SNP TSC0061345
actaaacaatat

SEQ ID NO: 375591 - DNA, 12 bp, Artificial Sequence
  Oligonucleotide primer for the detection of SNP TSC0061345
agtttttatcgg

SEQ ID NO: 375592 - DNA, 12 bp, Artificial Sequence
  Oligonucleotide primer for the detection of SNP TSC0061346
attaataaatcc

SEQ ID NO: 375593 - DNA, 12 bp, Artificial Sequence
  Oligonucleotide primer for the detection of SNP TSC0061346
attttagaatgg

SEQ ID NO: 375594 - DNA, 12 bp, Artificial Sequence
  Oligonucleotide primer for the detection of SNP TSC0061346
attttagaacgg

SEQ ID NO: 375595 - DNA, 12 bp, Artificial Sequence
  Oligonucleotide primer for the detection of SNP TSC0061346
atcccaaaacaa

SEQ ID NO: 375596 - DNA, 12 bp, Artificial Sequence
  Oligonucleotide primer for the detection of SNP TSC0061346
atcccaaaacga

SEQ ID NO: 375597 - DNA, 12 bp, Artificial Sequence
  Oligonucleotide primer for the detection of SNP TSC0061346
gttagtggattt

SEQ ID NO: 375598 - DNA, 12 bp, Artificial Sequence
  Oligonucleotide primer for the detection of SNP TSC0061347
aaaactccaccc

SEQ ID NO: 375599 - DNA, 12 bp, Artificial Sequence
  Oligonucleotide primer for the detection of SNP TSC0061347
aaaactccgccc

SEQ ID NO: 375600 - DNA, 12 bp, Artificial Sequence
  Oligonucleotide primer for the detection of SNP TSC0061347
ttttgtatttga

SEQ ID NO: 375601 - DNA, 12 bp, Artificial Sequence
  Oligonucleotide primer for the detection of SNP TSC0061348
tctaatccctaa

SEQ ID NO: 375602 - DNA, 12 bp, Artificial Sequence
  Oligonucleotide primer for the detection of SNP TSC0061348
aattatggaatg

SEQ ID NO: 375603 - DNA, 12 bp, Artificial Sequence
  Oligonucleotide primer for the detection of SNP TSC0061349
ttattccattac

SEQ ID NO: 375604 - DNA, 12 bp, Artificial Sequence
  Oligonucleotide primer for the detection of SNP TSC0061349
tataagagggaa

SEQ ID NO: 375605 - DNA, 12 bp, Artificial Sequence
  Oligonucleotide primer for the detection of SNP TSC0061350
aaaccttcaacc

SEQ ID NO: 375606 - DNA, 12 bp, Artificial Sequence
  Oligonucleotide primer for the detection of SNP TSC0061350
agttagatttta

SEQ ID NO: 375607 - DNA, 12 bp, Artificial Sequence
  Oligonucleotide primer for the detection of SNP TSC0061351
cctaacttttcc

SEQ ID NO: 375608 - DNA, 12 bp, Artificial Sequence
  Oligonucleotide primer for the detection of SNP TSC0061351
ttaaaaagttgg

SEQ ID NO: 375609 - DNA, 12 bp, Artificial Sequence
  Oligonucleotide primer for the detection of SNP TSC0061352
cttaactttatc

SEQ ID NO: 375610 - DNA, 12 bp, Artificial Sequence
  Oligonucleotide primer for the detection of SNP TSC0061353
aaaaattatcca

SEQ ID NO: 375611 - DNA, 12 bp, Artificial Sequence
  Oligonucleotide primer for the detection of SNP TSC0061353
ttgttattatgt

SEQ ID NO: 375612 - DNA, 12 bp, Artificial Sequence
  Oligonucleotide primer for the detection of SNP TSC0061353
tcgttattatgt

SEQ ID NO: 375613 - DNA, 12 bp, Artificial Sequence
  Oligonucleotide primer for the detection of SNP TSC0061353
ttgttattacgt

SEQ ID NO: 375614 - DNA, 12 bp, Artificial Sequence
  Oligonucleotide primer for the detection of SNP TSC0061353
tcgttattacgt

SEQ ID NO: 375615 - DNA, 12 bp, Artificial Sequence
  Oligonucleotide primer for the detection of SNP TSC0061353
ttgttattatgc

SEQ ID NO: 375616 - DNA, 12 bp, Artificial Sequence
  Oligonucleotide primer for the detection of SNP TSC0061353
tcgttattatgc

SEQ ID NO: 375617 - DNA, 12 bp, Artificial Sequence
  Oligonucleotide primer for the detection of SNP TSC0061353
ttgttattacgc

SEQ ID NO: 375618 - DNA, 12 bp, Artificial Sequence
  Oligonucleotide primer for the detection of SNP TSC0061353
tcgttattacgc

SEQ ID NO: 375619 - DNA, 12 bp, Artificial Sequence
  Oligonucleotide primer for the detection of SNP TSC0061353
ccaccaccacac

SEQ ID NO: 375620 - DNA, 12 bp, Artificial Sequence
  Oligonucleotide primer for the detection of SNP TSC0061353
ccaccaccacgc

SEQ ID NO: 375621 - DNA, 12 bp, Artificial Sequence
  Oligonucleotide primer for the detection of SNP TSC0061353
ccgccaccacac

SEQ ID NO: 375622 - DNA, 12 bp, Artificial Sequence
  Oligonucleotide primer for the detection of SNP TSC0061353
ccgccaccacgc

SEQ ID NO: 375623 - DNA, 12 bp, Artificial Sequence
  Oligonucleotide primer for the detection of SNP TSC0061353
taaaaattattt

SEQ ID NO: 375624 - DNA, 12 bp, Artificial Sequence
  Oligonucleotide primer for the detection of SNP TSC0061354
aaaatataatct

SEQ ID NO: 375625 - DNA, 12 bp, Artificial Sequence
  Oligonucleotide primer for the detection of SNP TSC0061356
aaccccccacat

SEQ ID NO: 375626 - DNA, 12 bp, Artificial Sequence
  Oligonucleotide primer for the detection of SNP TSC0061356
aaccccccacgt

SEQ ID NO: 375627 - DNA, 12 bp, Artificial Sequence
  Oligonucleotide primer for the detection of SNP TSC0061356
ccaacaaaccca

SEQ ID NO: 375628 - DNA, 12 bp, Artificial Sequence
  Oligonucleotide primer for the detection of SNP TSC0061356
gattttttatgt

SEQ ID NO: 375629 - DNA, 12 bp, Artificial Sequence
  Oligonucleotide primer for the detection of SNP TSC0061356
gattttttacgt

SEQ ID NO: 375630 - DNA, 12 bp, Artificial Sequence
  Oligonucleotide primer for the detection of SNP TSC0061357
aatcctaaccac

SEQ ID NO: 375631 - DNA, 12 bp, Artificial Sequence
  Oligonucleotide primer for the detection of SNP TSC0061357
aatcctaaccgc

SEQ ID NO: 375632 - DNA, 12 bp, Artificial Sequence
  Oligonucleotide primer for the detection of SNP TSC0061357
tgtaggttgagg

SEQ ID NO: 375633 - DNA, 12 bp, Artificial Sequence
  Oligonucleotide primer for the detection of SNP TSC0061358
ataactccacct

SEQ ID NO: 375634 - DNA, 12 bp, Artificial Sequence
  Oligonucleotide primer for the detection of SNP TSC0061358
tttggatggtaa

SEQ ID NO: 375635 - DNA, 12 bp, Artificial Sequence
  Oligonucleotide primer for the detection of SNP TSC0061361
tttgaataaatt

SEQ ID NO: 375636 - DNA, 12 bp, Artificial Sequence
  Oligonucleotide primer for the detection of SNP TSC0061361
tttaaataaatc

SEQ ID NO: 375637 - DNA, 12 bp, Artificial Sequence
  Oligonucleotide primer for the detection of SNP TSC0061361
ggaagtttttgg

SEQ ID NO: 375638 - DNA, 12 bp, Artificial Sequence
  Oligonucleotide primer for the detection of SNP TSC0061362
aagtataaagaa

SEQ ID NO: 375639 - DNA, 12 bp, Artificial Sequence
  Oligonucleotide primer for the detection of SNP TSC0061363
ttaattttaaat

SEQ ID NO: 375640 - DNA, 12 bp, Artificial Sequence
  Oligonucleotide primer for the detection of SNP TSC0061363
taaaaatttgaa

SEQ ID NO: 375641 - DNA, 12 bp, Artificial Sequence
  Oligonucleotide primer for the detection of SNP TSC0061364
taaaattatata

SEQ ID NO: 375642 - DNA, 12 bp, Artificial Sequence
  Oligonucleotide primer for the detection of SNP TSC0061364
caaaattataca

SEQ ID NO: 375643 - DNA, 12 bp, Artificial Sequence
  Oligonucleotide primer for the detection of SNP TSC0061364
agggtaaggagt

SEQ ID NO: 375644 - DNA, 12 bp, Artificial Sequence
  Oligonucleotide primer for the detection of SNP TSC0061367
taaaattcaaca

SEQ ID NO: 375645 - DNA, 12 bp, Artificial Sequence
  Oligonucleotide primer for the detection of SNP TSC0061367
ttattatgaagg

SEQ ID NO: 375646 - DNA, 12 bp, Artificial Sequence
  Oligonucleotide primer for the detection of SNP TSC0061367
ttatcataaaaa

SEQ ID NO: 375647 - DNA, 12 bp, Artificial Sequence
  Oligonucleotide primer for the detection of SNP TSC0008865
accatctcactc

SEQ ID NO: 375648 - DNA, 12 bp, Artificial Sequence
  Oligonucleotide primer for the detection of SNP TSC0061368
atgttagtagta

SEQ ID NO: 375649 - DNA, 12 bp, Artificial Sequence
  Oligonucleotide primer for the detection of SNP TSC0061368
atatcaataaca

SEQ ID NO: 375650 - DNA, 12 bp, Artificial Sequence
  Oligonucleotide primer for the detection of SNP TSC0061368
ggatgggatttt

SEQ ID NO: 375651 - DNA, 12 bp, Artificial Sequence
  Oligonucleotide primer for the detection of SNP TSC0061369
accttttataaa

SEQ ID NO: 375652 - DNA, 12 bp, Artificial Sequence
  Oligonucleotide primer for the detection of SNP TSC0061369
aggtaaattgat

SEQ ID NO: 375653 - DNA, 12 bp, Artificial Sequence
  Oligonucleotide primer for the detection of SNP TSC0061369
aggtaaatcgat

SEQ ID NO: 375654 - DNA, 12 bp, Artificial Sequence
  Oligonucleotide primer for the detection of SNP TSC0061369
aacaaatcaata

SEQ ID NO: 375655 - DNA, 12 bp, Artificial Sequence
  Oligonucleotide primer for the detection of SNP TSC0061369
aacaaatcgata

SEQ ID NO: 375656 - DNA, 12 bp, Artificial Sequence
  Oligonucleotide primer for the detection of SNP TSC0061370
catatattacta

SEQ ID NO: 375657 - DNA, 12 bp, Artificial Sequence
  Oligonucleotide primer for the detection of SNP TSC0061370
taatactcacct

SEQ ID NO: 375658 - DNA, 12 bp, Artificial Sequence
  Oligonucleotide primer for the detection of SNP TSC0061371
ccatatattact

SEQ ID NO: 375659 - DNA, 12 bp, Artificial Sequence
  Oligonucleotide primer for the detection of SNP TSC0061371
aatgtttattta

SEQ ID NO: 375660 - DNA, 12 bp, Artificial Sequence
  Oligonucleotide primer for the detection of SNP TSC0061371
aatactcaccta

SEQ ID NO: 375661 - DNA, 12 bp, Artificial Sequence
  Oligonucleotide primer for the detection of SNP TSC0061372
attataccaatt

SEQ ID NO: 375662 - DNA, 12 bp, Artificial Sequence
  Oligonucleotide primer for the detection of SNP TSC0061372
ttgttgggagta

SEQ ID NO: 375663 - DNA, 12 bp, Artificial Sequence
  Oligonucleotide primer for the detection of SNP TSC0061372
tcgttgggagta

SEQ ID NO: 375664 - DNA, 12 bp, Artificial Sequence
  Oligonucleotide primer for the detection of SNP TSC0061373
tgtaggttgatt

SEQ ID NO: 375665 - DNA, 12 bp, Artificial Sequence
  Oligonucleotide primer for the detection of SNP TSC0061373
tacaaactaatt

SEQ ID NO: 375666 - DNA, 12 bp, Artificial Sequence
  Oligonucleotide primer for the detection of SNP TSC0061373
ttagtaggttat

SEQ ID NO: 375667 - DNA, 12 bp, Artificial Sequence
  Oligonucleotide primer for the detection of SNP TSC0061374
caaaaaatttat

SEQ ID NO: 375668 - DNA, 12 bp, Artificial Sequence
  Oligonucleotide primer for the detection of SNP TSC0061374
ttatatttttag

SEQ ID NO: 375669 - DNA, 12 bp, Artificial Sequence
  Oligonucleotide primer for the detection of SNP TSC0061379
actactttatac

SEQ ID NO: 375670 - DNA, 12 bp, Artificial Sequence
  Oligonucleotide primer for the detection of SNP TSC0061380
ggtattttggat

SEQ ID NO: 375671 - DNA, 12 bp, Artificial Sequence
  Oligonucleotide primer for the detection of SNP TSC0061380
aatattctaaat

SEQ ID NO: 375672 - DNA, 12 bp, Artificial Sequence
  Oligonucleotide primer for the detection of SNP TSC0061380
ttataaaatgat

SEQ ID NO: 375673 - DNA, 12 bp, Artificial Sequence
  Oligonucleotide primer for the detection of SNP TSC0005247
tgttaatgaaag

SEQ ID NO: 375674 - DNA, 12 bp, Artificial Sequence
  Oligonucleotide primer for the detection of SNP TSC0061382
ttgttgtattta

SEQ ID NO: 375675 - DNA, 12 bp, Artificial Sequence
  Oligonucleotide primer for the detection of SNP TSC0061382
tcgttgtattta

SEQ ID NO: 375676 - DNA, 12 bp, Artificial Sequence
  Oligonucleotide primer for the detection of SNP TSC0061383
ttctactcattc

SEQ ID NO: 375677 - DNA, 12 bp, Artificial Sequence
  Oligonucleotide primer for the detection of SNP TSC0061383
tatagtaaatgt

SEQ ID NO: 375678 - DNA, 12 bp, Artificial Sequence
  Oligonucleotide primer for the detection of SNP TSC0061384
cattttccaatt

SEQ ID NO: 375679 - DNA, 12 bp, Artificial Sequence
  Oligonucleotide primer for the detection of SNP TSC0061384
tatgaaaaagtg

SEQ ID NO: 375680 - DNA, 12 bp, Artificial Sequence
  Oligonucleotide primer for the detection of SNP TSC0005498
atattaggatag

SEQ ID NO: 375681 - DNA, 12 bp, Artificial Sequence
  Oligonucleotide primer for the detection of SNP TSC0008914
aacttattatat

SEQ ID NO: 375682 - DNA, 12 bp, Artificial Sequence
  Oligonucleotide primer for the detection of SNP TSC0008914
gaaattatagaa

SEQ ID NO: 375683 - DNA, 12 bp, Artificial Sequence
  Oligonucleotide primer for the detection of SNP TSC0061385
ctattctccttt

SEQ ID NO: 375684 - DNA, 12 bp, Artificial Sequence
  Oligonucleotide primer for the detection of SNP TSC0061385
tttgattatgaa

SEQ ID NO: 375685 - DNA, 12 bp, Artificial Sequence
  Oligonucleotide primer for the detection of SNP TSC0061385
tttgattacgaa

SEQ ID NO: 375686 - DNA, 12 bp, Artificial Sequence
  Oligonucleotide primer for the detection of SNP TSC0061385
cctaactacaaa

SEQ ID NO: 375687 - DNA, 12 bp, Artificial Sequence
  Oligonucleotide primer for the detection of SNP TSC0061385
cctaactacgaa

SEQ ID NO: 375688 - DNA, 12 bp, Artificial Sequence
  Oligonucleotide primer for the detection of SNP TSC0000447
taataaataaac

SEQ ID NO: 375689 - DNA, 12 bp, Artificial Sequence
  Oligonucleotide primer for the detection of SNP TSC0000447
aatttgaagtta

SEQ ID NO: 375690 - DNA, 12 bp, Artificial Sequence
  Oligonucleotide primer for the detection of SNP TSC0000448
aaaccttcaaaa

SEQ ID NO: 375691 - DNA, 12 bp, Artificial Sequence
  Oligonucleotide primer for the detection of SNP TSC0061387
tataacacccct

SEQ ID NO: 375692 - DNA, 12 bp, Artificial Sequence
  Oligonucleotide primer for the detection of SNP TSC0061387
tgggtattttta

SEQ ID NO: 375693 - DNA, 12 bp, Artificial Sequence
  Oligonucleotide primer for the detection of SNP TSC0061387
cgggtattttta

SEQ ID NO: 375694 - DNA, 12 bp, Artificial Sequence
  Oligonucleotide primer for the detection of SNP TSC0061387
caaacactccca

SEQ ID NO: 375695 - DNA, 12 bp, Artificial Sequence
  Oligonucleotide primer for the detection of SNP TSC0061387
cgaacactccca

SEQ ID NO: 375696 - DNA, 12 bp, Artificial Sequence
  Oligonucleotide primer for the detection of SNP TSC0061387
tgtggtattttt

SEQ ID NO: 375697 - DNA, 12 bp, Artificial Sequence
  Oligonukleotid-Primer
tatttattcctc

SEQ ID NO: 375698 - DNA, 12 bp, Artificial Sequence
  Oligonucleotide primer for the detection of SNP TSC0061389
ttctaaaatcca

SEQ ID NO: 375699 - DNA, 12 bp, Artificial Sequence
  Oligonucleotide primer for the detection of SNP TSC0061391
ccatcccaacta

SEQ ID NO: 375700 - DNA, 12 bp, Artificial Sequence
  Oligonucleotide primer for the detection of SNP TSC0061392
aacacataaatc

SEQ ID NO: 375701 - DNA, 12 bp, Artificial Sequence
  Oligonucleotide primer for the detection of SNP TSC0061392
atttttaagtag

SEQ ID NO: 375702 - DNA, 12 bp, Artificial Sequence
  Oligonucleotide primer for the detection of SNP TSC0061394
taagattatatt

SEQ ID NO: 375703 - DNA, 12 bp, Artificial Sequence
  Oligonucleotide primer for the detection of SNP TSC0061397
tcacactaatat

SEQ ID NO: 375704 - DNA, 12 bp, Artificial Sequence
  Oligonucleotide primer for the detection of SNP TSC0061397
tttatttaattg

SEQ ID NO: 375705 - DNA, 12 bp, Artificial Sequence
  Oligonucleotide primer for the detection of SNP TSC0061398
gtttattaaatt

SEQ ID NO: 375706 - DNA, 12 bp, Artificial Sequence
  Oligonucleotide primer for the detection of SNP TSC0061398
acctattaaacc

SEQ ID NO: 375707 - DNA, 12 bp, Artificial Sequence
  Oligonucleotide primer for the detection of SNP TSC0061398
tgagttaggatt

SEQ ID NO: 375708 - DNA, 12 bp, Artificial Sequence
  Oligonucleotide primer for the detection of SNP TSC0061399
aaacaacaacac

SEQ ID NO: 375709 - DNA, 12 bp, Artificial Sequence
  Oligonucleotide primer for the detection of SNP TSC0061399
aggggtgattgg

SEQ ID NO: 375710 - DNA, 12 bp, Artificial Sequence
  Oligonucleotide primer for the detection of SNP TSC0061400
aataaacaccct

SEQ ID NO: 375711 - DNA, 12 bp, Artificial Sequence
  Oligonucleotide primer for the detection of SNP TSC0061400
tgagtattttgg

SEQ ID NO: 375712 - DNA, 12 bp, Artificial Sequence
  Oligonucleotide primer for the detection of SNP TSC0061401
cttaaaccaaat

SEQ ID NO: 375713 - DNA, 12 bp, Artificial Sequence
  Oligonucleotide primer for the detection of SNP TSC0061401
gttttggttgga

SEQ ID NO: 375714 - DNA, 12 bp, Artificial Sequence
  Oligonucleotide primer for the detection of SNP TSC0061401
gttttggtcgga

SEQ ID NO: 375715 - DNA, 12 bp, Artificial Sequence
  Oligonucleotide primer for the detection of SNP TSC0061402
tacaaataccac

SEQ ID NO: 375716 - DNA, 12 bp, Artificial Sequence
  Oligonucleotide primer for the detection of SNP TSC0061402
gttgtgtgttag

SEQ ID NO: 375717 - DNA, 12 bp, Artificial Sequence
  Oligonucleotide primer for the detection of SNP TSC0061402
gtcgtgtgttag

SEQ ID NO: 375718 - DNA, 12 bp, Artificial Sequence
  Oligonucleotide primer for the detection of SNP TSC0061403
tctaaaataatt

SEQ ID NO: 375719 - DNA, 12 bp, Artificial Sequence
  Oligonucleotide primer for the detection of SNP TSC0061403
gagtaatttaga

SEQ ID NO: 375720 - DNA, 12 bp, Artificial Sequence
  Oligonucleotide primer for the detection of SNP TSC0061404
taacctaatttc

SEQ ID NO: 375721 - DNA, 12 bp, Artificial Sequence
  Oligonucleotide primer for the detection of SNP TSC0061404
tggagtaaaata

SEQ ID NO: 375722 - DNA, 12 bp, Artificial Sequence
  Oligonucleotide primer for the detection of SNP TSC0061405
atccctaactca

SEQ ID NO: 375723 - DNA, 12 bp, Artificial Sequence
  Oligonucleotide primer for the detection of SNP TSC0061405
ggttggaaggat

SEQ ID NO: 375724 - DNA, 12 bp, Artificial Sequence
  Oligonucleotide primer for the detection of SNP TSC0061406
ctcctatcctta

SEQ ID NO: 375725 - DNA, 12 bp, Artificial Sequence
  Oligonucleotide primer for the detection of SNP TSC0061406
gatagtgttgtg

SEQ ID NO: 375726 - DNA, 12 bp, Artificial Sequence
  Oligonucleotide primer for the detection of SNP TSC0061406
gatagtgtcgtg

SEQ ID NO: 375727 - DNA, 12 bp, Artificial Sequence
  Oligonucleotide primer for the detection of SNP TSC0061406
aacaataccata

SEQ ID NO: 375728 - DNA, 12 bp, Artificial Sequence
  Oligonucleotide primer for the detection of SNP TSC0061406
aacaataccgta

SEQ ID NO: 375729 - DNA, 12 bp, Artificial Sequence
  Oligonukleotid-Primer
cctcaataatat

SEQ ID NO: 375730 - DNA, 12 bp, Artificial Sequence
  Oligonucleotide primer for the detection of SNP TSC0061412
cctcgataatat

SEQ ID NO: 375731 - DNA, 12 bp, Artificial Sequence
  Oligonucleotide primer for the detection of SNP TSC0061413
tcttcaccccta

SEQ ID NO: 375732 - DNA, 12 bp, Artificial Sequence
  Oligonucleotide primer for the detection of SNP TSC0061413
aaagttgtattt

SEQ ID NO: 375733 - DNA, 12 bp, Artificial Sequence
  Oligonucleotide primer for the detection of SNP TSC0061413
ctcaaaactata

SEQ ID NO: 375734 - DNA, 12 bp, Artificial Sequence
  Oligonucleotide primer for the detection of SNP TSC0061417
tcaatatctaat

SEQ ID NO: 375735 - DNA, 12 bp, Artificial Sequence
  Oligonucleotide primer for the detection of SNP TSC0061417
aagttttaatag

SEQ ID NO: 375736 - DNA, 12 bp, Artificial Sequence
  Oligonucleotide primer for the detection of SNP TSC0061418
tttttattggag

SEQ ID NO: 375737 - DNA, 12 bp, Artificial Sequence
  Oligonukleotid-Primer
tctccattaaaa

SEQ ID NO: 375738 - DNA, 12 bp, Artificial Sequence
  Oligonucleotide primer for the detection of SNP TSC0061419
atatatacctat

SEQ ID NO: 375739 - DNA, 12 bp, Artificial Sequence
  Oligonucleotide primer for the detection of SNP TSC0061419
gtaggtttgtta

SEQ ID NO: 375740 - DNA, 12 bp, Artificial Sequence
  Oligonucleotide primer for the detection of SNP TSC0061419
acaaatttatta

SEQ ID NO: 375741 - DNA, 12 bp, Artificial Sequence
  Oligonukleotid-Primer
tagaattttttg

SEQ ID NO: 375742 - DNA, 12 bp, Artificial Sequence
  Oligonucleotide primer for the detection of SNP TSC0061421
cccatatacttt

SEQ ID NO: 375743 - DNA, 12 bp, Artificial Sequence
  Oligonucleotide primer for the detection of SNP TSC0061421
cccgtatacttt

SEQ ID NO: 375744 - DNA, 12 bp, Artificial Sequence
  Oligonucleotide primer for the detection of SNP TSC0061422
caatcaaacact

SEQ ID NO: 375745 - DNA, 12 bp, Artificial Sequence
  Oligonukleotid-Primer
cacaaatcccta

SEQ ID NO: 375746 - DNA, 12 bp, Artificial Sequence
  Oligonucleotide primer for the detection of SNP TSC0061422
taattagatatt

SEQ ID NO: 375747 - DNA, 12 bp, Artificial Sequence
  Oligonucleotide primer for the detection of SNP TSC0061427
ataaaatctccc

SEQ ID NO: 375748 - DNA, 12 bp, Artificial Sequence
  Oligonucleotide primer for the detection of SNP TSC0061427
atgaggtttttt

SEQ ID NO: 375749 - DNA, 12 bp, Artificial Sequence
  Oligonukleotid-Primer
caatctcaaatt

SEQ ID NO: 375750 - DNA, 12 bp, Artificial Sequence
  Oligonucleotide primer for the detection of SNP TSC0061433
cgatctcaaatt

SEQ ID NO: 375751 - DNA, 12 bp, Artificial Sequence
  Oligonucleotide primer for the detection of SNP TSC0061433
ggtgatgaaaaa

SEQ ID NO: 375752 - DNA, 12 bp, Artificial Sequence
  Oligonucleotide primer for the detection of SNP TSC0008682
actcaaaaattt

SEQ ID NO: 375753 - DNA, 12 bp, Artificial Sequence
  Oligonucleotide primer for the detection of SNP TSC0008682
aagaagaaaaat

SEQ ID NO: 375754 - DNA, 12 bp, Artificial Sequence
  Oligonucleotide primer for the detection of SNP TSC0009122
cataaaacttaa

SEQ ID NO: 375755 - DNA, 12 bp, Artificial Sequence
  Oligonucleotide primer for the detection of SNP TSC0009122
gattttagaggt

SEQ ID NO: 375756 - DNA, 12 bp, Artificial Sequence
  Oligonucleotide primer for the detection of SNP TSC0009122
tatgaaatttag

SEQ ID NO: 375757 - DNA, 12 bp, Artificial Sequence
  Oligonucleotide primer for the detection of SNP TSC0004630
acaactttcctc

SEQ ID NO: 375758 - DNA, 12 bp, Artificial Sequence
  Oligonucleotide primer for the detection of SNP TSC0004631
gtttattattta

SEQ ID NO: 375759 - DNA, 12 bp, Artificial Sequence
  Oligonucleotide primer for the detection of SNP TSC0004631
ctcactacccaa

SEQ ID NO: 375760 - DNA, 12 bp, Artificial Sequence
  Oligonucleotide primer for the detection of SNP TSC0004631
aagtatagggtt

SEQ ID NO: 375761 - DNA, 12 bp, Artificial Sequence
  Oligonucleotide primer for the detection of SNP TSC0009161
gagtatttatta

SEQ ID NO: 375762 - DNA, 12 bp, Artificial Sequence
  Oligonucleotide primer for the detection of SNP TSC0009161
gaggggattgtt

SEQ ID NO: 375763 - DNA, 12 bp, Artificial Sequence
  Oligonucleotide primer for the detection of SNP TSC0061439
gaatattattta

SEQ ID NO: 375764 - DNA, 12 bp, Artificial Sequence
  Oligonucleotide primer for the detection of SNP TSC0006693
tctaatatttca

SEQ ID NO: 375765 - DNA, 12 bp, Artificial Sequence
  Oligonucleotide primer for the detection of SNP TSC0006693
aatgtttaatta

SEQ ID NO: 375766 - DNA, 12 bp, Artificial Sequence
  Oligonucleotide primer for the detection of SNP TSC0006693
aacgtttaatta

SEQ ID NO: 375767 - DNA, 12 bp, Artificial Sequence
  Oligonucleotide primer for the detection of SNP TSC0006694
accctattaatt

SEQ ID NO: 375768 - DNA, 12 bp, Artificial Sequence
  Oligonucleotide primer for the detection of SNP TSC0006694
tggagtatttag

SEQ ID NO: 375769 - DNA, 12 bp, Artificial Sequence
  Oligonucleotide primer for the detection of SNP TSC0061444
ccctcaaaaccc

SEQ ID NO: 375770 - DNA, 12 bp, Artificial Sequence
  Oligonucleotide primer for the detection of SNP TSC0061444
tgttatattttg

SEQ ID NO: 375771 - DNA, 12 bp, Artificial Sequence
  Oligonucleotide primer for the detection of SNP TSC0061445
gaaatagatatt

SEQ ID NO: 375772 - DNA, 12 bp, Artificial Sequence
  Oligonucleotide primer for the detection of SNP TSC0061445
tgtgtttaaatg

SEQ ID NO: 375773 - DNA, 12 bp, Artificial Sequence
  Oligonucleotide primer for the detection of SNP TSC0061445
cgtgtttaaatg

SEQ ID NO: 375774 - DNA, 12 bp, Artificial Sequence
  Oligonucleotide primer for the detection of SNP TSC0061446
tacccttcaata

SEQ ID NO: 375775 - DNA, 12 bp, Artificial Sequence
  Oligonucleotide primer for the detection of SNP TSC0061446
tacccttcgata

SEQ ID NO: 375776 - DNA, 12 bp, Artificial Sequence
  Oligonucleotide primer for the detection of SNP TSC0061446
ataattgtgaat

SEQ ID NO: 375777 - DNA, 12 bp, Artificial Sequence
  Oligonucleotide primer for the detection of SNP TSC0061446
acaattataaat

SEQ ID NO: 375778 - DNA, 12 bp, Artificial Sequence
  Oligonucleotide primer for the detection of SNP TSC0061446
tattttttggtg

SEQ ID NO: 375779 - DNA, 12 bp, Artificial Sequence
  Oligonucleotide primer for the detection of SNP TSC0061446
tatttttcggtg

SEQ ID NO: 375780 - DNA, 12 bp, Artificial Sequence
  Oligonucleotide primer for the detection of SNP TSC0009942
attttcctctct

SEQ ID NO: 375781 - DNA, 12 bp, Artificial Sequence
  Oligonucleotide primer for the detection of SNP TSC0009942
ggttaaatatta

SEQ ID NO: 375782 - DNA, 12 bp, Artificial Sequence
  Oligonucleotide primer for the detection of SNP TSC0061448
tatacctctaat

SEQ ID NO: 375783 - DNA, 12 bp, Artificial Sequence
  Oligonucleotide primer for the detection of SNP TSC0061448
accataaccaaa

SEQ ID NO: 375784 - DNA, 12 bp, Artificial Sequence
  Oligonucleotide primer for the detection of SNP TSC0061448
atgtttttgatt

SEQ ID NO: 375785 - DNA, 12 bp, Artificial Sequence
  Oligonucleotide primer for the detection of SNP TSC0061448
atgtttttgatc

SEQ ID NO: 375786 - DNA, 12 bp, Artificial Sequence
  Oligonucleotide primer for the detection of SNP TSC0061449
atatctaaacca

SEQ ID NO: 375787 - DNA, 12 bp, Artificial Sequence
  Oligonucleotide primer for the detection of SNP TSC0061449
ttttaaaattac

SEQ ID NO: 375788 - DNA, 12 bp, Artificial Sequence
  Oligonucleotide primer for the detection of SNP TSC0061449
tatttgagttat

SEQ ID NO: 375789 - DNA, 12 bp, Artificial Sequence
  Oligonucleotide primer for the detection of SNP TSC0061450
actctactaacc

SEQ ID NO: 375790 - DNA, 12 bp, Artificial Sequence
  Oligonucleotide primer for the detection of SNP TSC0061453
ttgaaataaaaa

SEQ ID NO: 375791 - DNA, 12 bp, Artificial Sequence
  Oligonucleotide primer for the detection of SNP TSC0009863
cacaactataaa

SEQ ID NO: 375792 - DNA, 12 bp, Artificial Sequence
  Oligonucleotide primer for the detection of SNP TSC0009863
gattagaaagat

SEQ ID NO: 375793 - DNA, 12 bp, Artificial Sequence
  Oligonucleotide primer for the detection of SNP TSC0009863
tatagttataag

SEQ ID NO: 375794 - DNA, 12 bp, Artificial Sequence
  Oligonucleotide primer for the detection of SNP TSC0061454
aataaaatacac

SEQ ID NO: 375795 - DNA, 12 bp, Artificial Sequence
  Oligonucleotide primer for the detection of SNP TSC0061454
taaatttatttt

SEQ ID NO: 375796 - DNA, 12 bp, Artificial Sequence
  Oligonucleotide primer for the detection of SNP TSC0061454
actaaatttatt

SEQ ID NO: 375797 - DNA, 12 bp, Artificial Sequence
  Oligonucleotide primer for the detection of SNP TSC0061454
agtgaaatatat

SEQ ID NO: 375798 - DNA, 12 bp, Artificial Sequence
  Oligonucleotide primer for the detection of SNP TSC0004641
caaaatatacta

SEQ ID NO: 375799 - DNA, 12 bp, Artificial Sequence
  Oligonucleotide primer for the detection of SNP TSC0004641
cgaaatatacta

SEQ ID NO: 375800 - DNA, 12 bp, Artificial Sequence
  Oligonucleotide primer for the detection of SNP TSC0004641
gatttggagaat

SEQ ID NO: 375801 - DNA, 12 bp, Artificial Sequence
  Oligonucleotide primer for the detection of SNP TSC0004641
ggagtatgttgt

SEQ ID NO: 375802 - DNA, 12 bp, Artificial Sequence
  Oligonucleotide primer for the detection of SNP TSC0006918
ttcaaaatacaa

SEQ ID NO: 375803 - DNA, 12 bp, Artificial Sequence
  Oligonucleotide primer for the detection of SNP TSC0006918
atgttattatat

SEQ ID NO: 375804 - DNA, 12 bp, Artificial Sequence
  Oligonucleotide primer for the detection of SNP TSC0006918
aataccatcaca

SEQ ID NO: 375805 - DNA, 12 bp, Artificial Sequence
  Oligonucleotide primer for the detection of SNP TSC0006918
gtttaaaatgta

SEQ ID NO: 375806 - DNA, 12 bp, Artificial Sequence
  Oligonucleotide primer for the detection of SNP TSC0061456
aaccccaaccgt

SEQ ID NO: 375807 - DNA, 12 bp, Artificial Sequence
  Oligonucleotide primer for the detection of SNP TSC0061457
atacccaatatt

SEQ ID NO: 375808 - DNA, 12 bp, Artificial Sequence
  Oligonucleotide primer for the detection of SNP TSC0061457
atacccgatatt

SEQ ID NO: 375809 - DNA, 12 bp, Artificial Sequence
  Oligonucleotide primer for the detection of SNP TSC0061457
ttgattagttaa

SEQ ID NO: 375810 - DNA, 12 bp, Artificial Sequence
  Oligonucleotide primer for the detection of SNP TSC0061458
taaatttaatca

SEQ ID NO: 375811 - DNA, 12 bp, Artificial Sequence
  Oligonucleotide primer for the detection of SNP TSC0061458
gttagtgttatt

SEQ ID NO: 375812 - DNA, 12 bp, Artificial Sequence
  Oligonucleotide primer for the detection of SNP TSC0061458
gttagcgttatt

SEQ ID NO: 375813 - DNA, 12 bp, Artificial Sequence
  Oligonucleotide primer for the detection of SNP TSC0061458
accaacactact

SEQ ID NO: 375814 - DNA, 12 bp, Artificial Sequence
  Oligonucleotide primer for the detection of SNP TSC0061458
accaacgctact

SEQ ID NO: 375815 - DNA, 12 bp, Artificial Sequence
  Oligonucleotide primer for the detection of SNP TSC0061458
tgggtttggtta

SEQ ID NO: 375816 - DNA, 12 bp, Artificial Sequence
  Oligonucleotide primer for the detection of SNP TSC0061459
ccaaaactacta

SEQ ID NO: 375817 - DNA, 12 bp, Artificial Sequence
  Oligonucleotide primer for the detection of SNP TSC0061459
acccaataattc

SEQ ID NO: 375818 - DNA, 12 bp, Artificial Sequence
  Oligonucleotide primer for the detection of SNP TSC0061459
ttagggttattg

SEQ ID NO: 375819 - DNA, 12 bp, Artificial Sequence
  Oligonucleotide primer for the detection of SNP TSC0061460
ttgttgtttagt

SEQ ID NO: 375820 - DNA, 12 bp, Artificial Sequence
  Oligonucleotide primer for the detection of SNP TSC0061460
ttgttgtttagc

SEQ ID NO: 375821 - DNA, 12 bp, Artificial Sequence
  Oligonucleotide primer for the detection of SNP TSC0061460
ctactacccaac

SEQ ID NO: 375822 - DNA, 12 bp, Artificial Sequence
  Oligonucleotide primer for the detection of SNP TSC0061460
ataaggatattt

SEQ ID NO: 375823 - DNA, 12 bp, Artificial Sequence
  Oligonucleotide primer for the detection of SNP TSC0061461
ccctctctctct

SEQ ID NO: 375824 - DNA, 12 bp, Artificial Sequence
  Oligonucleotide primer for the detection of SNP TSC0061461
gattgaagttta

SEQ ID NO: 375825 - DNA, 12 bp, Artificial Sequence
  Oligonucleotide primer for the detection of SNP TSC0008377
caccaaatcttt

SEQ ID NO: 375826 - DNA, 12 bp, Artificial Sequence
  Oligonucleotide primer for the detection of SNP TSC0008377
ttttgggatggg

SEQ ID NO: 375827 - DNA, 12 bp, Artificial Sequence
  Oligonucleotide primer for the detection of SNP TSC0008377
tttcgggatggg

SEQ ID NO: 375828 - DNA, 12 bp, Artificial Sequence
  Oligonucleotide primer for the detection of SNP TSC0061462
acatctacttcc

SEQ ID NO: 375829 - DNA, 12 bp, Artificial Sequence
  Oligonucleotide primer for the detection of SNP TSC0061462
ttatagattgta

SEQ ID NO: 375830 - DNA, 12 bp, Artificial Sequence
  Oligonucleotide primer for the detection of SNP TSC0061467
tactactataac

SEQ ID NO: 375831 - DNA, 12 bp, Artificial Sequence
  Oligonucleotide primer for the detection of SNP TSC0061467
tatttgtatatg

SEQ ID NO: 375832 - DNA, 12 bp, Artificial Sequence
  Oligonucleotide primer for the detection of SNP TSC0061467
tacttacacata

SEQ ID NO: 375833 - DNA, 12 bp, Artificial Sequence
  Oligonucleotide primer for the detection of SNP TSC0061467
tgttgttataat

SEQ ID NO: 375834 - DNA, 12 bp, Artificial Sequence
  Oligonucleotide primer for the detection of SNP TSC0061468
aactctcatttt

SEQ ID NO: 375835 - DNA, 12 bp, Artificial Sequence
  Oligonucleotide primer for the detection of SNP TSC0061468
gatttgaaaagg

SEQ ID NO: 375836 - DNA, 12 bp, Artificial Sequence
  Oligonucleotide primer for the detection of SNP TSC0061469
aatctaatactc

SEQ ID NO: 375837 - DNA, 12 bp, Artificial Sequence
  Oligonucleotide primer for the detection of SNP TSC0061470
taatattagtgt

SEQ ID NO: 375838 - DNA, 12 bp, Artificial Sequence
  Oligonucleotide primer for the detection of SNP TSC0061470
acaatactaata

SEQ ID NO: 375839 - DNA, 12 bp, Artificial Sequence
  Oligonucleotide primer for the detection of SNP TSC0061470
tgagaatgggtt

SEQ ID NO: 375840 - DNA, 12 bp, Artificial Sequence
  Oligonucleotide primer for the detection of SNP TSC0061473
tgtttattggtg

SEQ ID NO: 375841 - DNA, 12 bp, Artificial Sequence
  Oligonucleotide primer for the detection of SNP TSC0061473
ttagatataagg

SEQ ID NO: 375842 - DNA, 12 bp, Artificial Sequence
  Oligonucleotide primer for the detection of SNP TSC0061475
caacaactactc

SEQ ID NO: 375843 - DNA, 12 bp, Artificial Sequence
  Oligonucleotide primer for the detection of SNP TSC0061475
caacgactactc

SEQ ID NO: 375844 - DNA, 12 bp, Artificial Sequence
  Oligonucleotide primer for the detection of SNP TSC0061475
agttgggaaatt

SEQ ID NO: 375845 - DNA, 12 bp, Artificial Sequence
  Oligonucleotide primer for the detection of SNP TSC0061476
tctcaaacaaac

SEQ ID NO: 375846 - DNA, 12 bp, Artificial Sequence
  Oligonucleotide primer for the detection of SNP TSC0061476
tgtttattttaa

SEQ ID NO: 375847 - DNA, 12 bp, Artificial Sequence
  Oligonucleotide primer for the detection of SNP TSC0061477
taataatctacc

SEQ ID NO: 375848 - DNA, 12 bp, Artificial Sequence
  Oligonucleotide primer for the detection of SNP TSC0061477
aataaggattta

SEQ ID NO: 375849 - DNA, 12 bp, Artificial Sequence
  Oligonucleotide primer for the detection of SNP TSC0061478
tttattacaatt

SEQ ID NO: 375850 - DNA, 12 bp, Artificial Sequence
  Oligonucleotide primer for the detection of SNP TSC0061478
aaaatgttaaaa

SEQ ID NO: 375851 - DNA, 12 bp, Artificial Sequence
  Oligonucleotide primer for the detection of SNP TSC0061479
cacatactacat

SEQ ID NO: 375852 - DNA, 12 bp, Artificial Sequence
  Oligonucleotide primer for the detection of SNP TSC0061479
ttttggtagata

SEQ ID NO: 375853 - DNA, 12 bp, Artificial Sequence
  Oligonucleotide primer for the detection of SNP TSC0061479
ttttaataaaca

SEQ ID NO: 375854 - DNA, 12 bp, Artificial Sequence
  Oligonucleotide primer for the detection of SNP TSC0061479
tatatattgtat

SEQ ID NO: 375855 - DNA, 12 bp, Artificial Sequence
  Oligonucleotide primer for the detection of SNP TSC0061481
aacttaaacttc

SEQ ID NO: 375856 - DNA, 12 bp, Artificial Sequence
  Oligonucleotide primer for the detection of SNP TSC0061481
tttaatgtttgg

SEQ ID NO: 375857 - DNA, 12 bp, Artificial Sequence
  Oligonucleotide primer for the detection of SNP TSC0061482
aagatgtggaaa

SEQ ID NO: 375858 - DNA, 12 bp, Artificial Sequence
  Oligonucleotide primer for the detection of SNP TSC0061486
tctaactttact

SEQ ID NO: 375859 - DNA, 12 bp, Artificial Sequence
  Oligonucleotide primer for the detection of SNP TSC0061486
tccacccatttt

SEQ ID NO: 375860 - DNA, 12 bp, Artificial Sequence
  Oligonucleotide primer for the detection of SNP TSC0061486
tttggttttatt

SEQ ID NO: 375861 - DNA, 12 bp, Artificial Sequence
  Oligonucleotide primer for the detection of SNP TSC0061488
gaaggagatagg

SEQ ID NO: 375862 - DNA, 12 bp, Artificial Sequence
  Oligonucleotide primer for the detection of SNP TSC0061489
aaatacctttca

SEQ ID NO: 375863 - DNA, 12 bp, Artificial Sequence
  Oligonucleotide primer for the detection of SNP TSC0061489
tataaatgttgt

SEQ ID NO: 375864 - DNA, 12 bp, Artificial Sequence
  Oligonucleotide primer for the detection of SNP TSC0061489
ctataaatacta

SEQ ID NO: 375865 - DNA, 12 bp, Artificial Sequence
  Oligonucleotide primer for the detection of SNP TSC0061490
aataaacttaac

SEQ ID NO: 375866 - DNA, 12 bp, Artificial Sequence
  Oligonucleotide primer for the detection of SNP TSC0061491
ctccctctctca

SEQ ID NO: 375867 - DNA, 12 bp, Artificial Sequence
  Oligonucleotide primer for the detection of SNP TSC0061491
ttggtgtgttat

SEQ ID NO: 375868 - DNA, 12 bp, Artificial Sequence
  Oligonucleotide primer for the detection of SNP TSC0061491
ctaatatatcac

SEQ ID NO: 375869 - DNA, 12 bp, Artificial Sequence
  Oligonucleotide primer for the detection of SNP TSC0061492
ttaaataattct

SEQ ID NO: 375870 - DNA, 12 bp, Artificial Sequence
  Oligonucleotide primer for the detection of SNP TSC0061492
tatatgtagtta

SEQ ID NO: 375871 - DNA, 12 bp, Artificial Sequence
  Oligonucleotide primer for the detection of SNP TSC0061492
tatacgtagtta

SEQ ID NO: 375872 - DNA, 12 bp, Artificial Sequence
  Oligonucleotide primer for the detection of SNP TSC0061494
acaatctctttt

SEQ ID NO: 375873 - DNA, 12 bp, Artificial Sequence
  Oligonucleotide primer for the detection of SNP TSC0061495
aaaattctacct

SEQ ID NO: 375874 - DNA, 12 bp, Artificial Sequence
  Oligonucleotide primer for the detection of SNP TSC0061495
ggtaaaaatata

SEQ ID NO: 375875 - DNA, 12 bp, Artificial Sequence
  Oligonucleotide primer for the detection of SNP TSC0005730
ttcaccatttaa

SEQ ID NO: 375876 - DNA, 12 bp, Artificial Sequence
  Oligonucleotide primer for the detection of SNP TSC0005730
ttcgccatttaa

SEQ ID NO: 375877 - DNA, 12 bp, Artificial Sequence
  Oligonucleotide primer for the detection of SNP TSC0005730
taatttccacta

SEQ ID NO: 375878 - DNA, 12 bp, Artificial Sequence
  Oligonucleotide primer for the detection of SNP TSC0005730
aattcgttattt

SEQ ID NO: 375879 - DNA, 12 bp, Artificial Sequence
  Oligonucleotide primer for the detection of SNP TSC0061498
gtattattaaag

SEQ ID NO: 375880 - DNA, 12 bp, Artificial Sequence
  Oligonucleotide primer for the detection of SNP TSC0061499
gattaataattt

SEQ ID NO: 375881 - DNA, 12 bp, Artificial Sequence
  Oligonucleotide primer for the detection of SNP TSC0061499
aattaataattt

SEQ ID NO: 375882 - DNA, 12 bp, Artificial Sequence
  Oligonucleotide primer for the detection of SNP TSC0061499
atataaaagatg

SEQ ID NO: 375883 - DNA, 12 bp, Artificial Sequence
  Oligonucleotide primer for the detection of SNP TSC0061500
aaataataaatt

SEQ ID NO: 375884 - DNA, 12 bp, Artificial Sequence
  Oligonucleotide primer for the detection of SNP TSC0061500
agtttggataaa

SEQ ID NO: 375885 - DNA, 12 bp, Artificial Sequence
  Oligonucleotide primer for the detection of SNP TSC0061501
tccaactttata

SEQ ID NO: 375886 - DNA, 12 bp, Artificial Sequence
  Oligonucleotide primer for the detection of SNP TSC0061501
aaccactctaaa

SEQ ID NO: 375887 - DNA, 12 bp, Artificial Sequence
  Oligonucleotide primer for the detection of SNP TSC0061502
aatctcaaaata

SEQ ID NO: 375888 - DNA, 12 bp, Artificial Sequence
  Oligonucleotide primer for the detection of SNP TSC0061502
gttaaattaaaa

SEQ ID NO: 375889 - DNA, 12 bp, Artificial Sequence
  Oligonucleotide primer for the detection of SNP TSC0061502
gattttagagtg

SEQ ID NO: 375890 - DNA, 12 bp, Artificial Sequence
  Oligonucleotide primer for the detection of SNP TSC0061504
ataattttaact

SEQ ID NO: 375891 - DNA, 12 bp, Artificial Sequence
  Oligonucleotide primer for the detection of SNP TSC0006500
aaaatcatatac

SEQ ID NO: 375892 - DNA, 12 bp, Artificial Sequence
  Oligonucleotide primer for the detection of SNP TSC0006500
tatttttggatt

SEQ ID NO: 375893 - DNA, 12 bp, Artificial Sequence
  Oligonucleotide primer for the detection of SNP TSC0061508
caacgcaacaaa

SEQ ID NO: 375894 - DNA, 12 bp, Artificial Sequence
  Oligonucleotide primer for the detection of SNP TSC0061508
tagtgtagtagg

SEQ ID NO: 375895 - DNA, 12 bp, Artificial Sequence
  Oligonucleotide primer for the detection of SNP TSC0061508
tagcgtagtagg

SEQ ID NO: 375896 - DNA, 12 bp, Artificial Sequence
  Oligonucleotide primer for the detection of SNP TSC0061514
aaatggattata

SEQ ID NO: 375897 - DNA, 12 bp, Artificial Sequence
  Oligonucleotide primer for the detection of SNP TSC0006017
ttaaacaaaata

SEQ ID NO: 375898 - DNA, 12 bp, Artificial Sequence
  Oligonucleotide primer for the detection of SNP TSC0006017
agtattttggtg

SEQ ID NO: 375899 - DNA, 12 bp, Artificial Sequence
  Oligonucleotide primer for the detection of SNP TSC0006017
agtattttggcg

SEQ ID NO: 375900 - DNA, 12 bp, Artificial Sequence
  Oligonucleotide primer for the detection of SNP TSC0006017
aatatcttaaca

SEQ ID NO: 375901 - DNA, 12 bp, Artificial Sequence
  Oligonucleotide primer for the detection of SNP TSC0006017
aatatcttaacg

SEQ ID NO: 375902 - DNA, 12 bp, Artificial Sequence
  Oligonucleotide primer for the detection of SNP TSC0006017
tttagataaggt

SEQ ID NO: 375903 - DNA, 12 bp, Artificial Sequence
  Oligonucleotide primer for the detection of SNP TSC0061517
taaaaaacttct

SEQ ID NO: 375904 - DNA, 12 bp, Artificial Sequence
  Oligonucleotide primer for the detection of SNP TSC0061517
ggataaataagt

SEQ ID NO: 375905 - DNA, 12 bp, Artificial Sequence
  Oligonucleotide primer for the detection of SNP TSC0061517
tgggaaattttt

SEQ ID NO: 375906 - DNA, 12 bp, Artificial Sequence
  Oligonucleotide primer for the detection of SNP TSC0061518
actaattcaaaa

SEQ ID NO: 375907 - DNA, 12 bp, Artificial Sequence
  Oligonucleotide primer for the detection of SNP TSC0061519
aactatttcttc

SEQ ID NO: 375908 - DNA, 12 bp, Artificial Sequence
  Oligonucleotide primer for the detection of SNP TSC0061519
aagttatataga

SEQ ID NO: 375909 - DNA, 12 bp, Artificial Sequence
  Oligonucleotide primer for the detection of SNP TSC0061520
tgtgtatttaat

SEQ ID NO: 375910 - DNA, 12 bp, Artificial Sequence
  Oligonucleotide primer for the detection of SNP TSC0061520
tatacatttaat

SEQ ID NO: 375911 - DNA, 12 bp, Artificial Sequence
  Oligonucleotide primer for the detection of SNP TSC0061520
gtgataagaatg

SEQ ID NO: 375912 - DNA, 12 bp, Artificial Sequence
  Oligonucleotide primer for the detection of SNP TSC0061521
ttaaaatcataa

SEQ ID NO: 375913 - DNA, 12 bp, Artificial Sequence
  Oligonucleotide primer for the detection of SNP TSC0061521
gttttaaatgat

SEQ ID NO: 375914 - DNA, 12 bp, Artificial Sequence
  Oligonucleotide primer for the detection of SNP TSC0061521
cctcaaataata

SEQ ID NO: 375915 - DNA, 12 bp, Artificial Sequence
  Oligonucleotide primer for the detection of SNP TSC0061522
aatttacttttc

SEQ ID NO: 375916 - DNA, 12 bp, Artificial Sequence
  Oligonucleotide primer for the detection of SNP TSC0061522
gtttaggattta

SEQ ID NO: 375917 - DNA, 12 bp, Artificial Sequence
  Oligonucleotide primer for the detection of SNP TSC0061525
agggtttgtaaa

SEQ ID NO: 375918 - DNA, 12 bp, Artificial Sequence
  Oligonucleotide primer for the detection of SNP TSC0061526
aaaaatattctc

SEQ ID NO: 375919 - DNA, 12 bp, Artificial Sequence
  Oligonucleotide primer for the detection of SNP TSC0061526
tctctcctctaa

SEQ ID NO: 375920 - DNA, 12 bp, Artificial Sequence
  Oligonucleotide primer for the detection of SNP TSC0061528
ttttccttactc

SEQ ID NO: 375921 - DNA, 12 bp, Artificial Sequence
  Oligonucleotide primer for the detection of SNP TSC0061528
ggttggaattta

SEQ ID NO: 375922 - DNA, 12 bp, Artificial Sequence
  Oligonucleotide primer for the detection of SNP TSC0061529
ttttcaccattt

SEQ ID NO: 375923 - DNA, 12 bp, Artificial Sequence
  Oligonucleotide primer for the detection of SNP TSC0061529
aaataagttgga

SEQ ID NO: 375924 - DNA, 12 bp, Artificial Sequence
  Oligonucleotide primer for the detection of SNP TSC0061530
atagtatttata

SEQ ID NO: 375925 - DNA, 12 bp, Artificial Sequence
  Oligonucleotide primer for the detection of SNP TSC0061530
acaatattcata

SEQ ID NO: 375926 - DNA, 12 bp, Artificial Sequence
  Oligonucleotide primer for the detection of SNP TSC0061531
ctcccccactaa

SEQ ID NO: 375927 - DNA, 12 bp, Artificial Sequence
  Oligonucleotide primer for the detection of SNP TSC0061531
tagagtaatagt

SEQ ID NO: 375928 - DNA, 12 bp, Artificial Sequence
  Oligonucleotide primer for the detection of SNP TSC0061532
ttttttctaaaa

SEQ ID NO: 375929 - DNA, 12 bp, Artificial Sequence
  Oligonucleotide primer for the detection of SNP TSC0061532
agagtgagattc

SEQ ID NO: 375930 - DNA, 12 bp, Artificial Sequence
  Oligonucleotide primer for the detection of SNP TSC0005532
taaaccaccgta

SEQ ID NO: 375931 - DNA, 12 bp, Artificial Sequence
  Oligonucleotide primer for the detection of SNP TSC0005532
taaaaaagatgt

SEQ ID NO: 375932 - DNA, 12 bp, Artificial Sequence
  Oligonucleotide primer for the detection of SNP TSC0005533
cataattttaac

SEQ ID NO: 375933 - DNA, 12 bp, Artificial Sequence
  Oligonucleotide primer for the detection of SNP TSC0061533
ataccctttatt

SEQ ID NO: 375934 - DNA, 12 bp, Artificial Sequence
  Oligonucleotide primer for the detection of SNP TSC0061533
gaattagttagg

SEQ ID NO: 375935 - DNA, 12 bp, Artificial Sequence
  Oligonucleotide primer for the detection of SNP TSC0061534
gaaattgttaga

SEQ ID NO: 375936 - DNA, 12 bp, Artificial Sequence
  Oligonucleotide primer for the detection of SNP TSC0061534
tgataaagttgt

SEQ ID NO: 375937 - DNA, 12 bp, Artificial Sequence
  Oligonucleotide primer for the detection of SNP TSC0061535
ctatataatttt

SEQ ID NO: 375938 - DNA, 12 bp, Artificial Sequence
  Oligonucleotide primer for the detection of SNP TSC0061535
attgtggttttt

SEQ ID NO: 375939 - DNA, 12 bp, Artificial Sequence
  Oligonucleotide primer for the detection of SNP TSC0061535
attataaccctt

SEQ ID NO: 375940 - DNA, 12 bp, Artificial Sequence
  Oligonucleotide primer for the detection of SNP TSC0061535
ttatgtaatttt

SEQ ID NO: 375941 - DNA, 12 bp, Artificial Sequence
  Oligonucleotide primer for the detection of SNP TSC0061536
gaccaaacacaa

SEQ ID NO: 375942 - DNA, 12 bp, Artificial Sequence
  Oligonucleotide primer for the detection of SNP TSC0061536
ataggtatgaat

SEQ ID NO: 375943 - DNA, 12 bp, Artificial Sequence
  Oligonucleotide primer for the detection of SNP TSC0061536
ggttaggtatag

SEQ ID NO: 375944 - DNA, 12 bp, Artificial Sequence
  Oligonucleotide primer for the detection of SNP TSC0010427
aacatacatttc

SEQ ID NO: 375945 - DNA, 12 bp, Artificial Sequence
  Oligonucleotide primer for the detection of SNP TSC0010427
aacatacgtttc

SEQ ID NO: 375946 - DNA, 12 bp, Artificial Sequence
  Oligonucleotide primer for the detection of SNP TSC0010427
aacgtacatttc

SEQ ID NO: 375947 - DNA, 12 bp, Artificial Sequence
  Oligonucleotide primer for the detection of SNP TSC0010427
aacgtacgtttc

SEQ ID NO: 375948 - DNA, 12 bp, Artificial Sequence
  Oligonucleotide primer for the detection of SNP TSC0010427
agaatgaaagga

SEQ ID NO: 375949 - DNA, 12 bp, Artificial Sequence
  Oligonucleotide primer for the detection of SNP TSC0061538
ttatggtgatgt

SEQ ID NO: 375950 - DNA, 12 bp, Artificial Sequence
  Oligonucleotide primer for the detection of SNP TSC0061538
cataataataca

SEQ ID NO: 375951 - DNA, 12 bp, Artificial Sequence
  Oligonucleotide primer for the detection of SNP TSC0061538
aagtgtaattta

SEQ ID NO: 375952 - DNA, 12 bp, Artificial Sequence
  Oligonucleotide primer for the detection of SNP TSC0061539
tagtagttgtta

SEQ ID NO: 375953 - DNA, 12 bp, Artificial Sequence
  Oligonucleotide primer for the detection of SNP TSC0061539
caacaactacta

SEQ ID NO: 375954 - DNA, 12 bp, Artificial Sequence
  Oligonucleotide primer for the detection of SNP TSC0061539
tgaattttggag

SEQ ID NO: 375955 - DNA, 12 bp, Artificial Sequence
  Oligonucleotide primer for the detection of SNP TSC0061540
aaccgaaaaatt

SEQ ID NO: 375956 - DNA, 12 bp, Artificial Sequence
  Oligonucleotide primer for the detection of SNP TSC0061541
caaaataaaccg

SEQ ID NO: 375957 - DNA, 12 bp, Artificial Sequence
  Oligonucleotide primer for the detection of SNP TSC0009258
aatactacgcaa

SEQ ID NO: 375958 - DNA, 12 bp, Artificial Sequence
  Oligonucleotide primer for the detection of SNP TSC0009258
tgggttgttgtt

SEQ ID NO: 375959 - DNA, 12 bp, Artificial Sequence
  Oligonucleotide primer for the detection of SNP TSC0009258
cgggttgttgtt

SEQ ID NO: 375960 - DNA, 12 bp, Artificial Sequence
  Oligonucleotide primer for the detection of SNP TSC0009258
caaattattacc

SEQ ID NO: 375961 - DNA, 12 bp, Artificial Sequence
  Oligonucleotide primer for the detection of SNP TSC0009258
cgaattattacc

SEQ ID NO: 375962 - DNA, 12 bp, Artificial Sequence
  Oligonucleotide primer for the detection of SNP TSC0009258
tacgtagttttt

SEQ ID NO: 375963 - DNA, 12 bp, Artificial Sequence
  Oligonucleotide primer for the detection of SNP TSC0009258
tatgtagttttc

SEQ ID NO: 375964 - DNA, 12 bp, Artificial Sequence
  Oligonucleotide primer for the detection of SNP TSC0009258
tacgtagttttc

SEQ ID NO: 375965 - DNA, 12 bp, Artificial Sequence
  Oligonucleotide primer for the detection of SNP TSC0010299
aacaaaaaccac

SEQ ID NO: 375966 - DNA, 12 bp, Artificial Sequence
  Oligonukleotid-Primer
tttgatatgata

SEQ ID NO: 375967 - DNA, 12 bp, Artificial Sequence
  Oligonucleotide primer for the detection of SNP TSC0061543
tcccactactcc

SEQ ID NO: 375968 - DNA, 12 bp, Artificial Sequence
  Oligonucleotide primer for the detection of SNP TSC0061543
tcccgctactcc

SEQ ID NO: 375969 - DNA, 12 bp, Artificial Sequence
  Oligonucleotide primer for the detection of SNP TSC0061543
ttattaggagtt

SEQ ID NO: 375970 - DNA, 12 bp, Artificial Sequence
  Oligonucleotide primer for the detection of SNP TSC0061543
ccaccaaaaact

SEQ ID NO: 375971 - DNA, 12 bp, Artificial Sequence
  Oligonucleotide primer for the detection of SNP TSC0061543
tttcgttgtttt

SEQ ID NO: 375972 - DNA, 12 bp, Artificial Sequence
  Oligonucleotide primer for the detection of SNP TSC0061544
actaaaactatt

SEQ ID NO: 375973 - DNA, 12 bp, Artificial Sequence
  Oligonucleotide primer for the detection of SNP TSC0061544
cacctttaacaa

SEQ ID NO: 375974 - DNA, 12 bp, Artificial Sequence
  Oligonucleotide primer for the detection of SNP TSC0061544
attgaggttgtt

SEQ ID NO: 375975 - DNA, 12 bp, Artificial Sequence
  Oligonucleotide primer for the detection of SNP TSC0061546
ctctaaaccact

SEQ ID NO: 375976 - DNA, 12 bp, Artificial Sequence
  Oligonucleotide primer for the detection of SNP TSC0061546
atttgattataa

SEQ ID NO: 375977 - DNA, 12 bp, Artificial Sequence
  Oligonucleotide primer for the detection of SNP TSC0061547
caacaaaccatc

SEQ ID NO: 375978 - DNA, 12 bp, Artificial Sequence
  Oligonucleotide primer for the detection of SNP TSC0061547
caacaaaccgtc

SEQ ID NO: 375979 - DNA, 12 bp, Artificial Sequence
  Oligonucleotide primer for the detection of SNP TSC0061547
caacgaaccatc

SEQ ID NO: 375980 - DNA, 12 bp, Artificial Sequence
  Oligonucleotide primer for the detection of SNP TSC0061547
caacgaaccgtc

SEQ ID NO: 375981 - DNA, 12 bp, Artificial Sequence
  Oligonucleotide primer for the detection of SNP TSC0061547
aaatttttatga

SEQ ID NO: 375982 - DNA, 12 bp, Artificial Sequence
  Oligonucleotide primer for the detection of SNP TSC0061547
aaatttttacga

SEQ ID NO: 375983 - DNA, 12 bp, Artificial Sequence
  Oligonucleotide primer for the detection of SNP TSC0061548
tcttctaactat

SEQ ID NO: 375984 - DNA, 12 bp, Artificial Sequence
  Oligonucleotide primer for the detection of SNP TSC0061548
tgaagttgatga

SEQ ID NO: 375985 - DNA, 12 bp, Artificial Sequence
  Oligonucleotide primer for the detection of SNP TSC0061548
taaaactaataa

SEQ ID NO: 375986 - DNA, 12 bp, Artificial Sequence
  Oligonucleotide primer for the detection of SNP TSC0061549
gaatttatacca

SEQ ID NO: 375987 - DNA, 12 bp, Artificial Sequence
  Oligonucleotide primer for the detection of SNP TSC0061549
gtatttgatatt

SEQ ID NO: 375988 - DNA, 12 bp, Artificial Sequence
  Oligonucleotide primer for the detection of SNP TSC0061549
acacctaacact

SEQ ID NO: 375989 - DNA, 12 bp, Artificial Sequence
  Oligonucleotide primer for the detection of SNP TSC0061549
ggatttgtgtta

SEQ ID NO: 375990 - DNA, 12 bp, Artificial Sequence
  Oligonucleotide primer for the detection of SNP TSC0061550
gggatattattt

SEQ ID NO: 375991 - DNA, 12 bp, Artificial Sequence
  Oligonucleotide primer for the detection of SNP TSC0061550
aaacaccattca

SEQ ID NO: 375992 - DNA, 12 bp, Artificial Sequence
  Oligonucleotide primer for the detection of SNP TSC0061550
tggggttgagta

SEQ ID NO: 375993 - DNA, 12 bp, Artificial Sequence
  Oligonucleotide primer for the detection of SNP TSC0061552
ttccaatcaaac

SEQ ID NO: 375994 - DNA, 12 bp, Artificial Sequence
  Oligonucleotide primer for the detection of SNP TSC0061552
taagtaataaat

SEQ ID NO: 375995 - DNA, 12 bp, Artificial Sequence
  Oligonucleotide primer for the detection of SNP TSC0061552
tcaaataacaaa

SEQ ID NO: 375996 - DNA, 12 bp, Artificial Sequence
  Oligonucleotide primer for the detection of SNP TSC0061552
ttttagttaaat

SEQ ID NO: 375997 - DNA, 12 bp, Artificial Sequence
  Oligonucleotide primer for the detection of SNP TSC0061552
ttttagttaaac

SEQ ID NO: 375998 - DNA, 12 bp, Artificial Sequence
  Oligonucleotide primer for the detection of SNP TSC0061553
gagtaattatta

SEQ ID NO: 375999 - DNA, 12 bp, Artificial Sequence
  Oligonucleotide primer for the detection of SNP TSC0061554
ctacatcaacac

SEQ ID NO: 376000 - DNA, 12 bp, Artificial Sequence
  Oligonucleotide primer for the detection of SNP TSC0061554
taaatttcttaa

SEQ ID NO: 376001 - DNA, 12 bp, Artificial Sequence
  Oligonucleotide primer for the detection of SNP TSC0061554
ttatattaatac

SEQ ID NO: 376002 - DNA, 12 bp, Artificial Sequence
  Oligonucleotide primer for the detection of SNP TSC0061555
aaaatcaaatct

SEQ ID NO: 376003 - DNA, 12 bp, Artificial Sequence
  Oligonucleotide primer for the detection of SNP TSC0061556
gtttggtgttaa

SEQ ID NO: 376004 - DNA, 12 bp, Artificial Sequence
  Oligonucleotide primer for the detection of SNP TSC0061556
gttcggtgttaa

SEQ ID NO: 376005 - DNA, 12 bp, Artificial Sequence
  Oligonucleotide primer for the detection of SNP TSC0061558
aaatatcctctc

SEQ ID NO: 376006 - DNA, 12 bp, Artificial Sequence
  Oligonucleotide primer for the detection of SNP TSC0061558
gaaggtggtgat

SEQ ID NO: 376007 - DNA, 12 bp, Artificial Sequence
  Oligonucleotide primer for the detection of SNP TSC0061559
cctatacaaaac

SEQ ID NO: 376008 - DNA, 12 bp, Artificial Sequence
  Oligonucleotide primer for the detection of SNP TSC0061559
gttgtagagtta

SEQ ID NO: 376009 - DNA, 12 bp, Artificial Sequence
  Oligonucleotide primer for the detection of SNP TSC0061561
ctcataaccaaa

SEQ ID NO: 376010 - DNA, 12 bp, Artificial Sequence
  Oligonucleotide primer for the detection of SNP TSC0061561
attcctactaac

SEQ ID NO: 376011 - DNA, 12 bp, Artificial Sequence
  Oligonucleotide primer for the detection of SNP TSC0061561
tttatgattaga

SEQ ID NO: 376012 - DNA, 12 bp, Artificial Sequence
  Oligonucleotide primer for the detection of SNP TSC0061564
atataaatgtac

SEQ ID NO: 376013 - DNA, 12 bp, Artificial Sequence
  Oligonucleotide primer for the detection of SNP TSC0061564
aggttgtgtgtg

SEQ ID NO: 376014 - DNA, 12 bp, Artificial Sequence
  Oligonucleotide primer for the detection of SNP TSC0061565
cacacaacctat

SEQ ID NO: 376015 - DNA, 12 bp, Artificial Sequence
  Oligonucleotide primer for the detection of SNP TSC0061565
aggagtggtata

SEQ ID NO: 376016 - DNA, 12 bp, Artificial Sequence
  Oligonucleotide primer for the detection of SNP TSC0061567
aggtaggagatt

SEQ ID NO: 376017 - DNA, 12 bp, Artificial Sequence
  Oligonucleotide primer for the detection of SNP TSC0061567
aatatgtatgga

SEQ ID NO: 376018 - DNA, 12 bp, Artificial Sequence
  Oligonucleotide primer for the detection of SNP TSC0061568
aacacttttcca

SEQ ID NO: 376019 - DNA, 12 bp, Artificial Sequence
  Oligonucleotide primer for the detection of SNP TSC0061569
aataaaccatta

SEQ ID NO: 376020 - DNA, 12 bp, Artificial Sequence
  Oligonucleotide primer for the detection of SNP TSC0061569
tatttcaattta

SEQ ID NO: 376021 - DNA, 12 bp, Artificial Sequence
  Oligonucleotide primer for the detection of SNP TSC0061569
tgatgaattatt

SEQ ID NO: 376022 - DNA, 12 bp, Artificial Sequence
  Oligonucleotide primer for the detection of SNP TSC0061571
atactttcatat

SEQ ID NO: 376023 - DNA, 12 bp, Artificial Sequence
  Oligonucleotide primer for the detection of SNP TSC0061572
atcaaatcttaa

SEQ ID NO: 376024 - DNA, 12 bp, Artificial Sequence
  Oligonucleotide primer for the detection of SNP TSC0061572
atataattgagt

SEQ ID NO: 376025 - DNA, 12 bp, Artificial Sequence
  Oligonucleotide primer for the detection of SNP TSC0061572
atataatcgagt

SEQ ID NO: 376026 - DNA, 12 bp, Artificial Sequence
  Oligonucleotide primer for the detection of SNP TSC0061572
acacaaccaaat

SEQ ID NO: 376027 - DNA, 12 bp, Artificial Sequence
  Oligonucleotide primer for the detection of SNP TSC0061572
acacaaccgaat

SEQ ID NO: 376028 - DNA, 12 bp, Artificial Sequence
  Oligonucleotide primer for the detection of SNP TSC0061572
gttaaattttgg

SEQ ID NO: 376029 - DNA, 12 bp, Artificial Sequence
  Oligonucleotide primer for the detection of SNP TSC0061576
caatcttcctac

SEQ ID NO: 376030 - DNA, 12 bp, Artificial Sequence
  Oligonucleotide primer for the detection of SNP TSC0061576
ttttgagtttat

SEQ ID NO: 376031 - DNA, 12 bp, Artificial Sequence
  Oligonucleotide primer for the detection of SNP TSC0061576
cctaaacccaca

SEQ ID NO: 376032 - DNA, 12 bp, Artificial Sequence
  Oligonucleotide primer for the detection of SNP TSC0061578
attttcctatac

SEQ ID NO: 376033 - DNA, 12 bp, Artificial Sequence
  Oligonucleotide primer for the detection of SNP TSC0061579
atactccatttt

SEQ ID NO: 376034 - DNA, 12 bp, Artificial Sequence
  Oligonucleotide primer for the detection of SNP TSC0061579
ggtttttataaa

SEQ ID NO: 376035 - DNA, 12 bp, Artificial Sequence
  Oligonucleotide primer for the detection of SNP TSC0061580
aaactatataaa

SEQ ID NO: 376036 - DNA, 12 bp, Artificial Sequence
  Oligonucleotide primer for the detection of SNP TSC0061580
atggagaattaa

SEQ ID NO: 376037 - DNA, 12 bp, Artificial Sequence
  Oligonucleotide primer for the detection of SNP TSC0061580
aaattatataga

SEQ ID NO: 376038 - DNA, 12 bp, Artificial Sequence
  Oligonucleotide primer for the detection of SNP TSC0061582
aaaataagatat

SEQ ID NO: 376039 - DNA, 12 bp, Artificial Sequence
  Oligonucleotide primer for the detection of SNP TSC0061582
aaaataagatac

SEQ ID NO: 376040 - DNA, 12 bp, Artificial Sequence
  Oligonucleotide primer for the detection of SNP TSC0061582
ttggggataatt

SEQ ID NO: 376041 - DNA, 12 bp, Artificial Sequence
  Oligonucleotide primer for the detection of SNP TSC0007032
aataaactcaaa

SEQ ID NO: 376042 - DNA, 12 bp, Artificial Sequence
  Oligonucleotide primer for the detection of SNP TSC0007032
tttaggttttgg

SEQ ID NO: 376043 - DNA, 12 bp, Artificial Sequence
  Oligonucleotide primer for the detection of SNP TSC0007032
tcaaactttaaa

SEQ ID NO: 376044 - DNA, 12 bp, Artificial Sequence
  Oligonucleotide primer for the detection of SNP TSC0007032
ggtgggtttaga

SEQ ID NO: 376045 - DNA, 12 bp, Artificial Sequence
  Oligonucleotide primer for the detection of SNP TSC0061586
acacctcatctc

SEQ ID NO: 376046 - DNA, 12 bp, Artificial Sequence
  Oligonucleotide primer for the detection of SNP TSC0061586
ttgtatgattta

SEQ ID NO: 376047 - DNA, 12 bp, Artificial Sequence
  Oligonucleotide primer for the detection of SNP TSC0061589
atcaaaaaaact

SEQ ID NO: 376048 - DNA, 12 bp, Artificial Sequence
  Oligonucleotide primer for the detection of SNP TSC0061590
taaacaataatc

SEQ ID NO: 376049 - DNA, 12 bp, Artificial Sequence
  Oligonucleotide primer for the detection of SNP TSC0061590
ccatctattaca

SEQ ID NO: 376050 - DNA, 12 bp, Artificial Sequence
  Oligonucleotide primer for the detection of SNP TSC0061591
actcaaaaaaac

SEQ ID NO: 376051 - DNA, 12 bp, Artificial Sequence
  Oligonucleotide primer for the detection of SNP TSC0061591
ggtatatgtaat

SEQ ID NO: 376052 - DNA, 12 bp, Artificial Sequence
  Oligonucleotide primer for the detection of SNP TSC0061591
aatatatacaat

SEQ ID NO: 376053 - DNA, 12 bp, Artificial Sequence
  Oligonucleotide primer for the detection of SNP TSC0061591
gtttagaagggt

SEQ ID NO: 376054 - DNA, 12 bp, Artificial Sequence
  Oligonucleotide primer for the detection of SNP TSC0061592
taacacattctc

SEQ ID NO: 376055 - DNA, 12 bp, Artificial Sequence
  Oligonucleotide primer for the detection of SNP TSC0061592
taacacgttctc

SEQ ID NO: 376056 - DNA, 12 bp, Artificial Sequence
  Oligonucleotide primer for the detection of SNP TSC0061592
taatggttttaa

SEQ ID NO: 376057 - DNA, 12 bp, Artificial Sequence
  Oligonucleotide primer for the detection of SNP TSC0061593
cattcaatctat

SEQ ID NO: 376058 - DNA, 12 bp, Artificial Sequence
  Oligonucleotide primer for the detection of SNP TSC0061593
aaatatattata

SEQ ID NO: 376059 - DNA, 12 bp, Artificial Sequence
  Oligonucleotide primer for the detection of SNP TSC0061594
attaatatggtg

SEQ ID NO: 376060 - DNA, 12 bp, Artificial Sequence
  Oligonucleotide primer for the detection of SNP TSC0061595
tttaatttaatt

SEQ ID NO: 376061 - DNA, 12 bp, Artificial Sequence
  Oligonucleotide primer for the detection of SNP TSC0061595
agtttatagaga

SEQ ID NO: 376062 - DNA, 12 bp, Artificial Sequence
  Oligonucleotide primer for the detection of SNP TSC0061596
atctaccctatc

SEQ ID NO: 376063 - DNA, 12 bp, Artificial Sequence
  Oligonucleotide primer for the detection of SNP TSC0061596
ttgggtgatgta

SEQ ID NO: 376064 - DNA, 12 bp, Artificial Sequence
  Oligonucleotide primer for the detection of SNP TSC0061597
aaatacatctaa

SEQ ID NO: 376065 - DNA, 12 bp, Artificial Sequence
  Oligonucleotide primer for the detection of SNP TSC0061597
tatgtattgtta

SEQ ID NO: 376066 - DNA, 12 bp, Artificial Sequence
  Oligonucleotide primer for the detection of SNP TSC0061598
aatccaaaaata

SEQ ID NO: 376067 - DNA, 12 bp, Artificial Sequence
  Oligonucleotide primer for the detection of SNP TSC0061598
ctaaactcttac

SEQ ID NO: 376068 - DNA, 12 bp, Artificial Sequence
  Oligonucleotide primer for the detection of SNP TSC0061598
ggtttaaaaatg

SEQ ID NO: 376069 - DNA, 12 bp, Artificial Sequence
  Oligonucleotide primer for the detection of SNP TSC0061599
acaaaaaattac

SEQ ID NO: 376070 - DNA, 12 bp, Artificial Sequence
  Oligonucleotide primer for the detection of SNP TSC0061599
tttttcgattta

SEQ ID NO: 376071 - DNA, 12 bp, Artificial Sequence
  Oligonucleotide primer for the detection of SNP TSC0061601
tctcaaattctt

SEQ ID NO: 376072 - DNA, 12 bp, Artificial Sequence
  Oligonucleotide primer for the detection of SNP TSC0061601
tgaattaatgaa

SEQ ID NO: 376073 - DNA, 12 bp, Artificial Sequence
  Oligonucleotide primer for the detection of SNP TSC0061602
gagtattagaag

SEQ ID NO: 376074 - DNA, 12 bp, Artificial Sequence
  Oligonucleotide primer for the detection of SNP TSC0061603
taatgtagggag

SEQ ID NO: 376075 - DNA, 12 bp, Artificial Sequence
  Oligonucleotide primer for the detection of SNP TSC0061603
taacgtagggag

SEQ ID NO: 376076 - DNA, 12 bp, Artificial Sequence
  Oligonucleotide primer for the detection of SNP TSC0061603
caacgtaaaaaa

SEQ ID NO: 376077 - DNA, 12 bp, Artificial Sequence
  Oligonucleotide primer for the detection of SNP TSC0061603
tataaagagttt

SEQ ID NO: 376078 - DNA, 12 bp, Artificial Sequence
  Oligonucleotide primer for the detection of SNP TSC0061604
acaaaaaccaca

SEQ ID NO: 376079 - DNA, 12 bp, Artificial Sequence
  Oligonucleotide primer for the detection of SNP TSC0061604
acaaaaaccgca

SEQ ID NO: 376080 - DNA, 12 bp, Artificial Sequence
  Oligonucleotide primer for the detection of SNP TSC0061604
acgaaaaccaca

SEQ ID NO: 376081 - DNA, 12 bp, Artificial Sequence
  Oligonucleotide primer for the detection of SNP TSC0061604
gcaaaaaccaca

SEQ ID NO: 376082 - DNA, 12 bp, Artificial Sequence
  Oligonucleotide primer for the detection of SNP TSC0061604
acgaaaaccgca

SEQ ID NO: 376083 - DNA, 12 bp, Artificial Sequence
  Oligonucleotide primer for the detection of SNP TSC0061604
gcaaaaaccgca

SEQ ID NO: 376084 - DNA, 12 bp, Artificial Sequence
  Oligonucleotide primer for the detection of SNP TSC0061604
gcgaaaaccaca

SEQ ID NO: 376085 - DNA, 12 bp, Artificial Sequence
  Oligonucleotide primer for the detection of SNP TSC0061604
gcgaaaaccgca

SEQ ID NO: 376086 - DNA, 12 bp, Artificial Sequence
  Oligonucleotide primer for the detection of SNP TSC0061604
attttaggtatt

SEQ ID NO: 376087 - DNA, 12 bp, Artificial Sequence
  Oligonucleotide primer for the detection of SNP TSC0061604
attttaggtatc

SEQ ID NO: 376088 - DNA, 12 bp, Artificial Sequence
  Oligonucleotide primer for the detection of SNP TSC0061604
aactccaaacat

SEQ ID NO: 376089 - DNA, 12 bp, Artificial Sequence
  Oligonucleotide primer for the detection of SNP TSC0061604
gtggaagttgta

SEQ ID NO: 376090 - DNA, 12 bp, Artificial Sequence
  Oligonucleotide primer for the detection of SNP TSC0061604
gcggaagttgta

SEQ ID NO: 376091 - DNA, 12 bp, Artificial Sequence
  Oligonucleotide primer for the detection of SNP TSC0061604
gtggaagtcgta

SEQ ID NO: 376092 - DNA, 12 bp, Artificial Sequence
  Oligonucleotide primer for the detection of SNP TSC0061604
gcggaagtcgta

SEQ ID NO: 376093 - DNA, 12 bp, Artificial Sequence
  Oligonucleotide primer for the detection of SNP TSC0061606
ataacaaccatt

SEQ ID NO: 376094 - DNA, 12 bp, Artificial Sequence
  Oligonucleotide primer for the detection of SNP TSC0061606
tgagagataata

SEQ ID NO: 376095 - DNA, 12 bp, Artificial Sequence
  Oligonucleotide primer for the detection of SNP TSC0061608
ttatgaggtgga

SEQ ID NO: 376096 - DNA, 12 bp, Artificial Sequence
  Oligonucleotide primer for the detection of SNP TSC0061609
taacaataccac

SEQ ID NO: 376097 - DNA, 12 bp, Artificial Sequence
  Oligonucleotide primer for the detection of SNP TSC0061609
aggttttgtgag

SEQ ID NO: 376098 - DNA, 12 bp, Artificial Sequence
  Oligonucleotide primer for the detection of SNP TSC0061614
aactacaatatt

SEQ ID NO: 376099 - DNA, 12 bp, Artificial Sequence
  Oligonucleotide primer for the detection of SNP TSC0061614
aagagttttttg

SEQ ID NO: 376100 - DNA, 12 bp, Artificial Sequence
  Oligonucleotide primer for the detection of SNP TSC0061615
atataatctacc

SEQ ID NO: 376101 - DNA, 12 bp, Artificial Sequence
  Oligonucleotide primer for the detection of SNP TSC0061615
aaaggtgaagta

SEQ ID NO: 376102 - DNA, 12 bp, Artificial Sequence
  Oligonucleotide primer for the detection of SNP TSC0061616
tctttcttccat

SEQ ID NO: 376103 - DNA, 12 bp, Artificial Sequence
  Oligonucleotide primer for the detection of SNP TSC0061617
aaacaactctta

SEQ ID NO: 376104 - DNA, 12 bp, Artificial Sequence
  Oligonucleotide primer for the detection of SNP TSC0061617
tataagtgtggt

SEQ ID NO: 376105 - DNA, 12 bp, Artificial Sequence
  Oligonucleotide primer for the detection of SNP TSC0061617
aaatagttttta

SEQ ID NO: 376106 - DNA, 12 bp, Artificial Sequence
  Oligonucleotide primer for the detection of SNP TSC0061618
actaacttaaaa

SEQ ID NO: 376107 - DNA, 12 bp, Artificial Sequence
  Oligonucleotide primer for the detection of SNP TSC0061618
gatttttattaa

SEQ ID NO: 376108 - DNA, 12 bp, Artificial Sequence
  Oligonucleotide primer for the detection of SNP TSC0061618
aattttcatcaa

SEQ ID NO: 376109 - DNA, 12 bp, Artificial Sequence
  Oligonucleotide primer for the detection of SNP TSC0061618
attggtttgaag

SEQ ID NO: 376110 - DNA, 12 bp, Artificial Sequence
  Oligonucleotide primer for the detection of SNP TSC0061619
attttcattatt

SEQ ID NO: 376111 - DNA, 12 bp, Artificial Sequence
  Oligonucleotide primer for the detection of SNP TSC0061619
taagtttgttga

SEQ ID NO: 376112 - DNA, 12 bp, Artificial Sequence
  Oligonucleotide primer for the detection of SNP TSC0061620
cttaaattattt

SEQ ID NO: 376113 - DNA, 12 bp, Artificial Sequence
  Oligonucleotide primer for the detection of SNP TSC0061620
atttgtataatg

SEQ ID NO: 376114 - DNA, 12 bp, Artificial Sequence
  Oligonucleotide primer for the detection of SNP TSC0006552
caaatttcacat

SEQ ID NO: 376115 - DNA, 12 bp, Artificial Sequence
  Oligonucleotide primer for the detection of SNP TSC0061622
taattacaaaat

SEQ ID NO: 376116 - DNA, 12 bp, Artificial Sequence
  Oligonucleotide primer for the detection of SNP TSC0008604
aatacatcctaa

SEQ ID NO: 376117 - DNA, 12 bp, Artificial Sequence
  Oligonucleotide primer for the detection of SNP TSC0008604
ttgtattaaatt

SEQ ID NO: 376118 - DNA, 12 bp, Artificial Sequence
  Oligonucleotide primer for the detection of SNP TSC0008605
acctctatcctc

SEQ ID NO: 376119 - DNA, 12 bp, Artificial Sequence
  Oligonucleotide primer for the detection of SNP TSC0008605
gtttgagagaat

SEQ ID NO: 376120 - DNA, 12 bp, Artificial Sequence
  Oligonucleotide primer for the detection of SNP TSC0061623
aacccatccctt

SEQ ID NO: 376121 - DNA, 12 bp, Artificial Sequence
  Oligonucleotide primer for the detection of SNP TSC0061623
tgaaggtaatat

SEQ ID NO: 376122 - DNA, 12 bp, Artificial Sequence
  Oligonucleotide primer for the detection of SNP TSC0061624
tcttttacatat

SEQ ID NO: 376123 - DNA, 12 bp, Artificial Sequence
  Oligonucleotide primer for the detection of SNP TSC0061624
tttaaagtagaa

SEQ ID NO: 376124 - DNA, 12 bp, Artificial Sequence
  Oligonucleotide primer for the detection of SNP TSC0061625
attttgtgtatt

SEQ ID NO: 376125 - DNA, 12 bp, Artificial Sequence
  Oligonucleotide primer for the detection of SNP TSC0061625
actttatatact

SEQ ID NO: 376126 - DNA, 12 bp, Artificial Sequence
  Oligonucleotide primer for the detection of SNP TSC0061625
aaattaagaata

SEQ ID NO: 376127 - DNA, 12 bp, Artificial Sequence
  Oligonucleotide primer for the detection of SNP TSC0061628
tcatttcctata

SEQ ID NO: 376128 - DNA, 12 bp, Artificial Sequence
  Oligonucleotide primer for the detection of SNP TSC0061628
tcgtttcctata

SEQ ID NO: 376129 - DNA, 12 bp, Artificial Sequence
  Oligonucleotide primer for the detection of SNP TSC0061628
tatggtagttgt

SEQ ID NO: 376130 - DNA, 12 bp, Artificial Sequence
  Oligonucleotide primer for the detection of SNP TSC0061628
cataacaactat

SEQ ID NO: 376131 - DNA, 12 bp, Artificial Sequence
  Oligonukleotid-Primer
tcgttttttata

SEQ ID NO: 376132 - DNA, 12 bp, Artificial Sequence
  Oligonucleotide primer for the detection of SNP TSC0061629
ttagttggtaga

SEQ ID NO: 376133 - DNA, 12 bp, Artificial Sequence
  Oligonucleotide primer for the detection of SNP TSC0061631
ttatatttagaa

SEQ ID NO: 376134 - DNA, 12 bp, Artificial Sequence
  Oligonucleotide primer for the detection of SNP TSC0061634
aaaccaactacc

SEQ ID NO: 376135 - DNA, 12 bp, Artificial Sequence
  Oligonucleotide primer for the detection of SNP TSC0061634
aaaccgactacc

SEQ ID NO: 376136 - DNA, 12 bp, Artificial Sequence
  Oligonucleotide primer for the detection of SNP TSC0061634
tttatttcgtta

SEQ ID NO: 376137 - DNA, 12 bp, Artificial Sequence
  Oligonucleotide primer for the detection of SNP TSC0061635
aaatttatttcc

SEQ ID NO: 376138 - DNA, 12 bp, Artificial Sequence
  Oligonucleotide primer for the detection of SNP TSC0061635
aaaaactattct

SEQ ID NO: 376139 - DNA, 12 bp, Artificial Sequence
  Oligonucleotide primer for the detection of SNP TSC0061637
ataatcctccta

SEQ ID NO: 376140 - DNA, 12 bp, Artificial Sequence
  Oligonucleotide primer for the detection of SNP TSC0061637
tgtttgggaggt

SEQ ID NO: 376141 - DNA, 12 bp, Artificial Sequence
  Oligonucleotide primer for the detection of SNP TSC0061638
tatgagtttagg

SEQ ID NO: 376142 - DNA, 12 bp, Artificial Sequence
  Oligonucleotide primer for the detection of SNP TSC0061639
aaaaatcttaat

SEQ ID NO: 376143 - DNA, 12 bp, Artificial Sequence
  Oligonucleotide primer for the detection of SNP TSC0061639
tataaatatggt

SEQ ID NO: 376144 - DNA, 12 bp, Artificial Sequence
  Oligonucleotide primer for the detection of SNP TSC0061640
ttttaattagga

SEQ ID NO: 376145 - DNA, 12 bp, Artificial Sequence
  Oligonucleotide primer for the detection of SNP TSC0061641
caaattctctta

SEQ ID NO: 376146 - DNA, 12 bp, Artificial Sequence
  Oligonucleotide primer for the detection of SNP TSC0061641
actctcaaactc

SEQ ID NO: 376147 - DNA, 12 bp, Artificial Sequence
  Oligonucleotide primer for the detection of SNP TSC0061641
taagttttttta

SEQ ID NO: 376148 - DNA, 12 bp, Artificial Sequence
  Oligonucleotide primer for the detection of SNP TSC0061644
ctatctatctct

SEQ ID NO: 376149 - DNA, 12 bp, Artificial Sequence
  Oligonucleotide primer for the detection of SNP TSC0061644
agtgtgagaata

SEQ ID NO: 376150 - DNA, 12 bp, Artificial Sequence
  Oligonucleotide primer for the detection of SNP TSC0061645
aagtttggtaat

SEQ ID NO: 376151 - DNA, 12 bp, Artificial Sequence
  Oligonucleotide primer for the detection of SNP TSC0061645
aaatctaataat

SEQ ID NO: 376152 - DNA, 12 bp, Artificial Sequence
  Oligonucleotide primer for the detection of SNP TSC0061646
acctcaaaaata

SEQ ID NO: 376153 - DNA, 12 bp, Artificial Sequence
  Oligonucleotide primer for the detection of SNP TSC0061646
gagggagattat

SEQ ID NO: 376154 - DNA, 12 bp, Artificial Sequence
  Oligonucleotide primer for the detection of SNP TSC0061647
tgcgtatgtgtg

SEQ ID NO: 376155 - DNA, 12 bp, Artificial Sequence
  Oligonucleotide primer for the detection of SNP TSC0061649
cacctaaccaat

SEQ ID NO: 376156 - DNA, 12 bp, Artificial Sequence
  Oligonucleotide primer for the detection of SNP TSC0061649
agaaatttatta

SEQ ID NO: 376157 - DNA, 12 bp, Artificial Sequence
  Oligonucleotide primer for the detection of SNP TSC0061649
aaaaattcacca

SEQ ID NO: 376158 - DNA, 12 bp, Artificial Sequence
  Oligonucleotide primer for the detection of SNP TSC0061649
tatttggttaat

SEQ ID NO: 376159 - DNA, 12 bp, Artificial Sequence
  Oligonucleotide primer for the detection of SNP TSC0061650
attatattggtt

SEQ ID NO: 376160 - DNA, 12 bp, Artificial Sequence
  Oligonucleotide primer for the detection of SNP TSC0061650
accacattaacc

SEQ ID NO: 376161 - DNA, 12 bp, Artificial Sequence
  Oligonucleotide primer for the detection of SNP TSC0061650
gtggagaaatta

SEQ ID NO: 376162 - DNA, 12 bp, Artificial Sequence
  Oligonucleotide primer for the detection of SNP TSC0061652
cccccctccttt

SEQ ID NO: 376163 - DNA, 12 bp, Artificial Sequence
  Oligonucleotide primer for the detection of SNP TSC0061653
aaacttcctcac

SEQ ID NO: 376164 - DNA, 12 bp, Artificial Sequence
  Oligonucleotide primer for the detection of SNP TSC0061653
gtgtggtgtatg

SEQ ID NO: 376165 - DNA, 12 bp, Artificial Sequence
  Oligonucleotide primer for the detection of SNP TSC0061654
aacaaccccttc

SEQ ID NO: 376166 - DNA, 12 bp, Artificial Sequence
  Oligonucleotide primer for the detection of SNP TSC0061654
taattaggattg

SEQ ID NO: 376167 - DNA, 12 bp, Artificial Sequence
  Oligonucleotide primer for the detection of SNP TSC0061655
acttcctcacca

SEQ ID NO: 376168 - DNA, 12 bp, Artificial Sequence
  Oligonucleotide primer for the detection of SNP TSC0061655
tgagtgtggtgt

SEQ ID NO: 376169 - DNA, 12 bp, Artificial Sequence
  Oligonucleotide primer for the detection of SNP TSC0061656
ttaggtattgat

SEQ ID NO: 376170 - DNA, 12 bp, Artificial Sequence
  Oligonucleotide primer for the detection of SNP TSC0061656
tttaaagggtta

SEQ ID NO: 376171 - DNA, 12 bp, Artificial Sequence
  Oligonucleotide primer for the detection of SNP TSC0061657
cctcctaaatct

SEQ ID NO: 376172 - DNA, 12 bp, Artificial Sequence
  Oligonucleotide primer for the detection of SNP TSC0061657
gtgaatagggtg

SEQ ID NO: 376173 - DNA, 12 bp, Artificial Sequence
  Oligonucleotide primer for the detection of SNP TSC0061659
atacacatttta

SEQ ID NO: 376174 - DNA, 12 bp, Artificial Sequence
  Oligonucleotide primer for the detection of SNP TSC0061659
atggatttatgt

SEQ ID NO: 376175 - DNA, 12 bp, Artificial Sequence
  Oligonucleotide primer for the detection of SNP TSC0061659
ataaatctatac

SEQ ID NO: 376176 - DNA, 12 bp, Artificial Sequence
  Oligonucleotide primer for the detection of SNP TSC0010762
ctcttcaattca

SEQ ID NO: 376177 - DNA, 12 bp, Artificial Sequence
  Oligonucleotide primer for the detection of SNP TSC0010762
tcccaaaaataa

SEQ ID NO: 376178 - DNA, 12 bp, Artificial Sequence
  Oligonucleotide primer for the detection of SNP TSC0061663
cataccaccaca

SEQ ID NO: 376179 - DNA, 12 bp, Artificial Sequence
  Oligonucleotide primer for the detection of SNP TSC0061664
tatcaaataatt

SEQ ID NO: 376180 - DNA, 12 bp, Artificial Sequence
  Oligonucleotide primer for the detection of SNP TSC0061664
aatagattaagt

SEQ ID NO: 376181 - DNA, 12 bp, Artificial Sequence
  Oligonucleotide primer for the detection of SNP TSC0061664
tgttaggtagtt

SEQ ID NO: 376182 - DNA, 12 bp, Artificial Sequence
  Oligonucleotide primer for the detection of SNP TSC0061668
cacaatactatt

SEQ ID NO: 376183 - DNA, 12 bp, Artificial Sequence
  Oligonucleotide primer for the detection of SNP TSC0061669
cttcaaaaaact

SEQ ID NO: 376184 - DNA, 12 bp, Artificial Sequence
  Oligonucleotide primer for the detection of SNP TSC0061669
tttgattaggtt

SEQ ID NO: 376185 - DNA, 12 bp, Artificial Sequence
  Oligonucleotide primer for the detection of SNP TSC0061671
ttccaaaatcac

SEQ ID NO: 376186 - DNA, 12 bp, Artificial Sequence
  Oligonucleotide primer for the detection of SNP TSC0061671
aatatttattgg

SEQ ID NO: 376187 - DNA, 12 bp, Artificial Sequence
  Oligonucleotide primer for the detection of SNP TSC0061672
tctttcacaaat

SEQ ID NO: 376188 - DNA, 12 bp, Artificial Sequence
  Oligonucleotide primer for the detection of SNP TSC0061672
tcttatttttta

SEQ ID NO: 376189 - DNA, 12 bp, Artificial Sequence
  Oligonucleotide primer for the detection of SNP TSC0061673
aaaacatcaaat

SEQ ID NO: 376190 - DNA, 12 bp, Artificial Sequence
  Oligonucleotide primer for the detection of SNP TSC0061673
aaatttatgggg

SEQ ID NO: 376191 - DNA, 12 bp, Artificial Sequence
  Oligonucleotide primer for the detection of SNP TSC0061674
tcacaatataac

SEQ ID NO: 376192 - DNA, 12 bp, Artificial Sequence
  Oligonucleotide primer for the detection of SNP TSC0061674
ttatagtgtggt

SEQ ID NO: 376193 - DNA, 12 bp, Artificial Sequence
  Oligonucleotide primer for the detection of SNP TSC0061675
taataattttat

SEQ ID NO: 376194 - DNA, 12 bp, Artificial Sequence
  Oligonucleotide primer for the detection of SNP TSC0061678
ccaactaaactt

SEQ ID NO: 376195 - DNA, 12 bp, Artificial Sequence
  Oligonucleotide primer for the detection of SNP TSC0061678
ttaagggaagaa

SEQ ID NO: 376196 - DNA, 12 bp, Artificial Sequence
  Oligonucleotide primer for the detection of SNP TSC0061678
ttagttaggttt

SEQ ID NO: 376197 - DNA, 12 bp, Artificial Sequence
  Oligonucleotide primer for the detection of SNP TSC0061679
actctatctaaa

SEQ ID NO: 376198 - DNA, 12 bp, Artificial Sequence
  Oligonucleotide primer for the detection of SNP TSC0061679
aaatttatgagt

SEQ ID NO: 376199 - DNA, 12 bp, Artificial Sequence
  Oligonucleotide primer for the detection of SNP TSC0061680
tagttgtatgag

SEQ ID NO: 376200 - DNA, 12 bp, Artificial Sequence
  Oligonucleotide primer for the detection of SNP TSC0061681
tgtttcgttttg

SEQ ID NO: 376201 - DNA, 12 bp, Artificial Sequence
  Oligonucleotide primer for the detection of SNP TSC0061681
tatcccacccta

SEQ ID NO: 376202 - DNA, 12 bp, Artificial Sequence
  Oligonucleotide primer for the detection of SNP TSC0061681
tatcccgcccta

SEQ ID NO: 376203 - DNA, 12 bp, Artificial Sequence
  Oligonucleotide primer for the detection of SNP TSC0061681
taagtagttagt

SEQ ID NO: 376204 - DNA, 12 bp, Artificial Sequence
  Oligonucleotide primer for the detection of SNP TSC0061682
ttaagatattaa

SEQ ID NO: 376205 - DNA, 12 bp, Artificial Sequence
  Oligonucleotide primer for the detection of SNP TSC0061682
tcaaaacatcaa

SEQ ID NO: 376206 - DNA, 12 bp, Artificial Sequence
  Oligonucleotide primer for the detection of SNP TSC0061684
ttttataagagt

SEQ ID NO: 376207 - DNA, 12 bp, Artificial Sequence
  Oligonucleotide primer for the detection of SNP TSC0061684
atagagatagat

SEQ ID NO: 376208 - DNA, 12 bp, Artificial Sequence
  Oligonucleotide primer for the detection of SNP TSC0061685
gatgtggtgttt

SEQ ID NO: 376209 - DNA, 12 bp, Artificial Sequence
  Oligonucleotide primer for the detection of SNP TSC0061685
gatgtggtgttc

SEQ ID NO: 376210 - DNA, 12 bp, Artificial Sequence
  Oligonucleotide primer for the detection of SNP TSC0061685
gatataatactc

SEQ ID NO: 376211 - DNA, 12 bp, Artificial Sequence
  Oligonucleotide primer for the detection of SNP TSC0061685
gagtatattaat

SEQ ID NO: 376212 - DNA, 12 bp, Artificial Sequence
  Oligonucleotide primer for the detection of SNP TSC0061685
gagtatattaac

SEQ ID NO: 376213 - DNA, 12 bp, Artificial Sequence
  Oligonucleotide primer for the detection of SNP TSC0061686
caacccaaaacc

SEQ ID NO: 376214 - DNA, 12 bp, Artificial Sequence
  Oligonucleotide primer for the detection of SNP TSC0061686
ttagtagagtta

SEQ ID NO: 376215 - DNA, 12 bp, Artificial Sequence
  Oligonucleotide primer for the detection of SNP TSC0061686
ccaacaaaacta

SEQ ID NO: 376216 - DNA, 12 bp, Artificial Sequence
  Oligonucleotide primer for the detection of SNP TSC0061686
tagtttagaatt

SEQ ID NO: 376217 - DNA, 12 bp, Artificial Sequence
  Oligonucleotide primer for the detection of SNP TSC0061687
acacataaatct

SEQ ID NO: 376218 - DNA, 12 bp, Artificial Sequence
  Oligonucleotide primer for the detection of SNP TSC0061687
acacgtaaatct

SEQ ID NO: 376219 - DNA, 12 bp, Artificial Sequence
  Oligonucleotide primer for the detection of SNP TSC0061688
atacaaaaacat

SEQ ID NO: 376220 - DNA, 12 bp, Artificial Sequence
  Oligonucleotide primer for the detection of SNP TSC0061688
attgttgtggaa

SEQ ID NO: 376221 - DNA, 12 bp, Artificial Sequence
  Oligonucleotide primer for the detection of SNP TSC0061688
atataagaatat

SEQ ID NO: 376222 - DNA, 12 bp, Artificial Sequence
  Oligonucleotide primer for the detection of SNP TSC0061690
attctaacatcc

SEQ ID NO: 376223 - DNA, 12 bp, Artificial Sequence
  Oligonucleotide primer for the detection of SNP TSC0061690
taagatatttta

SEQ ID NO: 376224 - DNA, 12 bp, Artificial Sequence
  Oligonucleotide primer for the detection of SNP TSC0061691
atttaaatactc

SEQ ID NO: 376225 - DNA, 12 bp, Artificial Sequence
  Oligonucleotide primer for the detection of SNP TSC0061692
ctccctcccctc

SEQ ID NO: 376226 - DNA, 12 bp, Artificial Sequence
  Oligonucleotide primer for the detection of SNP TSC0061692
ttgttgtggggg

SEQ ID NO: 376227 - DNA, 12 bp, Artificial Sequence
  Oligonucleotide primer for the detection of SNP TSC0061694
ttgaagaaaatg

SEQ ID NO: 376228 - DNA, 12 bp, Artificial Sequence
  Oligonucleotide primer for the detection of SNP TSC0061695
aatacatcttcc

SEQ ID NO: 376229 - DNA, 12 bp, Artificial Sequence
  Oligonucleotide primer for the detection of SNP TSC0061695
aaaaatctctat

SEQ ID NO: 376230 - DNA, 12 bp, Artificial Sequence
  Oligonucleotide primer for the detection of SNP TSC0009905
gtggtttacgtt

SEQ ID NO: 376231 - DNA, 12 bp, Artificial Sequence
  Oligonucleotide primer for the detection of SNP TSC0009905
gtggtttatgtc

SEQ ID NO: 376232 - DNA, 12 bp, Artificial Sequence
  Oligonucleotide primer for the detection of SNP TSC0009905
gtggtttacgtc

SEQ ID NO: 376233 - DNA, 12 bp, Artificial Sequence
  Oligonucleotide primer for the detection of SNP TSC0061696
aacttctaaaca

SEQ ID NO: 376234 - DNA, 12 bp, Artificial Sequence
  Oligonucleotide primer for the detection of SNP TSC0061696
gatagatttgtt

SEQ ID NO: 376235 - DNA, 12 bp, Artificial Sequence
  Oligonucleotide primer for the detection of SNP TSC0061696
aacaaatttatt

SEQ ID NO: 376236 - DNA, 12 bp, Artificial Sequence
  Oligonucleotide primer for the detection of SNP TSC0061696
aatttttaagta

SEQ ID NO: 376237 - DNA, 12 bp, Artificial Sequence
  Oligonucleotide primer for the detection of SNP TSC0061697
atataatttcct

SEQ ID NO: 376238 - DNA, 12 bp, Artificial Sequence
  Oligonucleotide primer for the detection of SNP TSC0061697
taattgtgtttg

SEQ ID NO: 376239 - DNA, 12 bp, Artificial Sequence
  Oligonucleotide primer for the detection of SNP TSC0061697
taattgcgtttg

SEQ ID NO: 376240 - DNA, 12 bp, Artificial Sequence
  Oligonucleotide primer for the detection of SNP TSC0061698
aagaggtaaaaa

SEQ ID NO: 376241 - DNA, 12 bp, Artificial Sequence
  Oligonucleotide primer for the detection of SNP TSC0061700
taaacattaaaa

SEQ ID NO: 376242 - DNA, 12 bp, Artificial Sequence
  Oligonucleotide primer for the detection of SNP TSC0061700
cccctccataaa

SEQ ID NO: 376243 - DNA, 12 bp, Artificial Sequence
  Oligonucleotide primer for the detection of SNP TSC0061700
tgggtattagag

SEQ ID NO: 376244 - DNA, 12 bp, Artificial Sequence
  Oligonucleotide primer for the detection of SNP TSC0061701
ccaatttactaa

SEQ ID NO: 376245 - DNA, 12 bp, Artificial Sequence
  Oligonucleotide primer for the detection of SNP TSC0061701
tatataaaagat

SEQ ID NO: 376246 - DNA, 12 bp, Artificial Sequence
  Oligonucleotide primer for the detection of SNP TSC0061701
cacacaaaaaac

SEQ ID NO: 376247 - DNA, 12 bp, Artificial Sequence
  Oligonucleotide primer for the detection of SNP TSC0061702
ttatatccttat

SEQ ID NO: 376248 - DNA, 12 bp, Artificial Sequence
  Oligonucleotide primer for the detection of SNP TSC0061702
tttaagaaaggg

SEQ ID NO: 376249 - DNA, 12 bp, Artificial Sequence
  Oligonucleotide primer for the detection of SNP TSC0005786
aaaacgaccccc

SEQ ID NO: 376250 - DNA, 12 bp, Artificial Sequence
  Oligonucleotide primer for the detection of SNP TSC0005786
gttgatagaata

SEQ ID NO: 376251 - DNA, 12 bp, Artificial Sequence
  Oligonucleotide primer for the detection of SNP TSC0005787
ctaccaaatcat

SEQ ID NO: 376252 - DNA, 12 bp, Artificial Sequence
  Oligonucleotide primer for the detection of SNP TSC0005787
ctaccaaatcgt

SEQ ID NO: 376253 - DNA, 12 bp, Artificial Sequence
  Oligonucleotide primer for the detection of SNP TSC0005787
acccttaatcca

SEQ ID NO: 376254 - DNA, 12 bp, Artificial Sequence
  Oligonucleotide primer for the detection of SNP TSC0005787
ttgttaagttgt

SEQ ID NO: 376255 - DNA, 12 bp, Artificial Sequence
  Oligonukleotid-Primer
ttgttaagtcgt

SEQ ID NO: 376256 - DNA, 12 bp, Artificial Sequence
  Oligonucleotide primer for the detection of SNP TSC0008155
ttaactatatcc

SEQ ID NO: 376257 - DNA, 12 bp, Artificial Sequence
  Oligonucleotide primer for the detection of SNP TSC0008155
tatatttgggtg

SEQ ID NO: 376258 - DNA, 12 bp, Artificial Sequence
  Oligonucleotide primer for the detection of SNP TSC0008155
ttggttgtgttt

SEQ ID NO: 376259 - DNA, 12 bp, Artificial Sequence
  Oligonukleotid-Primer
caccttaaaaac

SEQ ID NO: 376260 - DNA, 12 bp, Artificial Sequence
  Oligonucleotide primer for the detection of SNP TSC0061703
cgccttaaaaac

SEQ ID NO: 376261 - DNA, 12 bp, Artificial Sequence
  Oligonucleotide primer for the detection of SNP TSC0061703
aatagttatttt

SEQ ID NO: 376262 - DNA, 12 bp, Artificial Sequence
  Oligonucleotide primer for the detection of SNP TSC0061703
aatcattctaaa

SEQ ID NO: 376263 - DNA, 12 bp, Artificial Sequence
  Oligonucleotide primer for the detection of SNP TSC0061704
ctttacatacaa

SEQ ID NO: 376264 - DNA, 12 bp, Artificial Sequence
  Oligonucleotide primer for the detection of SNP TSC0061704
gttttatatttt

SEQ ID NO: 376265 - DNA, 12 bp, Artificial Sequence
  Oligonucleotide primer for the detection of SNP TSC0061704
gttttatatttc

SEQ ID NO: 376266 - DNA, 12 bp, Artificial Sequence
  Oligonucleotide primer for the detection of SNP TSC0061704
ttttatacttcg

SEQ ID NO: 376267 - DNA, 12 bp, Artificial Sequence
  Oligonucleotide primer for the detection of SNP TSC0061705
ttaattcattta

SEQ ID NO: 376268 - DNA, 12 bp, Artificial Sequence
  Oligonucleotide primer for the detection of SNP TSC0061706
ctctaactttat

SEQ ID NO: 376269 - DNA, 12 bp, Artificial Sequence
  Oligonucleotide primer for the detection of SNP TSC0061706
gggtgttagata

SEQ ID NO: 376270 - DNA, 12 bp, Artificial Sequence
  Oligonucleotide primer for the detection of SNP TSC0061707
actaacaattta

SEQ ID NO: 376271 - DNA, 12 bp, Artificial Sequence
  Oligonucleotide primer for the detection of SNP TSC0061707
tatttagtagat

SEQ ID NO: 376272 - DNA, 12 bp, Artificial Sequence
  Oligonucleotide primer for the detection of SNP TSC0061707
ccattcaataaa

SEQ ID NO: 376273 - DNA, 12 bp, Artificial Sequence
  Oligonucleotide primer for the detection of SNP TSC0061707
gtagtttatttt

SEQ ID NO: 376274 - DNA, 12 bp, Artificial Sequence
  Oligonucleotide primer for the detection of SNP TSC0061708
acttaactaaat

SEQ ID NO: 376275 - DNA, 12 bp, Artificial Sequence
  Oligonucleotide primer for the detection of SNP TSC0006570
aaatgtgttttg

SEQ ID NO: 376276 - DNA, 12 bp, Artificial Sequence
  Oligonucleotide primer for the detection of SNP TSC0006570
aaacgtgttttg

SEQ ID NO: 376277 - DNA, 12 bp, Artificial Sequence
  Oligonucleotide primer for the detection of SNP TSC0006570
aaacatatttta

SEQ ID NO: 376278 - DNA, 12 bp, Artificial Sequence
  Oligonucleotide primer for the detection of SNP TSC0006570
aaacgtatttta

SEQ ID NO: 376279 - DNA, 12 bp, Artificial Sequence
  Oligonucleotide primer for the detection of SNP TSC0006570
tgaggggtaaat

SEQ ID NO: 376280 - DNA, 12 bp, Artificial Sequence
  Oligonucleotide primer for the detection of SNP TSC0061712
tatcatcattct

SEQ ID NO: 376281 - DNA, 12 bp, Artificial Sequence
  Oligonucleotide primer for the detection of SNP TSC0061712
atattatgaaaa

SEQ ID NO: 376282 - DNA, 12 bp, Artificial Sequence
  Oligonucleotide primer for the detection of SNP TSC0061712
acatcataaaaa

SEQ ID NO: 376283 - DNA, 12 bp, Artificial Sequence
  Oligonucleotide primer for the detection of SNP TSC0061714
cacccaatactt

SEQ ID NO: 376284 - DNA, 12 bp, Artificial Sequence
  Oligonucleotide primer for the detection of SNP TSC0061714
tatatatttggg

SEQ ID NO: 376285 - DNA, 12 bp, Artificial Sequence
  Oligonucleotide primer for the detection of SNP TSC0061715
atcatttattca

SEQ ID NO: 376286 - DNA, 12 bp, Artificial Sequence
  Oligonucleotide primer for the detection of SNP TSC0061715
atcatttattcg

SEQ ID NO: 376287 - DNA, 12 bp, Artificial Sequence
  Oligonucleotide primer for the detection of SNP TSC0061715
tttgtcgtattt

SEQ ID NO: 376288 - DNA, 12 bp, Artificial Sequence
  Oligonucleotide primer for the detection of SNP TSC0061715
actctaccatac

SEQ ID NO: 376289 - DNA, 12 bp, Artificial Sequence
  Oligonucleotide primer for the detection of SNP TSC0061715
actctaccgtac

SEQ ID NO: 376290 - DNA, 12 bp, Artificial Sequence
  Oligonucleotide primer for the detection of SNP TSC0061715
gttatttgtttg

SEQ ID NO: 376291 - DNA, 12 bp, Artificial Sequence
  Oligonucleotide primer for the detection of SNP TSC0061715
gttatttgttcg

SEQ ID NO: 376292 - DNA, 12 bp, Artificial Sequence
  Oligonucleotide primer for the detection of SNP TSC0061716
ttattcaaaaac

SEQ ID NO: 376293 - DNA, 12 bp, Artificial Sequence
  Oligonucleotide primer for the detection of SNP TSC0061716
cattaattcctt

SEQ ID NO: 376294 - DNA, 12 bp, Artificial Sequence
  Oligonucleotide primer for the detection of SNP TSC0061716
ttgtttaagagt

SEQ ID NO: 376295 - DNA, 12 bp, Artificial Sequence
  Oligonucleotide primer for the detection of SNP TSC0061717
taatgttggtta

SEQ ID NO: 376296 - DNA, 12 bp, Artificial Sequence
  Oligonucleotide primer for the detection of SNP TSC0061717
taacgttggtta

SEQ ID NO: 376297 - DNA, 12 bp, Artificial Sequence
  Oligonucleotide primer for the detection of SNP TSC0061718
atcctacaactt

SEQ ID NO: 376298 - DNA, 12 bp, Artificial Sequence
  Oligonucleotide primer for the detection of SNP TSC0061718
tagtattaggat

SEQ ID NO: 376299 - DNA, 12 bp, Artificial Sequence
  Oligonucleotide primer for the detection of SNP TSC0061718
aacactaaaata

SEQ ID NO: 376300 - DNA, 12 bp, Artificial Sequence
  Oligonucleotide primer for the detection of SNP TSC0061718
gttttgtaattt

SEQ ID NO: 376301 - DNA, 12 bp, Artificial Sequence
  Oligonucleotide primer for the detection of SNP TSC0061720
taactaaaacca

SEQ ID NO: 376302 - DNA, 12 bp, Artificial Sequence
  Oligonucleotide primer for the detection of SNP TSC0061720
ttggtatatatt

SEQ ID NO: 376303 - DNA, 12 bp, Artificial Sequence
  Oligonucleotide primer for the detection of SNP TSC0061720
ctaacacacatc

SEQ ID NO: 376304 - DNA, 12 bp, Artificial Sequence
  Oligonucleotide primer for the detection of SNP TSC0061720
agttgggattac

SEQ ID NO: 376305 - DNA, 12 bp, Artificial Sequence
  Oligonucleotide primer for the detection of SNP TSC0005804
atacctcaaaat

SEQ ID NO: 376306 - DNA, 12 bp, Artificial Sequence
  Oligonucleotide primer for the detection of SNP TSC0005804
ttggattttagg

SEQ ID NO: 376307 - DNA, 12 bp, Artificial Sequence
  Oligonucleotide primer for the detection of SNP TSC0004607
aaacccacttac

SEQ ID NO: 376308 - DNA, 12 bp, Artificial Sequence
  Oligonucleotide primer for the detection of SNP TSC0004607
aaattgagtttg

SEQ ID NO: 376309 - DNA, 12 bp, Artificial Sequence
  Oligonucleotide primer for the detection of SNP TSC0061722
gaagagataaaa

SEQ ID NO: 376310 - DNA, 12 bp, Artificial Sequence
  Oligonucleotide primer for the detection of SNP TSC0061723
aattatcaaact

SEQ ID NO: 376311 - DNA, 12 bp, Artificial Sequence
  Oligonucleotide primer for the detection of SNP TSC0061723
tgatgtttattg

SEQ ID NO: 376312 - DNA, 12 bp, Artificial Sequence
  Oligonucleotide primer for the detection of SNP TSC0061724
ccaaaaaaattt

SEQ ID NO: 376313 - DNA, 12 bp, Artificial Sequence
  Oligonucleotide primer for the detection of SNP TSC0061725
tctacaaaaacc

SEQ ID NO: 376314 - DNA, 12 bp, Artificial Sequence
  Oligonucleotide primer for the detection of SNP TSC0061725
tctaccttttca

SEQ ID NO: 376315 - DNA, 12 bp, Artificial Sequence
  Oligonucleotide primer for the detection of SNP TSC0061725
tttgtaagaatt

SEQ ID NO: 376316 - DNA, 12 bp, Artificial Sequence
  Oligonucleotide primer for the detection of SNP TSC0010727
tttgttaataag

SEQ ID NO: 376317 - DNA, 12 bp, Artificial Sequence
  Oligonucleotide primer for the detection of SNP TSC0061726
aatctaaaacct

SEQ ID NO: 376318 - DNA, 12 bp, Artificial Sequence
  Oligonucleotide primer for the detection of SNP TSC0061726
gagggagaaggg

SEQ ID NO: 376319 - DNA, 12 bp, Artificial Sequence
  Oligonucleotide primer for the detection of SNP TSC0007932
atatatcctata

SEQ ID NO: 376320 - DNA, 12 bp, Artificial Sequence
  Oligonucleotide primer for the detection of SNP TSC0007932
tattattggggt

SEQ ID NO: 376321 - DNA, 12 bp, Artificial Sequence
  Oligonucleotide primer for the detection of SNP TSC0007932
caccattaaaat

SEQ ID NO: 376322 - DNA, 12 bp, Artificial Sequence
  Oligonucleotide primer for the detection of SNP TSC0061728
caaccttaaaaa

SEQ ID NO: 376323 - DNA, 12 bp, Artificial Sequence
  Oligonucleotide primer for the detection of SNP TSC0061728
tttatctaattt

SEQ ID NO: 376324 - DNA, 12 bp, Artificial Sequence
  Oligonucleotide primer for the detection of SNP TSC0061728
tagttttaaaga

SEQ ID NO: 376325 - DNA, 12 bp, Artificial Sequence
  Oligonucleotide primer for the detection of SNP TSC0000765
attctactataa

SEQ ID NO: 376326 - DNA, 12 bp, Artificial Sequence
  Oligonucleotide primer for the detection of SNP TSC0000765
gaagtataaaat

SEQ ID NO: 376327 - DNA, 12 bp, Artificial Sequence
  Oligonucleotide primer for the detection of SNP TSC0000765
attttgttgtaa

SEQ ID NO: 376328 - DNA, 12 bp, Artificial Sequence
  Oligonucleotide primer for the detection of SNP TSC0061731
ctatctataatc

SEQ ID NO: 376329 - DNA, 12 bp, Artificial Sequence
  Oligonucleotide primer for the detection of SNP TSC0061732
cccacccccaat

SEQ ID NO: 376330 - DNA, 12 bp, Artificial Sequence
  Oligonucleotide primer for the detection of SNP TSC0061732
tgttttgtggaa

SEQ ID NO: 376331 - DNA, 12 bp, Artificial Sequence
  Oligonucleotide primer for the detection of SNP TSC0061733
atccaataaaaa

SEQ ID NO: 376332 - DNA, 12 bp, Artificial Sequence
  Oligonucleotide primer for the detection of SNP TSC0061733
gggataaatgtt

SEQ ID NO: 376333 - DNA, 12 bp, Artificial Sequence
  Oligonucleotide primer for the detection of SNP TSC0061733
gtatttaataaa

SEQ ID NO: 376334 - DNA, 12 bp, Artificial Sequence
  Oligonucleotide primer for the detection of SNP TSC0061734
atggaggataaa

SEQ ID NO: 376335 - DNA, 12 bp, Artificial Sequence
  Oligonucleotide primer for the detection of SNP TSC0061734
acggaggataaa

SEQ ID NO: 376336 - DNA, 12 bp, Artificial Sequence
  Oligonucleotide primer for the detection of SNP TSC0061735
ctttctaacttt

SEQ ID NO: 376337 - DNA, 12 bp, Artificial Sequence
  Oligonucleotide primer for the detection of SNP TSC0061735
aaaatatttgaa

SEQ ID NO: 376338 - DNA, 12 bp, Artificial Sequence
  Oligonucleotide primer for the detection of SNP TSC0061737
ccctattaatct

SEQ ID NO: 376339 - DNA, 12 bp, Artificial Sequence
  Oligonucleotide primer for the detection of SNP TSC0061738
atggtggttttt

SEQ ID NO: 376340 - DNA, 12 bp, Artificial Sequence
  Oligonucleotide primer for the detection of SNP TSC0061738
atattgaaaaat

SEQ ID NO: 376341 - DNA, 12 bp, Artificial Sequence
  Oligonucleotide primer for the detection of SNP TSC0061739
tctcatatataa

SEQ ID NO: 376342 - DNA, 12 bp, Artificial Sequence
  Oligonucleotide primer for the detection of SNP TSC0061745
agggtttttgta

SEQ ID NO: 376343 - DNA, 12 bp, Artificial Sequence
  Oligonucleotide primer for the detection of SNP TSC0061746
aaaaatattgaa

SEQ ID NO: 376344 - DNA, 12 bp, Artificial Sequence
  Oligonucleotide primer for the detection of SNP TSC0061746
aaaaacattaaa

SEQ ID NO: 376345 - DNA, 12 bp, Artificial Sequence
  Oligonucleotide primer for the detection of SNP TSC0061746
gtttaattagag

SEQ ID NO: 376346 - DNA, 12 bp, Artificial Sequence
  Oligonucleotide primer for the detection of SNP TSC0061747
aaaaactattaa

SEQ ID NO: 376347 - DNA, 12 bp, Artificial Sequence
  Oligonucleotide primer for the detection of SNP TSC0061747
accttttctata

SEQ ID NO: 376348 - DNA, 12 bp, Artificial Sequence
  Oligonucleotide primer for the detection of SNP TSC0008448
tataacacctct

SEQ ID NO: 376349 - DNA, 12 bp, Artificial Sequence
  Oligonucleotide primer for the detection of SNP TSC0008448
atgatattatgg

SEQ ID NO: 376350 - DNA, 12 bp, Artificial Sequence
  Oligonucleotide primer for the detection of SNP TSC0008448
atgatattacgg

SEQ ID NO: 376351 - DNA, 12 bp, Artificial Sequence
  Oligonucleotide primer for the detection of SNP TSC0008449
aaattaaactaa

SEQ ID NO: 376352 - DNA, 12 bp, Artificial Sequence
  Oligonucleotide primer for the detection of SNP TSC0008449
ttgggttgattt

SEQ ID NO: 376353 - DNA, 12 bp, Artificial Sequence
  Oligonucleotide primer for the detection of SNP TSC0061749
aaaatcatttaa

SEQ ID NO: 376354 - DNA, 12 bp, Artificial Sequence
  Oligonucleotide primer for the detection of SNP TSC0061749
taaatgtttgag

SEQ ID NO: 376355 - DNA, 12 bp, Artificial Sequence
  Oligonucleotide primer for the detection of SNP TSC0061749
taaacgtttgag

SEQ ID NO: 376356 - DNA, 12 bp, Artificial Sequence
  Oligonucleotide primer for the detection of SNP TSC0061749
taaacacctaaa

SEQ ID NO: 376357 - DNA, 12 bp, Artificial Sequence
  Oligonucleotide primer for the detection of SNP TSC0061749
taaacgcctaaa

SEQ ID NO: 376358 - DNA, 12 bp, Artificial Sequence
  Oligonucleotide primer for the detection of SNP TSC0061749
gaggattatttg

SEQ ID NO: 376359 - DNA, 12 bp, Artificial Sequence
  Oligonucleotide primer for the detection of SNP TSC0061750
tttatttttacg

SEQ ID NO: 376360 - DNA, 12 bp, Artificial Sequence
  Oligonucleotide primer for the detection of SNP TSC0061753
accaccaaaaca

SEQ ID NO: 376361 - DNA, 12 bp, Artificial Sequence
  Oligonucleotide primer for the detection of SNP TSC0061753
gtaggtatatat

SEQ ID NO: 376362 - DNA, 12 bp, Artificial Sequence
  Oligonucleotide primer for the detection of SNP TSC0061753
cataaatacaca

SEQ ID NO: 376363 - DNA, 12 bp, Artificial Sequence
  Oligonucleotide primer for the detection of SNP TSC0061753
cgtaaatacaca

SEQ ID NO: 376364 - DNA, 12 bp, Artificial Sequence
  Oligonucleotide primer for the detection of SNP TSC0061753
aattattaaggt

SEQ ID NO: 376365 - DNA, 12 bp, Artificial Sequence
  Oligonucleotide primer for the detection of SNP TSC0061756
aaaaaccataac

SEQ ID NO: 376366 - DNA, 12 bp, Artificial Sequence
  Oligonucleotide primer for the detection of SNP TSC0061757
agttttagttgt

SEQ ID NO: 376367 - DNA, 12 bp, Artificial Sequence
  Oligonucleotide primer for the detection of SNP TSC0061757
taaagaagggtt

SEQ ID NO: 376368 - DNA, 12 bp, Artificial Sequence
  Oligonucleotide primer for the detection of SNP TSC0061761
atatttaaaaac

SEQ ID NO: 376369 - DNA, 12 bp, Artificial Sequence
  Oligonucleotide primer for the detection of SNP TSC0061761
ttttgttaaaga

SEQ ID NO: 376370 - DNA, 12 bp, Artificial Sequence
  Oligonucleotide primer for the detection of SNP TSC0061766
ttcaaaccaaat

SEQ ID NO: 376371 - DNA, 12 bp, Artificial Sequence
  Oligonucleotide primer for the detection of SNP TSC0061766
ttttagaaaaaa

SEQ ID NO: 376372 - DNA, 12 bp, Artificial Sequence
  Oligonucleotide primer for the detection of SNP TSC0061767
ttttattttacc

SEQ ID NO: 376373 - DNA, 12 bp, Artificial Sequence
  Oligonucleotide primer for the detection of SNP TSC0006504
ttttattaagaa

SEQ ID NO: 376374 - DNA, 12 bp, Artificial Sequence
  Oligonucleotide primer for the detection of SNP TSC0061770
aactctctttac

SEQ ID NO: 376375 - DNA, 12 bp, Artificial Sequence
  Oligonucleotide primer for the detection of SNP TSC0061770
ttaaaaatagaa

SEQ ID NO: 376376 - DNA, 12 bp, Artificial Sequence
  Oligonucleotide primer for the detection of SNP TSC0061773
tccaattttaca

SEQ ID NO: 376377 - DNA, 12 bp, Artificial Sequence
  Oligonucleotide primer for the detection of SNP TSC0061773
gtaatgatttat

SEQ ID NO: 376378 - DNA, 12 bp, Artificial Sequence
  Oligonucleotide primer for the detection of SNP TSC0061773
caataactcata

SEQ ID NO: 376379 - DNA, 12 bp, Artificial Sequence
  Oligonucleotide primer for the detection of SNP TSC0061774
caaacaattcta

SEQ ID NO: 376380 - DNA, 12 bp, Artificial Sequence
  Oligonucleotide primer for the detection of SNP TSC0061774
aaattttctcct

SEQ ID NO: 376381 - DNA, 12 bp, Artificial Sequence
  Oligonucleotide primer for the detection of SNP TSC0061774
ttaaataatttt

SEQ ID NO: 376382 - DNA, 12 bp, Artificial Sequence
  Oligonucleotide primer for the detection of SNP TSC0061777
aaatacatactc

SEQ ID NO: 376383 - DNA, 12 bp, Artificial Sequence
  Oligonucleotide primer for the detection of SNP TSC0061777
aaatacgtactc

SEQ ID NO: 376384 - DNA, 12 bp, Artificial Sequence
  Oligonucleotide primer for the detection of SNP TSC0061777
tttagtaaagaa

SEQ ID NO: 376385 - DNA, 12 bp, Artificial Sequence
  Oligonucleotide primer for the detection of SNP TSC0061780
tgatttgtttga

SEQ ID NO: 376386 - DNA, 12 bp, Artificial Sequence
  Oligonucleotide primer for the detection of SNP TSC0061780
tgatttgttcga

SEQ ID NO: 376387 - DNA, 12 bp, Artificial Sequence
  Oligonucleotide primer for the detection of SNP TSC0061780
taatctacccaa

SEQ ID NO: 376388 - DNA, 12 bp, Artificial Sequence
  Oligonucleotide primer for the detection of SNP TSC0061780
taatctacccga

SEQ ID NO: 376389 - DNA, 12 bp, Artificial Sequence
  Oligonucleotide primer for the detection of SNP TSC0061781
ctaatttcttta

SEQ ID NO: 376390 - DNA, 12 bp, Artificial Sequence
  Oligonucleotide primer for the detection of SNP TSC0061781
ttaagtagtgtt

SEQ ID NO: 376391 - DNA, 12 bp, Artificial Sequence
  Oligonucleotide primer for the detection of SNP TSC0061781
ccaaacaatact

SEQ ID NO: 376392 - DNA, 12 bp, Artificial Sequence
  Oligonucleotide primer for the detection of SNP TSC0061782
cataaacataaa

SEQ ID NO: 376393 - DNA, 12 bp, Artificial Sequence
  Oligonucleotide primer for the detection of SNP TSC0061782
tataaggttatg

SEQ ID NO: 376394 - DNA, 12 bp, Artificial Sequence
  Oligonucleotide primer for the detection of SNP TSC0061782
ataagtataaat

SEQ ID NO: 376395 - DNA, 12 bp, Artificial Sequence
  Oligonucleotide primer for the detection of SNP TSC0061789
aaatcatatttc

SEQ ID NO: 376396 - DNA, 12 bp, Artificial Sequence
  Oligonucleotide primer for the detection of SNP TSC0061794
tcaaatcttaaa

SEQ ID NO: 376397 - DNA, 12 bp, Artificial Sequence
  Oligonucleotide primer for the detection of SNP TSC0061794
ggagaaaatgtt

SEQ ID NO: 376398 - DNA, 12 bp, Artificial Sequence
  Oligonucleotide primer for the detection of SNP TSC0061795
ctctctccaaat

SEQ ID NO: 376399 - DNA, 12 bp, Artificial Sequence
  Oligonucleotide primer for the detection of SNP TSC0061795
tagtatttgata

SEQ ID NO: 376400 - DNA, 12 bp, Artificial Sequence
  Oligonucleotide primer for the detection of SNP TSC0061795
taacatctaaca

SEQ ID NO: 376401 - DNA, 12 bp, Artificial Sequence
  Oligonucleotide primer for the detection of SNP TSC0061796
ccaatcaacctt

SEQ ID NO: 376402 - DNA, 12 bp, Artificial Sequence
  Oligonucleotide primer for the detection of SNP TSC0061797
acataaacattc

SEQ ID NO: 376403 - DNA, 12 bp, Artificial Sequence
  Oligonucleotide primer for the detection of SNP TSC0061797
tttaggtaagta

SEQ ID NO: 376404 - DNA, 12 bp, Artificial Sequence
  Oligonucleotide primer for the detection of SNP TSC0061797
cctaaacaaaca

SEQ ID NO: 376405 - DNA, 12 bp, Artificial Sequence
  Oligonucleotide primer for the detection of SNP TSC0061797
atatgggtattt

SEQ ID NO: 376406 - DNA, 12 bp, Artificial Sequence
  Oligonucleotide primer for the detection of SNP TSC0061798
ggttgggggggt

SEQ ID NO: 376407 - DNA, 12 bp, Artificial Sequence
  Oligonucleotide primer for the detection of SNP TSC0061798
aatatttttgat

SEQ ID NO: 376408 - DNA, 12 bp, Artificial Sequence
  Oligonucleotide primer for the detection of SNP TSC0008241
gaggtagttaat

SEQ ID NO: 376409 - DNA, 12 bp, Artificial Sequence
  Oligonucleotide primer for the detection of SNP TSC0008241
aaaacaattaat

SEQ ID NO: 376410 - DNA, 12 bp, Artificial Sequence
  Oligonucleotide primer for the detection of SNP TSC0008241
gaaacaattaat

SEQ ID NO: 376411 - DNA, 12 bp, Artificial Sequence
  Oligonucleotide primer for the detection of SNP TSC0008241
agtgagagtaga

SEQ ID NO: 376412 - DNA, 12 bp, Artificial Sequence
  Oligonucleotide primer for the detection of SNP TSC0061800
ataaatatatat

SEQ ID NO: 376413 - DNA, 12 bp, Artificial Sequence
  Oligonucleotide primer for the detection of SNP TSC0061802
aggaggttttag

SEQ ID NO: 376414 - DNA, 12 bp, Artificial Sequence
  Oligonucleotide primer for the detection of SNP TSC0006090
caaaatcattct

SEQ ID NO: 376415 - DNA, 12 bp, Artificial Sequence
  Oligonucleotide primer for the detection of SNP TSC0006090
agtttaagtata

SEQ ID NO: 376416 - DNA, 12 bp, Artificial Sequence
  Oligonucleotide primer for the detection of SNP TSC0061805
ccataaattatt

SEQ ID NO: 376417 - DNA, 12 bp, Artificial Sequence
  Oligonucleotide primer for the detection of SNP TSC0061805
ttggtaaatgtg

SEQ ID NO: 376418 - DNA, 12 bp, Artificial Sequence
  Oligonucleotide primer for the detection of SNP TSC0061806
aattttacattc

SEQ ID NO: 376419 - DNA, 12 bp, Artificial Sequence
  Oligonucleotide primer for the detection of SNP TSC0061806
atattgttagta

SEQ ID NO: 376420 - DNA, 12 bp, Artificial Sequence
  Oligonucleotide primer for the detection of SNP TSC0061808
ccttaaatttaa

SEQ ID NO: 376421 - DNA, 12 bp, Artificial Sequence
  Oligonucleotide primer for the detection of SNP TSC0061808
tagagtgtggtt

SEQ ID NO: 376422 - DNA, 12 bp, Artificial Sequence
  Oligonucleotide primer for the detection of SNP TSC0061808
caaaatataatc

SEQ ID NO: 376423 - DNA, 12 bp, Artificial Sequence
  Oligonucleotide primer for the detection of SNP TSC0061808
ttttaggtttag

SEQ ID NO: 376424 - DNA, 12 bp, Artificial Sequence
  Oligonucleotide primer for the detection of SNP TSC0061809
tattattttctt

SEQ ID NO: 376425 - DNA, 12 bp, Artificial Sequence
  Oligonucleotide primer for the detection of SNP TSC0061810
ttttactaaaaa

SEQ ID NO: 376426 - DNA, 12 bp, Artificial Sequence
  Oligonucleotide primer for the detection of SNP TSC0061810
ttaaaatcatac

SEQ ID NO: 376427 - DNA, 12 bp, Artificial Sequence
  Oligonucleotide primer for the detection of SNP TSC0061810
aatattttattg

SEQ ID NO: 376428 - DNA, 12 bp, Artificial Sequence
  Oligonucleotide primer for the detection of SNP TSC0061813
tactacatactt

SEQ ID NO: 376429 - DNA, 12 bp, Artificial Sequence
  Oligonucleotide primer for the detection of SNP TSC0061813
gaggaaaggtta

SEQ ID NO: 376430 - DNA, 12 bp, Artificial Sequence
  Oligonucleotide primer for the detection of SNP TSC0061813
tgttgtatgttt

SEQ ID NO: 376431 - DNA, 12 bp, Artificial Sequence
  Oligonucleotide primer for the detection of SNP TSC0010337
aaacaaacattc

SEQ ID NO: 376432 - DNA, 12 bp, Artificial Sequence
  Oligonucleotide primer for the detection of SNP TSC0010337
ggtaagattaaa

SEQ ID NO: 376433 - DNA, 12 bp, Artificial Sequence
  Oligonucleotide primer for the detection of SNP TSC0005426
cttaactaattt

SEQ ID NO: 376434 - DNA, 12 bp, Artificial Sequence
  Oligonucleotide primer for the detection of SNP TSC0005426
tggatagagtaa

SEQ ID NO: 376435 - DNA, 12 bp, Artificial Sequence
  Oligonucleotide primer for the detection of SNP TSC0005427
aagattatataa

SEQ ID NO: 376436 - DNA, 12 bp, Artificial Sequence
  Oligonucleotide primer for the detection of SNP TSC0005428
tggtaagtaaaa

SEQ ID NO: 376437 - DNA, 12 bp, Artificial Sequence
  Oligonucleotide primer for the detection of SNP TSC0061814
caaaaatataac

SEQ ID NO: 376438 - DNA, 12 bp, Artificial Sequence
  Oligonucleotide primer for the detection of SNP TSC0061814
cgaaaatataac

SEQ ID NO: 376439 - DNA, 12 bp, Artificial Sequence
  Oligonucleotide primer for the detection of SNP TSC0061814
tatggtaaaata

SEQ ID NO: 376440 - DNA, 12 bp, Artificial Sequence
  Oligonucleotide primer for the detection of SNP TSC0061815
ctaccaatatat

SEQ ID NO: 376441 - DNA, 12 bp, Artificial Sequence
  Oligonucleotide primer for the detection of SNP TSC0061815
tagtattttacg

SEQ ID NO: 376442 - DNA, 12 bp, Artificial Sequence
  Oligonucleotide primer for the detection of SNP TSC0061816
actttaactata

SEQ ID NO: 376443 - DNA, 12 bp, Artificial Sequence
  Oligonucleotide primer for the detection of SNP TSC0061816
ttttagtgggtt

SEQ ID NO: 376444 - DNA, 12 bp, Artificial Sequence
  Oligonucleotide primer for the detection of SNP TSC0061816
cttcaataaact

SEQ ID NO: 376445 - DNA, 12 bp, Artificial Sequence
  Oligonucleotide primer for the detection of SNP TSC0061817
caatccttatac

SEQ ID NO: 376446 - DNA, 12 bp, Artificial Sequence
  Oligonucleotide primer for the detection of SNP TSC0061817
tattgagttata

SEQ ID NO: 376447 - DNA, 12 bp, Artificial Sequence
  Oligonucleotide primer for the detection of SNP TSC0061818
tcaacttacact

SEQ ID NO: 376448 - DNA, 12 bp, Artificial Sequence
  Oligonucleotide primer for the detection of SNP TSC0061818
tatagtttaata

SEQ ID NO: 376449 - DNA, 12 bp, Artificial Sequence
  Oligonucleotide primer for the detection of SNP TSC0061818
tataactcaata

SEQ ID NO: 376450 - DNA, 12 bp, Artificial Sequence
  Oligonucleotide primer for the detection of SNP TSC0061819
gagttttgagta

SEQ ID NO: 376451 - DNA, 12 bp, Artificial Sequence
  Oligonucleotide primer for the detection of SNP TSC0005500
aaccaccctaaa

SEQ ID NO: 376452 - DNA, 12 bp, Artificial Sequence
  Oligonucleotide primer for the detection of SNP TSC0005500
ttgggtgtgttg

SEQ ID NO: 376453 - DNA, 12 bp, Artificial Sequence
  Oligonucleotide primer for the detection of SNP TSC0005500
aaattattttag

SEQ ID NO: 376454 - DNA, 12 bp, Artificial Sequence
  Oligonucleotide primer for the detection of SNP TSC0061820
aaaaaatactta

SEQ ID NO: 376455 - DNA, 12 bp, Artificial Sequence
  Oligonucleotide primer for the detection of SNP TSC0061820
aaaaccttaaat

SEQ ID NO: 376456 - DNA, 12 bp, Artificial Sequence
  Oligonucleotide primer for the detection of SNP TSC0061820
agaaaatattta

SEQ ID NO: 376457 - DNA, 12 bp, Artificial Sequence
  Oligonucleotide primer for the detection of SNP TSC0010044
aacaaccatact

SEQ ID NO: 376458 - DNA, 12 bp, Artificial Sequence
  Oligonucleotide primer for the detection of SNP TSC0010044
gacaaccatact

SEQ ID NO: 376459 - DNA, 12 bp, Artificial Sequence
  Oligonucleotide primer for the detection of SNP TSC0010045
taaaaactaata

SEQ ID NO: 376460 - DNA, 12 bp, Artificial Sequence
  Oligonucleotide primer for the detection of SNP TSC0010045
tagtatggttgt

SEQ ID NO: 376461 - DNA, 12 bp, Artificial Sequence
  Oligonucleotide primer for the detection of SNP TSC0010045
caatataactac

SEQ ID NO: 376462 - DNA, 12 bp, Artificial Sequence
  Oligonucleotide primer for the detection of SNP TSC0010045
tgaaggttggtg

SEQ ID NO: 376463 - DNA, 12 bp, Artificial Sequence
  Oligonucleotide primer for the detection of SNP TSC0061822
ggagttgatgaa

SEQ ID NO: 376464 - DNA, 12 bp, Artificial Sequence
  Oligonucleotide primer for the detection of SNP TSC0061822
ggagtcgatgaa

SEQ ID NO: 376465 - DNA, 12 bp, Artificial Sequence
  Oligonucleotide primer for the detection of SNP TSC0061822
tgttattgtaga

SEQ ID NO: 376466 - DNA, 12 bp, Artificial Sequence
  Oligonucleotide primer for the detection of SNP TSC0007616
ctcctctattaa

SEQ ID NO: 376467 - DNA, 12 bp, Artificial Sequence
  Oligonucleotide primer for the detection of SNP TSC0007616
agggtagttgtt

SEQ ID NO: 376468 - DNA, 12 bp, Artificial Sequence
  Oligonucleotide primer for the detection of SNP TSC0007616
aaaacaattatt

SEQ ID NO: 376469 - DNA, 12 bp, Artificial Sequence
  Oligonucleotide primer for the detection of SNP TSC0007617
aaaacactcaca

SEQ ID NO: 376470 - DNA, 12 bp, Artificial Sequence
  Oligonucleotide primer for the detection of SNP TSC0007617
aaaacactcacg

SEQ ID NO: 376471 - DNA, 12 bp, Artificial Sequence
  Oligonucleotide primer for the detection of SNP TSC0007617
tttggtattagt

SEQ ID NO: 376472 - DNA, 12 bp, Artificial Sequence
  Oligonucleotide primer for the detection of SNP TSC0007617
tctaataccaat

SEQ ID NO: 376473 - DNA, 12 bp, Artificial Sequence
  Oligonucleotide primer for the detection of SNP TSC0007617
agaatatttatg

SEQ ID NO: 376474 - DNA, 12 bp, Artificial Sequence
  Oligonucleotide primer for the detection of SNP TSC0007617
agaatatttacg

SEQ ID NO: 376475 - DNA, 12 bp, Artificial Sequence
  Oligonucleotide primer for the detection of SNP TSC0061823
actaataccaaa

SEQ ID NO: 376476 - DNA, 12 bp, Artificial Sequence
  Oligonucleotide primer for the detection of SNP TSC0061823
aatgagtagttt

SEQ ID NO: 376477 - DNA, 12 bp, Artificial Sequence
  Oligonucleotide primer for the detection of SNP TSC0061823
attggtattaga

SEQ ID NO: 376478 - DNA, 12 bp, Artificial Sequence
  Oligonucleotide primer for the detection of SNP TSC0006436
tacactacttac

SEQ ID NO: 376479 - DNA, 12 bp, Artificial Sequence
  Oligonucleotide primer for the detection of SNP TSC0006436
agtagttggtat

SEQ ID NO: 376480 - DNA, 12 bp, Artificial Sequence
  Oligonucleotide primer for the detection of SNP TSC0006436
gtattgtttatt

SEQ ID NO: 376481 - DNA, 12 bp, Artificial Sequence
  Oligonucleotide primer for the detection of SNP TSC0061825
atctcaaaactt

SEQ ID NO: 376482 - DNA, 12 bp, Artificial Sequence
  Oligonucleotide primer for the detection of SNP TSC0061825
gagtattgaaat

SEQ ID NO: 376483 - DNA, 12 bp, Artificial Sequence
  Oligonucleotide primer for the detection of SNP TSC0008912
aaactatatacc

SEQ ID NO: 376484 - DNA, 12 bp, Artificial Sequence
  Oligonucleotide primer for the detection of SNP TSC0008912
aaattgtgtatt

SEQ ID NO: 376485 - DNA, 12 bp, Artificial Sequence
  Oligonucleotide primer for the detection of SNP TSC0008938
cctcctaattac

SEQ ID NO: 376486 - DNA, 12 bp, Artificial Sequence
  Oligonucleotide primer for the detection of SNP TSC0008938
agaaagttattt

SEQ ID NO: 376487 - DNA, 12 bp, Artificial Sequence
  Oligonucleotide primer for the detection of SNP TSC0008938
taaaaaactacc

SEQ ID NO: 376488 - DNA, 12 bp, Artificial Sequence
  Oligonucleotide primer for the detection of SNP TSC0061829
taaaaatctaat

SEQ ID NO: 376489 - DNA, 12 bp, Artificial Sequence
  Oligonucleotide primer for the detection of SNP TSC0061829
aaattagttgtg

SEQ ID NO: 376490 - DNA, 12 bp, Artificial Sequence
  Oligonucleotide primer for the detection of SNP TSC0061830
ataataactcct

SEQ ID NO: 376491 - DNA, 12 bp, Artificial Sequence
  Oligonucleotide primer for the detection of SNP TSC0061831
attaactttata

SEQ ID NO: 376492 - DNA, 12 bp, Artificial Sequence
  Oligonucleotide primer for the detection of SNP TSC0061832
ccaatatctaat

SEQ ID NO: 376493 - DNA, 12 bp, Artificial Sequence
  Oligonucleotide primer for the detection of SNP TSC0061832
attgttataaaa

SEQ ID NO: 376494 - DNA, 12 bp, Artificial Sequence
  Oligonucleotide primer for the detection of SNP TSC0061832
attactataaaa

SEQ ID NO: 376495 - DNA, 12 bp, Artificial Sequence
  Oligonucleotide primer for the detection of SNP TSC0008382
aaaatcatttac

SEQ ID NO: 376496 - DNA, 12 bp, Artificial Sequence
  Oligonucleotide primer for the detection of SNP TSC0008382
aaaatcgtttac

SEQ ID NO: 376497 - DNA, 12 bp, Artificial Sequence
  Oligonucleotide primer for the detection of SNP TSC0008382
atattggtatta

SEQ ID NO: 376498 - DNA, 12 bp, Artificial Sequence
  Oligonucleotide primer for the detection of SNP TSC0008973
cacttcacataa

SEQ ID NO: 376499 - DNA, 12 bp, Artificial Sequence
  Oligonucleotide primer for the detection of SNP TSC0008973
ttccctactttt

SEQ ID NO: 376500 - DNA, 12 bp, Artificial Sequence
  Oligonucleotide primer for the detection of SNP TSC0061834
atccttttaaat

SEQ ID NO: 376501 - DNA, 12 bp, Artificial Sequence
  Oligonucleotide primer for the detection of SNP TSC0061834
tttgttattggg

SEQ ID NO: 376502 - DNA, 12 bp, Artificial Sequence
  Oligonucleotide primer for the detection of SNP TSC0061834
ttcgttattggg

SEQ ID NO: 376503 - DNA, 12 bp, Artificial Sequence
  Oligonucleotide primer for the detection of SNP TSC0061835
ttccaatattct

SEQ ID NO: 376504 - DNA, 12 bp, Artificial Sequence
  Oligonucleotide primer for the detection of SNP TSC0061835
atttgaataaaa

SEQ ID NO: 376505 - DNA, 12 bp, Artificial Sequence
  Oligonucleotide primer for the detection of SNP TSC0009406
actaattacttc

SEQ ID NO: 376506 - DNA, 12 bp, Artificial Sequence
  Oligonucleotide primer for the detection of SNP TSC0009406
tgtggaggaaag

SEQ ID NO: 376507 - DNA, 12 bp, Artificial Sequence
  Oligonucleotide primer for the detection of SNP TSC0009406
gttaattatttt

SEQ ID NO: 376508 - DNA, 12 bp, Artificial Sequence
  Oligonucleotide primer for the detection of SNP TSC0009406
gttaattatttc

SEQ ID NO: 376509 - DNA, 12 bp, Artificial Sequence
  Oligonucleotide primer for the detection of SNP TSC0061836
aattcttaactc

SEQ ID NO: 376510 - DNA, 12 bp, Artificial Sequence
  Oligonucleotide primer for the detection of SNP TSC0061836
ataattttttaa

SEQ ID NO: 376511 - DNA, 12 bp, Artificial Sequence
  Oligonucleotide primer for the detection of SNP TSC0061837
cccatatatatc

SEQ ID NO: 376512 - DNA, 12 bp, Artificial Sequence
  Oligonucleotide primer for the detection of SNP TSC0061837
tttgggtttagg

SEQ ID NO: 376513 - DNA, 12 bp, Artificial Sequence
  Oligonucleotide primer for the detection of SNP TSC0061837
ttaaacctaaaa

SEQ ID NO: 376514 - DNA, 12 bp, Artificial Sequence
  Oligonucleotide primer for the detection of SNP TSC0001418
acctcataacaa

SEQ ID NO: 376515 - DNA, 12 bp, Artificial Sequence
  Oligonucleotide primer for the detection of SNP TSC0001418
tactcaccacta

SEQ ID NO: 376516 - DNA, 12 bp, Artificial Sequence
  Oligonukleotid-Primer
gattttatggta

SEQ ID NO: 376517 - DNA, 12 bp, Artificial Sequence
  Oligonucleotide primer for the detection of SNP TSC0001419
catctaaaacct

SEQ ID NO: 376518 - DNA, 12 bp, Artificial Sequence
  Oligonucleotide primer for the detection of SNP TSC0001419
tatgatgatgta

SEQ ID NO: 376519 - DNA, 12 bp, Artificial Sequence
  Oligonucleotide primer for the detection of SNP TSC0007307
ttagtgatttaa

SEQ ID NO: 376520 - DNA, 12 bp, Artificial Sequence
  Oligonucleotide primer for the detection of SNP TSC0007308
aactttttccaa

SEQ ID NO: 376521 - DNA, 12 bp, Artificial Sequence
  Oligonucleotide primer for the detection of SNP TSC0007308
cataactttaac

SEQ ID NO: 376522 - DNA, 12 bp, Artificial Sequence
  Oligonucleotide primer for the detection of SNP TSC0007308
cgtaactttaac

SEQ ID NO: 376523 - DNA, 12 bp, Artificial Sequence
  Oligonucleotide primer for the detection of SNP TSC0061839
caactcctaacc

SEQ ID NO: 376524 - DNA, 12 bp, Artificial Sequence
  Oligonucleotide primer for the detection of SNP TSC0061839
aacacttattat

SEQ ID NO: 376525 - DNA, 12 bp, Artificial Sequence
  Oligonucleotide primer for the detection of SNP TSC0008741
tgagaattattt

SEQ ID NO: 376526 - DNA, 12 bp, Artificial Sequence
  Oligonucleotide primer for the detection of SNP TSC0008741
taaaaatcattt

SEQ ID NO: 376527 - DNA, 12 bp, Artificial Sequence
  Oligonucleotide primer for the detection of SNP TSC0061841
caaaaattcatc

SEQ ID NO: 376528 - DNA, 12 bp, Artificial Sequence
  Oligonucleotide primer for the detection of SNP TSC0061841
aggtagataaag

SEQ ID NO: 376529 - DNA, 12 bp, Artificial Sequence
  Oligonucleotide primer for the detection of SNP TSC0061842
cacaaaaaaacc

SEQ ID NO: 376530 - DNA, 12 bp, Artificial Sequence
  Oligonucleotide primer for the detection of SNP TSC0061842
gatttagtttaa

SEQ ID NO: 376531 - DNA, 12 bp, Artificial Sequence
  Oligonucleotide primer for the detection of SNP TSC0061843
tcctttaaataa

SEQ ID NO: 376532 - DNA, 12 bp, Artificial Sequence
  Oligonucleotide primer for the detection of SNP TSC0061843
aaacataccaat

SEQ ID NO: 376533 - DNA, 12 bp, Artificial Sequence
  Oligonucleotide primer for the detection of SNP TSC0061844
atactatcatac

SEQ ID NO: 376534 - DNA, 12 bp, Artificial Sequence
  Oligonucleotide primer for the detection of SNP TSC0061844
taagaagggaga

SEQ ID NO: 376535 - DNA, 12 bp, Artificial Sequence
  Oligonucleotide primer for the detection of SNP TSC0061845
tctatcaacaac

SEQ ID NO: 376536 - DNA, 12 bp, Artificial Sequence
  Oligonucleotide primer for the detection of SNP TSC0061845
aaactccactac

SEQ ID NO: 376537 - DNA, 12 bp, Artificial Sequence
  Oligonucleotide primer for the detection of SNP TSC0061845
tttattagtaac

SEQ ID NO: 376538 - DNA, 12 bp, Artificial Sequence
  Oligonucleotide primer for the detection of SNP TSC0061847
ttttagaaagag

SEQ ID NO: 376539 - DNA, 12 bp, Artificial Sequence
  Oligonucleotide primer for the detection of SNP TSC0061848
gaagattaggag

SEQ ID NO: 376540 - DNA, 12 bp, Artificial Sequence
  Oligonucleotide primer for the detection of SNP TSC0061848
ttaggttagtgt

SEQ ID NO: 376541 - DNA, 12 bp, Artificial Sequence
  Oligonucleotide primer for the detection of SNP TSC0009012
actttcaaatac

SEQ ID NO: 376542 - DNA, 12 bp, Artificial Sequence
  Oligonucleotide primer for the detection of SNP TSC0009012
actttcgaatac

SEQ ID NO: 376543 - DNA, 12 bp, Artificial Sequence
  Oligonucleotide primer for the detection of SNP TSC0009012
tatatgttatgg

SEQ ID NO: 376544 - DNA, 12 bp, Artificial Sequence
  Oligonukleotid-Primer
tatacgttatgg

SEQ ID NO: 376545 - DNA, 12 bp, Artificial Sequence
  Oligonucleotide primer for the detection of SNP TSC0009012
tatacattataa

SEQ ID NO: 376546 - DNA, 12 bp, Artificial Sequence
  Oligonucleotide primer for the detection of SNP TSC0009012
tatacgttataa

SEQ ID NO: 376547 - DNA, 12 bp, Artificial Sequence
  Oligonucleotide primer for the detection of SNP TSC0009012
gttttcgagtgt

SEQ ID NO: 376548 - DNA, 12 bp, Artificial Sequence
  Oligonucleotide primer for the detection of SNP TSC0009012
gtttttgagtgc

SEQ ID NO: 376549 - DNA, 12 bp, Artificial Sequence
  Oligonucleotide primer for the detection of SNP TSC0009012
gttttcgagtgc

SEQ ID NO: 376550 - DNA, 12 bp, Artificial Sequence
  Oligonucleotide primer for the detection of SNP TSC0061852
aataaccaaaca

SEQ ID NO: 376551 - DNA, 12 bp, Artificial Sequence
  Oligonucleotide primer for the detection of SNP TSC0061852
gtatgaattatt

SEQ ID NO: 376552 - DNA, 12 bp, Artificial Sequence
  Oligonucleotide primer for the detection of SNP TSC0061852
aatggttaggta

SEQ ID NO: 376553 - DNA, 12 bp, Artificial Sequence
  Oligonucleotide primer for the detection of SNP TSC0061853
acaatataatcc

SEQ ID NO: 376554 - DNA, 12 bp, Artificial Sequence
  Oligonucleotide primer for the detection of SNP TSC0061853
tttttgtgtaga

SEQ ID NO: 376555 - DNA, 12 bp, Artificial Sequence
  Oligonucleotide primer for the detection of SNP TSC0061853
cctctatataaa

SEQ ID NO: 376556 - DNA, 12 bp, Artificial Sequence
  Oligonucleotide primer for the detection of SNP TSC0061853
ataatgtaattt

SEQ ID NO: 376557 - DNA, 12 bp, Artificial Sequence
  Oligonucleotide primer for the detection of SNP TSC0010339
aaaccgaataaa

SEQ ID NO: 376558 - DNA, 12 bp, Artificial Sequence
  Oligonucleotide primer for the detection of SNP TSC0010339
ttggtttaaata

SEQ ID NO: 376559 - DNA, 12 bp, Artificial Sequence
  Oligonucleotide primer for the detection of SNP TSC0005693
aaaacctaaaac

SEQ ID NO: 376560 - DNA, 12 bp, Artificial Sequence
  Oligonucleotide primer for the detection of SNP TSC0005693
attacaactcta

SEQ ID NO: 376561 - DNA, 12 bp, Artificial Sequence
  Oligonucleotide primer for the detection of SNP TSC0010908
tatagaatgtaa

SEQ ID NO: 376562 - DNA, 12 bp, Artificial Sequence
  Oligonucleotide primer for the detection of SNP TSC0008402
gattcggggtat

SEQ ID NO: 376563 - DNA, 12 bp, Artificial Sequence
  Oligonucleotide primer for the detection of SNP TSC0008402
aattcaaaatac

SEQ ID NO: 376564 - DNA, 12 bp, Artificial Sequence
  Oligonucleotide primer for the detection of SNP TSC0008402
aattcgaaatac

SEQ ID NO: 376565 - DNA, 12 bp, Artificial Sequence
  Oligonucleotide primer for the detection of SNP TSC0008402
taagatttagtg

SEQ ID NO: 376566 - DNA, 12 bp, Artificial Sequence
  Oligonucleotide primer for the detection of SNP TSC0061855
gtaatctaatta

SEQ ID NO: 376567 - DNA, 12 bp, Artificial Sequence
  Oligonucleotide primer for the detection of SNP TSC0061855
ggttttggggag

SEQ ID NO: 376568 - DNA, 12 bp, Artificial Sequence
  Oligonucleotide primer for the detection of SNP TSC0061855
gtgatttaatta

SEQ ID NO: 376569 - DNA, 12 bp, Artificial Sequence
  Oligonucleotide primer for the detection of SNP TSC0061856
taaataaaatca

SEQ ID NO: 376570 - DNA, 12 bp, Artificial Sequence
  Oligonucleotide primer for the detection of SNP TSC0061856
gattaagatggt

SEQ ID NO: 376571 - DNA, 12 bp, Artificial Sequence
  Oligonucleotide primer for the detection of SNP TSC0061856
taaatggaatta

SEQ ID NO: 376572 - DNA, 12 bp, Artificial Sequence
  Oligonucleotide primer for the detection of SNP TSC0061857
ttctctaaattc

SEQ ID NO: 376573 - DNA, 12 bp, Artificial Sequence
  Oligonucleotide primer for the detection of SNP TSC0061857
ggttatttgtat

SEQ ID NO: 376574 - DNA, 12 bp, Artificial Sequence
  Oligonucleotide primer for the detection of SNP TSC0061857
aactatctatat

SEQ ID NO: 376575 - DNA, 12 bp, Artificial Sequence
  Oligonucleotide primer for the detection of SNP TSC0061858
gaatttatagtt

SEQ ID NO: 376576 - DNA, 12 bp, Artificial Sequence
  Oligonucleotide primer for the detection of SNP TSC0061858
aaattcataatt

SEQ ID NO: 376577 - DNA, 12 bp, Artificial Sequence
  Oligonucleotide primer for the detection of SNP TSC0061858
tgagattaatta

SEQ ID NO: 376578 - DNA, 12 bp, Artificial Sequence
  Oligonucleotide primer for the detection of SNP TSC0061859
gttaatttagtt

SEQ ID NO: 376579 - DNA, 12 bp, Artificial Sequence
  Oligonucleotide primer for the detection of SNP TSC0061859
atcaatccaacc

SEQ ID NO: 376580 - DNA, 12 bp, Artificial Sequence
  Oligonucleotide primer for the detection of SNP TSC0061859
tttaaagattta

SEQ ID NO: 376581 - DNA, 12 bp, Artificial Sequence
  Oligonucleotide primer for the detection of SNP TSC0061860
taccactaatcc

SEQ ID NO: 376582 - DNA, 12 bp, Artificial Sequence
  Oligonucleotide primer for the detection of SNP TSC0061860
tagttatgatgg

SEQ ID NO: 376583 - DNA, 12 bp, Artificial Sequence
  Oligonucleotide primer for the detection of SNP TSC0061860
tagttacgatgg

SEQ ID NO: 376584 - DNA, 12 bp, Artificial Sequence
  Oligonucleotide primer for the detection of SNP TSC0061861
ccactaatccaa

SEQ ID NO: 376585 - DNA, 12 bp, Artificial Sequence
  Oligonucleotide primer for the detection of SNP TSC0061861
ttatgatggatt

SEQ ID NO: 376586 - DNA, 12 bp, Artificial Sequence
  Oligonucleotide primer for the detection of SNP TSC0061861
ttacgatggatt

SEQ ID NO: 376587 - DNA, 12 bp, Artificial Sequence
  Oligonucleotide primer for the detection of SNP TSC0061861
accacaataaat

SEQ ID NO: 376588 - DNA, 12 bp, Artificial Sequence
  Oligonucleotide primer for the detection of SNP TSC0061861
accacgataaat

SEQ ID NO: 376589 - DNA, 12 bp, Artificial Sequence
  Oligonucleotide primer for the detection of SNP TSC0061861
ttattgatttaa

SEQ ID NO: 376590 - DNA, 12 bp, Artificial Sequence
  Oligonucleotide primer for the detection of SNP TSC0061869
actttcttccaa

SEQ ID NO: 376591 - DNA, 12 bp, Artificial Sequence
  Oligonucleotide primer for the detection of SNP TSC0061870
aaagttaagtag

SEQ ID NO: 376592 - DNA, 12 bp, Artificial Sequence
  Oligonucleotide primer for the detection of SNP TSC0061871
aattctcctctt

SEQ ID NO: 376593 - DNA, 12 bp, Artificial Sequence
  Oligonucleotide primer for the detection of SNP TSC0061871
tttagttgagag

SEQ ID NO: 376594 - DNA, 12 bp, Artificial Sequence
  Oligonucleotide primer for the detection of SNP TSC0061871
ttcaactaaaaa

SEQ ID NO: 376595 - DNA, 12 bp, Artificial Sequence
  Oligonucleotide primer for the detection of SNP TSC0004754
aaatatctattc

SEQ ID NO: 376596 - DNA, 12 bp, Artificial Sequence
  Oligonucleotide primer for the detection of SNP TSC0004754
aggttagttttt

SEQ ID NO: 376597 - DNA, 12 bp, Artificial Sequence
  Oligonucleotide primer for the detection of SNP TSC0004754
aaatcaacctct

SEQ ID NO: 376598 - DNA, 12 bp, Artificial Sequence
  Oligonucleotide primer for the detection of SNP TSC0004754
aagtatttgttt

SEQ ID NO: 376599 - DNA, 12 bp, Artificial Sequence
  Oligonucleotide primer for the detection of SNP TSC0004755
ctctactcactt

SEQ ID NO: 376600 - DNA, 12 bp, Artificial Sequence
  Oligonucleotide primer for the detection of SNP TSC0004755
aagtggaaatta

SEQ ID NO: 376601 - DNA, 12 bp, Artificial Sequence
  Oligonucleotide primer for the detection of SNP TSC0061872
tcctcaattctc

SEQ ID NO: 376602 - DNA, 12 bp, Artificial Sequence
  Oligonucleotide primer for the detection of SNP TSC0061873
aatgtaataaaa

SEQ ID NO: 376603 - DNA, 12 bp, Artificial Sequence
  Oligonucleotide primer for the detection of SNP TSC0061873
aacgtaataaaa

SEQ ID NO: 376604 - DNA, 12 bp, Artificial Sequence
  Oligonucleotide primer for the detection of SNP TSC0061873
aacgcaacaaaa

SEQ ID NO: 376605 - DNA, 12 bp, Artificial Sequence
  Oligonucleotide primer for the detection of SNP TSC0061874
tgatagttgtta

SEQ ID NO: 376606 - DNA, 12 bp, Artificial Sequence
  Oligonucleotide primer for the detection of SNP TSC0061875
ccaaaaaccaca

SEQ ID NO: 376607 - DNA, 12 bp, Artificial Sequence
  Oligonucleotide primer for the detection of SNP TSC0061875
ttggtggtgttt

SEQ ID NO: 376608 - DNA, 12 bp, Artificial Sequence
  Oligonucleotide primer for the detection of SNP TSC0061875
ttagggattata

SEQ ID NO: 376609 - DNA, 12 bp, Artificial Sequence
  Oligonucleotide primer for the detection of SNP TSC0061876
aaccaacatcac

SEQ ID NO: 376610 - DNA, 12 bp, Artificial Sequence
  Oligonucleotide primer for the detection of SNP TSC0061877
tgtttattaaaa

SEQ ID NO: 376611 - DNA, 12 bp, Artificial Sequence
  Oligonucleotide primer for the detection of SNP TSC0061878
aattatataact

SEQ ID NO: 376612 - DNA, 12 bp, Artificial Sequence
  Oligonucleotide primer for the detection of SNP TSC0061878
ttgaaagatgta

SEQ ID NO: 376613 - DNA, 12 bp, Artificial Sequence
  Oligonucleotide primer for the detection of SNP TSC0061878
tcgaaagatgta

SEQ ID NO: 376614 - DNA, 12 bp, Artificial Sequence
  Oligonucleotide primer for the detection of SNP TSC0061883
gaatattggtgt

SEQ ID NO: 376615 - DNA, 12 bp, Artificial Sequence
  Oligonucleotide primer for the detection of SNP TSC0061883
gaatattggcgt

SEQ ID NO: 376616 - DNA, 12 bp, Artificial Sequence
  Oligonucleotide primer for the detection of SNP TSC0061883
taaatattaaca

SEQ ID NO: 376617 - DNA, 12 bp, Artificial Sequence
  Oligonucleotide primer for the detection of SNP TSC0061883
taaatattaacg

SEQ ID NO: 376618 - DNA, 12 bp, Artificial Sequence
  Oligonucleotide primer for the detection of SNP TSC0061884
cgcaactaaaaa

SEQ ID NO: 376619 - DNA, 12 bp, Artificial Sequence
  Oligonucleotide primer for the detection of SNP TSC0061884
aaagtttgttgt

SEQ ID NO: 376620 - DNA, 12 bp, Artificial Sequence
  Oligonucleotide primer for the detection of SNP TSC0061884
aaaacttactat

SEQ ID NO: 376621 - DNA, 12 bp, Artificial Sequence
  Oligonucleotide primer for the detection of SNP TSC0061884
tgtagttgaaga

SEQ ID NO: 376622 - DNA, 12 bp, Artificial Sequence
  Oligonucleotide primer for the detection of SNP TSC0061884
cgtagttgaaga

SEQ ID NO: 376623 - DNA, 12 bp, Artificial Sequence
  Oligonucleotide primer for the detection of SNP TSC0061889
ctaaataatacc

SEQ ID NO: 376624 - DNA, 12 bp, Artificial Sequence
  Oligonucleotide primer for the detection of SNP TSC0061889
ttggaaggaaag

SEQ ID NO: 376625 - DNA, 12 bp, Artificial Sequence
  Oligonucleotide primer for the detection of SNP TSC0061890
actaaaacctaa

SEQ ID NO: 376626 - DNA, 12 bp, Artificial Sequence
  Oligonucleotide primer for the detection of SNP TSC0061890
ttatgtattggg

SEQ ID NO: 376627 - DNA, 12 bp, Artificial Sequence
  Oligonucleotide primer for the detection of SNP TSC0061890
ttgaaatttaat

SEQ ID NO: 376628 - DNA, 12 bp, Artificial Sequence
  Oligonucleotide primer for the detection of SNP TSC0061891
ctattctacaac

SEQ ID NO: 376629 - DNA, 12 bp, Artificial Sequence
  Oligonucleotide primer for the detection of SNP TSC0061892
agtaaaagaata

SEQ ID NO: 376630 - DNA, 12 bp, Artificial Sequence
  Oligonucleotide primer for the detection of SNP TSC0061894
ataatccaatta

SEQ ID NO: 376631 - DNA, 12 bp, Artificial Sequence
  Oligonucleotide primer for the detection of SNP TSC0061894
agtgtttgtttt

SEQ ID NO: 376632 - DNA, 12 bp, Artificial Sequence
  Oligonucleotide primer for the detection of SNP TSC0061894
aatatttactct

SEQ ID NO: 376633 - DNA, 12 bp, Artificial Sequence
  Oligonucleotide primer for the detection of SNP TSC0061895
aactttctaaat

SEQ ID NO: 376634 - DNA, 12 bp, Artificial Sequence
  Oligonucleotide primer for the detection of SNP TSC0061895
tcacttatcttc

SEQ ID NO: 376635 - DNA, 12 bp, Artificial Sequence
  Oligonucleotide primer for the detection of SNP TSC0061896
ttttactttaaa

SEQ ID NO: 376636 - DNA, 12 bp, Artificial Sequence
  Oligonucleotide primer for the detection of SNP TSC0061896
ttttgttttaag

SEQ ID NO: 376637 - DNA, 12 bp, Artificial Sequence
  Oligonucleotide primer for the detection of SNP TSC0061897
ccaaattttcct

SEQ ID NO: 376638 - DNA, 12 bp, Artificial Sequence
  Oligonucleotide primer for the detection of SNP TSC0061897
ttagaggtagaa

SEQ ID NO: 376639 - DNA, 12 bp, Artificial Sequence
  Oligonucleotide primer for the detection of SNP TSC0061899
aatcataactca

SEQ ID NO: 376640 - DNA, 12 bp, Artificial Sequence
  Oligonucleotide primer for the detection of SNP TSC0061899
ggtagatgattt

SEQ ID NO: 376641 - DNA, 12 bp, Artificial Sequence
  Oligonucleotide primer for the detection of SNP TSC0061899
taattatggttt

SEQ ID NO: 376642 - DNA, 12 bp, Artificial Sequence
  Oligonucleotide primer for the detection of SNP TSC0061903
ttttgttcgtgt

SEQ ID NO: 376643 - DNA, 12 bp, Artificial Sequence
  Oligonucleotide primer for the detection of SNP TSC0061907
gtgatacgattt

SEQ ID NO: 376644 - DNA, 12 bp, Artificial Sequence
  Oligonucleotide primer for the detection of SNP TSC0061908
gagaagttatgg

SEQ ID NO: 376645 - DNA, 12 bp, Artificial Sequence
  Oligonucleotide primer for the detection of SNP TSC0061909
gatataatgaat

SEQ ID NO: 376646 - DNA, 12 bp, Artificial Sequence
  Oligonucleotide primer for the detection of SNP TSC0061909
acacaataaata

SEQ ID NO: 376647 - DNA, 12 bp, Artificial Sequence
  Oligonucleotide primer for the detection of SNP TSC0061909
agaattttaatc

SEQ ID NO: 376648 - DNA, 12 bp, Artificial Sequence
  Oligonucleotide primer for the detection of SNP TSC0061910
aacattatatat

SEQ ID NO: 376649 - DNA, 12 bp, Artificial Sequence
  Oligonucleotide primer for the detection of SNP TSC0061910
gatatgaagtaa

SEQ ID NO: 376650 - DNA, 12 bp, Artificial Sequence
  Oligonucleotide primer for the detection of SNP TSC0061912
gaatatattttt

SEQ ID NO: 376651 - DNA, 12 bp, Artificial Sequence
  Oligonucleotide primer for the detection of SNP TSC0061912
aagaaaattgtt

SEQ ID NO: 376652 - DNA, 12 bp, Artificial Sequence
  Oligonucleotide primer for the detection of SNP TSC0061913
atatttcctttc

SEQ ID NO: 376653 - DNA, 12 bp, Artificial Sequence
  Oligonucleotide primer for the detection of SNP TSC0061913
gttatttaattg

SEQ ID NO: 376654 - DNA, 12 bp, Artificial Sequence
  Oligonucleotide primer for the detection of SNP TSC0061913
ttatctaattaa

SEQ ID NO: 376655 - DNA, 12 bp, Artificial Sequence
  Oligonucleotide primer for the detection of SNP TSC0061914
aaatttgtaaag

SEQ ID NO: 376656 - DNA, 12 bp, Artificial Sequence
  Oligonucleotide primer for the detection of SNP TSC0061915
aaaaaagttgtt

SEQ ID NO: 376657 - DNA, 12 bp, Artificial Sequence
  Oligonucleotide primer for the detection of SNP TSC0061915
taagagtaaaaa

SEQ ID NO: 376658 - DNA, 12 bp, Artificial Sequence
  Oligonucleotide primer for the detection of SNP TSC0061920
atataattaaat

SEQ ID NO: 376659 - DNA, 12 bp, Artificial Sequence
  Oligonucleotide primer for the detection of SNP TSC0061921
attgagatgtta

SEQ ID NO: 376660 - DNA, 12 bp, Artificial Sequence
  Oligonucleotide primer for the detection of SNP TSC0007978
gaatattaataa

SEQ ID NO: 376661 - DNA, 12 bp, Artificial Sequence
  Oligonucleotide primer for the detection of SNP TSC0061922
cccataaatata

SEQ ID NO: 376662 - DNA, 12 bp, Artificial Sequence
  Oligonucleotide primer for the detection of SNP TSC0061922
acacacatacca

SEQ ID NO: 376663 - DNA, 12 bp, Artificial Sequence
  Oligonucleotide primer for the detection of SNP TSC0061922
tttataaatatg

SEQ ID NO: 376664 - DNA, 12 bp, Artificial Sequence
  Oligonucleotide primer for the detection of SNP TSC0007696
cacatcacacta

SEQ ID NO: 376665 - DNA, 12 bp, Artificial Sequence
  Oligonucleotide primer for the detection of SNP TSC0007696
cacatcacgcta

SEQ ID NO: 376666 - DNA, 12 bp, Artificial Sequence
  Oligonucleotide primer for the detection of SNP TSC0007696
cacatcgcacta

SEQ ID NO: 376667 - DNA, 12 bp, Artificial Sequence
  Oligonucleotide primer for the detection of SNP TSC0007696
cacatcgcgcta

SEQ ID NO: 376668 - DNA, 12 bp, Artificial Sequence
  Oligonucleotide primer for the detection of SNP TSC0007696
ttaaagtgattt

SEQ ID NO: 376669 - DNA, 12 bp, Artificial Sequence
  Oligonucleotide primer for the detection of SNP TSC0007696
ttcccaaaataa

SEQ ID NO: 376670 - DNA, 12 bp, Artificial Sequence
  Oligonucleotide primer for the detection of SNP TSC0007696
atattgtgttgt

SEQ ID NO: 376671 - DNA, 12 bp, Artificial Sequence
  Oligonucleotide primer for the detection of SNP TSC0007696
atatcgtgttgt

SEQ ID NO: 376672 - DNA, 12 bp, Artificial Sequence
  Oligonucleotide primer for the detection of SNP TSC0007696
atattgcgttgt

SEQ ID NO: 376673 - DNA, 12 bp, Artificial Sequence
  Oligonucleotide primer for the detection of SNP TSC0007696
atatcgcgttgt

SEQ ID NO: 376674 - DNA, 12 bp, Artificial Sequence
  Oligonucleotide primer for the detection of SNP TSC0061924
ctaaatccaaat

SEQ ID NO: 376675 - DNA, 12 bp, Artificial Sequence
  Oligonucleotide primer for the detection of SNP TSC0061924
aggaaaaaaata

SEQ ID NO: 376676 - DNA, 12 bp, Artificial Sequence
  Oligonucleotide primer for the detection of SNP TSC0061927
tataaataaacc

SEQ ID NO: 376677 - DNA, 12 bp, Artificial Sequence
  Oligonucleotide primer for the detection of SNP TSC0061927
ttttagtggtgg

SEQ ID NO: 376678 - DNA, 12 bp, Artificial Sequence
  Oligonucleotide primer for the detection of SNP TSC0061928
caccccatacct

SEQ ID NO: 376679 - DNA, 12 bp, Artificial Sequence
  Oligonucleotide primer for the detection of SNP TSC0061928
agatataaagaa

SEQ ID NO: 376680 - DNA, 12 bp, Artificial Sequence
  Oligonucleotide primer for the detection of SNP TSC0061930
ctactactccta

SEQ ID NO: 376681 - DNA, 12 bp, Artificial Sequence
  Oligonucleotide primer for the detection of SNP TSC0061930
gtgattttaaat

SEQ ID NO: 376682 - DNA, 12 bp, Artificial Sequence
  Oligonucleotide primer for the detection of SNP TSC0061930
ataattctaaat

SEQ ID NO: 376683 - DNA, 12 bp, Artificial Sequence
  Oligonucleotide primer for the detection of SNP TSC0061931
tcaatatatttt

SEQ ID NO: 376684 - DNA, 12 bp, Artificial Sequence
  Oligonucleotide primer for the detection of SNP TSC0061931
taagatgaaaag

SEQ ID NO: 376685 - DNA, 12 bp, Artificial Sequence
  Oligonucleotide primer for the detection of SNP TSC0061931
taagacgaaaag

SEQ ID NO: 376686 - DNA, 12 bp, Artificial Sequence
  Oligonucleotide primer for the detection of SNP TSC0061932
catctaaactac

SEQ ID NO: 376687 - DNA, 12 bp, Artificial Sequence
  Oligonucleotide primer for the detection of SNP TSC0061932
tctctaacccaa

SEQ ID NO: 376688 - DNA, 12 bp, Artificial Sequence
  Oligonucleotide primer for the detection of SNP TSC0061933
tttccaaactac

SEQ ID NO: 376689 - DNA, 12 bp, Artificial Sequence
  Oligonucleotide primer for the detection of SNP TSC0061933
tccttttcatta

SEQ ID NO: 376690 - DNA, 12 bp, Artificial Sequence
  Oligonucleotide primer for the detection of SNP TSC0061935
agtaaattatat

SEQ ID NO: 376691 - DNA, 12 bp, Artificial Sequence
  Oligonucleotide primer for the detection of SNP TSC0000976
acaattaataat

SEQ ID NO: 376692 - DNA, 12 bp, Artificial Sequence
  Oligonucleotide primer for the detection of SNP TSC0000976
aatttagtaaaa

SEQ ID NO: 376693 - DNA, 12 bp, Artificial Sequence
  Oligonucleotide primer for the detection of SNP TSC0061936
taacctctcttc

SEQ ID NO: 376694 - DNA, 12 bp, Artificial Sequence
  Oligonucleotide primer for the detection of SNP TSC0061936
aattagttttag

SEQ ID NO: 376695 - DNA, 12 bp, Artificial Sequence
  Oligonucleotide primer for the detection of SNP TSC0061937
ccaaccacatac

SEQ ID NO: 376696 - DNA, 12 bp, Artificial Sequence
  Oligonucleotide primer for the detection of SNP TSC0061937
ccaaccacgtac

SEQ ID NO: 376697 - DNA, 12 bp, Artificial Sequence
  Oligonucleotide primer for the detection of SNP TSC0061937
atattgaagtag

SEQ ID NO: 376698 - DNA, 12 bp, Artificial Sequence
  Oligonucleotide primer for the detection of SNP TSC0061937
atatcgaagtag

SEQ ID NO: 376699 - DNA, 12 bp, Artificial Sequence
  Oligonucleotide primer for the detection of SNP TSC0061938
atctatttcaca

SEQ ID NO: 376700 - DNA, 12 bp, Artificial Sequence
  Oligonucleotide primer for the detection of SNP TSC0061938
atacacctactt

SEQ ID NO: 376701 - DNA, 12 bp, Artificial Sequence
  Oligonucleotide primer for the detection of SNP TSC0061938
gtacacctactt

SEQ ID NO: 376702 - DNA, 12 bp, Artificial Sequence
  Oligonucleotide primer for the detection of SNP TSC0007485
actttccttaac

SEQ ID NO: 376703 - DNA, 12 bp, Artificial Sequence
  Oligonucleotide primer for the detection of SNP TSC0007485
tggttatgtcga

SEQ ID NO: 376704 - DNA, 12 bp, Artificial Sequence
  Oligonucleotide primer for the detection of SNP TSC0061939
attataacattc

SEQ ID NO: 376705 - DNA, 12 bp, Artificial Sequence
  Oligonucleotide primer for the detection of SNP TSC0061939
ggttattatttt

SEQ ID NO: 376706 - DNA, 12 bp, Artificial Sequence
  Oligonucleotide primer for the detection of SNP TSC0061939
actatcatccta

SEQ ID NO: 376707 - DNA, 12 bp, Artificial Sequence
  Oligonucleotide primer for the detection of SNP TSC0061940
tattatacaacc

SEQ ID NO: 376708 - DNA, 12 bp, Artificial Sequence
  Oligonucleotide primer for the detection of SNP TSC0061940
agaattttggag

SEQ ID NO: 376709 - DNA, 12 bp, Artificial Sequence
  Oligonucleotide primer for the detection of SNP TSC0061943
aagaaaaaaatt

SEQ ID NO: 376710 - DNA, 12 bp, Artificial Sequence
  Oligonucleotide primer for the detection of SNP TSC0061943
tggaggtatttt

SEQ ID NO: 376711 - DNA, 12 bp, Artificial Sequence
  Oligonucleotide primer for the detection of SNP TSC0061944
acctaaacgaaa

SEQ ID NO: 376712 - DNA, 12 bp, Artificial Sequence
  Oligonucleotide primer for the detection of SNP TSC0061944
taaaggggtatt

SEQ ID NO: 376713 - DNA, 12 bp, Artificial Sequence
  Oligonucleotide primer for the detection of SNP TSC0061944
gtttgaatggga

SEQ ID NO: 376714 - DNA, 12 bp, Artificial Sequence
  Oligonucleotide primer for the detection of SNP TSC0061944
gtttgaacggga

SEQ ID NO: 376715 - DNA, 12 bp, Artificial Sequence
  Oligonucleotide primer for the detection of SNP TSC0061951
caatactattac

SEQ ID NO: 376716 - DNA, 12 bp, Artificial Sequence
  Oligonucleotide primer for the detection of SNP TSC0061951
agggatatttaa

SEQ ID NO: 376717 - DNA, 12 bp, Artificial Sequence
  Oligonucleotide primer for the detection of SNP TSC0061951
taatgttattat

SEQ ID NO: 376718 - DNA, 12 bp, Artificial Sequence
  Oligonucleotide primer for the detection of SNP TSC0061954
aaaataattatc

SEQ ID NO: 376719 - DNA, 12 bp, Artificial Sequence
  Oligonucleotide primer for the detection of SNP TSC0061954
gtttgttataaa

SEQ ID NO: 376720 - DNA, 12 bp, Artificial Sequence
  Oligonucleotide primer for the detection of SNP TSC0061955
tccctcttatca

SEQ ID NO: 376721 - DNA, 12 bp, Artificial Sequence
  Oligonucleotide primer for the detection of SNP TSC0061955
tccctcttatcg

SEQ ID NO: 376722 - DNA, 12 bp, Artificial Sequence
  Oligonucleotide primer for the detection of SNP TSC0061955
tttttttgtcgt

SEQ ID NO: 376723 - DNA, 12 bp, Artificial Sequence
  Oligonucleotide primer for the detection of SNP TSC0061956
aaaacattttta

SEQ ID NO: 376724 - DNA, 12 bp, Artificial Sequence
  Oligonucleotide primer for the detection of SNP TSC0061956
gagaataattat

SEQ ID NO: 376725 - DNA, 12 bp, Artificial Sequence
  Oligonucleotide primer for the detection of SNP TSC0061956
aggtatttttgt

SEQ ID NO: 376726 - DNA, 12 bp, Artificial Sequence
  Oligonucleotide primer for the detection of SNP TSC0061957
catttaaaacac

SEQ ID NO: 376727 - DNA, 12 bp, Artificial Sequence
  Oligonucleotide primer for the detection of SNP TSC0061957
tatttaaagtat

SEQ ID NO: 376728 - DNA, 12 bp, Artificial Sequence
  Oligonucleotide primer for the detection of SNP TSC0061958
aaaattcttatt

SEQ ID NO: 376729 - DNA, 12 bp, Artificial Sequence
  Oligonucleotide primer for the detection of SNP TSC0000458
taacactaattc

SEQ ID NO: 376730 - DNA, 12 bp, Artificial Sequence
  Oligonucleotide primer for the detection of SNP TSC0000458
taaattagggtg

SEQ ID NO: 376731 - DNA, 12 bp, Artificial Sequence
  Oligonucleotide primer for the detection of SNP TSC0061961
cactcccctttc

SEQ ID NO: 376732 - DNA, 12 bp, Artificial Sequence
  Oligonucleotide primer for the detection of SNP TSC0061961
cgctcccctttc

SEQ ID NO: 376733 - DNA, 12 bp, Artificial Sequence
  Oligonucleotide primer for the detection of SNP TSC0061961
aggagagggagg

SEQ ID NO: 376734 - DNA, 12 bp, Artificial Sequence
  Oligonucleotide primer for the detection of SNP TSC0061962
tcaattatattc

SEQ ID NO: 376735 - DNA, 12 bp, Artificial Sequence
  Oligonucleotide primer for the detection of SNP TSC0061962
taatggatgttg

SEQ ID NO: 376736 - DNA, 12 bp, Artificial Sequence
  Oligonucleotide primer for the detection of SNP TSC0061963
ataattaaactc

SEQ ID NO: 376737 - DNA, 12 bp, Artificial Sequence
  Oligonucleotide primer for the detection of SNP TSC0061963
aattatatgata

SEQ ID NO: 376738 - DNA, 12 bp, Artificial Sequence
  Oligonucleotide primer for the detection of SNP TSC0061963
aattatataaca

SEQ ID NO: 376739 - DNA, 12 bp, Artificial Sequence
  Oligonucleotide primer for the detection of SNP TSC0061963
ataattggattt

SEQ ID NO: 376740 - DNA, 12 bp, Artificial Sequence
  Oligonucleotide primer for the detection of SNP TSC0061971
acattttaaaca

SEQ ID NO: 376741 - DNA, 12 bp, Artificial Sequence
  Oligonucleotide primer for the detection of SNP TSC0061971
tgattttttggt

SEQ ID NO: 376742 - DNA, 12 bp, Artificial Sequence
  Oligonucleotide primer for the detection of SNP TSC0061971
tgattttttggc

SEQ ID NO: 376743 - DNA, 12 bp, Artificial Sequence
  Oligonucleotide primer for the detection of SNP TSC0061971
ttaatttcctaa

SEQ ID NO: 376744 - DNA, 12 bp, Artificial Sequence
  Oligonucleotide primer for the detection of SNP TSC0061971
gtattttagata

SEQ ID NO: 376745 - DNA, 12 bp, Artificial Sequence
  Oligonucleotide primer for the detection of SNP TSC0005195
caaaatcatcct

SEQ ID NO: 376746 - DNA, 12 bp, Artificial Sequence
  Oligonucleotide primer for the detection of SNP TSC0005195
ttgaggaggtga

SEQ ID NO: 376747 - DNA, 12 bp, Artificial Sequence
  Oligonucleotide primer for the detection of SNP TSC0061972
tcgtttttattt

SEQ ID NO: 376748 - DNA, 12 bp, Artificial Sequence
  Oligonucleotide primer for the detection of SNP TSC0061972
ccactcttattt

SEQ ID NO: 376749 - DNA, 12 bp, Artificial Sequence
  Oligonucleotide primer for the detection of SNP TSC0061972
ccgctcttattt

SEQ ID NO: 376750 - DNA, 12 bp, Artificial Sequence
  Oligonucleotide primer for the detection of SNP TSC0061972
gtaggttaagtt

SEQ ID NO: 376751 - DNA, 12 bp, Artificial Sequence
  Oligonucleotide primer for the detection of SNP TSC0061973
ataatcatccct

SEQ ID NO: 376752 - DNA, 12 bp, Artificial Sequence
  Oligonucleotide primer for the detection of SNP TSC0061973
atgatagatata

SEQ ID NO: 376753 - DNA, 12 bp, Artificial Sequence
  Oligonukleotid-Primer
acgatagatata

SEQ ID NO: 376754 - DNA, 12 bp, Artificial Sequence
  Oligonucleotide primer for the detection of SNP TSC0061974
ttatagataatg

SEQ ID NO: 376755 - DNA, 12 bp, Artificial Sequence
  Oligonucleotide primer for the detection of SNP TSC0061975
acctatttaaat

SEQ ID NO: 376756 - DNA, 12 bp, Artificial Sequence
  Oligonucleotide primer for the detection of SNP TSC0061976
catatatatttc

SEQ ID NO: 376757 - DNA, 12 bp, Artificial Sequence
  Oligonucleotide primer for the detection of SNP TSC0061976
ttttaaggatag

SEQ ID NO: 376758 - DNA, 12 bp, Artificial Sequence
  Oligonucleotide primer for the detection of SNP TSC0005783
acaaaaacttca

SEQ ID NO: 376759 - DNA, 12 bp, Artificial Sequence
  Oligonucleotide primer for the detection of SNP TSC0005783
actaaattatac

SEQ ID NO: 376760 - DNA, 12 bp, Artificial Sequence
  Oligonucleotide primer for the detection of SNP TSC0005783
agtaagggtttt

SEQ ID NO: 376761 - DNA, 12 bp, Artificial Sequence
  Oligonucleotide primer for the detection of SNP TSC0061977
acaacacaaaaa

SEQ ID NO: 376762 - DNA, 12 bp, Artificial Sequence
  Oligonucleotide primer for the detection of SNP TSC0061977
ttaagaaatgat

SEQ ID NO: 376763 - DNA, 12 bp, Artificial Sequence
  Oligonucleotide primer for the detection of SNP TSC0061977
ttagtagtatag

SEQ ID NO: 376764 - DNA, 12 bp, Artificial Sequence
  Oligonucleotide primer for the detection of SNP TSC0061978
ccctctatcatc

SEQ ID NO: 376765 - DNA, 12 bp, Artificial Sequence
  Oligonucleotide primer for the detection of SNP TSC0010246
accctataccaa

SEQ ID NO: 376766 - DNA, 12 bp, Artificial Sequence
  Oligonucleotide primer for the detection of SNP TSC0010246
tttaggagagtt

SEQ ID NO: 376767 - DNA, 12 bp, Artificial Sequence
  Oligonucleotide primer for the detection of SNP TSC0010246
ttccaaaaaaac

SEQ ID NO: 376768 - DNA, 12 bp, Artificial Sequence
  Oligonucleotide primer for the detection of SNP TSC0010246
gttttgtgttag

SEQ ID NO: 376769 - DNA, 12 bp, Artificial Sequence
  Oligonukleotid-Primer
aaacctaacact

SEQ ID NO: 376770 - DNA, 12 bp, Artificial Sequence
  Oligonucleotide primer for the detection of SNP TSC0010247
gttgatattttg

SEQ ID NO: 376771 - DNA, 12 bp, Artificial Sequence
  Oligonucleotide primer for the detection of SNP TSC0010247
gttgatatttcg

SEQ ID NO: 376772 - DNA, 12 bp, Artificial Sequence
  Oligonucleotide primer for the detection of SNP TSC0010586
atggtttagata

SEQ ID NO: 376773 - DNA, 12 bp, Artificial Sequence
  Oligonukleotid-Primer
tcccactaaacc

SEQ ID NO: 376774 - DNA, 12 bp, Artificial Sequence
  Oligonucleotide primer for the detection of SNP TSC0061980
aatatggtggtg

SEQ ID NO: 376775 - DNA, 12 bp, Artificial Sequence
  Oligonucleotide primer for the detection of SNP TSC0061981
tcacacaaaaat

SEQ ID NO: 376776 - DNA, 12 bp, Artificial Sequence
  Oligonucleotide primer for the detection of SNP TSC0061981
gaggttttgttg

SEQ ID NO: 376777 - DNA, 12 bp, Artificial Sequence
  Oligonucleotide primer for the detection of SNP TSC0061981
aaaaccttacta

SEQ ID NO: 376778 - DNA, 12 bp, Artificial Sequence
  Oligonucleotide primer for the detection of SNP TSC0061981
ttatataggggt

SEQ ID NO: 376779 - DNA, 12 bp, Artificial Sequence
  Oligonucleotide primer for the detection of SNP TSC0061982
acatcatctcta

SEQ ID NO: 376780 - DNA, 12 bp, Artificial Sequence
  Oligonucleotide primer for the detection of SNP TSC0061982
tagttggaatgg

SEQ ID NO: 376781 - DNA, 12 bp, Artificial Sequence
  Oligonucleotide primer for the detection of SNP TSC0061983
ctaccattaaca

SEQ ID NO: 376782 - DNA, 12 bp, Artificial Sequence
  Oligonucleotide primer for the detection of SNP TSC0061983
aaagtttgtgtt

SEQ ID NO: 376783 - DNA, 12 bp, Artificial Sequence
  Oligonucleotide primer for the detection of SNP TSC0061983
aaatctatatta

SEQ ID NO: 376784 - DNA, 12 bp, Artificial Sequence
  Oligonucleotide primer for the detection of SNP TSC0061984
tttatgagtaaa

SEQ ID NO: 376785 - DNA, 12 bp, Artificial Sequence
  Oligonucleotide primer for the detection of SNP TSC0061984
ctcataaacaaa

SEQ ID NO: 376786 - DNA, 12 bp, Artificial Sequence
  Oligonucleotide primer for the detection of SNP TSC0061984
aggatttttttt

SEQ ID NO: 376787 - DNA, 12 bp, Artificial Sequence
  Oligonucleotide primer for the detection of SNP TSC0061985
atctctaaatat

SEQ ID NO: 376788 - DNA, 12 bp, Artificial Sequence
  Oligonucleotide primer for the detection of SNP TSC0061985
gtattttgtttg

SEQ ID NO: 376789 - DNA, 12 bp, Artificial Sequence
  Oligonucleotide primer for the detection of SNP TSC0061985
gtattttgttcg

SEQ ID NO: 376790 - DNA, 12 bp, Artificial Sequence
  Oligonucleotide primer for the detection of SNP TSC0061986
taaaactcctac

SEQ ID NO: 376791 - DNA, 12 bp, Artificial Sequence
  Oligonucleotide primer for the detection of SNP TSC0061986
aggagttagaga

SEQ ID NO: 376792 - DNA, 12 bp, Artificial Sequence
  Oligonucleotide primer for the detection of SNP TSC0061990
tatagtaggtta

SEQ ID NO: 376793 - DNA, 12 bp, Artificial Sequence
  Oligonucleotide primer for the detection of SNP TSC0061990
cacaacaaacta

SEQ ID NO: 376794 - DNA, 12 bp, Artificial Sequence
  Oligonucleotide primer for the detection of SNP TSC0061990
ttttaattgatt

SEQ ID NO: 376795 - DNA, 12 bp, Artificial Sequence
  Oligonucleotide primer for the detection of SNP TSC0004604
tcatctcacttt

SEQ ID NO: 376796 - DNA, 12 bp, Artificial Sequence
  Oligonucleotide primer for the detection of SNP TSC0004604
tcgtctcacttt

SEQ ID NO: 376797 - DNA, 12 bp, Artificial Sequence
  Oligonucleotide primer for the detection of SNP TSC0004604
aggggagaggat

SEQ ID NO: 376798 - DNA, 12 bp, Artificial Sequence
  Oligonucleotide primer for the detection of SNP TSC0061991
aaaaataaacat

SEQ ID NO: 376799 - DNA, 12 bp, Artificial Sequence
  Oligonucleotide primer for the detection of SNP TSC0061993
atctatacaaac

SEQ ID NO: 376800 - DNA, 12 bp, Artificial Sequence
  Oligonucleotide primer for the detection of SNP TSC0061993
attagtattatg

SEQ ID NO: 376801 - DNA, 12 bp, Artificial Sequence
  Oligonucleotide primer for the detection of SNP TSC0061994
tttatatatatg

SEQ ID NO: 376802 - DNA, 12 bp, Artificial Sequence
  Oligonucleotide primer for the detection of SNP TSC0061994
agattgtttgtt

SEQ ID NO: 376803 - DNA, 12 bp, Artificial Sequence
  Oligonucleotide primer for the detection of SNP TSC0010095
tcttaaaacaaa

SEQ ID NO: 376804 - DNA, 12 bp, Artificial Sequence
  Oligonucleotide primer for the detection of SNP TSC0010095
aatacttttttt

SEQ ID NO: 376805 - DNA, 12 bp, Artificial Sequence
  Oligonucleotide primer for the detection of SNP TSC0010096
tctacttctaac

SEQ ID NO: 376806 - DNA, 12 bp, Artificial Sequence
  Oligonucleotide primer for the detection of SNP TSC0010096
tttaatgtttag

SEQ ID NO: 376807 - DNA, 12 bp, Artificial Sequence
  Oligonucleotide primer for the detection of SNP TSC0061995
acaatcaatatt

SEQ ID NO: 376808 - DNA, 12 bp, Artificial Sequence
  Oligonucleotide primer for the detection of SNP TSC0061995
acgatcaatatt

SEQ ID NO: 376809 - DNA, 12 bp, Artificial Sequence
  Oligonucleotide primer for the detection of SNP TSC0061995
gaagagtttgtg

SEQ ID NO: 376810 - DNA, 12 bp, Artificial Sequence
  Oligonucleotide primer for the detection of SNP TSC0061996
tactttttttat

SEQ ID NO: 376811 - DNA, 12 bp, Artificial Sequence
  Oligonucleotide primer for the detection of SNP TSC0061997
cttaaaaattat

SEQ ID NO: 376812 - DNA, 12 bp, Artificial Sequence
  Oligonucleotide primer for the detection of SNP TSC0061997
tgaggaagtaga

SEQ ID NO: 376813 - DNA, 12 bp, Artificial Sequence
  Oligonucleotide primer for the detection of SNP TSC0061998
aatcaaaaacta

SEQ ID NO: 376814 - DNA, 12 bp, Artificial Sequence
  Oligonucleotide primer for the detection of SNP TSC0061998
tgtaattttggt

SEQ ID NO: 376815 - DNA, 12 bp, Artificial Sequence
  Oligonucleotide primer for the detection of SNP TSC0061998
ttataaccctaa

SEQ ID NO: 376816 - DNA, 12 bp, Artificial Sequence
  Oligonucleotide primer for the detection of SNP TSC0061998
tagttagaggtt

SEQ ID NO: 376817 - DNA, 12 bp, Artificial Sequence
  Oligonucleotide primer for the detection of SNP TSC0010872
tacataataata

SEQ ID NO: 376818 - DNA, 12 bp, Artificial Sequence
  Oligonucleotide primer for the detection of SNP TSC0010872
gattgtagtaat

SEQ ID NO: 376819 - DNA, 12 bp, Artificial Sequence
  Oligonucleotide primer for the detection of SNP TSC0010872
gattgtagtaac

SEQ ID NO: 376820 - DNA, 12 bp, Artificial Sequence
  Oligonucleotide primer for the detection of SNP TSC0010872
aattataataac

SEQ ID NO: 376821 - DNA, 12 bp, Artificial Sequence
  Oligonucleotide primer for the detection of SNP TSC0010872
atatagtgatat

SEQ ID NO: 376822 - DNA, 12 bp, Artificial Sequence
  Oligonucleotide primer for the detection of SNP TSC0001640
accctacaataa

SEQ ID NO: 376823 - DNA, 12 bp, Artificial Sequence
  Oligonucleotide primer for the detection of SNP TSC0001640
tttagtggaggg

SEQ ID NO: 376824 - DNA, 12 bp, Artificial Sequence
  Oligonucleotide primer for the detection of SNP TSC0001640
gttttgtagtgg

SEQ ID NO: 376825 - DNA, 12 bp, Artificial Sequence
  Oligonucleotide primer for the detection of SNP TSC0001641
ttttccccccat

SEQ ID NO: 376826 - DNA, 12 bp, Artificial Sequence
  Oligonucleotide primer for the detection of SNP TSC0001641
ggattgttatta

SEQ ID NO: 376827 - DNA, 12 bp, Artificial Sequence
  Oligonucleotide primer for the detection of SNP TSC0007299
acaacaactaat

SEQ ID NO: 376828 - DNA, 12 bp, Artificial Sequence
  Oligonucleotide primer for the detection of SNP TSC0007299
ttttataggttt

SEQ ID NO: 376829 - DNA, 12 bp, Artificial Sequence
  Oligonucleotide primer for the detection of SNP TSC0007299
ttttataaattc

SEQ ID NO: 376830 - DNA, 12 bp, Artificial Sequence
  Oligonucleotide primer for the detection of SNP TSC0007299
ataatagttgat

SEQ ID NO: 376831 - DNA, 12 bp, Artificial Sequence
  Oligonucleotide primer for the detection of SNP TSC0010179
acttaaatacat

SEQ ID NO: 376832 - DNA, 12 bp, Artificial Sequence
  Oligonucleotide primer for the detection of SNP TSC0010179
aattgataaata

SEQ ID NO: 376833 - DNA, 12 bp, Artificial Sequence
  Oligonucleotide primer for the detection of SNP TSC0062009
gtttttttggta

SEQ ID NO: 376834 - DNA, 12 bp, Artificial Sequence
  Oligonucleotide primer for the detection of SNP TSC0062010
ataaaacttacc

SEQ ID NO: 376835 - DNA, 12 bp, Artificial Sequence
  Oligonucleotide primer for the detection of SNP TSC0062010
tgggatttggga

SEQ ID NO: 376836 - DNA, 12 bp, Artificial Sequence
  Oligonucleotide primer for the detection of SNP TSC0062010
cgggatttggga

SEQ ID NO: 376837 - DNA, 12 bp, Artificial Sequence
  Oligonucleotide primer for the detection of SNP TSC0062011
accttctatcta

SEQ ID NO: 376838 - DNA, 12 bp, Artificial Sequence
  Oligonucleotide primer for the detection of SNP TSC0062011
aagtagtgagtt

SEQ ID NO: 376839 - DNA, 12 bp, Artificial Sequence
  Oligonucleotide primer for the detection of SNP TSC0062012
aacgctcctaac

SEQ ID NO: 376840 - DNA, 12 bp, Artificial Sequence
  Oligonucleotide primer for the detection of SNP TSC0062012
gaatgttgtttg

SEQ ID NO: 376841 - DNA, 12 bp, Artificial Sequence
  Oligonucleotide primer for the detection of SNP TSC0062012
gaacgttgtttg

SEQ ID NO: 376842 - DNA, 12 bp, Artificial Sequence
  Oligonucleotide primer for the detection of SNP TSC0062013
aaatcataaacc

SEQ ID NO: 376843 - DNA, 12 bp, Artificial Sequence
  Oligonucleotide primer for the detection of SNP TSC0062013
tgggtttaatag

SEQ ID NO: 376844 - DNA, 12 bp, Artificial Sequence
  Oligonucleotide primer for the detection of SNP TSC0062014
cactatttaaat

SEQ ID NO: 376845 - DNA, 12 bp, Artificial Sequence
  Oligonucleotide primer for the detection of SNP TSC0062014
cgctatttaaat

SEQ ID NO: 376846 - DNA, 12 bp, Artificial Sequence
  Oligonucleotide primer for the detection of SNP TSC0062014
ttaaaggtagtg

SEQ ID NO: 376847 - DNA, 12 bp, Artificial Sequence
  Oligonucleotide primer for the detection of SNP TSC0062014
ttaaaggtagcg

SEQ ID NO: 376848 - DNA, 12 bp, Artificial Sequence
  Oligonucleotide primer for the detection of SNP TSC0062015
atagtagggaat

SEQ ID NO: 376849 - DNA, 12 bp, Artificial Sequence
  Oligonucleotide primer for the detection of SNP TSC0062015
acaacaaaaaac

SEQ ID NO: 376850 - DNA, 12 bp, Artificial Sequence
  Oligonucleotide primer for the detection of SNP TSC0062015
tatgtataaggt

SEQ ID NO: 376851 - DNA, 12 bp, Artificial Sequence
  Oligonucleotide primer for the detection of SNP TSC0062016
aaactcaaaatc

SEQ ID NO: 376852 - DNA, 12 bp, Artificial Sequence
  Oligonucleotide primer for the detection of SNP TSC0062016
aaactcgaaatc

SEQ ID NO: 376853 - DNA, 12 bp, Artificial Sequence
  Oligonucleotide primer for the detection of SNP TSC0062016
ttttggatatga

SEQ ID NO: 376854 - DNA, 12 bp, Artificial Sequence
  Oligonucleotide primer for the detection of SNP TSC0062017
aactcataaaca

SEQ ID NO: 376855 - DNA, 12 bp, Artificial Sequence
  Oligonucleotide primer for the detection of SNP TSC0062017
ggtaagtttttt

SEQ ID NO: 376856 - DNA, 12 bp, Artificial Sequence
  Oligonucleotide primer for the detection of SNP TSC0062017
aggtttataggt

SEQ ID NO: 376857 - DNA, 12 bp, Artificial Sequence
  Oligonucleotide primer for the detection of SNP TSC0062018
aatacctatacc

SEQ ID NO: 376858 - DNA, 12 bp, Artificial Sequence
  Oligonucleotide primer for the detection of SNP TSC0062018
aagatataatgt

SEQ ID NO: 376859 - DNA, 12 bp, Artificial Sequence
  Oligonucleotide primer for the detection of SNP TSC0062018
caaaatacaata

SEQ ID NO: 376860 - DNA, 12 bp, Artificial Sequence
  Oligonucleotide primer for the detection of SNP TSC0062018
aatgtttgtatc

SEQ ID NO: 376861 - DNA, 12 bp, Artificial Sequence
  Oligonucleotide primer for the detection of SNP TSC0062019
gttgtatgtgta

SEQ ID NO: 376862 - DNA, 12 bp, Artificial Sequence
  Oligonucleotide primer for the detection of SNP TSC0062019
gttgtatgcgta

SEQ ID NO: 376863 - DNA, 12 bp, Artificial Sequence
  Oligonucleotide primer for the detection of SNP TSC0062019
actatatacaca

SEQ ID NO: 376864 - DNA, 12 bp, Artificial Sequence
  Oligonucleotide primer for the detection of SNP TSC0062019
actatatacgca

SEQ ID NO: 376865 - DNA, 12 bp, Artificial Sequence
  Oligonucleotide primer for the detection of SNP TSC0062019
ttttgggaaagg

SEQ ID NO: 376866 - DNA, 12 bp, Artificial Sequence
  Oligonucleotide primer for the detection of SNP TSC0008297
acttaaaccatt

SEQ ID NO: 376867 - DNA, 12 bp, Artificial Sequence
  Oligonucleotide primer for the detection of SNP TSC0008297
gtattttttgaa

SEQ ID NO: 376868 - DNA, 12 bp, Artificial Sequence
  Oligonucleotide primer for the detection of SNP TSC0008298
cacaaacccaac

SEQ ID NO: 376869 - DNA, 12 bp, Artificial Sequence
  Oligonucleotide primer for the detection of SNP TSC0008298
gagttttatgtg

SEQ ID NO: 376870 - DNA, 12 bp, Artificial Sequence
  Oligonucleotide primer for the detection of SNP TSC0008299
caaaactccact

SEQ ID NO: 376871 - DNA, 12 bp, Artificial Sequence
  Oligonucleotide primer for the detection of SNP TSC0008299
taaagttttatt

SEQ ID NO: 376872 - DNA, 12 bp, Artificial Sequence
  Oligonucleotide primer for the detection of SNP TSC0008940
ttttgaagtagt

SEQ ID NO: 376873 - DNA, 12 bp, Artificial Sequence
  Oligonucleotide primer for the detection of SNP TSC0008940
cccttaaaacaa

SEQ ID NO: 376874 - DNA, 12 bp, Artificial Sequence
  Oligonucleotide primer for the detection of SNP TSC0008940
tttatgtatttt

SEQ ID NO: 376875 - DNA, 12 bp, Artificial Sequence
  Oligonucleotide primer for the detection of SNP TSC0062022
cataataataaa

SEQ ID NO: 376876 - DNA, 12 bp, Artificial Sequence
  Oligonucleotide primer for the detection of SNP TSC0062022
gattttattaga

SEQ ID NO: 376877 - DNA, 12 bp, Artificial Sequence
  Oligonucleotide primer for the detection of SNP TSC0062022
aatctcatcaaa

SEQ ID NO: 376878 - DNA, 12 bp, Artificial Sequence
  Oligonucleotide primer for the detection of SNP TSC0006716
ctcttactattt

SEQ ID NO: 376879 - DNA, 12 bp, Artificial Sequence
  Oligonucleotide primer for the detection of SNP TSC0007571
ctattaaaaacc

SEQ ID NO: 376880 - DNA, 12 bp, Artificial Sequence
  Oligonucleotide primer for the detection of SNP TSC0008595
accgaaaaatat

SEQ ID NO: 376881 - DNA, 12 bp, Artificial Sequence
  Oligonucleotide primer for the detection of SNP TSC0062024
ttatggatgtat

SEQ ID NO: 376882 - DNA, 12 bp, Artificial Sequence
  Oligonucleotide primer for the detection of SNP TSC0062024
tcataaatatat

SEQ ID NO: 376883 - DNA, 12 bp, Artificial Sequence
  Oligonucleotide primer for the detection of SNP TSC0062024
gagttggtatga

SEQ ID NO: 376884 - DNA, 12 bp, Artificial Sequence
  Oligonucleotide primer for the detection of SNP TSC0062026
tattttgttttc

SEQ ID NO: 376885 - DNA, 12 bp, Artificial Sequence
  Oligonucleotide primer for the detection of SNP TSC0062026
ttcactttattt

SEQ ID NO: 376886 - DNA, 12 bp, Artificial Sequence
  Oligonucleotide primer for the detection of SNP TSC0062026
aagagggggtat

SEQ ID NO: 376887 - DNA, 12 bp, Artificial Sequence
  Oligonucleotide primer for the detection of SNP TSC0062029
atctaaaaatta

SEQ ID NO: 376888 - DNA, 12 bp, Artificial Sequence
  Oligonucleotide primer for the detection of SNP TSC0062029
tagaaataattt

SEQ ID NO: 376889 - DNA, 12 bp, Artificial Sequence
  Oligonucleotide primer for the detection of SNP TSC0062029
aaaaacaattca

SEQ ID NO: 376890 - DNA, 12 bp, Artificial Sequence
  Oligonucleotide primer for the detection of SNP TSC0062029
atttggaagtta

SEQ ID NO: 376891 - DNA, 12 bp, Artificial Sequence
  Oligonucleotide primer for the detection of SNP TSC0062030
attatatatatt

SEQ ID NO: 376892 - DNA, 12 bp, Artificial Sequence
  Oligonucleotide primer for the detection of SNP TSC0062031
cacacaccacca

SEQ ID NO: 376893 - DNA, 12 bp, Artificial Sequence
  Oligonucleotide primer for the detection of SNP TSC0062032
aaatcctattat

SEQ ID NO: 376894 - DNA, 12 bp, Artificial Sequence
  Oligonucleotide primer for the detection of SNP TSC0062032
agttgtgtggaa

SEQ ID NO: 376895 - DNA, 12 bp, Artificial Sequence
  Oligonucleotide primer for the detection of SNP TSC0062033
aaaatactacaa

SEQ ID NO: 376896 - DNA, 12 bp, Artificial Sequence
  Oligonucleotide primer for the detection of SNP TSC0062033
tggttttggttg

SEQ ID NO: 376897 - DNA, 12 bp, Artificial Sequence
  Oligonucleotide primer for the detection of SNP TSC0062033
tggtttcggttg

SEQ ID NO: 376898 - DNA, 12 bp, Artificial Sequence
  Oligonucleotide primer for the detection of SNP TSC0062033
taacctcaacta

SEQ ID NO: 376899 - DNA, 12 bp, Artificial Sequence
  Oligonucleotide primer for the detection of SNP TSC0062033
taacctcgacta

SEQ ID NO: 376900 - DNA, 12 bp, Artificial Sequence
  Oligonucleotide primer for the detection of SNP TSC0062033
tagagatgttat

SEQ ID NO: 376901 - DNA, 12 bp, Artificial Sequence
  Oligonucleotide primer for the detection of SNP TSC0062034
actacatacatt

SEQ ID NO: 376902 - DNA, 12 bp, Artificial Sequence
  Oligonucleotide primer for the detection of SNP TSC0062034
tgataagtttgg

SEQ ID NO: 376903 - DNA, 12 bp, Artificial Sequence
  Oligonucleotide primer for the detection of SNP TSC0062035
aataccatcccc

SEQ ID NO: 376904 - DNA, 12 bp, Artificial Sequence
  Oligonucleotide primer for the detection of SNP TSC0062035
agtagtgtttag

SEQ ID NO: 376905 - DNA, 12 bp, Artificial Sequence
  Oligonucleotide primer for the detection of SNP TSC0062036
tctcctccactc

SEQ ID NO: 376906 - DNA, 12 bp, Artificial Sequence
  Oligonucleotide primer for the detection of SNP TSC0062036
tatcctcaacca

SEQ ID NO: 376907 - DNA, 12 bp, Artificial Sequence
  Oligonucleotide primer for the detection of SNP TSC0062037
atcataaaatat

SEQ ID NO: 376908 - DNA, 12 bp, Artificial Sequence
  Oligonucleotide primer for the detection of SNP TSC0062037
aataaatatttg

SEQ ID NO: 376909 - DNA, 12 bp, Artificial Sequence
  Oligonucleotide primer for the detection of SNP TSC0062042
aaaaccattcaa

SEQ ID NO: 376910 - DNA, 12 bp, Artificial Sequence
  Oligonucleotide primer for the detection of SNP TSC0062042
cctaatcttttt

SEQ ID NO: 376911 - DNA, 12 bp, Artificial Sequence
  Oligonucleotide primer for the detection of SNP TSC0062042
gaagttatttag

SEQ ID NO: 376912 - DNA, 12 bp, Artificial Sequence
  Oligonucleotide primer for the detection of SNP TSC0006108
tataaaacttca

SEQ ID NO: 376913 - DNA, 12 bp, Artificial Sequence
  Oligonucleotide primer for the detection of SNP TSC0006108
caaatttcttca

SEQ ID NO: 376914 - DNA, 12 bp, Artificial Sequence
  Oligonucleotide primer for the detection of SNP TSC0006108
ttgtaagatttt

SEQ ID NO: 376915 - DNA, 12 bp, Artificial Sequence
  Oligonucleotide primer for the detection of SNP TSC0062045
aaccaatcaatt

SEQ ID NO: 376916 - DNA, 12 bp, Artificial Sequence
  Oligonucleotide primer for the detection of SNP TSC0062049
ttttgtatttac

SEQ ID NO: 376917 - DNA, 12 bp, Artificial Sequence
  Oligonucleotide primer for the detection of SNP TSC0062049
ctcctatatcca

SEQ ID NO: 376918 - DNA, 12 bp, Artificial Sequence
  Oligonucleotide primer for the detection of SNP TSC0062049
gagagtatagat

SEQ ID NO: 376919 - DNA, 12 bp, Artificial Sequence
  Oligonucleotide primer for the detection of SNP TSC0062051
cataaaaaatac

SEQ ID NO: 376920 - DNA, 12 bp, Artificial Sequence
  Oligonucleotide primer for the detection of SNP TSC0062051
ttataggaaata

SEQ ID NO: 376921 - DNA, 12 bp, Artificial Sequence
  Oligonucleotide primer for the detection of SNP TSC0062051
ccataaaaaata

SEQ ID NO: 376922 - DNA, 12 bp, Artificial Sequence
  Oligonucleotide primer for the detection of SNP TSC0062051
tatgagaaatat

SEQ ID NO: 376923 - DNA, 12 bp, Artificial Sequence
  Oligonucleotide primer for the detection of SNP TSC0062052
cttaaccattat

SEQ ID NO: 376924 - DNA, 12 bp, Artificial Sequence
  Oligonucleotide primer for the detection of SNP TSC0062052
tgaaatagataa

SEQ ID NO: 376925 - DNA, 12 bp, Artificial Sequence
  Oligonucleotide primer for the detection of SNP TSC0062053
tattaattagtg

SEQ ID NO: 376926 - DNA, 12 bp, Artificial Sequence
  Oligonucleotide primer for the detection of SNP TSC0062054
ttaatacatttt

SEQ ID NO: 376927 - DNA, 12 bp, Artificial Sequence
  Oligonucleotide primer for the detection of SNP TSC0062054
ctttatcataca

SEQ ID NO: 376928 - DNA, 12 bp, Artificial Sequence
  Oligonucleotide primer for the detection of SNP TSC0062054
ttgatgtatttt

SEQ ID NO: 376929 - DNA, 12 bp, Artificial Sequence
  Oligonucleotide primer for the detection of SNP TSC0062058
caataaattcat

SEQ ID NO: 376930 - DNA, 12 bp, Artificial Sequence
  Oligonucleotide primer for the detection of SNP TSC0062059
cacaaaaaatct

SEQ ID NO: 376931 - DNA, 12 bp, Artificial Sequence
  Oligonucleotide primer for the detection of SNP TSC0062059
tttctttcttta

SEQ ID NO: 376932 - DNA, 12 bp, Artificial Sequence
  Oligonucleotide primer for the detection of SNP TSC0062059
tataagaggttt

SEQ ID NO: 376933 - DNA, 12 bp, Artificial Sequence
  Oligonucleotide primer for the detection of SNP TSC0062060
tcacttaaaaat

SEQ ID NO: 376934 - DNA, 12 bp, Artificial Sequence
  Oligonucleotide primer for the detection of SNP TSC0062060
ttcaaaaataaa

SEQ ID NO: 376935 - DNA, 12 bp, Artificial Sequence
  Oligonucleotide primer for the detection of SNP TSC0062060
ttatttagaaat

SEQ ID NO: 376936 - DNA, 12 bp, Artificial Sequence
  Oligonucleotide primer for the detection of SNP TSC0007530
ccttttctttac

SEQ ID NO: 376937 - DNA, 12 bp, Artificial Sequence
  Oligonucleotide primer for the detection of SNP TSC0007530
ttttaagatgag

SEQ ID NO: 376938 - DNA, 12 bp, Artificial Sequence
  Oligonucleotide primer for the detection of SNP TSC0062063
ctatatattccc

SEQ ID NO: 376939 - DNA, 12 bp, Artificial Sequence
  Oligonucleotide primer for the detection of SNP TSC0062063
ttgagtttgtag

SEQ ID NO: 376940 - DNA, 12 bp, Artificial Sequence
  Oligonucleotide primer for the detection of SNP TSC0062065
tatcattaaatt

SEQ ID NO: 376941 - DNA, 12 bp, Artificial Sequence
  Oligonucleotide primer for the detection of SNP TSC0062066
ttaatttctcca

SEQ ID NO: 376942 - DNA, 12 bp, Artificial Sequence
  Oligonucleotide primer for the detection of SNP TSC0062066
agttaatgattt

SEQ ID NO: 376943 - DNA, 12 bp, Artificial Sequence
  Oligonucleotide primer for the detection of SNP TSC0062066
agttaacgattt

SEQ ID NO: 376944 - DNA, 12 bp, Artificial Sequence
  Oligonucleotide primer for the detection of SNP TSC0062066
aattaacaatcc

SEQ ID NO: 376945 - DNA, 12 bp, Artificial Sequence
  Oligonucleotide primer for the detection of SNP TSC0062066
aattaacgatcc

SEQ ID NO: 376946 - DNA, 12 bp, Artificial Sequence
  Oligonucleotide primer for the detection of SNP TSC0062067
caccaaaacaac

SEQ ID NO: 376947 - DNA, 12 bp, Artificial Sequence
  Oligonucleotide primer for the detection of SNP TSC0062067
gttggtgagtaa

SEQ ID NO: 376948 - DNA, 12 bp, Artificial Sequence
  Oligonucleotide primer for the detection of SNP TSC0062067
actaataaataa

SEQ ID NO: 376949 - DNA, 12 bp, Artificial Sequence
  Oligonucleotide primer for the detection of SNP TSC0062067
tattaaggtaat

SEQ ID NO: 376950 - DNA, 12 bp, Artificial Sequence
  Oligonucleotide primer for the detection of SNP TSC0062070
ttaatatgtttg

SEQ ID NO: 376951 - DNA, 12 bp, Artificial Sequence
  Oligonucleotide primer for the detection of SNP TSC0062071
caccacttataa

SEQ ID NO: 376952 - DNA, 12 bp, Artificial Sequence
  Oligonucleotide primer for the detection of SNP TSC0062071
cgccacttataa

SEQ ID NO: 376953 - DNA, 12 bp, Artificial Sequence
  Oligonucleotide primer for the detection of SNP TSC0062071
tgttttagatat

SEQ ID NO: 376954 - DNA, 12 bp, Artificial Sequence
  Oligonukleotid-Primer
tgttttagatac

SEQ ID NO: 376955 - DNA, 12 bp, Artificial Sequence
  Oligonucleotide primer for the detection of SNP TSC0062071
tgttatttataa

SEQ ID NO: 376956 - DNA, 12 bp, Artificial Sequence
  Oligonucleotide primer for the detection of SNP TSC0062071
cgttatttataa

SEQ ID NO: 376957 - DNA, 12 bp, Artificial Sequence
  Oligonucleotide primer for the detection of SNP TSC0062072
aacccttacaat

SEQ ID NO: 376958 - DNA, 12 bp, Artificial Sequence
  Oligonucleotide primer for the detection of SNP TSC0062072
gataatatttta

SEQ ID NO: 376959 - DNA, 12 bp, Artificial Sequence
  Oligonucleotide primer for the detection of SNP TSC0008822
taaattctaaat

SEQ ID NO: 376960 - DNA, 12 bp, Artificial Sequence
  Oligonucleotide primer for the detection of SNP TSC0008822
gggattgtgtga

SEQ ID NO: 376961 - DNA, 12 bp, Artificial Sequence
  Oligonucleotide primer for the detection of SNP TSC0008822
gggatcgtgtga

SEQ ID NO: 376962 - DNA, 12 bp, Artificial Sequence
  Oligonucleotide primer for the detection of SNP TSC0008823
tattattttgta

SEQ ID NO: 376963 - DNA, 12 bp, Artificial Sequence
  Oligonucleotide primer for the detection of SNP TSC0008823
tattatttcgta

SEQ ID NO: 376964 - DNA, 12 bp, Artificial Sequence
  Oligonucleotide primer for the detection of SNP TSC0008823
caccaccccaca

SEQ ID NO: 376965 - DNA, 12 bp, Artificial Sequence
  Oligonucleotide primer for the detection of SNP TSC0008823
caccaccccgca

SEQ ID NO: 376966 - DNA, 12 bp, Artificial Sequence
  Oligonucleotide primer for the detection of SNP TSC0008823
ggagtagagtgt

SEQ ID NO: 376967 - DNA, 12 bp, Artificial Sequence
  Oligonucleotide primer for the detection of SNP TSC0062073
gaatttaagttt

SEQ ID NO: 376968 - DNA, 12 bp, Artificial Sequence
  Oligonucleotide primer for the detection of SNP TSC0062073
aaacccaaatcc

SEQ ID NO: 376969 - DNA, 12 bp, Artificial Sequence
  Oligonucleotide primer for the detection of SNP TSC0062075
acaattcataat

SEQ ID NO: 376970 - DNA, 12 bp, Artificial Sequence
  Oligonucleotide primer for the detection of SNP TSC0062075
ttgtgataagtg

SEQ ID NO: 376971 - DNA, 12 bp, Artificial Sequence
  Oligonucleotide primer for the detection of SNP TSC0062075
tcgtgataagtg

SEQ ID NO: 376972 - DNA, 12 bp, Artificial Sequence
  Oligonucleotide primer for the detection of SNP TSC0062075
ttgtgataagcg

SEQ ID NO: 376973 - DNA, 12 bp, Artificial Sequence
  Oligonucleotide primer for the detection of SNP TSC0062075
tcgtgataagcg

SEQ ID NO: 376974 - DNA, 12 bp, Artificial Sequence
  Oligonucleotide primer for the detection of SNP TSC0062076
tcctcataatat

SEQ ID NO: 376975 - DNA, 12 bp, Artificial Sequence
  Oligonucleotide primer for the detection of SNP TSC0062079
agtaggagaggt

SEQ ID NO: 376976 - DNA, 12 bp, Artificial Sequence
  Oligonucleotide primer for the detection of SNP TSC0062079
gggtaagttaag

SEQ ID NO: 376977 - DNA, 12 bp, Artificial Sequence
  Oligonucleotide primer for the detection of SNP TSC0062080
ccctatattatt

SEQ ID NO: 376978 - DNA, 12 bp, Artificial Sequence
  Oligonucleotide primer for the detection of SNP TSC0062080
tatatattttaa

SEQ ID NO: 376979 - DNA, 12 bp, Artificial Sequence
  Oligonucleotide primer for the detection of SNP TSC0062081
ttctcattacta

SEQ ID NO: 376980 - DNA, 12 bp, Artificial Sequence
  Oligonucleotide primer for the detection of SNP TSC0062081
tattctttatct

SEQ ID NO: 376981 - DNA, 12 bp, Artificial Sequence
  Oligonucleotide primer for the detection of SNP TSC0009574
taaccatcccta

SEQ ID NO: 376982 - DNA, 12 bp, Artificial Sequence
  Oligonucleotide primer for the detection of SNP TSC0009574
ccaaccaacttc

SEQ ID NO: 376983 - DNA, 12 bp, Artificial Sequence
  Oligonucleotide primer for the detection of SNP TSC0062083
aacctcctaccc

SEQ ID NO: 376984 - DNA, 12 bp, Artificial Sequence
  Oligonucleotide primer for the detection of SNP TSC0062083
gagaaaaattag

SEQ ID NO: 376985 - DNA, 12 bp, Artificial Sequence
  Oligonucleotide primer for the detection of SNP TSC0062084
tacaacctaacc

SEQ ID NO: 376986 - DNA, 12 bp, Artificial Sequence
  Oligonucleotide primer for the detection of SNP TSC0062084
ttatgggtaggg

SEQ ID NO: 376987 - DNA, 12 bp, Artificial Sequence
  Oligonucleotide primer for the detection of SNP TSC0062086
aaattatttatc

SEQ ID NO: 376988 - DNA, 12 bp, Artificial Sequence
  Oligonucleotide primer for the detection of SNP TSC0062086
aaaattatctat

SEQ ID NO: 376989 - DNA, 12 bp, Artificial Sequence
  Oligonucleotide primer for the detection of SNP TSC0062087
aaaatccttacc

SEQ ID NO: 376990 - DNA, 12 bp, Artificial Sequence
  Oligonucleotide primer for the detection of SNP TSC0062087
atgttggaatta

SEQ ID NO: 376991 - DNA, 12 bp, Artificial Sequence
  Oligonucleotide primer for the detection of SNP TSC0062088
aatttttacaaa

SEQ ID NO: 376992 - DNA, 12 bp, Artificial Sequence
  Oligonucleotide primer for the detection of SNP TSC0062088
aggttttttagt

SEQ ID NO: 376993 - DNA, 12 bp, Artificial Sequence
  Oligonucleotide primer for the detection of SNP TSC0062088
aaacctcctaac

SEQ ID NO: 376994 - DNA, 12 bp, Artificial Sequence
  Oligonucleotide primer for the detection of SNP TSC0062088
gggtttttgtag

SEQ ID NO: 376995 - DNA, 12 bp, Artificial Sequence
  Oligonucleotide primer for the detection of SNP TSC0062089
ataaaatataga

SEQ ID NO: 376996 - DNA, 12 bp, Artificial Sequence
  Oligonucleotide primer for the detection of SNP TSC0062089
gatgtagagtat

SEQ ID NO: 376997 - DNA, 12 bp, Artificial Sequence
  Oligonucleotide primer for the detection of SNP TSC0062095
tttatagtattt

SEQ ID NO: 376998 - DNA, 12 bp, Artificial Sequence
  Oligonucleotide primer for the detection of SNP TSC0062095
tttatagtattc

SEQ ID NO: 376999 - DNA, 12 bp, Artificial Sequence
  Oligonucleotide primer for the detection of SNP TSC0062095
attcacaatatt

SEQ ID NO: 377000 - DNA, 12 bp, Artificial Sequence
  Oligonucleotide primer for the detection of SNP TSC0062095
aaaaggtttata

SEQ ID NO: 377001 - DNA, 12 bp, Artificial Sequence
  Oligonucleotide primer for the detection of SNP TSC0062096
aattttttctac

SEQ ID NO: 377002 - DNA, 12 bp, Artificial Sequence
  Oligonucleotide primer for the detection of SNP TSC0062096
agtaataattta

SEQ ID NO: 377003 - DNA, 12 bp, Artificial Sequence
  Oligonucleotide primer for the detection of SNP TSC0062097
taaaaaaccatt

SEQ ID NO: 377004 - DNA, 12 bp, Artificial Sequence
  Oligonucleotide primer for the detection of SNP TSC0062097
taaaaaaccgtt

SEQ ID NO: 377005 - DNA, 12 bp, Artificial Sequence
  Oligonucleotide primer for the detection of SNP TSC0062097
ttagatagggtg

SEQ ID NO: 377006 - DNA, 12 bp, Artificial Sequence
  Oligonucleotide primer for the detection of SNP TSC0062098
ccttttttaata

SEQ ID NO: 377007 - DNA, 12 bp, Artificial Sequence
  Oligonucleotide primer for the detection of SNP TSC0062098
acttcttttata

SEQ ID NO: 377008 - DNA, 12 bp, Artificial Sequence
  Oligonucleotide primer for the detection of SNP TSC0062101
ttaaaatataca

SEQ ID NO: 377009 - DNA, 12 bp, Artificial Sequence
  Oligonucleotide primer for the detection of SNP TSC0062101
taattcatttta

SEQ ID NO: 377010 - DNA, 12 bp, Artificial Sequence
  Oligonucleotide primer for the detection of SNP TSC0062101
tgaaatatgtat

SEQ ID NO: 377011 - DNA, 12 bp, Artificial Sequence
  Oligonucleotide primer for the detection of SNP TSC0062103
tttaaataaaac

SEQ ID NO: 377012 - DNA, 12 bp, Artificial Sequence
  Oligonucleotide primer for the detection of SNP TSC0062104
ttgtaataaata

SEQ ID NO: 377013 - DNA, 12 bp, Artificial Sequence
  Oligonucleotide primer for the detection of SNP TSC0062105
ctaaaatttctt

SEQ ID NO: 377014 - DNA, 12 bp, Artificial Sequence
  Oligonucleotide primer for the detection of SNP TSC0062105
gattttaaataa

SEQ ID NO: 377015 - DNA, 12 bp, Artificial Sequence
  Oligonucleotide primer for the detection of SNP TSC0062106
taactattcaaa

SEQ ID NO: 377016 - DNA, 12 bp, Artificial Sequence
  Oligonucleotide primer for the detection of SNP TSC0062106
tcaacatcacat

SEQ ID NO: 377017 - DNA, 12 bp, Artificial Sequence
  Oligonucleotide primer for the detection of SNP TSC0062107
tccatcacactt

SEQ ID NO: 377018 - DNA, 12 bp, Artificial Sequence
  Oligonucleotide primer for the detection of SNP TSC0062107
agatagattata

SEQ ID NO: 377019 - DNA, 12 bp, Artificial Sequence
  Oligonucleotide primer for the detection of SNP TSC0062109
tggttgatattt

SEQ ID NO: 377020 - DNA, 12 bp, Artificial Sequence
  Oligonucleotide primer for the detection of SNP TSC0062109
cggttgatattt

SEQ ID NO: 377021 - DNA, 12 bp, Artificial Sequence
  Oligonucleotide primer for the detection of SNP TSC0062109
atcaattaacat

SEQ ID NO: 377022 - DNA, 12 bp, Artificial Sequence
  Oligonucleotide primer for the detection of SNP TSC0062109
atcgattaacat

SEQ ID NO: 377023 - DNA, 12 bp, Artificial Sequence
  Oligonucleotide primer for the detection of SNP TSC0062109
tggtggtgatta

SEQ ID NO: 377024 - DNA, 12 bp, Artificial Sequence
  Oligonucleotide primer for the detection of SNP TSC0062110
gtagggtttttt

SEQ ID NO: 377025 - DNA, 12 bp, Artificial Sequence
  Oligonucleotide primer for the detection of SNP TSC0062111
gataaaaaaaat

SEQ ID NO: 377026 - DNA, 12 bp, Artificial Sequence
  Oligonucleotide primer for the detection of SNP TSC0062111
agaatagaatag

SEQ ID NO: 377027 - DNA, 12 bp, Artificial Sequence
  Oligonucleotide primer for the detection of SNP TSC0001258
tttagtttaata

SEQ ID NO: 377028 - DNA, 12 bp, Artificial Sequence
  Oligonucleotide primer for the detection of SNP TSC0062113
agggaatatgtt

SEQ ID NO: 377029 - DNA, 12 bp, Artificial Sequence
  Oligonucleotide primer for the detection of SNP TSC0062114
taattttacatt

SEQ ID NO: 377030 - DNA, 12 bp, Artificial Sequence
  Oligonucleotide primer for the detection of SNP TSC0062114
ttgtggaggggg

SEQ ID NO: 377031 - DNA, 12 bp, Artificial Sequence
  Oligonucleotide primer for the detection of SNP TSC0062114
ttgcggaggggg

SEQ ID NO: 377032 - DNA, 12 bp, Artificial Sequence
  Oligonucleotide primer for the detection of SNP TSC0062116
gggatgaagata

SEQ ID NO: 377033 - DNA, 12 bp, Artificial Sequence
  Oligonucleotide primer for the detection of SNP TSC0062116
gggacgaagata

SEQ ID NO: 377034 - DNA, 12 bp, Artificial Sequence
  Oligonucleotide primer for the detection of SNP TSC0008338
catttttcctta

SEQ ID NO: 377035 - DNA, 12 bp, Artificial Sequence
  Oligonucleotide primer for the detection of SNP TSC0008338
cgtttttcctta

SEQ ID NO: 377036 - DNA, 12 bp, Artificial Sequence
  Oligonucleotide primer for the detection of SNP TSC0008338
attgaaaatatt

SEQ ID NO: 377037 - DNA, 12 bp, Artificial Sequence
  Oligonucleotide primer for the detection of SNP TSC0008338
ctaaaaatacca

SEQ ID NO: 377038 - DNA, 12 bp, Artificial Sequence
  Oligonucleotide primer for the detection of SNP TSC0008338
gcgttttttttt

SEQ ID NO: 377039 - DNA, 12 bp, Artificial Sequence
  Oligonucleotide primer for the detection of SNP TSC0007313
tattttctatat

SEQ ID NO: 377040 - DNA, 12 bp, Artificial Sequence
  Oligonucleotide primer for the detection of SNP TSC0007313
ttaaattatgta

SEQ ID NO: 377041 - DNA, 12 bp, Artificial Sequence
  Oligonucleotide primer for the detection of SNP TSC0062118
accctcctctaa

SEQ ID NO: 377042 - DNA, 12 bp, Artificial Sequence
  Oligonucleotide primer for the detection of SNP TSC0062118
gattaagaagtt

SEQ ID NO: 377043 - DNA, 12 bp, Artificial Sequence
  Oligonucleotide primer for the detection of SNP TSC0062119
catccctaatta

SEQ ID NO: 377044 - DNA, 12 bp, Artificial Sequence
  Oligonucleotide primer for the detection of SNP TSC0062119
ggagagttataa

SEQ ID NO: 377045 - DNA, 12 bp, Artificial Sequence
  Oligonucleotide primer for the detection of SNP TSC0062120
taaatcccttta

SEQ ID NO: 377046 - DNA, 12 bp, Artificial Sequence
  Oligonucleotide primer for the detection of SNP TSC0062120
taaagagaaaga

SEQ ID NO: 377047 - DNA, 12 bp, Artificial Sequence
  Oligonucleotide primer for the detection of SNP TSC0062120
taggtttttttg

SEQ ID NO: 377048 - DNA, 12 bp, Artificial Sequence
  Oligonucleotide primer for the detection of SNP TSC0062121
ttactaacattc

SEQ ID NO: 377049 - DNA, 12 bp, Artificial Sequence
  Oligonucleotide primer for the detection of SNP TSC0062121
gttgtattaaag

SEQ ID NO: 377050 - DNA, 12 bp, Artificial Sequence
  Oligonucleotide primer for the detection of SNP TSC0062121
ttacatcaaaaa

SEQ ID NO: 377051 - DNA, 12 bp, Artificial Sequence
  Oligonucleotide primer for the detection of SNP TSC0062121
tattggtatttt

SEQ ID NO: 377052 - DNA, 12 bp, Artificial Sequence
  Oligonucleotide primer for the detection of SNP TSC0062123
tgggtaatttgg

SEQ ID NO: 377053 - DNA, 12 bp, Artificial Sequence
  Oligonucleotide primer for the detection of SNP TSC0062123
tgggtaattcgg

SEQ ID NO: 377054 - DNA, 12 bp, Artificial Sequence
  Oligonucleotide primer for the detection of SNP TSC0062123
taaataacccaa

SEQ ID NO: 377055 - DNA, 12 bp, Artificial Sequence
  Oligonucleotide primer for the detection of SNP TSC0062123
taaataacccga

SEQ ID NO: 377056 - DNA, 12 bp, Artificial Sequence
  Oligonucleotide primer for the detection of SNP TSC0062123
aagtaagtttat

SEQ ID NO: 377057 - DNA, 12 bp, Artificial Sequence
  Oligonucleotide primer for the detection of SNP TSC0062124
attaaacaaatt

SEQ ID NO: 377058 - DNA, 12 bp, Artificial Sequence
  Oligonucleotide primer for the detection of SNP TSC0062124
gttataataaag

SEQ ID NO: 377059 - DNA, 12 bp, Artificial Sequence
  Oligonucleotide primer for the detection of SNP TSC0062126
accaaactctcc

SEQ ID NO: 377060 - DNA, 12 bp, Artificial Sequence
  Oligonucleotide primer for the detection of SNP TSC0062126
aaagtgtggagg

SEQ ID NO: 377061 - DNA, 12 bp, Artificial Sequence
  Oligonucleotide primer for the detection of SNP TSC0062130
caattctcccca

SEQ ID NO: 377062 - DNA, 12 bp, Artificial Sequence
  Oligonucleotide primer for the detection of SNP TSC0062130
agtgaaagaaat

SEQ ID NO: 377063 - DNA, 12 bp, Artificial Sequence
  Oligonucleotide primer for the detection of SNP TSC0062131
acaaatcctaat

SEQ ID NO: 377064 - DNA, 12 bp, Artificial Sequence
  Oligonucleotide primer for the detection of SNP TSC0006434
aactactactaa

SEQ ID NO: 377065 - DNA, 12 bp, Artificial Sequence
  Oligonucleotide primer for the detection of SNP TSC0006434
ggttttatggtt

SEQ ID NO: 377066 - DNA, 12 bp, Artificial Sequence
  Oligonucleotide primer for the detection of SNP TSC0006434
aatcttataact

SEQ ID NO: 377067 - DNA, 12 bp, Artificial Sequence
  Oligonucleotide primer for the detection of SNP TSC0006434
ggttgttgttga

SEQ ID NO: 377068 - DNA, 12 bp, Artificial Sequence
  Oligonucleotide primer for the detection of SNP TSC0062133
gttaggtattga

SEQ ID NO: 377069 - DNA, 12 bp, Artificial Sequence
  Oligonucleotide primer for the detection of SNP TSC0062133
gttaggtatcga

SEQ ID NO: 377070 - DNA, 12 bp, Artificial Sequence
  Oligonucleotide primer for the detection of SNP TSC0062134
aaaatagtgata

SEQ ID NO: 377071 - DNA, 12 bp, Artificial Sequence
  Oligonucleotide primer for the detection of SNP TSC0062135
ctaccttttact

SEQ ID NO: 377072 - DNA, 12 bp, Artificial Sequence
  Oligonucleotide primer for the detection of SNP TSC0062135
gtaagaaatgag

SEQ ID NO: 377073 - DNA, 12 bp, Artificial Sequence
  Oligonucleotide primer for the detection of SNP TSC0006083
cccatcaaacct

SEQ ID NO: 377074 - DNA, 12 bp, Artificial Sequence
  Oligonucleotide primer for the detection of SNP TSC0006083
tgtagagtttgg

SEQ ID NO: 377075 - DNA, 12 bp, Artificial Sequence
  Oligonucleotide primer for the detection of SNP TSC0006084
tttaaaacccaa

SEQ ID NO: 377076 - DNA, 12 bp, Artificial Sequence
  Oligonucleotide primer for the detection of SNP TSC0006084
tattgtttagtt

SEQ ID NO: 377077 - DNA, 12 bp, Artificial Sequence
  Oligonucleotide primer for the detection of SNP TSC0006084
cactacttaatc

SEQ ID NO: 377078 - DNA, 12 bp, Artificial Sequence
  Oligonucleotide primer for the detection of SNP TSC0006084
ttaaggtttagc

SEQ ID NO: 377079 - DNA, 12 bp, Artificial Sequence
  Oligonucleotide primer for the detection of SNP TSC0006085
aataatcacatc

SEQ ID NO: 377080 - DNA, 12 bp, Artificial Sequence
  Oligonucleotide primer for the detection of SNP TSC0006085
ttatatttggga

SEQ ID NO: 377081 - DNA, 12 bp, Artificial Sequence
  Oligonucleotide primer for the detection of SNP TSC0010199
tttagtataatt

SEQ ID NO: 377082 - DNA, 12 bp, Artificial Sequence
  Oligonucleotide primer for the detection of SNP TSC0010200
ttattttaggat

SEQ ID NO: 377083 - DNA, 12 bp, Artificial Sequence
  Oligonucleotide primer for the detection of SNP TSC0010200
tcatcttaaaat

SEQ ID NO: 377084 - DNA, 12 bp, Artificial Sequence
  Oligonucleotide primer for the detection of SNP TSC0010200
ttgtaaagataa

SEQ ID NO: 377085 - DNA, 12 bp, Artificial Sequence
  Oligonucleotide primer for the detection of SNP TSC0010201
aggtgtttttga

SEQ ID NO: 377086 - DNA, 12 bp, Artificial Sequence
  Oligonucleotide primer for the detection of SNP TSC0062136
gatgagatattt

SEQ ID NO: 377087 - DNA, 12 bp, Artificial Sequence
  Oligonucleotide primer for the detection of SNP TSC0006649
ttttaaggttgg

SEQ ID NO: 377088 - DNA, 12 bp, Artificial Sequence
  Oligonucleotide primer for the detection of SNP TSC0062137
tttcaacacata

SEQ ID NO: 377089 - DNA, 12 bp, Artificial Sequence
  Oligonucleotide primer for the detection of SNP TSC0062137
gggtatgtgtgt

SEQ ID NO: 377090 - DNA, 12 bp, Artificial Sequence
  Oligonucleotide primer for the detection of SNP TSC0062138
gtttttaaggaa

SEQ ID NO: 377091 - DNA, 12 bp, Artificial Sequence
  Oligonucleotide primer for the detection of SNP TSC0062138
atcttcaaaaaa

SEQ ID NO: 377092 - DNA, 12 bp, Artificial Sequence
  Oligonucleotide primer for the detection of SNP TSC0062138
tattgaaggatt

SEQ ID NO: 377093 - DNA, 12 bp, Artificial Sequence
  Oligonucleotide primer for the detection of SNP TSC0062140
caatatatcaat

SEQ ID NO: 377094 - DNA, 12 bp, Artificial Sequence
  Oligonucleotide primer for the detection of SNP TSC0062140
aggttgaaaatg

SEQ ID NO: 377095 - DNA, 12 bp, Artificial Sequence
  Oligonucleotide primer for the detection of SNP TSC0062140
tagtgtgttaat

SEQ ID NO: 377096 - DNA, 12 bp, Artificial Sequence
  Oligonucleotide primer for the detection of SNP TSC0062143
ctatccatatct

SEQ ID NO: 377097 - DNA, 12 bp, Artificial Sequence
  Oligonucleotide primer for the detection of SNP TSC0062143
gttgggaataag

SEQ ID NO: 377098 - DNA, 12 bp, Artificial Sequence
  Oligonucleotide primer for the detection of SNP TSC0062144
ttttccccctat

SEQ ID NO: 377099 - DNA, 12 bp, Artificial Sequence
  Oligonucleotide primer for the detection of SNP TSC0062147
ttttcgtttttc

SEQ ID NO: 377100 - DNA, 12 bp, Artificial Sequence
  Oligonucleotide primer for the detection of SNP TSC0062148
tacccacaattt

SEQ ID NO: 377101 - DNA, 12 bp, Artificial Sequence
  Oligonucleotide primer for the detection of SNP TSC0062148
tgatgagtgaaa

SEQ ID NO: 377102 - DNA, 12 bp, Artificial Sequence
  Oligonucleotide primer for the detection of SNP TSC0007081
taacttcatcct

SEQ ID NO: 377103 - DNA, 12 bp, Artificial Sequence
  Oligonucleotide primer for the detection of SNP TSC0007081
aataaatgttgt

SEQ ID NO: 377104 - DNA, 12 bp, Artificial Sequence
  Oligonucleotide primer for the detection of SNP TSC0062149
tacaaattaccc

SEQ ID NO: 377105 - DNA, 12 bp, Artificial Sequence
  Oligonucleotide primer for the detection of SNP TSC0062149
aaaatggtagaa

SEQ ID NO: 377106 - DNA, 12 bp, Artificial Sequence
  Oligonucleotide primer for the detection of SNP TSC0062150
aaaatccttcaa

SEQ ID NO: 377107 - DNA, 12 bp, Artificial Sequence
  Oligonucleotide primer for the detection of SNP TSC0062150
tatatagataat

SEQ ID NO: 377108 - DNA, 12 bp, Artificial Sequence
  Oligonucleotide primer for the detection of SNP TSC0062150
catacaaacaac

SEQ ID NO: 377109 - DNA, 12 bp, Artificial Sequence
  Oligonucleotide primer for the detection of SNP TSC0062150
aaagttttttag

SEQ ID NO: 377110 - DNA, 12 bp, Artificial Sequence
  Oligonucleotide primer for the detection of SNP TSC0062152
tatatataaatc

SEQ ID NO: 377111 - DNA, 12 bp, Artificial Sequence
  Oligonucleotide primer for the detection of SNP TSC0062153
taactcacacaa

SEQ ID NO: 377112 - DNA, 12 bp, Artificial Sequence
  Oligonucleotide primer for the detection of SNP TSC0062153
attgaatgttat

SEQ ID NO: 377113 - DNA, 12 bp, Artificial Sequence
  Oligonucleotide primer for the detection of SNP TSC0062153
aattaaatacca

SEQ ID NO: 377114 - DNA, 12 bp, Artificial Sequence
  Oligonucleotide primer for the detection of SNP TSC0062153
atttatatagtt

SEQ ID NO: 377115 - DNA, 12 bp, Artificial Sequence
  Oligonucleotide primer for the detection of SNP TSC0062154
ttccatatactt

SEQ ID NO: 377116 - DNA, 12 bp, Artificial Sequence
  Oligonucleotide primer for the detection of SNP TSC0062155
ttaacaaatatt

SEQ ID NO: 377117 - DNA, 12 bp, Artificial Sequence
  Oligonucleotide primer for the detection of SNP TSC0062155
tattaaatgatg

SEQ ID NO: 377118 - DNA, 12 bp, Artificial Sequence
  Oligonucleotide primer for the detection of SNP TSC0062155
tattaaatgacg

SEQ ID NO: 377119 - DNA, 12 bp, Artificial Sequence
  Oligonucleotide primer for the detection of SNP TSC0062156
ttcaactatttt

SEQ ID NO: 377120 - DNA, 12 bp, Artificial Sequence
  Oligonucleotide primer for the detection of SNP TSC0062156
ttcgactatttt

SEQ ID NO: 377121 - DNA, 12 bp, Artificial Sequence
  Oligonucleotide primer for the detection of SNP TSC0062156
tatgggaatgga

SEQ ID NO: 377122 - DNA, 12 bp, Artificial Sequence
  Oligonucleotide primer for the detection of SNP TSC0062156
tacgggaatgga

SEQ ID NO: 377123 - DNA, 12 bp, Artificial Sequence
  Oligonucleotide primer for the detection of SNP TSC0062157
actataatcacc

SEQ ID NO: 377124 - DNA, 12 bp, Artificial Sequence
  Oligonucleotide primer for the detection of SNP TSC0062157
ttattatatata

SEQ ID NO: 377125 - DNA, 12 bp, Artificial Sequence
  Oligonucleotide primer for the detection of SNP TSC0062158
tatatatacacc

SEQ ID NO: 377126 - DNA, 12 bp, Artificial Sequence
  Oligonucleotide primer for the detection of SNP TSC0062158
ttaagttagtta

SEQ ID NO: 377127 - DNA, 12 bp, Artificial Sequence
  Oligonucleotide primer for the detection of SNP TSC0062158
tcaaattaacca

SEQ ID NO: 377128 - DNA, 12 bp, Artificial Sequence
  Oligonucleotide primer for the detection of SNP TSC0062158
tatgtgtatatt

SEQ ID NO: 377129 - DNA, 12 bp, Artificial Sequence
  Oligonucleotide primer for the detection of SNP TSC0062159
acaccaacccta

SEQ ID NO: 377130 - DNA, 12 bp, Artificial Sequence
  Oligonucleotide primer for the detection of SNP TSC0062159
acgccaacccta

SEQ ID NO: 377131 - DNA, 12 bp, Artificial Sequence
  Oligonucleotide primer for the detection of SNP TSC0062159
gaggaggttggt

SEQ ID NO: 377132 - DNA, 12 bp, Artificial Sequence
  Oligonucleotide primer for the detection of SNP TSC0062159
gaggaggtcggt

SEQ ID NO: 377133 - DNA, 12 bp, Artificial Sequence
  Oligonucleotide primer for the detection of SNP TSC0062159
aaaaaaaccgat

SEQ ID NO: 377134 - DNA, 12 bp, Artificial Sequence
  Oligonucleotide primer for the detection of SNP TSC0062159
gaaaaaaccaat

SEQ ID NO: 377135 - DNA, 12 bp, Artificial Sequence
  Oligonucleotide primer for the detection of SNP TSC0062159
gaaaaaaccgat

SEQ ID NO: 377136 - DNA, 12 bp, Artificial Sequence
  Oligonucleotide primer for the detection of SNP TSC0008829
tttttaaataca

SEQ ID NO: 377137 - DNA, 12 bp, Artificial Sequence
  Oligonucleotide primer for the detection of SNP TSC0008829
taagttttgtgt

SEQ ID NO: 377138 - DNA, 12 bp, Artificial Sequence
  Oligonucleotide primer for the detection of SNP TSC0008829
taaaccttatac

SEQ ID NO: 377139 - DNA, 12 bp, Artificial Sequence
  Oligonucleotide primer for the detection of SNP TSC0062160
aattctttttat

SEQ ID NO: 377140 - DNA, 12 bp, Artificial Sequence
  Oligonucleotide primer for the detection of SNP TSC0062160
gtaaaataaaaa

SEQ ID NO: 377141 - DNA, 12 bp, Artificial Sequence
  Oligonucleotide primer for the detection of SNP TSC0062161
gatttagaagta

SEQ ID NO: 377142 - DNA, 12 bp, Artificial Sequence
  Oligonucleotide primer for the detection of SNP TSC0062162
taaacatataca

SEQ ID NO: 377143 - DNA, 12 bp, Artificial Sequence
  Oligonucleotide primer for the detection of SNP TSC0062162
ttataaagatat

SEQ ID NO: 377144 - DNA, 12 bp, Artificial Sequence
  Oligonucleotide primer for the detection of SNP TSC0062162
ttacaaaaacac

SEQ ID NO: 377145 - DNA, 12 bp, Artificial Sequence
  Oligonucleotide primer for the detection of SNP TSC0062162
tgaatatatata

SEQ ID NO: 377146 - DNA, 12 bp, Artificial Sequence
  Oligonucleotide primer for the detection of SNP TSC0062163
ccatcttcccct

SEQ ID NO: 377147 - DNA, 12 bp, Artificial Sequence
  Oligonucleotide primer for the detection of SNP TSC0062163
tggttgataagg

SEQ ID NO: 377148 - DNA, 12 bp, Artificial Sequence
  Oligonucleotide primer for the detection of SNP TSC0062164
ctatataaatat

SEQ ID NO: 377149 - DNA, 12 bp, Artificial Sequence
  Oligonucleotide primer for the detection of SNP TSC0062164
ttggattaggta

SEQ ID NO: 377150 - DNA, 12 bp, Artificial Sequence
  Oligonucleotide primer for the detection of SNP TSC0062165
tataaatattac

SEQ ID NO: 377151 - DNA, 12 bp, Artificial Sequence
  Oligonucleotide primer for the detection of SNP TSC0062166
tttaataaaatc

SEQ ID NO: 377152 - DNA, 12 bp, Artificial Sequence
  Oligonucleotide primer for the detection of SNP TSC0062166
catctacaaaaa

SEQ ID NO: 377153 - DNA, 12 bp, Artificial Sequence
  Oligonucleotide primer for the detection of SNP TSC0062166
tttggtgagatt

SEQ ID NO: 377154 - DNA, 12 bp, Artificial Sequence
  Oligonucleotide primer for the detection of SNP TSC0006612
atatacattctc

SEQ ID NO: 377155 - DNA, 12 bp, Artificial Sequence
  Oligonucleotide primer for the detection of SNP TSC0006612
atatacgttctc

SEQ ID NO: 377156 - DNA, 12 bp, Artificial Sequence
  Oligonucleotide primer for the detection of SNP TSC0006612
catactattcaa

SEQ ID NO: 377157 - DNA, 12 bp, Artificial Sequence
  Oligonucleotide primer for the detection of SNP TSC0006612
cgtactattcaa

SEQ ID NO: 377158 - DNA, 12 bp, Artificial Sequence
  Oligonucleotide primer for the detection of SNP TSC0006612
atgtatgttttt

SEQ ID NO: 377159 - DNA, 12 bp, Artificial Sequence
  Oligonucleotide primer for the detection of SNP TSC0006612
atgtacgttttt

SEQ ID NO: 377160 - DNA, 12 bp, Artificial Sequence
  Oligonucleotide primer for the detection of SNP TSC0062167
aacatttacaaa

SEQ ID NO: 377161 - DNA, 12 bp, Artificial Sequence
  Oligonucleotide primer for the detection of SNP TSC0008791
ccaacccacccc

SEQ ID NO: 377162 - DNA, 12 bp, Artificial Sequence
  Oligonucleotide primer for the detection of SNP TSC0008791
tgggttgggttg

SEQ ID NO: 377163 - DNA, 12 bp, Artificial Sequence
  Oligonucleotide primer for the detection of SNP TSC0008791
tgggtcgggttg

SEQ ID NO: 377164 - DNA, 12 bp, Artificial Sequence
  Oligonucleotide primer for the detection of SNP TSC0062168
aacacacacacc

SEQ ID NO: 377165 - DNA, 12 bp, Artificial Sequence
  Oligonucleotide primer for the detection of SNP TSC0062168
aacacacacgcc

SEQ ID NO: 377166 - DNA, 12 bp, Artificial Sequence
  Oligonucleotide primer for the detection of SNP TSC0062168
aacacacgcacc

SEQ ID NO: 377167 - DNA, 12 bp, Artificial Sequence
  Oligonukleotid-Primer
aacacgcacacc

SEQ ID NO: 377168 - DNA, 12 bp, Artificial Sequence
  Oligonucleotide primer for the detection of SNP TSC0062168
aacacacgcgcc

SEQ ID NO: 377169 - DNA, 12 bp, Artificial Sequence
  Oligonucleotide primer for the detection of SNP TSC0062168
aacacgcacgcc

SEQ ID NO: 377170 - DNA, 12 bp, Artificial Sequence
  Oligonucleotide primer for the detection of SNP TSC0062168
aacacgcgcacc

SEQ ID NO: 377171 - DNA, 12 bp, Artificial Sequence
  Oligonucleotide primer for the detection of SNP TSC0062168
aacacgcgcgcc

SEQ ID NO: 377172 - DNA, 12 bp, Artificial Sequence
  Oligonucleotide primer for the detection of SNP TSC0062168
ttgatagtttat

SEQ ID NO: 377173 - DNA, 12 bp, Artificial Sequence
  Oligonucleotide primer for the detection of SNP TSC0062168
tcgatagtttat

SEQ ID NO: 377174 - DNA, 12 bp, Artificial Sequence
  Oligonucleotide primer for the detection of SNP TSC0062168
ttgatagtttac

SEQ ID NO: 377175 - DNA, 12 bp, Artificial Sequence
  Oligonucleotide primer for the detection of SNP TSC0062168
tcgatagtttac

SEQ ID NO: 377176 - DNA, 12 bp, Artificial Sequence
  Oligonucleotide primer for the detection of SNP TSC0062168
ccaacaatttac

SEQ ID NO: 377177 - DNA, 12 bp, Artificial Sequence
  Oligonucleotide primer for the detection of SNP TSC0062168
ccgacaatttac

SEQ ID NO: 377178 - DNA, 12 bp, Artificial Sequence
  Oligonucleotide primer for the detection of SNP TSC0062168
atatgtgtgttt

SEQ ID NO: 377179 - DNA, 12 bp, Artificial Sequence
  Oligonucleotide primer for the detection of SNP TSC0062168
atacgtgtgttt

SEQ ID NO: 377180 - DNA, 12 bp, Artificial Sequence
  Oligonucleotide primer for the detection of SNP TSC0062168
atatgcgtgttt

SEQ ID NO: 377181 - DNA, 12 bp, Artificial Sequence
  Oligonucleotide primer for the detection of SNP TSC0062168
atatgtgcgttt

SEQ ID NO: 377182 - DNA, 12 bp, Artificial Sequence
  Oligonucleotide primer for the detection of SNP TSC0062168
atacgcgtgttt

SEQ ID NO: 377183 - DNA, 12 bp, Artificial Sequence
  Oligonucleotide primer for the detection of SNP TSC0062168
atacgtgcgttt

SEQ ID NO: 377184 - DNA, 12 bp, Artificial Sequence
  Oligonucleotide primer for the detection of SNP TSC0062168
atatgcgcgttt

SEQ ID NO: 377185 - DNA, 12 bp, Artificial Sequence
  Oligonucleotide primer for the detection of SNP TSC0062168
atacgcgcgttt

SEQ ID NO: 377186 - DNA, 12 bp, Artificial Sequence
  Oligonucleotide primer for the detection of SNP TSC0062169
cttacttcaaaa

SEQ ID NO: 377187 - DNA, 12 bp, Artificial Sequence
  Oligonucleotide primer for the detection of SNP TSC0062169
ttaacaattcct

SEQ ID NO: 377188 - DNA, 12 bp, Artificial Sequence
  Oligonucleotide primer for the detection of SNP TSC0062170
ctaaactctaat

SEQ ID NO: 377189 - DNA, 12 bp, Artificial Sequence
  Oligonucleotide primer for the detection of SNP TSC0062170
aagagaatttag

SEQ ID NO: 377190 - DNA, 12 bp, Artificial Sequence
  Oligonucleotide primer for the detection of SNP TSC0062171
ttttaaaatcta

SEQ ID NO: 377191 - DNA, 12 bp, Artificial Sequence
  Oligonucleotide primer for the detection of SNP TSC0062171
tagaatgtattt

SEQ ID NO: 377192 - DNA, 12 bp, Artificial Sequence
  Oligonucleotide primer for the detection of SNP TSC0062171
tagaacgtattt

SEQ ID NO: 377193 - DNA, 12 bp, Artificial Sequence
  Oligonucleotide primer for the detection of SNP TSC0062171
taaaacatattc

SEQ ID NO: 377194 - DNA, 12 bp, Artificial Sequence
  Oligonucleotide primer for the detection of SNP TSC0062171
taaaacgtattc

SEQ ID NO: 377195 - DNA, 12 bp, Artificial Sequence
  Oligonucleotide primer for the detection of SNP TSC0062172
ataccacaacta

SEQ ID NO: 377196 - DNA, 12 bp, Artificial Sequence
  Oligonucleotide primer for the detection of SNP TSC0062172
aatgttgaattt

SEQ ID NO: 377197 - DNA, 12 bp, Artificial Sequence
  Oligonucleotide primer for the detection of SNP TSC0062172
aatgtcgaattt

SEQ ID NO: 377198 - DNA, 12 bp, Artificial Sequence
  Oligonucleotide primer for the detection of SNP TSC0062172
aataccaaattt

SEQ ID NO: 377199 - DNA, 12 bp, Artificial Sequence
  Oligonucleotide primer for the detection of SNP TSC0062172
aataccgaattt

SEQ ID NO: 377200 - DNA, 12 bp, Artificial Sequence
  Oligonucleotide primer for the detection of SNP TSC0062172
atattatagttg

SEQ ID NO: 377201 - DNA, 12 bp, Artificial Sequence
  Oligonucleotide primer for the detection of SNP TSC0062173
ccatctacattt

SEQ ID NO: 377202 - DNA, 12 bp, Artificial Sequence
  Oligonucleotide primer for the detection of SNP TSC0062173
taagaatgggaa

SEQ ID NO: 377203 - DNA, 12 bp, Artificial Sequence
  Oligonucleotide primer for the detection of SNP TSC0062174
atacccataaaa

SEQ ID NO: 377204 - DNA, 12 bp, Artificial Sequence
  Oligonucleotide primer for the detection of SNP TSC0062174
tacaccattttc

SEQ ID NO: 377205 - DNA, 12 bp, Artificial Sequence
  Oligonucleotide primer for the detection of SNP TSC0062174
atatttatgaag

SEQ ID NO: 377206 - DNA, 12 bp, Artificial Sequence
  Oligonucleotide primer for the detection of SNP TSC0062175
atagtttatttt

SEQ ID NO: 377207 - DNA, 12 bp, Artificial Sequence
  Oligonucleotide primer for the detection of SNP TSC0062175
caattcacttta

SEQ ID NO: 377208 - DNA, 12 bp, Artificial Sequence
  Oligonucleotide primer for the detection of SNP TSC0062175
ttaggagtttga

SEQ ID NO: 377209 - DNA, 12 bp, Artificial Sequence
  Oligonucleotide primer for the detection of SNP TSC0062175
ttaggagttcga

SEQ ID NO: 377210 - DNA, 12 bp, Artificial Sequence
  Oligonucleotide primer for the detection of SNP TSC0062185
ttctaactaaca

SEQ ID NO: 377211 - DNA, 12 bp, Artificial Sequence
  Oligonucleotide primer for the detection of SNP TSC0062185
aaaataccatct

SEQ ID NO: 377212 - DNA, 12 bp, Artificial Sequence
  Oligonucleotide primer for the detection of SNP TSC0062185
ttttaattggta

SEQ ID NO: 377213 - DNA, 12 bp, Artificial Sequence
  Oligonucleotide primer for the detection of SNP TSC0062189
tcctcctttatt

SEQ ID NO: 377214 - DNA, 12 bp, Artificial Sequence
  Oligonucleotide primer for the detection of SNP TSC0062189
atatgaataaag

SEQ ID NO: 377215 - DNA, 12 bp, Artificial Sequence
  Oligonucleotide primer for the detection of SNP TSC0062191
tatgaataaaaa

SEQ ID NO: 377216 - DNA, 12 bp, Artificial Sequence
  Oligonucleotide primer for the detection of SNP TSC0062192
ttcttttatcac

SEQ ID NO: 377217 - DNA, 12 bp, Artificial Sequence
  Oligonucleotide primer for the detection of SNP TSC0062193
atctttaaaaaa

SEQ ID NO: 377218 - DNA, 12 bp, Artificial Sequence
  Oligonucleotide primer for the detection of SNP TSC0062193
tagaattttatt

SEQ ID NO: 377219 - DNA, 12 bp, Artificial Sequence
  Oligonucleotide primer for the detection of SNP TSC0062193
caaaacttcacc

SEQ ID NO: 377220 - DNA, 12 bp, Artificial Sequence
  Oligonucleotide primer for the detection of SNP TSC0062193
atttttgagaag

SEQ ID NO: 377221 - DNA, 12 bp, Artificial Sequence
  Oligonucleotide primer for the detection of SNP TSC0062195
taatttaaagta

SEQ ID NO: 377222 - DNA, 12 bp, Artificial Sequence
  Oligonucleotide primer for the detection of SNP TSC0062198
aaaatacatcta

SEQ ID NO: 377223 - DNA, 12 bp, Artificial Sequence
  Oligonucleotide primer for the detection of SNP TSC0062198
attttctttttt

SEQ ID NO: 377224 - DNA, 12 bp, Artificial Sequence
  Oligonucleotide primer for the detection of SNP TSC0062199
gtgagatgattt

SEQ ID NO: 377225 - DNA, 12 bp, Artificial Sequence
  Oligonucleotide primer for the detection of SNP TSC0062199
atatttatgggt

SEQ ID NO: 377226 - DNA, 12 bp, Artificial Sequence
  Oligonucleotide primer for the detection of SNP TSC0062200
ataataattaca

SEQ ID NO: 377227 - DNA, 12 bp, Artificial Sequence
  Oligonucleotide primer for the detection of SNP TSC0062200
gaaagtttttgt

SEQ ID NO: 377228 - DNA, 12 bp, Artificial Sequence
  Oligonucleotide primer for the detection of SNP TSC0062200
gataatagttat

SEQ ID NO: 377229 - DNA, 12 bp, Artificial Sequence
  Oligonucleotide primer for the detection of SNP TSC0062201
atctcaaataac

SEQ ID NO: 377230 - DNA, 12 bp, Artificial Sequence
  Oligonucleotide primer for the detection of SNP TSC0062201
aaattgtgttag

SEQ ID NO: 377231 - DNA, 12 bp, Artificial Sequence
  Oligonucleotide primer for the detection of SNP TSC0062201
aaatcgtgttag

SEQ ID NO: 377232 - DNA, 12 bp, Artificial Sequence
  Oligonucleotide primer for the detection of SNP TSC0062206
taaaataatatc

SEQ ID NO: 377233 - DNA, 12 bp, Artificial Sequence
  Oligonucleotide primer for the detection of SNP TSC0062206
agttataaaata

SEQ ID NO: 377234 - DNA, 12 bp, Artificial Sequence
  Oligonucleotide primer for the detection of SNP TSC0062207
tttatataactc

SEQ ID NO: 377235 - DNA, 12 bp, Artificial Sequence
  Oligonucleotide primer for the detection of SNP TSC0062207
aagtggaattgt

SEQ ID NO: 377236 - DNA, 12 bp, Artificial Sequence
  Oligonucleotide primer for the detection of SNP TSC0062207
aagtggaattgc

SEQ ID NO: 377237 - DNA, 12 bp, Artificial Sequence
  Oligonucleotide primer for the detection of SNP TSC0062208
aagtgtaaataa

SEQ ID NO: 377238 - DNA, 12 bp, Artificial Sequence
  Oligonucleotide primer for the detection of SNP TSC0010490
ttatatgtttgt

SEQ ID NO: 377239 - DNA, 12 bp, Artificial Sequence
  Oligonucleotide primer for the detection of SNP TSC0010490
ttatacgtttgt

SEQ ID NO: 377240 - DNA, 12 bp, Artificial Sequence
  Oligonucleotide primer for the detection of SNP TSC0010490
ttacacatttat

SEQ ID NO: 377241 - DNA, 12 bp, Artificial Sequence
  Oligonucleotide primer for the detection of SNP TSC0010490
ttacacgtttat

SEQ ID NO: 377242 - DNA, 12 bp, Artificial Sequence
  Oligonucleotide primer for the detection of SNP TSC0010490
atttttgaaaag

SEQ ID NO: 377243 - DNA, 12 bp, Artificial Sequence
  Oligonucleotide primer for the detection of SNP TSC0062211
aaaatcatataa

SEQ ID NO: 377244 - DNA, 12 bp, Artificial Sequence
  Oligonucleotide primer for the detection of SNP TSC0062211
ttttaggttatt

SEQ ID NO: 377245 - DNA, 12 bp, Artificial Sequence
  Oligonucleotide primer for the detection of SNP TSC0062211
tctcaaaccatt

SEQ ID NO: 377246 - DNA, 12 bp, Artificial Sequence
  Oligonucleotide primer for the detection of SNP TSC0062211
agagttatgtaa

SEQ ID NO: 377247 - DNA, 12 bp, Artificial Sequence
  Oligonucleotide primer for the detection of SNP TSC0062213
tgaggtttttta

SEQ ID NO: 377248 - DNA, 12 bp, Artificial Sequence
  Oligonucleotide primer for the detection of SNP TSC0006687
tctatcctctat

SEQ ID NO: 377249 - DNA, 12 bp, Artificial Sequence
  Oligonucleotide primer for the detection of SNP TSC0062216
tttttttgagag

SEQ ID NO: 377250 - DNA, 12 bp, Artificial Sequence
  Oligonucleotide primer for the detection of SNP TSC0062216
ttcctctaaaaa

SEQ ID NO: 377251 - DNA, 12 bp, Artificial Sequence
  Oligonucleotide primer for the detection of SNP TSC0062216
attgggggtgtt

SEQ ID NO: 377252 - DNA, 12 bp, Artificial Sequence
  Oligonucleotide primer for the detection of SNP TSC0062216
attgggggtgtc

SEQ ID NO: 377253 - DNA, 12 bp, Artificial Sequence
  Oligonucleotide primer for the detection of SNP TSC0062217
agtggtaggtgg

SEQ ID NO: 377254 - DNA, 12 bp, Artificial Sequence
  Oligonucleotide primer for the detection of SNP TSC0062218
tacatctaaaat

SEQ ID NO: 377255 - DNA, 12 bp, Artificial Sequence
  Oligonucleotide primer for the detection of SNP TSC0062218
atgaaatagaaa

SEQ ID NO: 377256 - DNA, 12 bp, Artificial Sequence
  Oligonucleotide primer for the detection of SNP TSC0062219
acaactttacac

SEQ ID NO: 377257 - DNA, 12 bp, Artificial Sequence
  Oligonucleotide primer for the detection of SNP TSC0062219
agagttataaaa

SEQ ID NO: 377258 - DNA, 12 bp, Artificial Sequence
  Oligonucleotide primer for the detection of SNP TSC0062219
atagttttgtat

SEQ ID NO: 377259 - DNA, 12 bp, Artificial Sequence
  Oligonucleotide primer for the detection of SNP TSC0062220
tttataatctac

SEQ ID NO: 377260 - DNA, 12 bp, Artificial Sequence
  Oligonucleotide primer for the detection of SNP TSC0062220
atattatagtga

SEQ ID NO: 377261 - DNA, 12 bp, Artificial Sequence
  Oligonucleotide primer for the detection of SNP TSC0062220
acactacaataa

SEQ ID NO: 377262 - DNA, 12 bp, Artificial Sequence
  Oligonucleotide primer for the detection of SNP TSC0062220
tttgtagtttgt

SEQ ID NO: 377263 - DNA, 12 bp, Artificial Sequence
  Oligonucleotide primer for the detection of SNP TSC0062227
ttaaaaaacttc

SEQ ID NO: 377264 - DNA, 12 bp, Artificial Sequence
  Oligonucleotide primer for the detection of SNP TSC0062227
tttaaaacttac

SEQ ID NO: 377265 - DNA, 12 bp, Artificial Sequence
  Oligonucleotide primer for the detection of SNP TSC0062227
ttgggaaatttt

SEQ ID NO: 377266 - DNA, 12 bp, Artificial Sequence
  Oligonucleotide primer for the detection of SNP TSC0062227
ttgggaaatttc

SEQ ID NO: 377267 - DNA, 12 bp, Artificial Sequence
  Oligonucleotide primer for the detection of SNP TSC0062232
acttattaacaa

SEQ ID NO: 377268 - DNA, 12 bp, Artificial Sequence
  Oligonucleotide primer for the detection of SNP TSC0062232
taagagtattgt

SEQ ID NO: 377269 - DNA, 12 bp, Artificial Sequence
  Oligonucleotide primer for the detection of SNP TSC0062236
aaatttatctac

SEQ ID NO: 377270 - DNA, 12 bp, Artificial Sequence
  Oligonucleotide primer for the detection of SNP TSC0062236
agagtaagtttt

SEQ ID NO: 377271 - DNA, 12 bp, Artificial Sequence
  Oligonucleotide primer for the detection of SNP TSC0062236
aaacaaacttca

SEQ ID NO: 377272 - DNA, 12 bp, Artificial Sequence
  Oligonucleotide primer for the detection of SNP TSC0062237
tattaataaact

SEQ ID NO: 377273 - DNA, 12 bp, Artificial Sequence
  Oligonucleotide primer for the detection of SNP TSC0062237
ttatttagttga

SEQ ID NO: 377274 - DNA, 12 bp, Artificial Sequence
  Oligonucleotide primer for the detection of SNP TSC0062238
cttataattttt

SEQ ID NO: 377275 - DNA, 12 bp, Artificial Sequence
  Oligonucleotide primer for the detection of SNP TSC0062239
ccccaaaactct

SEQ ID NO: 377276 - DNA, 12 bp, Artificial Sequence
  Oligonucleotide primer for the detection of SNP TSC0062239
ttggtgttttga

SEQ ID NO: 377277 - DNA, 12 bp, Artificial Sequence
  Oligonucleotide primer for the detection of SNP TSC0062240
tagatttttaag

SEQ ID NO: 377278 - DNA, 12 bp, Artificial Sequence
  Oligonucleotide primer for the detection of SNP TSC0062240
gttttgagagag

SEQ ID NO: 377279 - DNA, 12 bp, Artificial Sequence
  Oligonucleotide primer for the detection of SNP TSC0062241
atctctaaccac

SEQ ID NO: 377280 - DNA, 12 bp, Artificial Sequence
  Oligonucleotide primer for the detection of SNP TSC0062241
tagtggtagtgg

SEQ ID NO: 377281 - DNA, 12 bp, Artificial Sequence
  Oligonucleotide primer for the detection of SNP TSC0062241
atttttagttat

SEQ ID NO: 377282 - DNA, 12 bp, Artificial Sequence
  Oligonucleotide primer for the detection of SNP TSC0062244
ttgtttggatgg

SEQ ID NO: 377283 - DNA, 12 bp, Artificial Sequence
  Oligonucleotide primer for the detection of SNP TSC0062244
ctatctaaataa

SEQ ID NO: 377284 - DNA, 12 bp, Artificial Sequence
  Oligonucleotide primer for the detection of SNP TSC0062245
aattttttggta

SEQ ID NO: 377285 - DNA, 12 bp, Artificial Sequence
  Oligonucleotide primer for the detection of SNP TSC0062245
aatttttcggta

SEQ ID NO: 377286 - DNA, 12 bp, Artificial Sequence
  Oligonucleotide primer for the detection of SNP TSC0062246
atagattaatat

SEQ ID NO: 377287 - DNA, 12 bp, Artificial Sequence
  Oligonucleotide primer for the detection of SNP TSC0062246
aaaggttttaat

SEQ ID NO: 377288 - DNA, 12 bp, Artificial Sequence
  Oligonucleotide primer for the detection of SNP TSC0008153
tatacacactca

SEQ ID NO: 377289 - DNA, 12 bp, Artificial Sequence
  Oligonucleotide primer for the detection of SNP TSC0008153
ataatagtaaat

SEQ ID NO: 377290 - DNA, 12 bp, Artificial Sequence
  Oligonucleotide primer for the detection of SNP TSC0008153
atgtgtatattt

SEQ ID NO: 377291 - DNA, 12 bp, Artificial Sequence
  Oligonucleotide primer for the detection of SNP TSC0062248
tatccttacaat

SEQ ID NO: 377292 - DNA, 12 bp, Artificial Sequence
  Oligonucleotide primer for the detection of SNP TSC0062248
ttagaggaatgg

SEQ ID NO: 377293 - DNA, 12 bp, Artificial Sequence
  Oligonucleotide primer for the detection of SNP TSC0062248
ttagaggaacgg

SEQ ID NO: 377294 - DNA, 12 bp, Artificial Sequence
  Oligonucleotide primer for the detection of SNP TSC0062249
tacacatatata

SEQ ID NO: 377295 - DNA, 12 bp, Artificial Sequence
  Oligonucleotide primer for the detection of SNP TSC0062249
tatctctctctc

SEQ ID NO: 377296 - DNA, 12 bp, Artificial Sequence
  Oligonucleotide primer for the detection of SNP TSC0062251
aaattaacaatt

SEQ ID NO: 377297 - DNA, 12 bp, Artificial Sequence
  Oligonucleotide primer for the detection of SNP TSC0062252
atatactctata

SEQ ID NO: 377298 - DNA, 12 bp, Artificial Sequence
  Oligonucleotide primer for the detection of SNP TSC0062252
atatgttttgta

SEQ ID NO: 377299 - DNA, 12 bp, Artificial Sequence
  Oligonucleotide primer for the detection of SNP TSC0006720
gatgttatttga

SEQ ID NO: 377300 - DNA, 12 bp, Artificial Sequence
  Oligonucleotide primer for the detection of SNP TSC0062253
gtaagttatttt

SEQ ID NO: 377301 - DNA, 12 bp, Artificial Sequence
  Oligonucleotide primer for the detection of SNP TSC0062253
caacaaaccacc

SEQ ID NO: 377302 - DNA, 12 bp, Artificial Sequence
  Oligonucleotide primer for the detection of SNP TSC0062253
aagttatgttat

SEQ ID NO: 377303 - DNA, 12 bp, Artificial Sequence
  Oligonucleotide primer for the detection of SNP TSC0062253
aagttatgttac

SEQ ID NO: 377304 - DNA, 12 bp, Artificial Sequence
  Oligonucleotide primer for the detection of SNP TSC0062254
atggtaaatgaa

SEQ ID NO: 377305 - DNA, 12 bp, Artificial Sequence
  Oligonucleotide primer for the detection of SNP TSC0062254
atggtaaacgaa

SEQ ID NO: 377306 - DNA, 12 bp, Artificial Sequence
  Oligonucleotide primer for the detection of SNP TSC0062254
gttaaaggattt

SEQ ID NO: 377307 - DNA, 12 bp, Artificial Sequence
  Oligonucleotide primer for the detection of SNP TSC0062255
taaacactacac

SEQ ID NO: 377308 - DNA, 12 bp, Artificial Sequence
  Oligonucleotide primer for the detection of SNP TSC0062257
agtgatgtgtat

SEQ ID NO: 377309 - DNA, 12 bp, Artificial Sequence
  Oligonucleotide primer for the detection of SNP TSC0007555
ctattaaataca

SEQ ID NO: 377310 - DNA, 12 bp, Artificial Sequence
  Oligonucleotide primer for the detection of SNP TSC0007555
ttataaatatgt

SEQ ID NO: 377311 - DNA, 12 bp, Artificial Sequence
  Oligonucleotide primer for the detection of SNP TSC0062260
tatactactacc

SEQ ID NO: 377312 - DNA, 12 bp, Artificial Sequence
  Oligonucleotide primer for the detection of SNP TSC0062260
caaaacaccaaa

SEQ ID NO: 377313 - DNA, 12 bp, Artificial Sequence
  Oligonucleotide primer for the detection of SNP TSC0062261
ccaaaaaacata

SEQ ID NO: 377314 - DNA, 12 bp, Artificial Sequence
  Oligonucleotide primer for the detection of SNP TSC0062261
gggtaagtatta

SEQ ID NO: 377315 - DNA, 12 bp, Artificial Sequence
  Oligonucleotide primer for the detection of SNP TSC0062261
aaacaaacatca

SEQ ID NO: 377316 - DNA, 12 bp, Artificial Sequence
  Oligonucleotide primer for the detection of SNP TSC0007840
ttcctaatctac

SEQ ID NO: 377317 - DNA, 12 bp, Artificial Sequence
  Oligonucleotide primer for the detection of SNP TSC0007840
tattagtaagat

SEQ ID NO: 377318 - DNA, 12 bp, Artificial Sequence
  Oligonucleotide primer for the detection of SNP TSC0007840
acattaacaaaa

SEQ ID NO: 377319 - DNA, 12 bp, Artificial Sequence
  Oligonucleotide primer for the detection of SNP TSC0007840
tttttagtttgc

SEQ ID NO: 377320 - DNA, 12 bp, Artificial Sequence
  Oligonucleotide primer for the detection of SNP TSC0007841
tcaactccatcc

SEQ ID NO: 377321 - DNA, 12 bp, Artificial Sequence
  Oligonucleotide primer for the detection of SNP TSC0007841
ataatagaaaag

SEQ ID NO: 377322 - DNA, 12 bp, Artificial Sequence
  Oligonucleotide primer for the detection of SNP TSC0062265
aaataagtttat

SEQ ID NO: 377323 - DNA, 12 bp, Artificial Sequence
  Oligonucleotide primer for the detection of SNP TSC0062265
aaataaacccat

SEQ ID NO: 377324 - DNA, 12 bp, Artificial Sequence
  Oligonucleotide primer for the detection of SNP TSC0007083
atacataaataa

SEQ ID NO: 377325 - DNA, 12 bp, Artificial Sequence
  Oligonucleotide primer for the detection of SNP TSC0007083
acatttcaaaat

SEQ ID NO: 377326 - DNA, 12 bp, Artificial Sequence
  Oligonucleotide primer for the detection of SNP TSC0007083
taatatataaat

SEQ ID NO: 377327 - DNA, 12 bp, Artificial Sequence
  Oligonucleotide primer for the detection of SNP TSC0062266
aaagatattttg

SEQ ID NO: 377328 - DNA, 12 bp, Artificial Sequence
  Oligonucleotide primer for the detection of SNP TSC0062266
agtaagagtttt

SEQ ID NO: 377329 - DNA, 12 bp, Artificial Sequence
  Oligonucleotide primer for the detection of SNP TSC0062266
agtaagagtttc

SEQ ID NO: 377330 - DNA, 12 bp, Artificial Sequence
  Oligonucleotide primer for the detection of SNP TSC0062269
ttagtatttaag

SEQ ID NO: 377331 - DNA, 12 bp, Artificial Sequence
  Oligonucleotide primer for the detection of SNP TSC0062271
aatacaaaatta

SEQ ID NO: 377332 - DNA, 12 bp, Artificial Sequence
  Oligonucleotide primer for the detection of SNP TSC0062271
aaatgtaaaatt

SEQ ID NO: 377333 - DNA, 12 bp, Artificial Sequence
  Oligonucleotide primer for the detection of SNP TSC0062275
aacaacatacta

SEQ ID NO: 377334 - DNA, 12 bp, Artificial Sequence
  Oligonucleotide primer for the detection of SNP TSC0062275
tgtataattttg

SEQ ID NO: 377335 - DNA, 12 bp, Artificial Sequence
  Oligonucleotide primer for the detection of SNP TSC0062277
tctccctctact

SEQ ID NO: 377336 - DNA, 12 bp, Artificial Sequence
  Oligonucleotide primer for the detection of SNP TSC0062277
agaggatagatg

SEQ ID NO: 377337 - DNA, 12 bp, Artificial Sequence
  Oligonucleotide primer for the detection of SNP TSC0006712
tcccccaacccc

SEQ ID NO: 377338 - DNA, 12 bp, Artificial Sequence
  Oligonucleotide primer for the detection of SNP TSC0006712
taagttgttatg

SEQ ID NO: 377339 - DNA, 12 bp, Artificial Sequence
  Oligonucleotide primer for the detection of SNP TSC0006712
taaactactata

SEQ ID NO: 377340 - DNA, 12 bp, Artificial Sequence
  Oligonucleotide primer for the detection of SNP TSC0062278
agtgtttttgga

SEQ ID NO: 377341 - DNA, 12 bp, Artificial Sequence
  Oligonucleotide primer for the detection of SNP TSC0062278
agcgtttttgga

SEQ ID NO: 377342 - DNA, 12 bp, Artificial Sequence
  Oligonucleotide primer for the detection of SNP TSC0062278
aacattcctaaa

SEQ ID NO: 377343 - DNA, 12 bp, Artificial Sequence
  Oligonucleotide primer for the detection of SNP TSC0062278
aacgttcctaaa

SEQ ID NO: 377344 - DNA, 12 bp, Artificial Sequence
  Oligonucleotide primer for the detection of SNP TSC0062278
attgagaaattt

SEQ ID NO: 377345 - DNA, 12 bp, Artificial Sequence
  Oligonucleotide primer for the detection of SNP TSC0062284
aaccgtttaaac

SEQ ID NO: 377346 - DNA, 12 bp, Artificial Sequence
  Oligonucleotide primer for the detection of SNP TSC0062284
taaagatttgag

SEQ ID NO: 377347 - DNA, 12 bp, Artificial Sequence
  Oligonucleotide primer for the detection of SNP TSC0062287
tccaaaaaatta

SEQ ID NO: 377348 - DNA, 12 bp, Artificial Sequence
  Oligonucleotide primer for the detection of SNP TSC0062287
gtgatttatatt

SEQ ID NO: 377349 - DNA, 12 bp, Artificial Sequence
  Oligonucleotide primer for the detection of SNP TSC0062287
taactcatacta

SEQ ID NO: 377350 - DNA, 12 bp, Artificial Sequence
  Oligonucleotide primer for the detection of SNP TSC0062287
tttagaaggtta

SEQ ID NO: 377351 - DNA, 12 bp, Artificial Sequence
  Oligonucleotide primer for the detection of SNP TSC0000899
ttagaagaaata

SEQ ID NO: 377352 - DNA, 12 bp, Artificial Sequence
  Oligonucleotide primer for the detection of SNP TSC0000899
tattgatttgag

SEQ ID NO: 377353 - DNA, 12 bp, Artificial Sequence
  Oligonucleotide primer for the detection of SNP TSC0062290
aatgtttttgtg

SEQ ID NO: 377354 - DNA, 12 bp, Artificial Sequence
  Oligonucleotide primer for the detection of SNP TSC0000314
tacaactaaaat

SEQ ID NO: 377355 - DNA, 12 bp, Artificial Sequence
  Oligonucleotide primer for the detection of SNP TSC0000314
gttgttttttta

SEQ ID NO: 377356 - DNA, 12 bp, Artificial Sequence
  Oligonucleotide primer for the detection of SNP TSC0010010
gttgtgtgagat

SEQ ID NO: 377357 - DNA, 12 bp, Artificial Sequence
  Oligonucleotide primer for the detection of SNP TSC0010010
gtcgtgtgagat

SEQ ID NO: 377358 - DNA, 12 bp, Artificial Sequence
  Oligonucleotide primer for the detection of SNP TSC0010011
taaataataacc

SEQ ID NO: 377359 - DNA, 12 bp, Artificial Sequence
  Oligonucleotide primer for the detection of SNP TSC0010011
aatagattaata

SEQ ID NO: 377360 - DNA, 12 bp, Artificial Sequence
  Oligonucleotide primer for the detection of SNP TSC0010011
tgaatggtaatt

SEQ ID NO: 377361 - DNA, 12 bp, Artificial Sequence
  Oligonucleotide primer for the detection of SNP TSC0062291
tgttgtgtgaga

SEQ ID NO: 377362 - DNA, 12 bp, Artificial Sequence
  Oligonucleotide primer for the detection of SNP TSC0062291
tgtcgtgtgaga

SEQ ID NO: 377363 - DNA, 12 bp, Artificial Sequence
  Oligonucleotide primer for the detection of SNP TSC0062291
taccatataaaa

SEQ ID NO: 377364 - DNA, 12 bp, Artificial Sequence
  Oligonucleotide primer for the detection of SNP TSC0062291
taccgtataaaa

SEQ ID NO: 377365 - DNA, 12 bp, Artificial Sequence
  Oligonucleotide primer for the detection of SNP TSC0062291
aaggtgaaaggt

SEQ ID NO: 377366 - DNA, 12 bp, Artificial Sequence
  Oligonucleotide primer for the detection of SNP TSC0000923
tctcctaacact

SEQ ID NO: 377367 - DNA, 12 bp, Artificial Sequence
  Oligonucleotide primer for the detection of SNP TSC0000923
gatatagttaag

SEQ ID NO: 377368 - DNA, 12 bp, Artificial Sequence
  Oligonucleotide primer for the detection of SNP TSC0000145
acaaatacctat

SEQ ID NO: 377369 - DNA, 12 bp, Artificial Sequence
  Oligonucleotide primer for the detection of SNP TSC0000145
ttaggtagttgg

SEQ ID NO: 377370 - DNA, 12 bp, Artificial Sequence
  Oligonucleotide primer for the detection of SNP TSC0062292
atcaccactaca

SEQ ID NO: 377371 - DNA, 12 bp, Artificial Sequence
  Oligonucleotide primer for the detection of SNP TSC0062292
tgttattgaggt

SEQ ID NO: 377372 - DNA, 12 bp, Artificial Sequence
  Oligonucleotide primer for the detection of SNP TSC0062292
tatcactaaaac

SEQ ID NO: 377373 - DNA, 12 bp, Artificial Sequence
  Oligonucleotide primer for the detection of SNP TSC0062292
attattattata

SEQ ID NO: 377374 - DNA, 12 bp, Artificial Sequence
  Oligonucleotide primer for the detection of SNP TSC0062293
ttattggaattt

SEQ ID NO: 377375 - DNA, 12 bp, Artificial Sequence
  Oligonucleotide primer for the detection of SNP TSC0062293
cattaaaattta

SEQ ID NO: 377376 - DNA, 12 bp, Artificial Sequence
  Oligonukleotid-Primer
gggtagggttat

SEQ ID NO: 377377 - DNA, 12 bp, Artificial Sequence
  Oligonucleotide primer for the detection of SNP TSC0062294
gttattgaggtt

SEQ ID NO: 377378 - DNA, 12 bp, Artificial Sequence
  Oligonucleotide primer for the detection of SNP TSC0062295
cacacacaaaca

SEQ ID NO: 377379 - DNA, 12 bp, Artificial Sequence
  Oligonucleotide primer for the detection of SNP TSC0062296
tctactaaaatc

SEQ ID NO: 377380 - DNA, 12 bp, Artificial Sequence
  Oligonucleotide primer for the detection of SNP TSC0062296
gttttaaagtga

SEQ ID NO: 377381 - DNA, 12 bp, Artificial Sequence
  Oligonucleotide primer for the detection of SNP TSC0062296
tttgttgaaatt

SEQ ID NO: 377382 - DNA, 12 bp, Artificial Sequence
  Oligonucleotide primer for the detection of SNP TSC0062298
taacttcaattc

SEQ ID NO: 377383 - DNA, 12 bp, Artificial Sequence
  Oligonucleotide primer for the detection of SNP TSC0062298
ttaaaataggta

SEQ ID NO: 377384 - DNA, 12 bp, Artificial Sequence
  Oligonucleotide primer for the detection of SNP TSC0062299
tttaaactacct

SEQ ID NO: 377385 - DNA, 12 bp, Artificial Sequence
  Oligonucleotide primer for the detection of SNP TSC0062299
ttttgggtaggg

SEQ ID NO: 377386 - DNA, 12 bp, Artificial Sequence
  Oligonucleotide primer for the detection of SNP TSC0062300
tattttttgtga

SEQ ID NO: 377387 - DNA, 12 bp, Artificial Sequence
  Oligonucleotide primer for the detection of SNP TSC0062300
acttcctataaa

SEQ ID NO: 377388 - DNA, 12 bp, Artificial Sequence
  Oligonukleotid-Primer
aaagggttgagt

SEQ ID NO: 377389 - DNA, 12 bp, Artificial Sequence
  Oligonucleotide primer for the detection of SNP TSC0062301
tcacaataatat

SEQ ID NO: 377390 - DNA, 12 bp, Artificial Sequence
  Oligonucleotide primer for the detection of SNP TSC0062301
tggaggtgatga

SEQ ID NO: 377391 - DNA, 12 bp, Artificial Sequence
  Oligonucleotide primer for the detection of SNP TSC0062301
ttataatggtgt

SEQ ID NO: 377392 - DNA, 12 bp, Artificial Sequence
  Oligonukleotid-Primer
cgtataaataaa

SEQ ID NO: 377393 - DNA, 12 bp, Artificial Sequence
  Oligonucleotide primer for the detection of SNP TSC0004546
ccttaaaaataa

SEQ ID NO: 377394 - DNA, 12 bp, Artificial Sequence
  Oligonucleotide primer for the detection of SNP TSC0004546
aaatttgaaatg

SEQ ID NO: 377395 - DNA, 12 bp, Artificial Sequence
  Oligonucleotide primer for the detection of SNP TSC0004546
aaattcgaaatg

SEQ ID NO: 377396 - DNA, 12 bp, Artificial Sequence
  Oligonucleotide primer for the detection of SNP TSC0004546
aaacccaaaata

SEQ ID NO: 377397 - DNA, 12 bp, Artificial Sequence
  Oligonucleotide primer for the detection of SNP TSC0004546
aaacccgaaata

SEQ ID NO: 377398 - DNA, 12 bp, Artificial Sequence
  Oligonucleotide primer for the detection of SNP TSC0004546
ttttagagatga

SEQ ID NO: 377399 - DNA, 12 bp, Artificial Sequence
  Oligonucleotide primer for the detection of SNP TSC0010447
ccccttcttaat

SEQ ID NO: 377400 - DNA, 12 bp, Artificial Sequence
  Oligonucleotide primer for the detection of SNP TSC0010447
tagtttttatga

SEQ ID NO: 377401 - DNA, 12 bp, Artificial Sequence
  Oligonucleotide primer for the detection of SNP TSC0010447
tagtttttacga

SEQ ID NO: 377402 - DNA, 12 bp, Artificial Sequence
  Oligonucleotide primer for the detection of SNP TSC0010447
ttttttttgatc

SEQ ID NO: 377403 - DNA, 12 bp, Artificial Sequence
  Oligonucleotide primer for the detection of SNP TSC0062311
ttaatcatatca

SEQ ID NO: 377404 - DNA, 12 bp, Artificial Sequence
  Oligonukleotid-Primer
ggataaattgaa

SEQ ID NO: 377405 - DNA, 12 bp, Artificial Sequence
  Oligonucleotide primer for the detection of SNP TSC0062312
cactaatctttt

SEQ ID NO: 377406 - DNA, 12 bp, Artificial Sequence
  Oligonucleotide primer for the detection of SNP TSC0062312
ttatggaggtaa

SEQ ID NO: 377407 - DNA, 12 bp, Artificial Sequence
  Oligonucleotide primer for the detection of SNP TSC0062313
taacattactaa

SEQ ID NO: 377408 - DNA, 12 bp, Artificial Sequence
  Oligonukleotid-Primer
ttcattataaaa

SEQ ID NO: 377409 - DNA, 12 bp, Artificial Sequence
  Oligonucleotide primer for the detection of SNP TSC0062313
taatattgttga

SEQ ID NO: 377410 - DNA, 12 bp, Artificial Sequence
  Oligonucleotide primer for the detection of SNP TSC0004619
ttaaactctaat

SEQ ID NO: 377411 - DNA, 12 bp, Artificial Sequence
  Oligonucleotide primer for the detection of SNP TSC0062314
ctaaactatatt

SEQ ID NO: 377412 - DNA, 12 bp, Artificial Sequence
  Oligonukleotid-Primer
tccaaatctttt

SEQ ID NO: 377413 - DNA, 12 bp, Artificial Sequence
  Oligonucleotide primer for the detection of SNP TSC0062314
ttgggttgtgtt

SEQ ID NO: 377414 - DNA, 12 bp, Artificial Sequence
  Oligonucleotide primer for the detection of SNP TSC0062316
acataccattat

SEQ ID NO: 377415 - DNA, 12 bp, Artificial Sequence
  Oligonucleotide primer for the detection of SNP TSC0062317
ttctttatatat

SEQ ID NO: 377416 - DNA, 12 bp, Artificial Sequence
  Oligonukleotid-Primer
tataaatttatg

SEQ ID NO: 377417 - DNA, 12 bp, Artificial Sequence
  Oligonucleotide primer for the detection of SNP TSC0062318
caatttacttaa

SEQ ID NO: 377418 - DNA, 12 bp, Artificial Sequence
  Oligonucleotide primer for the detection of SNP TSC0062318
gtgaggtagagg

SEQ ID NO: 377419 - DNA, 12 bp, Artificial Sequence
  Oligonucleotide primer for the detection of SNP TSC0062319
taccaatttaca

SEQ ID NO: 377420 - DNA, 12 bp, Artificial Sequence
  Oligonukleotid-Primer
tcttttttttcc

SEQ ID NO: 377421 - DNA, 12 bp, Artificial Sequence
  Oligonucleotide primer for the detection of SNP TSC0062319
gtgttaatttat

SEQ ID NO: 377422 - DNA, 12 bp, Artificial Sequence
  Oligonucleotide primer for the detection of SNP TSC0062323
tatatttttact

SEQ ID NO: 377423 - DNA, 12 bp, Artificial Sequence
  Oligonucleotide primer for the detection of SNP TSC0062323
gtgttagtaata

SEQ ID NO: 377424 - DNA, 12 bp, Artificial Sequence
  Oligonucleotide primer for the detection of SNP TSC0062323
gcgttagtaata

SEQ ID NO: 377425 - DNA, 12 bp, Artificial Sequence
  Oligonucleotide primer for the detection of SNP TSC0062323
acactaataaca

SEQ ID NO: 377426 - DNA, 12 bp, Artificial Sequence
  Oligonucleotide primer for the detection of SNP TSC0062323
acgctaataaca

SEQ ID NO: 377427 - DNA, 12 bp, Artificial Sequence
  Oligonucleotide primer for the detection of SNP TSC0062326
tccaacacatct

SEQ ID NO: 377428 - DNA, 12 bp, Artificial Sequence
  Oligonucleotide primer for the detection of SNP TSC0006235
aatcactaaact

SEQ ID NO: 377429 - DNA, 12 bp, Artificial Sequence
  Oligonucleotide primer for the detection of SNP TSC0006235
aatcgctaaact

SEQ ID NO: 377430 - DNA, 12 bp, Artificial Sequence
  Oligonucleotide primer for the detection of SNP TSC0006235
atggtttaatta

SEQ ID NO: 377431 - DNA, 12 bp, Artificial Sequence
  Oligonucleotide primer for the detection of SNP TSC0006235
ataatccaacca

SEQ ID NO: 377432 - DNA, 12 bp, Artificial Sequence
  Oligonucleotide primer for the detection of SNP TSC0006235
agttgttggatt

SEQ ID NO: 377433 - DNA, 12 bp, Artificial Sequence
  Oligonucleotide primer for the detection of SNP TSC0006235
agtcgttggatt

SEQ ID NO: 377434 - DNA, 12 bp, Artificial Sequence
  Oligonucleotide primer for the detection of SNP TSC0062329
gttgaggtatga

SEQ ID NO: 377435 - DNA, 12 bp, Artificial Sequence
  Oligonucleotide primer for the detection of SNP TSC0062329
gttgaggtacga

SEQ ID NO: 377436 - DNA, 12 bp, Artificial Sequence
  Oligonucleotide primer for the detection of SNP TSC0062330
ccaccaaatcaa

SEQ ID NO: 377437 - DNA, 12 bp, Artificial Sequence
  Oligonucleotide primer for the detection of SNP TSC0062330
ccgccaaatcaa

SEQ ID NO: 377438 - DNA, 12 bp, Artificial Sequence
  Oligonucleotide primer for the detection of SNP TSC0062330
ggggtttatagt

SEQ ID NO: 377439 - DNA, 12 bp, Artificial Sequence
  Oligonucleotide primer for the detection of SNP TSC0062330
aaaacctacaac

SEQ ID NO: 377440 - DNA, 12 bp, Artificial Sequence
  Oligonucleotide primer for the detection of SNP TSC0062330
ttgttaagttag

SEQ ID NO: 377441 - DNA, 12 bp, Artificial Sequence
  Oligonucleotide primer for the detection of SNP TSC0062330
tcgttaagttag

SEQ ID NO: 377442 - DNA, 12 bp, Artificial Sequence
  Oligonucleotide primer for the detection of SNP TSC0062331
aataggtaatat

SEQ ID NO: 377443 - DNA, 12 bp, Artificial Sequence
  Oligonucleotide primer for the detection of SNP TSC0062331
aaaaggttttga

SEQ ID NO: 377444 - DNA, 12 bp, Artificial Sequence
  Oligonucleotide primer for the detection of SNP TSC0062332
aaggttagttaa

SEQ ID NO: 377445 - DNA, 12 bp, Artificial Sequence
  Oligonucleotide primer for the detection of SNP TSC0062332
aaaaccaattaa

SEQ ID NO: 377446 - DNA, 12 bp, Artificial Sequence
  Oligonucleotide primer for the detection of SNP TSC0062332
tattatttatat

SEQ ID NO: 377447 - DNA, 12 bp, Artificial Sequence
  Oligonucleotide primer for the detection of SNP TSC0062333
aatctaatcaat

SEQ ID NO: 377448 - DNA, 12 bp, Artificial Sequence
  Oligonucleotide primer for the detection of SNP TSC0062333
atagatgagagt

SEQ ID NO: 377449 - DNA, 12 bp, Artificial Sequence
  Oligonucleotide primer for the detection of SNP TSC0062333
gatttggttagt

SEQ ID NO: 377450 - DNA, 12 bp, Artificial Sequence
  Oligonucleotide primer for the detection of SNP TSC0008187
cttccactataa

SEQ ID NO: 377451 - DNA, 12 bp, Artificial Sequence
  Oligonucleotide primer for the detection of SNP TSC0008187
cctccaaaaaaa

SEQ ID NO: 377452 - DNA, 12 bp, Artificial Sequence
  Oligonucleotide primer for the detection of SNP TSC0062334
tggttttgttga

SEQ ID NO: 377453 - DNA, 12 bp, Artificial Sequence
  Oligonucleotide primer for the detection of SNP TSC0062339
atttataacatc

SEQ ID NO: 377454 - DNA, 12 bp, Artificial Sequence
  Oligonucleotide primer for the detection of SNP TSC0062339
attgtgtgtttg

SEQ ID NO: 377455 - DNA, 12 bp, Artificial Sequence
  Oligonucleotide primer for the detection of SNP TSC0062339
attgcgtgtttg

SEQ ID NO: 377456 - DNA, 12 bp, Artificial Sequence
  Oligonucleotide primer for the detection of SNP TSC0009115
ttttttttcaac

SEQ ID NO: 377457 - DNA, 12 bp, Artificial Sequence
  Oligonucleotide primer for the detection of SNP TSC0009115
ttttaaagtaag

SEQ ID NO: 377458 - DNA, 12 bp, Artificial Sequence
  Oligonucleotide primer for the detection of SNP TSC0062341
ttgtatgtgata

SEQ ID NO: 377459 - DNA, 12 bp, Artificial Sequence
  Oligonucleotide primer for the detection of SNP TSC0008513
aaaaattctacc

SEQ ID NO: 377460 - DNA, 12 bp, Artificial Sequence
  Oligonucleotide primer for the detection of SNP TSC0062342
ctccctttctct

SEQ ID NO: 377461 - DNA, 12 bp, Artificial Sequence
  Oligonucleotide primer for the detection of SNP TSC0062342
aagagaaataga

SEQ ID NO: 377462 - DNA, 12 bp, Artificial Sequence
  Oligonucleotide primer for the detection of SNP TSC0062343
ataagtgtatgt

SEQ ID NO: 377463 - DNA, 12 bp, Artificial Sequence
  Oligonucleotide primer for the detection of SNP TSC0062343
ataagcgtatgt

SEQ ID NO: 377464 - DNA, 12 bp, Artificial Sequence
  Oligonucleotide primer for the detection of SNP TSC0062343
tacaaacacata

SEQ ID NO: 377465 - DNA, 12 bp, Artificial Sequence
  Oligonucleotide primer for the detection of SNP TSC0062343
tacaaacgcata

SEQ ID NO: 377466 - DNA, 12 bp, Artificial Sequence
  Oligonucleotide primer for the detection of SNP TSC0062343
aaaaataggtat

SEQ ID NO: 377467 - DNA, 12 bp, Artificial Sequence
  Oligonucleotide primer for the detection of SNP TSC0062347
ctttttttcaca

SEQ ID NO: 377468 - DNA, 12 bp, Artificial Sequence
  Oligonucleotide primer for the detection of SNP TSC0062347
ctttttttcgca

SEQ ID NO: 377469 - DNA, 12 bp, Artificial Sequence
  Oligonucleotide primer for the detection of SNP TSC0062347
gtggggagtgta

SEQ ID NO: 377470 - DNA, 12 bp, Artificial Sequence
  Oligonucleotide primer for the detection of SNP TSC0007465
cgaataaaaaaa

SEQ ID NO: 377471 - DNA, 12 bp, Artificial Sequence
  Oligonucleotide primer for the detection of SNP TSC0007465
tccctaatccta

SEQ ID NO: 377472 - DNA, 12 bp, Artificial Sequence
  Oligonucleotide primer for the detection of SNP TSC0007465
tggatgagggaa

SEQ ID NO: 377473 - DNA, 12 bp, Artificial Sequence
  Oligonucleotide primer for the detection of SNP TSC0007465
cggatgagggaa

SEQ ID NO: 377474 - DNA, 12 bp, Artificial Sequence
  Oligonucleotide primer for the detection of SNP TSC0062349
caaaaaatatta

SEQ ID NO: 377475 - DNA, 12 bp, Artificial Sequence
  Oligonucleotide primer for the detection of SNP TSC0062349
tagaatgaaatt

SEQ ID NO: 377476 - DNA, 12 bp, Artificial Sequence
  Oligonucleotide primer for the detection of SNP TSC0062349
tagaacgaaatt

SEQ ID NO: 377477 - DNA, 12 bp, Artificial Sequence
  Oligonucleotide primer for the detection of SNP TSC0062349
taaaacgaaatt

SEQ ID NO: 377478 - DNA, 12 bp, Artificial Sequence
  Oligonucleotide primer for the detection of SNP TSC0062349
taaagaatattg

SEQ ID NO: 377479 - DNA, 12 bp, Artificial Sequence
  Oligonucleotide primer for the detection of SNP TSC0062350
tactaaaaaatt

SEQ ID NO: 377480 - DNA, 12 bp, Artificial Sequence
  Oligonucleotide primer for the detection of SNP TSC0062350
gtaatatttttt

SEQ ID NO: 377481 - DNA, 12 bp, Artificial Sequence
  Oligonucleotide primer for the detection of SNP TSC0062350
tattgagaaatt

SEQ ID NO: 377482 - DNA, 12 bp, Artificial Sequence
  Oligonucleotide primer for the detection of SNP TSC0062351
tctaaatattct

SEQ ID NO: 377483 - DNA, 12 bp, Artificial Sequence
  Oligonucleotide primer for the detection of SNP TSC0062351
aaggtttaggag

SEQ ID NO: 377484 - DNA, 12 bp, Artificial Sequence
  Oligonucleotide primer for the detection of SNP TSC0009194
ttaggtttaaag

SEQ ID NO: 377485 - DNA, 12 bp, Artificial Sequence
  Oligonucleotide primer for the detection of SNP TSC0009194
ctaaactcaaaa

SEQ ID NO: 377486 - DNA, 12 bp, Artificial Sequence
  Oligonucleotide primer for the detection of SNP TSC0009194
ggtgagagaatg

SEQ ID NO: 377487 - DNA, 12 bp, Artificial Sequence
  Oligonucleotide primer for the detection of SNP TSC0006979
ctattatcatct

SEQ ID NO: 377488 - DNA, 12 bp, Artificial Sequence
  Oligonucleotide primer for the detection of SNP TSC0062352
tctcctactaac

SEQ ID NO: 377489 - DNA, 12 bp, Artificial Sequence
  Oligonucleotide primer for the detection of SNP TSC0062352
gtgtttaaaatg

SEQ ID NO: 377490 - DNA, 12 bp, Artificial Sequence
  Oligonucleotide primer for the detection of SNP TSC0062352
atacccaaaata

SEQ ID NO: 377491 - DNA, 12 bp, Artificial Sequence
  Oligonucleotide primer for the detection of SNP TSC0062353
ctcatctctttc

SEQ ID NO: 377492 - DNA, 12 bp, Artificial Sequence
  Oligonucleotide primer for the detection of SNP TSC0062353
tgagatagttgg

SEQ ID NO: 377493 - DNA, 12 bp, Artificial Sequence
  Oligonucleotide primer for the detection of SNP TSC0062353
taaaacaactaa

SEQ ID NO: 377494 - DNA, 12 bp, Artificial Sequence
  Oligonucleotide primer for the detection of SNP TSC0062354
caaatataacaa

SEQ ID NO: 377495 - DNA, 12 bp, Artificial Sequence
  Oligonucleotide primer for the detection of SNP TSC0062354
ttctaaaaacct

SEQ ID NO: 377496 - DNA, 12 bp, Artificial Sequence
  Oligonucleotide primer for the detection of SNP TSC0062354
tagatataatag

SEQ ID NO: 377497 - DNA, 12 bp, Artificial Sequence
  Oligonucleotide primer for the detection of SNP TSC0009064
actttatcccca

SEQ ID NO: 377498 - DNA, 12 bp, Artificial Sequence
  Oligonucleotide primer for the detection of SNP TSC0009065
taagtatgataa

SEQ ID NO: 377499 - DNA, 12 bp, Artificial Sequence
  Oligonucleotide primer for the detection of SNP TSC0062355
ataatccaacta

SEQ ID NO: 377500 - DNA, 12 bp, Artificial Sequence
  Oligonucleotide primer for the detection of SNP TSC0062355
tagtatgtggtt

SEQ ID NO: 377501 - DNA, 12 bp, Artificial Sequence
  Oligonucleotide primer for the detection of SNP TSC0062355
caacatataatt

SEQ ID NO: 377502 - DNA, 12 bp, Artificial Sequence
  Oligonucleotide primer for the detection of SNP TSC0062355
tatggtttagtt

SEQ ID NO: 377503 - DNA, 12 bp, Artificial Sequence
  Oligonucleotide primer for the detection of SNP TSC0062356
aaacataatcca

SEQ ID NO: 377504 - DNA, 12 bp, Artificial Sequence
  Oligonucleotide primer for the detection of SNP TSC0062356
atgtggttgtag

SEQ ID NO: 377505 - DNA, 12 bp, Artificial Sequence
  Oligonucleotide primer for the detection of SNP TSC0062356
atataattacaa

SEQ ID NO: 377506 - DNA, 12 bp, Artificial Sequence
  Oligonucleotide primer for the detection of SNP TSC0062356
agagtatggttt

SEQ ID NO: 377507 - DNA, 12 bp, Artificial Sequence
  Oligonucleotide primer for the detection of SNP TSC0062360
taaaaaccttct

SEQ ID NO: 377508 - DNA, 12 bp, Artificial Sequence
  Oligonucleotide primer for the detection of SNP TSC0062360
gttatgatatag

SEQ ID NO: 377509 - DNA, 12 bp, Artificial Sequence
  Oligonucleotide primer for the detection of SNP TSC0062360
attataacataa

SEQ ID NO: 377510 - DNA, 12 bp, Artificial Sequence
  Oligonucleotide primer for the detection of SNP TSC0062360
tgaggatttttt

SEQ ID NO: 377511 - DNA, 12 bp, Artificial Sequence
  Oligonucleotide primer for the detection of SNP TSC0062361
aaaggtttggta

SEQ ID NO: 377512 - DNA, 12 bp, Artificial Sequence
  Oligonucleotide primer for the detection of SNP TSC0062362
accaaacctttc

SEQ ID NO: 377513 - DNA, 12 bp, Artificial Sequence
  Oligonucleotide primer for the detection of SNP TSC0062362
gttgagtagatg

SEQ ID NO: 377514 - DNA, 12 bp, Artificial Sequence
  Oligonucleotide primer for the detection of SNP TSC0062363
tgtggttgtgag

SEQ ID NO: 377515 - DNA, 12 bp, Artificial Sequence
  Oligonucleotide primer for the detection of SNP TSC0062363
cgtggttgtgag

SEQ ID NO: 377516 - DNA, 12 bp, Artificial Sequence
  Oligonucleotide primer for the detection of SNP TSC0062363
cataactataaa

SEQ ID NO: 377517 - DNA, 12 bp, Artificial Sequence
  Oligonucleotide primer for the detection of SNP TSC0062363
cgtaactataaa

SEQ ID NO: 377518 - DNA, 12 bp, Artificial Sequence
  Oligonucleotide primer for the detection of SNP TSC0062363
tttaaaattaat

SEQ ID NO: 377519 - DNA, 12 bp, Artificial Sequence
  Oligonucleotide primer for the detection of SNP TSC0009355
aaggttaaggtg

SEQ ID NO: 377520 - DNA, 12 bp, Artificial Sequence
  Oligonucleotide primer for the detection of SNP TSC0009355
aaggttaaggcg

SEQ ID NO: 377521 - DNA, 12 bp, Artificial Sequence
  Oligonucleotide primer for the detection of SNP TSC0062369
tatctccatata

SEQ ID NO: 377522 - DNA, 12 bp, Artificial Sequence
  Oligonucleotide primer for the detection of SNP TSC0062369
ttgatttggaat

SEQ ID NO: 377523 - DNA, 12 bp, Artificial Sequence
  Oligonucleotide primer for the detection of SNP TSC0062370
tgttaagtaatt

SEQ ID NO: 377524 - DNA, 12 bp, Artificial Sequence
  Oligonucleotide primer for the detection of SNP TSC0062370
aaaagtaatata

SEQ ID NO: 377525 - DNA, 12 bp, Artificial Sequence
  Oligonucleotide primer for the detection of SNP TSC0062371
ctataataaaat

SEQ ID NO: 377526 - DNA, 12 bp, Artificial Sequence
  Oligonucleotide primer for the detection of SNP TSC0062371
gtgtaaataata

SEQ ID NO: 377527 - DNA, 12 bp, Artificial Sequence
  Oligonucleotide primer for the detection of SNP TSC0007193
ccccttctttac

SEQ ID NO: 377528 - DNA, 12 bp, Artificial Sequence
  Oligonucleotide primer for the detection of SNP TSC0007193
ttttgtatatgg

SEQ ID NO: 377529 - DNA, 12 bp, Artificial Sequence
  Oligonucleotide primer for the detection of SNP TSC0006560
ccttatttcact

SEQ ID NO: 377530 - DNA, 12 bp, Artificial Sequence
  Oligonucleotide primer for the detection of SNP TSC0062372
ccttacaaccac

SEQ ID NO: 377531 - DNA, 12 bp, Artificial Sequence
  Oligonucleotide primer for the detection of SNP TSC0062372
taagatatataa

SEQ ID NO: 377532 - DNA, 12 bp, Artificial Sequence
  Oligonucleotide primer for the detection of SNP TSC0062373
aaaaaacttcta

SEQ ID NO: 377533 - DNA, 12 bp, Artificial Sequence
  Oligonucleotide primer for the detection of SNP TSC0062373
gtttaatgagta

SEQ ID NO: 377534 - DNA, 12 bp, Artificial Sequence
  Oligonucleotide primer for the detection of SNP TSC0062373
acctaataaata

SEQ ID NO: 377535 - DNA, 12 bp, Artificial Sequence
  Oligonucleotide primer for the detection of SNP TSC0007210
acaaattttctt

SEQ ID NO: 377536 - DNA, 12 bp, Artificial Sequence
  Oligonucleotide primer for the detection of SNP TSC0007210
attgaatataaa

SEQ ID NO: 377537 - DNA, 12 bp, Artificial Sequence
  Oligonucleotide primer for the detection of SNP TSC0062374
ttcataaatact

SEQ ID NO: 377538 - DNA, 12 bp, Artificial Sequence
  Oligonucleotide primer for the detection of SNP TSC0062375
ctttaatatatc

SEQ ID NO: 377539 - DNA, 12 bp, Artificial Sequence
  Oligonucleotide primer for the detection of SNP TSC0062375
gaaaaatttaat

SEQ ID NO: 377540 - DNA, 12 bp, Artificial Sequence
  Oligonucleotide primer for the detection of SNP TSC0062375
ttttagtatgtt

SEQ ID NO: 377541 - DNA, 12 bp, Artificial Sequence
  Oligonucleotide primer for the detection of SNP TSC0006427
attaacacaaat

SEQ ID NO: 377542 - DNA, 12 bp, Artificial Sequence
  Oligonucleotide primer for the detection of SNP TSC0006427
tgaaagttttaa

SEQ ID NO: 377543 - DNA, 12 bp, Artificial Sequence
  Oligonucleotide primer for the detection of SNP TSC0006428
tcattttccttt

SEQ ID NO: 377544 - DNA, 12 bp, Artificial Sequence
  Oligonucleotide primer for the detection of SNP TSC0006428
gagagatcgtag

SEQ ID NO: 377545 - DNA, 12 bp, Artificial Sequence
  Oligonucleotide primer for the detection of SNP TSC0062377
caatatcctata

SEQ ID NO: 377546 - DNA, 12 bp, Artificial Sequence
  Oligonucleotide primer for the detection of SNP TSC0062378
cttaacaacaat

SEQ ID NO: 377547 - DNA, 12 bp, Artificial Sequence
  Oligonucleotide primer for the detection of SNP TSC0062378
tattaaaattgg

SEQ ID NO: 377548 - DNA, 12 bp, Artificial Sequence
  Oligonucleotide primer for the detection of SNP TSC0062385
cacaaccaatta

SEQ ID NO: 377549 - DNA, 12 bp, Artificial Sequence
  Oligonucleotide primer for the detection of SNP TSC0062385
cacgaccaatta

SEQ ID NO: 377550 - DNA, 12 bp, Artificial Sequence
  Oligonucleotide primer for the detection of SNP TSC0062385
tatgattagttg

SEQ ID NO: 377551 - DNA, 12 bp, Artificial Sequence
  Oligonucleotide primer for the detection of SNP TSC0062385
tacgattagttg

SEQ ID NO: 377552 - DNA, 12 bp, Artificial Sequence
  Oligonucleotide primer for the detection of SNP TSC0062387
tttatacaattt

SEQ ID NO: 377553 - DNA, 12 bp, Artificial Sequence
  Oligonucleotide primer for the detection of SNP TSC0062388
attttctaaatt

SEQ ID NO: 377554 - DNA, 12 bp, Artificial Sequence
  Oligonucleotide primer for the detection of SNP TSC0062389
atataactatac

SEQ ID NO: 377555 - DNA, 12 bp, Artificial Sequence
  Oligonucleotide primer for the detection of SNP TSC0062389
taaaaggatatg

SEQ ID NO: 377556 - DNA, 12 bp, Artificial Sequence
  Oligonucleotide primer for the detection of SNP TSC0062390
ccttaaaaacct

SEQ ID NO: 377557 - DNA, 12 bp, Artificial Sequence
  Oligonucleotide primer for the detection of SNP TSC0062391
acaatcatacat

SEQ ID NO: 377558 - DNA, 12 bp, Artificial Sequence
  Oligonucleotide primer for the detection of SNP TSC0062391
acaatcatacgt

SEQ ID NO: 377559 - DNA, 12 bp, Artificial Sequence
  Oligonucleotide primer for the detection of SNP TSC0062391
tttgttgttaaa

SEQ ID NO: 377560 - DNA, 12 bp, Artificial Sequence
  Oligonucleotide primer for the detection of SNP TSC0062391
tctactattaaa

SEQ ID NO: 377561 - DNA, 12 bp, Artificial Sequence
  Oligonucleotide primer for the detection of SNP TSC0062391
atagttatgtgt

SEQ ID NO: 377562 - DNA, 12 bp, Artificial Sequence
  Oligonucleotide primer for the detection of SNP TSC0062391
atagttatgcgt

SEQ ID NO: 377563 - DNA, 12 bp, Artificial Sequence
  Oligonucleotide primer for the detection of SNP TSC0062392
catcttctaatt

SEQ ID NO: 377564 - DNA, 12 bp, Artificial Sequence
  Oligonucleotide primer for the detection of SNP TSC0062392
cgtcttctaatt

SEQ ID NO: 377565 - DNA, 12 bp, Artificial Sequence
  Oligonucleotide primer for the detection of SNP TSC0062392
aaaagaggttta

SEQ ID NO: 377566 - DNA, 12 bp, Artificial Sequence
  Oligonucleotide primer for the detection of SNP TSC0062392
cgttttttagtt

SEQ ID NO: 377567 - DNA, 12 bp, Artificial Sequence
  Oligonucleotide primer for the detection of SNP TSC0062396
ctccaaaactcc

SEQ ID NO: 377568 - DNA, 12 bp, Artificial Sequence
  Oligonucleotide primer for the detection of SNP TSC0062396
aaagaaaattag

SEQ ID NO: 377569 - DNA, 12 bp, Artificial Sequence
  Oligonucleotide primer for the detection of SNP TSC0062398
aacttaattaac

SEQ ID NO: 377570 - DNA, 12 bp, Artificial Sequence
  Oligonucleotide primer for the detection of SNP TSC0062398
tgtaggatattt

SEQ ID NO: 377571 - DNA, 12 bp, Artificial Sequence
  Oligonucleotide primer for the detection of SNP TSC0062398
ctacaaaacacc

SEQ ID NO: 377572 - DNA, 12 bp, Artificial Sequence
  Oligonucleotide primer for the detection of SNP TSC0062398
agtttaattagt

SEQ ID NO: 377573 - DNA, 12 bp, Artificial Sequence
  Oligonucleotide primer for the detection of SNP TSC0062398
agtttaattagc

SEQ ID NO: 377574 - DNA, 12 bp, Artificial Sequence
  Oligonucleotide primer for the detection of SNP TSC0062399
aaaaggtgtttg

SEQ ID NO: 377575 - DNA, 12 bp, Artificial Sequence
  Oligonucleotide primer for the detection of SNP TSC0062400
acctataaaact

SEQ ID NO: 377576 - DNA, 12 bp, Artificial Sequence
  Oligonucleotide primer for the detection of SNP TSC0062400
ggttttgatgaa

SEQ ID NO: 377577 - DNA, 12 bp, Artificial Sequence
  Oligonucleotide primer for the detection of SNP TSC0062400
ggttttgacgaa

SEQ ID NO: 377578 - DNA, 12 bp, Artificial Sequence
  Oligonucleotide primer for the detection of SNP TSC0062401
actacttccaac

SEQ ID NO: 377579 - DNA, 12 bp, Artificial Sequence
  Oligonucleotide primer for the detection of SNP TSC0062402
accaaaaacctt

SEQ ID NO: 377580 - DNA, 12 bp, Artificial Sequence
  Oligonucleotide primer for the detection of SNP TSC0062402
taagtatttaaa

SEQ ID NO: 377581 - DNA, 12 bp, Artificial Sequence
  Oligonucleotide primer for the detection of SNP TSC0062403
acttttatttct

SEQ ID NO: 377582 - DNA, 12 bp, Artificial Sequence
  Oligonucleotide primer for the detection of SNP TSC0062403
tagattttttgg

SEQ ID NO: 377583 - DNA, 12 bp, Artificial Sequence
  Oligonucleotide primer for the detection of SNP TSC0062404
tggtaaaggtta

SEQ ID NO: 377584 - DNA, 12 bp, Artificial Sequence
  Oligonucleotide primer for the detection of SNP TSC0062404
taataaaaatca

SEQ ID NO: 377585 - DNA, 12 bp, Artificial Sequence
  Oligonucleotide primer for the detection of SNP TSC0062404
attatattgtga

SEQ ID NO: 377586 - DNA, 12 bp, Artificial Sequence
  Oligonucleotide primer for the detection of SNP TSC0001678
tattcaaaaaat

SEQ ID NO: 377587 - DNA, 12 bp, Artificial Sequence
  Oligonucleotide primer for the detection of SNP TSC0001678
tatatattgaag

SEQ ID NO: 377588 - DNA, 12 bp, Artificial Sequence
  Oligonucleotide primer for the detection of SNP TSC0001678
tatacactaaaa

SEQ ID NO: 377589 - DNA, 12 bp, Artificial Sequence
  Oligonucleotide primer for the detection of SNP TSC0001678
tatttaagaagt

SEQ ID NO: 377590 - DNA, 12 bp, Artificial Sequence
  Oligonucleotide primer for the detection of SNP TSC0009908
aacatattccca

SEQ ID NO: 377591 - DNA, 12 bp, Artificial Sequence
  Oligonucleotide primer for the detection of SNP TSC0009908
caatcaaaaaac

SEQ ID NO: 377592 - DNA, 12 bp, Artificial Sequence
  Oligonucleotide primer for the detection of SNP TSC0009908
gatatgttttta

SEQ ID NO: 377593 - DNA, 12 bp, Artificial Sequence
  Oligonucleotide primer for the detection of SNP TSC0062405
accacatctcac

SEQ ID NO: 377594 - DNA, 12 bp, Artificial Sequence
  Oligonucleotide primer for the detection of SNP TSC0062405
tgagttatttta

SEQ ID NO: 377595 - DNA, 12 bp, Artificial Sequence
  Oligonucleotide primer for the detection of SNP TSC0062406
ccataatatacc

SEQ ID NO: 377596 - DNA, 12 bp, Artificial Sequence
  Oligonucleotide primer for the detection of SNP TSC0062406
aggtgaaggggg

SEQ ID NO: 377597 - DNA, 12 bp, Artificial Sequence
  Oligonucleotide primer for the detection of SNP TSC0062407
aacatccaaaat

SEQ ID NO: 377598 - DNA, 12 bp, Artificial Sequence
  Oligonucleotide primer for the detection of SNP TSC0062407
ttgagaattaag

SEQ ID NO: 377599 - DNA, 12 bp, Artificial Sequence
  Oligonucleotide primer for the detection of SNP TSC0062412
tcctaaatcctc

SEQ ID NO: 377600 - DNA, 12 bp, Artificial Sequence
  Oligonucleotide primer for the detection of SNP TSC0062412
tttagtttttga

SEQ ID NO: 377601 - DNA, 12 bp, Artificial Sequence
  Oligonucleotide primer for the detection of SNP TSC0062413
aaaaccccaaac

SEQ ID NO: 377602 - DNA, 12 bp, Artificial Sequence
  Oligonucleotide primer for the detection of SNP TSC0062413
aaaaccccgaac

SEQ ID NO: 377603 - DNA, 12 bp, Artificial Sequence
  Oligonucleotide primer for the detection of SNP TSC0062413
gagatgattgtg

SEQ ID NO: 377604 - DNA, 12 bp, Artificial Sequence
  Oligonucleotide primer for the detection of SNP TSC0000347
taattcataact

SEQ ID NO: 377605 - DNA, 12 bp, Artificial Sequence
  Oligonukleotid-Primer
aaaaaagatata

SEQ ID NO: 377606 - DNA, 12 bp, Artificial Sequence
  Oligonucleotide primer for the detection of SNP TSC0062416
acatcaattatc

SEQ ID NO: 377607 - DNA, 12 bp, Artificial Sequence
  Oligonucleotide primer for the detection of SNP TSC0062416
ttttgttttcga

SEQ ID NO: 377608 - DNA, 12 bp, Artificial Sequence
  Oligonucleotide primer for the detection of SNP TSC0062416
ctctatctccga

SEQ ID NO: 377609 - DNA, 12 bp, Artificial Sequence
  Oligonucleotide primer for the detection of SNP TSC0062416
atattaattgtt

SEQ ID NO: 377610 - DNA, 12 bp, Artificial Sequence
  Oligonucleotide primer for the detection of SNP TSC0062417
aacactccatct

SEQ ID NO: 377611 - DNA, 12 bp, Artificial Sequence
  Oligonucleotide primer for the detection of SNP TSC0062417
gatattttattt

SEQ ID NO: 377612 - DNA, 12 bp, Artificial Sequence
  Oligonucleotide primer for the detection of SNP TSC0062418
tacattctattt

SEQ ID NO: 377613 - DNA, 12 bp, Artificial Sequence
  Oligonukleotid-Primer
gaaaggttgagg

SEQ ID NO: 377614 - DNA, 12 bp, Artificial Sequence
  Oligonucleotide primer for the detection of SNP TSC0062419
gaaaggtcgagg

SEQ ID NO: 377615 - DNA, 12 bp, Artificial Sequence
  Oligonucleotide primer for the detection of SNP TSC0062419
aagtgatttatt

SEQ ID NO: 377616 - DNA, 12 bp, Artificial Sequence
  Oligonucleotide primer for the detection of SNP TSC0062422
atatttccatat

SEQ ID NO: 377617 - DNA, 12 bp, Artificial Sequence
  Oligonucleotide primer for the detection of SNP TSC0062422
tcaaaccttctc

SEQ ID NO: 377618 - DNA, 12 bp, Artificial Sequence
  Oligonucleotide primer for the detection of SNP TSC0062422
gtatttttatat

SEQ ID NO: 377619 - DNA, 12 bp, Artificial Sequence
  Oligonucleotide primer for the detection of SNP TSC0001200
tattacctatca

SEQ ID NO: 377620 - DNA, 12 bp, Artificial Sequence
  Oligonucleotide primer for the detection of SNP TSC0001200
tttagtatagta

SEQ ID NO: 377621 - DNA, 12 bp, Artificial Sequence
  Oligonucleotide primer for the detection of SNP TSC0001200
ttaacataataa

SEQ ID NO: 377622 - DNA, 12 bp, Artificial Sequence
  Oligonucleotide primer for the detection of SNP TSC0001201
attggtttttta

SEQ ID NO: 377623 - DNA, 12 bp, Artificial Sequence
  Oligonucleotide primer for the detection of SNP TSC0010142
tttatagaattt

SEQ ID NO: 377624 - DNA, 12 bp, Artificial Sequence
  Oligonucleotide primer for the detection of SNP TSC0010142
atttacaaaatc

SEQ ID NO: 377625 - DNA, 12 bp, Artificial Sequence
  Oligonucleotide primer for the detection of SNP TSC0010142
gtagattagatt

SEQ ID NO: 377626 - DNA, 12 bp, Artificial Sequence
  Oligonucleotide primer for the detection of SNP TSC0062423
atacatattatt

SEQ ID NO: 377627 - DNA, 12 bp, Artificial Sequence
  Oligonucleotide primer for the detection of SNP TSC0062423
tttaaagagtaa

SEQ ID NO: 377628 - DNA, 12 bp, Artificial Sequence
  Oligonucleotide primer for the detection of SNP TSC0008958
aaacatcaaaac

SEQ ID NO: 377629 - DNA, 12 bp, Artificial Sequence
  Oligonucleotide primer for the detection of SNP TSC0008958
tagtaggtttgg

SEQ ID NO: 377630 - DNA, 12 bp, Artificial Sequence
  Oligonucleotide primer for the detection of SNP TSC0001669
aactacatccca

SEQ ID NO: 377631 - DNA, 12 bp, Artificial Sequence
  Oligonucleotide primer for the detection of SNP TSC0001669
aaaatctataac

SEQ ID NO: 377632 - DNA, 12 bp, Artificial Sequence
  Oligonucleotide primer for the detection of SNP TSC0001121
attcccactccc

SEQ ID NO: 377633 - DNA, 12 bp, Artificial Sequence
  Oligonucleotide primer for the detection of SNP TSC0001121
tggaaatggaga

SEQ ID NO: 377634 - DNA, 12 bp, Artificial Sequence
  Oligonucleotide primer for the detection of SNP TSC0001121
tggaaacggaga

SEQ ID NO: 377635 - DNA, 12 bp, Artificial Sequence
  Oligonucleotide primer for the detection of SNP TSC0001321
taaaatttttac

SEQ ID NO: 377636 - DNA, 12 bp, Artificial Sequence
  Oligonucleotide primer for the detection of SNP TSC0001322
taaaaatcttaa

SEQ ID NO: 377637 - DNA, 12 bp, Artificial Sequence
  Oligonucleotide primer for the detection of SNP TSC0001322
tgatttgaaaat

SEQ ID NO: 377638 - DNA, 12 bp, Artificial Sequence
  Oligonucleotide primer for the detection of SNP TSC0001322
taaaaattttag

SEQ ID NO: 377639 - DNA, 12 bp, Artificial Sequence
  Oligonucleotide primer for the detection of SNP TSC0001323
tagttattgtga

SEQ ID NO: 377640 - DNA, 12 bp, Artificial Sequence
  Oligonucleotide primer for the detection of SNP TSC0001324
ttaattgagttt

SEQ ID NO: 377641 - DNA, 12 bp, Artificial Sequence
  Oligonucleotide primer for the detection of SNP TSC0001324
ttaattaaattc

SEQ ID NO: 377642 - DNA, 12 bp, Artificial Sequence
  Oligonucleotide primer for the detection of SNP TSC0001324
agttatgaaatt

SEQ ID NO: 377643 - DNA, 12 bp, Artificial Sequence
  Oligonucleotide primer for the detection of SNP TSC0062428
ctctccttcctt

SEQ ID NO: 377644 - DNA, 12 bp, Artificial Sequence
  Oligonucleotide primer for the detection of SNP TSC0062428
agaggaaggaag

SEQ ID NO: 377645 - DNA, 12 bp, Artificial Sequence
  Oligonucleotide primer for the detection of SNP TSC0001398
tccctctactcc

SEQ ID NO: 377646 - DNA, 12 bp, Artificial Sequence
  Oligonucleotide primer for the detection of SNP TSC0001398
gttatagattag

SEQ ID NO: 377647 - DNA, 12 bp, Artificial Sequence
  Oligonucleotide primer for the detection of SNP TSC0001399
cattaataatca

SEQ ID NO: 377648 - DNA, 12 bp, Artificial Sequence
  Oligonucleotide primer for the detection of SNP TSC0001399
aaattaaaagtt

SEQ ID NO: 377649 - DNA, 12 bp, Artificial Sequence
  Oligonucleotide primer for the detection of SNP TSC0062429
ataaataattat

SEQ ID NO: 377650 - DNA, 12 bp, Artificial Sequence
  Oligonucleotide primer for the detection of SNP TSC0062429
ttgttattttag

SEQ ID NO: 377651 - DNA, 12 bp, Artificial Sequence
  Oligonucleotide primer for the detection of SNP TSC0062430
ccctaaaacaac

SEQ ID NO: 377652 - DNA, 12 bp, Artificial Sequence
  Oligonucleotide primer for the detection of SNP TSC0062430
atagatgtttta

SEQ ID NO: 377653 - DNA, 12 bp, Artificial Sequence
  Oligonucleotide primer for the detection of SNP TSC0062431
aacttaaaacat

SEQ ID NO: 377654 - DNA, 12 bp, Artificial Sequence
  Oligonucleotide primer for the detection of SNP TSC0062431
atagatgttata

SEQ ID NO: 377655 - DNA, 12 bp, Artificial Sequence
  Oligonucleotide primer for the detection of SNP TSC0062432
attcaaaaattt

SEQ ID NO: 377656 - DNA, 12 bp, Artificial Sequence
  Oligonucleotide primer for the detection of SNP TSC0062432
gaaattgttttt

SEQ ID NO: 377657 - DNA, 12 bp, Artificial Sequence
  Oligonucleotide primer for the detection of SNP TSC0062433
aactacacttca

SEQ ID NO: 377658 - DNA, 12 bp, Artificial Sequence
  Oligonucleotide primer for the detection of SNP TSC0062433
gattatatttta

SEQ ID NO: 377659 - DNA, 12 bp, Artificial Sequence
  Oligonucleotide primer for the detection of SNP TSC0062434
ccttccttataa

SEQ ID NO: 377660 - DNA, 12 bp, Artificial Sequence
  Oligonucleotide primer for the detection of SNP TSC0062434
aaatggaggtat

SEQ ID NO: 377661 - DNA, 12 bp, Artificial Sequence
  Oligonucleotide primer for the detection of SNP TSC0062434
aaacggaggtat

SEQ ID NO: 377662 - DNA, 12 bp, Artificial Sequence
  Oligonucleotide primer for the detection of SNP TSC0062434
aacgaaaacata

SEQ ID NO: 377663 - DNA, 12 bp, Artificial Sequence
  Oligonucleotide primer for the detection of SNP TSC0000283
tgaaataaaata

SEQ ID NO: 377664 - DNA, 12 bp, Artificial Sequence
  Oligonucleotide primer for the detection of SNP TSC0062436
ctacctatcctc

SEQ ID NO: 377665 - DNA, 12 bp, Artificial Sequence
  Oligonucleotide primer for the detection of SNP TSC0062436
atatgggaataa

SEQ ID NO: 377666 - DNA, 12 bp, Artificial Sequence
  Oligonucleotide primer for the detection of SNP TSC0062437
ttccctcccaca

SEQ ID NO: 377667 - DNA, 12 bp, Artificial Sequence
  Oligonucleotide primer for the detection of SNP TSC0062437
agaaagtgggat

SEQ ID NO: 377668 - DNA, 12 bp, Artificial Sequence
  Oligonucleotide primer for the detection of SNP TSC0062437
agaaagtgggac

SEQ ID NO: 377669 - DNA, 12 bp, Artificial Sequence
  Oligonucleotide primer for the detection of SNP TSC0062440
gtttgaggttat

SEQ ID NO: 377670 - DNA, 12 bp, Artificial Sequence
  Oligonucleotide primer for the detection of SNP TSC0062440
gttcgaggttat

SEQ ID NO: 377671 - DNA, 12 bp, Artificial Sequence
  Oligonucleotide primer for the detection of SNP TSC0062440
attcaaaactac

SEQ ID NO: 377672 - DNA, 12 bp, Artificial Sequence
  Oligonucleotide primer for the detection of SNP TSC0062440
attcgaaactac

SEQ ID NO: 377673 - DNA, 12 bp, Artificial Sequence
  Oligonucleotide primer for the detection of SNP TSC0062440
aattatagttta

SEQ ID NO: 377674 - DNA, 12 bp, Artificial Sequence
  Oligonucleotide primer for the detection of SNP TSC0062441
ttctttctctta

SEQ ID NO: 377675 - DNA, 12 bp, Artificial Sequence
  Oligonucleotide primer for the detection of SNP TSC0062441
ccttcttcacat

SEQ ID NO: 377676 - DNA, 12 bp, Artificial Sequence
  Oligonucleotide primer for the detection of SNP TSC0062442
ttagtagtgatg

SEQ ID NO: 377677 - DNA, 12 bp, Artificial Sequence
  Oligonucleotide primer for the detection of SNP TSC0062442
tatggagaaatt

SEQ ID NO: 377678 - DNA, 12 bp, Artificial Sequence
  Oligonucleotide primer for the detection of SNP TSC0062442
tatggagaaatc

SEQ ID NO: 377679 - DNA, 12 bp, Artificial Sequence
  Oligonucleotide primer for the detection of SNP TSC0062443
tctaatcctaac

SEQ ID NO: 377680 - DNA, 12 bp, Artificial Sequence
  Oligonucleotide primer for the detection of SNP TSC0062443
tggttttgtaaa

SEQ ID NO: 377681 - DNA, 12 bp, Artificial Sequence
  Oligonucleotide primer for the detection of SNP TSC0062443
tggtttcgtaaa

SEQ ID NO: 377682 - DNA, 12 bp, Artificial Sequence
  Oligonucleotide primer for the detection of SNP TSC0062444
aaataccacaaa

SEQ ID NO: 377683 - DNA, 12 bp, Artificial Sequence
  Oligonucleotide primer for the detection of SNP TSC0062444
ttgtatttgtgt

SEQ ID NO: 377684 - DNA, 12 bp, Artificial Sequence
  Oligonucleotide primer for the detection of SNP TSC0062444
ttgtatttgcgt

SEQ ID NO: 377685 - DNA, 12 bp, Artificial Sequence
  Oligonucleotide primer for the detection of SNP TSC0062444
ttgtatttgtgc

SEQ ID NO: 377686 - DNA, 12 bp, Artificial Sequence
  Oligonucleotide primer for the detection of SNP TSC0062444
ttgtatttgcgc

SEQ ID NO: 377687 - DNA, 12 bp, Artificial Sequence
  Oligonucleotide primer for the detection of SNP TSC0062444
tttacacttaca

SEQ ID NO: 377688 - DNA, 12 bp, Artificial Sequence
  Oligonucleotide primer for the detection of SNP TSC0062444
tttacacttacg

SEQ ID NO: 377689 - DNA, 12 bp, Artificial Sequence
  Oligonucleotide primer for the detection of SNP TSC0062444
aaatattataaa

SEQ ID NO: 377690 - DNA, 12 bp, Artificial Sequence
  Oligonucleotide primer for the detection of SNP TSC0062445
ggtgtaatgatg

SEQ ID NO: 377691 - DNA, 12 bp, Artificial Sequence
  Oligonucleotide primer for the detection of SNP TSC0062446
ctatttttatat

SEQ ID NO: 377692 - DNA, 12 bp, Artificial Sequence
  Oligonucleotide primer for the detection of SNP TSC0062446
atagtatagtat

SEQ ID NO: 377693 - DNA, 12 bp, Artificial Sequence
  Oligonucleotide primer for the detection of SNP TSC0062447
tcaataaataat

SEQ ID NO: 377694 - DNA, 12 bp, Artificial Sequence
  Oligonucleotide primer for the detection of SNP TSC0062447
ttaataaatggt

SEQ ID NO: 377695 - DNA, 12 bp, Artificial Sequence
  Oligonucleotide primer for the detection of SNP TSC0062448
acatataaactt

SEQ ID NO: 377696 - DNA, 12 bp, Artificial Sequence
  Oligonucleotide primer for the detection of SNP TSC0062448
agagaatttaga

SEQ ID NO: 377697 - DNA, 12 bp, Artificial Sequence
  Oligonucleotide primer for the detection of SNP TSC0062449
tcttacaaaaac

SEQ ID NO: 377698 - DNA, 12 bp, Artificial Sequence
  Oligonucleotide primer for the detection of SNP TSC0062449
tgtatttataag

SEQ ID NO: 377699 - DNA, 12 bp, Artificial Sequence
  Oligonucleotide primer for the detection of SNP TSC0062449
tatattcacaaa

SEQ ID NO: 377700 - DNA, 12 bp, Artificial Sequence
  Oligonucleotide primer for the detection of SNP TSC0062449
ttttgtaaggat

SEQ ID NO: 377701 - DNA, 12 bp, Artificial Sequence
  Oligonucleotide primer for the detection of SNP TSC0062449
ttttgtaaggac

SEQ ID NO: 377702 - DNA, 12 bp, Artificial Sequence
  Oligonucleotide primer for the detection of SNP TSC0062454
tggtttaagttt

SEQ ID NO: 377703 - DNA, 12 bp, Artificial Sequence
  Oligonucleotide primer for the detection of SNP TSC0062454
taacctaaattt

SEQ ID NO: 377704 - DNA, 12 bp, Artificial Sequence
  Oligonucleotide primer for the detection of SNP TSC0062454
taaatggtagaa

SEQ ID NO: 377705 - DNA, 12 bp, Artificial Sequence
  Oligonucleotide primer for the detection of SNP TSC0062455
atccttctattt

SEQ ID NO: 377706 - DNA, 12 bp, Artificial Sequence
  Oligonucleotide primer for the detection of SNP TSC0062455
ataagtggttaa

SEQ ID NO: 377707 - DNA, 12 bp, Artificial Sequence
  Oligonucleotide primer for the detection of SNP TSC0062456
tcaataattctt

SEQ ID NO: 377708 - DNA, 12 bp, Artificial Sequence
  Oligonucleotide primer for the detection of SNP TSC0062456
aatgtatgaatg

SEQ ID NO: 377709 - DNA, 12 bp, Artificial Sequence
  Oligonucleotide primer for the detection of SNP TSC0062456
aacgtatgaatg

SEQ ID NO: 377710 - DNA, 12 bp, Artificial Sequence
  Oligonucleotide primer for the detection of SNP TSC0062457
ctactactaata

SEQ ID NO: 377711 - DNA, 12 bp, Artificial Sequence
  Oligonucleotide primer for the detection of SNP TSC0062457
aacttcacccta

SEQ ID NO: 377712 - DNA, 12 bp, Artificial Sequence
  Oligonucleotide primer for the detection of SNP TSC0062457
tttattgttgat

SEQ ID NO: 377713 - DNA, 12 bp, Artificial Sequence
  Oligonucleotide primer for the detection of SNP TSC0062458
acctaaatcaca

SEQ ID NO: 377714 - DNA, 12 bp, Artificial Sequence
  Oligonucleotide primer for the detection of SNP TSC0062458
gtagagggtttt

SEQ ID NO: 377715 - DNA, 12 bp, Artificial Sequence
  Oligonucleotide primer for the detection of SNP TSC0062459
atgataagtata

SEQ ID NO: 377716 - DNA, 12 bp, Artificial Sequence
  Oligonucleotide primer for the detection of SNP TSC0062460
ttttgggaaatt

SEQ ID NO: 377717 - DNA, 12 bp, Artificial Sequence
  Oligonucleotide primer for the detection of SNP TSC0062461
tgaaagagaaaa

SEQ ID NO: 377718 - DNA, 12 bp, Artificial Sequence
  Oligonucleotide primer for the detection of SNP TSC0062462
cattcaacaaat

SEQ ID NO: 377719 - DNA, 12 bp, Artificial Sequence
  Oligonucleotide primer for the detection of SNP TSC0062462
ggatataataaa

SEQ ID NO: 377720 - DNA, 12 bp, Artificial Sequence
  Oligonucleotide primer for the detection of SNP TSC0062463
cataaactaaat

SEQ ID NO: 377721 - DNA, 12 bp, Artificial Sequence
  Oligonucleotide primer for the detection of SNP TSC0062463
gtagtttataag

SEQ ID NO: 377722 - DNA, 12 bp, Artificial Sequence
  Oligonucleotide primer for the detection of SNP TSC0062464
taacactatatt

SEQ ID NO: 377723 - DNA, 12 bp, Artificial Sequence
  Oligonucleotide primer for the detection of SNP TSC0062464
aattttttgtag

SEQ ID NO: 377724 - DNA, 12 bp, Artificial Sequence
  Oligonucleotide primer for the detection of SNP TSC0006568
atcatttcctca

SEQ ID NO: 377725 - DNA, 12 bp, Artificial Sequence
  Oligonucleotide primer for the detection of SNP TSC0006568
ttagttatagga

SEQ ID NO: 377726 - DNA, 12 bp, Artificial Sequence
  Oligonucleotide primer for the detection of SNP TSC0007183
tttgatagaagg

SEQ ID NO: 377727 - DNA, 12 bp, Artificial Sequence
  Oligonucleotide primer for the detection of SNP TSC0062465
tcccacactact

SEQ ID NO: 377728 - DNA, 12 bp, Artificial Sequence
  Oligonucleotide primer for the detection of SNP TSC0062465
acttcaccttta

SEQ ID NO: 377729 - DNA, 12 bp, Artificial Sequence
  Oligonucleotide primer for the detection of SNP TSC0062466
ccacaaccccat

SEQ ID NO: 377730 - DNA, 12 bp, Artificial Sequence
  Oligonucleotide primer for the detection of SNP TSC0062468
agttggtttaag

SEQ ID NO: 377731 - DNA, 12 bp, Artificial Sequence
  Oligonucleotide primer for the detection of SNP TSC0062468
aattaacctaaa

SEQ ID NO: 377732 - DNA, 12 bp, Artificial Sequence
  Oligonucleotide primer for the detection of SNP TSC0062468
tttaaattgaaa

SEQ ID NO: 377733 - DNA, 12 bp, Artificial Sequence
  Oligonucleotide primer for the detection of SNP TSC0062469
cccaaaatattt

SEQ ID NO: 377734 - DNA, 12 bp, Artificial Sequence
  Oligonucleotide primer for the detection of SNP TSC0062470
tctcaataactt

SEQ ID NO: 377735 - DNA, 12 bp, Artificial Sequence
  Oligonucleotide primer for the detection of SNP TSC0062470
tatagtagttag

SEQ ID NO: 377736 - DNA, 12 bp, Artificial Sequence
  Oligonucleotide primer for the detection of SNP TSC0005961
aatattcctcct

SEQ ID NO: 377737 - DNA, 12 bp, Artificial Sequence
  Oligonucleotide primer for the detection of SNP TSC0005961
gatattcctcct

SEQ ID NO: 377738 - DNA, 12 bp, Artificial Sequence
  Oligonucleotide primer for the detection of SNP TSC0005961
agtgatgtttga

SEQ ID NO: 377739 - DNA, 12 bp, Artificial Sequence
  Oligonucleotide primer for the detection of SNP TSC0062471
atcataacctac

SEQ ID NO: 377740 - DNA, 12 bp, Artificial Sequence
  Oligonucleotide primer for the detection of SNP TSC0062471
ttttgatttacg

SEQ ID NO: 377741 - DNA, 12 bp, Artificial Sequence
  Oligonucleotide primer for the detection of SNP TSC0062476
tatcacccttat

SEQ ID NO: 377742 - DNA, 12 bp, Artificial Sequence
  Oligonucleotide primer for the detection of SNP TSC0062476
tagaaggattaa

SEQ ID NO: 377743 - DNA, 12 bp, Artificial Sequence
  Oligonucleotide primer for the detection of SNP TSC0062479
tgtataataaag

SEQ ID NO: 377744 - DNA, 12 bp, Artificial Sequence
  Oligonucleotide primer for the detection of SNP TSC0062480
ccccgaaaaaaa

SEQ ID NO: 377745 - DNA, 12 bp, Artificial Sequence
  Oligonucleotide primer for the detection of SNP TSC0062480
aaaggtgtgttt

SEQ ID NO: 377746 - DNA, 12 bp, Artificial Sequence
  Oligonucleotide primer for the detection of SNP TSC0062480
ttttggggagag

SEQ ID NO: 377747 - DNA, 12 bp, Artificial Sequence
  Oligonucleotide primer for the detection of SNP TSC0062480
tttcggggagag

SEQ ID NO: 377748 - DNA, 12 bp, Artificial Sequence
  Oligonucleotide primer for the detection of SNP TSC0007457
ataaattaaaat

SEQ ID NO: 377749 - DNA, 12 bp, Artificial Sequence
  Oligonucleotide primer for the detection of SNP TSC0007457
tggttatgttgg

SEQ ID NO: 377750 - DNA, 12 bp, Artificial Sequence
  Oligonucleotide primer for the detection of SNP TSC0007457
taaccatactaa

SEQ ID NO: 377751 - DNA, 12 bp, Artificial Sequence
  Oligonucleotide primer for the detection of SNP TSC0000273
aataacacaatt

SEQ ID NO: 377752 - DNA, 12 bp, Artificial Sequence
  Oligonucleotide primer for the detection of SNP TSC0062481
atcataaataaa

SEQ ID NO: 377753 - DNA, 12 bp, Artificial Sequence
  Oligonucleotide primer for the detection of SNP TSC0062481
ttttaaatagtt

SEQ ID NO: 377754 - DNA, 12 bp, Artificial Sequence
  Oligonucleotide primer for the detection of SNP TSC0062481
ttttaaatagtc

SEQ ID NO: 377755 - DNA, 12 bp, Artificial Sequence
  Oligonucleotide primer for the detection of SNP TSC0062481
ttttaaacaatc

SEQ ID NO: 377756 - DNA, 12 bp, Artificial Sequence
  Oligonucleotide primer for the detection of SNP TSC0062481
gttatgaataag

SEQ ID NO: 377757 - DNA, 12 bp, Artificial Sequence
  Oligonucleotide primer for the detection of SNP TSC0004786
caaactaaaatt

SEQ ID NO: 377758 - DNA, 12 bp, Artificial Sequence
  Oligonucleotide primer for the detection of SNP TSC0004786
aaaattacacca

SEQ ID NO: 377759 - DNA, 12 bp, Artificial Sequence
  Oligonucleotide primer for the detection of SNP TSC0000698
aaatctcattct

SEQ ID NO: 377760 - DNA, 12 bp, Artificial Sequence
  Oligonucleotide primer for the detection of SNP TSC0000698
caaacataacaa

SEQ ID NO: 377761 - DNA, 12 bp, Artificial Sequence
  Oligonucleotide primer for the detection of SNP TSC0007285
aaccataatttc

SEQ ID NO: 377762 - DNA, 12 bp, Artificial Sequence
  Oligonucleotide primer for the detection of SNP TSC0007285
ttaggtggatga

SEQ ID NO: 377763 - DNA, 12 bp, Artificial Sequence
  Oligonucleotide primer for the detection of SNP TSC0007286
ataaaattatat

SEQ ID NO: 377764 - DNA, 12 bp, Artificial Sequence
  Oligonucleotide primer for the detection of SNP TSC0007286
ctaacccaacta

SEQ ID NO: 377765 - DNA, 12 bp, Artificial Sequence
  Oligonucleotide primer for the detection of SNP TSC0007286
gtggggttgtgt

SEQ ID NO: 377766 - DNA, 12 bp, Artificial Sequence
  Oligonucleotide primer for the detection of SNP TSC0062482
ttcttaccatcc

SEQ ID NO: 377767 - DNA, 12 bp, Artificial Sequence
  Oligonucleotide primer for the detection of SNP TSC0062484
aacacattttta

SEQ ID NO: 377768 - DNA, 12 bp, Artificial Sequence
  Oligonucleotide primer for the detection of SNP TSC0062484
ataaatttataa

SEQ ID NO: 377769 - DNA, 12 bp, Artificial Sequence
  Oligonucleotide primer for the detection of SNP TSC0006767
aaaaaaacactc

SEQ ID NO: 377770 - DNA, 12 bp, Artificial Sequence
  Oligonucleotide primer for the detection of SNP TSC0006767
tatagtggataa

SEQ ID NO: 377771 - DNA, 12 bp, Artificial Sequence
  Oligonucleotide primer for the detection of SNP TSC0062487
ttttgtagataa

SEQ ID NO: 377772 - DNA, 12 bp, Artificial Sequence
  Oligonucleotide primer for the detection of SNP TSC0062488
agtttgtatatt

SEQ ID NO: 377773 - DNA, 12 bp, Artificial Sequence
  Oligonucleotide primer for the detection of SNP TSC0062488
aatctacatatt

SEQ ID NO: 377774 - DNA, 12 bp, Artificial Sequence
  Oligonucleotide primer for the detection of SNP TSC0062488
ggagaagtggta

SEQ ID NO: 377775 - DNA, 12 bp, Artificial Sequence
  Oligonucleotide primer for the detection of SNP TSC0062488
ggagaagcggta

SEQ ID NO: 377776 - DNA, 12 bp, Artificial Sequence
  Oligonucleotide primer for the detection of SNP TSC0008562
aaaggaaggaag

SEQ ID NO: 377777 - DNA, 12 bp, Artificial Sequence
  Oligonucleotide primer for the detection of SNP TSC0062489
cataataaacct

SEQ ID NO: 377778 - DNA, 12 bp, Artificial Sequence
  Oligonucleotide primer for the detection of SNP TSC0062489
tagtagataaaa

SEQ ID NO: 377779 - DNA, 12 bp, Artificial Sequence
  Oligonucleotide primer for the detection of SNP TSC0062490
tcttatccaact

SEQ ID NO: 377780 - DNA, 12 bp, Artificial Sequence
  Oligonucleotide primer for the detection of SNP TSC0062490
ataggatatata

SEQ ID NO: 377781 - DNA, 12 bp, Artificial Sequence
  Oligonucleotide primer for the detection of SNP TSC0062492
atacttctaaac

SEQ ID NO: 377782 - DNA, 12 bp, Artificial Sequence
  Oligonucleotide primer for the detection of SNP TSC0062492
aagttttttgta

SEQ ID NO: 377783 - DNA, 12 bp, Artificial Sequence
  Oligonucleotide primer for the detection of SNP TSC0007422
ttcaccttttac

SEQ ID NO: 377784 - DNA, 12 bp, Artificial Sequence
  Oligonucleotide primer for the detection of SNP TSC0007422
ttgttttatagg

SEQ ID NO: 377785 - DNA, 12 bp, Artificial Sequence
  Oligonucleotide primer for the detection of SNP TSC0007422
ctattctacaaa

SEQ ID NO: 377786 - DNA, 12 bp, Artificial Sequence
  Oligonucleotide primer for the detection of SNP TSC0062494
ttggtatttagt

SEQ ID NO: 377787 - DNA, 12 bp, Artificial Sequence
  Oligonucleotide primer for the detection of SNP TSC0062494
ctaacattcaat

SEQ ID NO: 377788 - DNA, 12 bp, Artificial Sequence
  Oligonucleotide primer for the detection of SNP TSC0062495
ggttggagtata

SEQ ID NO: 377789 - DNA, 12 bp, Artificial Sequence
  Oligonucleotide primer for the detection of SNP TSC0062496
aaaaattgaata

SEQ ID NO: 377790 - DNA, 12 bp, Artificial Sequence
  Oligonucleotide primer for the detection of SNP TSC0062497
taaaatgagtta

SEQ ID NO: 377791 - DNA, 12 bp, Artificial Sequence
  Oligonucleotide primer for the detection of SNP TSC0062498
atatccttaaaa

SEQ ID NO: 377792 - DNA, 12 bp, Artificial Sequence
  Oligonucleotide primer for the detection of SNP TSC0062498
tgagaaatagga

SEQ ID NO: 377793 - DNA, 12 bp, Artificial Sequence
  Oligonucleotide primer for the detection of SNP TSC0062500
aaccaaaaactc

SEQ ID NO: 377794 - DNA, 12 bp, Artificial Sequence
  Oligonucleotide primer for the detection of SNP TSC0009817
tgaattttaatt

SEQ ID NO: 377795 - DNA, 12 bp, Artificial Sequence
  Oligonucleotide primer for the detection of SNP TSC0009817
tttggatagaat

SEQ ID NO: 377796 - DNA, 12 bp, Artificial Sequence
  Oligonucleotide primer for the detection of SNP TSC0062501
gtatatttcgat

SEQ ID NO: 377797 - DNA, 12 bp, Artificial Sequence
  Oligonucleotide primer for the detection of SNP TSC0062501
aacacattccaa

SEQ ID NO: 377798 - DNA, 12 bp, Artificial Sequence
  Oligonucleotide primer for the detection of SNP TSC0062501
aacacattccga

SEQ ID NO: 377799 - DNA, 12 bp, Artificial Sequence
  Oligonucleotide primer for the detection of SNP TSC0062502
cctcctaaccct

SEQ ID NO: 377800 - DNA, 12 bp, Artificial Sequence
  Oligonucleotide primer for the detection of SNP TSC0062502
agattatggtta

SEQ ID NO: 377801 - DNA, 12 bp, Artificial Sequence
  Oligonucleotide primer for the detection of SNP TSC0062502
aaatcataatca

SEQ ID NO: 377802 - DNA, 12 bp, Artificial Sequence
  Oligonucleotide primer for the detection of SNP TSC0062505
cctaacaattct

SEQ ID NO: 377803 - DNA, 12 bp, Artificial Sequence
  Oligonucleotide primer for the detection of SNP TSC0062505
aatttagtttga

SEQ ID NO: 377804 - DNA, 12 bp, Artificial Sequence
  Oligonucleotide primer for the detection of SNP TSC0062506
tcaattttcata

SEQ ID NO: 377805 - DNA, 12 bp, Artificial Sequence
  Oligonucleotide primer for the detection of SNP TSC0062507
attacctccccc

SEQ ID NO: 377806 - DNA, 12 bp, Artificial Sequence
  Oligonucleotide primer for the detection of SNP TSC0062507
ttatgggaggga

SEQ ID NO: 377807 - DNA, 12 bp, Artificial Sequence
  Oligonucleotide primer for the detection of SNP TSC0062508
cttttccaatca

SEQ ID NO: 377808 - DNA, 12 bp, Artificial Sequence
  Oligonucleotide primer for the detection of SNP TSC0062508
ttagagtatttt

SEQ ID NO: 377809 - DNA, 12 bp, Artificial Sequence
  Oligonucleotide primer for the detection of SNP TSC0062508
ctaaaacacctt

SEQ ID NO: 377810 - DNA, 12 bp, Artificial Sequence
  Oligonucleotide primer for the detection of SNP TSC0062509
aactcccctccc

SEQ ID NO: 377811 - DNA, 12 bp, Artificial Sequence
  Oligonucleotide primer for the detection of SNP TSC0062509
tgattaggtgtg

SEQ ID NO: 377812 - DNA, 12 bp, Artificial Sequence
  Oligonucleotide primer for the detection of SNP TSC0062510
tacctctaacta

SEQ ID NO: 377813 - DNA, 12 bp, Artificial Sequence
  Oligonucleotide primer for the detection of SNP TSC0062510
taaattatctca

SEQ ID NO: 377814 - DNA, 12 bp, Artificial Sequence
  Oligonucleotide primer for the detection of SNP TSC0006243
aaacattaatta

SEQ ID NO: 377815 - DNA, 12 bp, Artificial Sequence
  Oligonucleotide primer for the detection of SNP TSC0006243
tgtgttttaatt

SEQ ID NO: 377816 - DNA, 12 bp, Artificial Sequence
  Oligonucleotide primer for the detection of SNP TSC0006243
tatattccaatt

SEQ ID NO: 377817 - DNA, 12 bp, Artificial Sequence
  Oligonucleotide primer for the detection of SNP TSC0006243
gaatattaatta

SEQ ID NO: 377818 - DNA, 12 bp, Artificial Sequence
  Oligonucleotide primer for the detection of SNP TSC0062512
ccatatactcaa

SEQ ID NO: 377819 - DNA, 12 bp, Artificial Sequence
  Oligonucleotide primer for the detection of SNP TSC0062512
ccatatactcga

SEQ ID NO: 377820 - DNA, 12 bp, Artificial Sequence
  Oligonucleotide primer for the detection of SNP TSC0062512
aattgttttatg

SEQ ID NO: 377821 - DNA, 12 bp, Artificial Sequence
  Oligonucleotide primer for the detection of SNP TSC0062512
aattactttata

SEQ ID NO: 377822 - DNA, 12 bp, Artificial Sequence
  Oligonucleotide primer for the detection of SNP TSC0062512
gattatatattt

SEQ ID NO: 377823 - DNA, 12 bp, Artificial Sequence
  Oligonucleotide primer for the detection of SNP TSC0062512
gattatatattc

SEQ ID NO: 377824 - DNA, 12 bp, Artificial Sequence
  Oligonucleotide primer for the detection of SNP TSC0062513
ctactcataaca

SEQ ID NO: 377825 - DNA, 12 bp, Artificial Sequence
  Oligonucleotide primer for the detection of SNP TSC0062513
tatttgtagagt

SEQ ID NO: 377826 - DNA, 12 bp, Artificial Sequence
  Oligonucleotide primer for the detection of SNP TSC0062513
ttgtttatggta

SEQ ID NO: 377827 - DNA, 12 bp, Artificial Sequence
  Oligonucleotide primer for the detection of SNP TSC0006902
gtgggggttgtg

SEQ ID NO: 377828 - DNA, 12 bp, Artificial Sequence
  Oligonucleotide primer for the detection of SNP TSC0006902
gcgggggttgtg

SEQ ID NO: 377829 - DNA, 12 bp, Artificial Sequence
  Oligonucleotide primer for the detection of SNP TSC0006902
gtgggggttgcg

SEQ ID NO: 377830 - DNA, 12 bp, Artificial Sequence
  Oligonucleotide primer for the detection of SNP TSC0006902
gcgggggttgcg

SEQ ID NO: 377831 - DNA, 12 bp, Artificial Sequence
  Oligonucleotide primer for the detection of SNP TSC0008188
tagtaagatttt

SEQ ID NO: 377832 - DNA, 12 bp, Artificial Sequence
  Oligonucleotide primer for the detection of SNP TSC0062517
ataaatattcac

SEQ ID NO: 377833 - DNA, 12 bp, Artificial Sequence
  Oligonucleotide primer for the detection of SNP TSC0062517
aggtgagggaag

SEQ ID NO: 377834 - DNA, 12 bp, Artificial Sequence
  Oligonucleotide primer for the detection of SNP TSC0009166
aaaaattacgac

SEQ ID NO: 377835 - DNA, 12 bp, Artificial Sequence
  Oligonucleotide primer for the detection of SNP TSC0009166
agtataagaggt

SEQ ID NO: 377836 - DNA, 12 bp, Artificial Sequence
  Oligonucleotide primer for the detection of SNP TSC0009166
acacaaaaaata

SEQ ID NO: 377837 - DNA, 12 bp, Artificial Sequence
  Oligonucleotide primer for the detection of SNP TSC0009166
ggaattgtgatt

SEQ ID NO: 377838 - DNA, 12 bp, Artificial Sequence
  Oligonucleotide primer for the detection of SNP TSC0009166
ggaattgcgatt

SEQ ID NO: 377839 - DNA, 12 bp, Artificial Sequence
  Oligonucleotide primer for the detection of SNP TSC0009844
tatatttaagtg

SEQ ID NO: 377840 - DNA, 12 bp, Artificial Sequence
  Oligonucleotide primer for the detection of SNP TSC0006790
cacctattccac

SEQ ID NO: 377841 - DNA, 12 bp, Artificial Sequence
  Oligonucleotide primer for the detection of SNP TSC0006790
ggagaataaatg

SEQ ID NO: 377842 - DNA, 12 bp, Artificial Sequence
  Oligonucleotide primer for the detection of SNP TSC0062519
gaatatttttat

SEQ ID NO: 377843 - DNA, 12 bp, Artificial Sequence
  Oligonucleotide primer for the detection of SNP TSC0062519
aaaacatcttta

SEQ ID NO: 377844 - DNA, 12 bp, Artificial Sequence
  Oligonucleotide primer for the detection of SNP TSC0062519
tgaaagtgaagg

SEQ ID NO: 377845 - DNA, 12 bp, Artificial Sequence
  Oligonucleotide primer for the detection of SNP TSC0062520
gtggttgaatgg

SEQ ID NO: 377846 - DNA, 12 bp, Artificial Sequence
  Oligonucleotide primer for the detection of SNP TSC0062521
taatttattagt

SEQ ID NO: 377847 - DNA, 12 bp, Artificial Sequence
  Oligonucleotide primer for the detection of SNP TSC0062521
taactcattaat

SEQ ID NO: 377848 - DNA, 12 bp, Artificial Sequence
  Oligonucleotide primer for the detection of SNP TSC0062523
caataaaacctc

SEQ ID NO: 377849 - DNA, 12 bp, Artificial Sequence
  Oligonucleotide primer for the detection of SNP TSC0062523
tttataaagaaa

SEQ ID NO: 377850 - DNA, 12 bp, Artificial Sequence
  Oligonucleotide primer for the detection of SNP TSC0062524
ttaatccttaac

SEQ ID NO: 377851 - DNA, 12 bp, Artificial Sequence
  Oligonucleotide primer for the detection of SNP TSC0062524
gaatggttttgg

SEQ ID NO: 377852 - DNA, 12 bp, Artificial Sequence
  Oligonucleotide primer for the detection of SNP TSC0062525
atattgtattag

SEQ ID NO: 377853 - DNA, 12 bp, Artificial Sequence
  Oligonucleotide primer for the detection of SNP TSC0062525
gtaattgtagat

SEQ ID NO: 377854 - DNA, 12 bp, Artificial Sequence
  Oligonucleotide primer for the detection of SNP TSC0062526
ttttttttcact

SEQ ID NO: 377855 - DNA, 12 bp, Artificial Sequence
  Oligonucleotide primer for the detection of SNP TSC0062526
tttaaatggaag

SEQ ID NO: 377856 - DNA, 12 bp, Artificial Sequence
  Oligonucleotide primer for the detection of SNP TSC0062527
attatataatta

SEQ ID NO: 377857 - DNA, 12 bp, Artificial Sequence
  Oligonucleotide primer for the detection of SNP TSC0062527
ataaaaaggttt

SEQ ID NO: 377858 - DNA, 12 bp, Artificial Sequence
  Oligonucleotide primer for the detection of SNP TSC0062527
caaaaaaactta

SEQ ID NO: 377859 - DNA, 12 bp, Artificial Sequence
  Oligonucleotide primer for the detection of SNP TSC0062527
ttgtgtggttgt

SEQ ID NO: 377860 - DNA, 12 bp, Artificial Sequence
  Oligonucleotide primer for the detection of SNP TSC0008827
ataattaatcta

SEQ ID NO: 377861 - DNA, 12 bp, Artificial Sequence
  Oligonucleotide primer for the detection of SNP TSC0008827
atattgtaattt

SEQ ID NO: 377862 - DNA, 12 bp, Artificial Sequence
  Oligonucleotide primer for the detection of SNP TSC0008827
ctcatactataa

SEQ ID NO: 377863 - DNA, 12 bp, Artificial Sequence
  Oligonucleotide primer for the detection of SNP TSC0008827
agtggttgattt

SEQ ID NO: 377864 - DNA, 12 bp, Artificial Sequence
  Oligonucleotide primer for the detection of SNP TSC0010505
atataacctttc

SEQ ID NO: 377865 - DNA, 12 bp, Artificial Sequence
  Oligonucleotide primer for the detection of SNP TSC0010505
atatagagaaga

SEQ ID NO: 377866 - DNA, 12 bp, Artificial Sequence
  Oligonucleotide primer for the detection of SNP TSC0010505
atgtggtttttt

SEQ ID NO: 377867 - DNA, 12 bp, Artificial Sequence
  Oligonucleotide primer for the detection of SNP TSC0010506
aatctaatttta

SEQ ID NO: 377868 - DNA, 12 bp, Artificial Sequence
  Oligonucleotide primer for the detection of SNP TSC0010506
ttttttggggat

SEQ ID NO: 377869 - DNA, 12 bp, Artificial Sequence
  Oligonucleotide primer for the detection of SNP TSC0010506
tccctaaaaaca

SEQ ID NO: 377870 - DNA, 12 bp, Artificial Sequence
  Oligonucleotide primer for the detection of SNP TSC0010506
gagtttgatttt

SEQ ID NO: 377871 - DNA, 12 bp, Artificial Sequence
  Oligonucleotide primer for the detection of SNP TSC0062529
ctacacctaatc

SEQ ID NO: 377872 - DNA, 12 bp, Artificial Sequence
  Oligonucleotide primer for the detection of SNP TSC0062530
gattcactacaa

SEQ ID NO: 377873 - DNA, 12 bp, Artificial Sequence
  Oligonucleotide primer for the detection of SNP TSC0062530
cgggaggtgaag

SEQ ID NO: 377874 - DNA, 12 bp, Artificial Sequence
  Oligonucleotide primer for the detection of SNP TSC0062530
cgggaggcgaag

SEQ ID NO: 377875 - DNA, 12 bp, Artificial Sequence
  Oligonucleotide primer for the detection of SNP TSC0062530
caaaaaacgaaa

SEQ ID NO: 377876 - DNA, 12 bp, Artificial Sequence
  Oligonucleotide primer for the detection of SNP TSC0062530
cgaaaaacgaaa

SEQ ID NO: 377877 - DNA, 12 bp, Artificial Sequence
  Oligonucleotide primer for the detection of SNP TSC0009371
ccttctatcttt

SEQ ID NO: 377878 - DNA, 12 bp, Artificial Sequence
  Oligonucleotide primer for the detection of SNP TSC0009371
gtaggatgggtg

SEQ ID NO: 377879 - DNA, 12 bp, Artificial Sequence
  Oligonucleotide primer for the detection of SNP TSC0009372
aaaatgaaaatt

SEQ ID NO: 377880 - DNA, 12 bp, Artificial Sequence
  Oligonucleotide primer for the detection of SNP TSC0062531
tgtataaatttg

SEQ ID NO: 377881 - DNA, 12 bp, Artificial Sequence
  Oligonucleotide primer for the detection of SNP TSC0062532
ataaactaacac

SEQ ID NO: 377882 - DNA, 12 bp, Artificial Sequence
  Oligonucleotide primer for the detection of SNP TSC0062532
ataaactaacgc

SEQ ID NO: 377883 - DNA, 12 bp, Artificial Sequence
  Oligonucleotide primer for the detection of SNP TSC0062532
gtaattttgaga

SEQ ID NO: 377884 - DNA, 12 bp, Artificial Sequence
  Oligonucleotide primer for the detection of SNP TSC0062532
acaattctaaaa

SEQ ID NO: 377885 - DNA, 12 bp, Artificial Sequence
  Oligonucleotide primer for the detection of SNP TSC0062532
atgagttaatgt

SEQ ID NO: 377886 - DNA, 12 bp, Artificial Sequence
  Oligonukleotid-Primer
atgagttaacgt

SEQ ID NO: 377887 - DNA, 12 bp, Artificial Sequence
  Oligonucleotide primer for the detection of SNP TSC0062533
aaactcataccc

SEQ ID NO: 377888 - DNA, 12 bp, Artificial Sequence
  Oligonucleotide primer for the detection of SNP TSC0062535
tccccaccctca

SEQ ID NO: 377889 - DNA, 12 bp, Artificial Sequence
  Oligonucleotide primer for the detection of SNP TSC0010452
tctccaccctac

SEQ ID NO: 377890 - DNA, 12 bp, Artificial Sequence
  Oligonucleotide primer for the detection of SNP TSC0010452
tattttgtgaag

SEQ ID NO: 377891 - DNA, 12 bp, Artificial Sequence
  Oligonucleotide primer for the detection of SNP TSC0062536
ccaaatttcttt

SEQ ID NO: 377892 - DNA, 12 bp, Artificial Sequence
  Oligonucleotide primer for the detection of SNP TSC0062537
tttccctttcca

SEQ ID NO: 377893 - DNA, 12 bp, Artificial Sequence
  Oligonucleotide primer for the detection of SNP TSC0062537
aaagaaagaaat

SEQ ID NO: 377894 - DNA, 12 bp, Artificial Sequence
  Oligonucleotide primer for the detection of SNP TSC0062538
aaatccaaacat

SEQ ID NO: 377895 - DNA, 12 bp, Artificial Sequence
  Oligonucleotide primer for the detection of SNP TSC0062540
ccattaactttc

SEQ ID NO: 377896 - DNA, 12 bp, Artificial Sequence
  Oligonucleotide primer for the detection of SNP TSC0062540
tagatttaaaga

SEQ ID NO: 377897 - DNA, 12 bp, Artificial Sequence
  Oligonucleotide primer for the detection of SNP TSC0062542
acacatttattt

SEQ ID NO: 377898 - DNA, 12 bp, Artificial Sequence
  Oligonucleotide primer for the detection of SNP TSC0062542
acacgtttattt

SEQ ID NO: 377899 - DNA, 12 bp, Artificial Sequence
  Oligonucleotide primer for the detection of SNP TSC0062542
gatataagtaag

SEQ ID NO: 377900 - DNA, 12 bp, Artificial Sequence
  Oligonucleotide primer for the detection of SNP TSC0006316
atcctttcaaat

SEQ ID NO: 377901 - DNA, 12 bp, Artificial Sequence
  Oligonucleotide primer for the detection of SNP TSC0006316
tgaaattaaaag

SEQ ID NO: 377902 - DNA, 12 bp, Artificial Sequence
  Oligonucleotide primer for the detection of SNP TSC0001485
tattcaccacca

SEQ ID NO: 377903 - DNA, 12 bp, Artificial Sequence
  Oligonucleotide primer for the detection of SNP TSC0001485
ttatattgtttt

SEQ ID NO: 377904 - DNA, 12 bp, Artificial Sequence
  Oligonucleotide primer for the detection of SNP TSC0001485
cccatactattc

SEQ ID NO: 377905 - DNA, 12 bp, Artificial Sequence
  Oligonucleotide primer for the detection of SNP TSC0001485
atttattattat

SEQ ID NO: 377906 - DNA, 12 bp, Artificial Sequence
  Oligonucleotide primer for the detection of SNP TSC0001485
atttattattac

SEQ ID NO: 377907 - DNA, 12 bp, Artificial Sequence
  Oligonucleotide primer for the detection of SNP TSC0062545
cctttattaaat

SEQ ID NO: 377908 - DNA, 12 bp, Artificial Sequence
  Oligonucleotide primer for the detection of SNP TSC0062545
aatatttgtaaa

SEQ ID NO: 377909 - DNA, 12 bp, Artificial Sequence
  Oligonucleotide primer for the detection of SNP TSC0062546
tttacctatacc

SEQ ID NO: 377910 - DNA, 12 bp, Artificial Sequence
  Oligonucleotide primer for the detection of SNP TSC0062546
aattttttggga

SEQ ID NO: 377911 - DNA, 12 bp, Artificial Sequence
  Oligonucleotide primer for the detection of SNP TSC0062546
tttgtttatgtt

SEQ ID NO: 377912 - DNA, 12 bp, Artificial Sequence
  Oligonucleotide primer for the detection of SNP TSC0000656
gggtagtgtaat

SEQ ID NO: 377913 - DNA, 12 bp, Artificial Sequence
  Oligonucleotide primer for the detection of SNP TSC0000656
gggtagcgtaat

SEQ ID NO: 377914 - DNA, 12 bp, Artificial Sequence
  Oligonukleotid-Primer
aaataacacaat

SEQ ID NO: 377915 - DNA, 12 bp, Artificial Sequence
  Oligonucleotide primer for the detection of SNP TSC0000656
aaataacgcaat

SEQ ID NO: 377916 - DNA, 12 bp, Artificial Sequence
  Oligonucleotide primer for the detection of SNP TSC0000656
gtttagtttaag

SEQ ID NO: 377917 - DNA, 12 bp, Artificial Sequence
  Oligonucleotide primer for the detection of SNP TSC0062547
ataattgagtag

SEQ ID NO: 377918 - DNA, 12 bp, Artificial Sequence
  Oligonukleotid-Primer
gggaatttgttt

SEQ ID NO: 377919 - DNA, 12 bp, Artificial Sequence
  Oligonucleotide primer for the detection of SNP TSC0062548
aaatctactcaa

SEQ ID NO: 377920 - DNA, 12 bp, Artificial Sequence
  Oligonucleotide primer for the detection of SNP TSC0062549
ctaaaaaatatc

SEQ ID NO: 377921 - DNA, 12 bp, Artificial Sequence
  Oligonucleotide primer for the detection of SNP TSC0062549
tgtttgtaggtg

SEQ ID NO: 377922 - DNA, 12 bp, Artificial Sequence
  Oligonukleotid-Primer
ctttctctttaa

SEQ ID NO: 377923 - DNA, 12 bp, Artificial Sequence
  Oligonucleotide primer for the detection of SNP TSC0062550
atttcccaacaa

SEQ ID NO: 377924 - DNA, 12 bp, Artificial Sequence
  Oligonucleotide primer for the detection of SNP TSC0062551
cctcataatcta

SEQ ID NO: 377925 - DNA, 12 bp, Artificial Sequence
  Oligonucleotide primer for the detection of SNP TSC0062551
cctcgtaatcta

SEQ ID NO: 377926 - DNA, 12 bp, Artificial Sequence
  Oligonukleotid-Primer
atatagaaattg

SEQ ID NO: 377927 - DNA, 12 bp, Artificial Sequence
  Oligonucleotide primer for the detection of SNP TSC0062552
aaaaacatccaa

SEQ ID NO: 377928 - DNA, 12 bp, Artificial Sequence
  Oligonucleotide primer for the detection of SNP TSC0062552
ttttaaaattgt

SEQ ID NO: 377929 - DNA, 12 bp, Artificial Sequence
  Oligonucleotide primer for the detection of SNP TSC0062552
tcttcaaaatta

SEQ ID NO: 377930 - DNA, 12 bp, Artificial Sequence
  Oligonucleotide primer for the detection of SNP TSC0062552
ttaagaatattt

SEQ ID NO: 377931 - DNA, 12 bp, Artificial Sequence
  Oligonucleotide primer for the detection of SNP TSC0062553
cctacataatcc

SEQ ID NO: 377932 - DNA, 12 bp, Artificial Sequence
  Oligonucleotide primer for the detection of SNP TSC0062553
ttatttgtgata

SEQ ID NO: 377933 - DNA, 12 bp, Artificial Sequence
  Oligonucleotide primer for the detection of SNP TSC0062554
caaacattctct

SEQ ID NO: 377934 - DNA, 12 bp, Artificial Sequence
  Oligonucleotide primer for the detection of SNP TSC0062554
caaacgttctct

SEQ ID NO: 377935 - DNA, 12 bp, Artificial Sequence
  Oligonucleotide primer for the detection of SNP TSC0062554
atacttaataca

SEQ ID NO: 377936 - DNA, 12 bp, Artificial Sequence
  Oligonucleotide primer for the detection of SNP TSC0007165
cacaaactctct

SEQ ID NO: 377937 - DNA, 12 bp, Artificial Sequence
  Oligonucleotide primer for the detection of SNP TSC0007165
ggtagatgagag

SEQ ID NO: 377938 - DNA, 12 bp, Artificial Sequence
  Oligonukleotid-Primer
agaatttaagga

SEQ ID NO: 377939 - DNA, 12 bp, Artificial Sequence
  Oligonucleotide primer for the detection of SNP TSC0008902
aaaatatctaaa

SEQ ID NO: 377940 - DNA, 12 bp, Artificial Sequence
  Oligonucleotide primer for the detection of SNP TSC0008902
acacatattcta

SEQ ID NO: 377941 - DNA, 12 bp, Artificial Sequence
  Oligonucleotide primer for the detection of SNP TSC0008902
taaggagtattt

SEQ ID NO: 377942 - DNA, 12 bp, Artificial Sequence
  Oligonukleotid-Primer
aaaaactttatc

SEQ ID NO: 377943 - DNA, 12 bp, Artificial Sequence
  Oligonucleotide primer for the detection of SNP TSC0062556
tacaacctccca

SEQ ID NO: 377944 - DNA, 12 bp, Artificial Sequence
  Oligonucleotide primer for the detection of SNP TSC0062556
gaaagttttgtt

SEQ ID NO: 377945 - DNA, 12 bp, Artificial Sequence
  Oligonucleotide primer for the detection of SNP TSC0062556
gaaagttttgtc

SEQ ID NO: 377946 - DNA, 12 bp, Artificial Sequence
  Oligonucleotide primer for the detection of SNP TSC0062558
atatgtgtttga

SEQ ID NO: 377947 - DNA, 12 bp, Artificial Sequence
  Oligonucleotide primer for the detection of SNP TSC0006665
cttcaaattttt

SEQ ID NO: 377948 - DNA, 12 bp, Artificial Sequence
  Oligonucleotide primer for the detection of SNP TSC0006666
tatcattcctta

SEQ ID NO: 377949 - DNA, 12 bp, Artificial Sequence
  Oligonucleotide primer for the detection of SNP TSC0006666
agggagaagttt

SEQ ID NO: 377950 - DNA, 12 bp, Artificial Sequence
  Oligonukleotid-Primer
cacttaaaatat

SEQ ID NO: 377951 - DNA, 12 bp, Artificial Sequence
  Oligonucleotide primer for the detection of SNP TSC0006667
aagatattatta

SEQ ID NO: 377952 - DNA, 12 bp, Artificial Sequence
  Oligonucleotide primer for the detection of SNP TSC0006668
aataaaatccac

SEQ ID NO: 377953 - DNA, 12 bp, Artificial Sequence
  Oligonucleotide primer for the detection of SNP TSC0006668
ttaggtttttgg

SEQ ID NO: 377954 - DNA, 12 bp, Artificial Sequence
  Oligonukleotid-Primer
tttgggttttgg

SEQ ID NO: 377955 - DNA, 12 bp, Artificial Sequence
  Oligonucleotide primer for the detection of SNP TSC0062560
caatttaataat

SEQ ID NO: 377956 - DNA, 12 bp, Artificial Sequence
  Oligonucleotide primer for the detection of SNP TSC0062560
gaagtgatatta

SEQ ID NO: 377957 - DNA, 12 bp, Artificial Sequence
  Oligonucleotide primer for the detection of SNP TSC0062561
caactacaaaca

SEQ ID NO: 377958 - DNA, 12 bp, Artificial Sequence
  Oligonukleotid-Primer
cgactacaaaca

SEQ ID NO: 377959 - DNA, 12 bp, Artificial Sequence
  Oligonucleotide primer for the detection of SNP TSC0062561
ttttttgagagt

SEQ ID NO: 377960 - DNA, 12 bp, Artificial Sequence
  Oligonucleotide primer for the detection of SNP TSC0062561
ttccctaaaaac

SEQ ID NO: 377961 - DNA, 12 bp, Artificial Sequence
  Oligonucleotide primer for the detection of SNP TSC0062561
tggttgtaggta

SEQ ID NO: 377962 - DNA, 12 bp, Artificial Sequence
  Oligonucleotide primer for the detection of SNP TSC0062561
cggttgtaggta

SEQ ID NO: 377963 - DNA, 12 bp, Artificial Sequence
  Oligonucleotide primer for the detection of SNP TSC0062562
ttttggttgtag

SEQ ID NO: 377964 - DNA, 12 bp, Artificial Sequence
  Oligonucleotide primer for the detection of SNP TSC0062562
tttcggttgtag

SEQ ID NO: 377965 - DNA, 12 bp, Artificial Sequence
  Oligonucleotide primer for the detection of SNP TSC0062563
cccctactttac

SEQ ID NO: 377966 - DNA, 12 bp, Artificial Sequence
  Oligonucleotide primer for the detection of SNP TSC0062564
aattatttgtta

SEQ ID NO: 377967 - DNA, 12 bp, Artificial Sequence
  Oligonucleotide primer for the detection of SNP TSC0062564
aatcacttatta

SEQ ID NO: 377968 - DNA, 12 bp, Artificial Sequence
  Oligonucleotide primer for the detection of SNP TSC0001107
tatcttcaacat

SEQ ID NO: 377969 - DNA, 12 bp, Artificial Sequence
  Oligonucleotide primer for the detection of SNP TSC0001107
atattgaagata

SEQ ID NO: 377970 - DNA, 12 bp, Artificial Sequence
  Oligonucleotide primer for the detection of SNP TSC0062565
aataaaacaccc

SEQ ID NO: 377971 - DNA, 12 bp, Artificial Sequence
  Oligonucleotide primer for the detection of SNP TSC0062565
aataaaacgccc

SEQ ID NO: 377972 - DNA, 12 bp, Artificial Sequence
  Oligonucleotide primer for the detection of SNP TSC0062565
gtattaatttta

SEQ ID NO: 377973 - DNA, 12 bp, Artificial Sequence
  Oligonucleotide primer for the detection of SNP TSC0062565
acactaattcca

SEQ ID NO: 377974 - DNA, 12 bp, Artificial Sequence
  Oligonucleotide primer for the detection of SNP TSC0062565
agtggaatgttt

SEQ ID NO: 377975 - DNA, 12 bp, Artificial Sequence
  Oligonucleotide primer for the detection of SNP TSC0062565
agtggaacgttt

SEQ ID NO: 377976 - DNA, 12 bp, Artificial Sequence
  Oligonucleotide primer for the detection of SNP TSC0062566
ataatcttcaat

SEQ ID NO: 377977 - DNA, 12 bp, Artificial Sequence
  Oligonucleotide primer for the detection of SNP TSC0062566
tatagatgagga

SEQ ID NO: 377978 - DNA, 12 bp, Artificial Sequence
  Oligonucleotide primer for the detection of SNP TSC0062566
gtgatttttagt

SEQ ID NO: 377979 - DNA, 12 bp, Artificial Sequence
  Oligonucleotide primer for the detection of SNP TSC0062568
tcttttataaat

SEQ ID NO: 377980 - DNA, 12 bp, Artificial Sequence
  Oligonucleotide primer for the detection of SNP TSC0062568
agaagtattata

SEQ ID NO: 377981 - DNA, 12 bp, Artificial Sequence
  Oligonucleotide primer for the detection of SNP TSC0000979
ctcctttcctta

SEQ ID NO: 377982 - DNA, 12 bp, Artificial Sequence
  Oligonucleotide primer for the detection of SNP TSC0000979
gtaaaataagtt

SEQ ID NO: 377983 - DNA, 12 bp, Artificial Sequence
  Oligonucleotide primer for the detection of SNP TSC0000979
gtaaaataagtc

SEQ ID NO: 377984 - DNA, 12 bp, Artificial Sequence
  Oligonucleotide primer for the detection of SNP TSC0062570
ctttaaacctca

SEQ ID NO: 377985 - DNA, 12 bp, Artificial Sequence
  Oligonucleotide primer for the detection of SNP TSC0062570
gttaatgtttag

SEQ ID NO: 377986 - DNA, 12 bp, Artificial Sequence
  Oligonucleotide primer for the detection of SNP TSC0062570
accaatattcaa

SEQ ID NO: 377987 - DNA, 12 bp, Artificial Sequence
  Oligonucleotide primer for the detection of SNP TSC0010178
taataaactttt

SEQ ID NO: 377988 - DNA, 12 bp, Artificial Sequence
  Oligonucleotide primer for the detection of SNP TSC0010178
ttgttatgaatt

SEQ ID NO: 377989 - DNA, 12 bp, Artificial Sequence
  Oligonucleotide primer for the detection of SNP TSC0010178
ttaccataaatc

SEQ ID NO: 377990 - DNA, 12 bp, Artificial Sequence
  Oligonucleotide primer for the detection of SNP TSC0062571
acacataacatt

SEQ ID NO: 377991 - DNA, 12 bp, Artificial Sequence
  Oligonucleotide primer for the detection of SNP TSC0062571
tttcactttttt

SEQ ID NO: 377992 - DNA, 12 bp, Artificial Sequence
  Oligonucleotide primer for the detection of SNP TSC0062571
atatataatatt

SEQ ID NO: 377993 - DNA, 12 bp, Artificial Sequence
  Oligonucleotide primer for the detection of SNP TSC0062572
ttcattttactt

SEQ ID NO: 377994 - DNA, 12 bp, Artificial Sequence
  Oligonucleotide primer for the detection of SNP TSC0062572
ataagagagtaa

SEQ ID NO: 377995 - DNA, 12 bp, Artificial Sequence
  Oligonucleotide primer for the detection of SNP TSC0062573
ccttccttaaac

SEQ ID NO: 377996 - DNA, 12 bp, Artificial Sequence
  Oligonucleotide primer for the detection of SNP TSC0062573
taaaacacattc

SEQ ID NO: 377997 - DNA, 12 bp, Artificial Sequence
  Oligonucleotide primer for the detection of SNP TSC0062574
cgtatatatata

SEQ ID NO: 377998 - DNA, 12 bp, Artificial Sequence
  Oligonucleotide primer for the detection of SNP TSC0062575
aagtattaaaag

SEQ ID NO: 377999 - DNA, 12 bp, Artificial Sequence
  Oligonucleotide primer for the detection of SNP TSC0062576
tccaaattaaaa

SEQ ID NO: 378000 - DNA, 12 bp, Artificial Sequence
  Oligonucleotide primer for the detection of SNP TSC0062576
gtgggatataaa

SEQ ID NO: 378001 - DNA, 12 bp, Artificial Sequence
  Oligonucleotide primer for the detection of SNP TSC0062576
ttagattaaaat

SEQ ID NO: 378002 - DNA, 12 bp, Artificial Sequence
  Oligonucleotide primer for the detection of SNP TSC0062577
tcactctaattt

SEQ ID NO: 378003 - DNA, 12 bp, Artificial Sequence
  Oligonucleotide primer for the detection of SNP TSC0062577
tttaaaattgag

SEQ ID NO: 378004 - DNA, 12 bp, Artificial Sequence
  Oligonucleotide primer for the detection of SNP TSC0062579
aacactccatac

SEQ ID NO: 378005 - DNA, 12 bp, Artificial Sequence
  Oligonucleotide primer for the detection of SNP TSC0062579
aacactccgtac

SEQ ID NO: 378006 - DNA, 12 bp, Artificial Sequence
  Oligonucleotide primer for the detection of SNP TSC0062580
aatcgaaaaatt

SEQ ID NO: 378007 - DNA, 12 bp, Artificial Sequence
  Oligonucleotide primer for the detection of SNP TSC0062581
tttgggagtttt

SEQ ID NO: 378008 - DNA, 12 bp, Artificial Sequence
  Oligonucleotide primer for the detection of SNP TSC0062581
gaatttgaggat

SEQ ID NO: 378009 - DNA, 12 bp, Artificial Sequence
  Oligonucleotide primer for the detection of SNP TSC0062582
aaaaatctctca

SEQ ID NO: 378010 - DNA, 12 bp, Artificial Sequence
  Oligonucleotide primer for the detection of SNP TSC0062582
ttatttgtggtt

SEQ ID NO: 378011 - DNA, 12 bp, Artificial Sequence
  Oligonucleotide primer for the detection of SNP TSC0062582
ttatttgcggtt

SEQ ID NO: 378012 - DNA, 12 bp, Artificial Sequence
  Oligonucleotide primer for the detection of SNP TSC0062582
tcatctacaacc

SEQ ID NO: 378013 - DNA, 12 bp, Artificial Sequence
  Oligonucleotide primer for the detection of SNP TSC0062582
tcatctacgacc

SEQ ID NO: 378014 - DNA, 12 bp, Artificial Sequence
  Oligonucleotide primer for the detection of SNP TSC0062582
aggagtttttta

SEQ ID NO: 378015 - DNA, 12 bp, Artificial Sequence
  Oligonucleotide primer for the detection of SNP TSC0062583
ttgtaggttttt

SEQ ID NO: 378016 - DNA, 12 bp, Artificial Sequence
  Oligonucleotide primer for the detection of SNP TSC0062583
ctataaactctc

SEQ ID NO: 378017 - DNA, 12 bp, Artificial Sequence
  Oligonucleotide primer for the detection of SNP TSC0062583
gaataaagagag

SEQ ID NO: 378018 - DNA, 12 bp, Artificial Sequence
  Oligonucleotide primer for the detection of SNP TSC0062584
attctccaaatt

SEQ ID NO: 378019 - DNA, 12 bp, Artificial Sequence
  Oligonucleotide primer for the detection of SNP TSC0062584
gttctccaaatt

SEQ ID NO: 378020 - DNA, 12 bp, Artificial Sequence
  Oligonucleotide primer for the detection of SNP TSC0062584
aaattttgagaa

SEQ ID NO: 378021 - DNA, 12 bp, Artificial Sequence
  Oligonucleotide primer for the detection of SNP TSC0062585
accaaacattat

SEQ ID NO: 378022 - DNA, 12 bp, Artificial Sequence
  Oligonucleotide primer for the detection of SNP TSC0062585
ttttagagtttg

SEQ ID NO: 378023 - DNA, 12 bp, Artificial Sequence
  Oligonucleotide primer for the detection of SNP TSC0062586
cacaaccctcct

SEQ ID NO: 378024 - DNA, 12 bp, Artificial Sequence
  Oligonucleotide primer for the detection of SNP TSC0062586
ggtatgattatt

SEQ ID NO: 378025 - DNA, 12 bp, Artificial Sequence
  Oligonucleotide primer for the detection of SNP TSC0062590
aaaatcaataat

SEQ ID NO: 378026 - DNA, 12 bp, Artificial Sequence
  Oligonucleotide primer for the detection of SNP TSC0062590
taattgatatga

SEQ ID NO: 378027 - DNA, 12 bp, Artificial Sequence
  Oligonucleotide primer for the detection of SNP TSC0062590
taatcgatatga

SEQ ID NO: 378028 - DNA, 12 bp, Artificial Sequence
  Oligonucleotide primer for the detection of SNP TSC0062590
taattgatacga

SEQ ID NO: 378029 - DNA, 12 bp, Artificial Sequence
  Oligonucleotide primer for the detection of SNP TSC0062590
taatcgatacga

SEQ ID NO: 378030 - DNA, 12 bp, Artificial Sequence
  Oligonucleotide primer for the detection of SNP TSC0062591
acacataataat

SEQ ID NO: 378031 - DNA, 12 bp, Artificial Sequence
  Oligonucleotide primer for the detection of SNP TSC0062593
aggaggttagag

SEQ ID NO: 378032 - DNA, 12 bp, Artificial Sequence
  Oligonucleotide primer for the detection of SNP TSC0062593
aagggatgaaat

SEQ ID NO: 378033 - DNA, 12 bp, Artificial Sequence
  Oligonucleotide primer for the detection of SNP TSC0062598
tcactaaataat

SEQ ID NO: 378034 - DNA, 12 bp, Artificial Sequence
  Oligonucleotide primer for the detection of SNP TSC0062598
aaaggatttgaa

SEQ ID NO: 378035 - DNA, 12 bp, Artificial Sequence
  Oligonucleotide primer for the detection of SNP TSC0062600
caaaaatttacc

SEQ ID NO: 378036 - DNA, 12 bp, Artificial Sequence
  Oligonucleotide primer for the detection of SNP TSC0062600
gattttgtgtag

SEQ ID NO: 378037 - DNA, 12 bp, Artificial Sequence
  Oligonucleotide primer for the detection of SNP TSC0062600
aattctatataa

SEQ ID NO: 378038 - DNA, 12 bp, Artificial Sequence
  Oligonucleotide primer for the detection of SNP TSC0062600
tagaaatttatt

SEQ ID NO: 378039 - DNA, 12 bp, Artificial Sequence
  Oligonucleotide primer for the detection of SNP TSC0005272
cctaccataatc

SEQ ID NO: 378040 - DNA, 12 bp, Artificial Sequence
  Oligonucleotide primer for the detection of SNP TSC0005272
tgtttttaggag

SEQ ID NO: 378041 - DNA, 12 bp, Artificial Sequence
  Oligonucleotide primer for the detection of SNP TSC0005272
cgtttttaggag

SEQ ID NO: 378042 - DNA, 12 bp, Artificial Sequence
  Oligonucleotide primer for the detection of SNP TSC0005272
actcccaaaaaa

SEQ ID NO: 378043 - DNA, 12 bp, Artificial Sequence
  Oligonucleotide primer for the detection of SNP TSC0005272
gctcccaaaaaa

SEQ ID NO: 378044 - DNA, 12 bp, Artificial Sequence
  Oligonucleotide primer for the detection of SNP TSC0005272
tgttatggtttt

SEQ ID NO: 378045 - DNA, 12 bp, Artificial Sequence
  Oligonucleotide primer for the detection of SNP TSC0062605
cactcacactat

SEQ ID NO: 378046 - DNA, 12 bp, Artificial Sequence
  Oligonucleotide primer for the detection of SNP TSC0062605
ttgtgtagtgtg

SEQ ID NO: 378047 - DNA, 12 bp, Artificial Sequence
  Oligonucleotide primer for the detection of SNP TSC0062607
cttctttctttc

SEQ ID NO: 378048 - DNA, 12 bp, Artificial Sequence
  Oligonucleotide primer for the detection of SNP TSC0008069
tctcaacaatct

SEQ ID NO: 378049 - DNA, 12 bp, Artificial Sequence
  Oligonucleotide primer for the detection of SNP TSC0008069
tctcaacgatct

SEQ ID NO: 378050 - DNA, 12 bp, Artificial Sequence
  Oligonucleotide primer for the detection of SNP TSC0008069
tgatggagttaa

SEQ ID NO: 378051 - DNA, 12 bp, Artificial Sequence
  Oligonucleotide primer for the detection of SNP TSC0004683
tttccctaaaat

SEQ ID NO: 378052 - DNA, 12 bp, Artificial Sequence
  Oligonucleotide primer for the detection of SNP TSC0004683
tttagatttgga

SEQ ID NO: 378053 - DNA, 12 bp, Artificial Sequence
  Oligonucleotide primer for the detection of SNP TSC0004684
caactaaccaaa

SEQ ID NO: 378054 - DNA, 12 bp, Artificial Sequence
  Oligonucleotide primer for the detection of SNP TSC0004684
tttgggttgttc

SEQ ID NO: 378055 - DNA, 12 bp, Artificial Sequence
  Oligonucleotide primer for the detection of SNP TSC0004684
cctaaattattc

SEQ ID NO: 378056 - DNA, 12 bp, Artificial Sequence
  Oligonucleotide primer for the detection of SNP TSC0004684
ttagttgattag

SEQ ID NO: 378057 - DNA, 12 bp, Artificial Sequence
  Oligonucleotide primer for the detection of SNP TSC0007705
tctttcactcct

SEQ ID NO: 378058 - DNA, 12 bp, Artificial Sequence
  Oligonucleotide primer for the detection of SNP TSC0007705
gaagttttagaa

SEQ ID NO: 378059 - DNA, 12 bp, Artificial Sequence
  Oligonucleotide primer for the detection of SNP TSC0062608
acctccaaaact

SEQ ID NO: 378060 - DNA, 12 bp, Artificial Sequence
  Oligonucleotide primer for the detection of SNP TSC0062608
aggtaggaggat

SEQ ID NO: 378061 - DNA, 12 bp, Artificial Sequence
  Oligonucleotide primer for the detection of SNP TSC0062611
aaactatccatt

SEQ ID NO: 378062 - DNA, 12 bp, Artificial Sequence
  Oligonucleotide primer for the detection of SNP TSC0062611
gtagtttagttg

SEQ ID NO: 378063 - DNA, 12 bp, Artificial Sequence
  Oligonucleotide primer for the detection of SNP TSC0062612
ctacccctcttc

SEQ ID NO: 378064 - DNA, 12 bp, Artificial Sequence
  Oligonucleotide primer for the detection of SNP TSC0062612
gttggggaagga

SEQ ID NO: 378065 - DNA, 12 bp, Artificial Sequence
  Oligonucleotide primer for the detection of SNP TSC0062613
ttaaatcctaat

SEQ ID NO: 378066 - DNA, 12 bp, Artificial Sequence
  Oligonucleotide primer for the detection of SNP TSC0062613
tttttatatggg

SEQ ID NO: 378067 - DNA, 12 bp, Artificial Sequence
  Oligonucleotide primer for the detection of SNP TSC0062614
tatatgtagaat

SEQ ID NO: 378068 - DNA, 12 bp, Artificial Sequence
  Oligonucleotide primer for the detection of SNP TSC0062614
tcatatacaaaa

SEQ ID NO: 378069 - DNA, 12 bp, Artificial Sequence
  Oligonucleotide primer for the detection of SNP TSC0062615
acacacttccta

SEQ ID NO: 378070 - DNA, 12 bp, Artificial Sequence
  Oligonucleotide primer for the detection of SNP TSC0062615
acacgcttccta

SEQ ID NO: 378071 - DNA, 12 bp, Artificial Sequence
  Oligonucleotide primer for the detection of SNP TSC0062615
attgaggagtaa

SEQ ID NO: 378072 - DNA, 12 bp, Artificial Sequence
  Oligonucleotide primer for the detection of SNP TSC0062615
agtatgtttttt

SEQ ID NO: 378073 - DNA, 12 bp, Artificial Sequence
  Oligonucleotide primer for the detection of SNP TSC0062615
agtacgtttttt

SEQ ID NO: 378074 - DNA, 12 bp, Artificial Sequence
  Oligonucleotide primer for the detection of SNP TSC0005066
actcctaatccc

SEQ ID NO: 378075 - DNA, 12 bp, Artificial Sequence
  Oligonucleotide primer for the detection of SNP TSC0062616
ctaaacctccct

SEQ ID NO: 378076 - DNA, 12 bp, Artificial Sequence
  Oligonucleotide primer for the detection of SNP TSC0062618
tttctaactctc

SEQ ID NO: 378077 - DNA, 12 bp, Artificial Sequence
  Oligonucleotide primer for the detection of SNP TSC0062619
aacacataaaac

SEQ ID NO: 378078 - DNA, 12 bp, Artificial Sequence
  Oligonucleotide primer for the detection of SNP TSC0062619
aatagtatagcg

SEQ ID NO: 378079 - DNA, 12 bp, Artificial Sequence
  Oligonucleotide primer for the detection of SNP TSC0062619
ataatacaacaa

SEQ ID NO: 378080 - DNA, 12 bp, Artificial Sequence
  Oligonucleotide primer for the detection of SNP TSC0062619
ataatacaacga

SEQ ID NO: 378081 - DNA, 12 bp, Artificial Sequence
  Oligonucleotide primer for the detection of SNP TSC0062619
agtatatgggat

SEQ ID NO: 378082 - DNA, 12 bp, Artificial Sequence
  Oligonucleotide primer for the detection of SNP TSC0062619
agtatatgggac

SEQ ID NO: 378083 - DNA, 12 bp, Artificial Sequence
  Oligonucleotide primer for the detection of SNP TSC0062620
ttcctaatttta

SEQ ID NO: 378084 - DNA, 12 bp, Artificial Sequence
  Oligonucleotide primer for the detection of SNP TSC0062622
ataccaaaatta

SEQ ID NO: 378085 - DNA, 12 bp, Artificial Sequence
  Oligonucleotide primer for the detection of SNP TSC0062623
aacttactttat

SEQ ID NO: 378086 - DNA, 12 bp, Artificial Sequence
  Oligonucleotide primer for the detection of SNP TSC0062623
taaatagtatta

SEQ ID NO: 378087 - DNA, 12 bp, Artificial Sequence
  Oligonucleotide primer for the detection of SNP TSC0062624
aggatttgtagg

SEQ ID NO: 378088 - DNA, 12 bp, Artificial Sequence
  Oligonucleotide primer for the detection of SNP TSC0062625
aaaaaaaacatc

SEQ ID NO: 378089 - DNA, 12 bp, Artificial Sequence
  Oligonucleotide primer for the detection of SNP TSC0062625
atgtattgttag

SEQ ID NO: 378090 - DNA, 12 bp, Artificial Sequence
  Oligonucleotide primer for the detection of SNP TSC0062626
caaattccctta

SEQ ID NO: 378091 - DNA, 12 bp, Artificial Sequence
  Oligonucleotide primer for the detection of SNP TSC0062626
ttttagaaaggt

SEQ ID NO: 378092 - DNA, 12 bp, Artificial Sequence
  Oligonucleotide primer for the detection of SNP TSC0062626
ttttagaaaggc

SEQ ID NO: 378093 - DNA, 12 bp, Artificial Sequence
  Oligonucleotide primer for the detection of SNP TSC0062626
acttcaaaaaaa

SEQ ID NO: 378094 - DNA, 12 bp, Artificial Sequence
  Oligonucleotide primer for the detection of SNP TSC0007607
cataaacaacac

SEQ ID NO: 378095 - DNA, 12 bp, Artificial Sequence
  Oligonucleotide primer for the detection of SNP TSC0007607
cataaacgacac

SEQ ID NO: 378096 - DNA, 12 bp, Artificial Sequence
  Oligonucleotide primer for the detection of SNP TSC0007607
cgtaaacaacac

SEQ ID NO: 378097 - DNA, 12 bp, Artificial Sequence
  Oligonucleotide primer for the detection of SNP TSC0007607
cgtaaacgacac

SEQ ID NO: 378098 - DNA, 12 bp, Artificial Sequence
  Oligonucleotide primer for the detection of SNP TSC0007608
ctaaaatacact

SEQ ID NO: 378099 - DNA, 12 bp, Artificial Sequence
  Oligonucleotide primer for the detection of SNP TSC0007608
tttaagtgtggg

SEQ ID NO: 378100 - DNA, 12 bp, Artificial Sequence
  Oligonucleotide primer for the detection of SNP TSC0062628
ttctctctcttc

SEQ ID NO: 378101 - DNA, 12 bp, Artificial Sequence
  Oligonucleotide primer for the detection of SNP TSC0062628
aaggtgttagag

SEQ ID NO: 378102 - DNA, 12 bp, Artificial Sequence
  Oligonucleotide primer for the detection of SNP TSC0062629
tctaaccttaac

SEQ ID NO: 378103 - DNA, 12 bp, Artificial Sequence
  Oligonucleotide primer for the detection of SNP TSC0062629
ttggttaaagat

SEQ ID NO: 378104 - DNA, 12 bp, Artificial Sequence
  Oligonucleotide primer for the detection of SNP TSC0062629
ttaattttggtt

SEQ ID NO: 378105 - DNA, 12 bp, Artificial Sequence
  Oligonucleotide primer for the detection of SNP TSC0062630
accctaaattct

SEQ ID NO: 378106 - DNA, 12 bp, Artificial Sequence
  Oligonucleotide primer for the detection of SNP TSC0062630
taaagagttaag

SEQ ID NO: 378107 - DNA, 12 bp, Artificial Sequence
  Oligonucleotide primer for the detection of SNP TSC0062633
caccttaacctc

SEQ ID NO: 378108 - DNA, 12 bp, Artificial Sequence
  Oligonucleotide primer for the detection of SNP TSC0062633
cgccttaacctc

SEQ ID NO: 378109 - DNA, 12 bp, Artificial Sequence
  Oligonucleotide primer for the detection of SNP TSC0062634
gtgggagttatt

SEQ ID NO: 378110 - DNA, 12 bp, Artificial Sequence
  Oligonucleotide primer for the detection of SNP TSC0062634
gcgggagttatt

SEQ ID NO: 378111 - DNA, 12 bp, Artificial Sequence
  Oligonucleotide primer for the detection of SNP TSC0062634
gtgggagttatc

SEQ ID NO: 378112 - DNA, 12 bp, Artificial Sequence
  Oligonucleotide primer for the detection of SNP TSC0062634
gcgggagttatc

SEQ ID NO: 378113 - DNA, 12 bp, Artificial Sequence
  Oligonucleotide primer for the detection of SNP TSC0062634
acgaaaaccacc

SEQ ID NO: 378114 - DNA, 12 bp, Artificial Sequence
  Oligonucleotide primer for the detection of SNP TSC0062634
aatatggttggg

SEQ ID NO: 378115 - DNA, 12 bp, Artificial Sequence
  Oligonukleotid-Primer
aatatggtcggg

SEQ ID NO: 378116 - DNA, 12 bp, Artificial Sequence
  Oligonucleotide primer for the detection of SNP TSC0004933
attctataaccc

SEQ ID NO: 378117 - DNA, 12 bp, Artificial Sequence
  Oligonucleotide primer for the detection of SNP TSC0004933
tttgggatggga

SEQ ID NO: 378118 - DNA, 12 bp, Artificial Sequence
  Oligonucleotide primer for the detection of SNP TSC0062635
aattttgagtta

SEQ ID NO: 378119 - DNA, 12 bp, Artificial Sequence
  Oligonucleotide primer for the detection of SNP TSC0062636
tttattctaaat

SEQ ID NO: 378120 - DNA, 12 bp, Artificial Sequence
  Oligonucleotide primer for the detection of SNP TSC0062636
ttggatattaaa

SEQ ID NO: 378121 - DNA, 12 bp, Artificial Sequence
  Oligonucleotide primer for the detection of SNP TSC0005688
tttattaaataa

SEQ ID NO: 378122 - DNA, 12 bp, Artificial Sequence
  Oligonucleotide primer for the detection of SNP TSC0005688
ttgttatttgtg

SEQ ID NO: 378123 - DNA, 12 bp, Artificial Sequence
  Oligonukleotid-Primer
ctatcatctata

SEQ ID NO: 378124 - DNA, 12 bp, Artificial Sequence
  Oligonucleotide primer for the detection of SNP TSC0062637
tatattcaaaaa

SEQ ID NO: 378125 - DNA, 12 bp, Artificial Sequence
  Oligonucleotide primer for the detection of SNP TSC0062637
accttcctcaaa

SEQ ID NO: 378126 - DNA, 12 bp, Artificial Sequence
  Oligonucleotide primer for the detection of SNP TSC0062637
tgtatttagggg

SEQ ID NO: 378127 - DNA, 12 bp, Artificial Sequence
  Oligonukleotid-Primer
tatctctaaaaa

SEQ ID NO: 378128 - DNA, 12 bp, Artificial Sequence
  Oligonucleotide primer for the detection of SNP TSC0005618
tatggaagggga

SEQ ID NO: 378129 - DNA, 12 bp, Artificial Sequence
  Oligonucleotide primer for the detection of SNP TSC0005618
tttagaaatttc

SEQ ID NO: 378130 - DNA, 12 bp, Artificial Sequence
  Oligonucleotide primer for the detection of SNP TSC0062639
catttcaaaaac

SEQ ID NO: 378131 - DNA, 12 bp, Artificial Sequence
  Oligonukleotid-Primer
aaatcactatta

SEQ ID NO: 378132 - DNA, 12 bp, Artificial Sequence
  Oligonucleotide primer for the detection of SNP TSC0062640
cttatttctaaa

SEQ ID NO: 378133 - DNA, 12 bp, Artificial Sequence
  Oligonucleotide primer for the detection of SNP TSC0062640
gggattattatt

SEQ ID NO: 378134 - DNA, 12 bp, Artificial Sequence
  Oligonucleotide primer for the detection of SNP TSC0062641
aactaccaatac

SEQ ID NO: 378135 - DNA, 12 bp, Artificial Sequence
  Oligonucleotide primer for the detection of SNP TSC0062641
agtggaaaggtg

SEQ ID NO: 378136 - DNA, 12 bp, Artificial Sequence
  Oligonucleotide primer for the detection of SNP TSC0062642
ataattcaacta

SEQ ID NO: 378137 - DNA, 12 bp, Artificial Sequence
  Oligonucleotide primer for the detection of SNP TSC0062642
aaatttaaattt

SEQ ID NO: 378138 - DNA, 12 bp, Artificial Sequence
  Oligonucleotide primer for the detection of SNP TSC0062642
aaatctaaacct

SEQ ID NO: 378139 - DNA, 12 bp, Artificial Sequence
  Oligonucleotide primer for the detection of SNP TSC0062643
ggaatttagttg

SEQ ID NO: 378140 - DNA, 12 bp, Artificial Sequence
  Oligonucleotide primer for the detection of SNP TSC0005531
aggatttattta

SEQ ID NO: 378141 - DNA, 12 bp, Artificial Sequence
  Oligonucleotide primer for the detection of SNP TSC0005531
tgaatataggat

SEQ ID NO: 378142 - DNA, 12 bp, Artificial Sequence
  Oligonucleotide primer for the detection of SNP TSC0062644
ttaaaatatcct

SEQ ID NO: 378143 - DNA, 12 bp, Artificial Sequence
  Oligonucleotide primer for the detection of SNP TSC0062644
aattagagatta

SEQ ID NO: 378144 - DNA, 12 bp, Artificial Sequence
  Oligonucleotide primer for the detection of SNP TSC0062645
tttgtaagaaga

SEQ ID NO: 378145 - DNA, 12 bp, Artificial Sequence
  Oligonucleotide primer for the detection of SNP TSC0062647
  unsure (4): unknown base
ttanttagtgga

SEQ ID NO: 378146 - DNA, 12 bp, Artificial Sequence
  Oligonucleotide primer for the detection of SNP TSC0062647
  unsure (3): unknown base
tantcaataaaa

SEQ ID NO: 378147 - DNA, 12 bp, Artificial Sequence
  Oligonukleotid-Primer
tggaattagatg

SEQ ID NO: 378148 - DNA, 12 bp, Artificial Sequence
  Oligonucleotide primer for the detection of SNP TSC0008001
ctctatacctta

SEQ ID NO: 378149 - DNA, 12 bp, Artificial Sequence
  Oligonucleotide primer for the detection of SNP TSC0008001
aaaagttagttt

SEQ ID NO: 378150 - DNA, 12 bp, Artificial Sequence
  Oligonucleotide primer for the detection of SNP TSC0062649
acaatacatact

SEQ ID NO: 378151 - DNA, 12 bp, Artificial Sequence
  Oligonucleotide primer for the detection of SNP TSC0062650
gtagataaagta

SEQ ID NO: 378152 - DNA, 12 bp, Artificial Sequence
  Oligonucleotide primer for the detection of SNP TSC0062650
tatgtggaaaaa

SEQ ID NO: 378153 - DNA, 12 bp, Artificial Sequence
  Oligonucleotide primer for the detection of SNP TSC0062651
ctccctcacttt

SEQ ID NO: 378154 - DNA, 12 bp, Artificial Sequence
  Oligonucleotide primer for the detection of SNP TSC0062651
tagatgttttgg

SEQ ID NO: 378155 - DNA, 12 bp, Artificial Sequence
  Oligonucleotide primer for the detection of SNP TSC0062652
cttaaatcttaa

SEQ ID NO: 378156 - DNA, 12 bp, Artificial Sequence
  Oligonucleotide primer for the detection of SNP TSC0062652
gaggtaattgtg

SEQ ID NO: 378157 - DNA, 12 bp, Artificial Sequence
  Oligonucleotide primer for the detection of SNP TSC0062652
aaaataactata

SEQ ID NO: 378158 - DNA, 12 bp, Artificial Sequence
  Oligonucleotide primer for the detection of SNP TSC0006522
caaataaccaca

SEQ ID NO: 378159 - DNA, 12 bp, Artificial Sequence
  Oligonukleotid-Primer
cgaataaccaca

SEQ ID NO: 378160 - DNA, 12 bp, Artificial Sequence
  Oligonucleotide primer for the detection of SNP TSC0006522
tagagaggaggt

SEQ ID NO: 378161 - DNA, 12 bp, Artificial Sequence
  Oligonucleotide primer for the detection of SNP TSC0006522
tgggtaattata

SEQ ID NO: 378162 - DNA, 12 bp, Artificial Sequence
  Oligonucleotide primer for the detection of SNP TSC0006522
cgggtaattata

SEQ ID NO: 378163 - DNA, 12 bp, Artificial Sequence
  Oligonucleotide primer for the detection of SNP TSC0006523
tctcttctcccc

SEQ ID NO: 378164 - DNA, 12 bp, Artificial Sequence
  Oligonucleotide primer for the detection of SNP TSC0006523
gattgggaatgg

SEQ ID NO: 378165 - DNA, 12 bp, Artificial Sequence
  Oligonucleotide primer for the detection of SNP TSC0008067
tctaactaaatt

SEQ ID NO: 378166 - DNA, 12 bp, Artificial Sequence
  Oligonucleotide primer for the detection of SNP TSC0008067
tttaggggagaa

SEQ ID NO: 378167 - DNA, 12 bp, Artificial Sequence
  Oligonucleotide primer for the detection of SNP TSC0004781
acacgcaccacc

SEQ ID NO: 378168 - DNA, 12 bp, Artificial Sequence
  Oligonucleotide primer for the detection of SNP TSC0004781
gtacgtattatt

SEQ ID NO: 378169 - DNA, 12 bp, Artificial Sequence
  Oligonucleotide primer for the detection of SNP TSC0004840
ttataatctcct

SEQ ID NO: 378170 - DNA, 12 bp, Artificial Sequence
  Oligonucleotide primer for the detection of SNP TSC0004840
gaaatagattta

SEQ ID NO: 378171 - DNA, 12 bp, Artificial Sequence
  Oligonucleotide primer for the detection of SNP TSC0004840
aaaacaaattta

SEQ ID NO: 378172 - DNA, 12 bp, Artificial Sequence
  Oligonucleotide primer for the detection of SNP TSC0010406
ctatatatattt

SEQ ID NO: 378173 - DNA, 12 bp, Artificial Sequence
  Oligonucleotide primer for the detection of SNP TSC0006048
aaaacaaaattc

SEQ ID NO: 378174 - DNA, 12 bp, Artificial Sequence
  Oligonucleotide primer for the detection of SNP TSC0062658
caaaaaaacctc

SEQ ID NO: 378175 - DNA, 12 bp, Artificial Sequence
  Oligonukleotid-Primer
aattctttctca

SEQ ID NO: 378176 - DNA, 12 bp, Artificial Sequence
  Oligonucleotide primer for the detection of SNP TSC0005086
taaaatcatata

SEQ ID NO: 378177 - DNA, 12 bp, Artificial Sequence
  Oligonucleotide primer for the detection of SNP TSC0005086
ataataggaatt

SEQ ID NO: 378178 - DNA, 12 bp, Artificial Sequence
  Oligonucleotide primer for the detection of SNP TSC0062661
caaatatttctt

SEQ ID NO: 378179 - DNA, 12 bp, Artificial Sequence
  Oligonukleotid-Primer
tatatagaatgg

SEQ ID NO: 378180 - DNA, 12 bp, Artificial Sequence
  Oligonucleotide primer for the detection of SNP TSC0005571
cccttctataat

SEQ ID NO: 378181 - DNA, 12 bp, Artificial Sequence
  Oligonucleotide primer for the detection of SNP TSC0005571
aaattttattag

SEQ ID NO: 378182 - DNA, 12 bp, Artificial Sequence
  Oligonucleotide primer for the detection of SNP TSC0062662
aattattaatgg

SEQ ID NO: 378183 - DNA, 12 bp, Artificial Sequence
  Oligonucleotide primer for the detection of SNP TSC0062663
taattcttccaa

SEQ ID NO: 378184 - DNA, 12 bp, Artificial Sequence
  Oligonucleotide primer for the detection of SNP TSC0062663
tatataatattt

SEQ ID NO: 378185 - DNA, 12 bp, Artificial Sequence
  Oligonucleotide primer for the detection of SNP TSC0062664
cataatcaattc

SEQ ID NO: 378186 - DNA, 12 bp, Artificial Sequence
  Oligonucleotide primer for the detection of SNP TSC0062664
gtggaatttata

SEQ ID NO: 378187 - DNA, 12 bp, Artificial Sequence
  Oligonucleotide primer for the detection of SNP TSC0008957
taagtaatatgg

SEQ ID NO: 378188 - DNA, 12 bp, Artificial Sequence
  Oligonucleotide primer for the detection of SNP TSC0008957
taagtaatacgg

SEQ ID NO: 378189 - DNA, 12 bp, Artificial Sequence
  Oligonucleotide primer for the detection of SNP TSC0062665
tactataataaa

SEQ ID NO: 378190 - DNA, 12 bp, Artificial Sequence
  Oligonucleotide primer for the detection of SNP TSC0062665
ttgaaaaattat

SEQ ID NO: 378191 - DNA, 12 bp, Artificial Sequence
  Oligonukleotid-Primer
ttataataaatt

SEQ ID NO: 378192 - DNA, 12 bp, Artificial Sequence
  Oligonucleotide primer for the detection of SNP TSC0062666
tattatagtaaa

SEQ ID NO: 378193 - DNA, 12 bp, Artificial Sequence
  Oligonucleotide primer for the detection of SNP TSC0062667
attccttttttt

SEQ ID NO: 378194 - DNA, 12 bp, Artificial Sequence
  Oligonucleotide primer for the detection of SNP TSC0062667
gactaaaaaaaa

SEQ ID NO: 378195 - DNA, 12 bp, Artificial Sequence
  Oligonucleotide primer for the detection of SNP TSC0062668
tatctccaaatt

SEQ ID NO: 378196 - DNA, 12 bp, Artificial Sequence
  Oligonucleotide primer for the detection of SNP TSC0062669
acaattttacca

SEQ ID NO: 378197 - DNA, 12 bp, Artificial Sequence
  Oligonucleotide primer for the detection of SNP TSC0062669
acaattttaccg

SEQ ID NO: 378198 - DNA, 12 bp, Artificial Sequence
  Oligonucleotide primer for the detection of SNP TSC0062669
aatgagaggttt

SEQ ID NO: 378199 - DNA, 12 bp, Artificial Sequence
  Oligonucleotide primer for the detection of SNP TSC0062670
ttcataaaaaca

SEQ ID NO: 378200 - DNA, 12 bp, Artificial Sequence
  Oligonucleotide primer for the detection of SNP TSC0062670
taaaccctatca

SEQ ID NO: 378201 - DNA, 12 bp, Artificial Sequence
  Oligonucleotide primer for the detection of SNP TSC0062670
ttttatgaaggt

SEQ ID NO: 378202 - DNA, 12 bp, Artificial Sequence
  Oligonucleotide primer for the detection of SNP TSC0062671
tggttttggatt

SEQ ID NO: 378203 - DNA, 12 bp, Artificial Sequence
  Oligonukleotid-Primer
tggtttcggatt

SEQ ID NO: 378204 - DNA, 12 bp, Artificial Sequence
  Oligonucleotide primer for the detection of SNP TSC0062671
taaccccaaatt

SEQ ID NO: 378205 - DNA, 12 bp, Artificial Sequence
  Oligonucleotide primer for the detection of SNP TSC0062671
taaccccgaatt

SEQ ID NO: 378206 - DNA, 12 bp, Artificial Sequence
  Oligonucleotide primer for the detection of SNP TSC0062671
ttttattaggat

SEQ ID NO: 378207 - DNA, 12 bp, Artificial Sequence
  Oligonucleotide primer for the detection of SNP TSC0062672
ctttttcacatt

SEQ ID NO: 378208 - DNA, 12 bp, Artificial Sequence
  Oligonucleotide primer for the detection of SNP TSC0062672
ttttttaaatga

SEQ ID NO: 378209 - DNA, 12 bp, Artificial Sequence
  Oligonucleotide primer for the detection of SNP TSC0062673
agattattgaag

SEQ ID NO: 378210 - DNA, 12 bp, Artificial Sequence
  Oligonucleotide primer for the detection of SNP TSC0062674
ttcaataatctt

SEQ ID NO: 378211 - DNA, 12 bp, Artificial Sequence
  Oligonucleotide primer for the detection of SNP TSC0062674
gagtattataag

SEQ ID NO: 378212 - DNA, 12 bp, Artificial Sequence
  Oligonucleotide primer for the detection of SNP TSC0062675
ttttaaaatttg

SEQ ID NO: 378213 - DNA, 12 bp, Artificial Sequence
  Oligonucleotide primer for the detection of SNP TSC0009378
caaaaaactctt

SEQ ID NO: 378214 - DNA, 12 bp, Artificial Sequence
  Oligonucleotide primer for the detection of SNP TSC0009378
tgagtgaatagg

SEQ ID NO: 378215 - DNA, 12 bp, Artificial Sequence
  Oligonukleotid-Primer
atattacaatct

SEQ ID NO: 378216 - DNA, 12 bp, Artificial Sequence
  Oligonucleotide primer for the detection of SNP TSC0062676
ctctcttaccta

SEQ ID NO: 378217 - DNA, 12 bp, Artificial Sequence
  Oligonucleotide primer for the detection of SNP TSC0062676
tatgttttttat

SEQ ID NO: 378218 - DNA, 12 bp, Artificial Sequence
  Oligonucleotide primer for the detection of SNP TSC0062676
catatcttccat

SEQ ID NO: 378219 - DNA, 12 bp, Artificial Sequence
  Oligonukleotid-Primer
tatatattataa

SEQ ID NO: 378220 - DNA, 12 bp, Artificial Sequence
  Oligonucleotide primer for the detection of SNP TSC0062677
aaaagagagggt

SEQ ID NO: 378221 - DNA, 12 bp, Artificial Sequence
  Oligonucleotide primer for the detection of SNP TSC0062678
tttttacactaa

SEQ ID NO: 378222 - DNA, 12 bp, Artificial Sequence
  Oligonucleotide primer for the detection of SNP TSC0062678
ttgaaattgtaa

SEQ ID NO: 378223 - DNA, 12 bp, Artificial Sequence
  Oligonucleotide primer for the detection of SNP TSC0062678
atttttgtattg

SEQ ID NO: 378224 - DNA, 12 bp, Artificial Sequence
  Oligonucleotide primer for the detection of SNP TSC0062679
caaaaatattat

SEQ ID NO: 378225 - DNA, 12 bp, Artificial Sequence
  Oligonucleotide primer for the detection of SNP TSC0062679
tttgttgtttta

SEQ ID NO: 378226 - DNA, 12 bp, Artificial Sequence
  Oligonucleotide primer for the detection of SNP TSC0001221
cacaaaaaccat

SEQ ID NO: 378227 - DNA, 12 bp, Artificial Sequence
  Oligonucleotide primer for the detection of SNP TSC0001221
ttttataattgg

SEQ ID NO: 378228 - DNA, 12 bp, Artificial Sequence
  Oligonucleotide primer for the detection of SNP TSC0001221
ttttataatcgg

SEQ ID NO: 378229 - DNA, 12 bp, Artificial Sequence
  Oligonucleotide primer for the detection of SNP TSC0006350
aaatcttataac

SEQ ID NO: 378230 - DNA, 12 bp, Artificial Sequence
  Oligonucleotide primer for the detection of SNP TSC0006350
tgattgtaaata

SEQ ID NO: 378231 - DNA, 12 bp, Artificial Sequence
  Oligonucleotide primer for the detection of SNP TSC0062680
acactactaaaa

SEQ ID NO: 378232 - DNA, 12 bp, Artificial Sequence
  Oligonucleotide primer for the detection of SNP TSC0062680
gtatatagaaat

SEQ ID NO: 378233 - DNA, 12 bp, Artificial Sequence
  Oligonucleotide primer for the detection of SNP TSC0062680
atattattggaa

SEQ ID NO: 378234 - DNA, 12 bp, Artificial Sequence
  Oligonucleotide primer for the detection of SNP TSC0062682
taagagagtaag

SEQ ID NO: 378235 - DNA, 12 bp, Artificial Sequence
  Oligonucleotide primer for the detection of SNP TSC0062683
ttacttctacca

SEQ ID NO: 378236 - DNA, 12 bp, Artificial Sequence
  Oligonucleotide primer for the detection of SNP TSC0062683
aaggtattttat

SEQ ID NO: 378237 - DNA, 12 bp, Artificial Sequence
  Oligonucleotide primer for the detection of SNP TSC0062683
aaaaacatctca

SEQ ID NO: 378238 - DNA, 12 bp, Artificial Sequence
  Oligonucleotide primer for the detection of SNP TSC0062684
ttatctataaat

SEQ ID NO: 378239 - DNA, 12 bp, Artificial Sequence
  Oligonucleotide primer for the detection of SNP TSC0062685
ctataaatttta

SEQ ID NO: 378240 - DNA, 12 bp, Artificial Sequence
  Oligonucleotide primer for the detection of SNP TSC0062685
atgaaaaataaa

SEQ ID NO: 378241 - DNA, 12 bp, Artificial Sequence
  Oligonucleotide primer for the detection of SNP TSC0062685
tttgtaaatttt

SEQ ID NO: 378242 - DNA, 12 bp, Artificial Sequence
  Oligonucleotide primer for the detection of SNP TSC0062686
gatttattatat

SEQ ID NO: 378243 - DNA, 12 bp, Artificial Sequence
  Oligonucleotide primer for the detection of SNP TSC0062686
acccatcatata

SEQ ID NO: 378244 - DNA, 12 bp, Artificial Sequence
  Oligonucleotide primer for the detection of SNP TSC0062686
aaaataaatgag

SEQ ID NO: 378245 - DNA, 12 bp, Artificial Sequence
  Oligonucleotide primer for the detection of SNP TSC0062687
tatcacttttcc

SEQ ID NO: 378246 - DNA, 12 bp, Artificial Sequence
  Oligonucleotide primer for the detection of SNP TSC0062687
atagaggtttta

SEQ ID NO: 378247 - DNA, 12 bp, Artificial Sequence
  Oligonucleotide primer for the detection of SNP TSC0062689
ctaaacccaata

SEQ ID NO: 378248 - DNA, 12 bp, Artificial Sequence
  Oligonucleotide primer for the detection of SNP TSC0062689
tgattggatagt

SEQ ID NO: 378249 - DNA, 12 bp, Artificial Sequence
  Oligonucleotide primer for the detection of SNP TSC0062689
tgattggatagc

SEQ ID NO: 378250 - DNA, 12 bp, Artificial Sequence
  Oligonucleotide primer for the detection of SNP TSC0062689
tttgagtttagt

SEQ ID NO: 378251 - DNA, 12 bp, Artificial Sequence
  Oligonucleotide primer for the detection of SNP TSC0062690
tgatattaagat

SEQ ID NO: 378252 - DNA, 12 bp, Artificial Sequence
  Oligonucleotide primer for the detection of SNP TSC0062690
aagattattttt

SEQ ID NO: 378253 - DNA, 12 bp, Artificial Sequence
  Oligonucleotide primer for the detection of SNP TSC0006032
cataacaaaatc

SEQ ID NO: 378254 - DNA, 12 bp, Artificial Sequence
  Oligonucleotide primer for the detection of SNP TSC0006032
taggtgtgtttt

SEQ ID NO: 378255 - DNA, 12 bp, Artificial Sequence
  Oligonucleotide primer for the detection of SNP TSC0006032
aaatatatccca

SEQ ID NO: 378256 - DNA, 12 bp, Artificial Sequence
  Oligonucleotide primer for the detection of SNP TSC0006032
ataatagaattt

SEQ ID NO: 378257 - DNA, 12 bp, Artificial Sequence
  Oligonucleotide primer for the detection of SNP TSC0062692
aaagttgggtgt

SEQ ID NO: 378258 - DNA, 12 bp, Artificial Sequence
  Oligonucleotide primer for the detection of SNP TSC0062692
aaaattaaatat

SEQ ID NO: 378259 - DNA, 12 bp, Artificial Sequence
  Oligonucleotide primer for the detection of SNP TSC0062692
aatagttgaaga

SEQ ID NO: 378260 - DNA, 12 bp, Artificial Sequence
  Oligonucleotide primer for the detection of SNP TSC0062696
aaaaacaccaat

SEQ ID NO: 378261 - DNA, 12 bp, Artificial Sequence
  Oligonucleotide primer for the detection of SNP TSC0062696
ttagatgtttga

SEQ ID NO: 378262 - DNA, 12 bp, Artificial Sequence
  Oligonucleotide primer for the detection of SNP TSC0062696
ttagacgtttga

SEQ ID NO: 378263 - DNA, 12 bp, Artificial Sequence
  Oligonucleotide primer for the detection of SNP TSC0062696
tcaaacatctaa

SEQ ID NO: 378264 - DNA, 12 bp, Artificial Sequence
  Oligonucleotide primer for the detection of SNP TSC0062696
tcaaacgtctaa

SEQ ID NO: 378265 - DNA, 12 bp, Artificial Sequence
  Oligonucleotide primer for the detection of SNP TSC0062696
aggaatattagt

SEQ ID NO: 378266 - DNA, 12 bp, Artificial Sequence
  Oligonucleotide primer for the detection of SNP TSC0062697
ctactaatctac

SEQ ID NO: 378267 - DNA, 12 bp, Artificial Sequence
  Oligonucleotide primer for the detection of SNP TSC0062697
tttaagaatttg

SEQ ID NO: 378268 - DNA, 12 bp, Artificial Sequence
  Oligonucleotide primer for the detection of SNP TSC0062700
aaaaaaacgact

SEQ ID NO: 378269 - DNA, 12 bp, Artificial Sequence
  Oligonucleotide primer for the detection of SNP TSC0001032
ctaaactctact

SEQ ID NO: 378270 - DNA, 12 bp, Artificial Sequence
  Oligonucleotide primer for the detection of SNP TSC0001032
aaaaagattaaa

SEQ ID NO: 378271 - DNA, 12 bp, Artificial Sequence
  Oligonucleotide primer for the detection of SNP TSC0009732
ttataaaatatg

SEQ ID NO: 378272 - DNA, 12 bp, Artificial Sequence
  Oligonucleotide primer for the detection of SNP TSC0009732
tcacaaaacata

SEQ ID NO: 378273 - DNA, 12 bp, Artificial Sequence
  Oligonucleotide primer for the detection of SNP TSC0009732
aggtgagatagg

SEQ ID NO: 378274 - DNA, 12 bp, Artificial Sequence
  Oligonucleotide primer for the detection of SNP TSC0009871
ttaattttctac

SEQ ID NO: 378275 - DNA, 12 bp, Artificial Sequence
  Oligonucleotide primer for the detection of SNP TSC0009871
agagattattaa

SEQ ID NO: 378276 - DNA, 12 bp, Artificial Sequence
  Oligonucleotide primer for the detection of SNP TSC0062701
attgttagaaag

SEQ ID NO: 378277 - DNA, 12 bp, Artificial Sequence
  Oligonucleotide primer for the detection of SNP TSC0062701
tgataagaagtt

SEQ ID NO: 378278 - DNA, 12 bp, Artificial Sequence
  Oligonucleotide primer for the detection of SNP TSC0062702
tctatctatcac

SEQ ID NO: 378279 - DNA, 12 bp, Artificial Sequence
  Oligonucleotide primer for the detection of SNP TSC0062702
attaaattgaaa

SEQ ID NO: 378280 - DNA, 12 bp, Artificial Sequence
  Oligonucleotide primer for the detection of SNP TSC0062703
aaataacatacc

SEQ ID NO: 378281 - DNA, 12 bp, Artificial Sequence
  Oligonucleotide primer for the detection of SNP TSC0062703
aaaatattgtta

SEQ ID NO: 378282 - DNA, 12 bp, Artificial Sequence
  Oligonucleotide primer for the detection of SNP TSC0062704
caattcccacca

SEQ ID NO: 378283 - DNA, 12 bp, Artificial Sequence
  Oligonucleotide primer for the detection of SNP TSC0062704
tgaaatttgggt

SEQ ID NO: 378284 - DNA, 12 bp, Artificial Sequence
  Oligonucleotide primer for the detection of SNP TSC0062705
aaaactcaaaac

SEQ ID NO: 378285 - DNA, 12 bp, Artificial Sequence
  Oligonucleotide primer for the detection of SNP TSC0062705
gatttgaggatt

SEQ ID NO: 378286 - DNA, 12 bp, Artificial Sequence
  Oligonucleotide primer for the detection of SNP TSC0062705
aatctaaaaact

SEQ ID NO: 378287 - DNA, 12 bp, Artificial Sequence
  Oligonucleotide primer for the detection of SNP TSC0062705
agggtttaggat

SEQ ID NO: 378288 - DNA, 12 bp, Artificial Sequence
  Oligonucleotide primer for the detection of SNP TSC0062706
ctattactttat

SEQ ID NO: 378289 - DNA, 12 bp, Artificial Sequence
  Oligonucleotide primer for the detection of SNP TSC0062706
gaaaaaaaaaag

SEQ ID NO: 378290 - DNA, 12 bp, Artificial Sequence
  Oligonucleotide primer for the detection of SNP TSC0006698
aattatttgttt

SEQ ID NO: 378291 - DNA, 12 bp, Artificial Sequence
  Oligonucleotide primer for the detection of SNP TSC0006698
ttaactatttac

SEQ ID NO: 378292 - DNA, 12 bp, Artificial Sequence
  Oligonucleotide primer for the detection of SNP TSC0006698
aaggagtagatg

SEQ ID NO: 378293 - DNA, 12 bp, Artificial Sequence
  Oligonucleotide primer for the detection of SNP TSC0006699
taattttaatag

SEQ ID NO: 378294 - DNA, 12 bp, Artificial Sequence
  Oligonucleotide primer for the detection of SNP TSC0006699
caatcttaacaa

SEQ ID NO: 378295 - DNA, 12 bp, Artificial Sequence
  Oligonucleotide primer for the detection of SNP TSC0006699
gaggagtaaatt

SEQ ID NO: 378296 - DNA, 12 bp, Artificial Sequence
  Oligonucleotide primer for the detection of SNP TSC0062707
tatctaacaaat

SEQ ID NO: 378297 - DNA, 12 bp, Artificial Sequence
  Oligonucleotide primer for the detection of SNP TSC0062707
atatagattaag

SEQ ID NO: 378298 - DNA, 12 bp, Artificial Sequence
  Oligonucleotide primer for the detection of SNP TSC0062708
ttataaacaaca

SEQ ID NO: 378299 - DNA, 12 bp, Artificial Sequence
  Oligonucleotide primer for the detection of SNP TSC0062708
ctatatatttta

SEQ ID NO: 378300 - DNA, 12 bp, Artificial Sequence
  Oligonucleotide primer for the detection of SNP TSC0062708
ttataggtagta

SEQ ID NO: 378301 - DNA, 12 bp, Artificial Sequence
  Oligonucleotide primer for the detection of SNP TSC0062709
cctaaaaaatct

SEQ ID NO: 378302 - DNA, 12 bp, Artificial Sequence
  Oligonucleotide primer for the detection of SNP TSC0062710
actaataattta

SEQ ID NO: 378303 - DNA, 12 bp, Artificial Sequence
  Oligonucleotide primer for the detection of SNP TSC0062710
tttagaggtgga

SEQ ID NO: 378304 - DNA, 12 bp, Artificial Sequence
  Oligonucleotide primer for the detection of SNP TSC0062710
tttagaggcgga

SEQ ID NO: 378305 - DNA, 12 bp, Artificial Sequence
  Oligonucleotide primer for the detection of SNP TSC0062710
cccaaaaacgaa

SEQ ID NO: 378306 - DNA, 12 bp, Artificial Sequence
  Oligonucleotide primer for the detection of SNP TSC0062710
attagtaatttg

SEQ ID NO: 378307 - DNA, 12 bp, Artificial Sequence
  Oligonucleotide primer for the detection of SNP TSC0007587
ttgtgttggatg

SEQ ID NO: 378308 - DNA, 12 bp, Artificial Sequence
  Oligonucleotide primer for the detection of SNP TSC0007587
ttgcgttggatg

SEQ ID NO: 378309 - DNA, 12 bp, Artificial Sequence
  Oligonucleotide primer for the detection of SNP TSC0062714
ctatcctctcta

SEQ ID NO: 378310 - DNA, 12 bp, Artificial Sequence
  Oligonucleotide primer for the detection of SNP TSC0062714
atggaagtaagt

SEQ ID NO: 378311 - DNA, 12 bp, Artificial Sequence
  Oligonucleotide primer for the detection of SNP TSC0062716
tccacataacta

SEQ ID NO: 378312 - DNA, 12 bp, Artificial Sequence
  Oligonucleotide primer for the detection of SNP TSC0062716
tatgaagttttt

SEQ ID NO: 378313 - DNA, 12 bp, Artificial Sequence
  Oligonucleotide primer for the detection of SNP TSC0062717
ttcacctcaacc

SEQ ID NO: 378314 - DNA, 12 bp, Artificial Sequence
  Oligonucleotide primer for the detection of SNP TSC0062717
ttctctaactta

SEQ ID NO: 378315 - DNA, 12 bp, Artificial Sequence
  Oligonucleotide primer for the detection of SNP TSC0062717
tttattttagtc

SEQ ID NO: 378316 - DNA, 12 bp, Artificial Sequence
  Oligonucleotide primer for the detection of SNP TSC0062718
actaaccaaatc

SEQ ID NO: 378317 - DNA, 12 bp, Artificial Sequence
  Oligonucleotide primer for the detection of SNP TSC0062718
atggtttttaag

SEQ ID NO: 378318 - DNA, 12 bp, Artificial Sequence
  Oligonucleotide primer for the detection of SNP TSC0062718
attagttaaatt

SEQ ID NO: 378319 - DNA, 12 bp, Artificial Sequence
  Oligonucleotide primer for the detection of SNP TSC0062719
aacttacaatat

SEQ ID NO: 378320 - DNA, 12 bp, Artificial Sequence
  Oligonucleotide primer for the detection of SNP TSC0062719
ataatttatgaa

SEQ ID NO: 378321 - DNA, 12 bp, Artificial Sequence
  Oligonucleotide primer for the detection of SNP TSC0062719
ataatttacgaa

SEQ ID NO: 378322 - DNA, 12 bp, Artificial Sequence
  Oligonucleotide primer for the detection of SNP TSC0062720
ttcctttttttt

SEQ ID NO: 378323 - DNA, 12 bp, Artificial Sequence
  Oligonucleotide primer for the detection of SNP TSC0062722
atttgagagttt

SEQ ID NO: 378324 - DNA, 12 bp, Artificial Sequence
  Oligonucleotide primer for the detection of SNP TSC0062722
atttgagagttc

SEQ ID NO: 378325 - DNA, 12 bp, Artificial Sequence
  Oligonucleotide primer for the detection of SNP TSC0062724
taaccaaaacaa

SEQ ID NO: 378326 - DNA, 12 bp, Artificial Sequence
  Oligonucleotide primer for the detection of SNP TSC0062724
tgtattagtgtt

SEQ ID NO: 378327 - DNA, 12 bp, Artificial Sequence
  Oligonucleotide primer for the detection of SNP TSC0062724
tataccaatacc

SEQ ID NO: 378328 - DNA, 12 bp, Artificial Sequence
  Oligonucleotide primer for the detection of SNP TSC0062724
taattaaaatag

SEQ ID NO: 378329 - DNA, 12 bp, Artificial Sequence
  Oligonucleotide primer for the detection of SNP TSC0007418
atttatttaaac

SEQ ID NO: 378330 - DNA, 12 bp, Artificial Sequence
  Oligonucleotide primer for the detection of SNP TSC0007418
atttgtttaggt

SEQ ID NO: 378331 - DNA, 12 bp, Artificial Sequence
  Oligonucleotide primer for the detection of SNP TSC0006299
tctctactatac

SEQ ID NO: 378332 - DNA, 12 bp, Artificial Sequence
  Oligonucleotide primer for the detection of SNP TSC0006300
gtttgttgatag

SEQ ID NO: 378333 - DNA, 12 bp, Artificial Sequence
  Oligonucleotide primer for the detection of SNP TSC0006300
acctattaataa

SEQ ID NO: 378334 - DNA, 12 bp, Artificial Sequence
  Oligonucleotide primer for the detection of SNP TSC0006300
gagaatttttat

SEQ ID NO: 378335 - DNA, 12 bp, Artificial Sequence
  Oligonucleotide primer for the detection of SNP TSC0008287
aaaactatacta

SEQ ID NO: 378336 - DNA, 12 bp, Artificial Sequence
  Oligonucleotide primer for the detection of SNP TSC0008287
atttttaaattt

SEQ ID NO: 378337 - DNA, 12 bp, Artificial Sequence
  Oligonucleotide primer for the detection of SNP TSC0008287
tcttcaaatcca

SEQ ID NO: 378338 - DNA, 12 bp, Artificial Sequence
  Oligonucleotide primer for the detection of SNP TSC0008287
gaggttgtgttg

SEQ ID NO: 378339 - DNA, 12 bp, Artificial Sequence
  Oligonucleotide primer for the detection of SNP TSC0006794
atctaaaaacat

SEQ ID NO: 378340 - DNA, 12 bp, Artificial Sequence
  Oligonucleotide primer for the detection of SNP TSC0006794
tagatggttata

SEQ ID NO: 378341 - DNA, 12 bp, Artificial Sequence
  Oligonucleotide primer for the detection of SNP TSC0062731
attacttttttt

SEQ ID NO: 378342 - DNA, 12 bp, Artificial Sequence
  Oligonucleotide primer for the detection of SNP TSC0062733
attatttctaaa

SEQ ID NO: 378343 - DNA, 12 bp, Artificial Sequence
  Oligonucleotide primer for the detection of SNP TSC0062733
gtgtattgtttg

SEQ ID NO: 378344 - DNA, 12 bp, Artificial Sequence
  Oligonucleotide primer for the detection of SNP TSC0062733
atacactattta

SEQ ID NO: 378345 - DNA, 12 bp, Artificial Sequence
  Oligonucleotide primer for the detection of SNP TSC0062733
aattgtttttga

SEQ ID NO: 378346 - DNA, 12 bp, Artificial Sequence
  Oligonucleotide primer for the detection of SNP TSC0062737
tatggtggaggt

SEQ ID NO: 378347 - DNA, 12 bp, Artificial Sequence
  Oligonucleotide primer for the detection of SNP TSC0062737
tatggtggaggc

SEQ ID NO: 378348 - DNA, 12 bp, Artificial Sequence
  Oligonucleotide primer for the detection of SNP TSC0062737
gagatattgtat

SEQ ID NO: 378349 - DNA, 12 bp, Artificial Sequence
  Oligonucleotide primer for the detection of SNP TSC0062738
aagttttaaaat

SEQ ID NO: 378350 - DNA, 12 bp, Artificial Sequence
  Oligonucleotide primer for the detection of SNP TSC0062738
gagttaaaggag

SEQ ID NO: 378351 - DNA, 12 bp, Artificial Sequence
  Oligonucleotide primer for the detection of SNP TSC0062739
ctaactcccaaa

SEQ ID NO: 378352 - DNA, 12 bp, Artificial Sequence
  Oligonucleotide primer for the detection of SNP TSC0062743
aataactataat

SEQ ID NO: 378353 - DNA, 12 bp, Artificial Sequence
  Oligonucleotide primer for the detection of SNP TSC0006891
ctctacaattca

SEQ ID NO: 378354 - DNA, 12 bp, Artificial Sequence
  Oligonucleotide primer for the detection of SNP TSC0006891
ttatttgtagtg

SEQ ID NO: 378355 - DNA, 12 bp, Artificial Sequence
  Oligonucleotide primer for the detection of SNP TSC0006891
tcatctataata

SEQ ID NO: 378356 - DNA, 12 bp, Artificial Sequence
  Oligonucleotide primer for the detection of SNP TSC0008111
tccctcattctt

SEQ ID NO: 378357 - DNA, 12 bp, Artificial Sequence
  Oligonucleotide primer for the detection of SNP TSC0008111
tgagaaagtgta

SEQ ID NO: 378358 - DNA, 12 bp, Artificial Sequence
  Oligonucleotide primer for the detection of SNP TSC0006114
tatcctccctct

SEQ ID NO: 378359 - DNA, 12 bp, Artificial Sequence
  Oligonucleotide primer for the detection of SNP TSC0006114
tagaagagagaa

SEQ ID NO: 378360 - DNA, 12 bp, Artificial Sequence
  Oligonucleotide primer for the detection of SNP TSC0062744
aacacaaaaata

SEQ ID NO: 378361 - DNA, 12 bp, Artificial Sequence
  Oligonucleotide primer for the detection of SNP TSC0062744
taaggatggttg

SEQ ID NO: 378362 - DNA, 12 bp, Artificial Sequence
  Oligonucleotide primer for the detection of SNP TSC0062744
taaggacggttg

SEQ ID NO: 378363 - DNA, 12 bp, Artificial Sequence
  Oligonucleotide primer for the detection of SNP TSC0062745
aattcacaaaaa

SEQ ID NO: 378364 - DNA, 12 bp, Artificial Sequence
  Oligonucleotide primer for the detection of SNP TSC0062745
gtaggattagat

SEQ ID NO: 378365 - DNA, 12 bp, Artificial Sequence
  Oligonucleotide primer for the detection of SNP TSC0062745
agaatttataag

SEQ ID NO: 378366 - DNA, 12 bp, Artificial Sequence
  Oligonucleotide primer for the detection of SNP TSC0062746
tctattaatata

SEQ ID NO: 378367 - DNA, 12 bp, Artificial Sequence
  Oligonucleotide primer for the detection of SNP TSC0062746
taatgtaatatt

SEQ ID NO: 378368 - DNA, 12 bp, Artificial Sequence
  Oligonucleotide primer for the detection of SNP TSC0062746
tttattaatgtg

SEQ ID NO: 378369 - DNA, 12 bp, Artificial Sequence
  Oligonucleotide primer for the detection of SNP TSC0004535
tttttggttggg

SEQ ID NO: 378370 - DNA, 12 bp, Artificial Sequence
  Oligonucleotide primer for the detection of SNP TSC0004535
tttctaactaaa

SEQ ID NO: 378371 - DNA, 12 bp, Artificial Sequence
  Oligonucleotide primer for the detection of SNP TSC0004536
ggtggatttagg

SEQ ID NO: 378372 - DNA, 12 bp, Artificial Sequence
  Oligonucleotide primer for the detection of SNP TSC0007374
ttcccaaaacct

SEQ ID NO: 378373 - DNA, 12 bp, Artificial Sequence
  Oligonucleotide primer for the detection of SNP TSC0007374
gtgtttggtgtg

SEQ ID NO: 378374 - DNA, 12 bp, Artificial Sequence
  Oligonucleotide primer for the detection of SNP TSC0007374
gtgttcggtgtg

SEQ ID NO: 378375 - DNA, 12 bp, Artificial Sequence
  Oligonucleotide primer for the detection of SNP TSC0007374
atacccaatata

SEQ ID NO: 378376 - DNA, 12 bp, Artificial Sequence
  Oligonucleotide primer for the detection of SNP TSC0007374
atacccgatata

SEQ ID NO: 378377 - DNA, 12 bp, Artificial Sequence
  Oligonucleotide primer for the detection of SNP TSC0007375
acaaacctacca

SEQ ID NO: 378378 - DNA, 12 bp, Artificial Sequence
  Oligonucleotide primer for the detection of SNP TSC0007375
cctatccccaac

SEQ ID NO: 378379 - DNA, 12 bp, Artificial Sequence
  Oligonucleotide primer for the detection of SNP TSC0007375
ataggtttgtta

SEQ ID NO: 378380 - DNA, 12 bp, Artificial Sequence
  Oligonucleotide primer for the detection of SNP TSC0062747
caaaaccccaca

SEQ ID NO: 378381 - DNA, 12 bp, Artificial Sequence
  Oligonucleotide primer for the detection of SNP TSC0062747
caaaaccccacg

SEQ ID NO: 378382 - DNA, 12 bp, Artificial Sequence
  Oligonucleotide primer for the detection of SNP TSC0062747
cgaaaccccaca

SEQ ID NO: 378383 - DNA, 12 bp, Artificial Sequence
  Oligonucleotide primer for the detection of SNP TSC0062747
cgaaaccccacg

SEQ ID NO: 378384 - DNA, 12 bp, Artificial Sequence
  Oligonucleotide primer for the detection of SNP TSC0062747
gtttcgattttt

SEQ ID NO: 378385 - DNA, 12 bp, Artificial Sequence
  Oligonucleotide primer for the detection of SNP TSC0062747
gtttcgattttc

SEQ ID NO: 378386 - DNA, 12 bp, Artificial Sequence
  Oligonucleotide primer for the detection of SNP TSC0062747
cttcaaccctca

SEQ ID NO: 378387 - DNA, 12 bp, Artificial Sequence
  Oligonucleotide primer for the detection of SNP TSC0062747
cttcaaccctcg

SEQ ID NO: 378388 - DNA, 12 bp, Artificial Sequence
  Oligonucleotide primer for the detection of SNP TSC0062747
cttcgaccctca

SEQ ID NO: 378389 - DNA, 12 bp, Artificial Sequence
  Oligonucleotide primer for the detection of SNP TSC0062747
cttcgaccctcg

SEQ ID NO: 378390 - DNA, 12 bp, Artificial Sequence
  Oligonucleotide primer for the detection of SNP TSC0062747
ttgaaattttat

SEQ ID NO: 378391 - DNA, 12 bp, Artificial Sequence
  Oligonucleotide primer for the detection of SNP TSC0062747
tcgaaattttat

SEQ ID NO: 378392 - DNA, 12 bp, Artificial Sequence
  Oligonucleotide primer for the detection of SNP TSC0062747
ttgaaattttac

SEQ ID NO: 378393 - DNA, 12 bp, Artificial Sequence
  Oligonucleotide primer for the detection of SNP TSC0062747
tcgaaattttac

SEQ ID NO: 378394 - DNA, 12 bp, Artificial Sequence
  Oligonucleotide primer for the detection of SNP TSC0062748
taatctttcatc

SEQ ID NO: 378395 - DNA, 12 bp, Artificial Sequence
  Oligonucleotide primer for the detection of SNP TSC0062748
aatttgttttta

SEQ ID NO: 378396 - DNA, 12 bp, Artificial Sequence
  Oligonucleotide primer for the detection of SNP TSC0008704
atctccccatcc

SEQ ID NO: 378397 - DNA, 12 bp, Artificial Sequence
  Oligonucleotide primer for the detection of SNP TSC0008704
attggagatgag

SEQ ID NO: 378398 - DNA, 12 bp, Artificial Sequence
  Oligonucleotide primer for the detection of SNP TSC0062749
tcaaaaaaatac

SEQ ID NO: 378399 - DNA, 12 bp, Artificial Sequence
  Oligonucleotide primer for the detection of SNP TSC0062749
taagagataaaa

SEQ ID NO: 378400 - DNA, 12 bp, Artificial Sequence
  Oligonucleotide primer for the detection of SNP TSC0062750
aaaggttttttc

SEQ ID NO: 378401 - DNA, 12 bp, Artificial Sequence
  Oligonucleotide primer for the detection of SNP TSC0062750
aaaactccttca

SEQ ID NO: 378402 - DNA, 12 bp, Artificial Sequence
  Oligonucleotide primer for the detection of SNP TSC0062750
aaaactccttcg

SEQ ID NO: 378403 - DNA, 12 bp, Artificial Sequence
  Oligonucleotide primer for the detection of SNP TSC0062750
aaagggagttag

SEQ ID NO: 378404 - DNA, 12 bp, Artificial Sequence
  Oligonucleotide primer for the detection of SNP TSC0005286
actaattcccat

SEQ ID NO: 378405 - DNA, 12 bp, Artificial Sequence
  Oligonucleotide primer for the detection of SNP TSC0005286
ttttgaaggata

SEQ ID NO: 378406 - DNA, 12 bp, Artificial Sequence
  Oligonucleotide primer for the detection of SNP TSC0005286
tcttaaaaaata

SEQ ID NO: 378407 - DNA, 12 bp, Artificial Sequence
  Oligonucleotide primer for the detection of SNP TSC0062751
aaataatctata

SEQ ID NO: 378408 - DNA, 12 bp, Artificial Sequence
  Oligonucleotide primer for the detection of SNP TSC0062751
gtttagtgttta

SEQ ID NO: 378409 - DNA, 12 bp, Artificial Sequence
  Oligonucleotide primer for the detection of SNP TSC0062752
tgatataagagg

SEQ ID NO: 378410 - DNA, 12 bp, Artificial Sequence
  Oligonucleotide primer for the detection of SNP TSC0062753
caatctttacca

SEQ ID NO: 378411 - DNA, 12 bp, Artificial Sequence
  Oligonucleotide primer for the detection of SNP TSC0062753
ttagttagtgag

SEQ ID NO: 378412 - DNA, 12 bp, Artificial Sequence
  Oligonucleotide primer for the detection of SNP TSC0062758
ttcacctctaac

SEQ ID NO: 378413 - DNA, 12 bp, Artificial Sequence
  Oligonucleotide primer for the detection of SNP TSC0062758
gtggattatggg

SEQ ID NO: 378414 - DNA, 12 bp, Artificial Sequence
  Oligonucleotide primer for the detection of SNP TSC0062758
gtggattacggg

SEQ ID NO: 378415 - DNA, 12 bp, Artificial Sequence
  Oligonucleotide primer for the detection of SNP TSC0062758
ataaaccacgaa

SEQ ID NO: 378416 - DNA, 12 bp, Artificial Sequence
  Oligonucleotide primer for the detection of SNP TSC0062758
tttatttttaac

SEQ ID NO: 378417 - DNA, 12 bp, Artificial Sequence
  Oligonucleotide primer for the detection of SNP TSC0062759
ctatcataattc

SEQ ID NO: 378418 - DNA, 12 bp, Artificial Sequence
  Oligonucleotide primer for the detection of SNP TSC0062759
ctatcgtaattc

SEQ ID NO: 378419 - DNA, 12 bp, Artificial Sequence
  Oligonucleotide primer for the detection of SNP TSC0062759
ttaaatttttgg

SEQ ID NO: 378420 - DNA, 12 bp, Artificial Sequence
  Oligonucleotide primer for the detection of SNP TSC0062759
taaatctttaaa

SEQ ID NO: 378421 - DNA, 12 bp, Artificial Sequence
  Oligonucleotide primer for the detection of SNP TSC0062759
ttgttgtggttt

SEQ ID NO: 378422 - DNA, 12 bp, Artificial Sequence
  Oligonucleotide primer for the detection of SNP TSC0062759
ttgtcgtggttt

SEQ ID NO: 378423 - DNA, 12 bp, Artificial Sequence
  Oligonucleotide primer for the detection of SNP TSC0062761
atatatcaatta

SEQ ID NO: 378424 - DNA, 12 bp, Artificial Sequence
  Oligonucleotide primer for the detection of SNP TSC0062761
ggtgtgttagtt

SEQ ID NO: 378425 - DNA, 12 bp, Artificial Sequence
  Oligonucleotide primer for the detection of SNP TSC0062762
actatatattat

SEQ ID NO: 378426 - DNA, 12 bp, Artificial Sequence
  Oligonucleotide primer for the detection of SNP TSC0062762
atttaaggttta

SEQ ID NO: 378427 - DNA, 12 bp, Artificial Sequence
  Oligonucleotide primer for the detection of SNP TSC0062763
acattcataccc

SEQ ID NO: 378428 - DNA, 12 bp, Artificial Sequence
  Oligonucleotide primer for the detection of SNP TSC0062763
agataggtagtt

SEQ ID NO: 378429 - DNA, 12 bp, Artificial Sequence
  Oligonucleotide primer for the detection of SNP TSC0062764
atacaaataatt

SEQ ID NO: 378430 - DNA, 12 bp, Artificial Sequence
  Oligonucleotide primer for the detection of SNP TSC0062764
tttaatgattta

SEQ ID NO: 378431 - DNA, 12 bp, Artificial Sequence
  Oligonucleotide primer for the detection of SNP TSC0062764
tttaacgattta

SEQ ID NO: 378432 - DNA, 12 bp, Artificial Sequence
  Oligonucleotide primer for the detection of SNP TSC0062764
ttcaacaactta

SEQ ID NO: 378433 - DNA, 12 bp, Artificial Sequence
  Oligonucleotide primer for the detection of SNP TSC0062764
ttcaacgactta

SEQ ID NO: 378434 - DNA, 12 bp, Artificial Sequence
  Oligonucleotide primer for the detection of SNP TSC0062764
atgtagatgatt

SEQ ID NO: 378435 - DNA, 12 bp, Artificial Sequence
  Oligonucleotide primer for the detection of SNP TSC0062765
tttatttattca

SEQ ID NO: 378436 - DNA, 12 bp, Artificial Sequence
  Oligonucleotide primer for the detection of SNP TSC0062765
tataagttgttt

SEQ ID NO: 378437 - DNA, 12 bp, Artificial Sequence
  Oligonucleotide primer for the detection of SNP TSC0062766
acattattaata

SEQ ID NO: 378438 - DNA, 12 bp, Artificial Sequence
  Oligonucleotide primer for the detection of SNP TSC0062766
ttaaatttaaac

SEQ ID NO: 378439 - DNA, 12 bp, Artificial Sequence
  Oligonucleotide primer for the detection of SNP TSC0062766
atattgttggta

SEQ ID NO: 378440 - DNA, 12 bp, Artificial Sequence
  Oligonucleotide primer for the detection of SNP TSC0062770
aactctttaaat

SEQ ID NO: 378441 - DNA, 12 bp, Artificial Sequence
  Oligonucleotide primer for the detection of SNP TSC0062771
aacaattaatat

SEQ ID NO: 378442 - DNA, 12 bp, Artificial Sequence
  Oligonucleotide primer for the detection of SNP TSC0062771
ctaaacttcaca

SEQ ID NO: 378443 - DNA, 12 bp, Artificial Sequence
  Oligonucleotide primer for the detection of SNP TSC0062771
gatagttaatat

SEQ ID NO: 378444 - DNA, 12 bp, Artificial Sequence
  Oligonucleotide primer for the detection of SNP TSC0062772
tagtggtgaaag

SEQ ID NO: 378445 - DNA, 12 bp, Artificial Sequence
  Oligonucleotide primer for the detection of SNP TSC0062773
ctaacttcaaac

SEQ ID NO: 378446 - DNA, 12 bp, Artificial Sequence
  Oligonucleotide primer for the detection of SNP TSC0062773
agttttatagta

SEQ ID NO: 378447 - DNA, 12 bp, Artificial Sequence
  Oligonucleotide primer for the detection of SNP TSC0062774
aatcccaacttc

SEQ ID NO: 378448 - DNA, 12 bp, Artificial Sequence
  Oligonucleotide primer for the detection of SNP TSC0062776
tactcatatcac

SEQ ID NO: 378449 - DNA, 12 bp, Artificial Sequence
  Oligonucleotide primer for the detection of SNP TSC0062776
ttttaagtaggg

SEQ ID NO: 378450 - DNA, 12 bp, Artificial Sequence
  Oligonucleotide primer for the detection of SNP TSC0006028
ataaaaacaacc

SEQ ID NO: 378451 - DNA, 12 bp, Artificial Sequence
  Oligonucleotide primer for the detection of SNP TSC0005028
tattaccaatat

SEQ ID NO: 378452 - DNA, 12 bp, Artificial Sequence
  Oligonucleotide primer for the detection of SNP TSC0005028
tattaccgatat

SEQ ID NO: 378453 - DNA, 12 bp, Artificial Sequence
  Oligonucleotide primer for the detection of SNP TSC0005028
tattattggtgt

SEQ ID NO: 378454 - DNA, 12 bp, Artificial Sequence
  Oligonucleotide primer for the detection of SNP TSC0005028
tattatcggtgt

SEQ ID NO: 378455 - DNA, 12 bp, Artificial Sequence
  Oligonucleotide primer for the detection of SNP TSC0010518
tctaaaacacaa

SEQ ID NO: 378456 - DNA, 12 bp, Artificial Sequence
  Oligonucleotide primer for the detection of SNP TSC0010518
aatattgttttt

SEQ ID NO: 378457 - DNA, 12 bp, Artificial Sequence
  Oligonucleotide primer for the detection of SNP TSC0010518
taacactacctt

SEQ ID NO: 378458 - DNA, 12 bp, Artificial Sequence
  Oligonucleotide primer for the detection of SNP TSC0062777
ccaaatctcttc

SEQ ID NO: 378459 - DNA, 12 bp, Artificial Sequence
  Oligonucleotide primer for the detection of SNP TSC0062778
atttatgaatta

SEQ ID NO: 378460 - DNA, 12 bp, Artificial Sequence
  Oligonucleotide primer for the detection of SNP TSC0062786
ttaaaaatactt

SEQ ID NO: 378461 - DNA, 12 bp, Artificial Sequence
  Oligonucleotide primer for the detection of SNP TSC0062786
aacaacttctca

SEQ ID NO: 378462 - DNA, 12 bp, Artificial Sequence
  Oligonucleotide primer for the detection of SNP TSC0062787
aacaataaaatt

SEQ ID NO: 378463 - DNA, 12 bp, Artificial Sequence
  Oligonucleotide primer for the detection of SNP TSC0062788
tggaaattttag

SEQ ID NO: 378464 - DNA, 12 bp, Artificial Sequence
  Oligonucleotide primer for the detection of SNP TSC0062790
tattggtgagag

SEQ ID NO: 378465 - DNA, 12 bp, Artificial Sequence
  Oligonucleotide primer for the detection of SNP TSC0062791
gtatttattatg

SEQ ID NO: 378466 - DNA, 12 bp, Artificial Sequence
  Oligonucleotide primer for the detection of SNP TSC0062791
acacttactata

SEQ ID NO: 378467 - DNA, 12 bp, Artificial Sequence
  Oligonucleotide primer for the detection of SNP TSC0062791
aagaatagtgtt

SEQ ID NO: 378468 - DNA, 12 bp, Artificial Sequence
  Oligonucleotide primer for the detection of SNP TSC0062794
aatttattttat

SEQ ID NO: 378469 - DNA, 12 bp, Artificial Sequence
  Oligonucleotide primer for the detection of SNP TSC0062794
attatatgttgg

SEQ ID NO: 378470 - DNA, 12 bp, Artificial Sequence
  Oligonucleotide primer for the detection of SNP TSC0062795
ttttcacttaat

SEQ ID NO: 378471 - DNA, 12 bp, Artificial Sequence
  Oligonucleotide primer for the detection of SNP TSC0062795
gtttaaaatatt

SEQ ID NO: 378472 - DNA, 12 bp, Artificial Sequence
  Oligonucleotide primer for the detection of SNP TSC0062795
tttttatttagt

SEQ ID NO: 378473 - DNA, 12 bp, Artificial Sequence
  Oligonucleotide primer for the detection of SNP TSC0062796
taatacattact

SEQ ID NO: 378474 - DNA, 12 bp, Artificial Sequence
  Oligonucleotide primer for the detection of SNP TSC0062796
attgtttattaa

SEQ ID NO: 378475 - DNA, 12 bp, Artificial Sequence
  Oligonucleotide primer for the detection of SNP TSC0000668
ataactcctttc

SEQ ID NO: 378476 - DNA, 12 bp, Artificial Sequence
  Oligonucleotide primer for the detection of SNP TSC0000668
taaattaatagg

SEQ ID NO: 378477 - DNA, 12 bp, Artificial Sequence
  Oligonucleotide primer for the detection of SNP TSC0062797
taaaatataaac

SEQ ID NO: 378478 - DNA, 12 bp, Artificial Sequence
  Oligonucleotide primer for the detection of SNP TSC0062797
ttaaatgtttgg

SEQ ID NO: 378479 - DNA, 12 bp, Artificial Sequence
  Oligonucleotide primer for the detection of SNP TSC0062798
tcctattaaaaa

SEQ ID NO: 378480 - DNA, 12 bp, Artificial Sequence
  Oligonucleotide primer for the detection of SNP TSC0062798
tgttttttagta

SEQ ID NO: 378481 - DNA, 12 bp, Artificial Sequence
  Oligonucleotide primer for the detection of SNP TSC0062798
tatctctcaata

SEQ ID NO: 378482 - DNA, 12 bp, Artificial Sequence
  Oligonucleotide primer for the detection of SNP TSC0062798
ttttgttggggg

SEQ ID NO: 378483 - DNA, 12 bp, Artificial Sequence
  Oligonucleotide primer for the detection of SNP TSC0007924
aacctttaaaac

SEQ ID NO: 378484 - DNA, 12 bp, Artificial Sequence
  Oligonucleotide primer for the detection of SNP TSC0007924
attttaatagtg

SEQ ID NO: 378485 - DNA, 12 bp, Artificial Sequence
  Oligonucleotide primer for the detection of SNP TSC0001443
atcccttacaat

SEQ ID NO: 378486 - DNA, 12 bp, Artificial Sequence
  Oligonucleotide primer for the detection of SNP TSC0001443
tggtatttggga

SEQ ID NO: 378487 - DNA, 12 bp, Artificial Sequence
  Oligonucleotide primer for the detection of SNP TSC0010782
tattatttttgt

SEQ ID NO: 378488 - DNA, 12 bp, Artificial Sequence
  Oligonucleotide primer for the detection of SNP TSC0010782
tcactatttcta

SEQ ID NO: 378489 - DNA, 12 bp, Artificial Sequence
  Oligonucleotide primer for the detection of SNP TSC0010782
aatgggaatttg

SEQ ID NO: 378490 - DNA, 12 bp, Artificial Sequence
  Oligonucleotide primer for the detection of SNP TSC0062802
tttagtattgtt

SEQ ID NO: 378491 - DNA, 12 bp, Artificial Sequence
  Oligonucleotide primer for the detection of SNP TSC0062802
ttcaatattatt

SEQ ID NO: 378492 - DNA, 12 bp, Artificial Sequence
  Oligonucleotide primer for the detection of SNP TSC0062802
atattgttaata

SEQ ID NO: 378493 - DNA, 12 bp, Artificial Sequence
  Oligonucleotide primer for the detection of SNP TSC0000929
ttcactaacttc

SEQ ID NO: 378494 - DNA, 12 bp, Artificial Sequence
  Oligonucleotide primer for the detection of SNP TSC0062804
tctttaaaaaac

SEQ ID NO: 378495 - DNA, 12 bp, Artificial Sequence
  Oligonucleotide primer for the detection of SNP TSC0062804
tatttaagaatg

SEQ ID NO: 378496 - DNA, 12 bp, Artificial Sequence
  Oligonucleotide primer for the detection of SNP TSC0000395
ttcaatatccac

SEQ ID NO: 378497 - DNA, 12 bp, Artificial Sequence
  Oligonucleotide primer for the detection of SNP TSC0000395
gtttttaataaa

SEQ ID NO: 378498 - DNA, 12 bp, Artificial Sequence
  Oligonucleotide primer for the detection of SNP TSC0062806
acccaaacaaaa

SEQ ID NO: 378499 - DNA, 12 bp, Artificial Sequence
  Oligonucleotide primer for the detection of SNP TSC0062806
ggtgagtttagt

SEQ ID NO: 378500 - DNA, 12 bp, Artificial Sequence
  Oligonucleotide primer for the detection of SNP TSC0062806
aataaatccaac

SEQ ID NO: 378501 - DNA, 12 bp, Artificial Sequence
  Oligonucleotide primer for the detection of SNP TSC0062806
tagtttagatag

SEQ ID NO: 378502 - DNA, 12 bp, Artificial Sequence
  Oligonucleotide primer for the detection of SNP TSC0062809
taaaataatttc

SEQ ID NO: 378503 - DNA, 12 bp, Artificial Sequence
  Oligonucleotide primer for the detection of SNP TSC0062809
tttggtttgtag

SEQ ID NO: 378504 - DNA, 12 bp, Artificial Sequence
  Oligonucleotide primer for the detection of SNP TSC0062809
tctaacttataa

SEQ ID NO: 378505 - DNA, 12 bp, Artificial Sequence
  Oligonucleotide primer for the detection of SNP TSC0062809
aagtagtttttt

SEQ ID NO: 378506 - DNA, 12 bp, Artificial Sequence
  Oligonucleotide primer for the detection of SNP TSC0062815
tacattcctata

SEQ ID NO: 378507 - DNA, 12 bp, Artificial Sequence
  Oligonucleotide primer for the detection of SNP TSC0062815
cccaaccatttt

SEQ ID NO: 378508 - DNA, 12 bp, Artificial Sequence
  Oligonucleotide primer for the detection of SNP TSC0062816
aaacgaataaaa

SEQ ID NO: 378509 - DNA, 12 bp, Artificial Sequence
  Oligonucleotide primer for the detection of SNP TSC0062816
aggaggtttttt

SEQ ID NO: 378510 - DNA, 12 bp, Artificial Sequence
  Oligonucleotide primer for the detection of SNP TSC0062816
aaaaatccctca

SEQ ID NO: 378511 - DNA, 12 bp, Artificial Sequence
  Oligonucleotide primer for the detection of SNP TSC0062816
ttaggatgggta

SEQ ID NO: 378512 - DNA, 12 bp, Artificial Sequence
  Oligonucleotide primer for the detection of SNP TSC0062816
ttaggacgggta

SEQ ID NO: 378513 - DNA, 12 bp, Artificial Sequence
  Oligonucleotide primer for the detection of SNP TSC0062817
ataaattcaaac

SEQ ID NO: 378514 - DNA, 12 bp, Artificial Sequence
  Oligonucleotide primer for the detection of SNP TSC0000368
aataatcttaaa

SEQ ID NO: 378515 - DNA, 12 bp, Artificial Sequence
  Oligonucleotide primer for the detection of SNP TSC0000368
gtaaataatttt

SEQ ID NO: 378516 - DNA, 12 bp, Artificial Sequence
  Oligonucleotide primer for the detection of SNP TSC0010166
ctaaacaaatct

SEQ ID NO: 378517 - DNA, 12 bp, Artificial Sequence
  Oligonucleotide primer for the detection of SNP TSC0010167
ctataactaacc

SEQ ID NO: 378518 - DNA, 12 bp, Artificial Sequence
  Oligonucleotide primer for the detection of SNP TSC0010167
aataccaattta

SEQ ID NO: 378519 - DNA, 12 bp, Artificial Sequence
  Oligonucleotide primer for the detection of SNP TSC0010167
ttataattaatt

SEQ ID NO: 378520 - DNA, 12 bp, Artificial Sequence
  Oligonucleotide primer for the detection of SNP TSC0010167
ttataattaatc

SEQ ID NO: 378521 - DNA, 12 bp, Artificial Sequence
  Oligonucleotide primer for the detection of SNP TSC0062822
ccaaaccaaaac

SEQ ID NO: 378522 - DNA, 12 bp, Artificial Sequence
  Oligonucleotide primer for the detection of SNP TSC0062822
agtgagggtggg

SEQ ID NO: 378523 - DNA, 12 bp, Artificial Sequence
  Oligonucleotide primer for the detection of SNP TSC0062822
agcgagggtggg

SEQ ID NO: 378524 - DNA, 12 bp, Artificial Sequence
  Oligonucleotide primer for the detection of SNP TSC0062823
tataaattaact

SEQ ID NO: 378525 - DNA, 12 bp, Artificial Sequence
  Oligonucleotide primer for the detection of SNP TSC0062823
tatctattatta

SEQ ID NO: 378526 - DNA, 12 bp, Artificial Sequence
  Oligonucleotide primer for the detection of SNP TSC0062823
tatggattaatt

SEQ ID NO: 378527 - DNA, 12 bp, Artificial Sequence
  Oligonucleotide primer for the detection of SNP TSC0062824
ttcataaataat

SEQ ID NO: 378528 - DNA, 12 bp, Artificial Sequence
  Oligonucleotide primer for the detection of SNP TSC0062824
gtttttgtgtaa

SEQ ID NO: 378529 - DNA, 12 bp, Artificial Sequence
  Oligonucleotide primer for the detection of SNP TSC0062824
gttttcgtgtaa

SEQ ID NO: 378530 - DNA, 12 bp, Artificial Sequence
  Oligonucleotide primer for the detection of SNP TSC0001601
catctcctctct

SEQ ID NO: 378531 - DNA, 12 bp, Artificial Sequence
  Oligonucleotide primer for the detection of SNP TSC0062825
ttaataccaata

SEQ ID NO: 378532 - DNA, 12 bp, Artificial Sequence
  Oligonucleotide primer for the detection of SNP TSC0062825
ggttgggagtgt

SEQ ID NO: 378533 - DNA, 12 bp, Artificial Sequence
  Oligonucleotide primer for the detection of SNP TSC0062825
ttgatgttagtg

SEQ ID NO: 378534 - DNA, 12 bp, Artificial Sequence
  Oligonucleotide primer for the detection of SNP TSC0010844
gttggtataata

SEQ ID NO: 378535 - DNA, 12 bp, Artificial Sequence
  Oligonucleotide primer for the detection of SNP TSC0010844
attaacataata

SEQ ID NO: 378536 - DNA, 12 bp, Artificial Sequence
  Oligonucleotide primer for the detection of SNP TSC0010844
ttgttatatgtt

SEQ ID NO: 378537 - DNA, 12 bp, Artificial Sequence
  Oligonucleotide primer for the detection of SNP TSC0010845
actaaatcctaa

SEQ ID NO: 378538 - DNA, 12 bp, Artificial Sequence
  Oligonucleotide primer for the detection of SNP TSC0010845
agttgggatagt

SEQ ID NO: 378539 - DNA, 12 bp, Artificial Sequence
  Oligonucleotide primer for the detection of SNP TSC0010845
gttgagttttag

SEQ ID NO: 378540 - DNA, 12 bp, Artificial Sequence
  Oligonucleotide primer for the detection of SNP TSC0062828
ctttactttaat

SEQ ID NO: 378541 - DNA, 12 bp, Artificial Sequence
  Oligonucleotide primer for the detection of SNP TSC0062828
gattttggggta

SEQ ID NO: 378542 - DNA, 12 bp, Artificial Sequence
  Oligonucleotide primer for the detection of SNP TSC0062829
gtgaattattat

SEQ ID NO: 378543 - DNA, 12 bp, Artificial Sequence
  Oligonucleotide primer for the detection of SNP TSC0062829
ataaattaccat

SEQ ID NO: 378544 - DNA, 12 bp, Artificial Sequence
  Oligonucleotide primer for the detection of SNP TSC0062829
ggtataatattt

SEQ ID NO: 378545 - DNA, 12 bp, Artificial Sequence
  Oligonucleotide primer for the detection of SNP TSC0062833
gaaaagaaagta

SEQ ID NO: 378546 - DNA, 12 bp, Artificial Sequence
  Oligonucleotide primer for the detection of SNP TSC0062835
aaaactcattaa

SEQ ID NO: 378547 - DNA, 12 bp, Artificial Sequence
  Oligonucleotide primer for the detection of SNP TSC0062835
ttatgtttgaaa

SEQ ID NO: 378548 - DNA, 12 bp, Artificial Sequence
  Oligonucleotide primer for the detection of SNP TSC0062835
ttacgtttgaaa

SEQ ID NO: 378549 - DNA, 12 bp, Artificial Sequence
  Oligonucleotide primer for the detection of SNP TSC0005926
ctaaaaaatcct

SEQ ID NO: 378550 - DNA, 12 bp, Artificial Sequence
  Oligonucleotide primer for the detection of SNP TSC0005926
tttttgtaatta

SEQ ID NO: 378551 - DNA, 12 bp, Artificial Sequence
  Oligonucleotide primer for the detection of SNP TSC0062838
atactaacaccc

SEQ ID NO: 378552 - DNA, 12 bp, Artificial Sequence
  Oligonucleotide primer for the detection of SNP TSC0062838
tgttttagaata

SEQ ID NO: 378553 - DNA, 12 bp, Artificial Sequence
  Oligonucleotide primer for the detection of SNP TSC0062839
aatctatatctc

SEQ ID NO: 378554 - DNA, 12 bp, Artificial Sequence
  Oligonucleotide primer for the detection of SNP TSC0062839
tttaggttattc

SEQ ID NO: 378555 - DNA, 12 bp, Artificial Sequence
  Oligonucleotide primer for the detection of SNP TSC0062839
acccaaactatt

SEQ ID NO: 378556 - DNA, 12 bp, Artificial Sequence
  Oligonucleotide primer for the detection of SNP TSC0062839
aatttgtgtttt

SEQ ID NO: 378557 - DNA, 12 bp, Artificial Sequence
  Oligonucleotide primer for the detection of SNP TSC0062840
gtgttttgagta

SEQ ID NO: 378558 - DNA, 12 bp, Artificial Sequence
  Oligonucleotide primer for the detection of SNP TSC0062841
ataaaattggta

SEQ ID NO: 378559 - DNA, 12 bp, Artificial Sequence
  Oligonucleotide primer for the detection of SNP TSC0062841
atgaaagtgaat

SEQ ID NO: 378560 - DNA, 12 bp, Artificial Sequence
  Oligonucleotide primer for the detection of SNP TSC0062842
acttaaaattat

SEQ ID NO: 378561 - DNA, 12 bp, Artificial Sequence
  Oligonucleotide primer for the detection of SNP TSC0062842
gttggagattta

SEQ ID NO: 378562 - DNA, 12 bp, Artificial Sequence
  Oligonucleotide primer for the detection of SNP TSC0062844
ttggtatttaag

SEQ ID NO: 378563 - DNA, 12 bp, Artificial Sequence
  Oligonucleotide primer for the detection of SNP TSC0062844
tcggtatttaag

SEQ ID NO: 378564 - DNA, 12 bp, Artificial Sequence
  Oligonucleotide primer for the detection of SNP TSC0062845
tctaatatcttt

SEQ ID NO: 378565 - DNA, 12 bp, Artificial Sequence
  Oligonucleotide primer for the detection of SNP TSC0062845
aagagaataaaa

SEQ ID NO: 378566 - DNA, 12 bp, Artificial Sequence
  Oligonucleotide primer for the detection of SNP TSC0062846
accaacctaaaa

SEQ ID NO: 378567 - DNA, 12 bp, Artificial Sequence
  Oligonucleotide primer for the detection of SNP TSC0062846
accgacctaaaa

SEQ ID NO: 378568 - DNA, 12 bp, Artificial Sequence
  Oligonucleotide primer for the detection of SNP TSC0062846
gatgaggttggt

SEQ ID NO: 378569 - DNA, 12 bp, Artificial Sequence
  Oligonucleotide primer for the detection of SNP TSC0062846
gatgaggtcggt

SEQ ID NO: 378570 - DNA, 12 bp, Artificial Sequence
  Oligonucleotide primer for the detection of SNP TSC0062846
aataaaatcgac

SEQ ID NO: 378571 - DNA, 12 bp, Artificial Sequence
  Oligonucleotide primer for the detection of SNP TSC0062846
attgatttaagg

SEQ ID NO: 378572 - DNA, 12 bp, Artificial Sequence
  Oligonucleotide primer for the detection of SNP TSC0062846
atcgatttaagg

SEQ ID NO: 378573 - DNA, 12 bp, Artificial Sequence
  Oligonucleotide primer for the detection of SNP TSC0062847
aaaacttataat

SEQ ID NO: 378574 - DNA, 12 bp, Artificial Sequence
  Oligonucleotide primer for the detection of SNP TSC0062849
aaaaatgtatta

SEQ ID NO: 378575 - DNA, 12 bp, Artificial Sequence
  Oligonucleotide primer for the detection of SNP TSC0062850
ggatgatgaaaa

SEQ ID NO: 378576 - DNA, 12 bp, Artificial Sequence
  Oligonucleotide primer for the detection of SNP TSC0062851
ttaaaaaataca

SEQ ID NO: 378577 - DNA, 12 bp, Artificial Sequence
  Oligonucleotide primer for the detection of SNP TSC0062851
aataatgttata

SEQ ID NO: 378578 - DNA, 12 bp, Artificial Sequence
  Oligonucleotide primer for the detection of SNP TSC0062851
aataacgttata

SEQ ID NO: 378579 - DNA, 12 bp, Artificial Sequence
  Oligonucleotide primer for the detection of SNP TSC0062851
aataacattaca

SEQ ID NO: 378580 - DNA, 12 bp, Artificial Sequence
  Oligonucleotide primer for the detection of SNP TSC0062851
aataacgttaca

SEQ ID NO: 378581 - DNA, 12 bp, Artificial Sequence
  Oligonucleotide primer for the detection of SNP TSC0062852
caaaccaacata

SEQ ID NO: 378582 - DNA, 12 bp, Artificial Sequence
  Oligonucleotide primer for the detection of SNP TSC0062852
taggttagtata

SEQ ID NO: 378583 - DNA, 12 bp, Artificial Sequence
  Oligonucleotide primer for the detection of SNP TSC0005201
acctctttccct

SEQ ID NO: 378584 - DNA, 12 bp, Artificial Sequence
  Oligonucleotide primer for the detection of SNP TSC0005201
tggaggaatatg

SEQ ID NO: 378585 - DNA, 12 bp, Artificial Sequence
  Oligonucleotide primer for the detection of SNP TSC0062853
aatactatattc

SEQ ID NO: 378586 - DNA, 12 bp, Artificial Sequence
  Oligonucleotide primer for the detection of SNP TSC0062853
gtatagttttag

SEQ ID NO: 378587 - DNA, 12 bp, Artificial Sequence
  Oligonucleotide primer for the detection of SNP TSC0062854
cctcttcatcaa

SEQ ID NO: 378588 - DNA, 12 bp, Artificial Sequence
  Oligonucleotide primer for the detection of SNP TSC0062854
cctcttcgtcaa

SEQ ID NO: 378589 - DNA, 12 bp, Artificial Sequence
  Oligonucleotide primer for the detection of SNP TSC0062854
tgtagagagttt

SEQ ID NO: 378590 - DNA, 12 bp, Artificial Sequence
  Oligonucleotide primer for the detection of SNP TSC0062855
agatgaggtttt

SEQ ID NO: 378591 - DNA, 12 bp, Artificial Sequence
  Oligonucleotide primer for the detection of SNP TSC0062855
agacgaggtttt

SEQ ID NO: 378592 - DNA, 12 bp, Artificial Sequence
  Oligonucleotide primer for the detection of SNP TSC0062855
aaacgaaaccct

SEQ ID NO: 378593 - DNA, 12 bp, Artificial Sequence
  Oligonucleotide primer for the detection of SNP TSC0062856
acccctctaaca

SEQ ID NO: 378594 - DNA, 12 bp, Artificial Sequence
  Oligonucleotide primer for the detection of SNP TSC0062856
acccctctaacg

SEQ ID NO: 378595 - DNA, 12 bp, Artificial Sequence
  Oligonucleotide primer for the detection of SNP TSC0062856
ggtaggtttgat

SEQ ID NO: 378596 - DNA, 12 bp, Artificial Sequence
  Oligonucleotide primer for the detection of SNP TSC0062856
acaaacctaaca

SEQ ID NO: 378597 - DNA, 12 bp, Artificial Sequence
  Oligonucleotide primer for the detection of SNP TSC0062860
tatattttcttc

SEQ ID NO: 378598 - DNA, 12 bp, Artificial Sequence
  Oligonucleotide primer for the detection of SNP TSC0062860
ataatgatagaa

SEQ ID NO: 378599 - DNA, 12 bp, Artificial Sequence
  Oligonucleotide primer for the detection of SNP TSC0062862
gatgtaattttg

SEQ ID NO: 378600 - DNA, 12 bp, Artificial Sequence
  Oligonucleotide primer for the detection of SNP TSC0062863
attttaccatat

SEQ ID NO: 378601 - DNA, 12 bp, Artificial Sequence
  Oligonucleotide primer for the detection of SNP TSC0062863
gattagtttggg

SEQ ID NO: 378602 - DNA, 12 bp, Artificial Sequence
  Oligonucleotide primer for the detection of SNP TSC0007200
actactaccttt

SEQ ID NO: 378603 - DNA, 12 bp, Artificial Sequence
  Oligonucleotide primer for the detection of SNP TSC0007200
ttataagatata

SEQ ID NO: 378604 - DNA, 12 bp, Artificial Sequence
  Oligonucleotide primer for the detection of SNP TSC0007200
ttataaaatata

SEQ ID NO: 378605 - DNA, 12 bp, Artificial Sequence
  Oligonucleotide primer for the detection of SNP TSC0007201
aaaaactatacc

SEQ ID NO: 378606 - DNA, 12 bp, Artificial Sequence
  Oligonucleotide primer for the detection of SNP TSC0007201
gggaagaataaa

SEQ ID NO: 378607 - DNA, 12 bp, Artificial Sequence
  Oligonucleotide primer for the detection of SNP TSC0007201
ggaaattatgtt

SEQ ID NO: 378608 - DNA, 12 bp, Artificial Sequence
  Oligonucleotide primer for the detection of SNP TSC0062866
ttgaagtttatt

SEQ ID NO: 378609 - DNA, 12 bp, Artificial Sequence
  Oligonucleotide primer for the detection of SNP TSC0062866
ccctaaaatcta

SEQ ID NO: 378610 - DNA, 12 bp, Artificial Sequence
  Oligonucleotide primer for the detection of SNP TSC0062866
tttagatgtttg

SEQ ID NO: 378611 - DNA, 12 bp, Artificial Sequence
  Oligonucleotide primer for the detection of SNP TSC0062870
tacaaactctat

SEQ ID NO: 378612 - DNA, 12 bp, Artificial Sequence
  Oligonucleotide primer for the detection of SNP TSC0062870
gtggtatttatt

SEQ ID NO: 378613 - DNA, 12 bp, Artificial Sequence
  Oligonucleotide primer for the detection of SNP TSC0062870
ataacactcatt

SEQ ID NO: 378614 - DNA, 12 bp, Artificial Sequence
  Oligonucleotide primer for the detection of SNP TSC0062870
tgtagattttat

SEQ ID NO: 378615 - DNA, 12 bp, Artificial Sequence
  Oligonucleotide primer for the detection of SNP TSC0062871
ccacaatcctac

SEQ ID NO: 378616 - DNA, 12 bp, Artificial Sequence
  Oligonucleotide primer for the detection of SNP TSC0062871
atgtggtaatat

SEQ ID NO: 378617 - DNA, 12 bp, Artificial Sequence
  Oligonukleotid-Primer
acgtggtaatat

SEQ ID NO: 378618 - DNA, 12 bp, Artificial Sequence
  Oligonucleotide primer for the detection of SNP TSC0062871
atgtggtaatac

SEQ ID NO: 378619 - DNA, 12 bp, Artificial Sequence
  Oligonucleotide primer for the detection of SNP TSC0062871
acgtggtaatac

SEQ ID NO: 378620 - DNA, 12 bp, Artificial Sequence
  Oligonucleotide primer for the detection of SNP TSC0062871
aacgtaacaaca

SEQ ID NO: 378621 - DNA, 12 bp, Artificial Sequence
  Oligonucleotide primer for the detection of SNP TSC0062872
ttaagttagaat

SEQ ID NO: 378622 - DNA, 12 bp, Artificial Sequence
  Oligonucleotide primer for the detection of SNP TSC0062872
caaaccaaaata

SEQ ID NO: 378623 - DNA, 12 bp, Artificial Sequence
  Oligonucleotide primer for the detection of SNP TSC0062872
agaaagtttaga

SEQ ID NO: 378624 - DNA, 12 bp, Artificial Sequence
  Oligonucleotide primer for the detection of SNP TSC0062873
actctacttccc

SEQ ID NO: 378625 - DNA, 12 bp, Artificial Sequence
  Oligonucleotide primer for the detection of SNP TSC0062873
gttttagggatg

SEQ ID NO: 378626 - DNA, 12 bp, Artificial Sequence
  Oligonucleotide primer for the detection of SNP TSC0062874
cactattcaatc

SEQ ID NO: 378627 - DNA, 12 bp, Artificial Sequence
  Oligonucleotide primer for the detection of SNP TSC0062874
atgggtagttta

SEQ ID NO: 378628 - DNA, 12 bp, Artificial Sequence
  Oligonucleotide primer for the detection of SNP TSC0062876
atcttaaccact

SEQ ID NO: 378629 - DNA, 12 bp, Artificial Sequence
  Oligonucleotide primer for the detection of SNP TSC0062876
tgggtttgttag

SEQ ID NO: 378630 - DNA, 12 bp, Artificial Sequence
  Oligonucleotide primer for the detection of SNP TSC0062876
tgggttcgttag

SEQ ID NO: 378631 - DNA, 12 bp, Artificial Sequence
  Oligonucleotide primer for the detection of SNP TSC0062877
ctataaacacca

SEQ ID NO: 378632 - DNA, 12 bp, Artificial Sequence
  Oligonucleotide primer for the detection of SNP TSC0062877
ttaagttatgtt

SEQ ID NO: 378633 - DNA, 12 bp, Artificial Sequence
  Oligonucleotide primer for the detection of SNP TSC0062877
aaaccatactaa

SEQ ID NO: 378634 - DNA, 12 bp, Artificial Sequence
  Oligonucleotide primer for the detection of SNP TSC0062877
tgtgagtattat

SEQ ID NO: 378635 - DNA, 12 bp, Artificial Sequence
  Oligonucleotide primer for the detection of SNP TSC0062877
tgtgagtattac

SEQ ID NO: 378636 - DNA, 12 bp, Artificial Sequence
  Oligonucleotide primer for the detection of SNP TSC0062878
atttattgaata

SEQ ID NO: 378637 - DNA, 12 bp, Artificial Sequence
  Oligonucleotide primer for the detection of SNP TSC0062879
tttcccttaaaa

SEQ ID NO: 378638 - DNA, 12 bp, Artificial Sequence
  Oligonucleotide primer for the detection of SNP TSC0062879
ttttttgaagtc

SEQ ID NO: 378639 - DNA, 12 bp, Artificial Sequence
  Oligonucleotide primer for the detection of SNP TSC0006495
ccaacataacat

SEQ ID NO: 378640 - DNA, 12 bp, Artificial Sequence
  Oligonucleotide primer for the detection of SNP TSC0062880
acaaaattctat

SEQ ID NO: 378641 - DNA, 12 bp, Artificial Sequence
  Oligonucleotide primer for the detection of SNP TSC0062880
ataaggttttat

SEQ ID NO: 378642 - DNA, 12 bp, Artificial Sequence
  Oligonucleotide primer for the detection of SNP TSC0062881
tcataaccatat

SEQ ID NO: 378643 - DNA, 12 bp, Artificial Sequence
  Oligonucleotide primer for the detection of SNP TSC0062881
tcataaccgtat

SEQ ID NO: 378644 - DNA, 12 bp, Artificial Sequence
  Oligonucleotide primer for the detection of SNP TSC0062881
tcgtaaccatat

SEQ ID NO: 378645 - DNA, 12 bp, Artificial Sequence
  Oligonucleotide primer for the detection of SNP TSC0062881
tcgtaaccgtat

SEQ ID NO: 378646 - DNA, 12 bp, Artificial Sequence
  Oligonucleotide primer for the detection of SNP TSC0062881
ataggatttgag

SEQ ID NO: 378647 - DNA, 12 bp, Artificial Sequence
  Oligonucleotide primer for the detection of SNP TSC0062881
ataggattcgag

SEQ ID NO: 378648 - DNA, 12 bp, Artificial Sequence
  Oligonucleotide primer for the detection of SNP TSC0062882
attatttttccc

SEQ ID NO: 378649 - DNA, 12 bp, Artificial Sequence
  Oligonucleotide primer for the detection of SNP TSC0062882
tgaattttatgt

SEQ ID NO: 378650 - DNA, 12 bp, Artificial Sequence
  Oligonucleotide primer for the detection of SNP TSC0062882
cgaattttatgt

SEQ ID NO: 378651 - DNA, 12 bp, Artificial Sequence
  Oligonucleotide primer for the detection of SNP TSC0062882
caaatcctatat

SEQ ID NO: 378652 - DNA, 12 bp, Artificial Sequence
  Oligonucleotide primer for the detection of SNP TSC0062882
cgaatcctatat

SEQ ID NO: 378653 - DNA, 12 bp, Artificial Sequence
  Oligonucleotide primer for the detection of SNP TSC0062884
aatttagtagta

SEQ ID NO: 378654 - DNA, 12 bp, Artificial Sequence
  Oligonucleotide primer for the detection of SNP TSC0005754
acatttaattca

SEQ ID NO: 378655 - DNA, 12 bp, Artificial Sequence
  Oligonucleotide primer for the detection of SNP TSC0005754
ttttatttatac

SEQ ID NO: 378656 - DNA, 12 bp, Artificial Sequence
  Oligonucleotide primer for the detection of SNP TSC0005754
tctctatccaca

SEQ ID NO: 378657 - DNA, 12 bp, Artificial Sequence
  Oligonucleotide primer for the detection of SNP TSC0005755
gttcgtttcggt

SEQ ID NO: 378658 - DNA, 12 bp, Artificial Sequence
  Oligonucleotide primer for the detection of SNP TSC0005756
gaatataataac

SEQ ID NO: 378659 - DNA, 12 bp, Artificial Sequence
  Oligonucleotide primer for the detection of SNP TSC0005757
tcataatccgcc

SEQ ID NO: 378660 - DNA, 12 bp, Artificial Sequence
  Oligonucleotide primer for the detection of SNP TSC0005757
tcgtaatccgcc

SEQ ID NO: 378661 - DNA, 12 bp, Artificial Sequence
  Oligonucleotide primer for the detection of SNP TSC0005757
ttgtgatttgtt

SEQ ID NO: 378662 - DNA, 12 bp, Artificial Sequence
  Oligonucleotide primer for the detection of SNP TSC0005757
tcgtgatttgtt

SEQ ID NO: 378663 - DNA, 12 bp, Artificial Sequence
  Oligonucleotide primer for the detection of SNP TSC0005757
ttgtgattcgtt

SEQ ID NO: 378664 - DNA, 12 bp, Artificial Sequence
  Oligonucleotide primer for the detection of SNP TSC0005757
tcgtgattcgtt

SEQ ID NO: 378665 - DNA, 12 bp, Artificial Sequence
  Oligonucleotide primer for the detection of SNP TSC0062885
ttatatttcttt

SEQ ID NO: 378666 - DNA, 12 bp, Artificial Sequence
  Oligonucleotide primer for the detection of SNP TSC0062885
ttgaaaaaaaaa

SEQ ID NO: 378667 - DNA, 12 bp, Artificial Sequence
  Oligonucleotide primer for the detection of SNP TSC0005882
taaaaaattacc

SEQ ID NO: 378668 - DNA, 12 bp, Artificial Sequence
  Oligonucleotide primer for the detection of SNP TSC0005882
tagagaattatt

SEQ ID NO: 378669 - DNA, 12 bp, Artificial Sequence
  Oligonucleotide primer for the detection of SNP TSC0062887
ctaaaaaaactc

SEQ ID NO: 378670 - DNA, 12 bp, Artificial Sequence
  Oligonucleotide primer for the detection of SNP TSC0062887
atttttaaagaa

SEQ ID NO: 378671 - DNA, 12 bp, Artificial Sequence
  Oligonucleotide primer for the detection of SNP TSC0062887
ttgaaaaaattt

SEQ ID NO: 378672 - DNA, 12 bp, Artificial Sequence
  Oligonucleotide primer for the detection of SNP TSC0062888
taccttcatatt

SEQ ID NO: 378673 - DNA, 12 bp, Artificial Sequence
  Oligonucleotide primer for the detection of SNP TSC0062889
aatttaaaatca

SEQ ID NO: 378674 - DNA, 12 bp, Artificial Sequence
  Oligonucleotide primer for the detection of SNP TSC0062889
ttttggtgatat

SEQ ID NO: 378675 - DNA, 12 bp, Artificial Sequence
  Oligonucleotide primer for the detection of SNP TSC0062889
tcctaataacac

SEQ ID NO: 378676 - DNA, 12 bp, Artificial Sequence
  Oligonucleotide primer for the detection of SNP TSC0062889
aatttgggatta

SEQ ID NO: 378677 - DNA, 12 bp, Artificial Sequence
  Oligonucleotide primer for the detection of SNP TSC0062890
atactaaatcac

SEQ ID NO: 378678 - DNA, 12 bp, Artificial Sequence
  Oligonucleotide primer for the detection of SNP TSC0062890
tatttaagataa

SEQ ID NO: 378679 - DNA, 12 bp, Artificial Sequence
  Oligonucleotide primer for the detection of SNP TSC0062890
atgttggattat

SEQ ID NO: 378680 - DNA, 12 bp, Artificial Sequence
  Oligonucleotide primer for the detection of SNP TSC0004863
aaattaacctat

SEQ ID NO: 378681 - DNA, 12 bp, Artificial Sequence
  Oligonucleotide primer for the detection of SNP TSC0004863
tttatgttatta

SEQ ID NO: 378682 - DNA, 12 bp, Artificial Sequence
  Oligonucleotide primer for the detection of SNP TSC0006257
ttcactcaaaat

SEQ ID NO: 378683 - DNA, 12 bp, Artificial Sequence
  Oligonucleotide primer for the detection of SNP TSC0006257
ttagatagttta

SEQ ID NO: 378684 - DNA, 12 bp, Artificial Sequence
  Oligonucleotide primer for the detection of SNP TSC0006257
ccaaataaccta

SEQ ID NO: 378685 - DNA, 12 bp, Artificial Sequence
  Oligonucleotide primer for the detection of SNP TSC0062892
tttttattacca

SEQ ID NO: 378686 - DNA, 12 bp, Artificial Sequence
  Oligonucleotide primer for the detection of SNP TSC0062892
ttaggtagtgtt

SEQ ID NO: 378687 - DNA, 12 bp, Artificial Sequence
  Oligonucleotide primer for the detection of SNP TSC0062893
ccataaaaaaac

SEQ ID NO: 378688 - DNA, 12 bp, Artificial Sequence
  Oligonucleotide primer for the detection of SNP TSC0062893
gtaggattgata

SEQ ID NO: 378689 - DNA, 12 bp, Artificial Sequence
  Oligonucleotide primer for the detection of SNP TSC0008173
attaattggaag

SEQ ID NO: 378690 - DNA, 12 bp, Artificial Sequence
  Oligonucleotide primer for the detection of SNP TSC0005762
aatcacttaaat

SEQ ID NO: 378691 - DNA, 12 bp, Artificial Sequence
  Oligonucleotide primer for the detection of SNP TSC0005762
aatcgcttaaat

SEQ ID NO: 378692 - DNA, 12 bp, Artificial Sequence
  Oligonucleotide primer for the detection of SNP TSC0062895
aaattttcaaaa

SEQ ID NO: 378693 - DNA, 12 bp, Artificial Sequence
  Oligonucleotide primer for the detection of SNP TSC0062895
tggaaggtgtga

SEQ ID NO: 378694 - DNA, 12 bp, Artificial Sequence
  Oligonucleotide primer for the detection of SNP TSC0062896
aacattcatatc

SEQ ID NO: 378695 - DNA, 12 bp, Artificial Sequence
  Oligonucleotide primer for the detection of SNP TSC0062896
aacgttcatatc

SEQ ID NO: 378696 - DNA, 12 bp, Artificial Sequence
  Oligonucleotide primer for the detection of SNP TSC0062896
tagtgattaagg

SEQ ID NO: 378697 - DNA, 12 bp, Artificial Sequence
  Oligonucleotide primer for the detection of SNP TSC0062896
ggtgtttatgtt

SEQ ID NO: 378698 - DNA, 12 bp, Artificial Sequence
  Oligonucleotide primer for the detection of SNP TSC0062896
ggcgtttatgtt

SEQ ID NO: 378699 - DNA, 12 bp, Artificial Sequence
  Oligonucleotide primer for the detection of SNP TSC0007044
ttgtataatgta

SEQ ID NO: 378700 - DNA, 12 bp, Artificial Sequence
  Oligonucleotide primer for the detection of SNP TSC0062897
tggggtaaataa

SEQ ID NO: 378701 - DNA, 12 bp, Artificial Sequence
  Oligonucleotide primer for the detection of SNP TSC0062897
cggggtaaataa

SEQ ID NO: 378702 - DNA, 12 bp, Artificial Sequence
  Oligonucleotide primer for the detection of SNP TSC0062898
aagggtaatttg

SEQ ID NO: 378703 - DNA, 12 bp, Artificial Sequence
  Oligonucleotide primer for the detection of SNP TSC0005735
actctattaccc

SEQ ID NO: 378704 - DNA, 12 bp, Artificial Sequence
  Oligonucleotide primer for the detection of SNP TSC0062899
cacacaccttaa

SEQ ID NO: 378705 - DNA, 12 bp, Artificial Sequence
  Oligonucleotide primer for the detection of SNP TSC0062899
aaattgtataga

SEQ ID NO: 378706 - DNA, 12 bp, Artificial Sequence
  Oligonucleotide primer for the detection of SNP TSC0062900
tgtttaggttgg

SEQ ID NO: 378707 - DNA, 12 bp, Artificial Sequence
  Oligonucleotide primer for the detection of SNP TSC0062902
tctctaacttaa

SEQ ID NO: 378708 - DNA, 12 bp, Artificial Sequence
  Oligonucleotide primer for the detection of SNP TSC0062902
ggttttttaaga

SEQ ID NO: 378709 - DNA, 12 bp, Artificial Sequence
  Oligonucleotide primer for the detection of SNP TSC0062903
tatttagaaaga

SEQ ID NO: 378710 - DNA, 12 bp, Artificial Sequence
  Oligonucleotide primer for the detection of SNP TSC0006732
aaattctaccat

SEQ ID NO: 378711 - DNA, 12 bp, Artificial Sequence
  Oligonucleotide primer for the detection of SNP TSC0010270
cttataccacca

SEQ ID NO: 378712 - DNA, 12 bp, Artificial Sequence
  Oligonucleotide primer for the detection of SNP TSC0006271
ataatgtgaagt

SEQ ID NO: 378713 - DNA, 12 bp, Artificial Sequence
  Oligonucleotide primer for the detection of SNP TSC0006271
ataacgtgaagt

SEQ ID NO: 378714 - DNA, 12 bp, Artificial Sequence
  Oligonucleotide primer for the detection of SNP TSC0006271
cataacataaaa

SEQ ID NO: 378715 - DNA, 12 bp, Artificial Sequence
  Oligonucleotide primer for the detection of SNP TSC0006271
cataacgtaaaa

SEQ ID NO: 378716 - DNA, 12 bp, Artificial Sequence
  Oligonucleotide primer for the detection of SNP TSC0006272
aaaacttaataa

SEQ ID NO: 378717 - DNA, 12 bp, Artificial Sequence
  Oligonucleotide primer for the detection of SNP TSC0006272
aattactaaaaa

SEQ ID NO: 378718 - DNA, 12 bp, Artificial Sequence
  Oligonucleotide primer for the detection of SNP TSC0006273
tgtgtgatttga

SEQ ID NO: 378719 - DNA, 12 bp, Artificial Sequence
  Oligonucleotide primer for the detection of SNP TSC0006988
ctatcactcata

SEQ ID NO: 378720 - DNA, 12 bp, Artificial Sequence
  Oligonucleotide primer for the detection of SNP TSC0006988
ctatcactcgta

SEQ ID NO: 378721 - DNA, 12 bp, Artificial Sequence
  Oligonucleotide primer for the detection of SNP TSC0006988
ctttctactcta

SEQ ID NO: 378722 - DNA, 12 bp, Artificial Sequence
  Oligonucleotide primer for the detection of SNP TSC0006988
ttgttattcgtg

SEQ ID NO: 378723 - DNA, 12 bp, Artificial Sequence
  Oligonucleotide primer for the detection of SNP TSC0062906
taattaactcta

SEQ ID NO: 378724 - DNA, 12 bp, Artificial Sequence
  Oligonucleotide primer for the detection of SNP TSC0062906
tgagtgtttggt

SEQ ID NO: 378725 - DNA, 12 bp, Artificial Sequence
  Oligonucleotide primer for the detection of SNP TSC0062907
taattatttaat

SEQ ID NO: 378726 - DNA, 12 bp, Artificial Sequence
  Oligonucleotide primer for the detection of SNP TSC0062907
taattatttaac

SEQ ID NO: 378727 - DNA, 12 bp, Artificial Sequence
  Oligonucleotide primer for the detection of SNP TSC0062907
ctaattacttaa

SEQ ID NO: 378728 - DNA, 12 bp, Artificial Sequence
  Oligonucleotide primer for the detection of SNP TSC0007199
aataaattcctt

SEQ ID NO: 378729 - DNA, 12 bp, Artificial Sequence
  Oligonucleotide primer for the detection of SNP TSC0007199
ttttgataagag

SEQ ID NO: 378730 - DNA, 12 bp, Artificial Sequence
  Oligonucleotide primer for the detection of SNP TSC0062911
ccactattttac

SEQ ID NO: 378731 - DNA, 12 bp, Artificial Sequence
  Oligonucleotide primer for the detection of SNP TSC0062911
gggtgaatatat

SEQ ID NO: 378732 - DNA, 12 bp, Artificial Sequence
  Oligonucleotide primer for the detection of SNP TSC0062911
ttattgttttat

SEQ ID NO: 378733 - DNA, 12 bp, Artificial Sequence
  Oligonucleotide primer for the detection of SNP TSC0062912
atcattataaaa

SEQ ID NO: 378734 - DNA, 12 bp, Artificial Sequence
  Oligonucleotide primer for the detection of SNP TSC0062912
atcgttataaaa

SEQ ID NO: 378735 - DNA, 12 bp, Artificial Sequence
  Oligonucleotide primer for the detection of SNP TSC0062912
ttaaaagttggt

SEQ ID NO: 378736 - DNA, 12 bp, Artificial Sequence
  Oligonucleotide primer for the detection of SNP TSC0062912
accaaaaattaa

SEQ ID NO: 378737 - DNA, 12 bp, Artificial Sequence
  Oligonucleotide primer for the detection of SNP TSC0062912
tatcgttataag

SEQ ID NO: 378738 - DNA, 12 bp, Artificial Sequence
  Oligonucleotide primer for the detection of SNP TSC0006707
aacaaataaaac

SEQ ID NO: 378739 - DNA, 12 bp, Artificial Sequence
  Oligonucleotide primer for the detection of SNP TSC0006707
taatatatagta

SEQ ID NO: 378740 - DNA, 12 bp, Artificial Sequence
  Oligonucleotide primer for the detection of SNP TSC0006707
taatatataata

SEQ ID NO: 378741 - DNA, 12 bp, Artificial Sequence
  Oligonucleotide primer for the detection of SNP TSC0006707
agtaagtgagat

SEQ ID NO: 378742 - DNA, 12 bp, Artificial Sequence
  Oligonucleotide primer for the detection of SNP TSC0062914
caccatcacacc

SEQ ID NO: 378743 - DNA, 12 bp, Artificial Sequence
  Oligonucleotide primer for the detection of SNP TSC0062914
caccatcacgcc

SEQ ID NO: 378744 - DNA, 12 bp, Artificial Sequence
  Oligonucleotide primer for the detection of SNP TSC0062916
gtggttggggag

SEQ ID NO: 378745 - DNA, 12 bp, Artificial Sequence
  Oligonucleotide primer for the detection of SNP TSC0008610
aagaaaaataag

SEQ ID NO: 378746 - DNA, 12 bp, Artificial Sequence
  Oligonucleotide primer for the detection of SNP TSC0062917
gtattataggta

SEQ ID NO: 378747 - DNA, 12 bp, Artificial Sequence
  Oligonucleotide primer for the detection of SNP TSC0062917
acaccacaaata

SEQ ID NO: 378748 - DNA, 12 bp, Artificial Sequence
  Oligonucleotide primer for the detection of SNP TSC0062917
agaaatattaaa

SEQ ID NO: 378749 - DNA, 12 bp, Artificial Sequence
  Oligonucleotide primer for the detection of SNP TSC0062918
ctttttacataa

SEQ ID NO: 378750 - DNA, 12 bp, Artificial Sequence
  Oligonucleotide primer for the detection of SNP TSC0062918
tgtaaagggaat

SEQ ID NO: 378751 - DNA, 12 bp, Artificial Sequence
  Oligonucleotide primer for the detection of SNP TSC0000654
ctactttctatt

SEQ ID NO: 378752 - DNA, 12 bp, Artificial Sequence
  Oligonucleotide primer for the detection of SNP TSC0000654
tttttaaagata

SEQ ID NO: 378753 - DNA, 12 bp, Artificial Sequence
  Oligonucleotide primer for the detection of SNP TSC0062924
tgttttgtatta

SEQ ID NO: 378754 - DNA, 12 bp, Artificial Sequence
  Oligonucleotide primer for the detection of SNP TSC0006351
accaaccccaat

SEQ ID NO: 378755 - DNA, 12 bp, Artificial Sequence
  Oligonucleotide primer for the detection of SNP TSC0006351
accaaccccgat

SEQ ID NO: 378756 - DNA, 12 bp, Artificial Sequence
  Oligonucleotide primer for the detection of SNP TSC0006351
atatttatgtta

SEQ ID NO: 378757 - DNA, 12 bp, Artificial Sequence
  Oligonucleotide primer for the detection of SNP TSC0062930
ccactaaataaa

SEQ ID NO: 378758 - DNA, 12 bp, Artificial Sequence
  Oligonucleotide primer for the detection of SNP TSC0062930
tttgtaataagt

SEQ ID NO: 378759 - DNA, 12 bp, Artificial Sequence
  Oligonucleotide primer for the detection of SNP TSC0062930
tattgaataagt

SEQ ID NO: 378760 - DNA, 12 bp, Artificial Sequence
  Oligonucleotide primer for the detection of SNP TSC0062931
ataacaaacctt

SEQ ID NO: 378761 - DNA, 12 bp, Artificial Sequence
  Oligonucleotide primer for the detection of SNP TSC0062931
atagggggagga

SEQ ID NO: 378762 - DNA, 12 bp, Artificial Sequence
  Oligonucleotide primer for the detection of SNP TSC0062932
cataatactacc

SEQ ID NO: 378763 - DNA, 12 bp, Artificial Sequence
  Oligonucleotide primer for the detection of SNP TSC0062932
gagtgtagttgg

SEQ ID NO: 378764 - DNA, 12 bp, Artificial Sequence
  Oligonucleotide primer for the detection of SNP TSC0007284
ataaaaaattta

SEQ ID NO: 378765 - DNA, 12 bp, Artificial Sequence
  Oligonucleotide primer for the detection of SNP TSC0007284
ttgtgtgatttt

SEQ ID NO: 378766 - DNA, 12 bp, Artificial Sequence
  Oligonucleotide primer for the detection of SNP TSC0007284
tcgtgtgatttt

SEQ ID NO: 378767 - DNA, 12 bp, Artificial Sequence
  Oligonucleotide primer for the detection of SNP TSC0007284
ccatataacctt

SEQ ID NO: 378768 - DNA, 12 bp, Artificial Sequence
  Oligonucleotide primer for the detection of SNP TSC0007284
ccgtataacctt

SEQ ID NO: 378769 - DNA, 12 bp, Artificial Sequence
  Oligonucleotide primer for the detection of SNP TSC0007284
gtaagggatttg

SEQ ID NO: 378770 - DNA, 12 bp, Artificial Sequence
  Oligonucleotide primer for the detection of SNP TSC0062933
acctcctctcaa

SEQ ID NO: 378771 - DNA, 12 bp, Artificial Sequence
  Oligonucleotide primer for the detection of SNP TSC0062933
ttatttgatagg

SEQ ID NO: 378772 - DNA, 12 bp, Artificial Sequence
  Oligonucleotide primer for the detection of SNP TSC0062933
ttatctaacaaa

SEQ ID NO: 378773 - DNA, 12 bp, Artificial Sequence
  Oligonucleotide primer for the detection of SNP TSC0062934
tatgttgtttaa

SEQ ID NO: 378774 - DNA, 12 bp, Artificial Sequence
  Oligonucleotide primer for the detection of SNP TSC0062934
catactacttaa

SEQ ID NO: 378775 - DNA, 12 bp, Artificial Sequence
  Oligonucleotide primer for the detection of SNP TSC0062935
acaaaaattcat

SEQ ID NO: 378776 - DNA, 12 bp, Artificial Sequence
  Oligonucleotide primer for the detection of SNP TSC0062935
agaataattgga

SEQ ID NO: 378777 - DNA, 12 bp, Artificial Sequence
  Oligonucleotide primer for the detection of SNP TSC0062935
atagaaatttat

SEQ ID NO: 378778 - DNA, 12 bp, Artificial Sequence
  Oligonucleotide primer for the detection of SNP TSC0062937
ttaccctcacta

SEQ ID NO: 378779 - DNA, 12 bp, Artificial Sequence
  Oligonucleotide primer for the detection of SNP TSC0062937
atatattttctc

SEQ ID NO: 378780 - DNA, 12 bp, Artificial Sequence
  Oligonucleotide primer for the detection of SNP TSC0007067
caacaaatacca

SEQ ID NO: 378781 - DNA, 12 bp, Artificial Sequence
  Oligonucleotide primer for the detection of SNP TSC0007067
taattagtatat

SEQ ID NO: 378782 - DNA, 12 bp, Artificial Sequence
  Oligonucleotide primer for the detection of SNP TSC0007067
taaccaacatat

SEQ ID NO: 378783 - DNA, 12 bp, Artificial Sequence
  Oligonucleotide primer for the detection of SNP TSC0007067
taataaatatta

SEQ ID NO: 378784 - DNA, 12 bp, Artificial Sequence
  Oligonucleotide primer for the detection of SNP TSC0062938
tcatataataat

SEQ ID NO: 378785 - DNA, 12 bp, Artificial Sequence
  Oligonucleotide primer for the detection of SNP TSC0062938
tcgtataataat

SEQ ID NO: 378786 - DNA, 12 bp, Artificial Sequence
  Oligonucleotide primer for the detection of SNP TSC0062938
tattaggtggga

SEQ ID NO: 378787 - DNA, 12 bp, Artificial Sequence
  Oligonucleotide primer for the detection of SNP TSC0005083
tttaaactaact

SEQ ID NO: 378788 - DNA, 12 bp, Artificial Sequence
  Oligonucleotide primer for the detection of SNP TSC0005083
tcaaattatccc

SEQ ID NO: 378789 - DNA, 12 bp, Artificial Sequence
  Oligonucleotide primer for the detection of SNP TSC0005083
tttaaattggtt

SEQ ID NO: 378790 - DNA, 12 bp, Artificial Sequence
  Oligonucleotide primer for the detection of SNP TSC0062939
aaaatatttact

SEQ ID NO: 378791 - DNA, 12 bp, Artificial Sequence
  Oligonucleotide primer for the detection of SNP TSC0062939
tggttgaagggg

SEQ ID NO: 378792 - DNA, 12 bp, Artificial Sequence
  Oligonucleotide primer for the detection of SNP TSC0062939
tggtcgaagggg

SEQ ID NO: 378793 - DNA, 12 bp, Artificial Sequence
  Oligonucleotide primer for the detection of SNP TSC0062940
caacataattta

SEQ ID NO: 378794 - DNA, 12 bp, Artificial Sequence
  Oligonucleotide primer for the detection of SNP TSC0062940
aagtttttttag

SEQ ID NO: 378795 - DNA, 12 bp, Artificial Sequence
  Oligonucleotide primer for the detection of SNP TSC0006029
aaatacctcctc

SEQ ID NO: 378796 - DNA, 12 bp, Artificial Sequence
  Oligonucleotide primer for the detection of SNP TSC0006029
atgttttgttta

SEQ ID NO: 378797 - DNA, 12 bp, Artificial Sequence
  Oligonucleotide primer for the detection of SNP TSC0006550
ctataatcaatc

SEQ ID NO: 378798 - DNA, 12 bp, Artificial Sequence
  Oligonucleotide primer for the detection of SNP TSC0006550
tttatgtatgtt

SEQ ID NO: 378799 - DNA, 12 bp, Artificial Sequence
  Oligonucleotide primer for the detection of SNP TSC0006550
tttatgtatgtc

SEQ ID NO: 378800 - DNA, 12 bp, Artificial Sequence
  Oligonucleotide primer for the detection of SNP TSC0006550
tccatacatacc

SEQ ID NO: 378801 - DNA, 12 bp, Artificial Sequence
  Oligonucleotide primer for the detection of SNP TSC0006550
tgtaattaattt

SEQ ID NO: 378802 - DNA, 12 bp, Artificial Sequence
  Oligonucleotide primer for the detection of SNP TSC0062941
atatagtttttt

SEQ ID NO: 378803 - DNA, 12 bp, Artificial Sequence
  Oligonucleotide primer for the detection of SNP TSC0062941
cacaactctcca

SEQ ID NO: 378804 - DNA, 12 bp, Artificial Sequence
  Oligonucleotide primer for the detection of SNP TSC0062941
ttaggtgattat

SEQ ID NO: 378805 - DNA, 12 bp, Artificial Sequence
  Oligonucleotide primer for the detection of SNP TSC0006837
taccttcaaacc

SEQ ID NO: 378806 - DNA, 12 bp, Artificial Sequence
  Oligonucleotide primer for the detection of SNP TSC0006837
ggaatgagtttg

SEQ ID NO: 378807 - DNA, 12 bp, Artificial Sequence
  Oligonucleotide primer for the detection of SNP TSC0062945
tctaacctatct

SEQ ID NO: 378808 - DNA, 12 bp, Artificial Sequence
  Oligonucleotide primer for the detection of SNP TSC0062945
ggaatattattg

SEQ ID NO: 378809 - DNA, 12 bp, Artificial Sequence
  Oligonucleotide primer for the detection of SNP TSC0005918
tattagtaatta

SEQ ID NO: 378810 - DNA, 12 bp, Artificial Sequence
  Oligonucleotide primer for the detection of SNP TSC0006109
tatctcaatatt

SEQ ID NO: 378811 - DNA, 12 bp, Artificial Sequence
  Oligonucleotide primer for the detection of SNP TSC0006874
ctatcttttata

SEQ ID NO: 378812 - DNA, 12 bp, Artificial Sequence
  Oligonucleotide primer for the detection of SNP TSC0006874
tttagataggat

SEQ ID NO: 378813 - DNA, 12 bp, Artificial Sequence
  Oligonucleotide primer for the detection of SNP TSC0007540
ttccgtaaattt

SEQ ID NO: 378814 - DNA, 12 bp, Artificial Sequence
  Oligonucleotide primer for the detection of SNP TSC0007540
agtagtttgata

SEQ ID NO: 378815 - DNA, 12 bp, Artificial Sequence
  Oligonucleotide primer for the detection of SNP TSC0007540
aataatctaaca

SEQ ID NO: 378816 - DNA, 12 bp, Artificial Sequence
  Oligonucleotide primer for the detection of SNP TSC0007540
tttcgtaagttt

SEQ ID NO: 378817 - DNA, 12 bp, Artificial Sequence
  Oligonucleotide primer for the detection of SNP TSC0006213
ttactctaaatt

SEQ ID NO: 378818 - DNA, 12 bp, Artificial Sequence
  Oligonucleotide primer for the detection of SNP TSC0006213
gggaaaaaaaaa

SEQ ID NO: 378819 - DNA, 12 bp, Artificial Sequence
  Oligonucleotide primer for the detection of SNP TSC0062949
actaccaaactt

SEQ ID NO: 378820 - DNA, 12 bp, Artificial Sequence
  Oligonucleotide primer for the detection of SNP TSC0062949
agtaagttatag

SEQ ID NO: 378821 - DNA, 12 bp, Artificial Sequence
  Oligonucleotide primer for the detection of SNP TSC0062950
atacacaaacaa

SEQ ID NO: 378822 - DNA, 12 bp, Artificial Sequence
  Oligonucleotide primer for the detection of SNP TSC0062950
atacacaaacga

SEQ ID NO: 378823 - DNA, 12 bp, Artificial Sequence
  Oligonucleotide primer for the detection of SNP TSC0062950
atgtatagatga

SEQ ID NO: 378824 - DNA, 12 bp, Artificial Sequence
  Oligonucleotide primer for the detection of SNP TSC0062950
atgtatagacga

SEQ ID NO: 378825 - DNA, 12 bp, Artificial Sequence
  Oligonucleotide primer for the detection of SNP TSC0062951
gatgggtttata

SEQ ID NO: 378826 - DNA, 12 bp, Artificial Sequence
  Oligonucleotide primer for the detection of SNP TSC0062951
taaacctataaa

SEQ ID NO: 378827 - DNA, 12 bp, Artificial Sequence
  Oligonucleotide primer for the detection of SNP TSC0062951
atagaggggtat

SEQ ID NO: 378828 - DNA, 12 bp, Artificial Sequence
  Oligonucleotide primer for the detection of SNP TSC0062952
taatgatttgtt

SEQ ID NO: 378829 - DNA, 12 bp, Artificial Sequence
  Oligonucleotide primer for the detection of SNP TSC0062952
taataacctatt

SEQ ID NO: 378830 - DNA, 12 bp, Artificial Sequence
  Oligonucleotide primer for the detection of SNP TSC0062952
agttataagaaa

SEQ ID NO: 378831 - DNA, 12 bp, Artificial Sequence
  Oligonucleotide primer for the detection of SNP TSC0008211
taaatcacaaaa

SEQ ID NO: 378832 - DNA, 12 bp, Artificial Sequence
  Oligonucleotide primer for the detection of SNP TSC0008211
atgggaaagatt

SEQ ID NO: 378833 - DNA, 12 bp, Artificial Sequence
  Oligonucleotide primer for the detection of SNP TSC0008211
acgggaaagatt

SEQ ID NO: 378834 - DNA, 12 bp, Artificial Sequence
  Oligonucleotide primer for the detection of SNP TSC0008211
acgaaaaaaacc

SEQ ID NO: 378835 - DNA, 12 bp, Artificial Sequence
  Oligonucleotide primer for the detection of SNP TSC0008212
cccaataaaaaa

SEQ ID NO: 378836 - DNA, 12 bp, Artificial Sequence
  Oligonucleotide primer for the detection of SNP TSC0008212
tttgtgatttaa

SEQ ID NO: 378837 - DNA, 12 bp, Artificial Sequence
  Oligonucleotide primer for the detection of SNP TSC0062955
cattacttataa

SEQ ID NO: 378838 - DNA, 12 bp, Artificial Sequence
  Oligonucleotide primer for the detection of SNP TSC0062955
cgtaaaataaaa

SEQ ID NO: 378839 - DNA, 12 bp, Artificial Sequence
  Oligonucleotide primer for the detection of SNP TSC0062955
cataaaacaaaa

SEQ ID NO: 378840 - DNA, 12 bp, Artificial Sequence
  Oligonucleotide primer for the detection of SNP TSC0062955
cgtaaaacaaaa

SEQ ID NO: 378841 - DNA, 12 bp, Artificial Sequence
  Oligonucleotide primer for the detection of SNP TSC0062955
atattatttgtg

SEQ ID NO: 378842 - DNA, 12 bp, Artificial Sequence
  Oligonucleotide primer for the detection of SNP TSC0062956
aacacatccaca

SEQ ID NO: 378843 - DNA, 12 bp, Artificial Sequence
  Oligonucleotide primer for the detection of SNP TSC0062956
tgattggatttt

SEQ ID NO: 378844 - DNA, 12 bp, Artificial Sequence
  Oligonucleotide primer for the detection of SNP TSC0062956
taatatatttat

SEQ ID NO: 378845 - DNA, 12 bp, Artificial Sequence
  Oligonucleotide primer for the detection of SNP TSC0062957
gggaattaaaat

SEQ ID NO: 378846 - DNA, 12 bp, Artificial Sequence
  Oligonucleotide primer for the detection of SNP TSC0062958
aatacatacaac

SEQ ID NO: 378847 - DNA, 12 bp, Artificial Sequence
  Oligonucleotide primer for the detection of SNP TSC0062959
aatccactcatc

SEQ ID NO: 378848 - DNA, 12 bp, Artificial Sequence
  Oligonucleotide primer for the detection of SNP TSC0062959
agtgtttatttg

SEQ ID NO: 378849 - DNA, 12 bp, Artificial Sequence
  Oligonucleotide primer for the detection of SNP TSC0062961
ccaaattatttc

SEQ ID NO: 378850 - DNA, 12 bp, Artificial Sequence
  Oligonucleotide primer for the detection of SNP TSC0062962
tatcaaattaac

SEQ ID NO: 378851 - DNA, 12 bp, Artificial Sequence
  Oligonucleotide primer for the detection of SNP TSC0062962
cctaatctacca

SEQ ID NO: 378852 - DNA, 12 bp, Artificial Sequence
  Oligonucleotide primer for the detection of SNP TSC0062962
tgttaggttggt

SEQ ID NO: 378853 - DNA, 12 bp, Artificial Sequence
  Oligonucleotide primer for the detection of SNP TSC0062964
tatctctatctc

SEQ ID NO: 378854 - DNA, 12 bp, Artificial Sequence
  Oligonucleotide primer for the detection of SNP TSC0062964
tttatagaaatt

SEQ ID NO: 378855 - DNA, 12 bp, Artificial Sequence
  Oligonucleotide primer for the detection of SNP TSC0062964
ctataaaaatta

SEQ ID NO: 378856 - DNA, 12 bp, Artificial Sequence
  Oligonucleotide primer for the detection of SNP TSC0008488
tcttatttacat

SEQ ID NO: 378857 - DNA, 12 bp, Artificial Sequence
  Oligonucleotide primer for the detection of SNP TSC0008488
ttgtatgtggga

SEQ ID NO: 378858 - DNA, 12 bp, Artificial Sequence
  Oligonucleotide primer for the detection of SNP TSC0062972
ataaattcaatc

SEQ ID NO: 378859 - DNA, 12 bp, Artificial Sequence
  Oligonucleotide primer for the detection of SNP TSC0062972
gtttaataaatg

SEQ ID NO: 378860 - DNA, 12 bp, Artificial Sequence
  Oligonucleotide primer for the detection of SNP TSC0062972
gtgaatttaatt

SEQ ID NO: 378861 - DNA, 12 bp, Artificial Sequence
  Oligonucleotide primer for the detection of SNP TSC0062973
tgttattttatt

SEQ ID NO: 378862 - DNA, 12 bp, Artificial Sequence
  Oligonucleotide primer for the detection of SNP TSC0062973
aataccatccca

SEQ ID NO: 378863 - DNA, 12 bp, Artificial Sequence
  Oligonucleotide primer for the detection of SNP TSC0062973
ataggttagaag

SEQ ID NO: 378864 - DNA, 12 bp, Artificial Sequence
  Oligonucleotide primer for the detection of SNP TSC0062974
tttataatctat

SEQ ID NO: 378865 - DNA, 12 bp, Artificial Sequence
  Oligonucleotide primer for the detection of SNP TSC0062974
agtatgagtggt

SEQ ID NO: 378866 - DNA, 12 bp, Artificial Sequence
  Oligonucleotide primer for the detection of SNP TSC0062974
ttgtagtttatt

SEQ ID NO: 378867 - DNA, 12 bp, Artificial Sequence
  Oligonucleotide primer for the detection of SNP TSC0062975
tctcaaatactt

SEQ ID NO: 378868 - DNA, 12 bp, Artificial Sequence
  Oligonucleotide primer for the detection of SNP TSC0062975
agttatgttgtt

SEQ ID NO: 378869 - DNA, 12 bp, Artificial Sequence
  Oligonucleotide primer for the detection of SNP TSC0062976
ctaaaactaatc

SEQ ID NO: 378870 - DNA, 12 bp, Artificial Sequence
  Oligonucleotide primer for the detection of SNP TSC0006391
atgaagtaggtt

SEQ ID NO: 378871 - DNA, 12 bp, Artificial Sequence
  Oligonucleotide primer for the detection of SNP TSC0005873
tcaccttatttc

SEQ ID NO: 378872 - DNA, 12 bp, Artificial Sequence
  Oligonucleotide primer for the detection of SNP TSC0005873
ttaaccaatcca

SEQ ID NO: 378873 - DNA, 12 bp, Artificial Sequence
  Oligonucleotide primer for the detection of SNP TSC0005874
caaaaaaccatc

SEQ ID NO: 378874 - DNA, 12 bp, Artificial Sequence
  Oligonucleotide primer for the detection of SNP TSC0005874
aggttaggtaga

SEQ ID NO: 378875 - DNA, 12 bp, Artificial Sequence
  Oligonucleotide primer for the detection of SNP TSC0062977
caaacacattat

SEQ ID NO: 378876 - DNA, 12 bp, Artificial Sequence
  Oligonucleotide primer for the detection of SNP TSC0062977
caaacacgttat

SEQ ID NO: 378877 - DNA, 12 bp, Artificial Sequence
  Oligonucleotide primer for the detection of SNP TSC0062977
caaacgcattat

SEQ ID NO: 378878 - DNA, 12 bp, Artificial Sequence
  Oligonucleotide primer for the detection of SNP TSC0062977
cgaacacattat

SEQ ID NO: 378879 - DNA, 12 bp, Artificial Sequence
  Oligonucleotide primer for the detection of SNP TSC0062977
caaacgcgttat

SEQ ID NO: 378880 - DNA, 12 bp, Artificial Sequence
  Oligonucleotide primer for the detection of SNP TSC0062977
cgaacacgttat

SEQ ID NO: 378881 - DNA, 12 bp, Artificial Sequence
  Oligonucleotide primer for the detection of SNP TSC0062977
cgaacgcattat

SEQ ID NO: 378882 - DNA, 12 bp, Artificial Sequence
  Oligonucleotide primer for the detection of SNP TSC0062977
cgaacgcgttat

SEQ ID NO: 378883 - DNA, 12 bp, Artificial Sequence
  Oligonucleotide primer for the detection of SNP TSC0062977
cggggaggtttt

SEQ ID NO: 378884 - DNA, 12 bp, Artificial Sequence
  Oligonucleotide primer for the detection of SNP TSC0062977
cgaaaaaacttt

SEQ ID NO: 378885 - DNA, 12 bp, Artificial Sequence
  Oligonucleotide primer for the detection of SNP TSC0062977
tggatgtgttgt

SEQ ID NO: 378886 - DNA, 12 bp, Artificial Sequence
  Oligonukleotid-Primer
cggatgtgttgt

SEQ ID NO: 378887 - DNA, 12 bp, Artificial Sequence
  Oligonucleotide primer for the detection of SNP TSC0062977
tggacgtgttgt

SEQ ID NO: 378888 - DNA, 12 bp, Artificial Sequence
  Oligonucleotide primer for the detection of SNP TSC0062977
tggatgcgttgt

SEQ ID NO: 378889 - DNA, 12 bp, Artificial Sequence
  Oligonucleotide primer for the detection of SNP TSC0062977
cggacgtgttgt

SEQ ID NO: 378890 - DNA, 12 bp, Artificial Sequence
  Oligonucleotide primer for the detection of SNP TSC0062977
cggatgcgttgt

SEQ ID NO: 378891 - DNA, 12 bp, Artificial Sequence
  Oligonucleotide primer for the detection of SNP TSC0062977
tggacgcgttgt

SEQ ID NO: 378892 - DNA, 12 bp, Artificial Sequence
  Oligonucleotide primer for the detection of SNP TSC0062977
cggacgcgttgt

SEQ ID NO: 378893 - DNA, 12 bp, Artificial Sequence
  Oligonucleotide primer for the detection of SNP TSC0062978
gaaaatacccac

SEQ ID NO: 378894 - DNA, 12 bp, Artificial Sequence
  Oligonucleotide primer for the detection of SNP TSC0062978
gaaaatacccgc

SEQ ID NO: 378895 - DNA, 12 bp, Artificial Sequence
  Oligonucleotide primer for the detection of SNP TSC0062978
gttgagttattt

SEQ ID NO: 378896 - DNA, 12 bp, Artificial Sequence
  Oligonucleotide primer for the detection of SNP TSC0062978
gttgagttattc

SEQ ID NO: 378897 - DNA, 12 bp, Artificial Sequence
  Oligonucleotide primer for the detection of SNP TSC0062978
actaaatcaccc

SEQ ID NO: 378898 - DNA, 12 bp, Artificial Sequence
  Oligonucleotide primer for the detection of SNP TSC0062978
ggggtgtttgtt

SEQ ID NO: 378899 - DNA, 12 bp, Artificial Sequence
  Oligonucleotide primer for the detection of SNP TSC0062978
ggggtgttcgtt

SEQ ID NO: 378900 - DNA, 12 bp, Artificial Sequence
  Oligonucleotide primer for the detection of SNP TSC0007808
ctaactactaaa

SEQ ID NO: 378901 - DNA, 12 bp, Artificial Sequence
  Oligonucleotide primer for the detection of SNP TSC0007808
atatgaggatat

SEQ ID NO: 378902 - DNA, 12 bp, Artificial Sequence
  Oligonucleotide primer for the detection of SNP TSC0007808
ttaattgttgag

SEQ ID NO: 378903 - DNA, 12 bp, Artificial Sequence
  Oligonucleotide primer for the detection of SNP TSC0007809
ataataatcttt

SEQ ID NO: 378904 - DNA, 12 bp, Artificial Sequence
  Oligonucleotide primer for the detection of SNP TSC0062979
acttcttaacaa

SEQ ID NO: 378905 - DNA, 12 bp, Artificial Sequence
  Oligonucleotide primer for the detection of SNP TSC0062979
gtaaaattgggt

SEQ ID NO: 378906 - DNA, 12 bp, Artificial Sequence
  Oligonucleotide primer for the detection of SNP TSC0062979
tttttggtagtt

SEQ ID NO: 378907 - DNA, 12 bp, Artificial Sequence
  Oligonucleotide primer for the detection of SNP TSC0062980
aaaatttaacac

SEQ ID NO: 378908 - DNA, 12 bp, Artificial Sequence
  Oligonucleotide primer for the detection of SNP TSC0062980
attgttattagg

SEQ ID NO: 378909 - DNA, 12 bp, Artificial Sequence
  Oligonucleotide primer for the detection of SNP TSC0062980
actatcaccaaa

SEQ ID NO: 378910 - DNA, 12 bp, Artificial Sequence
  Oligonucleotide primer for the detection of SNP TSC0062980
gagatttagtat

SEQ ID NO: 378911 - DNA, 12 bp, Artificial Sequence
  Oligonucleotide primer for the detection of SNP TSC0009095
aaaaaataaatg

SEQ ID NO: 378912 - DNA, 12 bp, Artificial Sequence
  Oligonucleotide primer for the detection of SNP TSC0009096
attttctatacc

SEQ ID NO: 378913 - DNA, 12 bp, Artificial Sequence
  Oligonucleotide primer for the detection of SNP TSC0009096
atttggagttta

SEQ ID NO: 378914 - DNA, 12 bp, Artificial Sequence
  Oligonucleotide primer for the detection of SNP TSC0062982
ataacctttcct

SEQ ID NO: 378915 - DNA, 12 bp, Artificial Sequence
  Oligonucleotide primer for the detection of SNP TSC0062982
taagaatataaa

SEQ ID NO: 378916 - DNA, 12 bp, Artificial Sequence
  Oligonucleotide primer for the detection of SNP TSC0062983
caactaatctaa

SEQ ID NO: 378917 - DNA, 12 bp, Artificial Sequence
  Oligonucleotide primer for the detection of SNP TSC0062983
taattgatttga

SEQ ID NO: 378918 - DNA, 12 bp, Artificial Sequence
  Oligonucleotide primer for the detection of SNP TSC0062984
aatactaccatt

SEQ ID NO: 378919 - DNA, 12 bp, Artificial Sequence
  Oligonucleotide primer for the detection of SNP TSC0062984
atagtaattata

SEQ ID NO: 378920 - DNA, 12 bp, Artificial Sequence
  Oligonucleotide primer for the detection of SNP TSC0007467
cacatcataaaa

SEQ ID NO: 378921 - DNA, 12 bp, Artificial Sequence
  Oligonucleotide primer for the detection of SNP TSC0007467
cacatcgtaaaa

SEQ ID NO: 378922 - DNA, 12 bp, Artificial Sequence
  Oligonucleotide primer for the detection of SNP TSC0007467
ccccaataccca

SEQ ID NO: 378923 - DNA, 12 bp, Artificial Sequence
  Oligonucleotide primer for the detection of SNP TSC0007467
ttatattgtggg

SEQ ID NO: 378924 - DNA, 12 bp, Artificial Sequence
  Oligonucleotide primer for the detection of SNP TSC0007467
ttatatcgtggg

SEQ ID NO: 378925 - DNA, 12 bp, Artificial Sequence
  Oligonucleotide primer for the detection of SNP TSC0009914
ttttttattagg

SEQ ID NO: 378926 - DNA, 12 bp, Artificial Sequence
  Oligonucleotide primer for the detection of SNP TSC0062985
ttggagggtttg

SEQ ID NO: 378927 - DNA, 12 bp, Artificial Sequence
  Oligonucleotide primer for the detection of SNP TSC0062985
ttaaaaaactta

SEQ ID NO: 378928 - DNA, 12 bp, Artificial Sequence
  Oligonucleotide primer for the detection of SNP TSC0062985
aatagttattgt

SEQ ID NO: 378929 - DNA, 12 bp, Artificial Sequence
  Oligonucleotide primer for the detection of SNP TSC0062985
aatagttattgc

SEQ ID NO: 378930 - DNA, 12 bp, Artificial Sequence
  Oligonucleotide primer for the detection of SNP TSC0005347
aaccccaaaatt

SEQ ID NO: 378931 - DNA, 12 bp, Artificial Sequence
  Oligonucleotide primer for the detection of SNP TSC0005347
aaccccgaaatt

SEQ ID NO: 378932 - DNA, 12 bp, Artificial Sequence
  Oligonucleotide primer for the detection of SNP TSC0062986
cccactaaatac

SEQ ID NO: 378933 - DNA, 12 bp, Artificial Sequence
  Oligonucleotide primer for the detection of SNP TSC0062986
gagtgtggataa

SEQ ID NO: 378934 - DNA, 12 bp, Artificial Sequence
  Oligonucleotide primer for the detection of SNP TSC0062987
aaaattataatt

SEQ ID NO: 378935 - DNA, 12 bp, Artificial Sequence
  Oligonucleotide primer for the detection of SNP TSC0062987
tagtaattggaa

SEQ ID NO: 378936 - DNA, 12 bp, Artificial Sequence
  Oligonucleotide primer for the detection of SNP TSC0062987
agaattgtagtt

SEQ ID NO: 378937 - DNA, 12 bp, Artificial Sequence
  Oligonucleotide primer for the detection of SNP TSC0062988
aattactataat

SEQ ID NO: 378938 - DNA, 12 bp, Artificial Sequence
  Oligonucleotide primer for the detection of SNP TSC0062988
aatgtattataa

SEQ ID NO: 378939 - DNA, 12 bp, Artificial Sequence
  Oligonucleotide primer for the detection of SNP TSC0062989
ttccatataaat

SEQ ID NO: 378940 - DNA, 12 bp, Artificial Sequence
  Oligonucleotide primer for the detection of SNP TSC0062989
aaacatttctaa

SEQ ID NO: 378941 - DNA, 12 bp, Artificial Sequence
  Oligonucleotide primer for the detection of SNP TSC0006437
agagtagattaa

SEQ ID NO: 378942 - DNA, 12 bp, Artificial Sequence
  Oligonucleotide primer for the detection of SNP TSC0062990
attcttcaataa

SEQ ID NO: 378943 - DNA, 12 bp, Artificial Sequence
  Oligonucleotide primer for the detection of SNP TSC0062990
caccaaccctca

SEQ ID NO: 378944 - DNA, 12 bp, Artificial Sequence
  Oligonucleotide primer for the detection of SNP TSC0062990
attttttaatag

SEQ ID NO: 378945 - DNA, 12 bp, Artificial Sequence
  Oligonucleotide primer for the detection of SNP TSC0062992
aatttctacctc

SEQ ID NO: 378946 - DNA, 12 bp, Artificial Sequence
  Oligonucleotide primer for the detection of SNP TSC0062992
atttcgtatata

SEQ ID NO: 378947 - DNA, 12 bp, Artificial Sequence
  Oligonucleotide primer for the detection of SNP TSC0062992
atttcatatata

SEQ ID NO: 378948 - DNA, 12 bp, Artificial Sequence
  Oligonucleotide primer for the detection of SNP TSC0006938
gagattaggagg

SEQ ID NO: 378949 - DNA, 12 bp, Artificial Sequence
  Oligonucleotide primer for the detection of SNP TSC0006939
tatgttattaat

SEQ ID NO: 378950 - DNA, 12 bp, Artificial Sequence
  Oligonucleotide primer for the detection of SNP TSC0006939
tatgttattaac

SEQ ID NO: 378951 - DNA, 12 bp, Artificial Sequence
  Oligonucleotide primer for the detection of SNP TSC0006939
ccatattattaa

SEQ ID NO: 378952 - DNA, 12 bp, Artificial Sequence
  Oligonucleotide primer for the detection of SNP TSC0006939
atatgaaaaaga

SEQ ID NO: 378953 - DNA, 12 bp, Artificial Sequence
  Oligonucleotide primer for the detection of SNP TSC0062994
acaaactaacct

SEQ ID NO: 378954 - DNA, 12 bp, Artificial Sequence
  Oligonucleotide primer for the detection of SNP TSC0009031
acacatttctaa

SEQ ID NO: 378955 - DNA, 12 bp, Artificial Sequence
  Oligonucleotide primer for the detection of SNP TSC0062995
tattcctctatt

SEQ ID NO: 378956 - DNA, 12 bp, Artificial Sequence
  Oligonucleotide primer for the detection of SNP TSC0062995
gtaatagatatt

SEQ ID NO: 378957 - DNA, 12 bp, Artificial Sequence
  Oligonucleotide primer for the detection of SNP TSC0062998
cacttcatcttc

SEQ ID NO: 378958 - DNA, 12 bp, Artificial Sequence
  Oligonucleotide primer for the detection of SNP TSC0062998
cacttcgtcttc

SEQ ID NO: 378959 - DNA, 12 bp, Artificial Sequence
  Oligonucleotide primer for the detection of SNP TSC0062998
cgcttcatcttc

SEQ ID NO: 378960 - DNA, 12 bp, Artificial Sequence
  Oligonucleotide primer for the detection of SNP TSC0062998
cgcttcgtcttc

SEQ ID NO: 378961 - DNA, 12 bp, Artificial Sequence
  Oligonucleotide primer for the detection of SNP TSC0062998
agtttaggtagg

SEQ ID NO: 378962 - DNA, 12 bp, Artificial Sequence
  Oligonucleotide primer for the detection of SNP TSC0062999
ctctccaaaaat

SEQ ID NO: 378963 - DNA, 12 bp, Artificial Sequence
  Oligonucleotide primer for the detection of SNP TSC0062999
gatatagttgta

SEQ ID NO: 378964 - DNA, 12 bp, Artificial Sequence
  Oligonucleotide primer for the detection of SNP TSC0063000
aataaaaaccgc

SEQ ID NO: 378965 - DNA, 12 bp, Artificial Sequence
  Oligonucleotide primer for the detection of SNP TSC0063000
ggtggaaaattt

SEQ ID NO: 378966 - DNA, 12 bp, Artificial Sequence
  Oligonucleotide primer for the detection of SNP TSC0063001
gtgatttaaaaa

SEQ ID NO: 378967 - DNA, 12 bp, Artificial Sequence
  Oligonucleotide primer for the detection of SNP TSC0063005
taacacataact

SEQ ID NO: 378968 - DNA, 12 bp, Artificial Sequence
  Oligonucleotide primer for the detection of SNP TSC0063006
atattaaataga

SEQ ID NO: 378969 - DNA, 12 bp, Artificial Sequence
  Oligonucleotide primer for the detection of SNP TSC0063009
aaatagttaata

SEQ ID NO: 378970 - DNA, 12 bp, Artificial Sequence
  Oligonucleotide primer for the detection of SNP TSC0063011
aaatatataaac

SEQ ID NO: 378971 - DNA, 12 bp, Artificial Sequence
  Oligonucleotide primer for the detection of SNP TSC0063011
aattgtatagta

SEQ ID NO: 378972 - DNA, 12 bp, Artificial Sequence
  Oligonucleotide primer for the detection of SNP TSC0063011
aattatacaaca

SEQ ID NO: 378973 - DNA, 12 bp, Artificial Sequence
  Oligonucleotide primer for the detection of SNP TSC0063011
ggatgtgtgagt

SEQ ID NO: 378974 - DNA, 12 bp, Artificial Sequence
  Oligonucleotide primer for the detection of SNP TSC0063012
cttaacttctaa

SEQ ID NO: 378975 - DNA, 12 bp, Artificial Sequence
  Oligonucleotide primer for the detection of SNP TSC0063012
gtaaaaaatttt

SEQ ID NO: 378976 - DNA, 12 bp, Artificial Sequence
  Oligonucleotide primer for the detection of SNP TSC0063012
taaaaaatctca

SEQ ID NO: 378977 - DNA, 12 bp, Artificial Sequence
  Oligonucleotide primer for the detection of SNP TSC0063013
agatttagtggt

SEQ ID NO: 378978 - DNA, 12 bp, Artificial Sequence
  Oligonucleotide primer for the detection of SNP TSC0063013
ggggattatagg

SEQ ID NO: 378979 - DNA, 12 bp, Artificial Sequence
  Oligonucleotide primer for the detection of SNP TSC0063014
tcctaaactata

SEQ ID NO: 378980 - DNA, 12 bp, Artificial Sequence
  Oligonucleotide primer for the detection of SNP TSC0063014
gagtattttatt

SEQ ID NO: 378981 - DNA, 12 bp, Artificial Sequence
  Oligonucleotide primer for the detection of SNP TSC0063014
aaatatcctacc

SEQ ID NO: 378982 - DNA, 12 bp, Artificial Sequence
  Oligonucleotide primer for the detection of SNP TSC0063014
ttttgaattata

SEQ ID NO: 378983 - DNA, 12 bp, Artificial Sequence
  Oligonucleotide primer for the detection of SNP TSC0063015
caaaaaatctcc

SEQ ID NO: 378984 - DNA, 12 bp, Artificial Sequence
  Oligonucleotide primer for the detection of SNP TSC0063015
aagttaagttta

SEQ ID NO: 378985 - DNA, 12 bp, Artificial Sequence
  Oligonucleotide primer for the detection of SNP TSC0063016
ataatgataaga

SEQ ID NO: 378986 - DNA, 12 bp, Artificial Sequence
  Oligonucleotide primer for the detection of SNP TSC0063017
catttaaaaaaa

SEQ ID NO: 378987 - DNA, 12 bp, Artificial Sequence
  Oligonucleotide primer for the detection of SNP TSC0005039
cactaaaatatt

SEQ ID NO: 378988 - DNA, 12 bp, Artificial Sequence
  Oligonucleotide primer for the detection of SNP TSC0005039
cgctaaaatatt

SEQ ID NO: 378989 - DNA, 12 bp, Artificial Sequence
  Oligonucleotide primer for the detection of SNP TSC0063020
actttatatctc

SEQ ID NO: 378990 - DNA, 12 bp, Artificial Sequence
  Oligonucleotide primer for the detection of SNP TSC0063020
ggattttagggg

SEQ ID NO: 378991 - DNA, 12 bp, Artificial Sequence
  Oligonucleotide primer for the detection of SNP TSC0063021
ctaaaataaatc

SEQ ID NO: 378992 - DNA, 12 bp, Artificial Sequence
  Oligonucleotide primer for the detection of SNP TSC0063021
ccttacaaaaaa

SEQ ID NO: 378993 - DNA, 12 bp, Artificial Sequence
  Oligonucleotide primer for the detection of SNP TSC0063021
ttgaggtggatt

SEQ ID NO: 378994 - DNA, 12 bp, Artificial Sequence
  Oligonucleotide primer for the detection of SNP TSC0063022
actatcacccat

SEQ ID NO: 378995 - DNA, 12 bp, Artificial Sequence
  Oligonucleotide primer for the detection of SNP TSC0063023
tctaataaaatt

SEQ ID NO: 378996 - DNA, 12 bp, Artificial Sequence
  Oligonucleotide primer for the detection of SNP TSC0063023
atagagaaggaa

SEQ ID NO: 378997 - DNA, 12 bp, Artificial Sequence
  Oligonucleotide primer for the detection of SNP TSC0063023
tttgatagaatt

SEQ ID NO: 378998 - DNA, 12 bp, Artificial Sequence
  Oligonucleotide primer for the detection of SNP TSC0063024
gaataggggagg

SEQ ID NO: 378999 - DNA, 12 bp, Artificial Sequence
  Oligonucleotide primer for the detection of SNP TSC0063024
gaggtattgtta

SEQ ID NO: 379000 - DNA, 12 bp, Artificial Sequence
  Oligonucleotide primer for the detection of SNP TSC0063025
ccctcaactcca

SEQ ID NO: 379001 - DNA, 12 bp, Artificial Sequence
  Oligonucleotide primer for the detection of SNP TSC0063025
acaatattctaa

SEQ ID NO: 379002 - DNA, 12 bp, Artificial Sequence
  Oligonucleotide primer for the detection of SNP TSC0063025
gcaatattctaa

SEQ ID NO: 379003 - DNA, 12 bp, Artificial Sequence
  Oligonucleotide primer for the detection of SNP TSC0063027
tacactttcttc

SEQ ID NO: 379004 - DNA, 12 bp, Artificial Sequence
  Oligonucleotide primer for the detection of SNP TSC0063028
actacatttaaa

SEQ ID NO: 379005 - DNA, 12 bp, Artificial Sequence
  Oligonucleotide primer for the detection of SNP TSC0063028
cacctattacct

SEQ ID NO: 379006 - DNA, 12 bp, Artificial Sequence
  Oligonucleotide primer for the detection of SNP TSC0063028
attgtatttgga

SEQ ID NO: 379007 - DNA, 12 bp, Artificial Sequence
  Oligonucleotide primer for the detection of SNP TSC0063029
attcctaaaaac

SEQ ID NO: 379008 - DNA, 12 bp, Artificial Sequence
  Oligonucleotide primer for the detection of SNP TSC0063029
tctaaatccttt

SEQ ID NO: 379009 - DNA, 12 bp, Artificial Sequence
  Oligonucleotide primer for the detection of SNP TSC0063030
acctacaataaa

SEQ ID NO: 379010 - DNA, 12 bp, Artificial Sequence
  Oligonucleotide primer for the detection of SNP TSC0063030
tatgatagattt

SEQ ID NO: 379011 - DNA, 12 bp, Artificial Sequence
  Oligonucleotide primer for the detection of SNP TSC0063030
tatgatagattc

SEQ ID NO: 379012 - DNA, 12 bp, Artificial Sequence
  Oligonucleotide primer for the detection of SNP TSC0063030
cataataaactc

SEQ ID NO: 379013 - DNA, 12 bp, Artificial Sequence
  Oligonucleotide primer for the detection of SNP TSC0063030
ggtttgtagtgg

SEQ ID NO: 379014 - DNA, 12 bp, Artificial Sequence
  Oligonucleotide primer for the detection of SNP TSC0063031
atacttctcata

SEQ ID NO: 379015 - DNA, 12 bp, Artificial Sequence
  Oligonucleotide primer for the detection of SNP TSC0063031
gtttttgttgga

SEQ ID NO: 379016 - DNA, 12 bp, Artificial Sequence
  Oligonucleotide primer for the detection of SNP TSC0063032
aatacaaaacaa

SEQ ID NO: 379017 - DNA, 12 bp, Artificial Sequence
  Oligonucleotide primer for the detection of SNP TSC0063032
aaacactataaa

SEQ ID NO: 379018 - DNA, 12 bp, Artificial Sequence
  Oligonucleotide primer for the detection of SNP TSC0063032
aaatgtaaagta

SEQ ID NO: 379019 - DNA, 12 bp, Artificial Sequence
  Oligonucleotide primer for the detection of SNP TSC0063033
aatcaaaacatc

SEQ ID NO: 379020 - DNA, 12 bp, Artificial Sequence
  Oligonucleotide primer for the detection of SNP TSC0063033
tttgattgatta

SEQ ID NO: 379021 - DNA, 12 bp, Artificial Sequence
  Oligonucleotide primer for the detection of SNP TSC0063034
atcaaaacatcc

SEQ ID NO: 379022 - DNA, 12 bp, Artificial Sequence
  Oligonucleotide primer for the detection of SNP TSC0063034
ttttttgattga

SEQ ID NO: 379023 - DNA, 12 bp, Artificial Sequence
  Oligonucleotide primer for the detection of SNP TSC0063035
  unsure (6): unknown base
ttacanaaaaaa

SEQ ID NO: 379024 - DNA, 12 bp, Artificial Sequence
  Oligonucleotide primer for the detection of SNP TSC0063035
  unsure (6): unknown base
ttgtanaaaaaa

SEQ ID NO: 379025 - DNA, 12 bp, Artificial Sequence
  Oligonucleotide primer for the detection of SNP TSC0004624
ggtattttaaaa

SEQ ID NO: 379026 - DNA, 12 bp, Artificial Sequence
  Oligonucleotide primer for the detection of SNP TSC0063036
aaaccaaacaaa

SEQ ID NO: 379027 - DNA, 12 bp, Artificial Sequence
  Oligonucleotide primer for the detection of SNP TSC0063036
aaatatgtttat

SEQ ID NO: 379028 - DNA, 12 bp, Artificial Sequence
  Oligonucleotide primer for the detection of SNP TSC0063037
atacaccaccat

SEQ ID NO: 379029 - DNA, 12 bp, Artificial Sequence
  Oligonucleotide primer for the detection of SNP TSC0063037
tttgtaagtagg

SEQ ID NO: 379030 - DNA, 12 bp, Artificial Sequence
  Oligonucleotide primer for the detection of SNP TSC0063038
aatactcaaaac

SEQ ID NO: 379031 - DNA, 12 bp, Artificial Sequence
  Oligonucleotide primer for the detection of SNP TSC0063038
gaggataattta

SEQ ID NO: 379032 - DNA, 12 bp, Artificial Sequence
  Oligonucleotide primer for the detection of SNP TSC0063039
agaatatttata

SEQ ID NO: 379033 - DNA, 12 bp, Artificial Sequence
  Oligonucleotide primer for the detection of SNP TSC0063039
aaaacacccaca

SEQ ID NO: 379034 - DNA, 12 bp, Artificial Sequence
  Oligonucleotide primer for the detection of SNP TSC0063039
tataatttggag

SEQ ID NO: 379035 - DNA, 12 bp, Artificial Sequence
  Oligonucleotide primer for the detection of SNP TSC0063044
taacacatattc

SEQ ID NO: 379036 - DNA, 12 bp, Artificial Sequence
  Oligonucleotide primer for the detection of SNP TSC0063044
aattatataata

SEQ ID NO: 379037 - DNA, 12 bp, Artificial Sequence
  Oligonucleotide primer for the detection of SNP TSC0063045
tcaatataccta

SEQ ID NO: 379038 - DNA, 12 bp, Artificial Sequence
  Oligonucleotide primer for the detection of SNP TSC0063045
gttaatatgttt

SEQ ID NO: 379039 - DNA, 12 bp, Artificial Sequence
  Oligonucleotide primer for the detection of SNP TSC0063046
actacttaattt

SEQ ID NO: 379040 - DNA, 12 bp, Artificial Sequence
  Oligonucleotide primer for the detection of SNP TSC0063046
agataagtatat

SEQ ID NO: 379041 - DNA, 12 bp, Artificial Sequence
  Oligonucleotide primer for the detection of SNP TSC0063047
caatactattta

SEQ ID NO: 379042 - DNA, 12 bp, Artificial Sequence
  Oligonucleotide primer for the detection of SNP TSC0063047
ttgtttggtgtt

SEQ ID NO: 379043 - DNA, 12 bp, Artificial Sequence
  Oligonucleotide primer for the detection of SNP TSC0063047
ttatttaatatt

SEQ ID NO: 379044 - DNA, 12 bp, Artificial Sequence
  Oligonucleotide primer for the detection of SNP TSC0004970
tataccacttaa

SEQ ID NO: 379045 - DNA, 12 bp, Artificial Sequence
  Oligonucleotide primer for the detection of SNP TSC0004970
gaagagaaaatt

SEQ ID NO: 379046 - DNA, 12 bp, Artificial Sequence
  Oligonucleotide primer for the detection of SNP TSC0063049
aatatttgtagt

SEQ ID NO: 379047 - DNA, 12 bp, Artificial Sequence
  Oligonucleotide primer for the detection of SNP TSC0063049
aacacctacaac

SEQ ID NO: 379048 - DNA, 12 bp, Artificial Sequence
  Oligonucleotide primer for the detection of SNP TSC0063049
tgtggagggggg

SEQ ID NO: 379049 - DNA, 12 bp, Artificial Sequence
  Oligonucleotide primer for the detection of SNP TSC0063050
ttaaataataga

SEQ ID NO: 379050 - DNA, 12 bp, Artificial Sequence
  Oligonucleotide primer for the detection of SNP TSC0063050
aggaaatttgat

SEQ ID NO: 379051 - DNA, 12 bp, Artificial Sequence
  Oligonucleotide primer for the detection of SNP TSC0063051
aatattaaattc

SEQ ID NO: 379052 - DNA, 12 bp, Artificial Sequence
  Oligonucleotide primer for the detection of SNP TSC0063051
atgttagttata

SEQ ID NO: 379053 - DNA, 12 bp, Artificial Sequence
  Oligonucleotide primer for the detection of SNP TSC0063051
acgttagttata

SEQ ID NO: 379054 - DNA, 12 bp, Artificial Sequence
  Oligonucleotide primer for the detection of SNP TSC0063052
tacaatctccct

SEQ ID NO: 379055 - DNA, 12 bp, Artificial Sequence
  Oligonucleotide primer for the detection of SNP TSC0063052
tacgatctccct

SEQ ID NO: 379056 - DNA, 12 bp, Artificial Sequence
  Oligonucleotide primer for the detection of SNP TSC0007658
aataaataacgt

SEQ ID NO: 379057 - DNA, 12 bp, Artificial Sequence
  Oligonucleotide primer for the detection of SNP TSC0007658
atagtttggtta

SEQ ID NO: 379058 - DNA, 12 bp, Artificial Sequence
  Oligonucleotide primer for the detection of SNP TSC0063056
taacataacttt

SEQ ID NO: 379059 - DNA, 12 bp, Artificial Sequence
  Oligonucleotide primer for the detection of SNP TSC0063056
ttttattgatta

SEQ ID NO: 379060 - DNA, 12 bp, Artificial Sequence
  Oligonucleotide primer for the detection of SNP TSC0063057
ttattcacattt

SEQ ID NO: 379061 - DNA, 12 bp, Artificial Sequence
  Oligonucleotide primer for the detection of SNP TSC0063057
agtggtttaata

SEQ ID NO: 379062 - DNA, 12 bp, Artificial Sequence
  Oligonucleotide primer for the detection of SNP TSC0063059
tatgggatgtta

SEQ ID NO: 379063 - DNA, 12 bp, Artificial Sequence
  Oligonucleotide primer for the detection of SNP TSC0063060
ataaacatccac

SEQ ID NO: 379064 - DNA, 12 bp, Artificial Sequence
  Oligonucleotide primer for the detection of SNP TSC0063060
gaatggttttga

SEQ ID NO: 379065 - DNA, 12 bp, Artificial Sequence
  Oligonucleotide primer for the detection of SNP TSC0063062
tctatttcattt

SEQ ID NO: 379066 - DNA, 12 bp, Artificial Sequence
  Oligonucleotide primer for the detection of SNP TSC0063062
taagagttgaaa

SEQ ID NO: 379067 - DNA, 12 bp, Artificial Sequence
  Oligonucleotide primer for the detection of SNP TSC0063063
tttataaaatac

SEQ ID NO: 379068 - DNA, 12 bp, Artificial Sequence
  Oligonucleotide primer for the detection of SNP TSC0063064
ctttaatcaata

SEQ ID NO: 379069 - DNA, 12 bp, Artificial Sequence
  Oligonucleotide primer for the detection of SNP TSC0063064
aatataacaaac

SEQ ID NO: 379070 - DNA, 12 bp, Artificial Sequence
  Oligonucleotide primer for the detection of SNP TSC0063064
ttttggttaatg

SEQ ID NO: 379071 - DNA, 12 bp, Artificial Sequence
  Oligonucleotide primer for the detection of SNP TSC0063065
atcaaaaatata

SEQ ID NO: 379072 - DNA, 12 bp, Artificial Sequence
  Oligonucleotide primer for the detection of SNP TSC0063065
gttagttattga

SEQ ID NO: 379073 - DNA, 12 bp, Artificial Sequence
  Oligonucleotide primer for the detection of SNP TSC0063065
actaatcactaa

SEQ ID NO: 379074 - DNA, 12 bp, Artificial Sequence
  Oligonucleotide primer for the detection of SNP TSC0063065
tagaaatgtgtt

SEQ ID NO: 379075 - DNA, 12 bp, Artificial Sequence
  Oligonucleotide primer for the detection of SNP TSC0063065
tagaaatgtgtc

SEQ ID NO: 379076 - DNA, 12 bp, Artificial Sequence
  Oligonucleotide primer for the detection of SNP TSC0063066
catcttatcctt

SEQ ID NO: 379077 - DNA, 12 bp, Artificial Sequence
  Oligonucleotide primer for the detection of SNP TSC0063066
tgatttgagatg

SEQ ID NO: 379078 - DNA, 12 bp, Artificial Sequence
  Oligonucleotide primer for the detection of SNP TSC0063067
gtagttaaagag

SEQ ID NO: 379079 - DNA, 12 bp, Artificial Sequence
  Oligonucleotide primer for the detection of SNP TSC0063068
ttcaaaaaaatt

SEQ ID NO: 379080 - DNA, 12 bp, Artificial Sequence
  Oligonucleotide primer for the detection of SNP TSC0063069
attttcttctca

SEQ ID NO: 379081 - DNA, 12 bp, Artificial Sequence
  Oligonucleotide primer for the detection of SNP TSC0063069
aactaacttcaa

SEQ ID NO: 379082 - DNA, 12 bp, Artificial Sequence
  Oligonucleotide primer for the detection of SNP TSC0063070
ctaccttaatct

SEQ ID NO: 379083 - DNA, 12 bp, Artificial Sequence
  Oligonucleotide primer for the detection of SNP TSC0063070
ataagggtagaa

SEQ ID NO: 379084 - DNA, 12 bp, Artificial Sequence
  Oligonucleotide primer for the detection of SNP TSC0063071
atccctaccact

SEQ ID NO: 379085 - DNA, 12 bp, Artificial Sequence
  Oligonucleotide primer for the detection of SNP TSC0063071
tattgttgaaaa

SEQ ID NO: 379086 - DNA, 12 bp, Artificial Sequence
  Oligonucleotide primer for the detection of SNP TSC0063074
actaaacaccta

SEQ ID NO: 379087 - DNA, 12 bp, Artificial Sequence
  Oligonucleotide primer for the detection of SNP TSC0063074
agtgagggattt

SEQ ID NO: 379088 - DNA, 12 bp, Artificial Sequence
  Oligonucleotide primer for the detection of SNP TSC0063075
caaccataacat

SEQ ID NO: 379089 - DNA, 12 bp, Artificial Sequence
  Oligonucleotide primer for the detection of SNP TSC0063075
caaccgtaacat

SEQ ID NO: 379090 - DNA, 12 bp, Artificial Sequence
  Oligonucleotide primer for the detection of SNP TSC0063075
atgtttgtagaa

SEQ ID NO: 379091 - DNA, 12 bp, Artificial Sequence
  Oligonucleotide primer for the detection of SNP TSC0063075
tatttacaaaaa

SEQ ID NO: 379092 - DNA, 12 bp, Artificial Sequence
  Oligonucleotide primer for the detection of SNP TSC0063075
taattgtggtat

SEQ ID NO: 379093 - DNA, 12 bp, Artificial Sequence
  Oligonucleotide primer for the detection of SNP TSC0063075
taatcgtggtat

SEQ ID NO: 379094 - DNA, 12 bp, Artificial Sequence
  Oligonucleotide primer for the detection of SNP TSC0004612
cacatctaatct

SEQ ID NO: 379095 - DNA, 12 bp, Artificial Sequence
  Oligonucleotide primer for the detection of SNP TSC0004612
aaactttctttt

SEQ ID NO: 379096 - DNA, 12 bp, Artificial Sequence
  Oligonucleotide primer for the detection of SNP TSC0004612
tatatttggttt

SEQ ID NO: 379097 - DNA, 12 bp, Artificial Sequence
  Oligonucleotide primer for the detection of SNP TSC0063079
gtatggattttt

SEQ ID NO: 379098 - DNA, 12 bp, Artificial Sequence
  Oligonucleotide primer for the detection of SNP TSC0063080
tcttcctatatt

SEQ ID NO: 379099 - DNA, 12 bp, Artificial Sequence
  Oligonucleotide primer for the detection of SNP TSC0063080
agttaaaagaag

SEQ ID NO: 379100 - DNA, 12 bp, Artificial Sequence
  Oligonucleotide primer for the detection of SNP TSC0063081
actcacaaccac

SEQ ID NO: 379101 - DNA, 12 bp, Artificial Sequence
  Oligonucleotide primer for the detection of SNP TSC0063081
aaatatcatcca

SEQ ID NO: 379102 - DNA, 12 bp, Artificial Sequence
  Oligonucleotide primer for the detection of SNP TSC0063081
ttatagttattt

SEQ ID NO: 379103 - DNA, 12 bp, Artificial Sequence
  Oligonucleotide primer for the detection of SNP TSC0063082
catactattaaa

SEQ ID NO: 379104 - DNA, 12 bp, Artificial Sequence
  Oligonucleotide primer for the detection of SNP TSC0063082
gtgttatagatt

SEQ ID NO: 379105 - DNA, 12 bp, Artificial Sequence
  Oligonucleotide primer for the detection of SNP TSC0063082
atattacaaatt

SEQ ID NO: 379106 - DNA, 12 bp, Artificial Sequence
  Oligonucleotide primer for the detection of SNP TSC0063082
tatattattggg

SEQ ID NO: 379107 - DNA, 12 bp, Artificial Sequence
  Oligonucleotide primer for the detection of SNP TSC0063084
gtttaagcgatt

SEQ ID NO: 379108 - DNA, 12 bp, Artificial Sequence
  Oligonucleotide primer for the detection of SNP TSC0063084
ggttaaggtggg

SEQ ID NO: 379109 - DNA, 12 bp, Artificial Sequence
  Oligonucleotide primer for the detection of SNP TSC0063087
ttatttaaatat

SEQ ID NO: 379110 - DNA, 12 bp, Artificial Sequence
  Oligonucleotide primer for the detection of SNP TSC0063087
aatttaaggagg

SEQ ID NO: 379111 - DNA, 12 bp, Artificial Sequence
  Oligonucleotide primer for the detection of SNP TSC0063087
ttatttggatgt

SEQ ID NO: 379112 - DNA, 12 bp, Artificial Sequence
  Oligonucleotide primer for the detection of SNP TSC0063088
ttgaaaggaatt

SEQ ID NO: 379113 - DNA, 12 bp, Artificial Sequence
  Oligonucleotide primer for the detection of SNP TSC0063089
aaggttggttgg

SEQ ID NO: 379114 - DNA, 12 bp, Artificial Sequence
  Oligonucleotide primer for the detection of SNP TSC0063089
aaaattaactaa

SEQ ID NO: 379115 - DNA, 12 bp, Artificial Sequence
  Oligonucleotide primer for the detection of SNP TSC0063089
tgggagggtttt

SEQ ID NO: 379116 - DNA, 12 bp, Artificial Sequence
  Oligonucleotide primer for the detection of SNP TSC0063089
cgggagggtttt

SEQ ID NO: 379117 - DNA, 12 bp, Artificial Sequence
  Oligonucleotide primer for the detection of SNP TSC0063090
tcaaaacatctc

SEQ ID NO: 379118 - DNA, 12 bp, Artificial Sequence
  Oligonucleotide primer for the detection of SNP TSC0063090
gtttatgaggta

SEQ ID NO: 379119 - DNA, 12 bp, Artificial Sequence
  Oligonucleotide primer for the detection of SNP TSC0063092
cctcataaacaa

SEQ ID NO: 379120 - DNA, 12 bp, Artificial Sequence
  Oligonucleotide primer for the detection of SNP TSC0063092
gtatataggtgt

SEQ ID NO: 379121 - DNA, 12 bp, Artificial Sequence
  Oligonucleotide primer for the detection of SNP TSC0063093
aatcttaaacat

SEQ ID NO: 379122 - DNA, 12 bp, Artificial Sequence
  Oligonucleotide primer for the detection of SNP TSC0063093
tttagaattgta

SEQ ID NO: 379123 - DNA, 12 bp, Artificial Sequence
  Oligonucleotide primer for the detection of SNP TSC0063093
tttaaaactaca

SEQ ID NO: 379124 - DNA, 12 bp, Artificial Sequence
  Oligonucleotide primer for the detection of SNP TSC0063093
agttttagatat

SEQ ID NO: 379125 - DNA, 12 bp, Artificial Sequence
  Oligonucleotide primer for the detection of SNP TSC0006558
cctactcctatc

SEQ ID NO: 379126 - DNA, 12 bp, Artificial Sequence
  Oligonucleotide primer for the detection of SNP TSC0006558
tttggttttgga

SEQ ID NO: 379127 - DNA, 12 bp, Artificial Sequence
  Oligonucleotide primer for the detection of SNP TSC0006558
tttggtttcgga

SEQ ID NO: 379128 - DNA, 12 bp, Artificial Sequence
  Oligonucleotide primer for the detection of SNP TSC0063096
cctaatacctcc

SEQ ID NO: 379129 - DNA, 12 bp, Artificial Sequence
  Oligonucleotide primer for the detection of SNP TSC0063097
tgtaaattttat

SEQ ID NO: 379130 - DNA, 12 bp, Artificial Sequence
  Oligonucleotide primer for the detection of SNP TSC0006042
aaatataattac

SEQ ID NO: 379131 - DNA, 12 bp, Artificial Sequence
  Oligonucleotide primer for the detection of SNP TSC0006043
acacaatcatat

SEQ ID NO: 379132 - DNA, 12 bp, Artificial Sequence
  Oligonucleotide primer for the detection of SNP TSC0006043
attataggaatg

SEQ ID NO: 379133 - DNA, 12 bp, Artificial Sequence
  Oligonucleotide primer for the detection of SNP TSC0007565
ttataataacct

SEQ ID NO: 379134 - DNA, 12 bp, Artificial Sequence
  Oligonucleotide primer for the detection of SNP TSC0007565
taagaatgttgt

SEQ ID NO: 379135 - DNA, 12 bp, Artificial Sequence
  Oligonucleotide primer for the detection of SNP TSC0007565
taaaaatattac

SEQ ID NO: 379136 - DNA, 12 bp, Artificial Sequence
  Oligonucleotide primer for the detection of SNP TSC0007565
ttgtaataattt

SEQ ID NO: 379137 - DNA, 12 bp, Artificial Sequence
  Oligonucleotide primer for the detection of SNP TSC0063099
ataattatgatt

SEQ ID NO: 379138 - DNA, 12 bp, Artificial Sequence
  Oligonucleotide primer for the detection of SNP TSC0063099
gaaaggaggggt

SEQ ID NO: 379139 - DNA, 12 bp, Artificial Sequence
  Oligonucleotide primer for the detection of SNP TSC0063100
atacaaatatac

SEQ ID NO: 379140 - DNA, 12 bp, Artificial Sequence
  Oligonucleotide primer for the detection of SNP TSC0063100
ttatatactata

SEQ ID NO: 379141 - DNA, 12 bp, Artificial Sequence
  Oligonucleotide primer for the detection of SNP TSC0063100
gtatagatatat

SEQ ID NO: 379142 - DNA, 12 bp, Artificial Sequence
  Oligonucleotide primer for the detection of SNP TSC0008405
atcaatcaaata

SEQ ID NO: 379143 - DNA, 12 bp, Artificial Sequence
  Oligonucleotide primer for the detection of SNP TSC0008405
atcttctaaact

SEQ ID NO: 379144 - DNA, 12 bp, Artificial Sequence
  Oligonucleotide primer for the detection of SNP TSC0063101
acaatctaaatt

SEQ ID NO: 379145 - DNA, 12 bp, Artificial Sequence
  Oligonucleotide primer for the detection of SNP TSC0063101
tataaatgagaa

SEQ ID NO: 379146 - DNA, 12 bp, Artificial Sequence
  Oligonucleotide primer for the detection of SNP TSC0063101
tataaacgagaa

SEQ ID NO: 379147 - DNA, 12 bp, Artificial Sequence
  Oligonucleotide primer for the detection of SNP TSC0063103
caatactaaaaa

SEQ ID NO: 379148 - DNA, 12 bp, Artificial Sequence
  Oligonucleotide primer for the detection of SNP TSC0063103
acctatttcacc

SEQ ID NO: 379149 - DNA, 12 bp, Artificial Sequence
  Oligonucleotide primer for the detection of SNP TSC0063103
taatgttggaga

SEQ ID NO: 379150 - DNA, 12 bp, Artificial Sequence
  Oligonucleotide primer for the detection of SNP TSC0063105
ttttcaacccta

SEQ ID NO: 379151 - DNA, 12 bp, Artificial Sequence
  Oligonucleotide primer for the detection of SNP TSC0063105
gaatagtgaaat

SEQ ID NO: 379152 - DNA, 12 bp, Artificial Sequence
  Oligonucleotide primer for the detection of SNP TSC0063106
ttttacaaacat

SEQ ID NO: 379153 - DNA, 12 bp, Artificial Sequence
  Oligonucleotide primer for the detection of SNP TSC0063106
ttttacaaacgt

SEQ ID NO: 379154 - DNA, 12 bp, Artificial Sequence
  Oligonucleotide primer for the detection of SNP TSC0005862
tggaggtgggag

SEQ ID NO: 379155 - DNA, 12 bp, Artificial Sequence
  Oligonucleotide primer for the detection of SNP TSC0063107
aaaaccacctcc

SEQ ID NO: 379156 - DNA, 12 bp, Artificial Sequence
  Oligonucleotide primer for the detection of SNP TSC0063108
ttcaaaaattat

SEQ ID NO: 379157 - DNA, 12 bp, Artificial Sequence
  Oligonucleotide primer for the detection of SNP TSC0063108
aataatgtaaaa

SEQ ID NO: 379158 - DNA, 12 bp, Artificial Sequence
  Oligonucleotide primer for the detection of SNP TSC0063109
tatgtgtggtat

SEQ ID NO: 379159 - DNA, 12 bp, Artificial Sequence
  Oligonucleotide primer for the detection of SNP TSC0063109
tatatataacat

SEQ ID NO: 379160 - DNA, 12 bp, Artificial Sequence
  Oligonucleotide primer for the detection of SNP TSC0063109
gtagaaatataa

SEQ ID NO: 379161 - DNA, 12 bp, Artificial Sequence
  Oligonucleotide primer for the detection of SNP TSC0063110
aaattcttaata

SEQ ID NO: 379162 - DNA, 12 bp, Artificial Sequence
  Oligonucleotide primer for the detection of SNP TSC0063110
taaggttaaaat

SEQ ID NO: 379163 - DNA, 12 bp, Artificial Sequence
  Oligonucleotide primer for the detection of SNP TSC0063110
taagtttttggt

SEQ ID NO: 379164 - DNA, 12 bp, Artificial Sequence
  Oligonucleotide primer for the detection of SNP TSC0063111
cttatttttacc

SEQ ID NO: 379165 - DNA, 12 bp, Artificial Sequence
  Oligonucleotide primer for the detection of SNP TSC0063112
cctatttattta

SEQ ID NO: 379166 - DNA, 12 bp, Artificial Sequence
  Oligonucleotide primer for the detection of SNP TSC0063112
attaaataattt

SEQ ID NO: 379167 - DNA, 12 bp, Artificial Sequence
  Oligonucleotide primer for the detection of SNP TSC0063112
attaaacaactc

SEQ ID NO: 379168 - DNA, 12 bp, Artificial Sequence
  Oligonucleotide primer for the detection of SNP TSC0063114
cataaaattttt

SEQ ID NO: 379169 - DNA, 12 bp, Artificial Sequence
  Oligonucleotide primer for the detection of SNP TSC0063114
ttttgatgttaa

SEQ ID NO: 379170 - DNA, 12 bp, Artificial Sequence
  Oligonucleotide primer for the detection of SNP TSC0006686
ccaaataaaaca

SEQ ID NO: 379171 - DNA, 12 bp, Artificial Sequence
  Oligonucleotide primer for the detection of SNP TSC0006686
atgaaaatatat

SEQ ID NO: 379172 - DNA, 12 bp, Artificial Sequence
  Oligonucleotide primer for the detection of SNP TSC0006686
ataaaaatatat

SEQ ID NO: 379173 - DNA, 12 bp, Artificial Sequence
  Oligonucleotide primer for the detection of SNP TSC0006686
ttaaataggata

SEQ ID NO: 379174 - DNA, 12 bp, Artificial Sequence
  Oligonucleotide primer for the detection of SNP TSC0008765
atattctaaaac

SEQ ID NO: 379175 - DNA, 12 bp, Artificial Sequence
  Oligonucleotide primer for the detection of SNP TSC0008765
acatttaaaatt

SEQ ID NO: 379176 - DNA, 12 bp, Artificial Sequence
  Oligonucleotide primer for the detection of SNP TSC0063118
ataaaattttcc

SEQ ID NO: 379177 - DNA, 12 bp, Artificial Sequence
  Oligonucleotide primer for the detection of SNP TSC0063121
aaggatttttat

SEQ ID NO: 379178 - DNA, 12 bp, Artificial Sequence
  Oligonucleotide primer for the detection of SNP TSC0063121
ttatgaatatag

SEQ ID NO: 379179 - DNA, 12 bp, Artificial Sequence
  Oligonucleotide primer for the detection of SNP TSC0063122
acctaaaatttc

SEQ ID NO: 379180 - DNA, 12 bp, Artificial Sequence
  Oligonucleotide primer for the detection of SNP TSC0063122
aattttagttta

SEQ ID NO: 379181 - DNA, 12 bp, Artificial Sequence
  Oligonucleotide primer for the detection of SNP TSC0063123
atatcccaaaaa

SEQ ID NO: 379182 - DNA, 12 bp, Artificial Sequence
  Oligonucleotide primer for the detection of SNP TSC0063123
aattagttttgt

SEQ ID NO: 379183 - DNA, 12 bp, Artificial Sequence
  Oligonucleotide primer for the detection of SNP TSC0063123
aaccaatcttac

SEQ ID NO: 379184 - DNA, 12 bp, Artificial Sequence
  Oligonucleotide primer for the detection of SNP TSC0063123
gtgtattttagg

SEQ ID NO: 379185 - DNA, 12 bp, Artificial Sequence
  Oligonucleotide primer for the detection of SNP TSC0005676
atatatttatag

SEQ ID NO: 379186 - DNA, 12 bp, Artificial Sequence
  Oligonucleotide primer for the detection of SNP TSC0005676
acatacctacaa

SEQ ID NO: 379187 - DNA, 12 bp, Artificial Sequence
  Oligonucleotide primer for the detection of SNP TSC0005676
aaattttagtgt

SEQ ID NO: 379188 - DNA, 12 bp, Artificial Sequence
  Oligonucleotide primer for the detection of SNP TSC0005677
ggaatttagaat

SEQ ID NO: 379189 - DNA, 12 bp, Artificial Sequence
  Oligonucleotide primer for the detection of SNP TSC0005677
gaaaactcaaaa

SEQ ID NO: 379190 - DNA, 12 bp, Artificial Sequence
  Oligonucleotide primer for the detection of SNP TSC0005677
aataggggttag

SEQ ID NO: 379191 - DNA, 12 bp, Artificial Sequence
  Oligonucleotide primer for the detection of SNP TSC0005678
atttcaataaat

SEQ ID NO: 379192 - DNA, 12 bp, Artificial Sequence
  Oligonucleotide primer for the detection of SNP TSC0063126
cctcctacctca

SEQ ID NO: 379193 - DNA, 12 bp, Artificial Sequence
  Oligonucleotide primer for the detection of SNP TSC0007164
ttagggtatgaa

SEQ ID NO: 379194 - DNA, 12 bp, Artificial Sequence
  Oligonucleotide primer for the detection of SNP TSC0007164
ttagggtacgaa

SEQ ID NO: 379195 - DNA, 12 bp, Artificial Sequence
  Oligonucleotide primer for the detection of SNP TSC0007164
tcaaaatacaaa

SEQ ID NO: 379196 - DNA, 12 bp, Artificial Sequence
  Oligonucleotide primer for the detection of SNP TSC0007164
tcaaaatacgaa

SEQ ID NO: 379197 - DNA, 12 bp, Artificial Sequence
  Oligonucleotide primer for the detection of SNP TSC0007164
gtaggtttgatt

SEQ ID NO: 379198 - DNA, 12 bp, Artificial Sequence
  Oligonucleotide primer for the detection of SNP TSC0007828
taatatcattaa

SEQ ID NO: 379199 - DNA, 12 bp, Artificial Sequence
  Oligonucleotide primer for the detection of SNP TSC0007828
agtatggagatt

SEQ ID NO: 379200 - DNA, 12 bp, Artificial Sequence
  Oligonucleotide primer for the detection of SNP TSC0063127
tctctctctcac

SEQ ID NO: 379201 - DNA, 12 bp, Artificial Sequence
  Oligonucleotide primer for the detection of SNP TSC0063127
tctctctctcgc

SEQ ID NO: 379202 - DNA, 12 bp, Artificial Sequence
  Oligonucleotide primer for the detection of SNP TSC0063127
aagtgggaggag

SEQ ID NO: 379203 - DNA, 12 bp, Artificial Sequence
  Oligonucleotide primer for the detection of SNP TSC0063128
cttaaatattat

SEQ ID NO: 379204 - DNA, 12 bp, Artificial Sequence
  Oligonucleotide primer for the detection of SNP TSC0063128
attattattttg

SEQ ID NO: 379205 - DNA, 12 bp, Artificial Sequence
  Oligonucleotide primer for the detection of SNP TSC0005345
atcttattactt

SEQ ID NO: 379206 - DNA, 12 bp, Artificial Sequence
  Oligonucleotide primer for the detection of SNP TSC0063130
gtttgatttata

SEQ ID NO: 379207 - DNA, 12 bp, Artificial Sequence
  Oligonucleotide primer for the detection of SNP TSC0063130
atctaatttaca

SEQ ID NO: 379208 - DNA, 12 bp, Artificial Sequence
  Oligonucleotide primer for the detection of SNP TSC0063130
aagattataagg

SEQ ID NO: 379209 - DNA, 12 bp, Artificial Sequence
  Oligonucleotide primer for the detection of SNP TSC0063131
tttaaacaaaat

SEQ ID NO: 379210 - DNA, 12 bp, Artificial Sequence
  Oligonucleotide primer for the detection of SNP TSC0063131
gagtttttatga

SEQ ID NO: 379211 - DNA, 12 bp, Artificial Sequence
  Oligonucleotide primer for the detection of SNP TSC0063131
gagtttttacga

SEQ ID NO: 379212 - DNA, 12 bp, Artificial Sequence
  Oligonucleotide primer for the detection of SNP TSC0063132
cactaacaataa

SEQ ID NO: 379213 - DNA, 12 bp, Artificial Sequence
  Oligonucleotide primer for the detection of SNP TSC0063132
ttggaatagttt

SEQ ID NO: 379214 - DNA, 12 bp, Artificial Sequence
  Oligonucleotide primer for the detection of SNP TSC0063132
tatattggtagt

SEQ ID NO: 379215 - DNA, 12 bp, Artificial Sequence
  Oligonucleotide primer for the detection of SNP TSC0008388
ccacccactaca

SEQ ID NO: 379216 - DNA, 12 bp, Artificial Sequence
  Oligonucleotide primer for the detection of SNP TSC0008388
tgttgggtatat

SEQ ID NO: 379217 - DNA, 12 bp, Artificial Sequence
  Oligonucleotide primer for the detection of SNP TSC0008388
tactaaacatac

SEQ ID NO: 379218 - DNA, 12 bp, Artificial Sequence
  Oligonucleotide primer for the detection of SNP TSC0063133
cacttactaact

SEQ ID NO: 379219 - DNA, 12 bp, Artificial Sequence
  Oligonucleotide primer for the detection of SNP TSC0063133
aattttttagag

SEQ ID NO: 379220 - DNA, 12 bp, Artificial Sequence
  Oligonucleotide primer for the detection of SNP TSC0063134
tgaggatgaagt

SEQ ID NO: 379221 - DNA, 12 bp, Artificial Sequence
  Oligonucleotide primer for the detection of SNP TSC0063135
aacccgaaaaat

SEQ ID NO: 379222 - DNA, 12 bp, Artificial Sequence
  Oligonucleotide primer for the detection of SNP TSC0063135
ttggggtttttt

SEQ ID NO: 379223 - DNA, 12 bp, Artificial Sequence
  Oligonucleotide primer for the detection of SNP TSC0063135
gatttgagaagt

SEQ ID NO: 379224 - DNA, 12 bp, Artificial Sequence
  Oligonucleotide primer for the detection of SNP TSC0063135
gattcgagaagt

SEQ ID NO: 379225 - DNA, 12 bp, Artificial Sequence
  Oligonucleotide primer for the detection of SNP TSC0063136
aatccaaaattt

SEQ ID NO: 379226 - DNA, 12 bp, Artificial Sequence
  Oligonucleotide primer for the detection of SNP TSC0063138
attttttaatct

SEQ ID NO: 379227 - DNA, 12 bp, Artificial Sequence
  Oligonucleotide primer for the detection of SNP TSC0063138
ggtggaaggggg

SEQ ID NO: 379228 - DNA, 12 bp, Artificial Sequence
  Oligonucleotide primer for the detection of SNP TSC0063139
attacaccaaaa

SEQ ID NO: 379229 - DNA, 12 bp, Artificial Sequence
  Oligonucleotide primer for the detection of SNP TSC0063139
ataggattgttt

SEQ ID NO: 379230 - DNA, 12 bp, Artificial Sequence
  Oligonucleotide primer for the detection of SNP TSC0063139
gattgtattaaa

SEQ ID NO: 379231 - DNA, 12 bp, Artificial Sequence
  Oligonucleotide primer for the detection of SNP TSC0063142
aagttaagtatt

SEQ ID NO: 379232 - DNA, 12 bp, Artificial Sequence
  Oligonucleotide primer for the detection of SNP TSC0063142
aagagattaatg

SEQ ID NO: 379233 - DNA, 12 bp, Artificial Sequence
  Oligonucleotide primer for the detection of SNP TSC0063143
  unsure (2): unknown base
tntcaaacataa

SEQ ID NO: 379234 - DNA, 12 bp, Artificial Sequence
  Oligonucleotide primer for the detection of SNP TSC0063143
tactccctatta

SEQ ID NO: 379235 - DNA, 12 bp, Artificial Sequence
  Oligonucleotide primer for the detection of SNP TSC0063143
  unsure (3): unknown base
ttnttaggtatg

SEQ ID NO: 379236 - DNA, 12 bp, Artificial Sequence
  Oligonucleotide primer for the detection of SNP TSC0063144
tgaagaattata

SEQ ID NO: 379237 - DNA, 12 bp, Artificial Sequence
  Oligonucleotide primer for the detection of SNP TSC0063144
cgaagaattata

SEQ ID NO: 379238 - DNA, 12 bp, Artificial Sequence
  Oligonucleotide primer for the detection of SNP TSC0063144
aaaaaatcacaa

SEQ ID NO: 379239 - DNA, 12 bp, Artificial Sequence
  Oligonukleotid-Primer
gaaaaatcacaa

SEQ ID NO: 379240 - DNA, 12 bp, Artificial Sequence
  Oligonucleotide primer for the detection of SNP TSC0063144
taggattgtttt

SEQ ID NO: 379241 - DNA, 12 bp, Artificial Sequence
  Oligonucleotide primer for the detection of SNP TSC0063146
aatttattttca

SEQ ID NO: 379242 - DNA, 12 bp, Artificial Sequence
  Oligonucleotide primer for the detection of SNP TSC0063147
tgtagagtagta

SEQ ID NO: 379243 - DNA, 12 bp, Artificial Sequence
  Oligonucleotide primer for the detection of SNP TSC0063152
taataacatttt

SEQ ID NO: 379244 - DNA, 12 bp, Artificial Sequence
  Oligonucleotide primer for the detection of SNP TSC0063152
tataaagttttt

SEQ ID NO: 379245 - DNA, 12 bp, Artificial Sequence
  Oligonucleotide primer for the detection of SNP TSC0063153
tgatttttttgt

SEQ ID NO: 379246 - DNA, 12 bp, Artificial Sequence
  Oligonucleotide primer for the detection of SNP TSC0063153
ctaaccctctta

SEQ ID NO: 379247 - DNA, 12 bp, Artificial Sequence
  Oligonucleotide primer for the detection of SNP TSC0063153
agaaagaaggag

SEQ ID NO: 379248 - DNA, 12 bp, Artificial Sequence
  Oligonucleotide primer for the detection of SNP TSC0063154
ttgaatgtgata

SEQ ID NO: 379249 - DNA, 12 bp, Artificial Sequence
  Oligonucleotide primer for the detection of SNP TSC0063155
aattacaaattc

SEQ ID NO: 379250 - DNA, 12 bp, Artificial Sequence
  Oligonucleotide primer for the detection of SNP TSC0063155
ttatgtaaaata

SEQ ID NO: 379251 - DNA, 12 bp, Artificial Sequence
  Oligonucleotide primer for the detection of SNP TSC0007144
attacaaaaatt

SEQ ID NO: 379252 - DNA, 12 bp, Artificial Sequence
  Oligonucleotide primer for the detection of SNP TSC0007144
tgaagttgttat

SEQ ID NO: 379253 - DNA, 12 bp, Artificial Sequence
  Oligonucleotide primer for the detection of SNP TSC0063166
ttcttacaataa

SEQ ID NO: 379254 - DNA, 12 bp, Artificial Sequence
  Oligonucleotide primer for the detection of SNP TSC0063166
ttataaaaggat

SEQ ID NO: 379255 - DNA, 12 bp, Artificial Sequence
  Oligonucleotide primer for the detection of SNP TSC0063167
acaaatatataa

SEQ ID NO: 379256 - DNA, 12 bp, Artificial Sequence
  Oligonucleotide primer for the detection of SNP TSC0063167
ttatgtttatat

SEQ ID NO: 379257 - DNA, 12 bp, Artificial Sequence
  Oligonucleotide primer for the detection of SNP TSC0063167
ctatacctatat

SEQ ID NO: 379258 - DNA, 12 bp, Artificial Sequence
  Oligonucleotide primer for the detection of SNP TSC0063167
ataagtgtgtga

SEQ ID NO: 379259 - DNA, 12 bp, Artificial Sequence
  Oligonucleotide primer for the detection of SNP TSC0063168
tatctacataca

SEQ ID NO: 379260 - DNA, 12 bp, Artificial Sequence
  Oligonucleotide primer for the detection of SNP TSC0063168
tttcacacactt

SEQ ID NO: 379261 - DNA, 12 bp, Artificial Sequence
  Oligonucleotide primer for the detection of SNP TSC0063169
aaactattaatt

SEQ ID NO: 379262 - DNA, 12 bp, Artificial Sequence
  Oligonucleotide primer for the detection of SNP TSC0063169
gaaattgaggta

SEQ ID NO: 379263 - DNA, 12 bp, Artificial Sequence
  Oligonucleotide primer for the detection of SNP TSC0063170
tcacatatcaaa

SEQ ID NO: 379264 - DNA, 12 bp, Artificial Sequence
  Oligonucleotide primer for the detection of SNP TSC0063170
aattcaaaatta

SEQ ID NO: 379265 - DNA, 12 bp, Artificial Sequence
  Oligonucleotide primer for the detection of SNP TSC0063170
ttatatattaaa

SEQ ID NO: 379266 - DNA, 12 bp, Artificial Sequence
  Oligonucleotide primer for the detection of SNP TSC0063172
accctactaact

SEQ ID NO: 379267 - DNA, 12 bp, Artificial Sequence
  Oligonucleotide primer for the detection of SNP TSC0063172
agaggttaggtg

SEQ ID NO: 379268 - DNA, 12 bp, Artificial Sequence
  Oligonucleotide primer for the detection of SNP TSC0063172
agaggttaggcg

SEQ ID NO: 379269 - DNA, 12 bp, Artificial Sequence
  Oligonucleotide primer for the detection of SNP TSC0063173
gtaagtgaatta

SEQ ID NO: 379270 - DNA, 12 bp, Artificial Sequence
  Oligonucleotide primer for the detection of SNP TSC0063175
ttctctttaatt

SEQ ID NO: 379271 - DNA, 12 bp, Artificial Sequence
  Oligonucleotide primer for the detection of SNP TSC0063177
caaacacaataa

SEQ ID NO: 379272 - DNA, 12 bp, Artificial Sequence
  Oligonucleotide primer for the detection of SNP TSC0063177
ttataggtatgc

SEQ ID NO: 379273 - DNA, 12 bp, Artificial Sequence
  Oligonucleotide primer for the detection of SNP TSC0063177
taagtatagtgg

SEQ ID NO: 379274 - DNA, 12 bp, Artificial Sequence
  Oligonucleotide primer for the detection of SNP TSC0063178
aacaaaacccta

SEQ ID NO: 379275 - DNA, 12 bp, Artificial Sequence
  Oligonucleotide primer for the detection of SNP TSC0063179
cataatcacata

SEQ ID NO: 379276 - DNA, 12 bp, Artificial Sequence
  Oligonucleotide primer for the detection of SNP TSC0063179
cataatcgcata

SEQ ID NO: 379277 - DNA, 12 bp, Artificial Sequence
  Oligonucleotide primer for the detection of SNP TSC0063179
ttggaatatagt

SEQ ID NO: 379278 - DNA, 12 bp, Artificial Sequence
  Oligonucleotide primer for the detection of SNP TSC0063179
tatgattgtatg

SEQ ID NO: 379279 - DNA, 12 bp, Artificial Sequence
  Oligonucleotide primer for the detection of SNP TSC0063179
tatgatcgtatg

SEQ ID NO: 379280 - DNA, 12 bp, Artificial Sequence
  Oligonucleotide primer for the detection of SNP TSC0063180
tgtggagatggt

SEQ ID NO: 379281 - DNA, 12 bp, Artificial Sequence
  Oligonucleotide primer for the detection of SNP TSC0063180
tataaaaataac

SEQ ID NO: 379282 - DNA, 12 bp, Artificial Sequence
  Oligonucleotide primer for the detection of SNP TSC0063180
gaattatgggaa

SEQ ID NO: 379283 - DNA, 12 bp, Artificial Sequence
  Oligonucleotide primer for the detection of SNP TSC0063183
catttaatcctc

SEQ ID NO: 379284 - DNA, 12 bp, Artificial Sequence
  Oligonucleotide primer for the detection of SNP TSC0063183
gttagtgaaaga

SEQ ID NO: 379285 - DNA, 12 bp, Artificial Sequence
  Oligonucleotide primer for the detection of SNP TSC0063184
cctatatctcta

SEQ ID NO: 379286 - DNA, 12 bp, Artificial Sequence
  Oligonucleotide primer for the detection of SNP TSC0063184
agggagatttga

SEQ ID NO: 379287 - DNA, 12 bp, Artificial Sequence
  Oligonucleotide primer for the detection of SNP TSC0063188
ccaaatacaatc

SEQ ID NO: 379288 - DNA, 12 bp, Artificial Sequence
  Oligonucleotide primer for the detection of SNP TSC0063193
taccctcttatc

SEQ ID NO: 379289 - DNA, 12 bp, Artificial Sequence
  Oligonucleotide primer for the detection of SNP TSC0063193
tgtgaaatgatt

SEQ ID NO: 379290 - DNA, 12 bp, Artificial Sequence
  Oligonucleotide primer for the detection of SNP TSC0063193
tgtgaaatgatc

SEQ ID NO: 379291 - DNA, 12 bp, Artificial Sequence
  Oligonucleotide primer for the detection of SNP TSC0063194
tctctctatact

SEQ ID NO: 379292 - DNA, 12 bp, Artificial Sequence
  Oligonucleotide primer for the detection of SNP TSC0063194
aattatttagaa

SEQ ID NO: 379293 - DNA, 12 bp, Artificial Sequence
  Oligonucleotide primer for the detection of SNP TSC0006237
aaagttttagga

SEQ ID NO: 379294 - DNA, 12 bp, Artificial Sequence
  Oligonucleotide primer for the detection of SNP TSC0063196
tttaactaaaaa

SEQ ID NO: 379295 - DNA, 12 bp, Artificial Sequence
  Oligonucleotide primer for the detection of SNP TSC0063196
tatttaagattt

SEQ ID NO: 379296 - DNA, 12 bp, Artificial Sequence
  Oligonucleotide primer for the detection of SNP TSC0063196
cacttaaaatct

SEQ ID NO: 379297 - DNA, 12 bp, Artificial Sequence
  Oligonucleotide primer for the detection of SNP TSC0063196
tttggttaagag

SEQ ID NO: 379298 - DNA, 12 bp, Artificial Sequence
  Oligonucleotide primer for the detection of SNP TSC0063197
atatctaaaata

SEQ ID NO: 379299 - DNA, 12 bp, Artificial Sequence
  Oligonucleotide primer for the detection of SNP TSC0063197
ttatgagtttga

SEQ ID NO: 379300 - DNA, 12 bp, Artificial Sequence
  Oligonucleotide primer for the detection of SNP TSC0063197
ctataaatttaa

SEQ ID NO: 379301 - DNA, 12 bp, Artificial Sequence
  Oligonucleotide primer for the detection of SNP TSC0063197
gatatttaaagt

SEQ ID NO: 379302 - DNA, 12 bp, Artificial Sequence
  Oligonucleotide primer for the detection of SNP TSC0063198
cttaattaatct

SEQ ID NO: 379303 - DNA, 12 bp, Artificial Sequence
  Oligonucleotide primer for the detection of SNP TSC0063198
gtttaattagta

SEQ ID NO: 379304 - DNA, 12 bp, Artificial Sequence
  Oligonucleotide primer for the detection of SNP TSC0063203
tttaattataac

SEQ ID NO: 379305 - DNA, 12 bp, Artificial Sequence
  Oligonucleotide primer for the detection of SNP TSC0063203
gattttgggttg

SEQ ID NO: 379306 - DNA, 12 bp, Artificial Sequence
  Oligonucleotide primer for the detection of SNP TSC0063204
ataacaaacaac

SEQ ID NO: 379307 - DNA, 12 bp, Artificial Sequence
  Oligonucleotide primer for the detection of SNP TSC0063204
ttggttgttatg

SEQ ID NO: 379308 - DNA, 12 bp, Artificial Sequence
  Oligonucleotide primer for the detection of SNP TSC0063204
ttggtcgttatg

SEQ ID NO: 379309 - DNA, 12 bp, Artificial Sequence
  Oligonucleotide primer for the detection of SNP TSC0063204
ttggttgttacg

SEQ ID NO: 379310 - DNA, 12 bp, Artificial Sequence
  Oligonucleotide primer for the detection of SNP TSC0063204
ttggtcgttacg

SEQ ID NO: 379311 - DNA, 12 bp, Artificial Sequence
  Oligonukleotid-Primer
tcctaccttacc

SEQ ID NO: 379312 - DNA, 12 bp, Artificial Sequence
  Oligonucleotide primer for the detection of SNP TSC0063205
attaaatgttga

SEQ ID NO: 379313 - DNA, 12 bp, Artificial Sequence
  Oligonucleotide primer for the detection of SNP TSC0063206
tactcactctaa

SEQ ID NO: 379314 - DNA, 12 bp, Artificial Sequence
  Oligonucleotide primer for the detection of SNP TSC0063206
atgttaaattta

SEQ ID NO: 379315 - DNA, 12 bp, Artificial Sequence
  Oligonukleotid-Primer
tactacttttta

SEQ ID NO: 379316 - DNA, 12 bp, Artificial Sequence
  Oligonucleotide primer for the detection of SNP TSC0063210
gatgggagtgtt

SEQ ID NO: 379317 - DNA, 12 bp, Artificial Sequence
  Oligonucleotide primer for the detection of SNP TSC0063211
ttaataaattca

SEQ ID NO: 379318 - DNA, 12 bp, Artificial Sequence
  Oligonucleotide primer for the detection of SNP TSC0063211
tttatttgtggt

SEQ ID NO: 379319 - DNA, 12 bp, Artificial Sequence
  Oligonucleotide primer for the detection of SNP TSC0063211
tttacttataac

SEQ ID NO: 379320 - DNA, 12 bp, Artificial Sequence
  Oligonucleotide primer for the detection of SNP TSC0063211
attaatgggttt

SEQ ID NO: 379321 - DNA, 12 bp, Artificial Sequence
  Oligonucleotide primer for the detection of SNP TSC0063212
ttaaaattgaaa

SEQ ID NO: 379322 - DNA, 12 bp, Artificial Sequence
  Oligonucleotide primer for the detection of SNP TSC0063214
gtaaaagaaata

SEQ ID NO: 379323 - DNA, 12 bp, Artificial Sequence
  Oligonucleotide primer for the detection of SNP TSC0063216
tttgttatgata

SEQ ID NO: 379324 - DNA, 12 bp, Artificial Sequence
  Oligonucleotide primer for the detection of SNP TSC0063217
aaaaacatttta

SEQ ID NO: 379325 - DNA, 12 bp, Artificial Sequence
  Oligonucleotide primer for the detection of SNP TSC0063217
tacacttctaac

SEQ ID NO: 379326 - DNA, 12 bp, Artificial Sequence
  Oligonucleotide primer for the detection of SNP TSC0063217
tacgcttctaac

SEQ ID NO: 379327 - DNA, 12 bp, Artificial Sequence
  Oligonukleotid-Primer
agaagtattttg

SEQ ID NO: 379328 - DNA, 12 bp, Artificial Sequence
  Oligonucleotide primer for the detection of SNP TSC0063220
attaaataaaac

SEQ ID NO: 379329 - DNA, 12 bp, Artificial Sequence
  Oligonucleotide primer for the detection of SNP TSC0063224
ttatcattttat

SEQ ID NO: 379330 - DNA, 12 bp, Artificial Sequence
  Oligonucleotide primer for the detection of SNP TSC0063224
ttatcgttttat

SEQ ID NO: 379331 - DNA, 12 bp, Artificial Sequence
  Oligonucleotide primer for the detection of SNP TSC0063224
tagtagaataga

SEQ ID NO: 379332 - DNA, 12 bp, Artificial Sequence
  Oligonucleotide primer for the detection of SNP TSC0063226
tgttttttaaga

SEQ ID NO: 379333 - DNA, 12 bp, Artificial Sequence
  Oligonucleotide primer for the detection of SNP TSC0063227
ttttcgtttggt

SEQ ID NO: 379334 - DNA, 12 bp, Artificial Sequence
  Oligonucleotide primer for the detection of SNP TSC0063227
ccctccacttaa

SEQ ID NO: 379335 - DNA, 12 bp, Artificial Sequence
  Oligonucleotide primer for the detection of SNP TSC0063227
ccctccgcttaa

SEQ ID NO: 379336 - DNA, 12 bp, Artificial Sequence
  Oligonucleotide primer for the detection of SNP TSC0063227
agtagagtggag

SEQ ID NO: 379337 - DNA, 12 bp, Artificial Sequence
  Oligonucleotide primer for the detection of SNP TSC0063227
agtagagcggag

SEQ ID NO: 379338 - DNA, 12 bp, Artificial Sequence
  Oligonucleotide primer for the detection of SNP TSC0063228
catcttaaaaat

SEQ ID NO: 379339 - DNA, 12 bp, Artificial Sequence
  Oligonucleotide primer for the detection of SNP TSC0063228
ttttggaaaata

SEQ ID NO: 379340 - DNA, 12 bp, Artificial Sequence
  Oligonucleotide primer for the detection of SNP TSC0004826
tctaattttaac

SEQ ID NO: 379341 - DNA, 12 bp, Artificial Sequence
  Oligonucleotide primer for the detection of SNP TSC0004827
tattcaaaatac

SEQ ID NO: 379342 - DNA, 12 bp, Artificial Sequence
  Oligonucleotide primer for the detection of SNP TSC0004827
gtttttggagta

SEQ ID NO: 379343 - DNA, 12 bp, Artificial Sequence
  Oligonucleotide primer for the detection of SNP TSC0063229
ttcaaaaaacta

SEQ ID NO: 379344 - DNA, 12 bp, Artificial Sequence
  Oligonucleotide primer for the detection of SNP TSC0063229
tagttttggtat

SEQ ID NO: 379345 - DNA, 12 bp, Artificial Sequence
  Oligonucleotide primer for the detection of SNP TSC0063230
taaatatggatt

SEQ ID NO: 379346 - DNA, 12 bp, Artificial Sequence
  Oligonucleotide primer for the detection of SNP TSC0063230
taaatatggatc

SEQ ID NO: 379347 - DNA, 12 bp, Artificial Sequence
  Oligonucleotide primer for the detection of SNP TSC0063230
ttgaggtattaa

SEQ ID NO: 379348 - DNA, 12 bp, Artificial Sequence
  Oligonucleotide primer for the detection of SNP TSC0063235
caacctttattt

SEQ ID NO: 379349 - DNA, 12 bp, Artificial Sequence
  Oligonucleotide primer for the detection of SNP TSC0063235
gatgtttttaga

SEQ ID NO: 379350 - DNA, 12 bp, Artificial Sequence
  Oligonucleotide primer for the detection of SNP TSC0063235
aatattcccaaa

SEQ ID NO: 379351 - DNA, 12 bp, Artificial Sequence
  Oligonucleotide primer for the detection of SNP TSC0063240
ggtttttgattg

SEQ ID NO: 379352 - DNA, 12 bp, Artificial Sequence
  Oligonucleotide primer for the detection of SNP TSC0063240
tatagggttagt

SEQ ID NO: 379353 - DNA, 12 bp, Artificial Sequence
  Oligonucleotide primer for the detection of SNP TSC0063244
ccaaaaaatccc

SEQ ID NO: 379354 - DNA, 12 bp, Artificial Sequence
  Oligonucleotide primer for the detection of SNP TSC0063244
gtatagaggtga

SEQ ID NO: 379355 - DNA, 12 bp, Artificial Sequence
  Oligonucleotide primer for the detection of SNP TSC0063245
tatattaatcaa

SEQ ID NO: 379356 - DNA, 12 bp, Artificial Sequence
  Oligonucleotide primer for the detection of SNP TSC0063246
cacaaaaaattt

SEQ ID NO: 379357 - DNA, 12 bp, Artificial Sequence
  Oligonucleotide primer for the detection of SNP TSC0063246
aagggattttta

SEQ ID NO: 379358 - DNA, 12 bp, Artificial Sequence
  Oligonucleotide primer for the detection of SNP TSC0063246
tataagggattt

SEQ ID NO: 379359 - DNA, 12 bp, Artificial Sequence
  Oligonucleotide primer for the detection of SNP TSC0063248
tttagtgattgg

SEQ ID NO: 379360 - DNA, 12 bp, Artificial Sequence
  Oligonucleotide primer for the detection of SNP TSC0063248
ctcaataactaa

SEQ ID NO: 379361 - DNA, 12 bp, Artificial Sequence
  Oligonucleotide primer for the detection of SNP TSC0063249
cactaaatttca

SEQ ID NO: 379362 - DNA, 12 bp, Artificial Sequence
  Oligonucleotide primer for the detection of SNP TSC0063249
tatatttcaatt

SEQ ID NO: 379363 - DNA, 12 bp, Artificial Sequence
  Oligonucleotide primer for the detection of SNP TSC0063250
ataaacttactt

SEQ ID NO: 379364 - DNA, 12 bp, Artificial Sequence
  Oligonucleotide primer for the detection of SNP TSC0063250
tgttatatttta

SEQ ID NO: 379365 - DNA, 12 bp, Artificial Sequence
  Oligonucleotide primer for the detection of SNP TSC0063251
tattaattacaa

SEQ ID NO: 379366 - DNA, 12 bp, Artificial Sequence
  Oligonucleotide primer for the detection of SNP TSC0063251
tattagttgtaa

SEQ ID NO: 379367 - DNA, 12 bp, Artificial Sequence
  Oligonucleotide primer for the detection of SNP TSC0063252
aaatatttacat

SEQ ID NO: 379368 - DNA, 12 bp, Artificial Sequence
  Oligonucleotide primer for the detection of SNP TSC0063252
aggtatttgtat

SEQ ID NO: 379369 - DNA, 12 bp, Artificial Sequence
  Oligonucleotide primer for the detection of SNP TSC0063254
ttataaactaaa

SEQ ID NO: 379370 - DNA, 12 bp, Artificial Sequence
  Oligonucleotide primer for the detection of SNP TSC0063254
tggggagatgta

SEQ ID NO: 379371 - DNA, 12 bp, Artificial Sequence
  Oligonucleotide primer for the detection of SNP TSC0063256
ttataagttttt

SEQ ID NO: 379372 - DNA, 12 bp, Artificial Sequence
  Oligonucleotide primer for the detection of SNP TSC0063256
ccataaaccttc

SEQ ID NO: 379373 - DNA, 12 bp, Artificial Sequence
  Oligonucleotide primer for the detection of SNP TSC0063256
ttagagtagttg

SEQ ID NO: 379374 - DNA, 12 bp, Artificial Sequence
  Oligonucleotide primer for the detection of SNP TSC0063257
acacaacaacct

SEQ ID NO: 379375 - DNA, 12 bp, Artificial Sequence
  Oligonucleotide primer for the detection of SNP TSC0063257
tggaggagggta

SEQ ID NO: 379376 - DNA, 12 bp, Artificial Sequence
  Oligonucleotide primer for the detection of SNP TSC0063258
agagttggttat

SEQ ID NO: 379377 - DNA, 12 bp, Artificial Sequence
  Oligonucleotide primer for the detection of SNP TSC0063258
caaaactaacca

SEQ ID NO: 379378 - DNA, 12 bp, Artificial Sequence
  Oligonucleotide primer for the detection of SNP TSC0063258
gtgggttattat

SEQ ID NO: 379379 - DNA, 12 bp, Artificial Sequence
  Oligonucleotide primer for the detection of SNP TSC0063258
gtgggttattac

SEQ ID NO: 379380 - DNA, 12 bp, Artificial Sequence
  Oligonucleotide primer for the detection of SNP TSC0063259
tattatttatct

SEQ ID NO: 379381 - DNA, 12 bp, Artificial Sequence
  Oligonucleotide primer for the detection of SNP TSC0063259
aggagattttta

SEQ ID NO: 379382 - DNA, 12 bp, Artificial Sequence
  Oligonucleotide primer for the detection of SNP TSC0063259
aaaaaatcctta

SEQ ID NO: 379383 - DNA, 12 bp, Artificial Sequence
  Oligonucleotide primer for the detection of SNP TSC0063259
tattatttgttt

SEQ ID NO: 379384 - DNA, 12 bp, Artificial Sequence
  Oligonucleotide primer for the detection of SNP TSC0063260
tttattgtgtag

SEQ ID NO: 379385 - DNA, 12 bp, Artificial Sequence
  Oligonucleotide primer for the detection of SNP TSC0063261
aacacaaaatta

SEQ ID NO: 379386 - DNA, 12 bp, Artificial Sequence
  Oligonucleotide primer for the detection of SNP TSC0063261
gggtggggtttt

SEQ ID NO: 379387 - DNA, 12 bp, Artificial Sequence
  Oligonucleotide primer for the detection of SNP TSC0063261
gggcggggtttt

SEQ ID NO: 379388 - DNA, 12 bp, Artificial Sequence
  Oligonucleotide primer for the detection of SNP TSC0063261
aaacaaaatcct

SEQ ID NO: 379389 - DNA, 12 bp, Artificial Sequence
  Oligonucleotide primer for the detection of SNP TSC0063261
aaacgaaatcct

SEQ ID NO: 379390 - DNA, 12 bp, Artificial Sequence
  Oligonucleotide primer for the detection of SNP TSC0063261
gatataaagttg

SEQ ID NO: 379391 - DNA, 12 bp, Artificial Sequence
  Oligonucleotide primer for the detection of SNP TSC0063262
caaaaacctctt

SEQ ID NO: 379392 - DNA, 12 bp, Artificial Sequence
  Oligonucleotide primer for the detection of SNP TSC0063265
ctcttaaaaaat

SEQ ID NO: 379393 - DNA, 12 bp, Artificial Sequence
  Oligonucleotide primer for the detection of SNP TSC0063266
ttcatctttaat

SEQ ID NO: 379394 - DNA, 12 bp, Artificial Sequence
  Oligonucleotide primer for the detection of SNP TSC0063267
ccctcaattacc

SEQ ID NO: 379395 - DNA, 12 bp, Artificial Sequence
  Oligonucleotide primer for the detection of SNP TSC0063268
ataaacttacaa

SEQ ID NO: 379396 - DNA, 12 bp, Artificial Sequence
  Oligonucleotide primer for the detection of SNP TSC0063268
taggtagtatat

SEQ ID NO: 379397 - DNA, 12 bp, Artificial Sequence
  Oligonucleotide primer for the detection of SNP TSC0063268
caaataacacac

SEQ ID NO: 379398 - DNA, 12 bp, Artificial Sequence
  Oligonucleotide primer for the detection of SNP TSC0063268
atgggtttatag

SEQ ID NO: 379399 - DNA, 12 bp, Artificial Sequence
  Oligonucleotide primer for the detection of SNP TSC0063269
ttctccataaac

SEQ ID NO: 379400 - DNA, 12 bp, Artificial Sequence
  Oligonucleotide primer for the detection of SNP TSC0063269
tatatacgattg

SEQ ID NO: 379401 - DNA, 12 bp, Artificial Sequence
  Oligonucleotide primer for the detection of SNP TSC0063269
cacacacaacta

SEQ ID NO: 379402 - DNA, 12 bp, Artificial Sequence
  Oligonucleotide primer for the detection of SNP TSC0063269
cacacacgacta

SEQ ID NO: 379403 - DNA, 12 bp, Artificial Sequence
  Oligonucleotide primer for the detection of SNP TSC0063269
ttttatgggttt

SEQ ID NO: 379404 - DNA, 12 bp, Artificial Sequence
  Oligonucleotide primer for the detection of SNP TSC0063273
ttgatttattta

SEQ ID NO: 379405 - DNA, 12 bp, Artificial Sequence
  Oligonucleotide primer for the detection of SNP TSC0000436
accctatctcaa

SEQ ID NO: 379406 - DNA, 12 bp, Artificial Sequence
  Oligonucleotide primer for the detection of SNP TSC0063274
acaatcaaattt

SEQ ID NO: 379407 - DNA, 12 bp, Artificial Sequence
  Oligonucleotide primer for the detection of SNP TSC0063274
gcaatcaaattt

SEQ ID NO: 379408 - DNA, 12 bp, Artificial Sequence
  Oligonucleotide primer for the detection of SNP TSC0063274
tgtttgaattga

SEQ ID NO: 379409 - DNA, 12 bp, Artificial Sequence
  Oligonucleotide primer for the detection of SNP TSC0008589
tctctctcatta

SEQ ID NO: 379410 - DNA, 12 bp, Artificial Sequence
  Oligonucleotide primer for the detection of SNP TSC0008589
tctctctcgtta

SEQ ID NO: 379411 - DNA, 12 bp, Artificial Sequence
  Oligonucleotide primer for the detection of SNP TSC0008589
aagtaaattatt

SEQ ID NO: 379412 - DNA, 12 bp, Artificial Sequence
  Oligonucleotide primer for the detection of SNP TSC0008589
aaaaacaaacta

SEQ ID NO: 379413 - DNA, 12 bp, Artificial Sequence
  Oligonucleotide primer for the detection of SNP TSC0008590
ttatataacata

SEQ ID NO: 379414 - DNA, 12 bp, Artificial Sequence
  Oligonucleotide primer for the detection of SNP TSC0008590
aagaatgaaatg

SEQ ID NO: 379415 - DNA, 12 bp, Artificial Sequence
  Oligonucleotide primer for the detection of SNP TSC0008590
tgtgtagtatat

SEQ ID NO: 379416 - DNA, 12 bp, Artificial Sequence
  Oligonucleotide primer for the detection of SNP TSC0008591
tttaattctatc

SEQ ID NO: 379417 - DNA, 12 bp, Artificial Sequence
  Oligonucleotide primer for the detection of SNP TSC0008591
ttaaagttaaaa

SEQ ID NO: 379418 - DNA, 12 bp, Artificial Sequence
  Oligonucleotide primer for the detection of SNP TSC0063277
atctcgaataat

SEQ ID NO: 379419 - DNA, 12 bp, Artificial Sequence
  Oligonucleotide primer for the detection of SNP TSC0063277
atgtgggtttgg

SEQ ID NO: 379420 - DNA, 12 bp, Artificial Sequence
  Oligonucleotide primer for the detection of SNP TSC0006735
caccccaatccc

SEQ ID NO: 379421 - DNA, 12 bp, Artificial Sequence
  Oligonucleotide primer for the detection of SNP TSC0006735
caccccgatccc

SEQ ID NO: 379422 - DNA, 12 bp, Artificial Sequence
  Oligonucleotide primer for the detection of SNP TSC0006735
ttgagtatggaa

SEQ ID NO: 379423 - DNA, 12 bp, Artificial Sequence
  Oligonucleotide primer for the detection of SNP TSC0006736
cttactaaatat

SEQ ID NO: 379424 - DNA, 12 bp, Artificial Sequence
  Oligonucleotide primer for the detection of SNP TSC0006736
cccccaccccaa

SEQ ID NO: 379425 - DNA, 12 bp, Artificial Sequence
  Oligonucleotide primer for the detection of SNP TSC0006736
cccccaccccga

SEQ ID NO: 379426 - DNA, 12 bp, Artificial Sequence
  Oligonucleotide primer for the detection of SNP TSC0006736
tttgttgagtat

SEQ ID NO: 379427 - DNA, 12 bp, Artificial Sequence
  Oligonucleotide primer for the detection of SNP TSC0009962
cttacccaaacc

SEQ ID NO: 379428 - DNA, 12 bp, Artificial Sequence
  Oligonucleotide primer for the detection of SNP TSC0009962
agttgagattag

SEQ ID NO: 379429 - DNA, 12 bp, Artificial Sequence
  Oligonucleotide primer for the detection of SNP TSC0009962
aactaaaatcaa

SEQ ID NO: 379430 - DNA, 12 bp, Artificial Sequence
  Oligonucleotide primer for the detection of SNP TSC0009962
tttatttaggtt

SEQ ID NO: 379431 - DNA, 12 bp, Artificial Sequence
  Oligonucleotide primer for the detection of SNP TSC0009963
aactaaaaactc

SEQ ID NO: 379432 - DNA, 12 bp, Artificial Sequence
  Oligonucleotide primer for the detection of SNP TSC0063280
atgaatggatgg

SEQ ID NO: 379433 - DNA, 12 bp, Artificial Sequence
  Oligonucleotide primer for the detection of SNP TSC0063280
atgaacggatgg

SEQ ID NO: 379434 - DNA, 12 bp, Artificial Sequence
  Oligonucleotide primer for the detection of SNP TSC0063281
aggggttttttt

SEQ ID NO: 379435 - DNA, 12 bp, Artificial Sequence
  Oligonucleotide primer for the detection of SNP TSC0007709
tttaaatccatt

SEQ ID NO: 379436 - DNA, 12 bp, Artificial Sequence
  Oligonucleotide primer for the detection of SNP TSC0007709
attagtttttta

SEQ ID NO: 379437 - DNA, 12 bp, Artificial Sequence
  Oligonucleotide primer for the detection of SNP TSC0007710
ttgtaatttgga

SEQ ID NO: 379438 - DNA, 12 bp, Artificial Sequence
  Oligonucleotide primer for the detection of SNP TSC0001661
aaacactcccac

SEQ ID NO: 379439 - DNA, 12 bp, Artificial Sequence
  Oligonucleotide primer for the detection of SNP TSC0063282
tactcaccctat

SEQ ID NO: 379440 - DNA, 12 bp, Artificial Sequence
  Oligonucleotide primer for the detection of SNP TSC0063288
aaatcttaattt

SEQ ID NO: 379441 - DNA, 12 bp, Artificial Sequence
  Oligonucleotide primer for the detection of SNP TSC0063288
tgtagttaataa

SEQ ID NO: 379442 - DNA, 12 bp, Artificial Sequence
  Oligonucleotide primer for the detection of SNP TSC0063288
cgtagttaataa

SEQ ID NO: 379443 - DNA, 12 bp, Artificial Sequence
  Oligonucleotide primer for the detection of SNP TSC0063288
cgcaattaataa

SEQ ID NO: 379444 - DNA, 12 bp, Artificial Sequence
  Oligonucleotide primer for the detection of SNP TSC0063288
ggattttagttt

SEQ ID NO: 379445 - DNA, 12 bp, Artificial Sequence
  Oligonucleotide primer for the detection of SNP TSC0063290
ataaatcatact

SEQ ID NO: 379446 - DNA, 12 bp, Artificial Sequence
  Oligonucleotide primer for the detection of SNP TSC0009101
atttataaaaat

SEQ ID NO: 379447 - DNA, 12 bp, Artificial Sequence
  Oligonucleotide primer for the detection of SNP TSC0009101
ggttaggtggga

SEQ ID NO: 379448 - DNA, 12 bp, Artificial Sequence
  Oligonucleotide primer for the detection of SNP TSC0009101
atttgtggaaat

SEQ ID NO: 379449 - DNA, 12 bp, Artificial Sequence
  Oligonucleotide primer for the detection of SNP TSC0063294
aacccaaacttc

SEQ ID NO: 379450 - DNA, 12 bp, Artificial Sequence
  Oligonucleotide primer for the detection of SNP TSC0063294
aacataatctta

SEQ ID NO: 379451 - DNA, 12 bp, Artificial Sequence
  Oligonucleotide primer for the detection of SNP TSC0063294
aatttagatttt

SEQ ID NO: 379452 - DNA, 12 bp, Artificial Sequence
  Oligonucleotide primer for the detection of SNP TSC0063295
actatatattaa

SEQ ID NO: 379453 - DNA, 12 bp, Artificial Sequence
  Oligonucleotide primer for the detection of SNP TSC0063295
tttttaagaatt

SEQ ID NO: 379454 - DNA, 12 bp, Artificial Sequence
  Oligonucleotide primer for the detection of SNP TSC0001113
tttcgttagtgt

SEQ ID NO: 379455 - DNA, 12 bp, Artificial Sequence
  Oligonucleotide primer for the detection of SNP TSC0001113
tttcaccaatat

SEQ ID NO: 379456 - DNA, 12 bp, Artificial Sequence
  Oligonucleotide primer for the detection of SNP TSC0001113
tttcgccaatat

SEQ ID NO: 379457 - DNA, 12 bp, Artificial Sequence
  Oligonucleotide primer for the detection of SNP TSC0001113
aattgttaagaa

SEQ ID NO: 379458 - DNA, 12 bp, Artificial Sequence
  Oligonucleotide primer for the detection of SNP TSC0001114
aaaacatacact

SEQ ID NO: 379459 - DNA, 12 bp, Artificial Sequence
  Oligonucleotide primer for the detection of SNP TSC0001114
gaagaaattatt

SEQ ID NO: 379460 - DNA, 12 bp, Artificial Sequence
  Oligonucleotide primer for the detection of SNP TSC0063297
tttaatttttat

SEQ ID NO: 379461 - DNA, 12 bp, Artificial Sequence
  Oligonucleotide primer for the detection of SNP TSC0063297
tattgtttatta

SEQ ID NO: 379462 - DNA, 12 bp, Artificial Sequence
  Oligonucleotide primer for the detection of SNP TSC0063297
tatcgtttatta

SEQ ID NO: 379463 - DNA, 12 bp, Artificial Sequence
  Oligonucleotide primer for the detection of SNP TSC0063298
aactaccacttc

SEQ ID NO: 379464 - DNA, 12 bp, Artificial Sequence
  Oligonucleotide primer for the detection of SNP TSC0063300
taaccataaaaa

SEQ ID NO: 379465 - DNA, 12 bp, Artificial Sequence
  Oligonucleotide primer for the detection of SNP TSC0063300
gtattgatgatt

SEQ ID NO: 379466 - DNA, 12 bp, Artificial Sequence
  Oligonucleotide primer for the detection of SNP TSC0063300
atggttataaag

SEQ ID NO: 379467 - DNA, 12 bp, Artificial Sequence
  Oligonucleotide primer for the detection of SNP TSC0063301
caataaaatttc

SEQ ID NO: 379468 - DNA, 12 bp, Artificial Sequence
  Oligonucleotide primer for the detection of SNP TSC0063301
ttaatagttatc

SEQ ID NO: 379469 - DNA, 12 bp, Artificial Sequence
  Oligonucleotide primer for the detection of SNP TSC0063301
tcaacaatcacc

SEQ ID NO: 379470 - DNA, 12 bp, Artificial Sequence
  Oligonucleotide primer for the detection of SNP TSC0063301
taataggatttt

SEQ ID NO: 379471 - DNA, 12 bp, Artificial Sequence
  Oligonucleotide primer for the detection of SNP TSC0063301
taataggatttc

SEQ ID NO: 379472 - DNA, 12 bp, Artificial Sequence
  Oligonucleotide primer for the detection of SNP TSC0063302
acaaattttatt

SEQ ID NO: 379473 - DNA, 12 bp, Artificial Sequence
  Oligonucleotide primer for the detection of SNP TSC0063302
taagtataaaaa

SEQ ID NO: 379474 - DNA, 12 bp, Artificial Sequence
  Oligonucleotide primer for the detection of SNP TSC0007575
ttaatttcgtaa

SEQ ID NO: 379475 - DNA, 12 bp, Artificial Sequence
  Oligonucleotide primer for the detection of SNP TSC0007575
ctttcttcttaa

SEQ ID NO: 379476 - DNA, 12 bp, Artificial Sequence
  Oligonucleotide primer for the detection of SNP TSC0007575
attagtttcgta

SEQ ID NO: 379477 - DNA, 12 bp, Artificial Sequence
  Oligonucleotide primer for the detection of SNP TSC0001483
atacataaactt

SEQ ID NO: 379478 - DNA, 12 bp, Artificial Sequence
  Oligonucleotide primer for the detection of SNP TSC0001484
ctttttactcaa

SEQ ID NO: 379479 - DNA, 12 bp, Artificial Sequence
  Oligonucleotide primer for the detection of SNP TSC0001484
agttaaagtaat

SEQ ID NO: 379480 - DNA, 12 bp, Artificial Sequence
  Oligonucleotide primer for the detection of SNP TSC0001484
aaccaaaacaac

SEQ ID NO: 379481 - DNA, 12 bp, Artificial Sequence
  Oligonucleotide primer for the detection of SNP TSC0000821
ataatataaacc

SEQ ID NO: 379482 - DNA, 12 bp, Artificial Sequence
  Oligonucleotide primer for the detection of SNP TSC0000821
caacctcgacct

SEQ ID NO: 379483 - DNA, 12 bp, Artificial Sequence
  Oligonucleotide primer for the detection of SNP TSC0000821
tgatgtaagttt

SEQ ID NO: 379484 - DNA, 12 bp, Artificial Sequence
  Oligonucleotide primer for the detection of SNP TSC0000822
gataaggtttta

SEQ ID NO: 379485 - DNA, 12 bp, Artificial Sequence
  Oligonucleotide primer for the detection of SNP TSC0000822
aaattgggtaat

SEQ ID NO: 379486 - DNA, 12 bp, Artificial Sequence
  Oligonucleotide primer for the detection of SNP TSC0063303
tcgattttttag

SEQ ID NO: 379487 - DNA, 12 bp, Artificial Sequence
  Oligonucleotide primer for the detection of SNP TSC0063303
tcaacctcctaa

SEQ ID NO: 379488 - DNA, 12 bp, Artificial Sequence
  Oligonucleotide primer for the detection of SNP TSC0063303
tcgacctcctaa

SEQ ID NO: 379489 - DNA, 12 bp, Artificial Sequence
  Oligonucleotide primer for the detection of SNP TSC0063303
agaatgatgtaa

SEQ ID NO: 379490 - DNA, 12 bp, Artificial Sequence
  Oligonucleotide primer for the detection of SNP TSC0063304
tatataaattac

SEQ ID NO: 379491 - DNA, 12 bp, Artificial Sequence
  Oligonucleotide primer for the detection of SNP TSC0063304
gaagtaaaagta

SEQ ID NO: 379492 - DNA, 12 bp, Artificial Sequence
  Oligonucleotide primer for the detection of SNP TSC0063304
tgtataggttat

SEQ ID NO: 379493 - DNA, 12 bp, Artificial Sequence
  Oligonucleotide primer for the detection of SNP TSC0063310
gtggaagaaggg

SEQ ID NO: 379494 - DNA, 12 bp, Artificial Sequence
  Oligonucleotide primer for the detection of SNP TSC0063310
agattaagaatt

SEQ ID NO: 379495 - DNA, 12 bp, Artificial Sequence
  Oligonucleotide primer for the detection of SNP TSC0063311
aatctctctatc

SEQ ID NO: 379496 - DNA, 12 bp, Artificial Sequence
  Oligonucleotide primer for the detection of SNP TSC0063311
tttagtttaagg

SEQ ID NO: 379497 - DNA, 12 bp, Artificial Sequence
  Oligonucleotide primer for the detection of SNP TSC0007095
tcaatataactt

SEQ ID NO: 379498 - DNA, 12 bp, Artificial Sequence
  Oligonucleotide primer for the detection of SNP TSC0007095
attatttatatt

SEQ ID NO: 379499 - DNA, 12 bp, Artificial Sequence
  Oligonukleotid-Primer
atactattcata

SEQ ID NO: 379500 - DNA, 12 bp, Artificial Sequence
  Oligonucleotide primer for the detection of SNP TSC0007095
ttaatgtaattt

SEQ ID NO: 379501 - DNA, 12 bp, Artificial Sequence
  Oligonucleotide primer for the detection of SNP TSC0063312
gatatagtgaat

SEQ ID NO: 379502 - DNA, 12 bp, Artificial Sequence
  Oligonucleotide primer for the detection of SNP TSC0063313
atacattactaa

SEQ ID NO: 379503 - DNA, 12 bp, Artificial Sequence
  Oligonukleotid-Primer
attttaaaggat

SEQ ID NO: 379504 - DNA, 12 bp, Artificial Sequence
  Oligonucleotide primer for the detection of SNP TSC0063313
aattccaaaaaa

SEQ ID NO: 379505 - DNA, 12 bp, Artificial Sequence
  Oligonucleotide primer for the detection of SNP TSC0063313
atatattattgg

SEQ ID NO: 379506 - DNA, 12 bp, Artificial Sequence
  Oligonucleotide primer for the detection of SNP TSC0063314
aattactaaaac

SEQ ID NO: 379507 - DNA, 12 bp, Artificial Sequence
  Oligonucleotide primer for the detection of SNP TSC0063314
gaattgttttta

SEQ ID NO: 379508 - DNA, 12 bp, Artificial Sequence
  Oligonucleotide primer for the detection of SNP TSC0063315
ctttacatacat

SEQ ID NO: 379509 - DNA, 12 bp, Artificial Sequence
  Oligonucleotide primer for the detection of SNP TSC0063315
attaattgattt

SEQ ID NO: 379510 - DNA, 12 bp, Artificial Sequence
  Oligonucleotide primer for the detection of SNP TSC0063315
atcaattaaccc

SEQ ID NO: 379511 - DNA, 12 bp, Artificial Sequence
  Oligonucleotide primer for the detection of SNP TSC0063315
ttttatatgtat

SEQ ID NO: 379512 - DNA, 12 bp, Artificial Sequence
  Oligonucleotide primer for the detection of SNP TSC0063316
aaaactccctct

SEQ ID NO: 379513 - DNA, 12 bp, Artificial Sequence
  Oligonucleotide primer for the detection of SNP TSC0063317
atcactaaaaat

SEQ ID NO: 379514 - DNA, 12 bp, Artificial Sequence
  Oligonucleotide primer for the detection of SNP TSC0063318
aatatccctaat

SEQ ID NO: 379515 - DNA, 12 bp, Artificial Sequence
  Oligonukleotid-Primer
ttccaacactat

SEQ ID NO: 379516 - DNA, 12 bp, Artificial Sequence
  Oligonucleotide primer for the detection of SNP TSC0001271
agatgtggtggg

SEQ ID NO: 379517 - DNA, 12 bp, Artificial Sequence
  Oligonucleotide primer for the detection of SNP TSC0063324
tgaggttttgtt

SEQ ID NO: 379518 - DNA, 12 bp, Artificial Sequence
  Oligonucleotide primer for the detection of SNP TSC0063324
taaaactctact

SEQ ID NO: 379519 - DNA, 12 bp, Artificial Sequence
  Oligonukleotid-Primer
agggtaggattg

SEQ ID NO: 379520 - DNA, 12 bp, Artificial Sequence
  Oligonucleotide primer for the detection of SNP TSC0001300
actaaataaaac

SEQ ID NO: 379521 - DNA, 12 bp, Artificial Sequence
  Oligonucleotide primer for the detection of SNP TSC0001300
tttttgtaggga

SEQ ID NO: 379522 - DNA, 12 bp, Artificial Sequence
  Oligonucleotide primer for the detection of SNP TSC0001301
caaaaccactct

SEQ ID NO: 379523 - DNA, 12 bp, Artificial Sequence
  Oligonukleotid-Primer
tgtggagtttta

SEQ ID NO: 379524 - DNA, 12 bp, Artificial Sequence
  Oligonucleotide primer for the detection of SNP TSC0001301
tgcggagtttta

SEQ ID NO: 379525 - DNA, 12 bp, Artificial Sequence
  Oligonucleotide primer for the detection of SNP TSC0008673
attgtaggtttg

SEQ ID NO: 379526 - DNA, 12 bp, Artificial Sequence
  Oligonucleotide primer for the detection of SNP TSC0008673
atcgtaggtttg

SEQ ID NO: 379527 - DNA, 12 bp, Artificial Sequence
  Oligonucleotide primer for the detection of SNP TSC0008673
atcacaaaccta

SEQ ID NO: 379528 - DNA, 12 bp, Artificial Sequence
  Oligonucleotide primer for the detection of SNP TSC0008673
atcgcaaaccta

SEQ ID NO: 379529 - DNA, 12 bp, Artificial Sequence
  Oligonucleotide primer for the detection of SNP TSC0008673
gttttgggggat

SEQ ID NO: 379530 - DNA, 12 bp, Artificial Sequence
  Oligonucleotide primer for the detection of SNP TSC0001572
aaataattctcc

SEQ ID NO: 379531 - DNA, 12 bp, Artificial Sequence
  Oligonucleotide primer for the detection of SNP TSC0063327
gttattaagttt

SEQ ID NO: 379532 - DNA, 12 bp, Artificial Sequence
  Oligonucleotide primer for the detection of SNP TSC0063327
caccaaacctaa

SEQ ID NO: 379533 - DNA, 12 bp, Artificial Sequence
  Oligonucleotide primer for the detection of SNP TSC0063329
ttctacctttta

SEQ ID NO: 379534 - DNA, 12 bp, Artificial Sequence
  Oligonucleotide primer for the detection of SNP TSC0063329
taggagtagatt

SEQ ID NO: 379535 - DNA, 12 bp, Artificial Sequence
  Oligonukleotid-Primer
taatttccattt

SEQ ID NO: 379536 - DNA, 12 bp, Artificial Sequence
  Oligonucleotide primer for the detection of SNP TSC0000564
tttagaataatg

SEQ ID NO: 379537 - DNA, 12 bp, Artificial Sequence
  Oligonucleotide primer for the detection of SNP TSC0063330
aacttctcacta

SEQ ID NO: 379538 - DNA, 12 bp, Artificial Sequence
  Oligonucleotide primer for the detection of SNP TSC0063330
aaagatagaaaa

SEQ ID NO: 379539 - DNA, 12 bp, Artificial Sequence
  Oligonukleotid-Primer
tctcgttaataa

SEQ ID NO: 379540 - DNA, 12 bp, Artificial Sequence
  Oligonucleotide primer for the detection of SNP TSC0000620
gttagatggttt

SEQ ID NO: 379541 - DNA, 12 bp, Artificial Sequence
  Oligonucleotide primer for the detection of SNP TSC0000620
actaaataactc

SEQ ID NO: 379542 - DNA, 12 bp, Artificial Sequence
  Oligonucleotide primer for the detection of SNP TSC0000620
tttcgttggtag

SEQ ID NO: 379543 - DNA, 12 bp, Artificial Sequence
  Oligonucleotide primer for the detection of SNP TSC0000621
catacctaaact

SEQ ID NO: 379544 - DNA, 12 bp, Artificial Sequence
  Oligonucleotide primer for the detection of SNP TSC0000621
aggaagttattg

SEQ ID NO: 379545 - DNA, 12 bp, Artificial Sequence
  Oligonucleotide primer for the detection of SNP TSC0000808
tagtgagttaag

SEQ ID NO: 379546 - DNA, 12 bp, Artificial Sequence
  Oligonucleotide primer for the detection of SNP TSC0063332
tctacaataaac

SEQ ID NO: 379547 - DNA, 12 bp, Artificial Sequence
  Oligonukleotid-Primer
ggtaattttgtt

SEQ ID NO: 379548 - DNA, 12 bp, Artificial Sequence
  Oligonucleotide primer for the detection of SNP TSC0063332
ctttatcaaaaa

SEQ ID NO: 379549 - DNA, 12 bp, Artificial Sequence
  Oligonucleotide primer for the detection of SNP TSC0063332
tatagtgaattt

SEQ ID NO: 379550 - DNA, 12 bp, Artificial Sequence
  Oligonucleotide primer for the detection of SNP TSC0063333
aaaaaactcatt

SEQ ID NO: 379551 - DNA, 12 bp, Artificial Sequence
  Oligonucleotide primer for the detection of SNP TSC0063333
gatattttaata

SEQ ID NO: 379552 - DNA, 12 bp, Artificial Sequence
  Oligonucleotide primer for the detection of SNP TSC0063334
aaaacattctac

SEQ ID NO: 379553 - DNA, 12 bp, Artificial Sequence
  Oligonucleotide primer for the detection of SNP TSC0063334
ttttaatttatg

SEQ ID NO: 379554 - DNA, 12 bp, Artificial Sequence
  Oligonucleotide primer for the detection of SNP TSC0063334
tcaatccataaa

SEQ ID NO: 379555 - DNA, 12 bp, Artificial Sequence
  Oligonucleotide primer for the detection of SNP TSC0063336
ttctctttatac

SEQ ID NO: 379556 - DNA, 12 bp, Artificial Sequence
  Oligonucleotide primer for the detection of SNP TSC0063337
tgtttagattat

SEQ ID NO: 379557 - DNA, 12 bp, Artificial Sequence
  Oligonucleotide primer for the detection of SNP TSC0063337
tacccaaattat

SEQ ID NO: 379558 - DNA, 12 bp, Artificial Sequence
  Oligonucleotide primer for the detection of SNP TSC0063337
aagtaagtaaaa

SEQ ID NO: 379559 - DNA, 12 bp, Artificial Sequence
  Oligonucleotide primer for the detection of SNP TSC0063341
tcaatttacata

SEQ ID NO: 379560 - DNA, 12 bp, Artificial Sequence
  Oligonucleotide primer for the detection of SNP TSC0063341
attttatctcat

SEQ ID NO: 379561 - DNA, 12 bp, Artificial Sequence
  Oligonucleotide primer for the detection of SNP TSC0063342
ggttatgtaaag

SEQ ID NO: 379562 - DNA, 12 bp, Artificial Sequence
  Oligonucleotide primer for the detection of SNP TSC0063343
ttttattttcta

SEQ ID NO: 379563 - DNA, 12 bp, Artificial Sequence
  Oligonukleotid-Primer
aaacaatattcc

SEQ ID NO: 379564 - DNA, 12 bp, Artificial Sequence
  Oligonucleotide primer for the detection of SNP TSC0063344
agattttggtaa

SEQ ID NO: 379565 - DNA, 12 bp, Artificial Sequence
  Oligonucleotide primer for the detection of SNP TSC0063345
gtagtaatggta

SEQ ID NO: 379566 - DNA, 12 bp, Artificial Sequence
  Oligonucleotide primer for the detection of SNP TSC0063352
ttaaatatttac

SEQ ID NO: 379567 - DNA, 12 bp, Artificial Sequence
  Oligonucleotide primer for the detection of SNP TSC0063353
tttttaagtagc

SEQ ID NO: 379568 - DNA, 12 bp, Artificial Sequence
  Oligonucleotide primer for the detection of SNP TSC0063354
cttttataccta

SEQ ID NO: 379569 - DNA, 12 bp, Artificial Sequence
  Oligonucleotide primer for the detection of SNP TSC0063354
atatagttatat

SEQ ID NO: 379570 - DNA, 12 bp, Artificial Sequence
  Oligonucleotide primer for the detection of SNP TSC0063355
ctaatccaactt

SEQ ID NO: 379571 - DNA, 12 bp, Artificial Sequence
  Oligonucleotide primer for the detection of SNP TSC0063355
ggtagggaagtg

SEQ ID NO: 379572 - DNA, 12 bp, Artificial Sequence
  Oligonucleotide primer for the detection of SNP TSC0063356
acaaacaccaaa

SEQ ID NO: 379573 - DNA, 12 bp, Artificial Sequence
  Oligonucleotide primer for the detection of SNP TSC0063356
tagataaatatt

SEQ ID NO: 379574 - DNA, 12 bp, Artificial Sequence
  Oligonucleotide primer for the detection of SNP TSC0063361
ctatctacaaaa

SEQ ID NO: 379575 - DNA, 12 bp, Artificial Sequence
  Oligonucleotide primer for the detection of SNP TSC0063361
ctatctacgaaa

SEQ ID NO: 379576 - DNA, 12 bp, Artificial Sequence
  Oligonucleotide primer for the detection of SNP TSC0063361
gataaagagggt

SEQ ID NO: 379577 - DNA, 12 bp, Artificial Sequence
  Oligonucleotide primer for the detection of SNP TSC0063361
ttgtttgtggag

SEQ ID NO: 379578 - DNA, 12 bp, Artificial Sequence
  Oligonucleotide primer for the detection of SNP TSC0063361
ttgtttgcggag

SEQ ID NO: 379579 - DNA, 12 bp, Artificial Sequence
  Oligonukleotid-Primer
ttcctactaccg

SEQ ID NO: 379580 - DNA, 12 bp, Artificial Sequence
  Oligonucleotide primer for the detection of SNP TSC0063362
tttttgttgtcg

SEQ ID NO: 379581 - DNA, 12 bp, Artificial Sequence
  Oligonucleotide primer for the detection of SNP TSC0063363
aattttcttcct

SEQ ID NO: 379582 - DNA, 12 bp, Artificial Sequence
  Oligonucleotide primer for the detection of SNP TSC0063363
tatttggtagta

SEQ ID NO: 379583 - DNA, 12 bp, Artificial Sequence
  Oligonucleotide primer for the detection of SNP TSC0063363
tattcggtagta

SEQ ID NO: 379584 - DNA, 12 bp, Artificial Sequence
  Oligonucleotide primer for the detection of SNP TSC0063363
cccgacaacaaa

SEQ ID NO: 379585 - DNA, 12 bp, Artificial Sequence
  Oligonucleotide primer for the detection of SNP TSC0063364
gtgtttagtgaa

SEQ ID NO: 379586 - DNA, 12 bp, Artificial Sequence
  Oligonucleotide primer for the detection of SNP TSC0063365
taggttaattta

SEQ ID NO: 379587 - DNA, 12 bp, Artificial Sequence
  Oligonucleotide primer for the detection of SNP TSC0063365
caaattaattta

SEQ ID NO: 379588 - DNA, 12 bp, Artificial Sequence
  Oligonucleotide primer for the detection of SNP TSC0063365
atttggaggaat

SEQ ID NO: 379589 - DNA, 12 bp, Artificial Sequence
  Oligonucleotide primer for the detection of SNP TSC0063366
accaatcccctc

SEQ ID NO: 379590 - DNA, 12 bp, Artificial Sequence
  Oligonucleotide primer for the detection of SNP TSC0063366
gaatatgataaa

SEQ ID NO: 379591 - DNA, 12 bp, Artificial Sequence
  Oligonucleotide primer for the detection of SNP TSC0063367
tattgaaagtaa

SEQ ID NO: 379592 - DNA, 12 bp, Artificial Sequence
  Oligonucleotide primer for the detection of SNP TSC0063372
taaaaaatcttt

SEQ ID NO: 379593 - DNA, 12 bp, Artificial Sequence
  Oligonucleotide primer for the detection of SNP TSC0063372
attttttaataa

SEQ ID NO: 379594 - DNA, 12 bp, Artificial Sequence
  Oligonucleotide primer for the detection of SNP TSC0063372
taagagattttt

SEQ ID NO: 379595 - DNA, 12 bp, Artificial Sequence
  Oligonucleotide primer for the detection of SNP TSC0063375
ttcacatacacc

SEQ ID NO: 379596 - DNA, 12 bp, Artificial Sequence
  Oligonucleotide primer for the detection of SNP TSC0063375
gatataatttta

SEQ ID NO: 379597 - DNA, 12 bp, Artificial Sequence
  Oligonucleotide primer for the detection of SNP TSC0063376
tttactcttaaa

SEQ ID NO: 379598 - DNA, 12 bp, Artificial Sequence
  Oligonucleotide primer for the detection of SNP TSC0063376
ggatgagtgttt

SEQ ID NO: 379599 - DNA, 12 bp, Artificial Sequence
  Oligonucleotide primer for the detection of SNP TSC0063377
atctcccacctc

SEQ ID NO: 379600 - DNA, 12 bp, Artificial Sequence
  Oligonucleotide primer for the detection of SNP TSC0063377
tatttaggaggc

SEQ ID NO: 379601 - DNA, 12 bp, Artificial Sequence
  Oligonucleotide primer for the detection of SNP TSC0063378
attatatactaa

SEQ ID NO: 379602 - DNA, 12 bp, Artificial Sequence
  Oligonucleotide primer for the detection of SNP TSC0063378
aattatgtgttg

SEQ ID NO: 379603 - DNA, 12 bp, Artificial Sequence
  Oligonucleotide primer for the detection of SNP TSC0063379
agttggagtgta

SEQ ID NO: 379604 - DNA, 12 bp, Artificial Sequence
  Oligonucleotide primer for the detection of SNP TSC0063381
atatcaataatc

SEQ ID NO: 379605 - DNA, 12 bp, Artificial Sequence
  Oligonucleotide primer for the detection of SNP TSC0063381
gggatgatgtat

SEQ ID NO: 379606 - DNA, 12 bp, Artificial Sequence
  Oligonucleotide primer for the detection of SNP TSC0063381
gggacgatgtat

SEQ ID NO: 379607 - DNA, 12 bp, Artificial Sequence
  Oligonucleotide primer for the detection of SNP TSC0063381
gggatgatgtac

SEQ ID NO: 379608 - DNA, 12 bp, Artificial Sequence
  Oligonucleotide primer for the detection of SNP TSC0063381
gggacgatgtac

SEQ ID NO: 379609 - DNA, 12 bp, Artificial Sequence
  Oligonucleotide primer for the detection of SNP TSC0063381
gtgttagtgatt

SEQ ID NO: 379610 - DNA, 12 bp, Artificial Sequence
  Oligonucleotide primer for the detection of SNP TSC0063381
gtgttagtgatc

SEQ ID NO: 379611 - DNA, 12 bp, Artificial Sequence
  Oligonucleotide primer for the detection of SNP TSC0063382
ctcctcatccac

SEQ ID NO: 379612 - DNA, 12 bp, Artificial Sequence
  Oligonucleotide primer for the detection of SNP TSC0063382
tgttggaatttg

SEQ ID NO: 379613 - DNA, 12 bp, Artificial Sequence
  Oligonucleotide primer for the detection of SNP TSC0063382
ctaaaacttaaa

SEQ ID NO: 379614 - DNA, 12 bp, Artificial Sequence
  Oligonucleotide primer for the detection of SNP TSC0063383
acactataaaac

SEQ ID NO: 379615 - DNA, 12 bp, Artificial Sequence
  Oligonucleotide primer for the detection of SNP TSC0063383
gtattataagat

SEQ ID NO: 379616 - DNA, 12 bp, Artificial Sequence
  Oligonucleotide primer for the detection of SNP TSC0063383
gtattataagac

SEQ ID NO: 379617 - DNA, 12 bp, Artificial Sequence
  Oligonucleotide primer for the detection of SNP TSC0063384
ttaaggttaggt

SEQ ID NO: 379618 - DNA, 12 bp, Artificial Sequence
  Oligonucleotide primer for the detection of SNP TSC0063384
ttaaggttaggc

SEQ ID NO: 379619 - DNA, 12 bp, Artificial Sequence
  Oligonucleotide primer for the detection of SNP TSC0063384
ccaaaattaaac

SEQ ID NO: 379620 - DNA, 12 bp, Artificial Sequence
  Oligonucleotide primer for the detection of SNP TSC0063384
gatatgggaatt

SEQ ID NO: 379621 - DNA, 12 bp, Artificial Sequence
  Oligonucleotide primer for the detection of SNP TSC0063384
gatatgggaatc

SEQ ID NO: 379622 - DNA, 12 bp, Artificial Sequence
  Oligonucleotide primer for the detection of SNP TSC0063387
caccaaaacctc

SEQ ID NO: 379623 - DNA, 12 bp, Artificial Sequence
  Oligonucleotide primer for the detection of SNP TSC0063388
acccaataaaat

SEQ ID NO: 379624 - DNA, 12 bp, Artificial Sequence
  Oligonucleotide primer for the detection of SNP TSC0063388
atacacctctaa

SEQ ID NO: 379625 - DNA, 12 bp, Artificial Sequence
  Oligonucleotide primer for the detection of SNP TSC0063390
ggggataatttg

SEQ ID NO: 379626 - DNA, 12 bp, Artificial Sequence
  Oligonucleotide primer for the detection of SNP TSC0063391
atttttaatcct

SEQ ID NO: 379627 - DNA, 12 bp, Artificial Sequence
  Oligonucleotide primer for the detection of SNP TSC0063391
agtgttatggta

SEQ ID NO: 379628 - DNA, 12 bp, Artificial Sequence
  Oligonucleotide primer for the detection of SNP TSC0004671
gttttagaagtg

SEQ ID NO: 379629 - DNA, 12 bp, Artificial Sequence
  Oligonucleotide primer for the detection of SNP TSC0063392
aatttcaacttc

SEQ ID NO: 379630 - DNA, 12 bp, Artificial Sequence
  Oligonucleotide primer for the detection of SNP TSC0063392
tagttgatgtaa

SEQ ID NO: 379631 - DNA, 12 bp, Artificial Sequence
  Oligonucleotide primer for the detection of SNP TSC0063392
tagttgacgtaa

SEQ ID NO: 379632 - DNA, 12 bp, Artificial Sequence
  Oligonucleotide primer for the detection of SNP TSC0063394
caaaaatttaca

SEQ ID NO: 379633 - DNA, 12 bp, Artificial Sequence
  Oligonucleotide primer for the detection of SNP TSC0063394
taagaatttata

SEQ ID NO: 379634 - DNA, 12 bp, Artificial Sequence
  Oligonucleotide primer for the detection of SNP TSC0005947
ttgttagttttc

SEQ ID NO: 379635 - DNA, 12 bp, Artificial Sequence
  Oligonucleotide primer for the detection of SNP TSC0005947
ttaccaactttc

SEQ ID NO: 379636 - DNA, 12 bp, Artificial Sequence
  Oligonucleotide primer for the detection of SNP TSC0005947
tatttaatgaat

SEQ ID NO: 379637 - DNA, 12 bp, Artificial Sequence
  Oligonucleotide primer for the detection of SNP TSC0063401
taaggagaaatg

SEQ ID NO: 379638 - DNA, 12 bp, Artificial Sequence
  Oligonucleotide primer for the detection of SNP TSC0063402
cctacccaaaaa

SEQ ID NO: 379639 - DNA, 12 bp, Artificial Sequence
  Oligonucleotide primer for the detection of SNP TSC0063402
agtttatttatg

SEQ ID NO: 379640 - DNA, 12 bp, Artificial Sequence
  Oligonucleotide primer for the detection of SNP TSC0063402
aattcattcata

SEQ ID NO: 379641 - DNA, 12 bp, Artificial Sequence
  Oligonucleotide primer for the detection of SNP TSC0063402
tttgtttagggg

SEQ ID NO: 379642 - DNA, 12 bp, Artificial Sequence
  Oligonucleotide primer for the detection of SNP TSC0063405
ttttttataagt

SEQ ID NO: 379643 - DNA, 12 bp, Artificial Sequence
  Oligonucleotide primer for the detection of SNP TSC0063405
tttttcataaat

SEQ ID NO: 379644 - DNA, 12 bp, Artificial Sequence
  Oligonucleotide primer for the detection of SNP TSC0008384
ttttcaacctat

SEQ ID NO: 379645 - DNA, 12 bp, Artificial Sequence
  Oligonucleotide primer for the detection of SNP TSC0063412
tcattaacatta

SEQ ID NO: 379646 - DNA, 12 bp, Artificial Sequence
  Oligonucleotide primer for the detection of SNP TSC0063414
gggggttagggg

SEQ ID NO: 379647 - DNA, 12 bp, Artificial Sequence
  Oligonucleotide primer for the detection of SNP TSC0063414
taaagagtaaat

SEQ ID NO: 379648 - DNA, 12 bp, Artificial Sequence
  Oligonucleotide primer for the detection of SNP TSC0063415
ccatcaacttcc

SEQ ID NO: 379649 - DNA, 12 bp, Artificial Sequence
  Oligonucleotide primer for the detection of SNP TSC0063415
tataaacttcta

SEQ ID NO: 379650 - DNA, 12 bp, Artificial Sequence
  Oligonucleotide primer for the detection of SNP TSC0063418
aaataaatgata

SEQ ID NO: 379651 - DNA, 12 bp, Artificial Sequence
  Oligonucleotide primer for the detection of SNP TSC0063419
taatatttaaga

SEQ ID NO: 379652 - DNA, 12 bp, Artificial Sequence
  Oligonucleotide primer for the detection of SNP TSC0063420
ttctaaaaaact

SEQ ID NO: 379653 - DNA, 12 bp, Artificial Sequence
  Oligonucleotide primer for the detection of SNP TSC0063420
atatattataaa

SEQ ID NO: 379654 - DNA, 12 bp, Artificial Sequence
  Oligonucleotide primer for the detection of SNP TSC0063421
tttatctcacta

SEQ ID NO: 379655 - DNA, 12 bp, Artificial Sequence
  Oligonucleotide primer for the detection of SNP TSC0063421
tttatctcgcta

SEQ ID NO: 379656 - DNA, 12 bp, Artificial Sequence
  Oligonucleotide primer for the detection of SNP TSC0063421
aaagaaagtttt

SEQ ID NO: 379657 - DNA, 12 bp, Artificial Sequence
  Oligonucleotide primer for the detection of SNP TSC0063421
tttatttcgttg

SEQ ID NO: 379658 - DNA, 12 bp, Artificial Sequence
  Oligonucleotide primer for the detection of SNP TSC0008633
tttctaaatatt

SEQ ID NO: 379659 - DNA, 12 bp, Artificial Sequence
  Oligonucleotide primer for the detection of SNP TSC0008634
ttattaataatt

SEQ ID NO: 379660 - DNA, 12 bp, Artificial Sequence
  Oligonucleotide primer for the detection of SNP TSC0008634
tttttattgagt

SEQ ID NO: 379661 - DNA, 12 bp, Artificial Sequence
  Oligonucleotide primer for the detection of SNP TSC0008634
tttttatcgagt

SEQ ID NO: 379662 - DNA, 12 bp, Artificial Sequence
  Oligonucleotide primer for the detection of SNP TSC0008634
ctttttaccaaa

SEQ ID NO: 379663 - DNA, 12 bp, Artificial Sequence
  Oligonucleotide primer for the detection of SNP TSC0008634
ctttttaccgaa

SEQ ID NO: 379664 - DNA, 12 bp, Artificial Sequence
  Oligonucleotide primer for the detection of SNP TSC0006529
acaaaacattcc

SEQ ID NO: 379665 - DNA, 12 bp, Artificial Sequence
  Oligonucleotide primer for the detection of SNP TSC0006529
gtagttaagtta

SEQ ID NO: 379666 - DNA, 12 bp, Artificial Sequence
  Oligonucleotide primer for the detection of SNP TSC0006529
acaaccaaacta

SEQ ID NO: 379667 - DNA, 12 bp, Artificial Sequence
  Oligonucleotide primer for the detection of SNP TSC0063423
aatattacctaa

SEQ ID NO: 379668 - DNA, 12 bp, Artificial Sequence
  Oligonucleotide primer for the detection of SNP TSC0063423
ttttggggaatt

SEQ ID NO: 379669 - DNA, 12 bp, Artificial Sequence
  Oligonucleotide primer for the detection of SNP TSC0063423
atccttaaaaaa

SEQ ID NO: 379670 - DNA, 12 bp, Artificial Sequence
  Oligonucleotide primer for the detection of SNP TSC0063423
agtgttatttgg

SEQ ID NO: 379671 - DNA, 12 bp, Artificial Sequence
  Oligonucleotide primer for the detection of SNP TSC0063424
atcaccccaaat

SEQ ID NO: 379672 - DNA, 12 bp, Artificial Sequence
  Oligonucleotide primer for the detection of SNP TSC0063424
atttagggttgg

SEQ ID NO: 379673 - DNA, 12 bp, Artificial Sequence
  Oligonucleotide primer for the detection of SNP TSC0006439
tctctcctctcc

SEQ ID NO: 379674 - DNA, 12 bp, Artificial Sequence
  Oligonucleotide primer for the detection of SNP TSC0006439
tagagatattta

SEQ ID NO: 379675 - DNA, 12 bp, Artificial Sequence
  Oligonucleotide primer for the detection of SNP TSC0006440
ccaaatactatc

SEQ ID NO: 379676 - DNA, 12 bp, Artificial Sequence
  Oligonucleotide primer for the detection of SNP TSC0006440
ttaattattaaa

SEQ ID NO: 379677 - DNA, 12 bp, Artificial Sequence
  Oligonucleotide primer for the detection of SNP TSC0006440
ttaattaccaaa

SEQ ID NO: 379678 - DNA, 12 bp, Artificial Sequence
  Oligonucleotide primer for the detection of SNP TSC0006440
ttaaatattgtt

SEQ ID NO: 379679 - DNA, 12 bp, Artificial Sequence
  Oligonucleotide primer for the detection of SNP TSC0005924
tatacaatcaat

SEQ ID NO: 379680 - DNA, 12 bp, Artificial Sequence
  Oligonucleotide primer for the detection of SNP TSC0005924
tgtattttaaag

SEQ ID NO: 379681 - DNA, 12 bp, Artificial Sequence
  Oligonucleotide primer for the detection of SNP TSC0005924
tacactttaaaa

SEQ ID NO: 379682 - DNA, 12 bp, Artificial Sequence
  Oligonucleotide primer for the detection of SNP TSC0005924
tatataattaat

SEQ ID NO: 379683 - DNA, 12 bp, Artificial Sequence
  Oligonucleotide primer for the detection of SNP TSC0063425
atattttatact

SEQ ID NO: 379684 - DNA, 12 bp, Artificial Sequence
  Oligonucleotide primer for the detection of SNP TSC0063425
taggtagtaagg

SEQ ID NO: 379685 - DNA, 12 bp, Artificial Sequence
  Oligonucleotide primer for the detection of SNP TSC0063427
gaggtaaatttt

SEQ ID NO: 379686 - DNA, 12 bp, Artificial Sequence
  Oligonucleotide primer for the detection of SNP TSC0063427
aaaataaattct

SEQ ID NO: 379687 - DNA, 12 bp, Artificial Sequence
  Oligonucleotide primer for the detection of SNP TSC0063428
aaaccaccacat

SEQ ID NO: 379688 - DNA, 12 bp, Artificial Sequence
  Oligonucleotide primer for the detection of SNP TSC0063428
ttaaaaatagag

SEQ ID NO: 379689 - DNA, 12 bp, Artificial Sequence
  Oligonucleotide primer for the detection of SNP TSC0010335
tacccaccacca

SEQ ID NO: 379690 - DNA, 12 bp, Artificial Sequence
  Oligonucleotide primer for the detection of SNP TSC0010335
tgtttattatta

SEQ ID NO: 379691 - DNA, 12 bp, Artificial Sequence
  Oligonucleotide primer for the detection of SNP TSC0010336
aatttttacttt

SEQ ID NO: 379692 - DNA, 12 bp, Artificial Sequence
  Oligonucleotide primer for the detection of SNP TSC0010336
aaatattatatg

SEQ ID NO: 379693 - DNA, 12 bp, Artificial Sequence
  Oligonucleotide primer for the detection of SNP TSC0006554
tacccaccacta

SEQ ID NO: 379694 - DNA, 12 bp, Artificial Sequence
  Oligonucleotide primer for the detection of SNP TSC0005242
gggaagggagga

SEQ ID NO: 379695 - DNA, 12 bp, Artificial Sequence
  Oligonucleotide primer for the detection of SNP TSC0063429
actacaaatata

SEQ ID NO: 379696 - DNA, 12 bp, Artificial Sequence
  Oligonucleotide primer for the detection of SNP TSC0063430
ttaaagaattta

SEQ ID NO: 379697 - DNA, 12 bp, Artificial Sequence
  Oligonucleotide primer for the detection of SNP TSC0063431
taaaatactcct

SEQ ID NO: 379698 - DNA, 12 bp, Artificial Sequence
  Oligonucleotide primer for the detection of SNP TSC0063431
atatttaaggta

SEQ ID NO: 379699 - DNA, 12 bp, Artificial Sequence
  Oligonucleotide primer for the detection of SNP TSC0063432
ttttttagaaaa

SEQ ID NO: 379700 - DNA, 12 bp, Artificial Sequence
  Oligonucleotide primer for the detection of SNP TSC0063435
gattgttgatgt

SEQ ID NO: 379701 - DNA, 12 bp, Artificial Sequence
  Oligonucleotide primer for the detection of SNP TSC0063435
gatcgttgatgt

SEQ ID NO: 379702 - DNA, 12 bp, Artificial Sequence
  Oligonucleotide primer for the detection of SNP TSC0063435
gattgtcgatgt

SEQ ID NO: 379703 - DNA, 12 bp, Artificial Sequence
  Oligonucleotide primer for the detection of SNP TSC0063435
gatcgtcgatgt

SEQ ID NO: 379704 - DNA, 12 bp, Artificial Sequence
  Oligonucleotide primer for the detection of SNP TSC0063435
aaccaccaatac

SEQ ID NO: 379705 - DNA, 12 bp, Artificial Sequence
  Oligonucleotide primer for the detection of SNP TSC0063435
aaccaccgatac

SEQ ID NO: 379706 - DNA, 12 bp, Artificial Sequence
  Oligonucleotide primer for the detection of SNP TSC0063435
aaccgccaatac

SEQ ID NO: 379707 - DNA, 12 bp, Artificial Sequence
  Oligonucleotide primer for the detection of SNP TSC0063435
aaccgccgatac

SEQ ID NO: 379708 - DNA, 12 bp, Artificial Sequence
  Oligonucleotide primer for the detection of SNP TSC0063435
ttttttggaaga

SEQ ID NO: 379709 - DNA, 12 bp, Artificial Sequence
  Oligonucleotide primer for the detection of SNP TSC0063436
aattcaaataca

SEQ ID NO: 379710 - DNA, 12 bp, Artificial Sequence
  Oligonucleotide primer for the detection of SNP TSC0063436
aattcgaataca

SEQ ID NO: 379711 - DNA, 12 bp, Artificial Sequence
  Oligonucleotide primer for the detection of SNP TSC0063436
caaaatcctctc

SEQ ID NO: 379712 - DNA, 12 bp, Artificial Sequence
  Oligonucleotide primer for the detection of SNP TSC0063436
agtttgagtgta

SEQ ID NO: 379713 - DNA, 12 bp, Artificial Sequence
  Oligonucleotide primer for the detection of SNP TSC0063436
agttcgagtgta

SEQ ID NO: 379714 - DNA, 12 bp, Artificial Sequence
  Oligonucleotide primer for the detection of SNP TSC0010533
atttaaaattac

SEQ ID NO: 379715 - DNA, 12 bp, Artificial Sequence
  Oligonucleotide primer for the detection of SNP TSC0010533
tattgaatattg

SEQ ID NO: 379716 - DNA, 12 bp, Artificial Sequence
  Oligonucleotide primer for the detection of SNP TSC0063438
ctctttaatata

SEQ ID NO: 379717 - DNA, 12 bp, Artificial Sequence
  Oligonucleotide primer for the detection of SNP TSC0063438
aagaaaggaaat

SEQ ID NO: 379718 - DNA, 12 bp, Artificial Sequence
  Oligonucleotide primer for the detection of SNP TSC0063439
aaaatacaactt

SEQ ID NO: 379719 - DNA, 12 bp, Artificial Sequence
  Oligonucleotide primer for the detection of SNP TSC0063439
gaaatacaactt

SEQ ID NO: 379720 - DNA, 12 bp, Artificial Sequence
  Oligonucleotide primer for the detection of SNP TSC0063439
tgatattaagga

SEQ ID NO: 379721 - DNA, 12 bp, Artificial Sequence
  Oligonucleotide primer for the detection of SNP TSC0063440
agtaggtttagt

SEQ ID NO: 379722 - DNA, 12 bp, Artificial Sequence
  Oligonucleotide primer for the detection of SNP TSC0063440
aataaattcaac

SEQ ID NO: 379723 - DNA, 12 bp, Artificial Sequence
  Oligonucleotide primer for the detection of SNP TSC0063440
tagtagatgatg

SEQ ID NO: 379724 - DNA, 12 bp, Artificial Sequence
  Oligonucleotide primer for the detection of SNP TSC0005019
acttatcattac

SEQ ID NO: 379725 - DNA, 12 bp, Artificial Sequence
  Oligonucleotide primer for the detection of SNP TSC0005020
cccctcaaattt

SEQ ID NO: 379726 - DNA, 12 bp, Artificial Sequence
  Oligonucleotide primer for the detection of SNP TSC0005020
taataatgagtg

SEQ ID NO: 379727 - DNA, 12 bp, Artificial Sequence
  Oligonucleotide primer for the detection of SNP TSC0005021
ttagtaggaatg

SEQ ID NO: 379728 - DNA, 12 bp, Artificial Sequence
  Oligonucleotide primer for the detection of SNP TSC0063441
ttatatttttct

SEQ ID NO: 379729 - DNA, 12 bp, Artificial Sequence
  Oligonucleotide primer for the detection of SNP TSC0063441
taaatgggaaaa

SEQ ID NO: 379730 - DNA, 12 bp, Artificial Sequence
  Oligonucleotide primer for the detection of SNP TSC0063442
  unsure (3): unknown base
ttngttttaggt

SEQ ID NO: 379731 - DNA, 12 bp, Artificial Sequence
  Oligonucleotide primer for the detection of SNP TSC0063442
  unsure (4): unknown base
ttcnatcttaaa

SEQ ID NO: 379732 - DNA, 12 bp, Artificial Sequence
  Oligonucleotide primer for the detection of SNP TSC0063442
gttgagaaagat

SEQ ID NO: 379733 - DNA, 12 bp, Artificial Sequence
  Oligonucleotide primer for the detection of SNP TSC0004886
tattggaagtta

SEQ ID NO: 379734 - DNA, 12 bp, Artificial Sequence
  Oligonucleotide primer for the detection of SNP TSC0004888
ttctatatacaa

SEQ ID NO: 379735 - DNA, 12 bp, Artificial Sequence
  Oligonucleotide primer for the detection of SNP TSC0063443
cacttactaatc

SEQ ID NO: 379736 - DNA, 12 bp, Artificial Sequence
  Oligonucleotide primer for the detection of SNP TSC0063443
atggatttttgg

SEQ ID NO: 379737 - DNA, 12 bp, Artificial Sequence
  Oligonucleotide primer for the detection of SNP TSC0063444
aaaactctttat

SEQ ID NO: 379738 - DNA, 12 bp, Artificial Sequence
  Oligonucleotide primer for the detection of SNP TSC0063444
gattttttattc

SEQ ID NO: 379739 - DNA, 12 bp, Artificial Sequence
  Oligonucleotide primer for the detection of SNP TSC0063445
aaattaggaggt

SEQ ID NO: 379740 - DNA, 12 bp, Artificial Sequence
  Oligonucleotide primer for the detection of SNP TSC0063445
ttagtatgggga

SEQ ID NO: 379741 - DNA, 12 bp, Artificial Sequence
  Oligonucleotide primer for the detection of SNP TSC0063446
aaaatccaatac

SEQ ID NO: 379742 - DNA, 12 bp, Artificial Sequence
  Oligonucleotide primer for the detection of SNP TSC0063446
atacattcaata

SEQ ID NO: 379743 - DNA, 12 bp, Artificial Sequence
  Oligonucleotide primer for the detection of SNP TSC0063446
gaaatttaatat

SEQ ID NO: 379744 - DNA, 12 bp, Artificial Sequence
  Oligonucleotide primer for the detection of SNP TSC0063448
atttttggtatt

SEQ ID NO: 379745 - DNA, 12 bp, Artificial Sequence
  Oligonucleotide primer for the detection of SNP TSC0063448
atctttaacatt

SEQ ID NO: 379746 - DNA, 12 bp, Artificial Sequence
  Oligonucleotide primer for the detection of SNP TSC0063448
ttaaaaaatgtt

SEQ ID NO: 379747 - DNA, 12 bp, Artificial Sequence
  Oligonucleotide primer for the detection of SNP TSC0004901
aaacctatcctt

SEQ ID NO: 379748 - DNA, 12 bp, Artificial Sequence
  Oligonucleotide primer for the detection of SNP TSC0004901
ccacaatcacaa

SEQ ID NO: 379749 - DNA, 12 bp, Artificial Sequence
  Oligonucleotide primer for the detection of SNP TSC0004902
ttattgtaaggt

SEQ ID NO: 379750 - DNA, 12 bp, Artificial Sequence
  Oligonucleotide primer for the detection of SNP TSC0004902
ccattacaaaat

SEQ ID NO: 379751 - DNA, 12 bp, Artificial Sequence
  Oligonucleotide primer for the detection of SNP TSC0004902
aaaaatgggtaa

SEQ ID NO: 379752 - DNA, 12 bp, Artificial Sequence
  Oligonucleotide primer for the detection of SNP TSC0063451
tgaattatgtag

SEQ ID NO: 379753 - DNA, 12 bp, Artificial Sequence
  Oligonucleotide primer for the detection of SNP TSC0063453
tacccatactta

SEQ ID NO: 379754 - DNA, 12 bp, Artificial Sequence
  Oligonucleotide primer for the detection of SNP TSC0063453
tttaatatagat

SEQ ID NO: 379755 - DNA, 12 bp, Artificial Sequence
  Oligonucleotide primer for the detection of SNP TSC0063453
ttcaacataaac

SEQ ID NO: 379756 - DNA, 12 bp, Artificial Sequence
  Oligonucleotide primer for the detection of SNP TSC0063454
aataaagtaaat

SEQ ID NO: 379757 - DNA, 12 bp, Artificial Sequence
  Oligonucleotide primer for the detection of SNP TSC0063455
tagtgaatataa

SEQ ID NO: 379758 - DNA, 12 bp, Artificial Sequence
  Oligonucleotide primer for the detection of SNP TSC0004743
gtggttatgaga

SEQ ID NO: 379759 - DNA, 12 bp, Artificial Sequence
  Oligonucleotide primer for the detection of SNP TSC0004743
gcggttatgaga

SEQ ID NO: 379760 - DNA, 12 bp, Artificial Sequence
  Oligonucleotide primer for the detection of SNP TSC0004743
acaactataaaa

SEQ ID NO: 379761 - DNA, 12 bp, Artificial Sequence
  Oligonucleotide primer for the detection of SNP TSC0004743
acgactataaaa

SEQ ID NO: 379762 - DNA, 12 bp, Artificial Sequence
  Oligonucleotide primer for the detection of SNP TSC0004743
aaattgggtgta

SEQ ID NO: 379763 - DNA, 12 bp, Artificial Sequence
  Oligonucleotide primer for the detection of SNP TSC0004809
aaacaaaacgat

SEQ ID NO: 379764 - DNA, 12 bp, Artificial Sequence
  Oligonucleotide primer for the detection of SNP TSC0007113
tatattagttag

SEQ ID NO: 379765 - DNA, 12 bp, Artificial Sequence
  Oligonucleotide primer for the detection of SNP TSC0000849
atacttttaaca

SEQ ID NO: 379766 - DNA, 12 bp, Artificial Sequence
  Oligonucleotide primer for the detection of SNP TSC0000849
gtgaaataatat

SEQ ID NO: 379767 - DNA, 12 bp, Artificial Sequence
  Oligonucleotide primer for the detection of SNP TSC0000139
atatattcaatt

SEQ ID NO: 379768 - DNA, 12 bp, Artificial Sequence
  Oligonucleotide primer for the detection of SNP TSC0000139
atatattcgatt

SEQ ID NO: 379769 - DNA, 12 bp, Artificial Sequence
  Oligonucleotide primer for the detection of SNP TSC0000139
ttagatgagtta

SEQ ID NO: 379770 - DNA, 12 bp, Artificial Sequence
  Oligonucleotide primer for the detection of SNP TSC0063457
attctaaaaatt

SEQ ID NO: 379771 - DNA, 12 bp, Artificial Sequence
  Oligonucleotide primer for the detection of SNP TSC0063457
ttaggattttag

SEQ ID NO: 379772 - DNA, 12 bp, Artificial Sequence
  Oligonucleotide primer for the detection of SNP TSC0063458
ctctaataatcc

SEQ ID NO: 379773 - DNA, 12 bp, Artificial Sequence
  Oligonucleotide primer for the detection of SNP TSC0063458
tagtagatgttg

SEQ ID NO: 379774 - DNA, 12 bp, Artificial Sequence
  Oligonucleotide primer for the detection of SNP TSC0063458
tagtagacgttg

SEQ ID NO: 379775 - DNA, 12 bp, Artificial Sequence
  Oligonucleotide primer for the detection of SNP TSC0063458
tagtagatgtcg

SEQ ID NO: 379776 - DNA, 12 bp, Artificial Sequence
  Oligonucleotide primer for the detection of SNP TSC0063458
tagtagacgtcg

SEQ ID NO: 379777 - DNA, 12 bp, Artificial Sequence
  Oligonucleotide primer for the detection of SNP TSC0063460
ttagtaatttgg

SEQ ID NO: 379778 - DNA, 12 bp, Artificial Sequence
  Oligonucleotide primer for the detection of SNP TSC0063461
accccttatcat

SEQ ID NO: 379779 - DNA, 12 bp, Artificial Sequence
  Oligonucleotide primer for the detection of SNP TSC0063462
tgtaggtttaaa

SEQ ID NO: 379780 - DNA, 12 bp, Artificial Sequence
  Oligonucleotide primer for the detection of SNP TSC0063462
tgtgagttatag

SEQ ID NO: 379781 - DNA, 12 bp, Artificial Sequence
  Oligonucleotide primer for the detection of SNP TSC0063463
ttaatcccaacc
